United States Patent Application Publication US 2026/0021141 A1 - sequence listing, part 5

SEQ ID NO: 122878 - RNA, 22 nt, synthetic construct
  source 1..22: mol_type = other RNA
atgttctaaagttagaagtatc

SEQ ID NO: 122879 - RNA, 22 nt, synthetic construct
  source 1..22: mol_type = other RNA
atgttctcttttcctcgttttc

SEQ ID NO: 122880 - RNA, 22 nt, synthetic construct
  source 1..22: mol_type = other RNA
atgttgacatcttgcataactc

SEQ ID NO: 122881 - RNA, 22 nt, synthetic construct
  source 1..22: mol_type = other RNA
atgttgagtatcttttcatgtt

SEQ ID NO: 122882 - RNA, 22 nt, synthetic construct
  source 1..22: mol_type = other RNA
atgttgagtcttgtttacccag

SEQ ID NO: 122883 - RNA, 22 nt, synthetic construct
  source 1..22: mol_type = other RNA
atgttgatgtaatggatcaagg

SEQ ID NO: 122884 - RNA, 22 nt, synthetic construct
  source 1..22: mol_type = other RNA
atgttgattttgaggcagagag

SEQ ID NO: 122885 - RNA, 22 nt, synthetic construct
  source 1..22: mol_type = other RNA
atgttgcacaaaagtgaaaact

SEQ ID NO: 122886 - RNA, 22 nt, synthetic construct
  source 1..22: mol_type = other RNA
atgttgcagagactggatagca

SEQ ID NO: 122887 - RNA, 22 nt, synthetic construct
  source 1..22: mol_type = other RNA
atgttgccaatatctatcaggg

SEQ ID NO: 122888 - RNA, 22 nt, synthetic construct
  source 1..22: mol_type = other RNA
atgttgcctactagccagtgat

SEQ ID NO: 122889 - RNA, 22 nt, synthetic construct
  source 1..22: mol_type = other RNA
atgttgcggtgagcagagatca

SEQ ID NO: 122890 - RNA, 22 nt, synthetic construct
  source 1..22: mol_type = other RNA
atgttgctttgcgaaatagtag

SEQ ID NO: 122891 - RNA, 22 nt, synthetic construct
  source 1..22: mol_type = other RNA
atgttggatagtttctcaactt

SEQ ID NO: 122892 - RNA, 22 nt, synthetic construct
  source 1..22: mol_type = other RNA
atgttgggccaacttccagcaa

SEQ ID NO: 122893 - RNA, 22 nt, synthetic construct
  source 1..22: mol_type = other RNA
atgttgggtaaaaataatcaac

SEQ ID NO: 122894 - RNA, 22 nt, synthetic construct
  source 1..22: mol_type = other RNA
atgttggtgagaacccagtgtc

SEQ ID NO: 122895 - RNA, 22 nt, synthetic construct
  source 1..22: mol_type = other RNA
atgttggttagtgttgttttta

SEQ ID NO: 122896 - RNA, 22 nt, synthetic construct
  source 1..22: mol_type = other RNA
atgttgtggatgtccttaatgc

SEQ ID NO: 122897 - RNA, 22 nt, synthetic construct
  source 1..22: mol_type = other RNA
atgttgtgtagaaatgtggaga

SEQ ID NO: 122898 - RNA, 22 nt, synthetic construct
  source 1..22: mol_type = other RNA
atgttgtgttttcattcgttca

SEQ ID NO: 122899 - RNA, 22 nt, synthetic construct
  source 1..22: mol_type = other RNA
atgttgttcttttcaaaaacag

SEQ ID NO: 122900 - RNA, 22 nt, synthetic construct
  source 1..22: mol_type = other RNA
atgttgttgaatgtggcagaat

SEQ ID NO: 122901 - RNA, 22 nt, synthetic construct
  source 1..22: mol_type = other RNA
atgtttaactatcctatgtggg

SEQ ID NO: 122902 - RNA, 22 nt, synthetic construct
  source 1..22: mol_type = other RNA
atgtttaattacccaggcatga

SEQ ID NO: 122903 - RNA, 22 nt, synthetic construct
  source 1..22: mol_type = other RNA
atgtttaattcctactttcttc

SEQ ID NO: 122904 - RNA, 22 nt, synthetic construct
  source 1..22: mol_type = other RNA
atgtttagcaagattactggat

SEQ ID NO: 122905 - RNA, 22 nt, synthetic construct
  source 1..22: mol_type = other RNA
atgtttagcggaatgactatag

SEQ ID NO: 122906 - RNA, 22 nt, synthetic construct
  source 1..22: mol_type = other RNA
atgtttagtagaattctccagt

SEQ ID NO: 122907 - RNA, 22 nt, synthetic construct
  source 1..22: mol_type = other RNA
atgtttccataaaaagcgttgg

SEQ ID NO: 122908 - RNA, 22 nt, synthetic construct
  source 1..22: mol_type = other RNA
atgtttctacctttggctactg

SEQ ID NO: 122909 - RNA, 22 nt, synthetic construct
  source 1..22: mol_type = other RNA
atgtttctcattcttctctaat

SEQ ID NO: 122910 - RNA, 22 nt, synthetic construct
  source 1..22: mol_type = other RNA
atgtttctcctgcatggggagt

SEQ ID NO: 122911 - RNA, 22 nt, synthetic construct
  source 1..22: mol_type = other RNA
atgtttgaattttccattcaca

SEQ ID NO: 122912 - RNA, 22 nt, synthetic construct
  source 1..22: mol_type = other RNA
atgtttgattagttgactccta

SEQ ID NO: 122913 - RNA, 22 nt, synthetic construct
  source 1..22: mol_type = other RNA
atgtttgctaataatgatgact

SEQ ID NO: 122914 - RNA, 22 nt, synthetic construct
  source 1..22: mol_type = other RNA
atgtttggctccttaccactat

SEQ ID NO: 122915 - RNA, 22 nt, synthetic construct
  source 1..22: mol_type = other RNA
atgtttggtagatttctgcata

SEQ ID NO: 122916 - RNA, 22 nt, synthetic construct
  source 1..22: mol_type = other RNA
atgtttggtcaattgatctgcc

SEQ ID NO: 122917 - RNA, 22 nt, synthetic construct
  source 1..22: mol_type = other RNA
atgtttgtaacttgttcatgtt

SEQ ID NO: 122918 - RNA, 22 nt, synthetic construct
  source 1..22: mol_type = other RNA
atgtttgtacttctaccttgaa

SEQ ID NO: 122919 - RNA, 22 nt, synthetic construct
  source 1..22: mol_type = other RNA
atgtttgtggttttaacctctt

SEQ ID NO: 122920 - RNA, 22 nt, synthetic construct
  source 1..22: mol_type = other RNA
atgtttgtttaattagccgggt

SEQ ID NO: 122921 - RNA, 22 nt, synthetic construct
  source 1..22: mol_type = other RNA
atgttttaaggcagggcttggt

SEQ ID NO: 122922 - RNA, 22 nt, synthetic construct
  source 1..22: mol_type = other RNA
atgttttacacatgtcagccac

SEQ ID NO: 122923 - RNA, 22 nt, synthetic construct
  source 1..22: mol_type = other RNA
atgttttaggagtcaactaatc

SEQ ID NO: 122924 - RNA, 22 nt, synthetic construct
  source 1..22: mol_type = other RNA
atgttttatttagcccatgtct

SEQ ID NO: 122925 - RNA, 22 nt, synthetic construct
  source 1..22: mol_type = other RNA
atgttttatttcttgacctcag

SEQ ID NO: 122926 - RNA, 22 nt, synthetic construct
  source 1..22: mol_type = other RNA
atgttttcagttgcatgaattt

SEQ ID NO: 122927 - RNA, 22 nt, synthetic construct
  source 1..22: mol_type = other RNA
atgttttccgtgtgacaaaaag

SEQ ID NO: 122928 - RNA, 22 nt, synthetic construct
  source 1..22: mol_type = other RNA
atgttttgaacgaatgaaaaca

SEQ ID NO: 122929 - RNA, 22 nt, synthetic construct
  source 1..22: mol_type = other RNA
atgttttgcagagatgaggtct

SEQ ID NO: 122930 - RNA, 22 nt, synthetic construct
  source 1..22: mol_type = other RNA
atgttttgcttcgaagcttatt

SEQ ID NO: 122931 - RNA, 22 nt, synthetic construct
  source 1..22: mol_type = other RNA
atgtttttagagagatgcctgt

SEQ ID NO: 122932 - RNA, 22 nt, synthetic construct
  source 1..22: mol_type = other RNA
atgtttttccgtctagccactt

SEQ ID NO: 122933 - RNA, 22 nt, synthetic construct
  source 1..22: mol_type = other RNA
attaaaaactgagaccggatga

SEQ ID NO: 122934 - RNA, 22 nt, synthetic construct
  source 1..22: mol_type = other RNA
attaaaacatggatatttggcc

SEQ ID NO: 122935 - RNA, 22 nt, synthetic construct
  source 1..22: mol_type = other RNA
attaaaacccatgatctttgga

SEQ ID NO: 122936 - RNA, 22 nt, synthetic construct
  source 1..22: mol_type = other RNA
attaaaagcacaagcacagagt

SEQ ID NO: 122937 - RNA, 22 nt, synthetic construct
  source 1..22: mol_type = other RNA
attaaaaggtataaaggatgca

SEQ ID NO: 122938 - RNA, 22 nt, synthetic construct
  source 1..22: mol_type = other RNA
attaaaataacacgcagaacca

SEQ ID NO: 122939 - RNA, 22 nt, synthetic construct
  source 1..22: mol_type = other RNA
attaaaatgaacctgctttcta

SEQ ID NO: 122940 - RNA, 22 nt, synthetic construct
  source 1..22: mol_type = other RNA
attaaacaatcttgaaaggggc

SEQ ID NO: 122941 - RNA, 22 nt, synthetic construct
  source 1..22: mol_type = other RNA
attaaacacacccttggtaaac

SEQ ID NO: 122942 - RNA, 22 nt, synthetic construct
  source 1..22: mol_type = other RNA
attaaacctgttacatggttct

SEQ ID NO: 122943 - RNA, 22 nt, synthetic construct
  source 1..22: mol_type = other RNA
attaaactatagacccaaagca

SEQ ID NO: 122944 - RNA, 22 nt, synthetic construct
  source 1..22: mol_type = other RNA
attaaactcattatcccagaca

SEQ ID NO: 122945 - RNA, 22 nt, synthetic construct
  source 1..22: mol_type = other RNA
attaaacttcaaggtaatctag

SEQ ID NO: 122946 - RNA, 22 nt, synthetic construct
  source 1..22: mol_type = other RNA
attaaagacagctactaaacaa

SEQ ID NO: 122947 - RNA, 22 nt, synthetic construct
  source 1..22: mol_type = other RNA
attaaaggatgtcaactgaggc

SEQ ID NO: 122948 - RNA, 22 nt, synthetic construct
  source 1..22: mol_type = other RNA
attaaaggccctgatttaaagt

SEQ ID NO: 122949 - RNA, 22 nt, synthetic construct
  source 1..22: mol_type = other RNA
attaaaggctggaaataatttc

SEQ ID NO: 122950 - RNA, 22 nt, synthetic construct
  source 1..22: mol_type = other RNA
attaaagtagaaggccctatgc

SEQ ID NO: 122951 - RNA, 22 nt, synthetic construct
  source 1..22: mol_type = other RNA
attaaataagggcattttcaag

SEQ ID NO: 122952 - RNA, 22 nt, synthetic construct
  source 1..22: mol_type = other RNA
attaaatacagagcacagactc

SEQ ID NO: 122953 - RNA, 22 nt, synthetic construct
  source 1..22: mol_type = other RNA
attaaataccacctgaaatctg

SEQ ID NO: 122954 - RNA, 22 nt, synthetic construct
  source 1..22: mol_type = other RNA
attaaatcatgatgtttggctc

SEQ ID NO: 122955 - RNA, 22 nt, synthetic construct
  source 1..22: mol_type = other RNA
attaaatgagacacctacaata

SEQ ID NO: 122956 - RNA, 22 nt, synthetic construct
  source 1..22: mol_type = other RNA
attaaattaaaaactgagaccg

SEQ ID NO: 122957 - RNA, 22 nt, synthetic construct
  source 1..22: mol_type = other RNA
attaacactaatccttctcata

SEQ ID NO: 122958 - RNA, 22 nt, synthetic construct
  source 1..22: mol_type = other RNA
attaacagaagggtatatacaa

SEQ ID NO: 122959 - RNA, 22 nt, synthetic construct
  source 1..22: mol_type = other RNA
attaacagctcagaagctatag

SEQ ID NO: 122960 - RNA, 22 nt, synthetic construct
  source 1..22: mol_type = other RNA
attaacataccgacggctcagg

SEQ ID NO: 122961 - RNA, 22 nt, synthetic construct
  source 1..22: mol_type = other RNA
attaaccaagaacaaccttatc

SEQ ID NO: 122962 - RNA, 22 nt, synthetic construct
  source 1..22: mol_type = other RNA
attaaccactgaaacttttctt

SEQ ID NO: 122963 - RNA, 22 nt, synthetic construct
  source 1..22: mol_type = other RNA
attaaccatatggtttacaatg

SEQ ID NO: 122964 - RNA, 22 nt, synthetic construct
  source 1..22: mol_type = other RNA
attaactagaattgactttacc

SEQ ID NO: 122965 - RNA, 22 nt, synthetic construct
  source 1..22: mol_type = other RNA
attaactatggacatgaggaaa

SEQ ID NO: 122966 - RNA, 22 nt, synthetic construct
  source 1..22: mol_type = other RNA
attaactcatttaaacgtcaga

SEQ ID NO: 122967 - RNA, 22 nt, synthetic construct
  source 1..22: mol_type = other RNA
attaactccaggggacatgctc

SEQ ID NO: 122968 - RNA, 22 nt, synthetic construct
  source 1..22: mol_type = other RNA
attaactttaaagctctatggc

SEQ ID NO: 122969 - RNA, 22 nt, synthetic construct
  source 1..22: mol_type = other RNA
attaagaacttcttcaaaagac

SEQ ID NO: 122970 - RNA, 22 nt, synthetic construct
  source 1..22: mol_type = other RNA
attaagacaatgtggagttggt

SEQ ID NO: 122971 - RNA, 22 nt, synthetic construct
  source 1..22: mol_type = other RNA
attaagagaatggaaacttgcc

SEQ ID NO: 122972 - RNA, 22 nt, synthetic construct
  source 1..22: mol_type = other RNA
attaagagtctcatctgtcaaa

SEQ ID NO: 122973 - RNA, 22 nt, synthetic construct
  source 1..22: mol_type = other RNA
attaagagtgtgctgactagta

SEQ ID NO: 122974 - RNA, 22 nt, synthetic construct
  source 1..22: mol_type = other RNA
attaagataatgctgttctctg

SEQ ID NO: 122975 - RNA, 22 nt, synthetic construct
  source 1..22: mol_type = other RNA
attaagcaaaatggaagtgctg

SEQ ID NO: 122976 - RNA, 22 nt, synthetic construct
  source 1..22: mol_type = other RNA
attaagcaaccttttaggtgcc

SEQ ID NO: 122977 - RNA, 22 nt, synthetic construct
  source 1..22: mol_type = other RNA
attaagcacatctgtcttgtgc

SEQ ID NO: 122978 - RNA, 22 nt, synthetic construct
  source 1..22: mol_type = other RNA
attaagcaccactagagtatta

SEQ ID NO: 122979 - RNA, 22 nt, synthetic construct
  source 1..22: mol_type = other RNA
attaagccagtcactaaaaatc

SEQ ID NO: 122980 - RNA, 22 nt, synthetic construct
  source 1..22: mol_type = other RNA
attaagcttcgacagtcccttg

SEQ ID NO: 122981 - RNA, 22 nt, synthetic construct
  source 1..22: mol_type = other RNA
attaaggaatgcctataaaatg

SEQ ID NO: 122982 - RNA, 22 nt, synthetic construct
  source 1..22: mol_type = other RNA
attaaggacatccacaacattg

SEQ ID NO: 122983 - RNA, 22 nt, synthetic construct
  source 1..22: mol_type = other RNA
attaaggagatggcacatacca

SEQ ID NO: 122984 - RNA, 22 nt, synthetic construct
  source 1..22: mol_type = other RNA
attaaggctggaggatggcttg

SEQ ID NO: 122985 - RNA, 22 nt, synthetic construct
  source 1..22: mol_type = other RNA
attaagggaaacagggttacag

SEQ ID NO: 122986 - RNA, 22 nt, synthetic construct
  source 1..22: mol_type = other RNA
attaagtattgcattgaatctg

SEQ ID NO: 122987 - RNA, 22 nt, synthetic construct
  source 1..22: mol_type = other RNA
attaataagatcatacacctgg

SEQ ID NO: 122988 - RNA, 22 nt, synthetic construct
  source 1..22: mol_type = other RNA
attaatcagtctgtaagcacct

SEQ ID NO: 122989 - RNA, 22 nt, synthetic construct
  source 1..22: mol_type = other RNA
attaatccttgtggtcttaaga

SEQ ID NO: 122990 - RNA, 22 nt, synthetic construct
  source 1..22: mol_type = other RNA
attaatctcatccacaatgaga

SEQ ID NO: 122991 - RNA, 22 nt, synthetic construct
  source 1..22: mol_type = other RNA
attaatctcttacacctgttta

SEQ ID NO: 122992 - RNA, 22 nt, synthetic construct
  source 1..22: mol_type = other RNA
attaatcttgcaaaacaatagc

SEQ ID NO: 122993 - RNA, 22 nt, synthetic construct
  source 1..22: mol_type = other RNA
attaatgcaacctgctttcctc

SEQ ID NO: 122994 - RNA, 22 nt, synthetic construct
  source 1..22: mol_type = other RNA
attaatgcccaatcaaatccag

SEQ ID NO: 122995 - RNA, 22 nt, synthetic construct
  source 1..22: mol_type = other RNA
attaatgccccatgtgttggca

SEQ ID NO: 122996 - RNA, 22 nt, synthetic construct
  source 1..22: mol_type = other RNA
attaatgcttcatattttgtgg

SEQ ID NO: 122997 - RNA, 22 nt, synthetic construct
  source 1..22: mol_type = other RNA
attaatgtaggtgtctgatgtg

SEQ ID NO: 122998 - RNA, 22 nt, synthetic construct
  source 1..22: mol_type = other RNA
attaatgtgttgtctgattcag

SEQ ID NO: 122999 - RNA, 22 nt, synthetic construct
  source 1..22: mol_type = other RNA
attaattcagtcaacaccaagc

SEQ ID NO: 123000 - RNA, 22 nt, synthetic construct
  source 1..22: mol_type = other RNA
attaattctgaggcctcctgcc

SEQ ID NO: 123001 - RNA, 22 nt, synthetic construct
  source 1..22: mol_type = other RNA
attaatttgaggtctaggctaa

SEQ ID NO: 123002 - RNA, 22 nt, synthetic construct
  source 1..22: mol_type = other RNA
attaatttggcttggggaacag

SEQ ID NO: 123003 - RNA, 22 nt, synthetic construct
  source 1..22: mol_type = other RNA
attacaaaagaacaggactttt

SEQ ID NO: 123004 - RNA, 22 nt, synthetic construct
  source 1..22: mol_type = other RNA
attacaaaataggcagtcctct

SEQ ID NO: 123005 - RNA, 22 nt, synthetic construct
  source 1..22: mol_type = other RNA
attacaaatgaaagtcagctaa

SEQ ID NO: 123006 - RNA, 22 nt, synthetic construct
  source 1..22: mol_type = other RNA
attacaacagcaaggctcctgc

SEQ ID NO: 123007 - RNA, 22 nt, synthetic construct
  source 1..22: mol_type = other RNA
attacaactggtttctgcatac

SEQ ID NO: 123008 - RNA, 22 nt, synthetic construct
  source 1..22: mol_type = other RNA
attacaagggtgacagagccga

SEQ ID NO: 123009 - RNA, 22 nt, synthetic construct
  source 1..22: mol_type = other RNA
attacaataatgcacatgggca

SEQ ID NO: 123010 - RNA, 22 nt, synthetic construct
  source 1..22: mol_type = other RNA
attacaatgtaaggtgcacgct

SEQ ID NO: 123011 - RNA, 22 nt, synthetic construct
  source 1..22: mol_type = other RNA
attacaattcctttctaggcat

SEQ ID NO: 123012 - RNA, 22 nt, synthetic construct
  source 1..22: mol_type = other RNA
attacacacacctaccaccatg

SEQ ID NO: 123013 - RNA, 22 nt, synthetic construct
  source 1..22: mol_type = other RNA
attacacagaaagcctcttcag

SEQ ID NO: 123014 - RNA, 22 nt, synthetic construct
  source 1..22: mol_type = other RNA
attacacatctcccataccacc

SEQ ID NO: 123015 - RNA, 22 nt, synthetic construct
  source 1..22: mol_type = other RNA
attacaggcatgagccactgcg

SEQ ID NO: 123016 - RNA, 22 nt, synthetic construct
  source 1..22: mol_type = other RNA
attacaggcatgagtcgccata

SEQ ID NO: 123017 - RNA, 22 nt, synthetic construct
  source 1..22: mol_type = other RNA
attacaggcgcacgccatctcg

SEQ ID NO: 123018 - RNA, 22 nt, synthetic construct
  source 1..22: mol_type = other RNA
attacaggcgtgagccacctca

SEQ ID NO: 123019 - RNA, 22 nt, synthetic construct
  source 1..22: mol_type = other RNA
attacaggggactttgatgttt

SEQ ID NO: 123020 - RNA, 22 nt, synthetic construct
  source 1..22: mol_type = other RNA
attacaggtcaaactcacttat

SEQ ID NO: 123021 - RNA, 22 nt, synthetic construct
  source 1..22: mol_type = other RNA
attacagtaaggtttccctggg

SEQ ID NO: 123022 - RNA, 22 nt, synthetic construct
  source 1..22: mol_type = other RNA
attacagtctcgaccccctggg

SEQ ID NO: 123023 - RNA, 22 nt, synthetic construct
  source 1..22: mol_type = other RNA
attacatacttcaaagggtcac

SEQ ID NO: 123024 - RNA, 22 nt, synthetic construct
  source 1..22: mol_type = other RNA
attacatagcaaggaagcagaa

SEQ ID NO: 123025 - RNA, 22 nt, synthetic construct
  source 1..22: mol_type = other RNA
attacatttgcttaggctgtta

SEQ ID NO: 123026 - RNA, 22 nt, synthetic construct
  source 1..22: mol_type = other RNA
attaccaaaacctggtatgagt

SEQ ID NO: 123027 - RNA, 22 nt, synthetic construct
  source 1..22: mol_type = other RNA
attaccaataaaagcctcattt

SEQ ID NO: 123028 - RNA, 22 nt, synthetic construct
  source 1..22: mol_type = other RNA
attaccagcttacagcagatct

SEQ ID NO: 123029 - RNA, 22 nt, synthetic construct
  source 1..22: mol_type = other RNA
attaccaggctggaagaatttt

SEQ ID NO: 123030 - RNA, 22 nt, synthetic construct
  source 1..22: mol_type = other RNA
attaccataaagtcttccattt

SEQ ID NO: 123031 - RNA, 22 nt, synthetic construct
  source 1..22: mol_type = other RNA
attaccatgtttccataaaaag

SEQ ID NO: 123032 - RNA, 22 nt, synthetic construct
  source 1..22: mol_type = other RNA
attacccaaagactttgttttg

SEQ ID NO: 123033 - RNA, 22 nt, synthetic construct
  source 1..22: mol_type = other RNA
attacccaggcatgatggctca

SEQ ID NO: 123034 - RNA, 22 nt, synthetic construct
  source 1..22: mol_type = other RNA
attaccccattcactcagcata

SEQ ID NO: 123035 - RNA, 22 nt, synthetic construct
  source 1..22: mol_type = other RNA
attaccctaataacaaaatagg

SEQ ID NO: 123036 - RNA, 22 nt, synthetic construct
  source 1..22: mol_type = other RNA
attaccggcatccgccaccacg

SEQ ID NO: 123037 - RNA, 22 nt, synthetic construct
  source 1..22: mol_type = other RNA
attacctatgaataggtgtgtg

SEQ ID NO: 123038 - RNA, 22 nt, synthetic construct
  source 1..22: mol_type = other RNA
attacctcccatgcattcgtcc

SEQ ID NO: 123039 - RNA, 22 nt, synthetic construct
  source 1..22: mol_type = other RNA
attaccttatagatgacgaaag

SEQ ID NO: 123040 - RNA, 22 nt, synthetic construct
  source 1..22: mol_type = other RNA
attacgagttatgcaagatgtc

SEQ ID NO: 123041 - RNA, 22 nt, synthetic construct
  source 1..22: mol_type = other RNA
attactatatgatccagcagtt

SEQ ID NO: 123042 - RNA, 22 nt, synthetic construct
  source 1..22: mol_type = other RNA
attactcagtctcgaaaaggaa

SEQ ID NO: 123043 - RNA, 22 nt, synthetic construct
  source 1..22: mol_type = other RNA
attactcggtatgtacccaatg

SEQ ID NO: 123044 - RNA, 22 nt, synthetic construct
  source 1..22: mol_type = other RNA
attactcgtggttatagccata

SEQ ID NO: 123045 - RNA, 22 nt, synthetic construct
  source 1..22: mol_type = other RNA
attactcttctactcactgtac

SEQ ID NO: 123046 - RNA, 22 nt, synthetic construct
  source 1..22: mol_type = other RNA
attactgacaatagccaagaca

SEQ ID NO: 123047 - RNA, 22 nt, synthetic construct
  source 1..22: mol_type = other RNA
attactgactcaatcttcttat

SEQ ID NO: 123048 - RNA, 22 nt, synthetic construct
  source 1..22: mol_type = other RNA
attactggatacaaggtcaatc

SEQ ID NO: 123049 - RNA, 22 nt, synthetic construct
  source 1..22: mol_type = other RNA
attactgtacaaagatttaccc

SEQ ID NO: 123050 - RNA, 22 nt, synthetic construct
  source 1..22: mol_type = other RNA
attacttaggcagttattaaga

SEQ ID NO: 123051 - RNA, 22 nt, synthetic construct
  source 1..22: mol_type = other RNA
attacttcatagatgttatgcc

SEQ ID NO: 123052 - RNA, 22 nt, synthetic construct
  source 1..22: mol_type = other RNA
attacttccagtgttttagggg

SEQ ID NO: 123053 - RNA, 22 nt, synthetic construct
  source 1..22: mol_type = other RNA
attacttctttctctttcagcc

SEQ ID NO: 123054 - RNA, 22 nt, synthetic construct
  source 1..22: mol_type = other RNA
attacttgagagcagagacaca

SEQ ID NO: 123055 - RNA, 22 nt, synthetic construct
  source 1..22: mol_type = other RNA
attactttacagttatgtcagt

SEQ ID NO: 123056 - RNA, 22 nt, synthetic construct
  source 1..22: mol_type = other RNA
attacttttaaagaaaggtctc

SEQ ID NO: 123057 - RNA, 22 nt, synthetic construct
  source 1..22: mol_type = other RNA
attacttttttgtagagacaga

SEQ ID NO: 123058 - RNA, 22 nt, synthetic construct
  source 1..22: mol_type = other RNA
attagaaaattagctgactttc

SEQ ID NO: 123059 - RNA, 22 nt, synthetic construct
  source 1..22: mol_type = other RNA
attagaaactggtgaactgggt

SEQ ID NO: 123060 - RNA, 22 nt, synthetic construct
  source 1..22: mol_type = other RNA
attagaaagctggactcattcc

SEQ ID NO: 123061 - RNA, 22 nt, synthetic construct
  source 1..22: mol_type = other RNA
attagaaatgtggaagcagaac

SEQ ID NO: 123062 - RNA, 22 nt, synthetic construct
  source 1..22: mol_type = other RNA
attagaacatctggcagcaggg

SEQ ID NO: 123063 - RNA, 22 nt, synthetic construct
  source 1..22: mol_type = other RNA
attagaactagaactgtgttac

SEQ ID NO: 123064 - RNA, 22 nt, synthetic construct
  source 1..22: mol_type = other RNA
attagaagaatgattatttgcg

SEQ ID NO: 123065 - RNA, 22 nt, synthetic construct
  source 1..22: mol_type = other RNA
attagaaggattgttcatgtct

SEQ ID NO: 123066 - RNA, 22 nt, synthetic construct
  source 1..22: mol_type = other RNA
attagaatcatccggggagctt

SEQ ID NO: 123067 - RNA, 22 nt, synthetic construct
  source 1..22: mol_type = other RNA
attagaattcaggacagtcatc

SEQ ID NO: 123068 - RNA, 22 nt, synthetic construct
  source 1..22: mol_type = other RNA
attagacactaactttctattc

SEQ ID NO: 123069 - RNA, 22 nt, synthetic construct
  source 1..22: mol_type = other RNA
attagagaagaatgagaaacat

SEQ ID NO: 123070 - RNA, 22 nt, synthetic construct
  source 1..22: mol_type = other RNA
attagagccccaagaaagcagg

SEQ ID NO: 123071 - RNA, 22 nt, synthetic construct
  source 1..22: mol_type = other RNA
attagaggctgcaccctcctcc

SEQ ID NO: 123072 - RNA, 22 nt, synthetic construct
  source 1..22: mol_type = other RNA
attagagtaagcaactgcatct

SEQ ID NO: 123073 - RNA, 22 nt, synthetic construct
  source 1..22: mol_type = other RNA
attagagtgaaaagaaacaagt

SEQ ID NO: 123074 - RNA, 22 nt, synthetic construct
  source 1..22: mol_type = other RNA
attagatagtggtttgaagctt

SEQ ID NO: 123075 - RNA, 22 nt, synthetic construct
  source 1..22: mol_type = other RNA
attagatgatgttttgaacgaa

SEQ ID NO: 123076 - RNA, 22 nt, synthetic construct
  source 1..22: mol_type = other RNA
attagatggcttaggatcacca

SEQ ID NO: 123077 - RNA, 22 nt, synthetic construct
  source 1..22: mol_type = other RNA
attagatttatttttacccgtg

SEQ ID NO: 123078 - RNA, 22 nt, synthetic construct
  source 1..22: mol_type = other RNA
attagcaaagaggcaaaactcc

SEQ ID NO: 123079 - RNA, 22 nt, synthetic construct
  source 1..22: mol_type = other RNA
attagcaatgcgaatcatctag

SEQ ID NO: 123080 - RNA, 22 nt, synthetic construct
  source 1..22: mol_type = other RNA
attagcacctttattaactaga

SEQ ID NO: 123081 - RNA, 22 nt, synthetic construct
  source 1..22: mol_type = other RNA
attagcagttctgtacccttac

SEQ ID NO: 123082 - RNA, 22 nt, synthetic construct
  source 1..22: mol_type = other RNA
attagccaagcatggtggtagg

SEQ ID NO: 123083 - RNA, 22 nt, synthetic construct
  source 1..22: mol_type = other RNA
attagccactctgaattctctg

SEQ ID NO: 123084 - RNA, 22 nt, synthetic construct
  source 1..22: mol_type = other RNA
attagccaggcatgggggcgcg

SEQ ID NO: 123085 - RNA, 22 nt, synthetic construct
  source 1..22: mol_type = other RNA
attagccaggcgtggtggcgga

SEQ ID NO: 123086 - RNA, 22 nt, synthetic construct
  source 1..22: mol_type = other RNA
attagccgggtgtagtggtgtg

SEQ ID NO: 123087 - RNA, 22 nt, synthetic construct
  source 1..22: mol_type = other RNA
attagcctagacctcaaattaa

SEQ ID NO: 123088 - RNA, 22 nt, synthetic construct
  source 1..22: mol_type = other RNA
attagccttttacaccctaggt

SEQ ID NO: 123089 - RNA, 22 nt, synthetic construct
  source 1..22: mol_type = other RNA
attagcgaaagggattctggcc

SEQ ID NO: 123090 - RNA, 22 nt, synthetic construct
  source 1..22: mol_type = other RNA
attagctaagtatgcagaaacc

SEQ ID NO: 123091 - RNA, 22 nt, synthetic construct
  source 1..22: mol_type = other RNA
attagctacaaaagggaaaaca

SEQ ID NO: 123092 - RNA, 22 nt, synthetic construct
  source 1..22: mol_type = other RNA
attagctgactttcatttgtaa

SEQ ID NO: 123093 - RNA, 22 nt, synthetic construct
  source 1..22: mol_type = other RNA
attagctggatgtggtgtggca

SEQ ID NO: 123094 - RNA, 22 nt, synthetic construct
  source 1..22: mol_type = other RNA
attagctgggcgagatggcgtg

SEQ ID NO: 123095 - RNA, 22 nt, synthetic construct
  source 1..22: mol_type = other RNA
attagctgtctggattgattcc

SEQ ID NO: 123096 - RNA, 22 nt, synthetic construct
  source 1..22: mol_type = other RNA
attagcttcctcaggatctaca

SEQ ID NO: 123097 - RNA, 22 nt, synthetic construct
  source 1..22: mol_type = other RNA
attagcttgctagtagcagaat

SEQ ID NO: 123098 - RNA, 22 nt, synthetic construct
  source 1..22: mol_type = other RNA
attagctttctcccagctgtcc

SEQ ID NO: 123099 - RNA, 22 nt, synthetic construct
  source 1..22: mol_type = other RNA
attagcttttacgaggacagac

SEQ ID NO: 123100 - RNA, 22 nt, synthetic construct
  source 1..22: mol_type = other RNA
attaggatgtgtacccgtgtgt

SEQ ID NO: 123101 - RNA, 22 nt, synthetic construct
  source 1..22: mol_type = other RNA
attaggcagaaccacctggggg

SEQ ID NO: 123102 - RNA, 22 nt, synthetic construct
  source 1..22: mol_type = other RNA
attaggctctgggtcagaatcg

SEQ ID NO: 123103 - RNA, 22 nt, synthetic construct
  source 1..22: mol_type = other RNA
attaggctgtttgagatctttc

SEQ ID NO: 123104 - RNA, 22 nt, synthetic construct
  source 1..22: mol_type = other RNA
attagggtaatgctggcttcat

SEQ ID NO: 123105 - RNA, 22 nt, synthetic construct
  source 1..22: mol_type = other RNA
attaggtgcacacaacactcag

SEQ ID NO: 123106 - RNA, 22 nt, synthetic construct
  source 1..22: mol_type = other RNA
attaggttgatggctgtactaa

SEQ ID NO: 123107 - RNA, 22 nt, synthetic construct
  source 1..22: mol_type = other RNA
attagtagttaggtggtttgaa

SEQ ID NO: 123108 - RNA, 22 nt, synthetic construct
  source 1..22: mol_type = other RNA
attagtatacatgtttagcaag

SEQ ID NO: 123109 - RNA, 22 nt, synthetic construct
  source 1..22: mol_type = other RNA
attagtcatagcagtgggaagt

SEQ ID NO: 123110 - RNA, 22 nt, synthetic construct
  source 1..22: mol_type = other RNA
attagtctgtagcttcacgtgc

SEQ ID NO: 123111 - RNA, 22 nt, synthetic construct
  source 1..22: mol_type = other RNA
attagtgaattcacagtagaag

SEQ ID NO: 123112 - RNA, 22 nt, synthetic construct
  source 1..22: mol_type = other RNA
attagtgattttaccaaggcta

SEQ ID NO: 123113 - RNA, 22 nt, synthetic construct
  source 1..22: mol_type = other RNA
attagtggaaaaactgcagcaa

SEQ ID NO: 123114 - RNA, 22 nt, synthetic construct
  source 1..22: mol_type = other RNA
attagtggtggtagtaaggatc

SEQ ID NO: 123115 - RNA, 22 nt, synthetic construct
  source 1..22: mol_type = other RNA
attagttaaccttctggggttc

SEQ ID NO: 123116 - RNA, 22 nt, synthetic construct
  source 1..22: mol_type = other RNA
attagttacatgaggtcaccca

SEQ ID NO: 123117 - RNA, 22 nt, synthetic construct
  source 1..22: mol_type = other RNA
attagttatctcttagacctcc

SEQ ID NO: 123118 - RNA, 22 nt, synthetic construct
  source 1..22: mol_type = other RNA
attagttcctccttttgtagag

SEQ ID NO: 123119 - RNA, 22 nt, synthetic construct
  source 1..22: mol_type = other RNA
attagttccttttaagggaaac

SEQ ID NO: 123120 - RNA, 22 nt, synthetic construct
  source 1..22: mol_type = other RNA
attagttgactcctaaaacatg

SEQ ID NO: 123121 - RNA, 22 nt, synthetic construct
  source 1..22: mol_type = other RNA
attagttgtacttgacacaaag

SEQ ID NO: 123122 - RNA, 22 nt, synthetic construct
  source 1..22: mol_type = other RNA
attataaaataggaagtccatg

SEQ ID NO: 123123 - RNA, 22 nt, synthetic construct
  source 1..22: mol_type = other RNA
attataacataaaagcgtactg

SEQ ID NO: 123124 - RNA, 22 nt, synthetic construct
  source 1..22: mol_type = other RNA
attataaccttgaacttccagg

SEQ ID NO: 123125 - RNA, 22 nt, synthetic construct
  source 1..22: mol_type = other RNA
attataagcttcctctggctga

SEQ ID NO: 123126 - RNA, 22 nt, synthetic construct
  source 1..22: mol_type = other RNA
attataagttgggagtctattt

SEQ ID NO: 123127 - RNA, 22 nt, synthetic construct
  source 1..22: mol_type = other RNA
attatagagggcctaaataaaa

SEQ ID NO: 123128 - RNA, 22 nt, synthetic construct
  source 1..22: mol_type = other RNA
attatagctccaaaagcgaaag

SEQ ID NO: 123129 - RNA, 22 nt, synthetic construct
  source 1..22: mol_type = other RNA
attatagtggtaaggagccaaa

SEQ ID NO: 123130 - RNA, 22 nt, synthetic construct
  source 1..22: mol_type = other RNA
attatatgaataaaccacgcag

SEQ ID NO: 123131 - RNA, 22 nt, synthetic construct
  source 1..22: mol_type = other RNA
attatatgcctagatttcaatc

SEQ ID NO: 123132 - RNA, 22 nt, synthetic construct
  source 1..22: mol_type = other RNA
attatatggtctaccatgttgt

SEQ ID NO: 123133 - RNA, 22 nt, synthetic construct
  source 1..22: mol_type = other RNA
attatcagggatattggcttat

SEQ ID NO: 123134 - RNA, 22 nt, synthetic construct
  source 1..22: mol_type = other RNA
attatcccagacagatatatgc

SEQ ID NO: 123135 - RNA, 22 nt, synthetic construct
  source 1..22: mol_type = other RNA
attatcccagatctaacaaacg

SEQ ID NO: 123136 - RNA, 22 nt, synthetic construct
  source 1..22: mol_type = other RNA
attatccctttaaaatgatagc

SEQ ID NO: 123137 - RNA, 22 nt, synthetic construct
  source 1..22: mol_type = other RNA
attatcctatcagagcatgtcc

SEQ ID NO: 123138 - RNA, 22 nt, synthetic construct
  source 1..22: mol_type = other RNA
attatctgtgggttaaaagtta

SEQ ID NO: 123139 - RNA, 22 nt, synthetic construct
  source 1..22: mol_type = other RNA
attatgaaccattgtaaaccat

SEQ ID NO: 123140 - RNA, 22 nt, synthetic construct
  source 1..22: mol_type = other RNA
attatgactgagatacttaagt

SEQ ID NO: 123141 - RNA, 22 nt, synthetic construct
  source 1..22: mol_type = other RNA
attatgagcagttgtatgccaa

SEQ ID NO: 123142 - RNA, 22 nt, synthetic construct
  source 1..22: mol_type = other RNA
attatgagcattccccacatag

SEQ ID NO: 123143 - RNA, 22 nt, synthetic construct
  source 1..22: mol_type = other RNA
attatgctaacatgaactactc

SEQ ID NO: 123144 - RNA, 22 nt, synthetic construct
  source 1..22: mol_type = other RNA
attatgctgagtgaatggggta

SEQ ID NO: 123145 - RNA, 22 nt, synthetic construct
  source 1..22: mol_type = other RNA
attatggctagaaacttggatt

SEQ ID NO: 123146 - RNA, 22 nt, synthetic construct
  source 1..22: mol_type = other RNA
attatggtctttttccaggacc

SEQ ID NO: 123147 - RNA, 22 nt, synthetic construct
  source 1..22: mol_type = other RNA
attatggttgttggctaaaaga

SEQ ID NO: 123148 - RNA, 22 nt, synthetic construct
  source 1..22: mol_type = other RNA
attatgtgcaagttctcttttt

SEQ ID NO: 123149 - RNA, 22 nt, synthetic construct
  source 1..22: mol_type = other RNA
attatgttccacatgttactca

SEQ ID NO: 123150 - RNA, 22 nt, synthetic construct
  source 1..22: mol_type = other RNA
attattaagcaaaatggaagtg

SEQ ID NO: 123151 - RNA, 22 nt, synthetic construct
  source 1..22: mol_type = other RNA
attattagcttgctagtagcag

SEQ ID NO: 123152 - RNA, 22 nt, synthetic construct
  source 1..22: mol_type = other RNA
attattagttgtacttgacaca

SEQ ID NO: 123153 - RNA, 22 nt, synthetic construct
  source 1..22: mol_type = other RNA
attattctaaacacacgggctg

SEQ ID NO: 123154 - RNA, 22 nt, synthetic construct
  source 1..22: mol_type = other RNA
attattcttacagtgacatatg

SEQ ID NO: 123155 - RNA, 22 nt, synthetic construct
  source 1..22: mol_type = other RNA
attattgacaagacgtgtacat

SEQ ID NO: 123156 - RNA, 22 nt, synthetic construct
  source 1..22: mol_type = other RNA
attattgtctgcaagcagatct

SEQ ID NO: 123157 - RNA, 22 nt, synthetic construct
  source 1..22: mol_type = other RNA
attatttctgtcatctgaatca

SEQ ID NO: 123158 - RNA, 22 nt, synthetic construct
  source 1..22: mol_type = other RNA
attatttgagagtaagttgcat

SEQ ID NO: 123159 - RNA, 22 nt, synthetic construct
  source 1..22: mol_type = other RNA
attatttgcggcttgattagct

SEQ ID NO: 123160 - RNA, 22 nt, synthetic construct
  source 1..22: mol_type = other RNA
attatttggaagagagaaggct

SEQ ID NO: 123161 - RNA, 22 nt, synthetic construct
  source 1..22: mol_type = other RNA
attatttgtgcatactgtgatg

SEQ ID NO: 123162 - RNA, 22 nt, synthetic construct
  source 1..22: mol_type = other RNA
attattttcctccttctgctca

SEQ ID NO: 123163 - RNA, 22 nt, synthetic construct
  source 1..22: mol_type = other RNA
attatttttacccaacatgaga

SEQ ID NO: 123164 - RNA, 22 nt, synthetic construct
  source 1..22: mol_type = other RNA
attattttttcccgctacacaa

SEQ ID NO: 123165 - RNA, 22 nt, synthetic construct
  source 1..22: mol_type = other RNA
attcaaaacaaaacacatggca

SEQ ID NO: 123166 - RNA, 22 nt, synthetic construct
  source 1..22: mol_type = other RNA
attcaaaatgtgatggcatcat

SEQ ID NO: 123167 - RNA, 22 nt, synthetic construct
  source 1..22: mol_type = other RNA
attcaaacatgacagatcccaa

SEQ ID NO: 123168 - RNA, 22 nt, synthetic construct
  source 1..22: mol_type = other RNA
attcaaagatcatttcacttga

SEQ ID NO: 123169 - RNA, 22 nt, synthetic construct
  source 1..22: mol_type = other RNA
attcaaagcaagttaaaagaca

SEQ ID NO: 123170 - RNA, 22 nt, synthetic construct
  source 1..22: mol_type = other RNA
attcaaataattgctgcagttt

SEQ ID NO: 123171 - RNA, 22 nt, synthetic construct
  source 1..22: mol_type = other RNA
attcaacaaaactgggggctgg

SEQ ID NO: 123172 - RNA, 22 nt, synthetic construct
  source 1..22: mol_type = other RNA
attcaacaacatggatgaacct

SEQ ID NO: 123173 - RNA, 22 nt, synthetic construct
  source 1..22: mol_type = other RNA
attcaacaatagcaacaaaaca

SEQ ID NO: 123174 - RNA, 22 nt, synthetic construct
  source 1..22: mol_type = other RNA
attcaacagctactatgaatat

SEQ ID NO: 123175 - RNA, 22 nt, synthetic construct
  source 1..22: mol_type = other RNA
attcaacaggtataaagtttcc

SEQ ID NO: 123176 - RNA, 22 nt, synthetic construct
  source 1..22: mol_type = other RNA
attcaacctataagacccagtg

SEQ ID NO: 123177 - RNA, 22 nt, synthetic construct
  source 1..22: mol_type = other RNA
attcaacttggtaaaaagtgct

SEQ ID NO: 123178 - RNA, 22 nt, synthetic construct
  source 1..22: mol_type = other RNA
attcaagaaaccacagagccta

SEQ ID NO: 123179 - RNA, 22 nt, synthetic construct
  source 1..22: mol_type = other RNA
attcaagacaagcaaggaaggg

SEQ ID NO: 123180 - RNA, 22 nt, synthetic construct
  source 1..22: mol_type = other RNA
attcaagaccagcctggccaac

SEQ ID NO: 123181 - RNA, 22 nt, synthetic construct
  source 1..22: mol_type = other RNA
attcaagcagaaatgagttcca

SEQ ID NO: 123182 - RNA, 22 nt, synthetic construct
  source 1..22: mol_type = other RNA
attcaagttacaataatatgcc

SEQ ID NO: 123183 - RNA, 22 nt, synthetic construct
  source 1..22: mol_type = other RNA
attcaagtttcaccctgcgaag

SEQ ID NO: 123184 - RNA, 22 nt, synthetic construct
  source 1..22: mol_type = other RNA
attcaatgcaatacttaatagc

SEQ ID NO: 123185 - RNA, 22 nt, synthetic construct
  source 1..22: mol_type = other RNA
attcaattgtcctggcagatca

SEQ ID NO: 123186 - RNA, 22 nt, synthetic construct
  source 1..22: mol_type = other RNA
attcaattttcatgggttgatt

SEQ ID NO: 123187 - RNA, 22 nt, synthetic construct
  source 1..22: mol_type = other RNA
attcacaagattaatcttgcaa

SEQ ID NO: 123188 - RNA, 22 nt, synthetic construct
  source 1..22: mol_type = other RNA
attcacacaccctttcttagga

SEQ ID NO: 123189 - RNA, 22 nt, synthetic construct
  source 1..22: mol_type = other RNA
attcacactagtcaccctacag

SEQ ID NO: 123190 - RNA, 22 nt, synthetic construct
  source 1..22: mol_type = other RNA
attcacactgctcctgcctttg

SEQ ID NO: 123191 - RNA, 22 nt, synthetic construct
  source 1..22: mol_type = other RNA
attcacagaactgtcactgaca

SEQ ID NO: 123192 - RNA, 22 nt, synthetic construct
  source 1..22: mol_type = other RNA
attcacagaatatactcagaaa

SEQ ID NO: 123193 - RNA, 22 nt, synthetic construct
  source 1..22: mol_type = other RNA
attcacagcatgaatacctatt

SEQ ID NO: 123194 - RNA, 22 nt, synthetic construct
  source 1..22: mol_type = other RNA
attcacagcgtgcaccttacat

SEQ ID NO: 123195 - RNA, 22 nt, synthetic construct
  source 1..22: mol_type = other RNA
attcacagtagaagactcagca

SEQ ID NO: 123196 - RNA, 22 nt, synthetic construct
  source 1..22: mol_type = other RNA
attcacatttaagaagggaaca

SEQ ID NO: 123197 - RNA, 22 nt, synthetic construct
  source 1..22: mol_type = other RNA
attcaccaaacaccttacactc

SEQ ID NO: 123198 - RNA, 22 nt, synthetic construct
  source 1..22: mol_type = other RNA
attcaccaattgttaacatttc

SEQ ID NO: 123199 - RNA, 22 nt, synthetic construct
  source 1..22: mol_type = other RNA
attcacccaagaatttcatgcc

SEQ ID NO: 123200 - RNA, 22 nt, synthetic construct
  source 1..22: mol_type = other RNA
attcacgagactgttagggact

SEQ ID NO: 123201 - RNA, 22 nt, synthetic construct
  source 1..22: mol_type = other RNA
attcacgcacagggagatactt

SEQ ID NO: 123202 - RNA, 22 nt, synthetic construct
  source 1..22: mol_type = other RNA
attcactaatgcctcaaattag

SEQ ID NO: 123203 - RNA, 22 nt, synthetic construct
  source 1..22: mol_type = other RNA
attcactagacacatttttgac

SEQ ID NO: 123204 - RNA, 22 nt, synthetic construct
  source 1..22: mol_type = other RNA
attcactcagcataattggtta

SEQ ID NO: 123205 - RNA, 22 nt, synthetic construct
  source 1..22: mol_type = other RNA
attcactcctcattcacactag

SEQ ID NO: 123206 - RNA, 22 nt, synthetic construct
  source 1..22: mol_type = other RNA
attcactgtgactccaaagcaa

SEQ ID NO: 123207 - RNA, 22 nt, synthetic construct
  source 1..22: mol_type = other RNA
attcacttttgagttcagaaag

SEQ ID NO: 123208 - RNA, 22 nt, synthetic construct
  source 1..22: mol_type = other RNA
attcacttttggaatttaaggg

SEQ ID NO: 123209 - RNA, 22 nt, synthetic construct
  source 1..22: mol_type = other RNA
attcagaggtatttggggctag

SEQ ID NO: 123210 - RNA, 22 nt, synthetic construct
  source 1..22: mol_type = other RNA
attcagagtgctgggtagagac

SEQ ID NO: 123211 - RNA, 22 nt, synthetic construct
  source 1..22: mol_type = other RNA
attcagagtggctaatgtggct

SEQ ID NO: 123212 - RNA, 22 nt, synthetic construct
  source 1..22: mol_type = other RNA
attcagatgacagaaataatac

SEQ ID NO: 123213 - RNA, 22 nt, synthetic construct
  source 1..22: mol_type = other RNA
attcagatggccccaaaattac

SEQ ID NO: 123214 - RNA, 22 nt, synthetic construct
  source 1..22: mol_type = other RNA
attcaggacactggaggtgcac

SEQ ID NO: 123215 - RNA, 22 nt, synthetic construct
  source 1..22: mol_type = other RNA
attcaggacagattaaaatcag

SEQ ID NO: 123216 - RNA, 22 nt, synthetic construct
  source 1..22: mol_type = other RNA
attcaggacagtcatcctcaac

SEQ ID NO: 123217 - RNA, 22 nt, synthetic construct
  source 1..22: mol_type = other RNA
attcaggacagttattcttcag

SEQ ID NO: 123218 - RNA, 22 nt, synthetic construct
  source 1..22: mol_type = other RNA
attcagggggctaaatgctcac

SEQ ID NO: 123219 - RNA, 22 nt, synthetic construct
  source 1..22: mol_type = other RNA
attcaggtctatgtgacagaat

SEQ ID NO: 123220 - RNA, 22 nt, synthetic construct
  source 1..22: mol_type = other RNA
attcagtcaacaccaagcaaca

SEQ ID NO: 123221 - RNA, 22 nt, synthetic construct
  source 1..22: mol_type = other RNA
attcagtcaccaaacgtttaga

SEQ ID NO: 123222 - RNA, 22 nt, synthetic construct
  source 1..22: mol_type = other RNA
attcagtcttggtagtttgcac

SEQ ID NO: 123223 - RNA, 22 nt, synthetic construct
  source 1..22: mol_type = other RNA
attcagtggttggaaaactttt

SEQ ID NO: 123224 - RNA, 22 nt, synthetic construct
  source 1..22: mol_type = other RNA
attcagtttgctagtattttgt

SEQ ID NO: 123225 - RNA, 22 nt, synthetic construct
  source 1..22: mol_type = other RNA
attcataaacacagaacactaa

SEQ ID NO: 123226 - RNA, 22 nt, synthetic construct
  source 1..22: mol_type = other RNA
attcatacgttaactgtattgc

SEQ ID NO: 123227 - RNA, 22 nt, synthetic construct
  source 1..22: mol_type = other RNA
attcatactgaaggcatagggc

SEQ ID NO: 123228 - RNA, 22 nt, synthetic construct
  source 1..22: mol_type = other RNA
attcatagatcaccaggggctg

SEQ ID NO: 123229 - RNA, 22 nt, synthetic construct
  source 1..22: mol_type = other RNA
attcataggtaatactctagtg

SEQ ID NO: 123230 - RNA, 22 nt, synthetic construct
  source 1..22: mol_type = other RNA
attcatagtagctgttgaattg

SEQ ID NO: 123231 - RNA, 22 nt, synthetic construct
  source 1..22: mol_type = other RNA
attcatataatggagtactatg

SEQ ID NO: 123232 - RNA, 22 nt, synthetic construct
  source 1..22: mol_type = other RNA
attcatatgaaatcacacaatc

SEQ ID NO: 123233 - RNA, 22 nt, synthetic construct
  source 1..22: mol_type = other RNA
attcatatgctttgagctacaa

SEQ ID NO: 123234 - RNA, 22 nt, synthetic construct
  source 1..22: mol_type = other RNA
attcatatttgttcaagcgctg

SEQ ID NO: 123235 - RNA, 22 nt, synthetic construct
  source 1..22: mol_type = other RNA
attcatccaggcaaaagatgat

SEQ ID NO: 123236 - RNA, 22 nt, synthetic construct
  source 1..22: mol_type = other RNA
attcatccagtttaaagctttg

SEQ ID NO: 123237 - RNA, 22 nt, synthetic construct
  source 1..22: mol_type = other RNA
attcatccctctaaataggtat

SEQ ID NO: 123238 - RNA, 22 nt, synthetic construct
  source 1..22: mol_type = other RNA
attcatctaaacgtttggtgac

SEQ ID NO: 123239 - RNA, 22 nt, synthetic construct
  source 1..22: mol_type = other RNA
attcatctctcgatggacattt

SEQ ID NO: 123240 - RNA, 22 nt, synthetic construct
  source 1..22: mol_type = other RNA
attcatctgcagtgtccatctc

SEQ ID NO: 123241 - RNA, 22 nt, synthetic construct
  source 1..22: mol_type = other RNA
attcatctgttaatgggcactt

SEQ ID NO: 123242 - RNA, 22 nt, synthetic construct
  source 1..22: mol_type = other RNA
attcatcttgacttcacttcca

SEQ ID NO: 123243 - RNA, 22 nt, synthetic construct
  source 1..22: mol_type = other RNA
attcatgacaagaatctttggc

SEQ ID NO: 123244 - RNA, 22 nt, synthetic construct
  source 1..22: mol_type = other RNA
attcatgcaactgaaaacatct

SEQ ID NO: 123245 - RNA, 22 nt, synthetic construct
  source 1..22: mol_type = other RNA
attcatgctgtgaatttggatt

SEQ ID NO: 123246 - RNA, 22 nt, synthetic construct
  source 1..22: mol_type = other RNA
attcatgtaatgcaaactctaa

SEQ ID NO: 123247 - RNA, 22 nt, synthetic construct
  source 1..22: mol_type = other RNA
attcatgtttgtggttttaacc

SEQ ID NO: 123248 - RNA, 22 nt, synthetic construct
  source 1..22: mol_type = other RNA
attcattaccaggctggaagaa

SEQ ID NO: 123249 - RNA, 22 nt, synthetic construct
  source 1..22: mol_type = other RNA
attcattcatgacaagaatctt

SEQ ID NO: 123250 - RNA, 22 nt, synthetic construct
  source 1..22: mol_type = other RNA
attcattctttttactcgaggg

SEQ ID NO: 123251 - RNA, 22 nt, synthetic construct
  source 1..22: mol_type = other RNA
attcattgtacatgaagtcctc

SEQ ID NO: 123252 - RNA, 22 nt, synthetic construct
  source 1..22: mol_type = other RNA
attcatttccaaagatcatggg

SEQ ID NO: 123253 - RNA, 22 nt, synthetic construct
  source 1..22: mol_type = other RNA
attccaaaagtgaatatagcta

SEQ ID NO: 123254 - RNA, 22 nt, synthetic construct
  source 1..22: mol_type = other RNA
attccaaatgtctgtctttatg

SEQ ID NO: 123255 - RNA, 22 nt, synthetic construct
  source 1..22: mol_type = other RNA
attccaaattagctttctccca

SEQ ID NO: 123256 - RNA, 22 nt, synthetic construct
  source 1..22: mol_type = other RNA
attccaagagaggaataaatgg

SEQ ID NO: 123257 - RNA, 22 nt, synthetic construct
  source 1..22: mol_type = other RNA
attccaatccttccttcatgtc

SEQ ID NO: 123258 - RNA, 22 nt, synthetic construct
  source 1..22: mol_type = other RNA
attccacaaccactggggagtg

SEQ ID NO: 123259 - RNA, 22 nt, synthetic construct
  source 1..22: mol_type = other RNA
attccacgctgtggcttgggtg

SEQ ID NO: 123260 - RNA, 22 nt, synthetic construct
  source 1..22: mol_type = other RNA
attccacttatatgaagctaaa

SEQ ID NO: 123261 - RNA, 22 nt, synthetic construct
  source 1..22: mol_type = other RNA
attccagaccagcagttcaagc

SEQ ID NO: 123262 - RNA, 22 nt, synthetic construct
  source 1..22: mol_type = other RNA
attccagagaattcagagtggc

SEQ ID NO: 123263 - RNA, 22 nt, synthetic construct
  source 1..22: mol_type = other RNA
attccagagggtaacgtgagct

SEQ ID NO: 123264 - RNA, 22 nt, synthetic construct
  source 1..22: mol_type = other RNA
attccagattgaaatctaggca

SEQ ID NO: 123265 - RNA, 22 nt, synthetic construct
  source 1..22: mol_type = other RNA
attccagccattctcttctgga

SEQ ID NO: 123266 - RNA, 22 nt, synthetic construct
  source 1..22: mol_type = other RNA
attccaggatcaaatctggctg

SEQ ID NO: 123267 - RNA, 22 nt, synthetic construct
  source 1..22: mol_type = other RNA
attccaggtttacaggatatca

SEQ ID NO: 123268 - RNA, 22 nt, synthetic construct
  source 1..22: mol_type = other RNA
attccaggttttatctctctca

SEQ ID NO: 123269 - RNA, 22 nt, synthetic construct
  source 1..22: mol_type = other RNA
attccagtttctctgctttttc

SEQ ID NO: 123270 - RNA, 22 nt, synthetic construct
  source 1..22: mol_type = other RNA
attccataaaaaccaaacactg

SEQ ID NO: 123271 - RNA, 22 nt, synthetic construct
  source 1..22: mol_type = other RNA
attccataagatctgtctttgg

SEQ ID NO: 123272 - RNA, 22 nt, synthetic construct
  source 1..22: mol_type = other RNA
attccatcagtggttgtgcttc

SEQ ID NO: 123273 - RNA, 22 nt, synthetic construct
  source 1..22: mol_type = other RNA
attccatggtatgtgccatctc

SEQ ID NO: 123274 - RNA, 22 nt, synthetic construct
  source 1..22: mol_type = other RNA
attccattccttttcgagactg

SEQ ID NO: 123275 - RNA, 22 nt, synthetic construct
  source 1..22: mol_type = other RNA
attccattgttctctttgttta

SEQ ID NO: 123276 - RNA, 22 nt, synthetic construct
  source 1..22: mol_type = other RNA
attccatttttctgaccaacta

SEQ ID NO: 123277 - RNA, 22 nt, synthetic construct
  source 1..22: mol_type = other RNA
attcccaaatgtcttaagaagg

SEQ ID NO: 123278 - RNA, 22 nt, synthetic construct
  source 1..22: mol_type = other RNA
attcccaagatcataagctttt

SEQ ID NO: 123279 - RNA, 22 nt, synthetic construct
  source 1..22: mol_type = other RNA
attcccacaaaatatgaagcat

SEQ ID NO: 123280 - RNA, 22 nt, synthetic construct
  source 1..22: mol_type = other RNA
attcccaggtattttgttctct

SEQ ID NO: 123281 - RNA, 22 nt, synthetic construct
  source 1..22: mol_type = other RNA
attcccatgttcactgcagaat

SEQ ID NO: 123282 - RNA, 22 nt, synthetic construct
  source 1..22: mol_type = other RNA
attccccacataggatagttaa

SEQ ID NO: 123283 - RNA, 22 nt, synthetic construct
  source 1..22: mol_type = other RNA
attccccagcctcagcctccca

SEQ ID NO: 123284 - RNA, 22 nt, synthetic construct
  source 1..22: mol_type = other RNA
attccccagggaaaccttactg

SEQ ID NO: 123285 - RNA, 22 nt, synthetic construct
  source 1..22: mol_type = other RNA
attcccccttatgtgtgtataa

SEQ ID NO: 123286 - RNA, 22 nt, synthetic construct
  source 1..22: mol_type = other RNA
attcccctggatcccccagccc

SEQ ID NO: 123287 - RNA, 22 nt, synthetic construct
  source 1..22: mol_type = other RNA
attccccttatatgggatatct

SEQ ID NO: 123288 - RNA, 22 nt, synthetic construct
  source 1..22: mol_type = other RNA
attccccttgccaaggcttgct

SEQ ID NO: 123289 - RNA, 22 nt, synthetic construct
  source 1..22: mol_type = other RNA
attccctacattgccttcaagt

SEQ ID NO: 123290 - RNA, 22 nt, synthetic construct
  source 1..22: mol_type = other RNA
attccctcagcaaaagcaatta

SEQ ID NO: 123291 - RNA, 22 nt, synthetic construct
  source 1..22: mol_type = other RNA
attccctctacaaaaggaggaa

SEQ ID NO: 123292 - RNA, 22 nt, synthetic construct
  source 1..22: mol_type = other RNA
attccctctggccttctatatt

SEQ ID NO: 123293 - RNA, 22 nt, synthetic construct
  source 1..22: mol_type = other RNA
attccctgtctgggaagttatg

SEQ ID NO: 123294 - RNA, 22 nt, synthetic construct
  source 1..22: mol_type = other RNA
attccctgtctgtgatgtagag

SEQ ID NO: 123295 - RNA, 22 nt, synthetic construct
  source 1..22: mol_type = other RNA
attcccttcagtgtagtcagac

SEQ ID NO: 123296 - RNA, 22 nt, synthetic construct
  source 1..22: mol_type = other RNA
attccgcctgggcgacagagcg

SEQ ID NO: 123297 - RNA, 22 nt, synthetic construct
  source 1..22: mol_type = other RNA
attccgcgtttattagaactag

SEQ ID NO: 123298 - RNA, 22 nt, synthetic construct
  source 1..22: mol_type = other RNA
attccgctaaacattttattag

SEQ ID NO: 123299 - RNA, 22 nt, synthetic construct
  source 1..22: mol_type = other RNA
attccgctctggttttaaagaa

SEQ ID NO: 123300 - RNA, 22 nt, synthetic construct
  source 1..22: mol_type = other RNA
attccgtggaaggccttctcct

SEQ ID NO: 123301 - RNA, 22 nt, synthetic construct
  source 1..22: mol_type = other RNA
attcctaactcaagagttactt

SEQ ID NO: 123302 - RNA, 22 nt, synthetic construct
  source 1..22: mol_type = other RNA
attcctactttcttcaaccata

SEQ ID NO: 123303 - RNA, 22 nt, synthetic construct
  source 1..22: mol_type = other RNA
attcctatcagaagcacaccaa

SEQ ID NO: 123304 - RNA, 22 nt, synthetic construct
  source 1..22: mol_type = other RNA
attcctccctggagaggcaaag

SEQ ID NO: 123305 - RNA, 22 nt, synthetic construct
  source 1..22: mol_type = other RNA
attcctctcttggaatgtgcac

SEQ ID NO: 123306 - RNA, 22 nt, synthetic construct
  source 1..22: mol_type = other RNA
attcctgaaatgaaccaaactt

SEQ ID NO: 123307 - RNA, 22 nt, synthetic construct
  source 1..22: mol_type = other RNA
attccttcccctttctttggtt

SEQ ID NO: 123308 - RNA, 22 nt, synthetic construct
  source 1..22: mol_type = other RNA
attccttccgacctgtagattg

SEQ ID NO: 123309 - RNA, 22 nt, synthetic construct
  source 1..22: mol_type = other RNA
attccttcctttgatgacttac

SEQ ID NO: 123310 - RNA, 22 nt, synthetic construct
  source 1..22: mol_type = other RNA
attccttcttcacacattaact

SEQ ID NO: 123311 - RNA, 22 nt, synthetic construct
  source 1..22: mol_type = other RNA
attcctttcaaagagacctgat

SEQ ID NO: 123312 - RNA, 22 nt, synthetic construct
  source 1..22: mol_type = other RNA
attcctttctaggcatctattt

SEQ ID NO: 123313 - RNA, 22 nt, synthetic construct
  source 1..22: mol_type = other RNA
attccttttcgagactgagtaa

SEQ ID NO: 123314 - RNA, 22 nt, synthetic construct
  source 1..22: mol_type = other RNA
attccttttttatgtgctttct

SEQ ID NO: 123315 - RNA, 22 nt, synthetic construct
  source 1..22: mol_type = other RNA
attcgaaaatgggccaaagact

SEQ ID NO: 123316 - RNA, 22 nt, synthetic construct
  source 1..22: mol_type = other RNA
attcgaaataatcattgttagg

SEQ ID NO: 123317 - RNA, 22 nt, synthetic construct
  source 1..22: mol_type = other RNA
attcgattaaaataacacgcag

SEQ ID NO: 123318 - RNA, 22 nt, synthetic construct
  source 1..22: mol_type = other RNA
attcgcataaccaaattatttc

SEQ ID NO: 123319 - RNA, 22 nt, synthetic construct
  source 1..22: mol_type = other RNA
attcgcattgctaattcattgt

SEQ ID NO: 123320 - RNA, 22 nt, synthetic construct
  source 1..22: mol_type = other RNA
attcggccaagatctgtttttc

SEQ ID NO: 123321 - RNA, 22 nt, synthetic construct
  source 1..22: mol_type = other RNA
attcgggggagagcactggttt

SEQ ID NO: 123322 - RNA, 22 nt, synthetic construct
  source 1..22: mol_type = other RNA
attcggtggcattaaggacatc

SEQ ID NO: 123323 - RNA, 22 nt, synthetic construct
  source 1..22: mol_type = other RNA
attcgtagcaggtttaggaagc

SEQ ID NO: 123324 - RNA, 22 nt, synthetic construct
  source 1..22: mol_type = other RNA
attcgtccctaaacactgtagt

SEQ ID NO: 123325 - RNA, 22 nt, synthetic construct
  source 1..22: mol_type = other RNA
attcgttaatacttgtgtagcg

SEQ ID NO: 123326 - RNA, 22 nt, synthetic construct
  source 1..22: mol_type = other RNA
attcgttcaaaacatcatctaa

SEQ ID NO: 123327 - RNA, 22 nt, synthetic construct
  source 1..22: mol_type = other RNA
attcgttccagcagggtaaagt

SEQ ID NO: 123328 - RNA, 22 nt, synthetic construct
  source 1..22: mol_type = other RNA
attctaaacacacgggctgggc

SEQ ID NO: 123329 - RNA, 22 nt, synthetic construct
  source 1..22: mol_type = other RNA
attctaaacctgaggtctttaa

SEQ ID NO: 123330 - RNA, 22 nt, synthetic construct
  source 1..22: mol_type = other RNA
attctaacaagaagctgttttg

SEQ ID NO: 123331 - RNA, 22 nt, synthetic construct
  source 1..22: mol_type = other RNA
attctaacattatcttctacct

SEQ ID NO: 123332 - RNA, 22 nt, synthetic construct
  source 1..22: mol_type = other RNA
attctaagtttgccaaagattc

SEQ ID NO: 123333 - RNA, 22 nt, synthetic construct
  source 1..22: mol_type = other RNA
attctaatgaactcccagaact

SEQ ID NO: 123334 - RNA, 22 nt, synthetic construct
  source 1..22: mol_type = other RNA
attctaatgtgcaaggagagaa

SEQ ID NO: 123335 - RNA, 22 nt, synthetic construct
  source 1..22: mol_type = other RNA
attctaattagaaactggtgaa

SEQ ID NO: 123336 - RNA, 22 nt, synthetic construct
  source 1..22: mol_type = other RNA
attctacagaaaacccttcatc

SEQ ID NO: 123337 - RNA, 22 nt, synthetic construct
  source 1..22: mol_type = other RNA
attctacagtattacacagaaa

SEQ ID NO: 123338 - RNA, 22 nt, synthetic construct
  source 1..22: mol_type = other RNA
attctacctggagcctgaggac

SEQ ID NO: 123339 - RNA, 22 nt, synthetic construct
  source 1..22: mol_type = other RNA
attctactaaacattaaggaag

SEQ ID NO: 123340 - RNA, 22 nt, synthetic construct
  source 1..22: mol_type = other RNA
attctagaaaggagggactgaa

SEQ ID NO: 123341 - RNA, 22 nt, synthetic construct
  source 1..22: mol_type = other RNA
attctagtgatgggagatggac

SEQ ID NO: 123342 - RNA, 22 nt, synthetic construct
  source 1..22: mol_type = other RNA
attctagttaataaaggtgcta

SEQ ID NO: 123343 - RNA, 22 nt, synthetic construct
  source 1..22: mol_type = other RNA
attctagttctagctctgtctt

SEQ ID NO: 123344 - RNA, 22 nt, synthetic construct
  source 1..22: mol_type = other RNA
attctataggtagtacatattc

SEQ ID NO: 123345 - RNA, 22 nt, synthetic construct
  source 1..22: mol_type = other RNA
attctatcatcaagacagagct

SEQ ID NO: 123346 - RNA, 22 nt, synthetic construct
  source 1..22: mol_type = other RNA
attctatctgaactttcgaagt

SEQ ID NO: 123347 - RNA, 22 nt, synthetic construct
  source 1..22: mol_type = other RNA
attctatttttctgcaattgga

SEQ ID NO: 123348 - RNA, 22 nt, synthetic construct
  source 1..22: mol_type = other RNA
attctcaaatgaacaggttctt

SEQ ID NO: 123349 - RNA, 22 nt, synthetic construct
  source 1..22: mol_type = other RNA
attctcatattattttttcccg

SEQ ID NO: 123350 - RNA, 22 nt, synthetic construct
  source 1..22: mol_type = other RNA
attctcattagttatctcttag

SEQ ID NO: 123351 - RNA, 22 nt, synthetic construct
  source 1..22: mol_type = other RNA
attctccactttcatgatttgg

SEQ ID NO: 123352 - RNA, 22 nt, synthetic construct
  source 1..22: mol_type = other RNA
attctccagtgaagtcatctgg

SEQ ID NO: 123353 - RNA, 22 nt, synthetic construct
  source 1..22: mol_type = other RNA
attctcccagttgtcagaatta

SEQ ID NO: 123354 - RNA, 22 nt, synthetic construct
  source 1..22: mol_type = other RNA
attctccctgaaattgtcagaa

SEQ ID NO: 123355 - RNA, 22 nt, synthetic construct
  source 1..22: mol_type = other RNA
attctctctcaactggcccctc

SEQ ID NO: 123356 - RNA, 22 nt, synthetic construct
  source 1..22: mol_type = other RNA
attctctggaatagaagagcag

SEQ ID NO: 123357 - RNA, 22 nt, synthetic construct
  source 1..22: mol_type = other RNA
attctctgtctctgttgcccag

SEQ ID NO: 123358 - RNA, 22 nt, synthetic construct
  source 1..22: mol_type = other RNA
attctcttctggatagcattat

SEQ ID NO: 123359 - RNA, 22 nt, synthetic construct
  source 1..22: mol_type = other RNA
attctctttagggaagatagta

SEQ ID NO: 123360 - RNA, 22 nt, synthetic construct
  source 1..22: mol_type = other RNA
attctctttctgaaattctcat

SEQ ID NO: 123361 - RNA, 22 nt, synthetic construct
  source 1..22: mol_type = other RNA
attctgaactttcaacctaaca

SEQ ID NO: 123362 - RNA, 22 nt, synthetic construct
  source 1..22: mol_type = other RNA
attctgacaactgggagaatgg

SEQ ID NO: 123363 - RNA, 22 nt, synthetic construct
  source 1..22: mol_type = other RNA
attctgacacccgaagaggacg

SEQ ID NO: 123364 - RNA, 22 nt, synthetic construct
  source 1..22: mol_type = other RNA
attctgacccagagcctaatgt

SEQ ID NO: 123365 - RNA, 22 nt, synthetic construct
  source 1..22: mol_type = other RNA
attctgaccctttattcaaaga

SEQ ID NO: 123366 - RNA, 22 nt, synthetic construct
  source 1..22: mol_type = other RNA
attctgacctaaagttttaaga

SEQ ID NO: 123367 - RNA, 22 nt, synthetic construct
  source 1..22: mol_type = other RNA
attctgacttagtgagggaggc

SEQ ID NO: 123368 - RNA, 22 nt, synthetic construct
  source 1..22: mol_type = other RNA
attctgaggcctcctgccttcc

SEQ ID NO: 123369 - RNA, 22 nt, synthetic construct
  source 1..22: mol_type = other RNA
attctgagggaaattatttcca

SEQ ID NO: 123370 - RNA, 22 nt, synthetic construct
  source 1..22: mol_type = other RNA
attctgatagcttgacaaaagg

SEQ ID NO: 123371 - RNA, 22 nt, synthetic construct
  source 1..22: mol_type = other RNA
attctgatgcacaagccttgaa

SEQ ID NO: 123372 - RNA, 22 nt, synthetic construct
  source 1..22: mol_type = other RNA
attctgcagtgaacatgggaat

SEQ ID NO: 123373 - RNA, 22 nt, synthetic construct
  source 1..22: mol_type = other RNA
attctgcagtttgtgttttcac

SEQ ID NO: 123374 - RNA, 22 nt, synthetic construct
  source 1..22: mol_type = other RNA
attctgccacattcaacaacat

SEQ ID NO: 123375 - RNA, 22 nt, synthetic construct
  source 1..22: mol_type = other RNA
attctgcctgcagactgcaggt

SEQ ID NO: 123376 - RNA, 22 nt, synthetic construct
  source 1..22: mol_type = other RNA
attctgccttcaatgtttggta

SEQ ID NO: 123377 - RNA, 22 nt, synthetic construct
  source 1..22: mol_type = other RNA
attctgctactagcaagctaat

SEQ ID NO: 123378 - RNA, 22 nt, synthetic construct
  source 1..22: mol_type = other RNA
attctgctatgaaatgtggttt

SEQ ID NO: 123379 - RNA, 22 nt, synthetic construct
  source 1..22: mol_type = other RNA
attctgcttattatatgcctag

SEQ ID NO: 123380 - RNA, 22 nt, synthetic construct
  source 1..22: mol_type = other RNA
attctgcttccttgctatgtaa

SEQ ID NO: 123381 - RNA, 22 nt, synthetic construct
  source 1..22: mol_type = other RNA
attctggagtgttttcttcatg

SEQ ID NO: 123382 - RNA, 22 nt, synthetic construct
  source 1..22: mol_type = other RNA
attctggccaaatccctgatca

SEQ ID NO: 123383 - RNA, 22 nt, synthetic construct
  source 1..22: mol_type = other RNA
attctggggctcaagtaagtga

SEQ ID NO: 123384 - RNA, 22 nt, synthetic construct
  source 1..22: mol_type = other RNA
attctgtcacatagacctgaat

SEQ ID NO: 123385 - RNA, 22 nt, synthetic construct
  source 1..22: mol_type = other RNA
attctgtctctacaaaaaagta

SEQ ID NO: 123386 - RNA, 22 nt, synthetic construct
  source 1..22: mol_type = other RNA
attctgtgaattgtgacagttc

SEQ ID NO: 123387 - RNA, 22 nt, synthetic construct
  source 1..22: mol_type = other RNA
attctgtgccaagcaacttgat

SEQ ID NO: 123388 - RNA, 22 nt, synthetic construct
  source 1..22: mol_type = other RNA
attctgtgcttaaatttttgag

SEQ ID NO: 123389 - RNA, 22 nt, synthetic construct
  source 1..22: mol_type = other RNA
attctgttaatgtgatatgcca

SEQ ID NO: 123390 - RNA, 22 nt, synthetic construct
  source 1..22: mol_type = other RNA
attctgttctagctcctgggaa

SEQ ID NO: 123391 - RNA, 22 nt, synthetic construct
  source 1..22: mol_type = other RNA
attctgttctcagtatcctttc

SEQ ID NO: 123392 - RNA, 22 nt, synthetic construct
  source 1..22: mol_type = other RNA
attctgttgcaaattattttcc

SEQ ID NO: 123393 - RNA, 22 nt, synthetic construct
  source 1..22: mol_type = other RNA
attctgtttacccttactaaat

SEQ ID NO: 123394 - RNA, 22 nt, synthetic construct
  source 1..22: mol_type = other RNA
attcttaaactgccaaacccta

SEQ ID NO: 123395 - RNA, 22 nt, synthetic construct
  source 1..22: mol_type = other RNA
attcttacagtgacatatgccg

SEQ ID NO: 123396 - RNA, 22 nt, synthetic construct
  source 1..22: mol_type = other RNA
attcttaccttctaaaatcatc

SEQ ID NO: 123397 - RNA, 22 nt, synthetic construct
  source 1..22: mol_type = other RNA
attcttatccctacctaaaaag

SEQ ID NO: 123398 - RNA, 22 nt, synthetic construct
  source 1..22: mol_type = other RNA
attcttattgattcagatgaca

SEQ ID NO: 123399 - RNA, 22 nt, synthetic construct
  source 1..22: mol_type = other RNA
attcttcaccattccagccatt

SEQ ID NO: 123400 - RNA, 22 nt, synthetic construct
  source 1..22: mol_type = other RNA
attcttcagcaaggaccattag

SEQ ID NO: 123401 - RNA, 22 nt, synthetic construct
  source 1..22: mol_type = other RNA
attcttccactagtgggatcaa

SEQ ID NO: 123402 - RNA, 22 nt, synthetic construct
  source 1..22: mol_type = other RNA
attcttccagcctggtaatgaa

SEQ ID NO: 123403 - RNA, 22 nt, synthetic construct
  source 1..22: mol_type = other RNA
attcttcctgtcttggacccat

SEQ ID NO: 123404 - RNA, 22 nt, synthetic construct
  source 1..22: mol_type = other RNA
attcttccttaatgtttagtag

SEQ ID NO: 123405 - RNA, 22 nt, synthetic construct
  source 1..22: mol_type = other RNA
attcttctaataggaagtggct

SEQ ID NO: 123406 - RNA, 22 nt, synthetic construct
  source 1..22: mol_type = other RNA
attcttctctaatgtaaacagc

SEQ ID NO: 123407 - RNA, 22 nt, synthetic construct
  source 1..22: mol_type = other RNA
attcttgacatgattgaggact

SEQ ID NO: 123408 - RNA, 22 nt, synthetic construct
  source 1..22: mol_type = other RNA
attcttgacctcaaatgatcca

SEQ ID NO: 123409 - RNA, 22 nt, synthetic construct
  source 1..22: mol_type = other RNA
attcttgggtgaataacccata

SEQ ID NO: 123410 - RNA, 22 nt, synthetic construct
  source 1..22: mol_type = other RNA
attcttgtcatgaatgaatgtt

SEQ ID NO: 123411 - RNA, 22 nt, synthetic construct
  source 1..22: mol_type = other RNA
attcttgttaagcattttccgg

SEQ ID NO: 123412 - RNA, 22 nt, synthetic construct
  source 1..22: mol_type = other RNA
attcttgttttcttgagatgga

SEQ ID NO: 123413 - RNA, 22 nt, synthetic construct
  source 1..22: mol_type = other RNA
attctttaaaactgctgagtct

SEQ ID NO: 123414 - RNA, 22 nt, synthetic construct
  source 1..22: mol_type = other RNA
attcttttagagtaactgtcat

SEQ ID NO: 123415 - RNA, 22 nt, synthetic construct
  source 1..22: mol_type = other RNA
attcttttgctgtatacccagg

SEQ ID NO: 123416 - RNA, 22 nt, synthetic construct
  source 1..22: mol_type = other RNA
attctttttactcgagggtagc

SEQ ID NO: 123417 - RNA, 22 nt, synthetic construct
  source 1..22: mol_type = other RNA
attctttttctagtttgaggtg

SEQ ID NO: 123418 - RNA, 22 nt, synthetic construct
  source 1..22: mol_type = other RNA
attgaaaatggtttaggctgtc

SEQ ID NO: 123419 - RNA, 22 nt, synthetic construct
  source 1..22: mol_type = other RNA
attgaaacgatgcattccagat

SEQ ID NO: 123420 - RNA, 22 nt, synthetic construct
  source 1..22: mol_type = other RNA
attgaaactcaatgttggttag

SEQ ID NO: 123421 - RNA, 22 nt, synthetic construct
  source 1..22: mol_type = other RNA
attgaaagcccttgagtatttt

SEQ ID NO: 123422 - RNA, 22 nt, synthetic construct
  source 1..22: mol_type = other RNA
attgaacagcctaaagtccaca

SEQ ID NO: 123423 - RNA, 22 nt, synthetic construct
  source 1..22: mol_type = other RNA
attgaacccactgagcatttat

SEQ ID NO: 123424 - RNA, 22 nt, synthetic construct
  source 1..22: mol_type = other RNA
attgaactgttacttgactatt

SEQ ID NO: 123425 - RNA, 22 nt, synthetic construct
  source 1..22: mol_type = other RNA
attgaagagggaacattttcat

SEQ ID NO: 123426 - RNA, 22 nt, synthetic construct
  source 1..22: mol_type = other RNA
attgaagccagcacctaacaat

SEQ ID NO: 123427 - RNA, 22 nt, synthetic construct
  source 1..22: mol_type = other RNA
attgaagctactattccaggat

SEQ ID NO: 123428 - RNA, 22 nt, synthetic construct
  source 1..22: mol_type = other RNA
attgaaggcagaattatagagg

SEQ ID NO: 123429 - RNA, 22 nt, synthetic construct
  source 1..22: mol_type = other RNA
attgaagtatagtttgaagtca

SEQ ID NO: 123430 - RNA, 22 nt, synthetic construct
  source 1..22: mol_type = other RNA
attgaataatttccaggtcatt

SEQ ID NO: 123431 - RNA, 22 nt, synthetic construct
  source 1..22: mol_type = other RNA
attgaatggaaagaaatagaac

SEQ ID NO: 123432 - RNA, 22 nt, synthetic construct
  source 1..22: mol_type = other RNA
attgaatggggatgcaacaaat

SEQ ID NO: 123433 - RNA, 22 nt, synthetic construct
  source 1..22: mol_type = other RNA
attgacaagacgtgtacataaa

SEQ ID NO: 123434 - RNA, 22 nt, synthetic construct
  source 1..22: mol_type = other RNA
attgacaatataggagactatc

SEQ ID NO: 123435 - RNA, 22 nt, synthetic construct
  source 1..22: mol_type = other RNA
attgaccaaacatgtgaggatt

SEQ ID NO: 123436 - RNA, 22 nt, synthetic construct
  source 1..22: mol_type = other RNA
attgaccattccacgctgtggc

SEQ ID NO: 123437 - RNA, 22 nt, synthetic construct
  source 1..22: mol_type = other RNA
attgaccttctacttatctttt

SEQ ID NO: 123438 - RNA, 22 nt, synthetic construct
  source 1..22: mol_type = other RNA
attgaccttgtatccagtaatc

SEQ ID NO: 123439 - RNA, 22 nt, synthetic construct
  source 1..22: mol_type = other RNA
attgactaccaattctccctga

SEQ ID NO: 123440 - RNA, 22 nt, synthetic construct
  source 1..22: mol_type = other RNA
attgacttcactagatctcttt

SEQ ID NO: 123441 - RNA, 22 nt, synthetic construct
  source 1..22: mol_type = other RNA
attgactttaccctgctggaac

SEQ ID NO: 123442 - RNA, 22 nt, synthetic construct
  source 1..22: mol_type = other RNA
attgagaagcagaaaatcagtg

SEQ ID NO: 123443 - RNA, 22 nt, synthetic construct
  source 1..22: mol_type = other RNA
attgagagctttcttttaaaga

SEQ ID NO: 123444 - RNA, 22 nt, synthetic construct
  source 1..22: mol_type = other RNA
attgagagtgaaaacacaaact

SEQ ID NO: 123445 - RNA, 22 nt, synthetic construct
  source 1..22: mol_type = other RNA
attgagatgtactggaagtgta

SEQ ID NO: 123446 - RNA, 22 nt, synthetic construct
  source 1..22: mol_type = other RNA
attgagattagcgaaagggatt

SEQ ID NO: 123447 - RNA, 22 nt, synthetic construct
  source 1..22: mol_type = other RNA
attgagccaaagaagaaatcaa

SEQ ID NO: 123448 - RNA, 22 nt, synthetic construct
  source 1..22: mol_type = other RNA
attgagcctgttccgattttac

SEQ ID NO: 123449 - RNA, 22 nt, synthetic construct
  source 1..22: mol_type = other RNA
attgagctgtccccaccgcctt

SEQ ID NO: 123450 - RNA, 22 nt, synthetic construct
  source 1..22: mol_type = other RNA
attgaggacttcatgtacaatg

SEQ ID NO: 123451 - RNA, 22 nt, synthetic construct
  source 1..22: mol_type = other RNA
attgagggttagatttttcctt

SEQ ID NO: 123452 - RNA, 22 nt, synthetic construct
  source 1..22: mol_type = other RNA
attgagtatctggtgctggcag

SEQ ID NO: 123453 - RNA, 22 nt, synthetic construct
  source 1..22: mol_type = other RNA
attgagtcagtaatcaaaaacc

SEQ ID NO: 123454 - RNA, 22 nt, synthetic construct
  source 1..22: mol_type = other RNA
attgagtctgtagggtgactag

SEQ ID NO: 123455 - RNA, 22 nt, synthetic construct
  source 1..22: mol_type = other RNA
attgagtgtagctgtggctcac

SEQ ID NO: 123456 - RNA, 22 nt, synthetic construct
  source 1..22: mol_type = other RNA
attgataaatctaaagccaatc

SEQ ID NO: 123457 - RNA, 22 nt, synthetic construct
  source 1..22: mol_type = other RNA
attgataagcacatggtgataa

SEQ ID NO: 123458 - RNA, 22 nt, synthetic construct
  source 1..22: mol_type = other RNA
attgatacaatacttggatctt

SEQ ID NO: 123459 - RNA, 22 nt, synthetic construct
  source 1..22: mol_type = other RNA
attgatatctgagtgttgtgtg

SEQ ID NO: 123460 - RNA, 22 nt, synthetic construct
  source 1..22: mol_type = other RNA
attgatatttttcagattgacc

SEQ ID NO: 123461 - RNA, 22 nt, synthetic construct
  source 1..22: mol_type = other RNA
attgatctgccaggacaattga

SEQ ID NO: 123462 - RNA, 22 nt, synthetic construct
  source 1..22: mol_type = other RNA
attgattcagatgacagaaata

SEQ ID NO: 123463 - RNA, 22 nt, synthetic construct
  source 1..22: mol_type = other RNA
attgattccagtttctctgctt

SEQ ID NO: 123464 - RNA, 22 nt, synthetic construct
  source 1..22: mol_type = other RNA
attgattggcaaatctttagtg

SEQ ID NO: 123465 - RNA, 22 nt, synthetic construct
  source 1..22: mol_type = other RNA
attgatttgaccatgggacaag

SEQ ID NO: 123466 - RNA, 22 nt, synthetic construct
  source 1..22: mol_type = other RNA
attgattttgtatcctgagact

SEQ ID NO: 123467 - RNA, 22 nt, synthetic construct
  source 1..22: mol_type = other RNA
attgcaaaaacagtttccctct

SEQ ID NO: 123468 - RNA, 22 nt, synthetic construct
  source 1..22: mol_type = other RNA
attgcaaactaagtggtattct

SEQ ID NO: 123469 - RNA, 22 nt, synthetic construct
  source 1..22: mol_type = other RNA
attgcacagtctcccccaggtg

SEQ ID NO: 123470 - RNA, 22 nt, synthetic construct
  source 1..22: mol_type = other RNA
attgcactccacgtgggtgaca

SEQ ID NO: 123471 - RNA, 22 nt, synthetic construct
  source 1..22: mol_type = other RNA
attgcactccagcctaggcaag

SEQ ID NO: 123472 - RNA, 22 nt, synthetic construct
  source 1..22: mol_type = other RNA
attgcagagtgttcaaaagccc

SEQ ID NO: 123473 - RNA, 22 nt, synthetic construct
  source 1..22: mol_type = other RNA
attgcagccagagagtggaaag

SEQ ID NO: 123474 - RNA, 22 nt, synthetic construct
  source 1..22: mol_type = other RNA
attgcaggtgtgggccaccaag

SEQ ID NO: 123475 - RNA, 22 nt, synthetic construct
  source 1..22: mol_type = other RNA
attgcaggtttactccaagaag

SEQ ID NO: 123476 - RNA, 22 nt, synthetic construct
  source 1..22: mol_type = other RNA
attgcatagggatgttgcctac

SEQ ID NO: 123477 - RNA, 22 nt, synthetic construct
  source 1..22: mol_type = other RNA
attgcatcaactgcttccctag

SEQ ID NO: 123478 - RNA, 22 nt, synthetic construct
  source 1..22: mol_type = other RNA
attgcatgagacttggagtttg

SEQ ID NO: 123479 - RNA, 22 nt, synthetic construct
  source 1..22: mol_type = other RNA
attgcattgactaccaattctc

SEQ ID NO: 123480 - RNA, 22 nt, synthetic construct
  source 1..22: mol_type = other RNA
attgcatttacttgtcatttct

SEQ ID NO: 123481 - RNA, 22 nt, synthetic construct
  source 1..22: mol_type = other RNA
attgccaaactgttttccacag

SEQ ID NO: 123482 - RNA, 22 nt, synthetic construct
  source 1..22: mol_type = other RNA
attgccaggtttgtgcttggat

SEQ ID NO: 123483 - RNA, 22 nt, synthetic construct
  source 1..22: mol_type = other RNA
attgccagttttctggaaactc

SEQ ID NO: 123484 - RNA, 22 nt, synthetic construct
  source 1..22: mol_type = other RNA
attgccatatgtagggcaccgt

SEQ ID NO: 123485 - RNA, 22 nt, synthetic construct
  source 1..22: mol_type = other RNA
attgcccaggctggtcttgtac

SEQ ID NO: 123486 - RNA, 22 nt, synthetic construct
  source 1..22: mol_type = other RNA
attgcccattataaaataggaa

SEQ ID NO: 123487 - RNA, 22 nt, synthetic construct
  source 1..22: mol_type = other RNA
attgccccattgcactccacgt

SEQ ID NO: 123488 - RNA, 22 nt, synthetic construct
  source 1..22: mol_type = other RNA
attgcctaacaccagtaagatt

SEQ ID NO: 123489 - RNA, 22 nt, synthetic construct
  source 1..22: mol_type = other RNA
attgcctatagacagcatcccc

SEQ ID NO: 123490 - RNA, 22 nt, synthetic construct
  source 1..22: mol_type = other RNA
attgcctccatatgggatgctt

SEQ ID NO: 123491 - RNA, 22 nt, synthetic construct
  source 1..22: mol_type = other RNA
attgccttcaagttgctttttc

SEQ ID NO: 123492 - RNA, 22 nt, synthetic construct
  source 1..22: mol_type = other RNA
attgccttcgcagggtgaaact

SEQ ID NO: 123493 - RNA, 22 nt, synthetic construct
  source 1..22: mol_type = other RNA
attgcgattgtttcagtgtgtc

SEQ ID NO: 123494 - RNA, 22 nt, synthetic construct
  source 1..22: mol_type = other RNA
attgcgcagaactggggcttga

SEQ ID NO: 123495 - RNA, 22 nt, synthetic construct
  source 1..22: mol_type = other RNA
attgctaaactgttccccaagc

SEQ ID NO: 123496 - RNA, 22 nt, synthetic construct
  source 1..22: mol_type = other RNA
attgctaattcattgtacatga

SEQ ID NO: 123497 - RNA, 22 nt, synthetic construct
  source 1..22: mol_type = other RNA
attgctagtgtcctcaggctcc

SEQ ID NO: 123498 - RNA, 22 nt, synthetic construct
  source 1..22: mol_type = other RNA
attgctgcagtttttccactaa

SEQ ID NO: 123499 - RNA, 22 nt, synthetic construct
  source 1..22: mol_type = other RNA
attgcttcaaagagaacaaaat

SEQ ID NO: 123500 - RNA, 22 nt, synthetic construct
  source 1..22: mol_type = other RNA
attgcttgagagagataaaacc

SEQ ID NO: 123501 - RNA, 22 nt, synthetic construct
  source 1..22: mol_type = other RNA
attgcttgagtgcaggagtttg

SEQ ID NO: 123502 - RNA, 22 nt, synthetic construct
  source 1..22: mol_type = other RNA
attgcttttgctgagggaattt

SEQ ID NO: 123503 - RNA, 22 nt, synthetic construct
  source 1..22: mol_type = other RNA
attggaaaactaggtatttgaa

SEQ ID NO: 123504 - RNA, 22 nt, synthetic construct
  source 1..22: mol_type = other RNA
attggaaaactctgtttcctta

SEQ ID NO: 123505 - RNA, 22 nt, synthetic construct
  source 1..22: mol_type = other RNA
attggaacctttgtccactgtc

SEQ ID NO: 123506 - RNA, 22 nt, synthetic construct
  source 1..22: mol_type = other RNA
attggaagactatcacgattct

SEQ ID NO: 123507 - RNA, 22 nt, synthetic construct
  source 1..22: mol_type = other RNA
attggaatgagtccagctttct

SEQ ID NO: 123508 - RNA, 22 nt, synthetic construct
  source 1..22: mol_type = other RNA
attggaattttagtaattctcc

SEQ ID NO: 123509 - RNA, 22 nt, synthetic construct
  source 1..22: mol_type = other RNA
attggacgggtggtagggaggg

SEQ ID NO: 123510 - RNA, 22 nt, synthetic construct
  source 1..22: mol_type = other RNA
attggagactgataaacttcag

SEQ ID NO: 123511 - RNA, 22 nt, synthetic construct
  source 1..22: mol_type = other RNA
attggaggataatatctggact

SEQ ID NO: 123512 - RNA, 22 nt, synthetic construct
  source 1..22: mol_type = other RNA
attggatatttgcagtagtatt

SEQ ID NO: 123513 - RNA, 22 nt, synthetic construct
  source 1..22: mol_type = other RNA
attggattaagggcccaccctg

SEQ ID NO: 123514 - RNA, 22 nt, synthetic construct
  source 1..22: mol_type = other RNA
attggcaaatctttagtgttgc

SEQ ID NO: 123515 - RNA, 22 nt, synthetic construct
  source 1..22: mol_type = other RNA
attggcaacattttaattccaa

SEQ ID NO: 123516 - RNA, 22 nt, synthetic construct
  source 1..22: mol_type = other RNA
attggcataaagacagacattt

SEQ ID NO: 123517 - RNA, 22 nt, synthetic construct
  source 1..22: mol_type = other RNA
attggcatttaaaagaacctct

SEQ ID NO: 123518 - RNA, 22 nt, synthetic construct
  source 1..22: mol_type = other RNA
attggccaggctggttccaaac

SEQ ID NO: 123519 - RNA, 22 nt, synthetic construct
  source 1..22: mol_type = other RNA
attggcgtacatgtagatatgg

SEQ ID NO: 123520 - RNA, 22 nt, synthetic construct
  source 1..22: mol_type = other RNA
attggcttatagtgttcttttt

SEQ ID NO: 123521 - RNA, 22 nt, synthetic construct
  source 1..22: mol_type = other RNA
attgggaaaatcttggaacttt

SEQ ID NO: 123522 - RNA, 22 nt, synthetic construct
  source 1..22: mol_type = other RNA
attgggaagattggctttagat

SEQ ID NO: 123523 - RNA, 22 nt, synthetic construct
  source 1..22: mol_type = other RNA
attgggagctttcattattacc

SEQ ID NO: 123524 - RNA, 22 nt, synthetic construct
  source 1..22: mol_type = other RNA
attgggcattaattgagagctt

SEQ ID NO: 123525 - RNA, 22 nt, synthetic construct
  source 1..22: mol_type = other RNA
attgggcttttcatatacgtat

SEQ ID NO: 123526 - RNA, 22 nt, synthetic construct
  source 1..22: mol_type = other RNA
attgggggaaaattgacatttt

SEQ ID NO: 123527 - RNA, 22 nt, synthetic construct
  source 1..22: mol_type = other RNA
attgggtacataccgagtaatg

SEQ ID NO: 123528 - RNA, 22 nt, synthetic construct
  source 1..22: mol_type = other RNA
attgggtcaacaaactaactag

SEQ ID NO: 123529 - RNA, 22 nt, synthetic construct
  source 1..22: mol_type = other RNA
attggtaatgttatatttccgt

SEQ ID NO: 123530 - RNA, 22 nt, synthetic construct
  source 1..22: mol_type = other RNA
attggtagtcaatgcaatgcgt

SEQ ID NO: 123531 - RNA, 22 nt, synthetic construct
  source 1..22: mol_type = other RNA
attggtcctggaaaaagaccat

SEQ ID NO: 123532 - RNA, 22 nt, synthetic construct
  source 1..22: mol_type = other RNA
attggtgaatctgagtaaaggg

SEQ ID NO: 123533 - RNA, 22 nt, synthetic construct
  source 1..22: mol_type = other RNA
attggttaaacttggtctgggt

SEQ ID NO: 123534 - RNA, 22 nt, synthetic construct
  source 1..22: mol_type = other RNA
attggttattcatgtttgtggt

SEQ ID NO: 123535 - RNA, 22 nt, synthetic construct
  source 1..22: mol_type = other RNA
attggttcgtttgaggcttttc

SEQ ID NO: 123536 - RNA, 22 nt, synthetic construct
  source 1..22: mol_type = other RNA
attggttggactccaccctgcc

SEQ ID NO: 123537 - RNA, 22 nt, synthetic construct
  source 1..22: mol_type = other RNA
attggtttgaaatgatcttttg

SEQ ID NO: 123538 - RNA, 22 nt, synthetic construct
  source 1..22: mol_type = other RNA
attgtaacttgaattcagatgg

SEQ ID NO: 123539 - RNA, 22 nt, synthetic construct
  source 1..22: mol_type = other RNA
attgtaatcacagtacgctttt

SEQ ID NO: 123540 - RNA, 22 nt, synthetic construct
  source 1..22: mol_type = other RNA
attgtaatcctgtttctctaca

SEQ ID NO: 123541 - RNA, 22 nt, synthetic construct
  source 1..22: mol_type = other RNA
attgtaatgtctcctctttcat

SEQ ID NO: 123542 - RNA, 22 nt, synthetic construct
  source 1..22: mol_type = other RNA
attgtacaattttcttaccctt

SEQ ID NO: 123543 - RNA, 22 nt, synthetic construct
  source 1..22: mol_type = other RNA
attgtacacctcaaactagaaa

SEQ ID NO: 123544 - RNA, 22 nt, synthetic construct
  source 1..22: mol_type = other RNA
attgtacatgaagtcctcaatc

SEQ ID NO: 123545 - RNA, 22 nt, synthetic construct
  source 1..22: mol_type = other RNA
attgtaccttgatttatggcct

SEQ ID NO: 123546 - RNA, 22 nt, synthetic construct
  source 1..22: mol_type = other RNA
attgtaccttggagagaaacct

SEQ ID NO: 123547 - RNA, 22 nt, synthetic construct
  source 1..22: mol_type = other RNA
attgtagctatatcccaaattg

SEQ ID NO: 123548 - RNA, 22 nt, synthetic construct
  source 1..22: mol_type = other RNA
attgtaggaaagcctgtgacag

SEQ ID NO: 123549 - RNA, 22 nt, synthetic construct
  source 1..22: mol_type = other RNA
attgtaggtgtctcatttaata

SEQ ID NO: 123550 - RNA, 22 nt, synthetic construct
  source 1..22: mol_type = other RNA
attgtagtttccatggaggggc

SEQ ID NO: 123551 - RNA, 22 nt, synthetic construct
  source 1..22: mol_type = other RNA
attgtatatacccttctgttaa

SEQ ID NO: 123552 - RNA, 22 nt, synthetic construct
  source 1..22: mol_type = other RNA
attgtatttctgttagatggtg

SEQ ID NO: 123553 - RNA, 22 nt, synthetic construct
  source 1..22: mol_type = other RNA
attgtatttttcacaaacacac

SEQ ID NO: 123554 - RNA, 22 nt, synthetic construct
  source 1..22: mol_type = other RNA
attgtcaaggtcatcctttccc

SEQ ID NO: 123555 - RNA, 22 nt, synthetic construct
  source 1..22: mol_type = other RNA
attgtcaatggggaactttatt

SEQ ID NO: 123556 - RNA, 22 nt, synthetic construct
  source 1..22: mol_type = other RNA
attgtcagaaaagatcagtaaa

SEQ ID NO: 123557 - RNA, 22 nt, synthetic construct
  source 1..22: mol_type = other RNA
attgtcagtaattctgcagtga

SEQ ID NO: 123558 - RNA, 22 nt, synthetic construct
  source 1..22: mol_type = other RNA
attgtcattaccttatagatga

SEQ ID NO: 123559 - RNA, 22 nt, synthetic construct
  source 1..22: mol_type = other RNA
attgtcccgggggagggcgggg

SEQ ID NO: 123560 - RNA, 22 nt, synthetic construct
  source 1..22: mol_type = other RNA
attgtcctggcagatcaattga

SEQ ID NO: 123561 - RNA, 22 nt, synthetic construct
  source 1..22: mol_type = other RNA
attgtcgttgagtacctctggg

SEQ ID NO: 123562 - RNA, 22 nt, synthetic construct
  source 1..22: mol_type = other RNA
attgtctgcaagcagatctgct

SEQ ID NO: 123563 - RNA, 22 nt, synthetic construct
  source 1..22: mol_type = other RNA
attgtcttacataggcttagta

SEQ ID NO: 123564 - RNA, 22 nt, synthetic construct
  source 1..22: mol_type = other RNA
attgtcttctaaccctcaaatg

SEQ ID NO: 123565 - RNA, 22 nt, synthetic construct
  source 1..22: mol_type = other RNA
attgtcttttctatctgaacat

SEQ ID NO: 123566 - RNA, 22 nt, synthetic construct
  source 1..22: mol_type = other RNA
attgtgacagttctatttcttt

SEQ ID NO: 123567 - RNA, 22 nt, synthetic construct
  source 1..22: mol_type = other RNA
attgtgatgtctcagatgtctc

SEQ ID NO: 123568 - RNA, 22 nt, synthetic construct
  source 1..22: mol_type = other RNA
attgtgcaaccatccccgctgt

SEQ ID NO: 123569 - RNA, 22 nt, synthetic construct
  source 1..22: mol_type = other RNA
attgtgcatatataccacattt

SEQ ID NO: 123570 - RNA, 22 nt, synthetic construct
  source 1..22: mol_type = other RNA
attgtgccagtgaactccagtc

SEQ ID NO: 123571 - RNA, 22 nt, synthetic construct
  source 1..22: mol_type = other RNA
attgtgctcagtggttctgcgt

SEQ ID NO: 123572 - RNA, 22 nt, synthetic construct
  source 1..22: mol_type = other RNA
attgtgctgaaaccccgcatac

SEQ ID NO: 123573 - RNA, 22 nt, synthetic construct
  source 1..22: mol_type = other RNA
attgtggatgagattaatgtag

SEQ ID NO: 123574 - RNA, 22 nt, synthetic construct
  source 1..22: mol_type = other RNA
attgtgtggacacactgaaaca

SEQ ID NO: 123575 - RNA, 22 nt, synthetic construct
  source 1..22: mol_type = other RNA
attgtgtgtcgagaaaaatggg

SEQ ID NO: 123576 - RNA, 22 nt, synthetic construct
  source 1..22: mol_type = other RNA
attgtgtgttctctttttgaca

SEQ ID NO: 123577 - RNA, 22 nt, synthetic construct
  source 1..22: mol_type = other RNA
attgtgttgcccacgctggtct

SEQ ID NO: 123578 - RNA, 22 nt, synthetic construct
  source 1..22: mol_type = other RNA
attgttaacatttcttctagtc

SEQ ID NO: 123579 - RNA, 22 nt, synthetic construct
  source 1..22: mol_type = other RNA
attgttaactgtagagaaaatg

SEQ ID NO: 123580 - RNA, 22 nt, synthetic construct
  source 1..22: mol_type = other RNA
attgttagccacagcgttgttc

SEQ ID NO: 123581 - RNA, 22 nt, synthetic construct
  source 1..22: mol_type = other RNA
attgttaggtgctggcttcaat

SEQ ID NO: 123582 - RNA, 22 nt, synthetic construct
  source 1..22: mol_type = other RNA
attgttcagggaaggctgcaag

SEQ ID NO: 123583 - RNA, 22 nt, synthetic construct
  source 1..22: mol_type = other RNA
attgttcatgaaatccccttta

SEQ ID NO: 123584 - RNA, 22 nt, synthetic construct
  source 1..22: mol_type = other RNA
attgttcatgtctgtgtagttc

SEQ ID NO: 123585 - RNA, 22 nt, synthetic construct
  source 1..22: mol_type = other RNA
attgttccaggggggaaaaaac

SEQ ID NO: 123586 - RNA, 22 nt, synthetic construct
  source 1..22: mol_type = other RNA
attgttctctttgtttatcctt

SEQ ID NO: 123587 - RNA, 22 nt, synthetic construct
  source 1..22: mol_type = other RNA
attgttgaattgttggagttct

SEQ ID NO: 123588 - RNA, 22 nt, synthetic construct
  source 1..22: mol_type = other RNA
attgttgccatcattttatgaa

SEQ ID NO: 123589 - RNA, 22 nt, synthetic construct
  source 1..22: mol_type = other RNA
attgttgcgcgtcaaaagatgc

SEQ ID NO: 123590 - RNA, 22 nt, synthetic construct
  source 1..22: mol_type = other RNA
attgtttaattctgtttaccct

SEQ ID NO: 123591 - RNA, 22 nt, synthetic construct
  source 1..22: mol_type = other RNA
attgtttacagtagccaaaggt

SEQ ID NO: 123592 - RNA, 22 nt, synthetic construct
  source 1..22: mol_type = other RNA
attgtttcacttttctggtttt

SEQ ID NO: 123593 - RNA, 22 nt, synthetic construct
  source 1..22: mol_type = other RNA
attgtttcagtgtgtccacaca

SEQ ID NO: 123594 - RNA, 22 nt, synthetic construct
  source 1..22: mol_type = other RNA
attgtttgaggctgggagtaca

SEQ ID NO: 123595 - RNA, 22 nt, synthetic construct
  source 1..22: mol_type = other RNA
attgtttgttgggtttaactga

SEQ ID NO: 123596 - RNA, 22 nt, synthetic construct
  source 1..22: mol_type = other RNA
attgttttaggtagtcttgtca

SEQ ID NO: 123597 - RNA, 22 nt, synthetic construct
  source 1..22: mol_type = other RNA
attgttttcccttttgtagcta

SEQ ID NO: 123598 - RNA, 22 nt, synthetic construct
  source 1..22: mol_type = other RNA
attgttttgatttgcatttctc

SEQ ID NO: 123599 - RNA, 22 nt, synthetic construct
  source 1..22: mol_type = other RNA
attgttttgttgctattgttga

SEQ ID NO: 123600 - RNA, 22 nt, synthetic construct
  source 1..22: mol_type = other RNA
atttaaaagaaaatggccaaga

SEQ ID NO: 123601 - RNA, 22 nt, synthetic construct
  source 1..22: mol_type = other RNA
atttaaaagaacctctggaaag

SEQ ID NO: 123602 - RNA, 22 nt, synthetic construct
  source 1..22: mol_type = other RNA
atttaaaatctgattcagtggt

SEQ ID NO: 123603 - RNA, 22 nt, synthetic construct
  source 1..22: mol_type = other RNA
atttaaaattgcagagtgttca

SEQ ID NO: 123604 - RNA, 22 nt, synthetic construct
  source 1..22: mol_type = other RNA
atttaaacgtcagagcagcact

SEQ ID NO: 123605 - RNA, 22 nt, synthetic construct
  source 1..22: mol_type = other RNA
atttaaagacgttcagataaca

SEQ ID NO: 123606 - RNA, 22 nt, synthetic construct
  source 1..22: mol_type = other RNA
atttaaagtaggttgagactta

SEQ ID NO: 123607 - RNA, 22 nt, synthetic construct
  source 1..22: mol_type = other RNA
atttaaagttagtgaagcagag

SEQ ID NO: 123608 - RNA, 22 nt, synthetic construct
  source 1..22: mol_type = other RNA
atttaaatgccacataaatcac

SEQ ID NO: 123609 - RNA, 22 nt, synthetic construct
  source 1..22: mol_type = other RNA
atttaacaccatggcaggtttc

SEQ ID NO: 123610 - RNA, 22 nt, synthetic construct
  source 1..22: mol_type = other RNA
atttaacttctaatgcccatta

SEQ ID NO: 123611 - RNA, 22 nt, synthetic construct
  source 1..22: mol_type = other RNA
atttaagaagggaacactaaga

SEQ ID NO: 123612 - RNA, 22 nt, synthetic construct
  source 1..22: mol_type = other RNA
atttaagacacaaggaaggtca

SEQ ID NO: 123613 - RNA, 22 nt, synthetic construct
  source 1..22: mol_type = other RNA
atttaagagaggaagtgaccct

SEQ ID NO: 123614 - RNA, 22 nt, synthetic construct
  source 1..22: mol_type = other RNA
atttaaggaccaggtatggcga

SEQ ID NO: 123615 - RNA, 22 nt, synthetic construct
  source 1..22: mol_type = other RNA
atttaaggggtaaatggtttct

SEQ ID NO: 123616 - RNA, 22 nt, synthetic construct
  source 1..22: mol_type = other RNA
atttaagttactgattagaagg

SEQ ID NO: 123617 - RNA, 22 nt, synthetic construct
  source 1..22: mol_type = other RNA
atttaatactatgtatgtggct

SEQ ID NO: 123618 - RNA, 22 nt, synthetic construct
  source 1..22: mol_type = other RNA
atttaatagaggtctgtctttc

SEQ ID NO: 123619 - RNA, 22 nt, synthetic construct
  source 1..22: mol_type = other RNA
atttaatatgtgtacaatgggg

SEQ ID NO: 123620 - RNA, 22 nt, synthetic construct
  source 1..22: mol_type = other RNA
atttaatctctcttgaccttag

SEQ ID NO: 123621 - RNA, 22 nt, synthetic construct
  source 1..22: mol_type = other RNA
atttaatctgtcagcagttcag

SEQ ID NO: 123622 - RNA, 22 nt, synthetic construct
  source 1..22: mol_type = other RNA
atttaatgagtagtacttctga

SEQ ID NO: 123623 - RNA, 22 nt, synthetic construct
  source 1..22: mol_type = other RNA
atttaatgtgctgtccatttcc

SEQ ID NO: 123624 - RNA, 22 nt, synthetic construct
  source 1..22: mol_type = other RNA
atttaattttctgactctgtgc

SEQ ID NO: 123625 - RNA, 22 nt, synthetic construct
  source 1..22: mol_type = other RNA
atttaattttgagagtgcagta

SEQ ID NO: 123626 - RNA, 22 nt, synthetic construct
  source 1..22: mol_type = other RNA
atttacaaaaacacactgagct

SEQ ID NO: 123627 - RNA, 22 nt, synthetic construct
  source 1..22: mol_type = other RNA
atttacatagtgctcttctgat

SEQ ID NO: 123628 - RNA, 22 nt, synthetic construct
  source 1..22: mol_type = other RNA
atttaccatctgacatatgttt

SEQ ID NO: 123629 - RNA, 22 nt, synthetic construct
  source 1..22: mol_type = other RNA
atttacccctactttttgtcac

SEQ ID NO: 123630 - RNA, 22 nt, synthetic construct
  source 1..22: mol_type = other RNA
atttaccccttaaattccaaaa

SEQ ID NO: 123631 - RNA, 22 nt, synthetic construct
  source 1..22: mol_type = other RNA
atttactaaactgaacgaagtg

SEQ ID NO: 123632 - RNA, 22 nt, synthetic construct
  source 1..22: mol_type = other RNA
atttactaagaagtgaaactgc

SEQ ID NO: 123633 - RNA, 22 nt, synthetic construct
  source 1..22: mol_type = other RNA
atttactagatcaagcccttcc

SEQ ID NO: 123634 - RNA, 22 nt, synthetic construct
  source 1..22: mol_type = other RNA
atttactgaaatcctagcccca

SEQ ID NO: 123635 - RNA, 22 nt, synthetic construct
  source 1..22: mol_type = other RNA
atttactgcttgctgcactggc

SEQ ID NO: 123636 - RNA, 22 nt, synthetic construct
  source 1..22: mol_type = other RNA
atttacttctacagaatgttca

SEQ ID NO: 123637 - RNA, 22 nt, synthetic construct
  source 1..22: mol_type = other RNA
atttacttgtcatttctgctta

SEQ ID NO: 123638 - RNA, 22 nt, synthetic construct
  source 1..22: mol_type = other RNA
atttagaaatacctgcaggttg

SEQ ID NO: 123639 - RNA, 22 nt, synthetic construct
  source 1..22: mol_type = other RNA
atttagaattctctctcaactg

SEQ ID NO: 123640 - RNA, 22 nt, synthetic construct
  source 1..22: mol_type = other RNA
atttagagggatgaatgttgta

SEQ ID NO: 123641 - RNA, 22 nt, synthetic construct
  source 1..22: mol_type = other RNA
atttagagtttgcattacatga

SEQ ID NO: 123642 - RNA, 22 nt, synthetic construct
  source 1..22: mol_type = other RNA
atttagatctcatgttaagtgt

SEQ ID NO: 123643 - RNA, 22 nt, synthetic construct
  source 1..22: mol_type = other RNA
atttagatgagagtggcctaaa

SEQ ID NO: 123644 - RNA, 22 nt, synthetic construct
  source 1..22: mol_type = other RNA
atttagcccatgtctaaagtat

SEQ ID NO: 123645 - RNA, 22 nt, synthetic construct
  source 1..22: mol_type = other RNA
atttagccccctgaatacccct

SEQ ID NO: 123646 - RNA, 22 nt, synthetic construct
  source 1..22: mol_type = other RNA
atttagcgttcatccaaattat

SEQ ID NO: 123647 - RNA, 22 nt, synthetic construct
  source 1..22: mol_type = other RNA
atttagcttctgaattgagatg

SEQ ID NO: 123648 - RNA, 22 nt, synthetic construct
  source 1..22: mol_type = other RNA
atttaggccactctcatctaaa

SEQ ID NO: 123649 - RNA, 22 nt, synthetic construct
  source 1..22: mol_type = other RNA
atttaggccctctataattctg

SEQ ID NO: 123650 - RNA, 22 nt, synthetic construct
  source 1..22: mol_type = other RNA
atttagggagcatatatactct

SEQ ID NO: 123651 - RNA, 22 nt, synthetic construct
  source 1..22: mol_type = other RNA
atttagtaagggtaaacagaat

SEQ ID NO: 123652 - RNA, 22 nt, synthetic construct
  source 1..22: mol_type = other RNA
atttagtaagtgtgagcaaaaa

SEQ ID NO: 123653 - RNA, 22 nt, synthetic construct
  source 1..22: mol_type = other RNA
atttagtgaaatagttggtcag

SEQ ID NO: 123654 - RNA, 22 nt, synthetic construct
  source 1..22: mol_type = other RNA
atttagtgtattgtaccttgat

SEQ ID NO: 123655 - RNA, 22 nt, synthetic construct
  source 1..22: mol_type = other RNA
atttagtttcatctatgtcccc

SEQ ID NO: 123656 - RNA, 22 nt, synthetic construct
  source 1..22: mol_type = other RNA
atttataatccattgggtacat

SEQ ID NO: 123657 - RNA, 22 nt, synthetic construct
  source 1..22: mol_type = other RNA
atttatacaaataactccagct

SEQ ID NO: 123658 - RNA, 22 nt, synthetic construct
  source 1..22: mol_type = other RNA
atttatacaggtgcttacagac

SEQ ID NO: 123659 - RNA, 22 nt, synthetic construct
  source 1..22: mol_type = other RNA
atttatacagttggaactcttg

SEQ ID NO: 123660 - RNA, 22 nt, synthetic construct
  source 1..22: mol_type = other RNA
atttatacccaagtaaacaact

SEQ ID NO: 123661 - RNA, 22 nt, synthetic construct
  source 1..22: mol_type = other RNA
atttatagtgtttccttccaga

SEQ ID NO: 123662 - RNA, 22 nt, synthetic construct
  source 1..22: mol_type = other RNA
atttatattttggtagagatgg

SEQ ID NO: 123663 - RNA, 22 nt, synthetic construct
  source 1..22: mol_type = other RNA
atttatcaatagcagtgctgaa

SEQ ID NO: 123664 - RNA, 22 nt, synthetic construct
  source 1..22: mol_type = other RNA
atttatcagatcccaattactt

SEQ ID NO: 123665 - RNA, 22 nt, synthetic construct
  source 1..22: mol_type = other RNA
atttatcagcaccaaagattat

SEQ ID NO: 123666 - RNA, 22 nt, synthetic construct
  source 1..22: mol_type = other RNA
atttatcatgtcttcttggatt

SEQ ID NO: 123667 - RNA, 22 nt, synthetic construct
  source 1..22: mol_type = other RNA
atttatctccataagtccctaa

SEQ ID NO: 123668 - RNA, 22 nt, synthetic construct
  source 1..22: mol_type = other RNA
atttatctggatttttgtgtag

SEQ ID NO: 123669 - RNA, 22 nt, synthetic construct
  source 1..22: mol_type = other RNA
atttatgctgatgaactacaca

SEQ ID NO: 123670 - RNA, 22 nt, synthetic construct
  source 1..22: mol_type = other RNA
atttatggaattgccatatgta

SEQ ID NO: 123671 - RNA, 22 nt, synthetic construct
  source 1..22: mol_type = other RNA
atttatggcctaagatggaaag

SEQ ID NO: 123672 - RNA, 22 nt, synthetic construct
  source 1..22: mol_type = other RNA
atttatgtacatgacctatcta

SEQ ID NO: 123673 - RNA, 22 nt, synthetic construct
  source 1..22: mol_type = other RNA
atttatgttcatgaaccttcac

SEQ ID NO: 123674 - RNA, 22 nt, synthetic construct
  source 1..22: mol_type = other RNA
atttatgttgcacaaaagtgaa

SEQ ID NO: 123675 - RNA, 22 nt, synthetic construct
  source 1..22: mol_type = other RNA
atttattaaacctgttacatgg

SEQ ID NO: 123676 - RNA, 22 nt, synthetic construct
  source 1..22: mol_type = other RNA
atttattaaagtagaaggccct

SEQ ID NO: 123677 - RNA, 22 nt, synthetic construct
  source 1..22: mol_type = other RNA
atttattagtagttaggtggtt

SEQ ID NO: 123678 - RNA, 22 nt, synthetic construct
  source 1..22: mol_type = other RNA
atttattcctctcttggaatgt

SEQ ID NO: 123679 - RNA, 22 nt, synthetic construct
  source 1..22: mol_type = other RNA
atttattgtcaaggtcatcctt

SEQ ID NO: 123680 - RNA, 22 nt, synthetic construct
  source 1..22: mol_type = other RNA
atttattgtttcacttttctgg

SEQ ID NO: 123681 - RNA, 22 nt, synthetic construct
  source 1..22: mol_type = other RNA
atttatttccttaagccatttc

SEQ ID NO: 123682 - RNA, 22 nt, synthetic construct
  source 1..22: mol_type = other RNA
atttatttctgggctctctatt

SEQ ID NO: 123683 - RNA, 22 nt, synthetic construct
  source 1..22: mol_type = other RNA
atttatttttacccgtggaaat

SEQ ID NO: 123684 - RNA, 22 nt, synthetic construct
  source 1..22: mol_type = other RNA
atttatttttgagacaggttgt

SEQ ID NO: 123685 - RNA, 22 nt, synthetic construct
  source 1..22: mol_type = other RNA
atttcaaaccaatgttctcttt

SEQ ID NO: 123686 - RNA, 22 nt, synthetic construct
  source 1..22: mol_type = other RNA
atttcaaagttaatagcctcct

SEQ ID NO: 123687 - RNA, 22 nt, synthetic construct
  source 1..22: mol_type = other RNA
atttcaagtaacactcagaagt

SEQ ID NO: 123688 - RNA, 22 nt, synthetic construct
  source 1..22: mol_type = other RNA
atttcaatctggaatgcatcgt

SEQ ID NO: 123689 - RNA, 22 nt, synthetic construct
  source 1..22: mol_type = other RNA
atttcactcttttaaggtttag

SEQ ID NO: 123690 - RNA, 22 nt, synthetic construct
  source 1..22: mol_type = other RNA
atttcacttacttgagccccag

SEQ ID NO: 123691 - RNA, 22 nt, synthetic construct
  source 1..22: mol_type = other RNA
atttcacttgattactttacag

SEQ ID NO: 123692 - RNA, 22 nt, synthetic construct
  source 1..22: mol_type = other RNA
atttcacttgtttcttttcact

SEQ ID NO: 123693 - RNA, 22 nt, synthetic construct
  source 1..22: mol_type = other RNA
atttcagaaagagaatagcaga

SEQ ID NO: 123694 - RNA, 22 nt, synthetic construct
  source 1..22: mol_type = other RNA
atttcagagagacctgaagact

SEQ ID NO: 123695 - RNA, 22 nt, synthetic construct
  source 1..22: mol_type = other RNA
atttcagatctctgacattggt

SEQ ID NO: 123696 - RNA, 22 nt, synthetic construct
  source 1..22: mol_type = other RNA
atttcagccaaagctggcatgt

SEQ ID NO: 123697 - RNA, 22 nt, synthetic construct
  source 1..22: mol_type = other RNA
atttcaggaatgcaaagtttcc

SEQ ID NO: 123698 - RNA, 22 nt, synthetic construct
  source 1..22: mol_type = other RNA
atttcagggagaattggtagtc

SEQ ID NO: 123699 - RNA, 22 nt, synthetic construct
  source 1..22: mol_type = other RNA
atttcaggtggtatttaatctg

SEQ ID NO: 123700 - RNA, 22 nt, synthetic construct
  source 1..22: mol_type = other RNA
atttcaggtgtgtaaacactgt

SEQ ID NO: 123701 - RNA, 22 nt, synthetic construct
  source 1..22: mol_type = other RNA
atttcaggttttcgaccaagtt

SEQ ID NO: 123702 - RNA, 22 nt, synthetic construct
  source 1..22: mol_type = other RNA
atttcatagcagaatggccctg

SEQ ID NO: 123703 - RNA, 22 nt, synthetic construct
  source 1..22: mol_type = other RNA
atttcataggcatctctccctt

SEQ ID NO: 123704 - RNA, 22 nt, synthetic construct
  source 1..22: mol_type = other RNA
atttcatcgtaaaaagccattt

SEQ ID NO: 123705 - RNA, 22 nt, synthetic construct
  source 1..22: mol_type = other RNA
atttcatgaacaattttctctc

SEQ ID NO: 123706 - RNA, 22 nt, synthetic construct
  source 1..22: mol_type = other RNA
atttcatgccatcctggatttg

SEQ ID NO: 123707 - RNA, 22 nt, synthetic construct
  source 1..22: mol_type = other RNA
atttcatgcctttcagcatagc

SEQ ID NO: 123708 - RNA, 22 nt, synthetic construct
  source 1..22: mol_type = other RNA
atttcattaggttgatggctgt

SEQ ID NO: 123709 - RNA, 22 nt, synthetic construct
  source 1..22: mol_type = other RNA
atttcatttactgaaatcctag

SEQ ID NO: 123710 - RNA, 22 nt, synthetic construct
  source 1..22: mol_type = other RNA
atttccaaagatcatgggtttt

SEQ ID NO: 123711 - RNA, 22 nt, synthetic construct
  source 1..22: mol_type = other RNA
atttccaagaaccctttgttat

SEQ ID NO: 123712 - RNA, 22 nt, synthetic construct
  source 1..22: mol_type = other RNA
atttccaagattgaaaatggtt

SEQ ID NO: 123713 - RNA, 22 nt, synthetic construct
  source 1..22: mol_type = other RNA
atttccacccatgaagccagca

SEQ ID NO: 123714 - RNA, 22 nt, synthetic construct
  source 1..22: mol_type = other RNA
atttccacgggtaaaaataaat

SEQ ID NO: 123715 - RNA, 22 nt, synthetic construct
  source 1..22: mol_type = other RNA
atttccagcattttataggcat

SEQ ID NO: 123716 - RNA, 22 nt, synthetic construct
  source 1..22: mol_type = other RNA
atttccagcctttaatttagcg

SEQ ID NO: 123717 - RNA, 22 nt, synthetic construct
  source 1..22: mol_type = other RNA
atttccagggggtatggagaca

SEQ ID NO: 123718 - RNA, 22 nt, synthetic construct
  source 1..22: mol_type = other RNA
atttccaggtcattacatattt

SEQ ID NO: 123719 - RNA, 22 nt, synthetic construct
  source 1..22: mol_type = other RNA
atttccagtactttttcatcca

SEQ ID NO: 123720 - RNA, 22 nt, synthetic construct
  source 1..22: mol_type = other RNA
atttccagtgtttggtttttat

SEQ ID NO: 123721 - RNA, 22 nt, synthetic construct
  source 1..22: mol_type = other RNA
atttcccatttgatttcttctt

SEQ ID NO: 123722 - RNA, 22 nt, synthetic construct
  source 1..22: mol_type = other RNA
atttccccattagagtaagcaa

SEQ ID NO: 123723 - RNA, 22 nt, synthetic construct
  source 1..22: mol_type = other RNA
atttccctcagaatttgaggtc

SEQ ID NO: 123724 - RNA, 22 nt, synthetic construct
  source 1..22: mol_type = other RNA
atttccctgcatacactcattt

SEQ ID NO: 123725 - RNA, 22 nt, synthetic construct
  source 1..22: mol_type = other RNA
atttccctgcttcatctggacc

SEQ ID NO: 123726 - RNA, 22 nt, synthetic construct
  source 1..22: mol_type = other RNA
atttcccttttggatgcagatt

SEQ ID NO: 123727 - RNA, 22 nt, synthetic construct
  source 1..22: mol_type = other RNA
atttccgatgataccttcttga

SEQ ID NO: 123728 - RNA, 22 nt, synthetic construct
  source 1..22: mol_type = other RNA
atttccgtatccagtggttttt

SEQ ID NO: 123729 - RNA, 22 nt, synthetic construct
  source 1..22: mol_type = other RNA
atttccgttgctgcatagtact

SEQ ID NO: 123730 - RNA, 22 nt, synthetic construct
  source 1..22: mol_type = other RNA
atttccttaagcacagactgtg

SEQ ID NO: 123731 - RNA, 22 nt, synthetic construct
  source 1..22: mol_type = other RNA
atttccttaagccatttcaggt

SEQ ID NO: 123732 - RNA, 22 nt, synthetic construct
  source 1..22: mol_type = other RNA
atttccttatagtattacctcc

SEQ ID NO: 123733 - RNA, 22 nt, synthetic construct
  source 1..22: mol_type = other RNA
atttccttccagtttatatgcc

SEQ ID NO: 123734 - RNA, 22 nt, synthetic construct
  source 1..22: mol_type = other RNA
atttcctttcagtcggttcttc

SEQ ID NO: 123735 - RNA, 22 nt, synthetic construct
  source 1..22: mol_type = other RNA
atttcgaattatgctaacatga

SEQ ID NO: 123736 - RNA, 22 nt, synthetic construct
  source 1..22: mol_type = other RNA
atttcgcaaagcaacatgctaa

SEQ ID NO: 123737 - RNA, 22 nt, synthetic construct
  source 1..22: mol_type = other RNA
atttcgcctagataagaaaatg

SEQ ID NO: 123738 - RNA, 22 nt, synthetic construct
  source 1..22: mol_type = other RNA
atttcgccttctcagaaggaca

SEQ ID NO: 123739 - RNA, 22 nt, synthetic construct
  source 1..22: mol_type = other RNA
atttcggctctgtgctgagatg

SEQ ID NO: 123740 - RNA, 22 nt, synthetic construct
  source 1..22: mol_type = other RNA
atttctaaaaacgtgcaaacta

SEQ ID NO: 123741 - RNA, 22 nt, synthetic construct
  source 1..22: mol_type = other RNA
atttctaaatcaacagtgtact

SEQ ID NO: 123742 - RNA, 22 nt, synthetic construct
  source 1..22: mol_type = other RNA
atttctaagccatgtttctcct

SEQ ID NO: 123743 - RNA, 22 nt, synthetic construct
  source 1..22: mol_type = other RNA
atttctaaggttctgctatgct

SEQ ID NO: 123744 - RNA, 22 nt, synthetic construct
  source 1..22: mol_type = other RNA
atttctaatttccaagaaccct

SEQ ID NO: 123745 - RNA, 22 nt, synthetic construct
  source 1..22: mol_type = other RNA
atttctactggggtcttagttc

SEQ ID NO: 123746 - RNA, 22 nt, synthetic construct
  source 1..22: mol_type = other RNA
atttctaggccctaaccccaga

SEQ ID NO: 123747 - RNA, 22 nt, synthetic construct
  source 1..22: mol_type = other RNA
atttctatagtcattccgctaa

SEQ ID NO: 123748 - RNA, 22 nt, synthetic construct
  source 1..22: mol_type = other RNA
atttctcaatcccttccccacc

SEQ ID NO: 123749 - RNA, 22 nt, synthetic construct
  source 1..22: mol_type = other RNA
atttctcatactttgtcaggca

SEQ ID NO: 123750 - RNA, 22 nt, synthetic construct
  source 1..22: mol_type = other RNA
atttctcatctgtcactttcct

SEQ ID NO: 123751 - RNA, 22 nt, synthetic construct
  source 1..22: mol_type = other RNA
atttctcatgtatgttttagcc

SEQ ID NO: 123752 - RNA, 22 nt, synthetic construct
  source 1..22: mol_type = other RNA
atttctccacatccttgccaac

SEQ ID NO: 123753 - RNA, 22 nt, synthetic construct
  source 1..22: mol_type = other RNA
atttctcggccgggcgcggtgc

SEQ ID NO: 123754 - RNA, 22 nt, synthetic construct
  source 1..22: mol_type = other RNA
atttctctaatagctagtgatg

SEQ ID NO: 123755 - RNA, 22 nt, synthetic construct
  source 1..22: mol_type = other RNA
atttctctttaaagctgaactc

SEQ ID NO: 123756 - RNA, 22 nt, synthetic construct
  source 1..22: mol_type = other RNA
atttctgagagtattgccaggt

SEQ ID NO: 123757 - RNA, 22 nt, synthetic construct
  source 1..22: mol_type = other RNA
atttctgcatagagatcttgtg

SEQ ID NO: 123758 - RNA, 22 nt, synthetic construct
  source 1..22: mol_type = other RNA
atttctgcttagtcttctcaga

SEQ ID NO: 123759 - RNA, 22 nt, synthetic construct
  source 1..22: mol_type = other RNA
atttctgcttgaatgtgcctac

SEQ ID NO: 123760 - RNA, 22 nt, synthetic construct
  source 1..22: mol_type = other RNA
atttctgggctctctattccaa

SEQ ID NO: 123761 - RNA, 22 nt, synthetic construct
  source 1..22: mol_type = other RNA
atttctgtaaacatgaacaagt

SEQ ID NO: 123762 - RNA, 22 nt, synthetic construct
  source 1..22: mol_type = other RNA
atttctgtatcttttcagtcca

SEQ ID NO: 123763 - RNA, 22 nt, synthetic construct
  source 1..22: mol_type = other RNA
atttctgtcatctgaatcaata

SEQ ID NO: 123764 - RNA, 22 nt, synthetic construct
  source 1..22: mol_type = other RNA
atttctgtccttggattgctaa

SEQ ID NO: 123765 - RNA, 22 nt, synthetic construct
  source 1..22: mol_type = other RNA
atttctgttagatggtgctgat

SEQ ID NO: 123766 - RNA, 22 nt, synthetic construct
  source 1..22: mol_type = other RNA
atttctgttgcttaagtcactc

SEQ ID NO: 123767 - RNA, 22 nt, synthetic construct
  source 1..22: mol_type = other RNA
atttcttacacattaggctctg

SEQ ID NO: 123768 - RNA, 22 nt, synthetic construct
  source 1..22: mol_type = other RNA
atttcttctagtcacatttgct

SEQ ID NO: 123769 - RNA, 22 nt, synthetic construct
  source 1..22: mol_type = other RNA
atttcttctccctcttcgctct

SEQ ID NO: 123770 - RNA, 22 nt, synthetic construct
  source 1..22: mol_type = other RNA
atttcttctttggctcaatggt

SEQ ID NO: 123771 - RNA, 22 nt, synthetic construct
  source 1..22: mol_type = other RNA
atttcttgacctcagtggtagt

SEQ ID NO: 123772 - RNA, 22 nt, synthetic construct
  source 1..22: mol_type = other RNA
atttctttaaaaccagagcgga

SEQ ID NO: 123773 - RNA, 22 nt, synthetic construct
  source 1..22: mol_type = other RNA
atttctttccattcaatccttg

SEQ ID NO: 123774 - RNA, 22 nt, synthetic construct
  source 1..22: mol_type = other RNA
atttctttggctgttagccttg

SEQ ID NO: 123775 - RNA, 22 nt, synthetic construct
  source 1..22: mol_type = other RNA
atttctttttactcatgtctac

SEQ ID NO: 123776 - RNA, 22 nt, synthetic construct
  source 1..22: mol_type = other RNA
atttctttttcttgctttgctg

SEQ ID NO: 123777 - RNA, 22 nt, synthetic construct
  source 1..22: mol_type = other RNA
atttgaaaaaggaaagtaactg

SEQ ID NO: 123778 - RNA, 22 nt, synthetic construct
  source 1..22: mol_type = other RNA
atttgaaagaaagaaggccatt

SEQ ID NO: 123779 - RNA, 22 nt, synthetic construct
  source 1..22: mol_type = other RNA
atttgaactcactggccagcat

SEQ ID NO: 123780 - RNA, 22 nt, synthetic construct
  source 1..22: mol_type = other RNA
atttgaactttccagaagtaac

SEQ ID NO: 123781 - RNA, 22 nt, synthetic construct
  source 1..22: mol_type = other RNA
atttgaataaggtctgtaagtc

SEQ ID NO: 123782 - RNA, 22 nt, synthetic construct
  source 1..22: mol_type = other RNA
atttgaatgatgcgaaagaaaa

SEQ ID NO: 123783 - RNA, 22 nt, synthetic construct
  source 1..22: mol_type = other RNA
atttgacatgacaggtgagtgg

SEQ ID NO: 123784 - RNA, 22 nt, synthetic construct
  source 1..22: mol_type = other RNA
atttgaccatgggacaagtggg

SEQ ID NO: 123785 - RNA, 22 nt, synthetic construct
  source 1..22: mol_type = other RNA
atttgaccttccttgtgtctta

SEQ ID NO: 123786 - RNA, 22 nt, synthetic construct
  source 1..22: mol_type = other RNA
atttgagaatttcaggtgtgta

SEQ ID NO: 123787 - RNA, 22 nt, synthetic construct
  source 1..22: mol_type = other RNA
atttgagagtaagttgcatacg

SEQ ID NO: 123788 - RNA, 22 nt, synthetic construct
  source 1..22: mol_type = other RNA
atttgagcccaggaggttgaag

SEQ ID NO: 123789 - RNA, 22 nt, synthetic construct
  source 1..22: mol_type = other RNA
atttgaggcattagtgaattca

SEQ ID NO: 123790 - RNA, 22 nt, synthetic construct
  source 1..22: mol_type = other RNA
atttgaggccctattcaaccta

SEQ ID NO: 123791 - RNA, 22 nt, synthetic construct
  source 1..22: mol_type = other RNA
atttgagggtgctgatcaggaa

SEQ ID NO: 123792 - RNA, 22 nt, synthetic construct
  source 1..22: mol_type = other RNA
atttgagggttagaagacaata

SEQ ID NO: 123793 - RNA, 22 nt, synthetic construct
  source 1..22: mol_type = other RNA
atttgaggtagcacaactagta

SEQ ID NO: 123794 - RNA, 22 nt, synthetic construct
  source 1..22: mol_type = other RNA
atttgaggtctaggctaatgtg

SEQ ID NO: 123795 - RNA, 22 nt, synthetic construct
  source 1..22: mol_type = other RNA
atttgaggtcttctagctttca

SEQ ID NO: 123796 - RNA, 22 nt, synthetic construct
  source 1..22: mol_type = other RNA
atttgagtcttgctctcttgcc

SEQ ID NO: 123797 - RNA, 22 nt, synthetic construct
  source 1..22: mol_type = other RNA
atttgatcctggaatagtagct

SEQ ID NO: 123798 - RNA, 22 nt, synthetic construct
  source 1..22: mol_type = other RNA
atttgattatgttagatatccc

SEQ ID NO: 123799 - RNA, 22 nt, synthetic construct
  source 1..22: mol_type = other RNA
atttgattgccagttttctgga

SEQ ID NO: 123800 - RNA, 22 nt, synthetic construct
  source 1..22: mol_type = other RNA
atttgattgggcattaattgag

SEQ ID NO: 123801 - RNA, 22 nt, synthetic construct
  source 1..22: mol_type = other RNA
atttgattgttagccacagcgt

SEQ ID NO: 123802 - RNA, 22 nt, synthetic construct
  source 1..22: mol_type = other RNA
atttgatttcttctttggctca

SEQ ID NO: 123803 - RNA, 22 nt, synthetic construct
  source 1..22: mol_type = other RNA
atttgcagagcaaactcagatc

SEQ ID NO: 123804 - RNA, 22 nt, synthetic construct
  source 1..22: mol_type = other RNA
atttgcagtagtattgaactgt

SEQ ID NO: 123805 - RNA, 22 nt, synthetic construct
  source 1..22: mol_type = other RNA
atttgcatttctctaatagcta

SEQ ID NO: 123806 - RNA, 22 nt, synthetic construct
  source 1..22: mol_type = other RNA
atttgccaaaatgattttcaca

SEQ ID NO: 123807 - RNA, 22 nt, synthetic construct
  source 1..22: mol_type = other RNA
atttgccaatcaataattctgt

SEQ ID NO: 123808 - RNA, 22 nt, synthetic construct
  source 1..22: mol_type = other RNA
atttgccacattttaccaaaac

SEQ ID NO: 123809 - RNA, 22 nt, synthetic construct
  source 1..22: mol_type = other RNA
atttgcctattctggggctcaa

SEQ ID NO: 123810 - RNA, 22 nt, synthetic construct
  source 1..22: mol_type = other RNA
atttgcggcttgattagcttcc

SEQ ID NO: 123811 - RNA, 22 nt, synthetic construct
  source 1..22: mol_type = other RNA
atttgctggctcagtctgtttg

SEQ ID NO: 123812 - RNA, 22 nt, synthetic construct
  source 1..22: mol_type = other RNA
atttgctgtataacattttctc

SEQ ID NO: 123813 - RNA, 22 nt, synthetic construct
  source 1..22: mol_type = other RNA
atttgctgtcaggcaagggact

SEQ ID NO: 123814 - RNA, 22 nt, synthetic construct
  source 1..22: mol_type = other RNA
atttgcttaggctgttattaga

SEQ ID NO: 123815 - RNA, 22 nt, synthetic construct
  source 1..22: mol_type = other RNA
atttgctttactactgcatttt

SEQ ID NO: 123816 - RNA, 22 nt, synthetic construct
  source 1..22: mol_type = other RNA
atttgcttttcctggaaaactt

SEQ ID NO: 123817 - RNA, 22 nt, synthetic construct
  source 1..22: mol_type = other RNA
atttggaaagggtagagcactt

SEQ ID NO: 123818 - RNA, 22 nt, synthetic construct
  source 1..22: mol_type = other RNA
atttggaaatatggtcactgct

SEQ ID NO: 123819 - RNA, 22 nt, synthetic construct
  source 1..22: mol_type = other RNA
atttggaagagagaaggctgcc

SEQ ID NO: 123820 - RNA, 22 nt, synthetic construct
  source 1..22: mol_type = other RNA
atttggaatagagagcccagaa

SEQ ID NO: 123821 - RNA, 22 nt, synthetic construct
  source 1..22: mol_type = other RNA
atttggaattaaaatgttgcca

SEQ ID NO: 123822 - RNA, 22 nt, synthetic construct
  source 1..22: mol_type = other RNA
atttggatgaacgctaaattaa

SEQ ID NO: 123823 - RNA, 22 nt, synthetic construct
  source 1..22: mol_type = other RNA
atttggatttgagtaactaaac

SEQ ID NO: 123824 - RNA, 22 nt, synthetic construct
  source 1..22: mol_type = other RNA
atttggcaaaaaatgcagtagt

SEQ ID NO: 123825 - RNA, 22 nt, synthetic construct
  source 1..22: mol_type = other RNA
atttggccagaatccctttcgc

SEQ ID NO: 123826 - RNA, 22 nt, synthetic construct
  source 1..22: mol_type = other RNA
atttggcccagccatcccatta

SEQ ID NO: 123827 - RNA, 22 nt, synthetic construct
  source 1..22: mol_type = other RNA
atttggcctctgcggcggctga

SEQ ID NO: 123828 - RNA, 22 nt, synthetic construct
  source 1..22: mol_type = other RNA
atttggctgttaccatttgacc

SEQ ID NO: 123829 - RNA, 22 nt, synthetic construct
  source 1..22: mol_type = other RNA
atttggcttggggaacagttta

SEQ ID NO: 123830 - RNA, 22 nt, synthetic construct
  source 1..22: mol_type = other RNA
atttgggaaggatggccagtca

SEQ ID NO: 123831 - RNA, 22 nt, synthetic construct
  source 1..22: mol_type = other RNA
atttgggaatgtggtcacactt

SEQ ID NO: 123832 - RNA, 22 nt, synthetic construct
  source 1..22: mol_type = other RNA
atttgggacagcctagttttgt

SEQ ID NO: 123833 - RNA, 22 nt, synthetic construct
  source 1..22: mol_type = other RNA
atttgggactgagacagtattg

SEQ ID NO: 123834 - RNA, 22 nt, synthetic construct
  source 1..22: mol_type = other RNA
atttgggatatagctacaatga

SEQ ID NO: 123835 - RNA, 22 nt, synthetic construct
  source 1..22: mol_type = other RNA
atttggggattctgctactagc

SEQ ID NO: 123836 - RNA, 22 nt, synthetic construct
  source 1..22: mol_type = other RNA
atttggggctaggatttcagta

SEQ ID NO: 123837 - RNA, 22 nt, synthetic construct
  source 1..22: mol_type = other RNA
atttgggtttgagtttccagaa

SEQ ID NO: 123838 - RNA, 22 nt, synthetic construct
  source 1..22: mol_type = other RNA
atttggtattcttatccctacc

SEQ ID NO: 123839 - RNA, 22 nt, synthetic construct
  source 1..22: mol_type = other RNA
atttggtctcattcactagaca

SEQ ID NO: 123840 - RNA, 22 nt, synthetic construct
  source 1..22: mol_type = other RNA
atttggtgtgtgcaaaggatta

SEQ ID NO: 123841 - RNA, 22 nt, synthetic construct
  source 1..22: mol_type = other RNA
atttggttatgcgaatttactt

SEQ ID NO: 123842 - RNA, 22 nt, synthetic construct
  source 1..22: mol_type = other RNA
atttggttttactactgtactg

SEQ ID NO: 123843 - RNA, 22 nt, synthetic construct
  source 1..22: mol_type = other RNA
atttgtaacatgttagattagg

SEQ ID NO: 123844 - RNA, 22 nt, synthetic construct
  source 1..22: mol_type = other RNA
atttgtaattcatcctactagt

SEQ ID NO: 123845 - RNA, 22 nt, synthetic construct
  source 1..22: mol_type = other RNA
atttgtcaacttttagtaggtc

SEQ ID NO: 123846 - RNA, 22 nt, synthetic construct
  source 1..22: mol_type = other RNA
atttgtccatctggattatagt

SEQ ID NO: 123847 - RNA, 22 nt, synthetic construct
  source 1..22: mol_type = other RNA
atttgtgaaccttgaagtactt

SEQ ID NO: 123848 - RNA, 22 nt, synthetic construct
  source 1..22: mol_type = other RNA
atttgtgcatactgtgatgatt

SEQ ID NO: 123849 - RNA, 22 nt, synthetic construct
  source 1..22: mol_type = other RNA
atttgtggcatctttgttacag

SEQ ID NO: 123850 - RNA, 22 nt, synthetic construct
  source 1..22: mol_type = other RNA
atttgttactgatctgctcaag

SEQ ID NO: 123851 - RNA, 22 nt, synthetic construct
  source 1..22: mol_type = other RNA
atttgttcaagcgctgaagtac

SEQ ID NO: 123852 - RNA, 22 nt, synthetic construct
  source 1..22: mol_type = other RNA
atttgttcagaaatagactccc

SEQ ID NO: 123853 - RNA, 22 nt, synthetic construct
  source 1..22: mol_type = other RNA
atttgttctaatttgtgaacct

SEQ ID NO: 123854 - RNA, 22 nt, synthetic construct
  source 1..22: mol_type = other RNA
atttgttctgtcacggtgccct

SEQ ID NO: 123855 - RNA, 22 nt, synthetic construct
  source 1..22: mol_type = other RNA
atttgttgcatccccattcaat

SEQ ID NO: 123856 - RNA, 22 nt, synthetic construct
  source 1..22: mol_type = other RNA
atttgtttagtagctgtcttta

SEQ ID NO: 123857 - RNA, 22 nt, synthetic construct
  source 1..22: mol_type = other RNA
atttgtttgaattaagcaccac

SEQ ID NO: 123858 - RNA, 22 nt, synthetic construct
  source 1..22: mol_type = other RNA
atttgttttaccatctaaagcc

SEQ ID NO: 123859 - RNA, 22 nt, synthetic construct
  source 1..22: mol_type = other RNA
atttgttttccaagccttaaaa

SEQ ID NO: 123860 - RNA, 22 nt, synthetic construct
  source 1..22: mol_type = other RNA
atttgttttgtgtttgtgacca

SEQ ID NO: 123861 - RNA, 22 nt, synthetic construct
  source 1..22: mol_type = other RNA
attttaaaagtcagctaggcgt

SEQ ID NO: 123862 - RNA, 22 nt, synthetic construct
  source 1..22: mol_type = other RNA
attttaaagggataatgctatc

SEQ ID NO: 123863 - RNA, 22 nt, synthetic construct
  source 1..22: mol_type = other RNA
attttaaatcagcaccatctaa

SEQ ID NO: 123864 - RNA, 22 nt, synthetic construct
  source 1..22: mol_type = other RNA
attttaagattctctttaggga

SEQ ID NO: 123865 - RNA, 22 nt, synthetic construct
  source 1..22: mol_type = other RNA
attttaagcctagagattaggc

SEQ ID NO: 123866 - RNA, 22 nt, synthetic construct
  source 1..22: mol_type = other RNA
attttaagtgcacaatgcagta

SEQ ID NO: 123867 - RNA, 22 nt, synthetic construct
  source 1..22: mol_type = other RNA
attttaagttctagggaacatg

SEQ ID NO: 123868 - RNA, 22 nt, synthetic construct
  source 1..22: mol_type = other RNA
attttaataagcttcgaagcaa

SEQ ID NO: 123869 - RNA, 22 nt, synthetic construct
  source 1..22: mol_type = other RNA
attttaatcgaatcctcacaac

SEQ ID NO: 123870 - RNA, 22 nt, synthetic construct
  source 1..22: mol_type = other RNA
attttaatctgtcctgaatact

SEQ ID NO: 123871 - RNA, 22 nt, synthetic construct
  source 1..22: mol_type = other RNA
attttacaccatgcaggttcat

SEQ ID NO: 123872 - RNA, 22 nt, synthetic construct
  source 1..22: mol_type = other RNA
attttaccaaaacagcttcttg

SEQ ID NO: 123873 - RNA, 22 nt, synthetic construct
  source 1..22: mol_type = other RNA
attttaccaaggctaagttgag

SEQ ID NO: 123874 - RNA, 22 nt, synthetic construct
  source 1..22: mol_type = other RNA
attttaccctcattttataagg

SEQ ID NO: 123875 - RNA, 22 nt, synthetic construct
  source 1..22: mol_type = other RNA
attttactgatcttttctgaca

SEQ ID NO: 123876 - RNA, 22 nt, synthetic construct
  source 1..22: mol_type = other RNA
attttactgctatacaaccgga

SEQ ID NO: 123877 - RNA, 22 nt, synthetic construct
  source 1..22: mol_type = other RNA
attttacttactagttgtgcta

SEQ ID NO: 123878 - RNA, 22 nt, synthetic construct
  source 1..22: mol_type = other RNA
attttagaaggtaagaatgtca

SEQ ID NO: 123879 - RNA, 22 nt, synthetic construct
  source 1..22: mol_type = other RNA
attttagatcaagtcctttcca

SEQ ID NO: 123880 - RNA, 22 nt, synthetic construct
  source 1..22: mol_type = other RNA
attttagctggggcagcaaagc

SEQ ID NO: 123881 - RNA, 22 nt, synthetic construct
  source 1..22: mol_type = other RNA
attttaggacaaggaaaggatg

SEQ ID NO: 123882 - RNA, 22 nt, synthetic construct
  source 1..22: mol_type = other RNA
attttaggctctgtggtttctt

SEQ ID NO: 123883 - RNA, 22 nt, synthetic construct
  source 1..22: mol_type = other RNA
attttaggtcatttttcacttc

SEQ ID NO: 123884 - RNA, 22 nt, synthetic construct
  source 1..22: mol_type = other RNA
attttagtaattctccactttc

SEQ ID NO: 123885 - RNA, 22 nt, synthetic construct
  source 1..22: mol_type = other RNA
attttataatgggcaatcagaa

SEQ ID NO: 123886 - RNA, 22 nt, synthetic construct
  source 1..22: mol_type = other RNA
attttatgctttgtctctggaa

SEQ ID NO: 123887 - RNA, 22 nt, synthetic construct
  source 1..22: mol_type = other RNA
attttatggttttttcccccct

SEQ ID NO: 123888 - RNA, 22 nt, synthetic construct
  source 1..22: mol_type = other RNA
attttatgtacacgtcttgtca

SEQ ID NO: 123889 - RNA, 22 nt, synthetic construct
  source 1..22: mol_type = other RNA
attttattaatttggcttgggg

SEQ ID NO: 123890 - RNA, 22 nt, synthetic construct
  source 1..22: mol_type = other RNA
attttattaggtgcacacaaca

SEQ ID NO: 123891 - RNA, 22 nt, synthetic construct
  source 1..22: mol_type = other RNA
attttattgataagcacatggt

SEQ ID NO: 123892 - RNA, 22 nt, synthetic construct
  source 1..22: mol_type = other RNA
attttcaaggcttgtgcatcag

SEQ ID NO: 123893 - RNA, 22 nt, synthetic construct
  source 1..22: mol_type = other RNA
attttcaagggtgttttccccc

SEQ ID NO: 123894 - RNA, 22 nt, synthetic construct
  source 1..22: mol_type = other RNA
attttcaaggtagaagtacaaa

SEQ ID NO: 123895 - RNA, 22 nt, synthetic construct
  source 1..22: mol_type = other RNA
attttcacagggcagggagaga

SEQ ID NO: 123896 - RNA, 22 nt, synthetic construct
  source 1..22: mol_type = other RNA
attttcaggactcatgagagct

SEQ ID NO: 123897 - RNA, 22 nt, synthetic construct
  source 1..22: mol_type = other RNA
attttcataacaaagctctgat

SEQ ID NO: 123898 - RNA, 22 nt, synthetic construct
  source 1..22: mol_type = other RNA
attttcatagcagcattgttta

SEQ ID NO: 123899 - RNA, 22 nt, synthetic construct
  source 1..22: mol_type = other RNA
attttcatggttttaatgggca

SEQ ID NO: 123900 - RNA, 22 nt, synthetic construct
  source 1..22: mol_type = other RNA
attttcattacatttgcttagg

SEQ ID NO: 123901 - RNA, 22 nt, synthetic construct
  source 1..22: mol_type = other RNA
attttcattctacctggagcct

SEQ ID NO: 123902 - RNA, 22 nt, synthetic construct
  source 1..22: mol_type = other RNA
attttccattcacacacccttt

SEQ ID NO: 123903 - RNA, 22 nt, synthetic construct
  source 1..22: mol_type = other RNA
attttccattcatgtaatgcaa

SEQ ID NO: 123904 - RNA, 22 nt, synthetic construct
  source 1..22: mol_type = other RNA
attttcccaaagatagactctt

SEQ ID NO: 123905 - RNA, 22 nt, synthetic construct
  source 1..22: mol_type = other RNA
attttcccaatctctggtattc

SEQ ID NO: 123906 - RNA, 22 nt, synthetic construct
  source 1..22: mol_type = other RNA
attttcccccaattaaactata

SEQ ID NO: 123907 - RNA, 22 nt, synthetic construct
  source 1..22: mol_type = other RNA
attttccctcctttttatcacc

SEQ ID NO: 123908 - RNA, 22 nt, synthetic construct
  source 1..22: mol_type = other RNA
attttccggttgtatagcagta

SEQ ID NO: 123909 - RNA, 22 nt, synthetic construct
  source 1..22: mol_type = other RNA
attttcctaaaactccccatgc

SEQ ID NO: 123910 - RNA, 22 nt, synthetic construct
  source 1..22: mol_type = other RNA
attttcctaaccactgttatct

SEQ ID NO: 123911 - RNA, 22 nt, synthetic construct
  source 1..22: mol_type = other RNA
attttcctccttctgctcactt

SEQ ID NO: 123912 - RNA, 22 nt, synthetic construct
  source 1..22: mol_type = other RNA
attttccttatccattcatctc

SEQ ID NO: 123913 - RNA, 22 nt, synthetic construct
  source 1..22: mol_type = other RNA
attttcgtgtactgaaaccagt

SEQ ID NO: 123914 - RNA, 22 nt, synthetic construct
  source 1..22: mol_type = other RNA
attttctaaattgaacagccta

SEQ ID NO: 123915 - RNA, 22 nt, synthetic construct
  source 1..22: mol_type = other RNA
attttctaagagccaaagacat

SEQ ID NO: 123916 - RNA, 22 nt, synthetic construct
  source 1..22: mol_type = other RNA
attttctaggaaccatattaga

SEQ ID NO: 123917 - RNA, 22 nt, synthetic construct
  source 1..22: mol_type = other RNA
attttctatagtggctgcacca

SEQ ID NO: 123918 - RNA, 22 nt, synthetic construct
  source 1..22: mol_type = other RNA
attttctattcattaccaggct

SEQ ID NO: 123919 - RNA, 22 nt, synthetic construct
  source 1..22: mol_type = other RNA
attttctcccaaggttgcctgt

SEQ ID NO: 123920 - RNA, 22 nt, synthetic construct
  source 1..22: mol_type = other RNA
attttctctcatgttgggtaaa

SEQ ID NO: 123921 - RNA, 22 nt, synthetic construct
  source 1..22: mol_type = other RNA
attttctgactctgtgcttgtg

SEQ ID NO: 123922 - RNA, 22 nt, synthetic construct
  source 1..22: mol_type = other RNA
attttctgagcaactactattt

SEQ ID NO: 123923 - RNA, 22 nt, synthetic construct
  source 1..22: mol_type = other RNA
attttctgcatttggtttgcaa

SEQ ID NO: 123924 - RNA, 22 nt, synthetic construct
  source 1..22: mol_type = other RNA
attttctgcttctcaataagga

SEQ ID NO: 123925 - RNA, 22 nt, synthetic construct
  source 1..22: mol_type = other RNA
attttctgtcattctgcagttt

SEQ ID NO: 123926 - RNA, 22 nt, synthetic construct
  source 1..22: mol_type = other RNA
attttcttaccctttactcaga

SEQ ID NO: 123927 - RNA, 22 nt, synthetic construct
  source 1..22: mol_type = other RNA
attttcttatctaggcgaaata

SEQ ID NO: 123928 - RNA, 22 nt, synthetic construct
  source 1..22: mol_type = other RNA
attttctttgagtagttcatgt

SEQ ID NO: 123929 - RNA, 22 nt, synthetic construct
  source 1..22: mol_type = other RNA
attttgaaaaaacttcccttag

SEQ ID NO: 123930 - RNA, 22 nt, synthetic construct
  source 1..22: mol_type = other RNA
attttgaaaaacagatcttggc

SEQ ID NO: 123931 - RNA, 22 nt, synthetic construct
  source 1..22: mol_type = other RNA
attttgaagaaagttttgcagt

SEQ ID NO: 123932 - RNA, 22 nt, synthetic construct
  source 1..22: mol_type = other RNA
attttgaatcatgggagccaaa

SEQ ID NO: 123933 - RNA, 22 nt, synthetic construct
  source 1..22: mol_type = other RNA
attttgagacctcaggcagtct

SEQ ID NO: 123934 - RNA, 22 nt, synthetic construct
  source 1..22: mol_type = other RNA
attttgagagtgcagtatgtag

SEQ ID NO: 123935 - RNA, 22 nt, synthetic construct
  source 1..22: mol_type = other RNA
attttgaggcagagagatggtg

SEQ ID NO: 123936 - RNA, 22 nt, synthetic construct
  source 1..22: mol_type = other RNA
attttgaggcttttggattttc

SEQ ID NO: 123937 - RNA, 22 nt, synthetic construct
  source 1..22: mol_type = other RNA
attttgagttattgcataggga

SEQ ID NO: 123938 - RNA, 22 nt, synthetic construct
  source 1..22: mol_type = other RNA
attttgccagctaacttttaac

SEQ ID NO: 123939 - RNA, 22 nt, synthetic construct
  source 1..22: mol_type = other RNA
attttgctgccaagtcagcact

SEQ ID NO: 123940 - RNA, 22 nt, synthetic construct
  source 1..22: mol_type = other RNA
attttgcttaaagttggtcctg

SEQ ID NO: 123941 - RNA, 22 nt, synthetic construct
  source 1..22: mol_type = other RNA
attttgcttttgctttgggtct

SEQ ID NO: 123942 - RNA, 22 nt, synthetic construct
  source 1..22: mol_type = other RNA
attttggaagactatgagaagg

SEQ ID NO: 123943 - RNA, 22 nt, synthetic construct
  source 1..22: mol_type = other RNA
attttggattgcgattgtttca

SEQ ID NO: 123944 - RNA, 22 nt, synthetic construct
  source 1..22: mol_type = other RNA
attttggcaaattgtcagattt

SEQ ID NO: 123945 - RNA, 22 nt, synthetic construct
  source 1..22: mol_type = other RNA
attttggggccatctgaattca

SEQ ID NO: 123946 - RNA, 22 nt, synthetic construct
  source 1..22: mol_type = other RNA
attttggtagagatggggtctc

SEQ ID NO: 123947 - RNA, 22 nt, synthetic construct
  source 1..22: mol_type = other RNA
attttggtcttaccctctagct

SEQ ID NO: 123948 - RNA, 22 nt, synthetic construct
  source 1..22: mol_type = other RNA
attttgtaacgtgtatagcttt

SEQ ID NO: 123949 - RNA, 22 nt, synthetic construct
  source 1..22: mol_type = other RNA
attttgtatcctgagacttagg

SEQ ID NO: 123950 - RNA, 22 nt, synthetic construct
  source 1..22: mol_type = other RNA
attttgtgacaagttcagcatc

SEQ ID NO: 123951 - RNA, 22 nt, synthetic construct
  source 1..22: mol_type = other RNA
attttgtgggaattcagtcacc

SEQ ID NO: 123952 - RNA, 22 nt, synthetic construct
  source 1..22: mol_type = other RNA
attttgtgtcttctgtttttct

SEQ ID NO: 123953 - RNA, 22 nt, synthetic construct
  source 1..22: mol_type = other RNA
attttgttattagggtaatgct

SEQ ID NO: 123954 - RNA, 22 nt, synthetic construct
  source 1..22: mol_type = other RNA
attttgttcaggagttttgcct

SEQ ID NO: 123955 - RNA, 22 nt, synthetic construct
  source 1..22: mol_type = other RNA
attttgttgacatcctttgcgt

SEQ ID NO: 123956 - RNA, 22 nt, synthetic construct
  source 1..22: mol_type = other RNA
attttgttgttgttgtttctga

SEQ ID NO: 123957 - RNA, 22 nt, synthetic construct
  source 1..22: mol_type = other RNA
attttgtttatttgctgtcagg

SEQ ID NO: 123958 - RNA, 22 nt, synthetic construct
  source 1..22: mol_type = other RNA
atttttaaaaactttttgggcc

SEQ ID NO: 123959 - RNA, 22 nt, synthetic construct
  source 1..22: mol_type = other RNA
atttttaaaaagcagctacctg

SEQ ID NO: 123960 - RNA, 22 nt, synthetic construct
  source 1..22: mol_type = other RNA
atttttaaaagagcgaagaggg

SEQ ID NO: 123961 - RNA, 22 nt, synthetic construct
  source 1..22: mol_type = other RNA
atttttacccaacatgagagaa

SEQ ID NO: 123962 - RNA, 22 nt, synthetic construct
  source 1..22: mol_type = other RNA
atttttacccgtggaaatactt

SEQ ID NO: 123963 - RNA, 22 nt, synthetic construct
  source 1..22: mol_type = other RNA
atttttagtagagatgaggttt

SEQ ID NO: 123964 - RNA, 22 nt, synthetic construct
  source 1..22: mol_type = other RNA
atttttagtgactggcttaatg

SEQ ID NO: 123965 - RNA, 22 nt, synthetic construct
  source 1..22: mol_type = other RNA
atttttatcaaaatcaaggtgc

SEQ ID NO: 123966 - RNA, 22 nt, synthetic construct
  source 1..22: mol_type = other RNA
atttttatgcatttggtctcat

SEQ ID NO: 123967 - RNA, 22 nt, synthetic construct
  source 1..22: mol_type = other RNA
atttttcacaaacacacaaacc

SEQ ID NO: 123968 - RNA, 22 nt, synthetic construct
  source 1..22: mol_type = other RNA
atttttcacattcttcaccatt

SEQ ID NO: 123969 - RNA, 22 nt, synthetic construct
  source 1..22: mol_type = other RNA
atttttcagattgaccttgtat

SEQ ID NO: 123970 - RNA, 22 nt, synthetic construct
  source 1..22: mol_type = other RNA
atttttcaggggggccactgga

SEQ ID NO: 123971 - RNA, 22 nt, synthetic construct
  source 1..22: mol_type = other RNA
atttttccaacagtttacacgc

SEQ ID NO: 123972 - RNA, 22 nt, synthetic construct
  source 1..22: mol_type = other RNA
atttttccacataaagtcttgc

SEQ ID NO: 123973 - RNA, 22 nt, synthetic construct
  source 1..22: mol_type = other RNA
atttttcctttgcctaagtctc

SEQ ID NO: 123974 - RNA, 22 nt, synthetic construct
  source 1..22: mol_type = other RNA
atttttctaaactggttttcct

SEQ ID NO: 123975 - RNA, 22 nt, synthetic construct
  source 1..22: mol_type = other RNA
atttttctcgacacacaatcca

SEQ ID NO: 123976 - RNA, 22 nt, synthetic construct
  source 1..22: mol_type = other RNA
atttttctgaccaactatttca

SEQ ID NO: 123977 - RNA, 22 nt, synthetic construct
  source 1..22: mol_type = other RNA
atttttctgagtatattctgtg

SEQ ID NO: 123978 - RNA, 22 nt, synthetic construct
  source 1..22: mol_type = other RNA
atttttctgcaattggaagact

SEQ ID NO: 123979 - RNA, 22 nt, synthetic construct
  source 1..22: mol_type = other RNA
atttttcttacctaagcatcgt

SEQ ID NO: 123980 - RNA, 22 nt, synthetic construct
  source 1..22: mol_type = other RNA
atttttgacagccacgtgtatt

SEQ ID NO: 123981 - RNA, 22 nt, synthetic construct
  source 1..22: mol_type = other RNA
atttttgagaaattgccaaact

SEQ ID NO: 123982 - RNA, 22 nt, synthetic construct
  source 1..22: mol_type = other RNA
atttttgagacaggttgttgct

SEQ ID NO: 123983 - RNA, 22 nt, synthetic construct
  source 1..22: mol_type = other RNA
atttttgcaaaccaaatgcaga

SEQ ID NO: 123984 - RNA, 22 nt, synthetic construct
  source 1..22: mol_type = other RNA
atttttgccagtgttttaaagc

SEQ ID NO: 123985 - RNA, 22 nt, synthetic construct
  source 1..22: mol_type = other RNA
atttttgctcacacttactaaa

SEQ ID NO: 123986 - RNA, 22 nt, synthetic construct
  source 1..22: mol_type = other RNA
atttttgtattctgacctaaag

SEQ ID NO: 123987 - RNA, 22 nt, synthetic construct
  source 1..22: mol_type = other RNA
atttttgtcaagtgactccaag

SEQ ID NO: 123988 - RNA, 22 nt, synthetic construct
  source 1..22: mol_type = other RNA
atttttgtctggaacacacatt

SEQ ID NO: 123989 - RNA, 22 nt, synthetic construct
  source 1..22: mol_type = other RNA
atttttgtctggtggacaaaaa

SEQ ID NO: 123990 - RNA, 22 nt, synthetic construct
  source 1..22: mol_type = other RNA
atttttgtgtagaggtgaagtt

SEQ ID NO: 123991 - RNA, 22 nt, synthetic construct
  source 1..22: mol_type = other RNA
attttttaagtggcgctgtttg

SEQ ID NO: 123992 - RNA, 22 nt, synthetic construct
  source 1..22: mol_type = other RNA
attttttcaccagcggcataca

SEQ ID NO: 123993 - RNA, 22 nt, synthetic construct
  source 1..22: mol_type = other RNA
attttttcccagatacgttaaa

SEQ ID NO: 123994 - RNA, 22 nt, synthetic construct
  source 1..22: mol_type = other RNA
attttttcccgctacacaagta

SEQ ID NO: 123995 - RNA, 22 nt, synthetic construct
  source 1..22: mol_type = other RNA
attttttcttcccatctcactc

SEQ ID NO: 123996 - RNA, 22 nt, synthetic construct
  source 1..22: mol_type = other RNA
attttttgagacggaatcttac

SEQ ID NO: 123997 - RNA, 22 nt, synthetic construct
  source 1..22: mol_type = other RNA
attttttgcagagacggggtcc

SEQ ID NO: 123998 - RNA, 22 nt, synthetic construct
  source 1..22: mol_type = other RNA
attttttggcatacaactgctc

SEQ ID NO: 123999 - RNA, 22 nt, synthetic construct
  source 1..22: mol_type = other RNA
attttttgttgttggtttgtgt

SEQ ID NO: 124000 - RNA, 22 nt, synthetic construct
  source 1..22: mol_type = other RNA
caaaaaacaacaacaacaacaa

SEQ ID NO: 124001 - RNA, 22 nt, synthetic construct
  source 1..22: mol_type = other RNA
caaaaaaccactggatacggaa

SEQ ID NO: 124002 - RNA, 22 nt, synthetic construct
  source 1..22: mol_type = other RNA
caaaaaacgcggcacttggtaa

SEQ ID NO: 124003 - RNA, 22 nt, synthetic construct
  source 1..22: mol_type = other RNA
caaaaaactacgagtatcatat

SEQ ID NO: 124004 - RNA, 22 nt, synthetic construct
  source 1..22: mol_type = other RNA
caaaaaagcaccagttatcacc

SEQ ID NO: 124005 - RNA, 22 nt, synthetic construct
  source 1..22: mol_type = other RNA
caaaaaaggtgctgttgtattt

SEQ ID NO: 124006 - RNA, 22 nt, synthetic construct
  source 1..22: mol_type = other RNA
caaaaaagtcatgacctgcttt

SEQ ID NO: 124007 - RNA, 22 nt, synthetic construct
  source 1..22: mol_type = other RNA
caaaaaatcttaaagatgccat

SEQ ID NO: 124008 - RNA, 22 nt, synthetic construct
  source 1..22: mol_type = other RNA
caaaaaatgcagtagtaaagca

SEQ ID NO: 124009 - RNA, 22 nt, synthetic construct
  source 1..22: mol_type = other RNA
caaaaaatgtggcatatcacat

SEQ ID NO: 124010 - RNA, 22 nt, synthetic construct
  source 1..22: mol_type = other RNA
caaaaacaaaagagtagattcc

SEQ ID NO: 124011 - RNA, 22 nt, synthetic construct
  source 1..22: mol_type = other RNA
caaaaacacactgagctttttt

SEQ ID NO: 124012 - RNA, 22 nt, synthetic construct
  source 1..22: mol_type = other RNA
caaaaacactgtattttgaaca

SEQ ID NO: 124013 - RNA, 22 nt, synthetic construct
  source 1..22: mol_type = other RNA
caaaaacagcatatacatgaca

SEQ ID NO: 124014 - RNA, 22 nt, synthetic construct
  source 1..22: mol_type = other RNA
caaaaacagtttccctctgaga

SEQ ID NO: 124015 - RNA, 22 nt, synthetic construct
  source 1..22: mol_type = other RNA
caaaaaccacatttcatagcag

SEQ ID NO: 124016 - RNA, 22 nt, synthetic construct
  source 1..22: mol_type = other RNA
caaaaacccaactctttctttg

SEQ ID NO: 124017 - RNA, 22 nt, synthetic construct
  source 1..22: mol_type = other RNA
caaaaacctcccaacaggctga

SEQ ID NO: 124018 - RNA, 22 nt, synthetic construct
  source 1..22: mol_type = other RNA
caaaaagacaagtactgcatga

SEQ ID NO: 124019 - RNA, 22 nt, synthetic construct
  source 1..22: mol_type = other RNA
caaaaagagaaaaattacaggt

SEQ ID NO: 124020 - RNA, 22 nt, synthetic construct
  source 1..22: mol_type = other RNA
caaaaagagaacacacaatttg

SEQ ID NO: 124021 - RNA, 22 nt, synthetic construct
  source 1..22: mol_type = other RNA
caaaaagatctgtggactttag

SEQ ID NO: 124022 - RNA, 22 nt, synthetic construct
  source 1..22: mol_type = other RNA
caaaaagcacctaccataacaa

SEQ ID NO: 124023 - RNA, 22 nt, synthetic construct
  source 1..22: mol_type = other RNA
caaaaagtaggggtaaatcttt

SEQ ID NO: 124024 - RNA, 22 nt, synthetic construct
  source 1..22: mol_type = other RNA
caaaaagtgataccataaagtc

SEQ ID NO: 124025 - RNA, 22 nt, synthetic construct
  source 1..22: mol_type = other RNA
caaaaagtgtgaccacattccc

SEQ ID NO: 124026 - RNA, 22 nt, synthetic construct
  source 1..22: mol_type = other RNA
caaaaataatatgataccctca

SEQ ID NO: 124027 - RNA, 22 nt, synthetic construct
  source 1..22: mol_type = other RNA
caaaaatacagctccaaagaac

SEQ ID NO: 124028 - RNA, 22 nt, synthetic construct
  source 1..22: mol_type = other RNA
caaaaatacgaaagtgctctac

SEQ ID NO: 124029 - RNA, 22 nt, synthetic construct
  source 1..22: mol_type = other RNA
caaaaatactacaagagttccc

SEQ ID NO: 124030 - RNA, 22 nt, synthetic construct
  source 1..22: mol_type = other RNA
caaaaatactcaagggctttca

SEQ ID NO: 124031 - RNA, 22 nt, synthetic construct
  source 1..22: mol_type = other RNA
caaaaatacttaagagcatgtt

SEQ ID NO: 124032 - RNA, 22 nt, synthetic construct
  source 1..22: mol_type = other RNA
caaaaatagaggatgggcattc

SEQ ID NO: 124033 - RNA, 22 nt, synthetic construct
  source 1..22: mol_type = other RNA
caaaaatgacacaacttactac

SEQ ID NO: 124034 - RNA, 22 nt, synthetic construct
  source 1..22: mol_type = other RNA
caaaaatgtgtctagtgaatga

SEQ ID NO: 124035 - RNA, 22 nt, synthetic construct
  source 1..22: mol_type = other RNA
caaaaattagctgggcgagatg

SEQ ID NO: 124036 - RNA, 22 nt, synthetic construct
  source 1..22: mol_type = other RNA
caaaaattttcattctacctgg

SEQ ID NO: 124037 - RNA, 22 nt, synthetic construct
  source 1..22: mol_type = other RNA
caaaaattttgttcaggagttt

SEQ ID NO: 124038 - RNA, 22 nt, synthetic construct
  source 1..22: mol_type = other RNA
caaaacaaaaaacaaacccccc

SEQ ID NO: 124039 - RNA, 22 nt, synthetic construct
  source 1..22: mol_type = other RNA
caaaacaaaacacatggcatcg

SEQ ID NO: 124040 - RNA, 22 nt, synthetic construct
  source 1..22: mol_type = other RNA
caaaacaaaaccctgttgggct

SEQ ID NO: 124041 - RNA, 22 nt, synthetic construct
  source 1..22: mol_type = other RNA
caaaacaaacaaacagaaaggc

SEQ ID NO: 124042 - RNA, 22 nt, synthetic construct
  source 1..22: mol_type = other RNA
caaaacaaagtctttgggtaat

SEQ ID NO: 124043 - RNA, 22 nt, synthetic construct
  source 1..22: mol_type = other RNA
caaaacaaatggaaccactgta

SEQ ID NO: 124044 - RNA, 22 nt, synthetic construct
  source 1..22: mol_type = other RNA
caaaacaagaagaaaaagcaac

SEQ ID NO: 124045 - RNA, 22 nt, synthetic construct
  source 1..22: mol_type = other RNA
caaaacaataagacaccgctcc

SEQ ID NO: 124046 - RNA, 22 nt, synthetic construct
  source 1..22: mol_type = other RNA
caaaacaatagcccagcaggat

SEQ ID NO: 124047 - RNA, 22 nt, synthetic construct
  source 1..22: mol_type = other RNA
caaaacacacgggtacacatcc

SEQ ID NO: 124048 - RNA, 22 nt, synthetic construct
  source 1..22: mol_type = other RNA
caaaacacatggcatcggggcc

SEQ ID NO: 124049 - RNA, 22 nt, synthetic construct
  source 1..22: mol_type = other RNA
caaaacacttctgtgatcagaa

SEQ ID NO: 124050 - RNA, 22 nt, synthetic construct
  source 1..22: mol_type = other RNA
caaaacagcttcttgttagaat

SEQ ID NO: 124051 - RNA, 22 nt, synthetic construct
  source 1..22: mol_type = other RNA
caaaacagggttattaacatac

SEQ ID NO: 124052 - RNA, 22 nt, synthetic construct
  source 1..22: mol_type = other RNA
caaaacatatgtcagatggtaa

SEQ ID NO: 124053 - RNA, 22 nt, synthetic construct
  source 1..22: mol_type = other RNA
caaaacatcatctaatttccca

SEQ ID NO: 124054 - RNA, 22 nt, synthetic construct
  source 1..22: mol_type = other RNA
caaaacatgttttcaaatgcta

SEQ ID NO: 124055 - RNA, 22 nt, synthetic construct
  source 1..22: mol_type = other RNA
caaaaccaaagaaaggggaagg

SEQ ID NO: 124056 - RNA, 22 nt, synthetic construct
  source 1..22: mol_type = other RNA
caaaaccaggaggtttgcactg

SEQ ID NO: 124057 - RNA, 22 nt, synthetic construct
  source 1..22: mol_type = other RNA
caaaaccccgtccctactaaaa

SEQ ID NO: 124058 - RNA, 22 nt, synthetic construct
  source 1..22: mol_type = other RNA
caaaaccctgttgggctattaa

SEQ ID NO: 124059 - RNA, 22 nt, synthetic construct
  source 1..22: mol_type = other RNA
caaaacccttgggatgcagcaa

SEQ ID NO: 124060 - RNA, 22 nt, synthetic construct
  source 1..22: mol_type = other RNA
caaaacctggtatgagtgtttc

SEQ ID NO: 124061 - RNA, 22 nt, synthetic construct
  source 1..22: mol_type = other RNA
caaaacggaaactttatacctg

SEQ ID NO: 124062 - RNA, 22 nt, synthetic construct
  source 1..22: mol_type = other RNA
caaaactacaggcaacaaaaga

SEQ ID NO: 124063 - RNA, 22 nt, synthetic construct
  source 1..22: mol_type = other RNA
caaaactaggctgtcccaaatg

SEQ ID NO: 124064 - RNA, 22 nt, synthetic construct
  source 1..22: mol_type = other RNA
caaaactcctgaacaaaatttt

SEQ ID NO: 124065 - RNA, 22 nt, synthetic construct
  source 1..22: mol_type = other RNA
caaaactgaactcaaaatggat

SEQ ID NO: 124066 - RNA, 22 nt, synthetic construct
  source 1..22: mol_type = other RNA
caaaactgaagtttatcagtct

SEQ ID NO: 124067 - RNA, 22 nt, synthetic construct
  source 1..22: mol_type = other RNA
caaaactgggggctggacataa

SEQ ID NO: 124068 - RNA, 22 nt, synthetic construct
  source 1..22: mol_type = other RNA
caaaacttaggaggctattaac

SEQ ID NO: 124069 - RNA, 22 nt, synthetic construct
  source 1..22: mol_type = other RNA
caaaagaaaattttctgagcaa

SEQ ID NO: 124070 - RNA, 22 nt, synthetic construct
  source 1..22: mol_type = other RNA
caaaagaacaggacttttggta

SEQ ID NO: 124071 - RNA, 22 nt, synthetic construct
  source 1..22: mol_type = other RNA
caaaagacatcactaagagtga

SEQ ID NO: 124072 - RNA, 22 nt, synthetic construct
  source 1..22: mol_type = other RNA
caaaagaccaagaattttccat

SEQ ID NO: 124073 - RNA, 22 nt, synthetic construct
  source 1..22: mol_type = other RNA
caaaagagctgggcccgcagtg

SEQ ID NO: 124074 - RNA, 22 nt, synthetic construct
  source 1..22: mol_type = other RNA
caaaagagtagattccccctta

SEQ ID NO: 124075 - RNA, 22 nt, synthetic construct
  source 1..22: mol_type = other RNA
caaaagatacacaagatctcta

SEQ ID NO: 124076 - RNA, 22 nt, synthetic construct
  source 1..22: mol_type = other RNA
caaaagatcatttcaaaccaat

SEQ ID NO: 124077 - RNA, 22 nt, synthetic construct
  source 1..22: mol_type = other RNA
caaaagatgatgaacaaaggca

SEQ ID NO: 124078 - RNA, 22 nt, synthetic construct
  source 1..22: mol_type = other RNA
caaaagatgcagaaaaagcatt

SEQ ID NO: 124079 - RNA, 22 nt, synthetic construct
  source 1..22: mol_type = other RNA
caaaagatgctggtggagtatt

SEQ ID NO: 124080 - RNA, 22 nt, synthetic construct
  source 1..22: mol_type = other RNA
caaaagcaaaattctaacaaga

SEQ ID NO: 124081 - RNA, 22 nt, synthetic construct
  source 1..22: mol_type = other RNA
caaaagcaattattagttgtac

SEQ ID NO: 124082 - RNA, 22 nt, synthetic construct
  source 1..22: mol_type = other RNA
caaaagcaccactgagagggaa

SEQ ID NO: 124083 - RNA, 22 nt, synthetic construct
  source 1..22: mol_type = other RNA
caaaagcaggccctgagaagtc

SEQ ID NO: 124084 - RNA, 22 nt, synthetic construct
  source 1..22: mol_type = other RNA
caaaagccaagagcgaggcctg

SEQ ID NO: 124085 - RNA, 22 nt, synthetic construct
  source 1..22: mol_type = other RNA
caaaagccatagtgtaaactaa

SEQ ID NO: 124086 - RNA, 22 nt, synthetic construct
  source 1..22: mol_type = other RNA
caaaagccccaaaccatcaagt

SEQ ID NO: 124087 - RNA, 22 nt, synthetic construct
  source 1..22: mol_type = other RNA
caaaagcctcaaaatttagtaa

SEQ ID NO: 124088 - RNA, 22 nt, synthetic construct
  source 1..22: mol_type = other RNA
caaaagctccccggatgattct

SEQ ID NO: 124089 - RNA, 22 nt, synthetic construct
  source 1..22: mol_type = other RNA
caaaaggaggaactaattgata

SEQ ID NO: 124090 - RNA, 22 nt, synthetic construct
  source 1..22: mol_type = other RNA
caaaaggccccttgaaagatca

SEQ ID NO: 124091 - RNA, 22 nt, synthetic construct
  source 1..22: mol_type = other RNA
caaaagggaaaacaattacttg

SEQ ID NO: 124092 - RNA, 22 nt, synthetic construct
  source 1..22: mol_type = other RNA
caaaagggaaatatgaaccaca

SEQ ID NO: 124093 - RNA, 22 nt, synthetic construct
  source 1..22: mol_type = other RNA
caaaaggtagaagataatgtta

SEQ ID NO: 124094 - RNA, 22 nt, synthetic construct
  source 1..22: mol_type = other RNA
caaaaggtttccagtggccccc

SEQ ID NO: 124095 - RNA, 22 nt, synthetic construct
  source 1..22: mol_type = other RNA
caaaagtcctgttcttttgtaa

SEQ ID NO: 124096 - RNA, 22 nt, synthetic construct
  source 1..22: mol_type = other RNA
caaaagtgaaaactaaggtcaa

SEQ ID NO: 124097 - RNA, 22 nt, synthetic construct
  source 1..22: mol_type = other RNA
caaaagtgaatatagctaagaa

SEQ ID NO: 124098 - RNA, 22 nt, synthetic construct
  source 1..22: mol_type = other RNA
caaaagtgaatcactacagcat

SEQ ID NO: 124099 - RNA, 22 nt, synthetic construct
  source 1..22: mol_type = other RNA
caaaagtgctgttgaggctggg

SEQ ID NO: 124100 - RNA, 22 nt, synthetic construct
  source 1..22: mol_type = other RNA
caaaatacccacaagaaaaacc

SEQ ID NO: 124101 - RNA, 22 nt, synthetic construct
  source 1..22: mol_type = other RNA
caaaatacctgggaatccaact

SEQ ID NO: 124102 - RNA, 22 nt, synthetic construct
  source 1..22: mol_type = other RNA
caaaatactagcaaactgaatc

SEQ ID NO: 124103 - RNA, 22 nt, synthetic construct
  source 1..22: mol_type = other RNA
caaaataggattaagacactac

SEQ ID NO: 124104 - RNA, 22 nt, synthetic construct
  source 1..22: mol_type = other RNA
caaaataggcagtcctctactt

SEQ ID NO: 124105 - RNA, 22 nt, synthetic construct
  source 1..22: mol_type = other RNA
caaaatatgaagcattaatgca

SEQ ID NO: 124106 - RNA, 22 nt, synthetic construct
  source 1..22: mol_type = other RNA
caaaatatgtaatgacctggaa

SEQ ID NO: 124107 - RNA, 22 nt, synthetic construct
  source 1..22: mol_type = other RNA
caaaatattgaagagggaacat

SEQ ID NO: 124108 - RNA, 22 nt, synthetic construct
  source 1..22: mol_type = other RNA
caaaatcaacattgcctccata

SEQ ID NO: 124109 - RNA, 22 nt, synthetic construct
  source 1..22: mol_type = other RNA
caaaatcaaggtgcgggattat

SEQ ID NO: 124110 - RNA, 22 nt, synthetic construct
  source 1..22: mol_type = other RNA
caaaatcagatatgaaagagga

SEQ ID NO: 124111 - RNA, 22 nt, synthetic construct
  source 1..22: mol_type = other RNA
caaaatcccatttgtaacatgt

SEQ ID NO: 124112 - RNA, 22 nt, synthetic construct
  source 1..22: mol_type = other RNA
caaaatcctctgtagataaacg

SEQ ID NO: 124113 - RNA, 22 nt, synthetic construct
  source 1..22: mol_type = other RNA
caaaatctgatgtgtatgttac

SEQ ID NO: 124114 - RNA, 22 nt, synthetic construct
  source 1..22: mol_type = other RNA
caaaatgattttcacagggcag

SEQ ID NO: 124115 - RNA, 22 nt, synthetic construct
  source 1..22: mol_type = other RNA
caaaatggaagtgctgggctag

SEQ ID NO: 124116 - RNA, 22 nt, synthetic construct
  source 1..22: mol_type = other RNA
caaaatggagacatctgagaca

SEQ ID NO: 124117 - RNA, 22 nt, synthetic construct
  source 1..22: mol_type = other RNA
caaaatggagacccatactcag

SEQ ID NO: 124118 - RNA, 22 nt, synthetic construct
  source 1..22: mol_type = other RNA
caaaatggatcaaagacctaag

SEQ ID NO: 124119 - RNA, 22 nt, synthetic construct
  source 1..22: mol_type = other RNA
caaaatgtgatggcatcattca

SEQ ID NO: 124120 - RNA, 22 nt, synthetic construct
  source 1..22: mol_type = other RNA
caaaatgtggatgcatgaggca

SEQ ID NO: 124121 - RNA, 22 nt, synthetic construct
  source 1..22: mol_type = other RNA
caaaatgtggtatatatgcaca

SEQ ID NO: 124122 - RNA, 22 nt, synthetic construct
  source 1..22: mol_type = other RNA
caaaattaccccattcactcag

SEQ ID NO: 124123 - RNA, 22 nt, synthetic construct
  source 1..22: mol_type = other RNA
caaaattctaacaagaagctgt

SEQ ID NO: 124124 - RNA, 22 nt, synthetic construct
  source 1..22: mol_type = other RNA
caaaatttaaagttagtgaagc

SEQ ID NO: 124125 - RNA, 22 nt, synthetic construct
  source 1..22: mol_type = other RNA
caaaatttagtaagggtaaaca

SEQ ID NO: 124126 - RNA, 22 nt, synthetic construct
  source 1..22: mol_type = other RNA
caaaattttaaatcagcaccat

SEQ ID NO: 124127 - RNA, 22 nt, synthetic construct
  source 1..22: mol_type = other RNA
caaaatttttgcaaaccaaatg

SEQ ID NO: 124128 - RNA, 22 nt, synthetic construct
  source 1..22: mol_type = other RNA
caaacaaacacactgggtaaac

SEQ ID NO: 124129 - RNA, 22 nt, synthetic construct
  source 1..22: mol_type = other RNA
caaacaaacagaaaggcccaaa

SEQ ID NO: 124130 - RNA, 22 nt, synthetic construct
  source 1..22: mol_type = other RNA
caaacaaatccttttcccagga

SEQ ID NO: 124131 - RNA, 22 nt, synthetic construct
  source 1..22: mol_type = other RNA
caaacaattacttcatagatgt

SEQ ID NO: 124132 - RNA, 22 nt, synthetic construct
  source 1..22: mol_type = other RNA
caaacaattagcacctttatta

SEQ ID NO: 124133 - RNA, 22 nt, synthetic construct
  source 1..22: mol_type = other RNA
caaacacaaaacaaatggaacc

SEQ ID NO: 124134 - RNA, 22 nt, synthetic construct
  source 1..22: mol_type = other RNA
caaacacacaaaccaacaacaa

SEQ ID NO: 124135 - RNA, 22 nt, synthetic construct
  source 1..22: mol_type = other RNA
caaacacactgggtaaacaaga

SEQ ID NO: 124136 - RNA, 22 nt, synthetic construct
  source 1..22: mol_type = other RNA
caaacaccttacactcaaaagc

SEQ ID NO: 124137 - RNA, 22 nt, synthetic construct
  source 1..22: mol_type = other RNA
caaacactggaaatcacaggtt

SEQ ID NO: 124138 - RNA, 22 nt, synthetic construct
  source 1..22: mol_type = other RNA
caaacacttttcaaacacttaa

SEQ ID NO: 124139 - RNA, 22 nt, synthetic construct
  source 1..22: mol_type = other RNA
caaacagaaaccctgtacccat

SEQ ID NO: 124140 - RNA, 22 nt, synthetic construct
  source 1..22: mol_type = other RNA
caaacagaaaggcccaaaaagt

SEQ ID NO: 124141 - RNA, 22 nt, synthetic construct
  source 1..22: mol_type = other RNA
caaacagactgagccagcaaat

SEQ ID NO: 124142 - RNA, 22 nt, synthetic construct
  source 1..22: mol_type = other RNA
caaacagcctaattgtacacct

SEQ ID NO: 124143 - RNA, 22 nt, synthetic construct
  source 1..22: mol_type = other RNA
caaacagcgccacttaaaaaat

SEQ ID NO: 124144 - RNA, 22 nt, synthetic construct
  source 1..22: mol_type = other RNA
caaacagcttgacattcttacc

SEQ ID NO: 124145 - RNA, 22 nt, synthetic construct
  source 1..22: mol_type = other RNA
caaacaggatacaaaaagcacc

SEQ ID NO: 124146 - RNA, 22 nt, synthetic construct
  source 1..22: mol_type = other RNA
caaacagtgaccacagtttgaa

SEQ ID NO: 124147 - RNA, 22 nt, synthetic construct
  source 1..22: mol_type = other RNA
caaacagtgtgatattggcata

SEQ ID NO: 124148 - RNA, 22 nt, synthetic construct
  source 1..22: mol_type = other RNA
caaacagtttttacatgtagtt

SEQ ID NO: 124149 - RNA, 22 nt, synthetic construct
  source 1..22: mol_type = other RNA
caaacataccccaaccctacct

SEQ ID NO: 124150 - RNA, 22 nt, synthetic construct
  source 1..22: mol_type = other RNA
caaacatatgcatgttatttgg

SEQ ID NO: 124151 - RNA, 22 nt, synthetic construct
  source 1..22: mol_type = other RNA
caaacatcatgatttaatagag

SEQ ID NO: 124152 - RNA, 22 nt, synthetic construct
  source 1..22: mol_type = other RNA
caaacatgaataaccaatgtca

SEQ ID NO: 124153 - RNA, 22 nt, synthetic construct
  source 1..22: mol_type = other RNA
caaacatgacagatcccaaaaa

SEQ ID NO: 124154 - RNA, 22 nt, synthetic construct
  source 1..22: mol_type = other RNA
caaacatgtgaggatttatttc

SEQ ID NO: 124155 - RNA, 22 nt, synthetic construct
  source 1..22: mol_type = other RNA
caaacattgaaggcagaattat

SEQ ID NO: 124156 - RNA, 22 nt, synthetic construct
  source 1..22: mol_type = other RNA
caaacatttatggaattgccat

SEQ ID NO: 124157 - RNA, 22 nt, synthetic construct
  source 1..22: mol_type = other RNA
caaacattttttgcagagacgg

SEQ ID NO: 124158 - RNA, 22 nt, synthetic construct
  source 1..22: mol_type = other RNA
caaaccaaaaaatgtggcatat

SEQ ID NO: 124159 - RNA, 22 nt, synthetic construct
  source 1..22: mol_type = other RNA
caaaccaaatgcagaaaataaa

SEQ ID NO: 124160 - RNA, 22 nt, synthetic construct
  source 1..22: mol_type = other RNA
caaaccaacaacaaaaaatctt

SEQ ID NO: 124161 - RNA, 22 nt, synthetic construct
  source 1..22: mol_type = other RNA
caaaccaatgttctcttttcct

SEQ ID NO: 124162 - RNA, 22 nt, synthetic construct
  source 1..22: mol_type = other RNA
caaaccacacagagaacagcat

SEQ ID NO: 124163 - RNA, 22 nt, synthetic construct
  source 1..22: mol_type = other RNA
caaaccacctaactactaataa

SEQ ID NO: 124164 - RNA, 22 nt, synthetic construct
  source 1..22: mol_type = other RNA
caaaccagacatttctcatact

SEQ ID NO: 124165 - RNA, 22 nt, synthetic construct
  source 1..22: mol_type = other RNA
caaaccatcaagtgtgatccca

SEQ ID NO: 124166 - RNA, 22 nt, synthetic construct
  source 1..22: mol_type = other RNA
caaaccatcctttccttgtcct

SEQ ID NO: 124167 - RNA, 22 nt, synthetic construct
  source 1..22: mol_type = other RNA
caaaccatgttcatgggaagat

SEQ ID NO: 124168 - RNA, 22 nt, synthetic construct
  source 1..22: mol_type = other RNA
caaacccaaattaaaggatgtc

SEQ ID NO: 124169 - RNA, 22 nt, synthetic construct
  source 1..22: mol_type = other RNA
caaaccctacacccatccaccc

SEQ ID NO: 124170 - RNA, 22 nt, synthetic construct
  source 1..22: mol_type = other RNA
caaacccttggctagactaaga

SEQ ID NO: 124171 - RNA, 22 nt, synthetic construct
  source 1..22: mol_type = other RNA
caaacctcctggttttgatcat

SEQ ID NO: 124172 - RNA, 22 nt, synthetic construct
  source 1..22: mol_type = other RNA
caaacctggcaatactctcaga

SEQ ID NO: 124173 - RNA, 22 nt, synthetic construct
  source 1..22: mol_type = other RNA
caaaccttcttatttccttcca

SEQ ID NO: 124174 - RNA, 22 nt, synthetic construct
  source 1..22: mol_type = other RNA
caaacctttaagttctccaagt

SEQ ID NO: 124175 - RNA, 22 nt, synthetic construct
  source 1..22: mol_type = other RNA
caaacgaaccaattaccataaa

SEQ ID NO: 124176 - RNA, 22 nt, synthetic construct
  source 1..22: mol_type = other RNA
caaacgcattgtgatgtctcag

SEQ ID NO: 124177 - RNA, 22 nt, synthetic construct
  source 1..22: mol_type = other RNA
caaacgtccatcaacagcagaa

SEQ ID NO: 124178 - RNA, 22 nt, synthetic construct
  source 1..22: mol_type = other RNA
caaacgtgcacacccagttatc

SEQ ID NO: 124179 - RNA, 22 nt, synthetic construct
  source 1..22: mol_type = other RNA
caaacgtgctttccttattgag

SEQ ID NO: 124180 - RNA, 22 nt, synthetic construct
  source 1..22: mol_type = other RNA
caaacgtttagatgaatgattt

SEQ ID NO: 124181 - RNA, 22 nt, synthetic construct
  source 1..22: mol_type = other RNA
caaactaactagaaaaccgaca

SEQ ID NO: 124182 - RNA, 22 nt, synthetic construct
  source 1..22: mol_type = other RNA
caaactaagtggtattctatca

SEQ ID NO: 124183 - RNA, 22 nt, synthetic construct
  source 1..22: mol_type = other RNA
caaactactgatagcgaaaggt

SEQ ID NO: 124184 - RNA, 22 nt, synthetic construct
  source 1..22: mol_type = other RNA
caaactagaaaaagaataagct

SEQ ID NO: 124185 - RNA, 22 nt, synthetic construct
  source 1..22: mol_type = other RNA
caaactatacttcaatgctaca

SEQ ID NO: 124186 - RNA, 22 nt, synthetic construct
  source 1..22: mol_type = other RNA
caaactatgcttaatctgattt

SEQ ID NO: 124187 - RNA, 22 nt, synthetic construct
  source 1..22: mol_type = other RNA
caaactcaaaaggacatatttt

SEQ ID NO: 124188 - RNA, 22 nt, synthetic construct
  source 1..22: mol_type = other RNA
caaactcaagttccggttctca

SEQ ID NO: 124189 - RNA, 22 nt, synthetic construct
  source 1..22: mol_type = other RNA
caaactcacttattagcaaaga

SEQ ID NO: 124190 - RNA, 22 nt, synthetic construct
  source 1..22: mol_type = other RNA
caaactcagatctgagagatag

SEQ ID NO: 124191 - RNA, 22 nt, synthetic construct
  source 1..22: mol_type = other RNA
caaactccaaacctttaagttc

SEQ ID NO: 124192 - RNA, 22 nt, synthetic construct
  source 1..22: mol_type = other RNA
caaactccaagtctcatgcaat

SEQ ID NO: 124193 - RNA, 22 nt, synthetic construct
  source 1..22: mol_type = other RNA
caaactcctgcactcaagcaat

SEQ ID NO: 124194 - RNA, 22 nt, synthetic construct
  source 1..22: mol_type = other RNA
caaactgaatcagacaacacat

SEQ ID NO: 124195 - RNA, 22 nt, synthetic construct
  source 1..22: mol_type = other RNA
caaactgcagaatgacagaaaa

SEQ ID NO: 124196 - RNA, 22 nt, synthetic construct
  source 1..22: mol_type = other RNA
caaactgcgtggtttattcata

SEQ ID NO: 124197 - RNA, 22 nt, synthetic construct
  source 1..22: mol_type = other RNA
caaactggagtgcagtggtgca

SEQ ID NO: 124198 - RNA, 22 nt, synthetic construct
  source 1..22: mol_type = other RNA
caaactgtggtcactgtttgga

SEQ ID NO: 124199 - RNA, 22 nt, synthetic construct
  source 1..22: mol_type = other RNA
caaactgtgtgcttggagtcac

SEQ ID NO: 124200 - RNA, 22 nt, synthetic construct
  source 1..22: mol_type = other RNA
caaactgttttccacagtgact

SEQ ID NO: 124201 - RNA, 22 nt, synthetic construct
  source 1..22: mol_type = other RNA
caaacttgaaccttcctcttcc

SEQ ID NO: 124202 - RNA, 22 nt, synthetic construct
  source 1..22: mol_type = other RNA
caaacttggtttattttctgca

SEQ ID NO: 124203 - RNA, 22 nt, synthetic construct
  source 1..22: mol_type = other RNA
caaagaaaataatgttttccgt

SEQ ID NO: 124204 - RNA, 22 nt, synthetic construct
  source 1..22: mol_type = other RNA
caaagaaactacctagaaaaac

SEQ ID NO: 124205 - RNA, 22 nt, synthetic construct
  source 1..22: mol_type = other RNA
caaagaaagagttgggtttttg

SEQ ID NO: 124206 - RNA, 22 nt, synthetic construct
  source 1..22: mol_type = other RNA
caaagaaaggggaaggaatttt

SEQ ID NO: 124207 - RNA, 22 nt, synthetic construct
  source 1..22: mol_type = other RNA
caaagaaattggacgggtggta

SEQ ID NO: 124208 - RNA, 22 nt, synthetic construct
  source 1..22: mol_type = other RNA
caaagaacaggaagggagagat

SEQ ID NO: 124209 - RNA, 22 nt, synthetic construct
  source 1..22: mol_type = other RNA
caaagaacaggagttaccataa

SEQ ID NO: 124210 - RNA, 22 nt, synthetic construct
  source 1..22: mol_type = other RNA
caaagaagaaatcaaatgggaa

SEQ ID NO: 124211 - RNA, 22 nt, synthetic construct
  source 1..22: mol_type = other RNA
caaagaaggaaaaaacacctaa

SEQ ID NO: 124212 - RNA, 22 nt, synthetic construct
  source 1..22: mol_type = other RNA
caaagacaagttcttacctcaa

SEQ ID NO: 124213 - RNA, 22 nt, synthetic construct
  source 1..22: mol_type = other RNA
caaagacagatcttatggaata

SEQ ID NO: 124214 - RNA, 22 nt, synthetic construct
  source 1..22: mol_type = other RNA
caaagacatcctgatttaggcc

SEQ ID NO: 124215 - RNA, 22 nt, synthetic construct
  source 1..22: mol_type = other RNA
caaagacattgtcttacatagg

SEQ ID NO: 124216 - RNA, 22 nt, synthetic construct
  source 1..22: mol_type = other RNA
caaagacctaagcttaagagct

SEQ ID NO: 124217 - RNA, 22 nt, synthetic construct
  source 1..22: mol_type = other RNA
caaagacttcaacggacatttt

SEQ ID NO: 124218 - RNA, 22 nt, synthetic construct
  source 1..22: mol_type = other RNA
caaagacttcaggaacaccttg

SEQ ID NO: 124219 - RNA, 22 nt, synthetic construct
  source 1..22: mol_type = other RNA
caaagactttgttttgtttttc

SEQ ID NO: 124220 - RNA, 22 nt, synthetic construct
  source 1..22: mol_type = other RNA
caaagagaacaaaatacctggg

SEQ ID NO: 124221 - RNA, 22 nt, synthetic construct
  source 1..22: mol_type = other RNA
caaagagaacaatggaatagaa

SEQ ID NO: 124222 - RNA, 22 nt, synthetic construct
  source 1..22: mol_type = other RNA
caaagagacctgattcttccac

SEQ ID NO: 124223 - RNA, 22 nt, synthetic construct
  source 1..22: mol_type = other RNA
caaagagctgggactacaggtg

SEQ ID NO: 124224 - RNA, 22 nt, synthetic construct
  source 1..22: mol_type = other RNA
caaagaggcaaaactcctgaac

SEQ ID NO: 124225 - RNA, 22 nt, synthetic construct
  source 1..22: mol_type = other RNA
caaagataaaggtaaggaaacc

SEQ ID NO: 124226 - RNA, 22 nt, synthetic construct
  source 1..22: mol_type = other RNA
caaagatagactcttcagaggt

SEQ ID NO: 124227 - RNA, 22 nt, synthetic construct
  source 1..22: mol_type = other RNA
caaagatataaaaatggtcaac

SEQ ID NO: 124228 - RNA, 22 nt, synthetic construct
  source 1..22: mol_type = other RNA
caaagatatgggttattcaccc

SEQ ID NO: 124229 - RNA, 22 nt, synthetic construct
  source 1..22: mol_type = other RNA
caaagatattagctacaaaagg

SEQ ID NO: 124230 - RNA, 22 nt, synthetic construct
  source 1..22: mol_type = other RNA
caaagatcatgggttttaatat

SEQ ID NO: 124231 - RNA, 22 nt, synthetic construct
  source 1..22: mol_type = other RNA
caaagatcatttcacttgatta

SEQ ID NO: 124232 - RNA, 22 nt, synthetic construct
  source 1..22: mol_type = other RNA
caaagatgccacaaatggagtg

SEQ ID NO: 124233 - RNA, 22 nt, synthetic construct
  source 1..22: mol_type = other RNA
caaagattatgttccacatgtt

SEQ ID NO: 124234 - RNA, 22 nt, synthetic construct
  source 1..22: mol_type = other RNA
caaagattcttgtcatgaatga

SEQ ID NO: 124235 - RNA, 22 nt, synthetic construct
  source 1..22: mol_type = other RNA
caaagatttacccctacttttt

SEQ ID NO: 124236 - RNA, 22 nt, synthetic construct
  source 1..22: mol_type = other RNA
caaagatttactaaactgaacg

SEQ ID NO: 124237 - RNA, 22 nt, synthetic construct
  source 1..22: mol_type = other RNA
caaagcaaaagcaaaattctaa

SEQ ID NO: 124238 - RNA, 22 nt, synthetic construct
  source 1..22: mol_type = other RNA
caaagcaaaccagacatttctc

SEQ ID NO: 124239 - RNA, 22 nt, synthetic construct
  source 1..22: mol_type = other RNA
caaagcaaacgtgcacacccag

SEQ ID NO: 124240 - RNA, 22 nt, synthetic construct
  source 1..22: mol_type = other RNA
caaagcaacatgctaagtgttt

SEQ ID NO: 124241 - RNA, 22 nt, synthetic construct
  source 1..22: mol_type = other RNA
caaagcaagccttggcaagggg

SEQ ID NO: 124242 - RNA, 22 nt, synthetic construct
  source 1..22: mol_type = other RNA
caaagcaagttaaaagacatct

SEQ ID NO: 124243 - RNA, 22 nt, synthetic construct
  source 1..22: mol_type = other RNA
caaagcagaaatacagaccgat

SEQ ID NO: 124244 - RNA, 22 nt, synthetic construct
  source 1..22: mol_type = other RNA
caaagcatatgaatctagaaag

SEQ ID NO: 124245 - RNA, 22 nt, synthetic construct
  source 1..22: mol_type = other RNA
caaagcccaccagcataagacc

SEQ ID NO: 124246 - RNA, 22 nt, synthetic construct
  source 1..22: mol_type = other RNA
caaagccctcaggaccaggcag

SEQ ID NO: 124247 - RNA, 22 nt, synthetic construct
  source 1..22: mol_type = other RNA
caaagcctgtggaggcagtacc

SEQ ID NO: 124248 - RNA, 22 nt, synthetic construct
  source 1..22: mol_type = other RNA
caaagccttctctactctgcct

SEQ ID NO: 124249 - RNA, 22 nt, synthetic construct
  source 1..22: mol_type = other RNA
caaagctaccctttcttgttag

SEQ ID NO: 124250 - RNA, 22 nt, synthetic construct
  source 1..22: mol_type = other RNA
caaagctctgatgctttctcta

SEQ ID NO: 124251 - RNA, 22 nt, synthetic construct
  source 1..22: mol_type = other RNA
caaagctggcatgttggatagt

SEQ ID NO: 124252 - RNA, 22 nt, synthetic construct
  source 1..22: mol_type = other RNA
caaagctttaaactggatgaat

SEQ ID NO: 124253 - RNA, 22 nt, synthetic construct
  source 1..22: mol_type = other RNA
caaaggaaaaatctaaccctca

SEQ ID NO: 124254 - RNA, 22 nt, synthetic construct
  source 1..22: mol_type = other RNA
caaaggaaggaattttaggaca

SEQ ID NO: 124255 - RNA, 22 nt, synthetic construct
  source 1..22: mol_type = other RNA
caaaggacactattgagagtga

SEQ ID NO: 124256 - RNA, 22 nt, synthetic construct
  source 1..22: mol_type = other RNA
caaaggactggaactcatttct

SEQ ID NO: 124257 - RNA, 22 nt, synthetic construct
  source 1..22: mol_type = other RNA
caaaggactgggatcctaagca

SEQ ID NO: 124258 - RNA, 22 nt, synthetic construct
  source 1..22: mol_type = other RNA
caaaggagagaagagggggcat

SEQ ID NO: 124259 - RNA, 22 nt, synthetic construct
  source 1..22: mol_type = other RNA
caaaggatgtcaacaaaatact

SEQ ID NO: 124260 - RNA, 22 nt, synthetic construct
  source 1..22: mol_type = other RNA
caaaggattagaaagtagatta

SEQ ID NO: 124261 - RNA, 22 nt, synthetic construct
  source 1..22: mol_type = other RNA
caaaggattcgggggagagcac

SEQ ID NO: 124262 - RNA, 22 nt, synthetic construct
  source 1..22: mol_type = other RNA
caaaggattgggaagattggct

SEQ ID NO: 124263 - RNA, 22 nt, synthetic construct
  source 1..22: mol_type = other RNA
caaaggcaggagcagtgtgaat

SEQ ID NO: 124264 - RNA, 22 nt, synthetic construct
  source 1..22: mol_type = other RNA
caaaggccgctcttgaccttgt

SEQ ID NO: 124265 - RNA, 22 nt, synthetic construct
  source 1..22: mol_type = other RNA
caaaggcgaagcccgccgctcg

SEQ ID NO: 124266 - RNA, 22 nt, synthetic construct
  source 1..22: mol_type = other RNA
caaagggcctgttccaggcctc

SEQ ID NO: 124267 - RNA, 22 nt, synthetic construct
  source 1..22: mol_type = other RNA
caaaggggcattccgtggaagg

SEQ ID NO: 124268 - RNA, 22 nt, synthetic construct
  source 1..22: mol_type = other RNA
caaagggtcactattaaccata

SEQ ID NO: 124269 - RNA, 22 nt, synthetic construct
  source 1..22: mol_type = other RNA
caaagggttcttggaaattaga

SEQ ID NO: 124270 - RNA, 22 nt, synthetic construct
  source 1..22: mol_type = other RNA
caaaggtagaaacatcccaagt

SEQ ID NO: 124271 - RNA, 22 nt, synthetic construct
  source 1..22: mol_type = other RNA
caaaggtgttaagccgttccat

SEQ ID NO: 124272 - RNA, 22 nt, synthetic construct
  source 1..22: mol_type = other RNA
caaaggttgaaaactcaactgc

SEQ ID NO: 124273 - RNA, 22 nt, synthetic construct
  source 1..22: mol_type = other RNA
caaaggttgagacaagaccaca

SEQ ID NO: 124274 - RNA, 22 nt, synthetic construct
  source 1..22: mol_type = other RNA
caaagtaaaaagcactatccac

SEQ ID NO: 124275 - RNA, 22 nt, synthetic construct
  source 1..22: mol_type = other RNA
caaagtatatatcatagagtac

SEQ ID NO: 124276 - RNA, 22 nt, synthetic construct
  source 1..22: mol_type = other RNA
caaagtatgagaaatgtctggt

SEQ ID NO: 124277 - RNA, 22 nt, synthetic construct
  source 1..22: mol_type = other RNA
caaagtatgcatagcagggtca

SEQ ID NO: 124278 - RNA, 22 nt, synthetic construct
  source 1..22: mol_type = other RNA
caaagtccccacatgactggcc

SEQ ID NO: 124279 - RNA, 22 nt, synthetic construct
  source 1..22: mol_type = other RNA
caaagtcccctgtaattacata

SEQ ID NO: 124280 - RNA, 22 nt, synthetic construct
  source 1..22: mol_type = other RNA
caaagtctttgggtaatttatc

SEQ ID NO: 124281 - RNA, 22 nt, synthetic construct
  source 1..22: mol_type = other RNA
caaagtgaaaggcaaaggaaaa

SEQ ID NO: 124282 - RNA, 22 nt, synthetic construct
  source 1..22: mol_type = other RNA
caaagtgagcagaaggaggaaa

SEQ ID NO: 124283 - RNA, 22 nt, synthetic construct
  source 1..22: mol_type = other RNA
caaagtggaaacaactcaaacg

SEQ ID NO: 124284 - RNA, 22 nt, synthetic construct
  source 1..22: mol_type = other RNA
caaagttaaacttttgtgcatc

SEQ ID NO: 124285 - RNA, 22 nt, synthetic construct
  source 1..22: mol_type = other RNA
caaagttaatagcctcctaagt

SEQ ID NO: 124286 - RNA, 22 nt, synthetic construct
  source 1..22: mol_type = other RNA
caaagtttcctacatactgcac

SEQ ID NO: 124287 - RNA, 22 nt, synthetic construct
  source 1..22: mol_type = other RNA
caaataaaacacaaggacaggt

SEQ ID NO: 124288 - RNA, 22 nt, synthetic construct
  source 1..22: mol_type = other RNA
caaataaaagcttatgatcttg

SEQ ID NO: 124289 - RNA, 22 nt, synthetic construct
  source 1..22: mol_type = other RNA
caaataacaccatagctgaagg

SEQ ID NO: 124290 - RNA, 22 nt, synthetic construct
  source 1..22: mol_type = other RNA
caaataacatgcatatgtttgt

SEQ ID NO: 124291 - RNA, 22 nt, synthetic construct
  source 1..22: mol_type = other RNA
caaataactccagcttttatta

SEQ ID NO: 124292 - RNA, 22 nt, synthetic construct
  source 1..22: mol_type = other RNA
caaataagaagattgagtcagt

SEQ ID NO: 124293 - RNA, 22 nt, synthetic construct
  source 1..22: mol_type = other RNA
caaataaggtcacattcagagg

SEQ ID NO: 124294 - RNA, 22 nt, synthetic construct
  source 1..22: mol_type = other RNA
caaataatagctatcctaatgg

SEQ ID NO: 124295 - RNA, 22 nt, synthetic construct
  source 1..22: mol_type = other RNA
caaataatcccgcaccttgatt

SEQ ID NO: 124296 - RNA, 22 nt, synthetic construct
  source 1..22: mol_type = other RNA
caaataattgctgcagtttttc

SEQ ID NO: 124297 - RNA, 22 nt, synthetic construct
  source 1..22: mol_type = other RNA
caaataatttggcaaaaaatgc

SEQ ID NO: 124298 - RNA, 22 nt, synthetic construct
  source 1..22: mol_type = other RNA
caaatacctagttttccaatcc

SEQ ID NO: 124299 - RNA, 22 nt, synthetic construct
  source 1..22: mol_type = other RNA
caaatacctctgaatgtgacct

SEQ ID NO: 124300 - RNA, 22 nt, synthetic construct
  source 1..22: mol_type = other RNA
caaatatccaatcactggctag

SEQ ID NO: 124301 - RNA, 22 nt, synthetic construct
  source 1..22: mol_type = other RNA
caaatcaaaacaataagacacc

SEQ ID NO: 124302 - RNA, 22 nt, synthetic construct
  source 1..22: mol_type = other RNA
caaatcaatacttcatttccat

SEQ ID NO: 124303 - RNA, 22 nt, synthetic construct
  source 1..22: mol_type = other RNA
caaatcagaaaaggctgagacc

SEQ ID NO: 124304 - RNA, 22 nt, synthetic construct
  source 1..22: mol_type = other RNA
caaatcagatttcaggtggtat

SEQ ID NO: 124305 - RNA, 22 nt, synthetic construct
  source 1..22: mol_type = other RNA
caaatcatgaaagtggagaatt

SEQ ID NO: 124306 - RNA, 22 nt, synthetic construct
  source 1..22: mol_type = other RNA
caaatccaaattcacagcatga

SEQ ID NO: 124307 - RNA, 22 nt, synthetic construct
  source 1..22: mol_type = other RNA
caaatccaggatggcatgaaat

SEQ ID NO: 124308 - RNA, 22 nt, synthetic construct
  source 1..22: mol_type = other RNA
caaatccagtcttcaggtctct

SEQ ID NO: 124309 - RNA, 22 nt, synthetic construct
  source 1..22: mol_type = other RNA
caaatccctgatcaagttgctt

SEQ ID NO: 124310 - RNA, 22 nt, synthetic construct
  source 1..22: mol_type = other RNA
caaatccttttcccaggagcta

SEQ ID NO: 124311 - RNA, 22 nt, synthetic construct
  source 1..22: mol_type = other RNA
caaatctctagaacttatgcat

SEQ ID NO: 124312 - RNA, 22 nt, synthetic construct
  source 1..22: mol_type = other RNA
caaatctggctgcagggcttct

SEQ ID NO: 124313 - RNA, 22 nt, synthetic construct
  source 1..22: mol_type = other RNA
caaatctttagtgttgcttggt

SEQ ID NO: 124314 - RNA, 22 nt, synthetic construct
  source 1..22: mol_type = other RNA
caaatgaaaggcgtcggggctg

SEQ ID NO: 124315 - RNA, 22 nt, synthetic construct
  source 1..22: mol_type = other RNA
caaatgaaagtcagctaatttt

SEQ ID NO: 124316 - RNA, 22 nt, synthetic construct
  source 1..22: mol_type = other RNA
caaatgaacaggttcttcatca

SEQ ID NO: 124317 - RNA, 22 nt, synthetic construct
  source 1..22: mol_type = other RNA
caaatgaggcttttattggtaa

SEQ ID NO: 124318 - RNA, 22 nt, synthetic construct
  source 1..22: mol_type = other RNA
caaatgaggttgcttttacttg

SEQ ID NO: 124319 - RNA, 22 nt, synthetic construct
  source 1..22: mol_type = other RNA
caaatgatgaagggttttctgt

SEQ ID NO: 124320 - RNA, 22 nt, synthetic construct
  source 1..22: mol_type = other RNA
caaatgcaccaacacctgcagt

SEQ ID NO: 124321 - RNA, 22 nt, synthetic construct
  source 1..22: mol_type = other RNA
caaatgcagaaaataaaccaag

SEQ ID NO: 124322 - RNA, 22 nt, synthetic construct
  source 1..22: mol_type = other RNA
caaatgccatagagctttaaag

SEQ ID NO: 124323 - RNA, 22 nt, synthetic construct
  source 1..22: mol_type = other RNA
caaatgctataaagaacatgat

SEQ ID NO: 124324 - RNA, 22 nt, synthetic construct
  source 1..22: mol_type = other RNA
caaatggaaccactgtaggccc

SEQ ID NO: 124325 - RNA, 22 nt, synthetic construct
  source 1..22: mol_type = other RNA
caaatggagtgacttaagcaac

SEQ ID NO: 124326 - RNA, 22 nt, synthetic construct
  source 1..22: mol_type = other RNA
caaatggccttctttctttcaa

SEQ ID NO: 124327 - RNA, 22 nt, synthetic construct
  source 1..22: mol_type = other RNA
caaatgggaaattagatgatgt

SEQ ID NO: 124328 - RNA, 22 nt, synthetic construct
  source 1..22: mol_type = other RNA
caaatgggagcatgcacacagg

SEQ ID NO: 124329 - RNA, 22 nt, synthetic construct
  source 1..22: mol_type = other RNA
caaatggtaacagccaaataaa

SEQ ID NO: 124330 - RNA, 22 nt, synthetic construct
  source 1..22: mol_type = other RNA
caaatgtcatcttctctctctg

SEQ ID NO: 124331 - RNA, 22 nt, synthetic construct
  source 1..22: mol_type = other RNA
caaatgtctcattgtggatgag

SEQ ID NO: 124332 - RNA, 22 nt, synthetic construct
  source 1..22: mol_type = other RNA
caaatgtctgtctttatgccaa

SEQ ID NO: 124333 - RNA, 22 nt, synthetic construct
  source 1..22: mol_type = other RNA
caaatgtcttaagaaggaaaag

SEQ ID NO: 124334 - RNA, 22 nt, synthetic construct
  source 1..22: mol_type = other RNA
caaatgtgacagaacaaactca

SEQ ID NO: 124335 - RNA, 22 nt, synthetic construct
  source 1..22: mol_type = other RNA
caaatgtgactagaagaaatgt

SEQ ID NO: 124336 - RNA, 22 nt, synthetic construct
  source 1..22: mol_type = other RNA
caaatgtggatagtgcttttta

SEQ ID NO: 124337 - RNA, 22 nt, synthetic construct
  source 1..22: mol_type = other RNA
caaatgttaagcccaacttcac

SEQ ID NO: 124338 - RNA, 22 nt, synthetic construct
  source 1..22: mol_type = other RNA
caaatgttgcagagactggata

SEQ ID NO: 124339 - RNA, 22 nt, synthetic construct
  source 1..22: mol_type = other RNA
caaattaaaggatgtcaactga

SEQ ID NO: 124340 - RNA, 22 nt, synthetic construct
  source 1..22: mol_type = other RNA
caaattaatcagtctgtaagca

SEQ ID NO: 124341 - RNA, 22 nt, synthetic construct
  source 1..22: mol_type = other RNA
caaattaccatgtttccataaa

SEQ ID NO: 124342 - RNA, 22 nt, synthetic construct
  source 1..22: mol_type = other RNA
caaattagccaggcgtggtggc

SEQ ID NO: 124343 - RNA, 22 nt, synthetic construct
  source 1..22: mol_type = other RNA
caaattagctttctcccagctg

SEQ ID NO: 124344 - RNA, 22 nt, synthetic construct
  source 1..22: mol_type = other RNA
caaattagtcatagcagtggga

SEQ ID NO: 124345 - RNA, 22 nt, synthetic construct
  source 1..22: mol_type = other RNA
caaattatgactgagatactta

SEQ ID NO: 124346 - RNA, 22 nt, synthetic construct
  source 1..22: mol_type = other RNA
caaattattgacaagacgtgta

SEQ ID NO: 124347 - RNA, 22 nt, synthetic construct
  source 1..22: mol_type = other RNA
caaattatttgagagtaagttg

SEQ ID NO: 124348 - RNA, 22 nt, synthetic construct
  source 1..22: mol_type = other RNA
caaattattttcctccttctgc

SEQ ID NO: 124349 - RNA, 22 nt, synthetic construct
  source 1..22: mol_type = other RNA
caaattcaaagcaagttaaaag

SEQ ID NO: 124350 - RNA, 22 nt, synthetic construct
  source 1..22: mol_type = other RNA
caaattcacagaactgtcactg

SEQ ID NO: 124351 - RNA, 22 nt, synthetic construct
  source 1..22: mol_type = other RNA
caaattcacagcatgaatacct

SEQ ID NO: 124352 - RNA, 22 nt, synthetic construct
  source 1..22: mol_type = other RNA
caaattcacgagactgttaggg

SEQ ID NO: 124353 - RNA, 22 nt, synthetic construct
  source 1..22: mol_type = other RNA
caaattcatagatcaccagggg

SEQ ID NO: 124354 - RNA, 22 nt, synthetic construct
  source 1..22: mol_type = other RNA
caaattcatgcaactgaaaaca

SEQ ID NO: 124355 - RNA, 22 nt, synthetic construct
  source 1..22: mol_type = other RNA
caaattccctctacaaaaggag

SEQ ID NO: 124356 - RNA, 22 nt, synthetic construct
  source 1..22: mol_type = other RNA
caaattctgagggaaattattt

SEQ ID NO: 124357 - RNA, 22 nt, synthetic construct
  source 1..22: mol_type = other RNA
caaattgcatcaactgcttccc

SEQ ID NO: 124358 - RNA, 22 nt, synthetic construct
  source 1..22: mol_type = other RNA
caaattggcatttaaaagaacc

SEQ ID NO: 124359 - RNA, 22 nt, synthetic construct
  source 1..22: mol_type = other RNA
caaattgtcagattttcttgtt

SEQ ID NO: 124360 - RNA, 22 nt, synthetic construct
  source 1..22: mol_type = other RNA
caaattgtgtgttctctttttg

SEQ ID NO: 124361 - RNA, 22 nt, synthetic construct
  source 1..22: mol_type = other RNA
caaatttaacacacaacaatga

SEQ ID NO: 124362 - RNA, 22 nt, synthetic construct
  source 1..22: mol_type = other RNA
caaatttatgttcatgaacctt

SEQ ID NO: 124363 - RNA, 22 nt, synthetic construct
  source 1..22: mol_type = other RNA
caaatttcatttactgaaatcc

SEQ ID NO: 124364 - RNA, 22 nt, synthetic construct
  source 1..22: mol_type = other RNA
caaatttctatagtcattccgc

SEQ ID NO: 124365 - RNA, 22 nt, synthetic construct
  source 1..22: mol_type = other RNA
caaatttttcacattcttcacc

SEQ ID NO: 124366 - RNA, 22 nt, synthetic construct
  source 1..22: mol_type = other RNA
caacaaaaaatcttaaagatgc

SEQ ID NO: 124367 - RNA, 22 nt, synthetic construct
  source 1..22: mol_type = other RNA
caacaaaacaatctaattcgaa

SEQ ID NO: 124368 - RNA, 22 nt, synthetic construct
  source 1..22: mol_type = other RNA
caacaaaacacacgggtacaca

SEQ ID NO: 124369 - RNA, 22 nt, synthetic construct
  source 1..22: mol_type = other RNA
caacaaaacatgttttcaaatg

SEQ ID NO: 124370 - RNA, 22 nt, synthetic construct
  source 1..22: mol_type = other RNA
caacaaaactgggggctggaca

SEQ ID NO: 124371 - RNA, 22 nt, synthetic construct
  source 1..22: mol_type = other RNA
caacaaaatacccacaagaaaa

SEQ ID NO: 124372 - RNA, 22 nt, synthetic construct
  source 1..22: mol_type = other RNA
caacaaacaattagcaccttta

SEQ ID NO: 124373 - RNA, 22 nt, synthetic construct
  source 1..22: mol_type = other RNA
caacaaactaactagaaaaccg

SEQ ID NO: 124374 - RNA, 22 nt, synthetic construct
  source 1..22: mol_type = other RNA
caacaaaggcgaagcccgccgc

SEQ ID NO: 124375 - RNA, 22 nt, synthetic construct
  source 1..22: mol_type = other RNA
caacaaaggttgaaaactcaac

SEQ ID NO: 124376 - RNA, 22 nt, synthetic construct
  source 1..22: mol_type = other RNA
caacaaatgttgcagagactgg

SEQ ID NO: 124377 - RNA, 22 nt, synthetic construct
  source 1..22: mol_type = other RNA
caacaacaaaacacacgggtac

SEQ ID NO: 124378 - RNA, 22 nt, synthetic construct
  source 1..22: mol_type = other RNA
caacaacaaaacatgttttcaa

SEQ ID NO: 124379 - RNA, 22 nt, synthetic construct
  source 1..22: mol_type = other RNA
caacaacaaaatacccacaaga

SEQ ID NO: 124380 - RNA, 22 nt, synthetic construct
  source 1..22: mol_type = other RNA
caacaacaacaaaacacacggg

SEQ ID NO: 124381 - RNA, 22 nt, synthetic construct
  source 1..22: mol_type = other RNA
caacaacaacaaaacatgtttt

SEQ ID NO: 124382 - RNA, 22 nt, synthetic construct
  source 1..22: mol_type = other RNA
caacaacaacaaaatacccaca

SEQ ID NO: 124383 - RNA, 22 nt, synthetic construct
  source 1..22: mol_type = other RNA
caacaacaacaacaaaacacac

SEQ ID NO: 124384 - RNA, 22 nt, synthetic construct
  source 1..22: mol_type = other RNA
caacaacaacaacaaaacatgt

SEQ ID NO: 124385 - RNA, 22 nt, synthetic construct
  source 1..22: mol_type = other RNA
caacaacaacaacaacaaaaca

SEQ ID NO: 124386 - RNA, 22 nt, synthetic construct
  source 1..22: mol_type = other RNA
caacaaccataatgagtaacat

SEQ ID NO: 124387 - RNA, 22 nt, synthetic construct
  source 1..22: mol_type = other RNA
caacaacctgtctcaaaaataa

SEQ ID NO: 124388 - RNA, 22 nt, synthetic construct
  source 1..22: mol_type = other RNA
caacaagagaggacagttggcc

SEQ ID NO: 124389 - RNA, 22 nt, synthetic construct
  source 1..22: mol_type = other RNA
caacaagggttggtgcttcctt

SEQ ID NO: 124390 - RNA, 22 nt, synthetic construct
  source 1..22: mol_type = other RNA
caacaatagcaacaaaacaatc

SEQ ID NO: 124391 - RNA, 22 nt, synthetic construct
  source 1..22: mol_type = other RNA
caacaatcaacaggtagctgct

SEQ ID NO: 124392 - RNA, 22 nt, synthetic construct
  source 1..22: mol_type = other RNA
caacaattcaacaatagcaaca

SEQ ID NO: 124393 - RNA, 22 nt, synthetic construct
  source 1..22: mol_type = other RNA
caacaattcaacagctactatg

SEQ ID NO: 124394 - RNA, 22 nt, synthetic construct
  source 1..22: mol_type = other RNA
caacacaaagccttctctactc

SEQ ID NO: 124395 - RNA, 22 nt, synthetic construct
  source 1..22: mol_type = other RNA
caacacactagccactgggtct

SEQ ID NO: 124396 - RNA, 22 nt, synthetic construct
  source 1..22: mol_type = other RNA
caacacatcagcgctaagtgca

SEQ ID NO: 124397 - RNA, 22 nt, synthetic construct
  source 1..22: mol_type = other RNA
caacacatgcacactagacctt

SEQ ID NO: 124398 - RNA, 22 nt, synthetic construct
  source 1..22: mol_type = other RNA
caacacatggggcattaatttt

SEQ ID NO: 124399 - RNA, 22 nt, synthetic construct
  source 1..22: mol_type = other RNA
caacacattaataagatcatac

SEQ ID NO: 124400 - RNA, 22 nt, synthetic construct
  source 1..22: mol_type = other RNA
caacacattcaaaattgttcta

SEQ ID NO: 124401 - RNA, 22 nt, synthetic construct
  source 1..22: mol_type = other RNA
caacaccaagcaacactaaaga

SEQ ID NO: 124402 - RNA, 22 nt, synthetic construct
  source 1..22: mol_type = other RNA
caacaccagatactcatgcttg

SEQ ID NO: 124403 - RNA, 22 nt, synthetic construct
  source 1..22: mol_type = other RNA
caacacctgcagtggcgtgtgc

SEQ ID NO: 124404 - RNA, 22 nt, synthetic construct
  source 1..22: mol_type = other RNA
caacaccttgggaggctgaggc

SEQ ID NO: 124405 - RNA, 22 nt, synthetic construct
  source 1..22: mol_type = other RNA
caacactaaagatttgccaatc

SEQ ID NO: 124406 - RNA, 22 nt, synthetic construct
  source 1..22: mol_type = other RNA
caacactaaccaacattgagtt

SEQ ID NO: 124407 - RNA, 22 nt, synthetic construct
  source 1..22: mol_type = other RNA
caacactcagatatcaatctgg

SEQ ID NO: 124408 - RNA, 22 nt, synthetic construct
  source 1..22: mol_type = other RNA
caacactgtgttcttttccttc

SEQ ID NO: 124409 - RNA, 22 nt, synthetic construct
  source 1..22: mol_type = other RNA
caacacttcagtggtaaggact

SEQ ID NO: 124410 - RNA, 22 nt, synthetic construct
  source 1..22: mol_type = other RNA
caacacttttccagtcttctca

SEQ ID NO: 124411 - RNA, 22 nt, synthetic construct
  source 1..22: mol_type = other RNA
caacagaaatttattgtttcac

SEQ ID NO: 124412 - RNA, 22 nt, synthetic construct
  source 1..22: mol_type = other RNA
caacagaagaagtttctagtta

SEQ ID NO: 124413 - RNA, 22 nt, synthetic construct
  source 1..22: mol_type = other RNA
caacagaataaatgaaaacaga

SEQ ID NO: 124414 - RNA, 22 nt, synthetic construct
  source 1..22: mol_type = other RNA
caacagagacagagaatctgtc

SEQ ID NO: 124415 - RNA, 22 nt, synthetic construct
  source 1..22: mol_type = other RNA
caacagatcctcacatcagtta

SEQ ID NO: 124416 - RNA, 22 nt, synthetic construct
  source 1..22: mol_type = other RNA
caacagatctgagaagactaag

SEQ ID NO: 124417 - RNA, 22 nt, synthetic construct
  source 1..22: mol_type = other RNA
caacagcaaggctcctgcagac

SEQ ID NO: 124418 - RNA, 22 nt, synthetic construct
  source 1..22: mol_type = other RNA
caacagcaccttttttggtatt

SEQ ID NO: 124419 - RNA, 22 nt, synthetic construct
  source 1..22: mol_type = other RNA
caacagcacttttgtactactt

SEQ ID NO: 124420 - RNA, 22 nt, synthetic construct
  source 1..22: mol_type = other RNA
caacagcagaacaaactgcgtg

SEQ ID NO: 124421 - RNA, 22 nt, synthetic construct
  source 1..22: mol_type = other RNA
caacagctactatgaatatact

SEQ ID NO: 124422 - RNA, 22 nt, synthetic construct
  source 1..22: mol_type = other RNA
caacaggaagaggcagctaagc

SEQ ID NO: 124423 - RNA, 22 nt, synthetic construct
  source 1..22: mol_type = other RNA
caacaggcctgagccgtcggta

SEQ ID NO: 124424 - RNA, 22 nt, synthetic construct
  source 1..22: mol_type = other RNA
caacaggctgagtgcggtggct

SEQ ID NO: 124425 - RNA, 22 nt, synthetic construct
  source 1..22: mol_type = other RNA
caacagggccactgagagctca

SEQ ID NO: 124426 - RNA, 22 nt, synthetic construct
  source 1..22: mol_type = other RNA
caacagggtaagattccgtctc

SEQ ID NO: 124427 - RNA, 22 nt, synthetic construct
  source 1..22: mol_type = other RNA
caacagggttttgttttgtttt

SEQ ID NO: 124428 - RNA, 22 nt, synthetic construct
  source 1..22: mol_type = other RNA
caacaggtagctgctttttaaa

SEQ ID NO: 124429 - RNA, 22 nt, synthetic construct
  source 1..22: mol_type = other RNA
caacaggtataaagtttccgtt

SEQ ID NO: 124430 - RNA, 22 nt, synthetic construct
  source 1..22: mol_type = other RNA
caacagtcattcaggtctatgt

SEQ ID NO: 124431 - RNA, 22 nt, synthetic construct
  source 1..22: mol_type = other RNA
caacagtgtactagtctccata

SEQ ID NO: 124432 - RNA, 22 nt, synthetic construct
  source 1..22: mol_type = other RNA
caacagtgtgagaccgtgtctc

SEQ ID NO: 124433 - RNA, 22 nt, synthetic construct
  source 1..22: mol_type = other RNA
caacagttactttcctttttca

SEQ ID NO: 124434 - RNA, 22 nt, synthetic construct
  source 1..22: mol_type = other RNA
caacagtttacacgccttcgcg

SEQ ID NO: 124435 - RNA, 22 nt, synthetic construct
  source 1..22: mol_type = other RNA
caacataaatagggtgctactc

SEQ ID NO: 124436 - RNA, 22 nt, synthetic construct
  source 1..22: mol_type = other RNA
caacataccaaaacccttggga

SEQ ID NO: 124437 - RNA, 22 nt, synthetic construct
  source 1..22: mol_type = other RNA
caacatcactagctattagaga

SEQ ID NO: 124438 - RNA, 22 nt, synthetic construct
  source 1..22: mol_type = other RNA
caacatccacagctttcttttc

SEQ ID NO: 124439 - RNA, 22 nt, synthetic construct
  source 1..22: mol_type = other RNA
caacatccctatgcaataactc

SEQ ID NO: 124440 - RNA, 22 nt, synthetic construct
  source 1..22: mol_type = other RNA
caacatcgtaaaacctcatctc

SEQ ID NO: 124441 - RNA, 22 nt, synthetic construct
  source 1..22: mol_type = other RNA
caacatctgcctcccgggtcca

SEQ ID NO: 124442 - RNA, 22 nt, synthetic construct
  source 1..22: mol_type = other RNA
caacatgaaaagatactcaaca

SEQ ID NO: 124443 - RNA, 22 nt, synthetic construct
  source 1..22: mol_type = other RNA
caacatgagagaaaattgttca

SEQ ID NO: 124444 - RNA, 22 nt, synthetic construct
  source 1..22: mol_type = other RNA
caacatgccagctttggctgaa

SEQ ID NO: 124445 - RNA, 22 nt, synthetic construct
  source 1..22: mol_type = other RNA
caacatgctaagtgtttaggat

SEQ ID NO: 124446 - RNA, 22 nt, synthetic construct
  source 1..22: mol_type = other RNA
caacatgctcttaagtattttt

SEQ ID NO: 124447 - RNA, 22 nt, synthetic construct
  source 1..22: mol_type = other RNA
caacatggcacatgtctacctg

SEQ ID NO: 124448 - RNA, 22 nt, synthetic construct
  source 1..22: mol_type = other RNA
caacatggtagaccatataatc

SEQ ID NO: 124449 - RNA, 22 nt, synthetic construct
  source 1..22: mol_type = other RNA
caacatgtgtatttagggagca

SEQ ID NO: 124450 - RNA, 22 nt, synthetic construct
  source 1..22: mol_type = other RNA
caacatgttttatttctgtatc

SEQ ID NO: 124451 - RNA, 22 nt, synthetic construct
  source 1..22: mol_type = other RNA
caacattaagggaaacagggtt

SEQ ID NO: 124452 - RNA, 22 nt, synthetic construct
  source 1..22: mol_type = other RNA
caacattcatccctctaaatag

SEQ ID NO: 124453 - RNA, 22 nt, synthetic construct
  source 1..22: mol_type = other RNA
caacattcattcatgacaagaa

SEQ ID NO: 124454 - RNA, 22 nt, synthetic construct
  source 1..22: mol_type = other RNA
caacattgagtttcaatgactt

SEQ ID NO: 124455 - RNA, 22 nt, synthetic construct
  source 1..22: mol_type = other RNA
caacattgcctccatatgggat

SEQ ID NO: 124456 - RNA, 22 nt, synthetic construct
  source 1..22: mol_type = other RNA
caacattgtgcaaccatccccg

SEQ ID NO: 124457 - RNA, 22 nt, synthetic construct
  source 1..22: mol_type = other RNA
caacatttgttgcatccccatt

SEQ ID NO: 124458 - RNA, 22 nt, synthetic construct
  source 1..22: mol_type = other RNA
caaccaagcccaactttttctt

SEQ ID NO: 124459 - RNA, 22 nt, synthetic construct
  source 1..22: mol_type = other RNA
caaccaatcgcagggccattct

SEQ ID NO: 124460 - RNA, 22 nt, synthetic construct
  source 1..22: mol_type = other RNA
caaccactaaggtcaacacatc

SEQ ID NO: 124461 - RNA, 22 nt, synthetic construct
  source 1..22: mol_type = other RNA
caaccactgaatcagattttaa

SEQ ID NO: 124462 - RNA, 22 nt, synthetic construct
  source 1..22: mol_type = other RNA
caaccactgatggaattctgac

SEQ ID NO: 124463 - RNA, 22 nt, synthetic construct
  source 1..22: mol_type = other RNA
caaccactggggagtgtgccca

SEQ ID NO: 124464 - RNA, 22 nt, synthetic construct
  source 1..22: mol_type = other RNA
caaccataatgagtaacatgtg

SEQ ID NO: 124465 - RNA, 22 nt, synthetic construct
  source 1..22: mol_type = other RNA
caaccatacttttcaactgaac

SEQ ID NO: 124466 - RNA, 22 nt, synthetic construct
  source 1..22: mol_type = other RNA
caaccatccccgctgtccattt

SEQ ID NO: 124467 - RNA, 22 nt, synthetic construct
  source 1..22: mol_type = other RNA
caaccatcttcttagtgttccc

SEQ ID NO: 124468 - RNA, 22 nt, synthetic construct
  source 1..22: mol_type = other RNA
caaccattactcttctactcac

SEQ ID NO: 124469 - RNA, 22 nt, synthetic construct
  source 1..22: mol_type = other RNA
caacccatgaaaattgaattat

SEQ ID NO: 124470 - RNA, 22 nt, synthetic construct
  source 1..22: mol_type = other RNA
caacccattccaggttttatct

SEQ ID NO: 124471 - RNA, 22 nt, synthetic construct
  source 1..22: mol_type = other RNA
caacccccggccctgccgcttc

SEQ ID NO: 124472 - RNA, 22 nt, synthetic construct
  source 1..22: mol_type = other RNA
caaccctacctagggtgtaaaa

SEQ ID NO: 124473 - RNA, 22 nt, synthetic construct
  source 1..22: mol_type = other RNA
caaccctcggcctctactgact

SEQ ID NO: 124474 - RNA, 22 nt, synthetic construct
  source 1..22: mol_type = other RNA
caacccttgttggacagctggg

SEQ ID NO: 124475 - RNA, 22 nt, synthetic construct
  source 1..22: mol_type = other RNA
caaccggaaaatgcttaacaag

SEQ ID NO: 124476 - RNA, 22 nt, synthetic construct
  source 1..22: mol_type = other RNA
caacctaaatgtccatcgagag

SEQ ID NO: 124477 - RNA, 22 nt, synthetic construct
  source 1..22: mol_type = other RNA
caacctaacatgtcttggtgtg

SEQ ID NO: 124478 - RNA, 22 nt, synthetic construct
  source 1..22: mol_type = other RNA
caacctactttaaatcagggcc

SEQ ID NO: 124479 - RNA, 22 nt, synthetic construct
  source 1..22: mol_type = other RNA
caacctataagacccagtggct

SEQ ID NO: 124480 - RNA, 22 nt, synthetic construct
  source 1..22: mol_type = other RNA
caacctcaactttaggttacgt

SEQ ID NO: 124481 - RNA, 22 nt, synthetic construct
  source 1..22: mol_type = other RNA
caacctcatttgcagagcaaac

SEQ ID NO: 124482 - RNA, 22 nt, synthetic construct
  source 1..22: mol_type = other RNA
caacctccgtttttcaggttca

SEQ ID NO: 124483 - RNA, 22 nt, synthetic construct
  source 1..22: mol_type = other RNA
caacctgattagaggctgcacc

SEQ ID NO: 124484 - RNA, 22 nt, synthetic construct
  source 1..22: mol_type = other RNA
caacctgcaggtatttctaaat

SEQ ID NO: 124485 - RNA, 22 nt, synthetic construct
  source 1..22: mol_type = other RNA
caacctgctttcctcatgtcca

SEQ ID NO: 124486 - RNA, 22 nt, synthetic construct
  source 1..22: mol_type = other RNA
caacctgtctcaaaaataaata

SEQ ID NO: 124487 - RNA, 22 nt, synthetic construct
  source 1..22: mol_type = other RNA
caaccttgggagaaaattttta

SEQ ID NO: 124488 - RNA, 22 nt, synthetic construct
  source 1..22: mol_type = other RNA
caacctttgcctcctgggttca

SEQ ID NO: 124489 - RNA, 22 nt, synthetic construct
  source 1..22: mol_type = other RNA
caacctttgttgaaaacgagga

SEQ ID NO: 124490 - RNA, 22 nt, synthetic construct
  source 1..22: mol_type = other RNA
caaccttttaggtgccccactc

SEQ ID NO: 124491 - RNA, 22 nt, synthetic construct
  source 1..22: mol_type = other RNA
caacgacaatctctggggttag

SEQ ID NO: 124492 - RNA, 22 nt, synthetic construct
  source 1..22: mol_type = other RNA
caacgaccggacgtggtggctc

SEQ ID NO: 124493 - RNA, 22 nt, synthetic construct
  source 1..22: mol_type = other RNA
caacgatttcttaaaaatgaca

SEQ ID NO: 124494 - RNA, 22 nt, synthetic construct
  source 1..22: mol_type = other RNA
caacgcacccagagcgggtttc

SEQ ID NO: 124495 - RNA, 22 nt, synthetic construct
  source 1..22: mol_type = other RNA
caacgcctgtgatcccagctac

SEQ ID NO: 124496 - RNA, 22 nt, synthetic construct
  source 1..22: mol_type = other RNA
caacgctgtggctaacaatcaa

SEQ ID NO: 124497 - RNA, 22 nt, synthetic construct
  source 1..22: mol_type = other RNA
caacgctttttatggaaacatg

SEQ ID NO: 124498 - RNA, 22 nt, synthetic construct
  source 1..22: mol_type = other RNA
caacggaaatgagtgagccaca

SEQ ID NO: 124499 - RNA, 22 nt, synthetic construct
  source 1..22: mol_type = other RNA
caacggacatttttccaaagat

SEQ ID NO: 124500 - RNA, 22 nt, synthetic construct
  source 1..22: mol_type = other RNA
caacgtgcaggtttgttacaca

SEQ ID NO: 124501 - RNA, 22 nt, synthetic construct
  source 1..22: mol_type = other RNA
caactaataattgcttttgctg

SEQ ID NO: 124502 - RNA, 22 nt, synthetic construct
  source 1..22: mol_type = other RNA
caactaatcaaacataccccaa

SEQ ID NO: 124503 - RNA, 22 nt, synthetic construct
  source 1..22: mol_type = other RNA
caactactatttcgcaaagcaa

SEQ ID NO: 124504 - RNA, 22 nt, synthetic construct
  source 1..22: mol_type = other RNA
caactagagaaagcatcagagc

SEQ ID NO: 124505 - RNA, 22 nt, synthetic construct
  source 1..22: mol_type = other RNA
caactagtaagtaaaatcggaa

SEQ ID NO: 124506 - RNA, 22 nt, synthetic construct
  source 1..22: mol_type = other RNA
caactatcaaaacacttctgtg

SEQ ID NO: 124507 - RNA, 22 nt, synthetic construct
  source 1..22: mol_type = other RNA
caactattccataagatctgtc

SEQ ID NO: 124508 - RNA, 22 nt, synthetic construct
  source 1..22: mol_type = other RNA
caactcaaacgtccatcaacag

SEQ ID NO: 124509 - RNA, 22 nt, synthetic construct
  source 1..22: mol_type = other RNA
caactccacattgtcttaatta

SEQ ID NO: 124510 - RNA, 22 nt, synthetic construct
  source 1..22: mol_type = other RNA
caactcctgggctcatctaagc

SEQ ID NO: 124511 - RNA, 22 nt, synthetic construct
  source 1..22: mol_type = other RNA
caactctaataacagcctaagc

SEQ ID NO: 124512 - RNA, 22 nt, synthetic construct
  source 1..22: mol_type = other RNA
caactctgaccattgtgtggac

SEQ ID NO: 124513 - RNA, 22 nt, synthetic construct
  source 1..22: mol_type = other RNA
caactctggcaggtcacctagc

SEQ ID NO: 124514 - RNA, 22 nt, synthetic construct
  source 1..22: mol_type = other RNA
caactcttggccattttctttt

SEQ ID NO: 124515 - RNA, 22 nt, synthetic construct
  source 1..22: mol_type = other RNA
caactgaacaacgctgtggcta

SEQ ID NO: 124516 - RNA, 22 nt, synthetic construct
  source 1..22: mol_type = other RNA
caactgaagcggggctgccact

SEQ ID NO: 124517 - RNA, 22 nt, synthetic construct
  source 1..22: mol_type = other RNA
caactgactctaaagtctatgc

SEQ ID NO: 124518 - RNA, 22 nt, synthetic construct
  source 1..22: mol_type = other RNA
caactgagaagagctgtaacag

SEQ ID NO: 124519 - RNA, 22 nt, synthetic construct
  source 1..22: mol_type = other RNA
caactgaggcagagtagagaag

SEQ ID NO: 124520 - RNA, 22 nt, synthetic construct
  source 1..22: mol_type = other RNA
caactgcaaaactttcttcaaa

SEQ ID NO: 124521 - RNA, 22 nt, synthetic construct
  source 1..22: mol_type = other RNA
caactgcagtctgtcctcgtaa

SEQ ID NO: 124522 - RNA, 22 nt, synthetic construct
  source 1..22: mol_type = other RNA
caactgcatcttcttttacttg

SEQ ID NO: 124523 - RNA, 22 nt, synthetic construct
  source 1..22: mol_type = other RNA
caactgcctctacatcacagac

SEQ ID NO: 124524 - RNA, 22 nt, synthetic construct
  source 1..22: mol_type = other RNA
caactgctcataatagtctcac

SEQ ID NO: 124525 - RNA, 22 nt, synthetic construct
  source 1..22: mol_type = other RNA
caactgcttccctagcccagca

SEQ ID NO: 124526 - RNA, 22 nt, synthetic construct
  source 1..22: mol_type = other RNA
caactggcccctccatggaaac

SEQ ID NO: 124527 - RNA, 22 nt, synthetic construct
  source 1..22: mol_type = other RNA
caactgggagaatggcaaggct

SEQ ID NO: 124528 - RNA, 22 nt, synthetic construct
  source 1..22: mol_type = other RNA
caactggtttctgcatacttag

SEQ ID NO: 124529 - RNA, 22 nt, synthetic construct
  source 1..22: mol_type = other RNA
caactgtataaatgttcagttt

SEQ ID NO: 124530 - RNA, 22 nt, synthetic construct
  source 1..22: mol_type = other RNA
caactgtcctctcttgttgagg

SEQ ID NO: 124531 - RNA, 22 nt, synthetic construct
  source 1..22: mol_type = other RNA
caactgttttttcctcccttca

SEQ ID NO: 124532 - RNA, 22 nt, synthetic construct
  source 1..22: mol_type = other RNA
caacttactctcaaataatttg

SEQ ID NO: 124533 - RNA, 22 nt, synthetic construct
  source 1..22: mol_type = other RNA
caacttagccttggtaaaatca

SEQ ID NO: 124534 - RNA, 22 nt, synthetic construct
  source 1..22: mol_type = other RNA
caacttcacaccatttagatca

SEQ ID NO: 124535 - RNA, 22 nt, synthetic construct
  source 1..22: mol_type = other RNA
caacttccagcaagactttatg

SEQ ID NO: 124536 - RNA, 22 nt, synthetic construct
  source 1..22: mol_type = other RNA
caacttcctgttttagtggctc

SEQ ID NO: 124537 - RNA, 22 nt, synthetic construct
  source 1..22: mol_type = other RNA
caacttgaaggcaatgtaggga

SEQ ID NO: 124538 - RNA, 22 nt, synthetic construct
  source 1..22: mol_type = other RNA
caacttgatcagggatttggcc

SEQ ID NO: 124539 - RNA, 22 nt, synthetic construct
  source 1..22: mol_type = other RNA
caacttgcagaagagtgaagct

SEQ ID NO: 124540 - RNA, 22 nt, synthetic construct
  source 1..22: mol_type = other RNA
caacttggtaaaaagtgcttct

SEQ ID NO: 124541 - RNA, 22 nt, synthetic construct
  source 1..22: mol_type = other RNA
caacttgtatgaaattagttcc

SEQ ID NO: 124542 - RNA, 22 nt, synthetic construct
  source 1..22: mol_type = other RNA
caactttaggttacgtactagg

SEQ ID NO: 124543 - RNA, 22 nt, synthetic construct
  source 1..22: mol_type = other RNA
caacttttagtaggtctccttg

SEQ ID NO: 124544 - RNA, 22 nt, synthetic construct
  source 1..22: mol_type = other RNA
caagaaaaacctaaacctgtga

SEQ ID NO: 124545 - RNA, 22 nt, synthetic construct
  source 1..22: mol_type = other RNA
caagaaaaagcagagaaactgg

SEQ ID NO: 124546 - RNA, 22 nt, synthetic construct
  source 1..22: mol_type = other RNA
caagaaaatctgacaatttgcc

SEQ ID NO: 124547 - RNA, 22 nt, synthetic construct
  source 1..22: mol_type = other RNA
caagaaaccacagagcctaaaa

SEQ ID NO: 124548 - RNA, 22 nt, synthetic construct
  source 1..22: mol_type = other RNA
caagaaagcaggtcatgacttt

SEQ ID NO: 124549 - RNA, 22 nt, synthetic construct
  source 1..22: mol_type = other RNA
caagaaaggacttcagtcctta

SEQ ID NO: 124550 - RNA, 22 nt, synthetic construct
  source 1..22: mol_type = other RNA
caagaaagggtagctttgatgc

SEQ ID NO: 124551 - RNA, 22 nt, synthetic construct
  source 1..22: mol_type = other RNA
caagaaataaaacatggccagt

SEQ ID NO: 124552 - RNA, 22 nt, synthetic construct
  source 1..22: mol_type = other RNA
caagaacaaccttatctattta

SEQ ID NO: 124553 - RNA, 22 nt, synthetic construct
  source 1..22: mol_type = other RNA
caagaaccctttgttatctgaa

SEQ ID NO: 124554 - RNA, 22 nt, synthetic construct
  source 1..22: mol_type = other RNA
caagaagaaaaagcaacttgaa

SEQ ID NO: 124555 - RNA, 22 nt, synthetic construct
  source 1..22: mol_type = other RNA
caagaagacatgataaatacgt

SEQ ID NO: 124556 - RNA, 22 nt, synthetic construct
  source 1..22: mol_type = other RNA
caagaagctgttttggtaaaat

SEQ ID NO: 124557 - RNA, 22 nt, synthetic construct
  source 1..22: mol_type = other RNA
caagaaggctagcacagaggca

SEQ ID NO: 124558 - RNA, 22 nt, synthetic construct
  source 1..22: mol_type = other RNA
caagaaggtatcatcggaaata

SEQ ID NO: 124559 - RNA, 22 nt, synthetic construct
  source 1..22: mol_type = other RNA
caagaatcctgctattttatta

SEQ ID NO: 124560 - RNA, 22 nt, synthetic construct
  source 1..22: mol_type = other RNA
caagaatctttggcaaacttag

SEQ ID NO: 124561 - RNA, 22 nt, synthetic construct
  source 1..22: mol_type = other RNA
caagaatgaagtcagagatttt

SEQ ID NO: 124562 - RNA, 22 nt, synthetic construct
  source 1..22: mol_type = other RNA
caagaatggtttaacacataca

SEQ ID NO: 124563 - RNA, 22 nt, synthetic construct
  source 1..22: mol_type = other RNA
caagaatttcatgcctttcagc

SEQ ID NO: 124564 - RNA, 22 nt, synthetic construct
  source 1..22: mol_type = other RNA
caagaattttccattcatgtaa

SEQ ID NO: 124565 - RNA, 22 nt, synthetic construct
  source 1..22: mol_type = other RNA
caagacaagcaaggaagggctt

SEQ ID NO: 124566 - RNA, 22 nt, synthetic construct
  source 1..22: mol_type = other RNA
caagacagagctccctctccct

SEQ ID NO: 124567 - RNA, 22 nt, synthetic construct
  source 1..22: mol_type = other RNA
caagacagatgtgcttaatctt

SEQ ID NO: 124568 - RNA, 22 nt, synthetic construct
  source 1..22: mol_type = other RNA
caagacaggaagaattattgtc

SEQ ID NO: 124569 - RNA, 22 nt, synthetic construct
  source 1..22: mol_type = other RNA
caagacataagcattttctaaa

SEQ ID NO: 124570 - RNA, 22 nt, synthetic construct
  source 1..22: mol_type = other RNA
caagacatgttaggttgaaagt

SEQ ID NO: 124571 - RNA, 22 nt, synthetic construct
  source 1..22: mol_type = other RNA
caagaccctgtctctaaaaaat

SEQ ID NO: 124572 - RNA, 22 nt, synthetic construct
  source 1..22: mol_type = other RNA
caagacgtgtacataaaataaa

SEQ ID NO: 124573 - RNA, 22 nt, synthetic construct
  source 1..22: mol_type = other RNA
caagactacctaaaacaatcta

SEQ ID NO: 124574 - RNA, 22 nt, synthetic construct
  source 1..22: mol_type = other RNA
caagactcaacatgtgtattta

SEQ ID NO: 124575 - RNA, 22 nt, synthetic construct
  source 1..22: mol_type = other RNA
caagactttatgtggaaaaata

SEQ ID NO: 124576 - RNA, 22 nt, synthetic construct
  source 1..22: mol_type = other RNA
caagagagattaaataacttcc

SEQ ID NO: 124577 - RNA, 22 nt, synthetic construct
  source 1..22: mol_type = other RNA
caagagagcaagactcaaatct

SEQ ID NO: 124578 - RNA, 22 nt, synthetic construct
  source 1..22: mol_type = other RNA
caagagagcaagtccccatctc

SEQ ID NO: 124579 - RNA, 22 nt, synthetic construct
  source 1..22: mol_type = other RNA
caagagaggaataaatggtagc

SEQ ID NO: 124580 - RNA, 22 nt, synthetic construct
  source 1..22: mol_type = other RNA
caagagaggacagttggccttg

SEQ ID NO: 124581 - RNA, 22 nt, synthetic construct
  source 1..22: mol_type = other RNA
caagagcagaactccacctcag

SEQ ID NO: 124582 - RNA, 22 nt, synthetic construct
  source 1..22: mol_type = other RNA
caagagcatagactttagagtc

SEQ ID NO: 124583 - RNA, 22 nt, synthetic construct
  source 1..22: mol_type = other RNA
caagagcgaggcctggaacagg

SEQ ID NO: 124584 - RNA, 22 nt, synthetic construct
  source 1..22: mol_type = other RNA
caagagcggcctttgcctctcc

SEQ ID NO: 124585 - RNA, 22 nt, synthetic construct
  source 1..22: mol_type = other RNA
caagagcgtcgtacctttcgct

SEQ ID NO: 124586 - RNA, 22 nt, synthetic construct
  source 1..22: mol_type = other RNA
caagaggttaaaaccacaaaca

SEQ ID NO: 124587 - RNA, 22 nt, synthetic construct
  source 1..22: mol_type = other RNA
caagagtctgcagaccaagaaa

SEQ ID NO: 124588 - RNA, 22 nt, synthetic construct
  source 1..22: mol_type = other RNA
caagagtgtggctttaaggcgc

SEQ ID NO: 124589 - RNA, 22 nt, synthetic construct
  source 1..22: mol_type = other RNA
caagagttaaaactcacaaaaa

SEQ ID NO: 124590 - RNA, 22 nt, synthetic construct
  source 1..22: mol_type = other RNA
caagagttacttctggaaagtt

SEQ ID NO: 124591 - RNA, 22 nt, synthetic construct
  source 1..22: mol_type = other RNA
caagagttccaactgtataaat

SEQ ID NO: 124592 - RNA, 22 nt, synthetic construct
  source 1..22: mol_type = other RNA
caagagttcccctatactgtaa

SEQ ID NO: 124593 - RNA, 22 nt, synthetic construct
  source 1..22: mol_type = other RNA
caagagttgctgacttcctggc

SEQ ID NO: 124594 - RNA, 22 nt, synthetic construct
  source 1..22: mol_type = other RNA
caagatactgcactaaactagt

SEQ ID NO: 124595 - RNA, 22 nt, synthetic construct
  source 1..22: mol_type = other RNA
caagatcataagcttttatttg

SEQ ID NO: 124596 - RNA, 22 nt, synthetic construct
  source 1..22: mol_type = other RNA
caagatctctatgcagaaatct

SEQ ID NO: 124597 - RNA, 22 nt, synthetic construct
  source 1..22: mol_type = other RNA
caagatctgtttttcaaaatga

SEQ ID NO: 124598 - RNA, 22 nt, synthetic construct
  source 1..22: mol_type = other RNA
caagatgaatctgcaactatca

SEQ ID NO: 124599 - RNA, 22 nt, synthetic construct
  source 1..22: mol_type = other RNA
caagatgcataagttctagaga

SEQ ID NO: 124600 - RNA, 22 nt, synthetic construct
  source 1..22: mol_type = other RNA
caagatgcataccaagcccggc

SEQ ID NO: 124601 - RNA, 22 nt, synthetic construct
  source 1..22: mol_type = other RNA
caagatggcaagtttccattct

SEQ ID NO: 124602 - RNA, 22 nt, synthetic construct
  source 1..22: mol_type = other RNA
caagatgtcaacattaagggaa

SEQ ID NO: 124603 - RNA, 22 nt, synthetic construct
  source 1..22: mol_type = other RNA
caagattaatcttgcaaaacaa

SEQ ID NO: 124604 - RNA, 22 nt, synthetic construct
  source 1..22: mol_type = other RNA
caagattaatcttgtgaattga

SEQ ID NO: 124605 - RNA, 22 nt, synthetic construct
  source 1..22: mol_type = other RNA
caagattactggatacaaggtc

SEQ ID NO: 124606 - RNA, 22 nt, synthetic construct
  source 1..22: mol_type = other RNA
caagattgaaaatggtttaggc

SEQ ID NO: 124607 - RNA, 22 nt, synthetic construct
  source 1..22: mol_type = other RNA
caagattgtgtgatttcatatg

SEQ ID NO: 124608 - RNA, 22 nt, synthetic construct
  source 1..22: mol_type = other RNA
caagatttcataggcatctctc

SEQ ID NO: 124609 - RNA, 22 nt, synthetic construct
  source 1..22: mol_type = other RNA
caagattttcccaatctctggt

SEQ ID NO: 124610 - RNA, 22 nt, synthetic construct
  source 1..22: mol_type = other RNA
caagcaacaccagatactcatg

SEQ ID NO: 124611 - RNA, 22 nt, synthetic construct
  source 1..22: mol_type = other RNA
caagcaacactaaagatttgcc

SEQ ID NO: 124612 - RNA, 22 nt, synthetic construct
  source 1..22: mol_type = other RNA
caagcaacttgatcagggattt

SEQ ID NO: 124613 - RNA, 22 nt, synthetic construct
  source 1..22: mol_type = other RNA
caagcaaggaagggcttgatct

SEQ ID NO: 124614 - RNA, 22 nt, synthetic construct
  source 1..22: mol_type = other RNA
caagcaagtaaaagaagatgca

SEQ ID NO: 124615 - RNA, 22 nt, synthetic construct
  source 1..22: mol_type = other RNA
caagcaagtgtggtggtctcac

SEQ ID NO: 124616 - RNA, 22 nt, synthetic construct
  source 1..22: mol_type = other RNA
caagcaatctgaaacgaccttg

SEQ ID NO: 124617 - RNA, 22 nt, synthetic construct
  source 1..22: mol_type = other RNA
caagcacaaacctggcaatact

SEQ ID NO: 124618 - RNA, 22 nt, synthetic construct
  source 1..22: mol_type = other RNA
caagcacacagtttgagaagcc

SEQ ID NO: 124619 - RNA, 22 nt, synthetic construct
  source 1..22: mol_type = other RNA
caagcacactttccttggagaa

SEQ ID NO: 124620 - RNA, 22 nt, synthetic construct
  source 1..22: mol_type = other RNA
caagcacagagtcagaaaatta

SEQ ID NO: 124621 - RNA, 22 nt, synthetic construct
  source 1..22: mol_type = other RNA
caagcacaggcatctctctaaa

SEQ ID NO: 124622 - RNA, 22 nt, synthetic construct
  source 1..22: mol_type = other RNA
caagcaccacttcgagaaggga

SEQ ID NO: 124623 - RNA, 22 nt, synthetic construct
  source 1..22: mol_type = other RNA
caagcacgttagcatcaccatc

SEQ ID NO: 124624 - RNA, 22 nt, synthetic construct
  source 1..22: mol_type = other RNA
caagcactggtaaggaaacaga

SEQ ID NO: 124625 - RNA, 22 nt, synthetic construct
  source 1..22: mol_type = other RNA
caagcagaaatgagttccagtc

SEQ ID NO: 124626 - RNA, 22 nt, synthetic construct
  source 1..22: mol_type = other RNA
caagcagatctgctgtaagctg

SEQ ID NO: 124627 - RNA, 22 nt, synthetic construct
  source 1..22: mol_type = other RNA
caagcagggacgggcgggggag

SEQ ID NO: 124628 - RNA, 22 nt, synthetic construct
  source 1..22: mol_type = other RNA
caagcagtaaatatactgacta

SEQ ID NO: 124629 - RNA, 22 nt, synthetic construct
  source 1..22: mol_type = other RNA
caagcagtcctgccttggcctc

SEQ ID NO: 124630 - RNA, 22 nt, synthetic construct
  source 1..22: mol_type = other RNA
caagcatgagtatctggtgttg

SEQ ID NO: 124631 - RNA, 22 nt, synthetic construct
  source 1..22: mol_type = other RNA
caagcatggtggtaggtgtgtg

SEQ ID NO: 124632 - RNA, 22 nt, synthetic construct
  source 1..22: mol_type = other RNA
caagcattgggagctttcatta

SEQ ID NO: 124633 - RNA, 22 nt, synthetic construct
  source 1..22: mol_type = other RNA
caagccaaattaataaaatgga

SEQ ID NO: 124634 - RNA, 22 nt, synthetic construct
  source 1..22: mol_type = other RNA
caagccacagcgtggaatggtc

SEQ ID NO: 124635 - RNA, 22 nt, synthetic construct
  source 1..22: mol_type = other RNA
caagccacatgtggttattgag

SEQ ID NO: 124636 - RNA, 22 nt, synthetic construct
  source 1..22: mol_type = other RNA
caagccacattagccactctga

SEQ ID NO: 124637 - RNA, 22 nt, synthetic construct
  source 1..22: mol_type = other RNA
caagccagggtctgtctcacct

SEQ ID NO: 124638 - RNA, 22 nt, synthetic construct
  source 1..22: mol_type = other RNA
caagccatcctccagccttaat

SEQ ID NO: 124639 - RNA, 22 nt, synthetic construct
  source 1..22: mol_type = other RNA
caagcccaactttttcttttta

SEQ ID NO: 124640 - RNA, 22 nt, synthetic construct
  source 1..22: mol_type = other RNA
caagccccagttctgcgcaatt

SEQ ID NO: 124641 - RNA, 22 nt, synthetic construct
  source 1..22: mol_type = other RNA
caagcccggcacggtggctcac

SEQ ID NO: 124642 - RNA, 22 nt, synthetic construct
  source 1..22: mol_type = other RNA
caagccctgccttaaaacattt

SEQ ID NO: 124643 - RNA, 22 nt, synthetic construct
  source 1..22: mol_type = other RNA
caagcccttccttgcttgtctt

SEQ ID NO: 124644 - RNA, 22 nt, synthetic construct
  source 1..22: mol_type = other RNA
caagccgcaaataatcattctt

SEQ ID NO: 124645 - RNA, 22 nt, synthetic construct
  source 1..22: mol_type = other RNA
caagcctgataagctcccagcc

SEQ ID NO: 124646 - RNA, 22 nt, synthetic construct
  source 1..22: mol_type = other RNA
caagccttaaaagtgctgcagt

SEQ ID NO: 124647 - RNA, 22 nt, synthetic construct
  source 1..22: mol_type = other RNA
caagccttgaaaatatactaaa

SEQ ID NO: 124648 - RNA, 22 nt, synthetic construct
  source 1..22: mol_type = other RNA
caagccttggcaaggggaatgg

SEQ ID NO: 124649 - RNA, 22 nt, synthetic construct
  source 1..22: mol_type = other RNA
caagcgctgaagtacttcaagg

SEQ ID NO: 124650 - RNA, 22 nt, synthetic construct
  source 1..22: mol_type = other RNA
caagctaataatttatcagatc

SEQ ID NO: 124651 - RNA, 22 nt, synthetic construct
  source 1..22: mol_type = other RNA
caagctaccatttattcctctc

SEQ ID NO: 124652 - RNA, 22 nt, synthetic construct
  source 1..22: mol_type = other RNA
caagctatcagaattttattca

SEQ ID NO: 124653 - RNA, 22 nt, synthetic construct
  source 1..22: mol_type = other RNA
caagctccgcctcctggtgggt

SEQ ID NO: 124654 - RNA, 22 nt, synthetic construct
  source 1..22: mol_type = other RNA
caagctcgccgtctccctcggc

SEQ ID NO: 124655 - RNA, 22 nt, synthetic construct
  source 1..22: mol_type = other RNA
caagctgtttgagctgaaagta

SEQ ID NO: 124656 - RNA, 22 nt, synthetic construct
  source 1..22: mol_type = other RNA
caagcttaggtcagattccttt

SEQ ID NO: 124657 - RNA, 22 nt, synthetic construct
  source 1..22: mol_type = other RNA
caaggaaaggatggtttgattg

SEQ ID NO: 124658 - RNA, 22 nt, synthetic construct
  source 1..22: mol_type = other RNA
caaggaaagtgtgcttgggctc

SEQ ID NO: 124659 - RNA, 22 nt, synthetic construct
  source 1..22: mol_type = other RNA
caaggaagcagaatgtccatca

SEQ ID NO: 124660 - RNA, 22 nt, synthetic construct
  source 1..22: mol_type = other RNA
caaggaagcttcctaaagagag

SEQ ID NO: 124661 - RNA, 22 nt, synthetic construct
  source 1..22: mol_type = other RNA
caaggaaggaaaggagatactg

SEQ ID NO: 124662 - RNA, 22 nt, synthetic construct
  source 1..22: mol_type = other RNA
caaggaaggcagggtaggaagg

SEQ ID NO: 124663 - RNA, 22 nt, synthetic construct
  source 1..22: mol_type = other RNA
caaggaagggcttgatctagta

SEQ ID NO: 124664 - RNA, 22 nt, synthetic construct
  source 1..22: mol_type = other RNA
caaggaaggtcaaatggtaaca

SEQ ID NO: 124665 - RNA, 22 nt, synthetic construct
  source 1..22: mol_type = other RNA
caaggacagaaattcaacttgg

SEQ ID NO: 124666 - RNA, 22 nt, synthetic construct
  source 1..22: mol_type = other RNA
caaggacaggtcacattctgcc

SEQ ID NO: 124667 - RNA, 22 nt, synthetic construct
  source 1..22: mol_type = other RNA
caaggaccattagcagttctgt

SEQ ID NO: 124668 - RNA, 22 nt, synthetic construct
  source 1..22: mol_type = other RNA
caaggactggcttcagtgccaa

SEQ ID NO: 124669 - RNA, 22 nt, synthetic construct
  source 1..22: mol_type = other RNA
caaggagacctactaaaagttg

SEQ ID NO: 124670 - RNA, 22 nt, synthetic construct
  source 1..22: mol_type = other RNA
caaggagagaaaaacaaaacaa

SEQ ID NO: 124671 - RNA, 22 nt, synthetic construct
  source 1..22: mol_type = other RNA
caaggagggaggattgtttgag

SEQ ID NO: 124672 - RNA, 22 nt, synthetic construct
  source 1..22: mol_type = other RNA
caaggataaacaaagagaacaa

SEQ ID NO: 124673 - RNA, 22 nt, synthetic construct
  source 1..22: mol_type = other RNA
caaggattaatctttctgaact

SEQ ID NO: 124674 - RNA, 22 nt, synthetic construct
  source 1..22: mol_type = other RNA
caaggattgaatggaaagaaat

SEQ ID NO: 124675 - RNA, 22 nt, synthetic construct
  source 1..22: mol_type = other RNA
caaggcacagtctgtgcttaag

SEQ ID NO: 124676 - RNA, 22 nt, synthetic construct
  source 1..22: mol_type = other RNA
caaggcagaacacactgctctt

SEQ ID NO: 124677 - RNA, 22 nt, synthetic construct
  source 1..22: mol_type = other RNA
caaggcaggactgcttgaggcc

SEQ ID NO: 124678 - RNA, 22 nt, synthetic construct
  source 1..22: mol_type = other RNA
caaggcaggaggatcacttgag

SEQ ID NO: 124679 - RNA, 22 nt, synthetic construct
  source 1..22: mol_type = other RNA
caaggccaactgtcctctcttg

SEQ ID NO: 124680 - RNA, 22 nt, synthetic construct
  source 1..22: mol_type = other RNA
caaggcccaccatgatgcagcc

SEQ ID NO: 124681 - RNA, 22 nt, synthetic construct
  source 1..22: mol_type = other RNA
caaggctaacagccaaagaaat

SEQ ID NO: 124682 - RNA, 22 nt, synthetic construct
  source 1..22: mol_type = other RNA
caaggctaagttgagaaactat

SEQ ID NO: 124683 - RNA, 22 nt, synthetic construct
  source 1..22: mol_type = other RNA
caaggctagagctcacacgaga

SEQ ID NO: 124684 - RNA, 22 nt, synthetic construct
  source 1..22: mol_type = other RNA
caaggctcctgcagacatgcac

SEQ ID NO: 124685 - RNA, 22 nt, synthetic construct
  source 1..22: mol_type = other RNA
caaggctggagtgcagtggcgc

SEQ ID NO: 124686 - RNA, 22 nt, synthetic construct
  source 1..22: mol_type = other RNA
caaggcttgctttggctagaag

SEQ ID NO: 124687 - RNA, 22 nt, synthetic construct
  source 1..22: mol_type = other RNA
caaggcttgtgcatcagaattc

SEQ ID NO: 124688 - RNA, 22 nt, synthetic construct
  source 1..22: mol_type = other RNA
caagggaagaggccacaaagtc

SEQ ID NO: 124689 - RNA, 22 nt, synthetic construct
  source 1..22: mol_type = other RNA
caagggactgtcgaagcttaat

SEQ ID NO: 124690 - RNA, 22 nt, synthetic construct
  source 1..22: mol_type = other RNA
caagggctttcaatagtgggta

SEQ ID NO: 124691 - RNA, 22 nt, synthetic construct
  source 1..22: mol_type = other RNA
caaggggaatggtactgcctcc

SEQ ID NO: 124692 - RNA, 22 nt, synthetic construct
  source 1..22: mol_type = other RNA
caaggggagaggcctcatgtat

SEQ ID NO: 124693 - RNA, 22 nt, synthetic construct
  source 1..22: mol_type = other RNA
caaggggccttttgtcaagcta

SEQ ID NO: 124694 - RNA, 22 nt, synthetic construct
  source 1..22: mol_type = other RNA
caagggtgacagagccgagcag

SEQ ID NO: 124695 - RNA, 22 nt, synthetic construct
  source 1..22: mol_type = other RNA
caagggtggctggcactttcct

SEQ ID NO: 124696 - RNA, 22 nt, synthetic construct
  source 1..22: mol_type = other RNA
caagggtggtgctggactggag

SEQ ID NO: 124697 - RNA, 22 nt, synthetic construct
  source 1..22: mol_type = other RNA
caagggtgtgtttaatttccac

SEQ ID NO: 124698 - RNA, 22 nt, synthetic construct
  source 1..22: mol_type = other RNA
caagggtgttttcccccctaaa

SEQ ID NO: 124699 - RNA, 22 nt, synthetic construct
  source 1..22: mol_type = other RNA
caagggttggtgcttccttctc

SEQ ID NO: 124700 - RNA, 22 nt, synthetic construct
  source 1..22: mol_type = other RNA
caagggtttgtcaattttgctt

SEQ ID NO: 124701 - RNA, 22 nt, synthetic construct
  source 1..22: mol_type = other RNA
caagggttttggtatgttgtgt

SEQ ID NO: 124702 - RNA, 22 nt, synthetic construct
  source 1..22: mol_type = other RNA
caaggtaatctagtttatctca

SEQ ID NO: 124703 - RNA, 22 nt, synthetic construct
  source 1..22: mol_type = other RNA
caaggtacaatacactaaattt

SEQ ID NO: 124704 - RNA, 22 nt, synthetic construct
  source 1..22: mol_type = other RNA
caaggtacaattacacatctcc

SEQ ID NO: 124705 - RNA, 22 nt, synthetic construct
  source 1..22: mol_type = other RNA
caaggtagaagtacaaacatta

SEQ ID NO: 124706 - RNA, 22 nt, synthetic construct
  source 1..22: mol_type = other RNA
caaggtatctccccaaagatat

SEQ ID NO: 124707 - RNA, 22 nt, synthetic construct
  source 1..22: mol_type = other RNA
caaggtcaagagcggcctttgc

SEQ ID NO: 124708 - RNA, 22 nt, synthetic construct
  source 1..22: mol_type = other RNA
caaggtcaatctgaaaaatatc

SEQ ID NO: 124709 - RNA, 22 nt, synthetic construct
  source 1..22: mol_type = other RNA
caaggtcagaagtttggaacca

SEQ ID NO: 124710 - RNA, 22 nt, synthetic construct
  source 1..22: mol_type = other RNA
caaggtcatcctttcccttctg

SEQ ID NO: 124711 - RNA, 22 nt, synthetic construct
  source 1..22: mol_type = other RNA
caaggtcgtttcagattgcttg

SEQ ID NO: 124712 - RNA, 22 nt, synthetic construct
  source 1..22: mol_type = other RNA
caaggtgcgggattatttggaa

SEQ ID NO: 124713 - RNA, 22 nt, synthetic construct
  source 1..22: mol_type = other RNA
caaggtgttagcaggactggac

SEQ ID NO: 124714 - RNA, 22 nt, synthetic construct
  source 1..22: mol_type = other RNA
caaggtgttcctgaagtctttg

SEQ ID NO: 124715 - RNA, 22 nt, synthetic construct
  source 1..22: mol_type = other RNA
caaggttataatcagccgtgat

SEQ ID NO: 124716 - RNA, 22 nt, synthetic construct
  source 1..22: mol_type = other RNA
caaggttcacaaattagaacaa

SEQ ID NO: 124717 - RNA, 22 nt, synthetic construct
  source 1..22: mol_type = other RNA
caaggttgcctgttcactctga

SEQ ID NO: 124718 - RNA, 22 nt, synthetic construct
  source 1..22: mol_type = other RNA
caaggtttctctccaaggtaca

SEQ ID NO: 124719 - RNA, 22 nt, synthetic construct
  source 1..22: mol_type = other RNA
caagtaaaagaagatgcagttg

SEQ ID NO: 124720 - RNA, 22 nt, synthetic construct
  source 1..22: mol_type = other RNA
caagtaaaagcaacctcatttg

SEQ ID NO: 124721 - RNA, 22 nt, synthetic construct
  source 1..22: mol_type = other RNA
caagtaaacaactgactctaaa

SEQ ID NO: 124722 - RNA, 22 nt, synthetic construct
  source 1..22: mol_type = other RNA
caagtaaacctcaagtcttttc

SEQ ID NO: 124723 - RNA, 22 nt, synthetic construct
  source 1..22: mol_type = other RNA
caagtaaatgcaatgcaggcgc

SEQ ID NO: 124724 - RNA, 22 nt, synthetic construct
  source 1..22: mol_type = other RNA
caagtaacactcagaagtacta

SEQ ID NO: 124725 - RNA, 22 nt, synthetic construct
  source 1..22: mol_type = other RNA
caagtaacagttcaatactact

SEQ ID NO: 124726 - RNA, 22 nt, synthetic construct
  source 1..22: mol_type = other RNA
caagtaattgttttcccttttg

SEQ ID NO: 124727 - RNA, 22 nt, synthetic construct
  source 1..22: mol_type = other RNA
caagtacaactaataattgctt

SEQ ID NO: 124728 - RNA, 22 nt, synthetic construct
  source 1..22: mol_type = other RNA
caagtacatgaaatactcaaac

SEQ ID NO: 124729 - RNA, 22 nt, synthetic construct
  source 1..22: mol_type = other RNA
caagtactgcatgattcccctt

SEQ ID NO: 124730 - RNA, 22 nt, synthetic construct
  source 1..22: mol_type = other RNA
caagtagcagggactacagtca

SEQ ID NO: 124731 - RNA, 22 nt, synthetic construct
  source 1..22: mol_type = other RNA
caagtagctaggaccataggca

SEQ ID NO: 124732 - RNA, 22 nt, synthetic construct
  source 1..22: mol_type = other RNA
caagtagctgggatcacaggcg

SEQ ID NO: 124733 - RNA, 22 nt, synthetic construct
  source 1..22: mol_type = other RNA
caagtagtacaaaagtgctgtt

SEQ ID NO: 124734 - RNA, 22 nt, synthetic construct
  source 1..22: mol_type = other RNA
caagtataagatgatgatatga

SEQ ID NO: 124735 - RNA, 22 nt, synthetic construct
  source 1..22: mol_type = other RNA
caagtatctccctgtgcgtgaa

SEQ ID NO: 124736 - RNA, 22 nt, synthetic construct
  source 1..22: mol_type = other RNA
caagtatgagccactagtcagt

SEQ ID NO: 124737 - RNA, 22 nt, synthetic construct
  source 1..22: mol_type = other RNA
caagtatttccacgggtaaaaa

SEQ ID NO: 124738 - RNA, 22 nt, synthetic construct
  source 1..22: mol_type = other RNA
caagtatttctcatctgtcact

SEQ ID NO: 124739 - RNA, 22 nt, synthetic construct
  source 1..22: mol_type = other RNA
caagtcacaaaaagacaagtac

SEQ ID NO: 124740 - RNA, 22 nt, synthetic construct
  source 1..22: mol_type = other RNA
caagtcagcacttctgatatcc

SEQ ID NO: 124741 - RNA, 22 nt, synthetic construct
  source 1..22: mol_type = other RNA
caagtccccatctccacaaaaa

SEQ ID NO: 124742 - RNA, 22 nt, synthetic construct
  source 1..22: mol_type = other RNA
caagtcccggaagctgggctag

SEQ ID NO: 124743 - RNA, 22 nt, synthetic construct
  source 1..22: mol_type = other RNA
caagtccgtgcatgcctctgtt

SEQ ID NO: 124744 - RNA, 22 nt, synthetic construct
  source 1..22: mol_type = other RNA
caagtcctttccagaggttctt

SEQ ID NO: 124745 - RNA, 22 nt, synthetic construct
  source 1..22: mol_type = other RNA
caagtctcatgcaattccccag

SEQ ID NO: 124746 - RNA, 22 nt, synthetic construct
  source 1..22: mol_type = other RNA
caagtcttttcctagactgcca

SEQ ID NO: 124747 - RNA, 22 nt, synthetic construct
  source 1..22: mol_type = other RNA
caagtgaaatgatctttgaata

SEQ ID NO: 124748 - RNA, 22 nt, synthetic construct
  source 1..22: mol_type = other RNA
caagtgaaccaaaaaccacatt

SEQ ID NO: 124749 - RNA, 22 nt, synthetic construct
  source 1..22: mol_type = other RNA
caagtgactccaagcacacagt

SEQ ID NO: 124750 - RNA, 22 nt, synthetic construct
  source 1..22: mol_type = other RNA
caagtgatgcaactcctgggct

SEQ ID NO: 124751 - RNA, 22 nt, synthetic construct
  source 1..22: mol_type = other RNA
caagtgcccattaacagatgaa

SEQ ID NO: 124752 - RNA, 22 nt, synthetic construct
  source 1..22: mol_type = other RNA
caagtgccgcgttttttgtcca

SEQ ID NO: 124753 - RNA, 22 nt, synthetic construct
  source 1..22: mol_type = other RNA
caagtgctgtgattgcaggtgt

SEQ ID NO: 124754 - RNA, 22 nt, synthetic construct
  source 1..22: mol_type = other RNA
caagtggagcctgctctgcaga

SEQ ID NO: 124755 - RNA, 22 nt, synthetic construct
  source 1..22: mol_type = other RNA
caagtgggtggatgggtgtagg

SEQ ID NO: 124756 - RNA, 22 nt, synthetic construct
  source 1..22: mol_type = other RNA
caagtgtaaaaagacattattc

SEQ ID NO: 124757 - RNA, 22 nt, synthetic construct
  source 1..22: mol_type = other RNA
caagtgtggtggtctcaccctc

SEQ ID NO: 124758 - RNA, 22 nt, synthetic construct
  source 1..22: mol_type = other RNA
caagtgtttcatttacaaaaac

SEQ ID NO: 124759 - RNA, 22 nt, synthetic construct
  source 1..22: mol_type = other RNA
caagttaaaagacatctttcct

SEQ ID NO: 124760 - RNA, 22 nt, synthetic construct
  source 1..22: mol_type = other RNA
caagttacaaacatatgcatgt

SEQ ID NO: 124761 - RNA, 22 nt, synthetic construct
  source 1..22: mol_type = other RNA
caagttacaataatatgcctca

SEQ ID NO: 124762 - RNA, 22 nt, synthetic construct
  source 1..22: mol_type = other RNA
caagttacatgcttagccttcc

SEQ ID NO: 124763 - RNA, 22 nt, synthetic construct
  source 1..22: mol_type = other RNA
caagttactagaagcacttttt

SEQ ID NO: 124764 - RNA, 22 nt, synthetic construct
  source 1..22: mol_type = other RNA
caagttcagcatcttcactgac

SEQ ID NO: 124765 - RNA, 22 nt, synthetic construct
  source 1..22: mol_type = other RNA
caagttccggttctcaggagcc

SEQ ID NO: 124766 - RNA, 22 nt, synthetic construct
  source 1..22: mol_type = other RNA
caagttctcctgtgtgcatgct

SEQ ID NO: 124767 - RNA, 22 nt, synthetic construct
  source 1..22: mol_type = other RNA
caagttctgatttcaaagttaa

SEQ ID NO: 124768 - RNA, 22 nt, synthetic construct
  source 1..22: mol_type = other RNA
caagttcttacctcaaaggaga

SEQ ID NO: 124769 - RNA, 22 nt, synthetic construct
  source 1..22: mol_type = other RNA
caagttgaatttctgtccttgg

SEQ ID NO: 124770 - RNA, 22 nt, synthetic construct
  source 1..22: mol_type = other RNA
caagttgctatccagtctctgc

SEQ ID NO: 124771 - RNA, 22 nt, synthetic construct
  source 1..22: mol_type = other RNA
caagttgcttggcacagaatta

SEQ ID NO: 124772 - RNA, 22 nt, synthetic construct
  source 1..22: mol_type = other RNA
caagttgctttttcttcttgtt

SEQ ID NO: 124773 - RNA, 22 nt, synthetic construct
  source 1..22: mol_type = other RNA
caagttgtgatatattatgaac

SEQ ID NO: 124774 - RNA, 22 nt, synthetic construct
  source 1..22: mol_type = other RNA
caagtttaaccaattatgctga

SEQ ID NO: 124775 - RNA, 22 nt, synthetic construct
  source 1..22: mol_type = other RNA
caagtttcaccctgcgaaggca

SEQ ID NO: 124776 - RNA, 22 nt, synthetic construct
  source 1..22: mol_type = other RNA
caagtttccattctcttaattt

SEQ ID NO: 124777 - RNA, 22 nt, synthetic construct
  source 1..22: mol_type = other RNA
caagtttctagccataatcctt

SEQ ID NO: 124778 - RNA, 22 nt, synthetic construct
  source 1..22: mol_type = other RNA
caagtttggctcccatgattca

SEQ ID NO: 124779 - RNA, 22 nt, synthetic construct
  source 1..22: mol_type = other RNA
caagtttggttcatttcaggaa

SEQ ID NO: 124780 - RNA, 22 nt, synthetic construct
  source 1..22: mol_type = other RNA
caagttttaacttaagaactgt

SEQ ID NO: 124781 - RNA, 22 nt, synthetic construct
  source 1..22: mol_type = other RNA
caataaaagcctcatttgaact

SEQ ID NO: 124782 - RNA, 22 nt, synthetic construct
  source 1..22: mol_type = other RNA
caataaatggtgcaggccagat

SEQ ID NO: 124783 - RNA, 22 nt, synthetic construct
  source 1..22: mol_type = other RNA
caataaatttctgttgcttaag

SEQ ID NO: 124784 - RNA, 22 nt, synthetic construct
  source 1..22: mol_type = other RNA
caataaccacatgtggcttgtg

SEQ ID NO: 124785 - RNA, 22 nt, synthetic construct
  source 1..22: mol_type = other RNA
caataactcaaaatgttcatac

SEQ ID NO: 124786 - RNA, 22 nt, synthetic construct
  source 1..22: mol_type = other RNA
caataagaagtgaaaaatgacc

SEQ ID NO: 124787 - RNA, 22 nt, synthetic construct
  source 1..22: mol_type = other RNA
caataagacaccgctccacgcc

SEQ ID NO: 124788 - RNA, 22 nt, synthetic construct
  source 1..22: mol_type = other RNA
caataaggaaagcacgtttgat

SEQ ID NO: 124789 - RNA, 22 nt, synthetic construct
  source 1..22: mol_type = other RNA
caataagttaactgaaatcggg

SEQ ID NO: 124790 - RNA, 22 nt, synthetic construct
  source 1..22: mol_type = other RNA
caataataactacacatcagtg

SEQ ID NO: 124791 - RNA, 22 nt, synthetic construct
  source 1..22: mol_type = other RNA
caataatatgcctcatgcatcc

SEQ ID NO: 124792 - RNA, 22 nt, synthetic construct
  source 1..22: mol_type = other RNA
caataatgcacatgggcatggg

SEQ ID NO: 124793 - RNA, 22 nt, synthetic construct
  source 1..22: mol_type = other RNA
caataattctgtgccaagcaac

SEQ ID NO: 124794 - RNA, 22 nt, synthetic construct
  source 1..22: mol_type = other RNA
caataattcttcctgtcttgga

SEQ ID NO: 124795 - RNA, 22 nt, synthetic construct
  source 1..22: mol_type = other RNA
caataatttggatgaacgctaa

SEQ ID NO: 124796 - RNA, 22 nt, synthetic construct
  source 1..22: mol_type = other RNA
caatacacgtggctgtcaaaaa

SEQ ID NO: 124797 - RNA, 22 nt, synthetic construct
  source 1..22: mol_type = other RNA
caatacagttaacgtatgaata

SEQ ID NO: 124798 - RNA, 22 nt, synthetic construct
  source 1..22: mol_type = other RNA
caatacctgaaaagtgtattat

SEQ ID NO: 124799 - RNA, 22 nt, synthetic construct
  source 1..22: mol_type = other RNA
caatactactgcaaatatccaa

SEQ ID NO: 124800 - RNA, 22 nt, synthetic construct
  source 1..22: mol_type = other RNA
caatactctcagaaattataag

SEQ ID NO: 124801 - RNA, 22 nt, synthetic construct
  source 1..22: mol_type = other RNA
caatactgcattgtgcacttaa

SEQ ID NO: 124802 - RNA, 22 nt, synthetic construct
  source 1..22: mol_type = other RNA
caatactgtctcagtcccaaat

SEQ ID NO: 124803 - RNA, 22 nt, synthetic construct
  source 1..22: mol_type = other RNA
caatactgttatgacaagacta

SEQ ID NO: 124804 - RNA, 22 nt, synthetic construct
  source 1..22: mol_type = other RNA
caatacttaatagcccaacagg

SEQ ID NO: 124805 - RNA, 22 nt, synthetic construct
  source 1..22: mol_type = other RNA
caatacttcatttccattgtaa

SEQ ID NO: 124806 - RNA, 22 nt, synthetic construct
  source 1..22: mol_type = other RNA
caatacttggatcttatctgct

SEQ ID NO: 124807 - RNA, 22 nt, synthetic construct
  source 1..22: mol_type = other RNA
caatactttagacatgggctaa

SEQ ID NO: 124808 - RNA, 22 nt, synthetic construct
  source 1..22: mol_type = other RNA
caatagcaacaaaacaatctaa

SEQ ID NO: 124809 - RNA, 22 nt, synthetic construct
  source 1..22: mol_type = other RNA
caatagcagtgctgaaagctag

SEQ ID NO: 124810 - RNA, 22 nt, synthetic construct
  source 1..22: mol_type = other RNA
caatagcccagcaggatttttt

SEQ ID NO: 124811 - RNA, 22 nt, synthetic construct
  source 1..22: mol_type = other RNA
caatagctagtgtcttagtctg

SEQ ID NO: 124812 - RNA, 22 nt, synthetic construct
  source 1..22: mol_type = other RNA
caataggaatagtattcaggac

SEQ ID NO: 124813 - RNA, 22 nt, synthetic construct
  source 1..22: mol_type = other RNA
caatagtgggtagaagcagcaa

SEQ ID NO: 124814 - RNA, 22 nt, synthetic construct
  source 1..22: mol_type = other RNA
caatagtttagttactcaaatc

SEQ ID NO: 124815 - RNA, 22 nt, synthetic construct
  source 1..22: mol_type = other RNA
caatataggagactatcgttat

SEQ ID NO: 124816 - RNA, 22 nt, synthetic construct
  source 1..22: mol_type = other RNA
caatatagtgggaccccgtctc

SEQ ID NO: 124817 - RNA, 22 nt, synthetic construct
  source 1..22: mol_type = other RNA
caatatcacactgtttgattac

SEQ ID NO: 124818 - RNA, 22 nt, synthetic construct
  source 1..22: mol_type = other RNA
caatatccctgataatcacaga

SEQ ID NO: 124819 - RNA, 22 nt, synthetic construct
  source 1..22: mol_type = other RNA
caatatctatcagggctgaaaa

SEQ ID NO: 124820 - RNA, 22 nt, synthetic construct
  source 1..22: mol_type = other RNA
caatatgactggtgtccttctg

SEQ ID NO: 124821 - RNA, 22 nt, synthetic construct
  source 1..22: mol_type = other RNA
caatatgcagtatgtgccattt

SEQ ID NO: 124822 - RNA, 22 nt, synthetic construct
  source 1..22: mol_type = other RNA
caatattaagagtctcatctgt

SEQ ID NO: 124823 - RNA, 22 nt, synthetic construct
  source 1..22: mol_type = other RNA
caatattacagtaaggtttccc

SEQ ID NO: 124824 - RNA, 22 nt, synthetic construct
  source 1..22: mol_type = other RNA
caatattttggaagactatgag

SEQ ID NO: 124825 - RNA, 22 nt, synthetic construct
  source 1..22: mol_type = other RNA
caatcaaaccatcctttccttg

SEQ ID NO: 124826 - RNA, 22 nt, synthetic construct
  source 1..22: mol_type = other RNA
caatcaaatccagtcttcaggt

SEQ ID NO: 124827 - RNA, 22 nt, synthetic construct
  source 1..22: mol_type = other RNA
caatcaaatggccttctttctt

SEQ ID NO: 124828 - RNA, 22 nt, synthetic construct
  source 1..22: mol_type = other RNA
caatcaaatttaacacacaaca

SEQ ID NO: 124829 - RNA, 22 nt, synthetic construct
  source 1..22: mol_type = other RNA
caatcaacaggtagctgctttt

SEQ ID NO: 124830 - RNA, 22 nt, synthetic construct
  source 1..22: mol_type = other RNA
caatcaataattctgtgccaag

SEQ ID NO: 124831 - RNA, 22 nt, synthetic construct
  source 1..22: mol_type = other RNA
caatcacagcacttggggaggc

SEQ ID NO: 124832 - RNA, 22 nt, synthetic construct
  source 1..22: mol_type = other RNA
caatcacggctgattataacct

SEQ ID NO: 124833 - RNA, 22 nt, synthetic construct
  source 1..22: mol_type = other RNA
caatcactggctagtaggcaac

SEQ ID NO: 124834 - RNA, 22 nt, synthetic construct
  source 1..22: mol_type = other RNA
caatcagggccttcccaaagac

SEQ ID NO: 124835 - RNA, 22 nt, synthetic construct
  source 1..22: mol_type = other RNA
caatcagtggccagtgaccagt

SEQ ID NO: 124836 - RNA, 22 nt, synthetic construct
  source 1..22: mol_type = other RNA
caatcatagctcactagagctt

SEQ ID NO: 124837 - RNA, 22 nt, synthetic construct
  source 1..22: mol_type = other RNA
caatcatgtcaagaatgaagtc

SEQ ID NO: 124838 - RNA, 22 nt, synthetic construct
  source 1..22: mol_type = other RNA
caatcatgttctttatagcatt

SEQ ID NO: 124839 - RNA, 22 nt, synthetic construct
  source 1..22: mol_type = other RNA
caatccaaaatcctctgtagat

SEQ ID NO: 124840 - RNA, 22 nt, synthetic construct
  source 1..22: mol_type = other RNA
caatccaaggacagaaattcaa

SEQ ID NO: 124841 - RNA, 22 nt, synthetic construct
  source 1..22: mol_type = other RNA
caatccaagtttctagccataa

SEQ ID NO: 124842 - RNA, 22 nt, synthetic construct
  source 1..22: mol_type = other RNA
caatccagacagctaatatgct

SEQ ID NO: 124843 - RNA, 22 nt, synthetic construct
  source 1..22: mol_type = other RNA
caatccaggatcttactgtaag

SEQ ID NO: 124844 - RNA, 22 nt, synthetic construct
  source 1..22: mol_type = other RNA
caatccccatctgggatacttc

SEQ ID NO: 124845 - RNA, 22 nt, synthetic construct
  source 1..22: mol_type = other RNA
caatcccttccccacctttcct

SEQ ID NO: 124846 - RNA, 22 nt, synthetic construct
  source 1..22: mol_type = other RNA
caatccgggaacatgacatgta

SEQ ID NO: 124847 - RNA, 22 nt, synthetic construct
  source 1..22: mol_type = other RNA
caatcctcagccccctccctac

SEQ ID NO: 124848 - RNA, 22 nt, synthetic construct
  source 1..22: mol_type = other RNA
caatccttccgcctcagcctcc

SEQ ID NO: 124849 - RNA, 22 nt, synthetic construct
  source 1..22: mol_type = other RNA
caatccttccttcatgtcccct

SEQ ID NO: 124850 - RNA, 22 nt, synthetic construct
  source 1..22: mol_type = other RNA
caatccttctaatcagtaactt

SEQ ID NO: 124851 - RNA, 22 nt, synthetic construct
  source 1..22: mol_type = other RNA
caatccttgtaacttttatttc

SEQ ID NO: 124852 - RNA, 22 nt, synthetic construct
  source 1..22: mol_type = other RNA
caatcctttgtgcaggtctggg

SEQ ID NO: 124853 - RNA, 22 nt, synthetic construct
  source 1..22: mol_type = other RNA
caatcgcaatccaaaatcctct

SEQ ID NO: 124854 - RNA, 22 nt, synthetic construct
  source 1..22: mol_type = other RNA
caatcgcagggccattctgcta

SEQ ID NO: 124855 - RNA, 22 nt, synthetic construct
  source 1..22: mol_type = other RNA
caatctaattcgaaaatgggcc

SEQ ID NO: 124856 - RNA, 22 nt, synthetic construct
  source 1..22: mol_type = other RNA
caatctacagattcaatgcaat

SEQ ID NO: 124857 - RNA, 22 nt, synthetic construct
  source 1..22: mol_type = other RNA
caatctacaggtcggaaggaat

SEQ ID NO: 124858 - RNA, 22 nt, synthetic construct
  source 1..22: mol_type = other RNA
caatctaggaggtctaagagat

SEQ ID NO: 124859 - RNA, 22 nt, synthetic construct
  source 1..22: mol_type = other RNA
caatctcacacctgggtataca

SEQ ID NO: 124860 - RNA, 22 nt, synthetic construct
  source 1..22: mol_type = other RNA
caatctcagctcattacagtct

SEQ ID NO: 124861 - RNA, 22 nt, synthetic construct
  source 1..22: mol_type = other RNA
caatctcctgatccacctgcct

SEQ ID NO: 124862 - RNA, 22 nt, synthetic construct
  source 1..22: mol_type = other RNA
caatctcggcttcactgcaacc

SEQ ID NO: 124863 - RNA, 22 nt, synthetic construct
  source 1..22: mol_type = other RNA
caatctctggggttagggccta

SEQ ID NO: 124864 - RNA, 22 nt, synthetic construct
  source 1..22: mol_type = other RNA
caatctctggtattctgaactt

SEQ ID NO: 124865 - RNA, 22 nt, synthetic construct
  source 1..22: mol_type = other RNA
caatctgaaacgaccttgctca

SEQ ID NO: 124866 - RNA, 22 nt, synthetic construct
  source 1..22: mol_type = other RNA
caatctggaatgcatcgtttca

SEQ ID NO: 124867 - RNA, 22 nt, synthetic construct
  source 1..22: mol_type = other RNA
caatctggatataacaaatcaa

SEQ ID NO: 124868 - RNA, 22 nt, synthetic construct
  source 1..22: mol_type = other RNA
caatctgtttcctaatctaaca

SEQ ID NO: 124869 - RNA, 22 nt, synthetic construct
  source 1..22: mol_type = other RNA
caatcttacccccatcacactg

SEQ ID NO: 124870 - RNA, 22 nt, synthetic construct
  source 1..22: mol_type = other RNA
caatcttcccaatcctttgtgc

SEQ ID NO: 124871 - RNA, 22 nt, synthetic construct
  source 1..22: mol_type = other RNA
caatcttcttatttgttactga

SEQ ID NO: 124872 - RNA, 22 nt, synthetic construct
  source 1..22: mol_type = other RNA
caatcttgaaaggggccaggtg

SEQ ID NO: 124873 - RNA, 22 nt, synthetic construct
  source 1..22: mol_type = other RNA
caatcttgagacggaagactca

SEQ ID NO: 124874 - RNA, 22 nt, synthetic construct
  source 1..22: mol_type = other RNA
caatcttggaaatgatacctca

SEQ ID NO: 124875 - RNA, 22 nt, synthetic construct
  source 1..22: mol_type = other RNA
caatgaatatgtactacctata

SEQ ID NO: 124876 - RNA, 22 nt, synthetic construct
  source 1..22: mol_type = other RNA
caatgaattagcaatgcgaatc

SEQ ID NO: 124877 - RNA, 22 nt, synthetic construct
  source 1..22: mol_type = other RNA
caatgacttttatcaattcaca

SEQ ID NO: 124878 - RNA, 22 nt, synthetic construct
  source 1..22: mol_type = other RNA
caatgagacatttgagggtgct

SEQ ID NO: 124879 - RNA, 22 nt, synthetic construct
  source 1..22: mol_type = other RNA
caatgagaccccatctctacca

SEQ ID NO: 124880 - RNA, 22 nt, synthetic construct
  source 1..22: mol_type = other RNA
caatgagggcagagataactgg

SEQ ID NO: 124881 - RNA, 22 nt, synthetic construct
  source 1..22: mol_type = other RNA
caatgagtctgacatactgtca

SEQ ID NO: 124882 - RNA, 22 nt, synthetic construct
  source 1..22: mol_type = other RNA
caatgatagactggattaagga

SEQ ID NO: 124883 - RNA, 22 nt, synthetic construct
  source 1..22: mol_type = other RNA
caatgataggtcactgcagtct

SEQ ID NO: 124884 - RNA, 22 nt, synthetic construct
  source 1..22: mol_type = other RNA
caatgattatttcgaattatgc

SEQ ID NO: 124885 - RNA, 22 nt, synthetic construct
  source 1..22: mol_type = other RNA
caatgcaatacttaatagccca

SEQ ID NO: 124886 - RNA, 22 nt, synthetic construct
  source 1..22: mol_type = other RNA
caatgcaatgcgtgtgaaacca

SEQ ID NO: 124887 - RNA, 22 nt, synthetic construct
  source 1..22: mol_type = other RNA
caatgcaggcgcctggacagga

SEQ ID NO: 124888 - RNA, 22 nt, synthetic construct
  source 1..22: mol_type = other RNA
caatgcagtattgttaactgta

SEQ ID NO: 124889 - RNA, 22 nt, synthetic construct
  source 1..22: mol_type = other RNA
caatgccagggcgctcctctcc

SEQ ID NO: 124890 - RNA, 22 nt, synthetic construct
  source 1..22: mol_type = other RNA
caatgcctgccgcagagcaagc

SEQ ID NO: 124891 - RNA, 22 nt, synthetic construct
  source 1..22: mol_type = other RNA
caatgcctgcgattgcaggcac

SEQ ID NO: 124892 - RNA, 22 nt, synthetic construct
  source 1..22: mol_type = other RNA
caatgcgaatcatctaggcata

SEQ ID NO: 124893 - RNA, 22 nt, synthetic construct
  source 1..22: mol_type = other RNA
caatgcgtgtgaaaccaagcaa

SEQ ID NO: 124894 - RNA, 22 nt, synthetic construct
  source 1..22: mol_type = other RNA
caatgcgtttgttagatctggg

SEQ ID NO: 124895 - RNA, 22 nt, synthetic construct
  source 1..22: mol_type = other RNA
caatgctctcttcccccaaaac

SEQ ID NO: 124896 - RNA, 22 nt, synthetic construct
  source 1..22: mol_type = other RNA
caatgctgctatgaaaattggc

SEQ ID NO: 124897 - RNA, 22 nt, synthetic construct
  source 1..22: mol_type = other RNA
caatgcttgaagagcgcttcta

SEQ ID NO: 124898 - RNA, 22 nt, synthetic construct
  source 1..22: mol_type = other RNA
caatggaaaatgtaaaacatca

SEQ ID NO: 124899 - RNA, 22 nt, synthetic construct
  source 1..22: mol_type = other RNA
caatggaaatgaagtattgatt

SEQ ID NO: 124900 - RNA, 22 nt, synthetic construct
  source 1..22: mol_type = other RNA
caatggaatagaagggagaacc

SEQ ID NO: 124901 - RNA, 22 nt, synthetic construct
  source 1..22: mol_type = other RNA
caatggaatattactcagtctc

SEQ ID NO: 124902 - RNA, 22 nt, synthetic construct
  source 1..22: mol_type = other RNA
caatggcggctttgtggagtgg

SEQ ID NO: 124903 - RNA, 22 nt, synthetic construct
  source 1..22: mol_type = other RNA
caatggggcaatctcagctcat

SEQ ID NO: 124904 - RNA, 22 nt, synthetic construct
  source 1..22: mol_type = other RNA
caatggggctttactgtattag

SEQ ID NO: 124905 - RNA, 22 nt, synthetic construct
  source 1..22: mol_type = other RNA
caatggtcagagttgtatctgt

SEQ ID NO: 124906 - RNA, 22 nt, synthetic construct
  source 1..22: mol_type = other RNA
caatggtgggatctctgggctc

SEQ ID NO: 124907 - RNA, 22 nt, synthetic construct
  source 1..22: mol_type = other RNA
caatggttaagactgctgttta

SEQ ID NO: 124908 - RNA, 22 nt, synthetic construct
  source 1..22: mol_type = other RNA
caatggttcataatatatcaca

SEQ ID NO: 124909 - RNA, 22 nt, synthetic construct
  source 1..22: mol_type = other RNA
caatgtaacacagttctagttc

SEQ ID NO: 124910 - RNA, 22 nt, synthetic construct
  source 1..22: mol_type = other RNA
caatgtaaggtgcacgctgtga

SEQ ID NO: 124911 - RNA, 22 nt, synthetic construct
  source 1..22: mol_type = other RNA
caatgtagggaatagacaaaga

SEQ ID NO: 124912 - RNA, 22 nt, synthetic construct
  source 1..22: mol_type = other RNA
caatgtcagagatctgaaattg

SEQ ID NO: 124913 - RNA, 22 nt, synthetic construct
  source 1..22: mol_type = other RNA
caatgtctttggctcttagaaa

SEQ ID NO: 124914 - RNA, 22 nt, synthetic construct
  source 1..22: mol_type = other RNA
caatgtgagccacatacatagt

SEQ ID NO: 124915 - RNA, 22 nt, synthetic construct
  source 1..22: mol_type = other RNA
caatgtggagttggtgcaagga

SEQ ID NO: 124916 - RNA, 22 nt, synthetic construct
  source 1..22: mol_type = other RNA
caatgttctcttttcctcgttt

SEQ ID NO: 124917 - RNA, 22 nt, synthetic construct
  source 1..22: mol_type = other RNA
caatgttgattttgaggcagag

SEQ ID NO: 124918 - RNA, 22 nt, synthetic construct
  source 1..22: mol_type = other RNA
caatgttggttagtgttgtttt

SEQ ID NO: 124919 - RNA, 22 nt, synthetic construct
  source 1..22: mol_type = other RNA
caatgttgtggatgtccttaat

SEQ ID NO: 124920 - RNA, 22 nt, synthetic construct
  source 1..22: mol_type = other RNA
caatgtttggtagatttctgca

SEQ ID NO: 124921 - RNA, 22 nt, synthetic construct
  source 1..22: mol_type = other RNA
caattaaactatagacccaaag

SEQ ID NO: 124922 - RNA, 22 nt, synthetic construct
  source 1..22: mol_type = other RNA
caattaagcaaccttttaggtg

SEQ ID NO: 124923 - RNA, 22 nt, synthetic construct
  source 1..22: mol_type = other RNA
caattaatgcccaatcaaatcc

SEQ ID NO: 124924 - RNA, 22 nt, synthetic construct
  source 1..22: mol_type = other RNA
caattacacatctcccatacca

SEQ ID NO: 124925 - RNA, 22 nt, synthetic construct
  source 1..22: mol_type = other RNA
caattaccataaagtcttccat

SEQ ID NO: 124926 - RNA, 22 nt, synthetic construct
  source 1..22: mol_type = other RNA
caattactgtacaaagatttac

SEQ ID NO: 124927 - RNA, 22 nt, synthetic construct
  source 1..22: mol_type = other RNA
caattacttcatagatgttatg

SEQ ID NO: 124928 - RNA, 22 nt, synthetic construct
  source 1..22: mol_type = other RNA
caattacttccagtgttttagg

SEQ ID NO: 124929 - RNA, 22 nt, synthetic construct
  source 1..22: mol_type = other RNA
caattacttgagagcagagaca

SEQ ID NO: 124930 - RNA, 22 nt, synthetic construct
  source 1..22: mol_type = other RNA
caattagcacctttattaacta

SEQ ID NO: 124931 - RNA, 22 nt, synthetic construct
  source 1..22: mol_type = other RNA
caattaggctgtttgagatctt

SEQ ID NO: 124932 - RNA, 22 nt, synthetic construct
  source 1..22: mol_type = other RNA
caattagttcctccttttgtag

SEQ ID NO: 124933 - RNA, 22 nt, synthetic construct
  source 1..22: mol_type = other RNA
caattatgctgagtgaatgggg

SEQ ID NO: 124934 - RNA, 22 nt, synthetic construct
  source 1..22: mol_type = other RNA
caattattagttgtacttgaca

SEQ ID NO: 124935 - RNA, 22 nt, synthetic construct
  source 1..22: mol_type = other RNA
caattatttgaataaggtctgt

SEQ ID NO: 124936 - RNA, 22 nt, synthetic construct
  source 1..22: mol_type = other RNA
caattcaacaatagcaacaaaa

SEQ ID NO: 124937 - RNA, 22 nt, synthetic construct
  source 1..22: mol_type = other RNA
caattcaacagctactatgaat

SEQ ID NO: 124938 - RNA, 22 nt, synthetic construct
  source 1..22: mol_type = other RNA
caattcacaagattaatcttgc

SEQ ID NO: 124939 - RNA, 22 nt, synthetic construct
  source 1..22: mol_type = other RNA
caattcacagaatatactcaga

SEQ ID NO: 124940 - RNA, 22 nt, synthetic construct
  source 1..22: mol_type = other RNA
caattcagaagctaaattttca

SEQ ID NO: 124941 - RNA, 22 nt, synthetic construct
  source 1..22: mol_type = other RNA
caattccataaatgtttgctaa

SEQ ID NO: 124942 - RNA, 22 nt, synthetic construct
  source 1..22: mol_type = other RNA
caattccccagcctcagcctcc

SEQ ID NO: 124943 - RNA, 22 nt, synthetic construct
  source 1..22: mol_type = other RNA
caattcctttctaggcatctat

SEQ ID NO: 124944 - RNA, 22 nt, synthetic construct
  source 1..22: mol_type = other RNA
caattcggtggcattaaggaca

SEQ ID NO: 124945 - RNA, 22 nt, synthetic construct
  source 1..22: mol_type = other RNA
caattctagttaataaaggtgc

SEQ ID NO: 124946 - RNA, 22 nt, synthetic construct
  source 1..22: mol_type = other RNA
caattctccctgaaattgtcag

SEQ ID NO: 124947 - RNA, 22 nt, synthetic construct
  source 1..22: mol_type = other RNA
caattgaatggggatgcaacaa

SEQ ID NO: 124948 - RNA, 22 nt, synthetic construct
  source 1..22: mol_type = other RNA
caattgaccaaacatgtgagga

SEQ ID NO: 124949 - RNA, 22 nt, synthetic construct
  source 1..22: mol_type = other RNA
caattgatctgccaggacaatt

SEQ ID NO: 124950 - RNA, 22 nt, synthetic construct
  source 1..22: mol_type = other RNA
caattgcactccagcctaggca

SEQ ID NO: 124951 - RNA, 22 nt, synthetic construct
  source 1..22: mol_type = other RNA
caattgcagccagagagtggaa

SEQ ID NO: 124952 - RNA, 22 nt, synthetic construct
  source 1..22: mol_type = other RNA
caattgcgcagaactggggctt

SEQ ID NO: 124953 - RNA, 22 nt, synthetic construct
  source 1..22: mol_type = other RNA
caattggaagactatcacgatt

SEQ ID NO: 124954 - RNA, 22 nt, synthetic construct
  source 1..22: mol_type = other RNA
caattggtgaatctgagtaaag

SEQ ID NO: 124955 - RNA, 22 nt, synthetic construct
  source 1..22: mol_type = other RNA
caattgtaatgtctcctctttc

SEQ ID NO: 124956 - RNA, 22 nt, synthetic construct
  source 1..22: mol_type = other RNA
caattgtatttttcacaaacac

SEQ ID NO: 124957 - RNA, 22 nt, synthetic construct
  source 1..22: mol_type = other RNA
caattgtcctggcagatcaatt

SEQ ID NO: 124958 - RNA, 22 nt, synthetic construct
  source 1..22: mol_type = other RNA
caattgttaacatttcttctag

SEQ ID NO: 124959 - RNA, 22 nt, synthetic construct
  source 1..22: mol_type = other RNA
caatttaacttctaatgcccat

SEQ ID NO: 124960 - RNA, 22 nt, synthetic construct
  source 1..22: mol_type = other RNA
caatttaccatctgacatatgt

SEQ ID NO: 124961 - RNA, 22 nt, synthetic construct
  source 1..22: mol_type = other RNA
caatttagaaaatgcttatgtc

SEQ ID NO: 124962 - RNA, 22 nt, synthetic construct
  source 1..22: mol_type = other RNA
caatttagaattctctctcaac

SEQ ID NO: 124963 - RNA, 22 nt, synthetic construct
  source 1..22: mol_type = other RNA
caatttatatgatactcgtagt

SEQ ID NO: 124964 - RNA, 22 nt, synthetic construct
  source 1..22: mol_type = other RNA
caatttcagatctctgacattg

SEQ ID NO: 124965 - RNA, 22 nt, synthetic construct
  source 1..22: mol_type = other RNA
caatttcagggagaattggtag

SEQ ID NO: 124966 - RNA, 22 nt, synthetic construct
  source 1..22: mol_type = other RNA
caatttcatcgtaaaaagccat

SEQ ID NO: 124967 - RNA, 22 nt, synthetic construct
  source 1..22: mol_type = other RNA
caatttctttggctgttagcct

SEQ ID NO: 124968 - RNA, 22 nt, synthetic construct
  source 1..22: mol_type = other RNA
caatttgaggtagcacaactag

SEQ ID NO: 124969 - RNA, 22 nt, synthetic construct
  source 1..22: mol_type = other RNA
caatttgccaaaatgattttca

SEQ ID NO: 124970 - RNA, 22 nt, synthetic construct
  source 1..22: mol_type = other RNA
caatttgggatatagctacaat

SEQ ID NO: 124971 - RNA, 22 nt, synthetic construct
  source 1..22: mol_type = other RNA
caatttgttttccaagccttaa

SEQ ID NO: 124972 - RNA, 22 nt, synthetic construct
  source 1..22: mol_type = other RNA
caattttcatagcagcattgtt

SEQ ID NO: 124973 - RNA, 22 nt, synthetic construct
  source 1..22: mol_type = other RNA
caattttcatgggttgattttt

SEQ ID NO: 124974 - RNA, 22 nt, synthetic construct
  source 1..22: mol_type = other RNA
caattttcccccaattaaacta

SEQ ID NO: 124975 - RNA, 22 nt, synthetic construct
  source 1..22: mol_type = other RNA
caattttctctcatgttgggta

SEQ ID NO: 124976 - RNA, 22 nt, synthetic construct
  source 1..22: mol_type = other RNA
caattttcttaccctttactca

SEQ ID NO: 124977 - RNA, 22 nt, synthetic construct
  source 1..22: mol_type = other RNA
caattttttggcatacaactgc

SEQ ID NO: 124978 - RNA, 22 nt, synthetic construct
  source 1..22: mol_type = other RNA
cacaaaaagatctgtggacttt

SEQ ID NO: 124979 - RNA, 22 nt, synthetic construct
  source 1..22: mol_type = other RNA
cacaaaaagtgtgaccacattc

SEQ ID NO: 124980 - RNA, 22 nt, synthetic construct
  source 1..22: mol_type = other RNA
cacaaaacaaatggaaccactg

SEQ ID NO: 124981 - RNA, 22 nt, synthetic construct
  source 1..22: mol_type = other RNA
cacaaaagaaaattttctgagc

SEQ ID NO: 124982 - RNA, 22 nt, synthetic construct
  source 1..22: mol_type = other RNA
cacaaaagagctgggcccgcag

SEQ ID NO: 124983 - RNA, 22 nt, synthetic construct
  source 1..22: mol_type = other RNA
cacaaaagtgaaaactaaggtc

SEQ ID NO: 124984 - RNA, 22 nt, synthetic construct
  source 1..22: mol_type = other RNA
cacaaaagtttaactttgatga

SEQ ID NO: 124985 - RNA, 22 nt, synthetic construct
  source 1..22: mol_type = other RNA
cacaaaatatgaagcattaatg

SEQ ID NO: 124986 - RNA, 22 nt, synthetic construct
  source 1..22: mol_type = other RNA
cacaaaatcagatatgaaagag

SEQ ID NO: 124987 - RNA, 22 nt, synthetic construct
  source 1..22: mol_type = other RNA
cacaaaatgtggatgcatgagg

SEQ ID NO: 124988 - RNA, 22 nt, synthetic construct
  source 1..22: mol_type = other RNA
cacaaacaaatccttttcccag

SEQ ID NO: 124989 - RNA, 22 nt, synthetic construct
  source 1..22: mol_type = other RNA
cacaaacacaaaacaaatggaa

SEQ ID NO: 124990 - RNA, 22 nt, synthetic construct
  source 1..22: mol_type = other RNA
cacaaacacacaaaccaacaac

SEQ ID NO: 124991 - RNA, 22 nt, synthetic construct
  source 1..22: mol_type = other RNA
cacaaacatgaataaccaatgt

SEQ ID NO: 124992 - RNA, 22 nt, synthetic construct
  source 1..22: mol_type = other RNA
cacaaaccaacaacaaaaaatc

SEQ ID NO: 124993 - RNA, 22 nt, synthetic construct
  source 1..22: mol_type = other RNA
cacaaacctggcaatactctca

SEQ ID NO: 124994 - RNA, 22 nt, synthetic construct
  source 1..22: mol_type = other RNA
cacaaactgcagaatgacagaa

SEQ ID NO: 124995 - RNA, 22 nt, synthetic construct
  source 1..22: mol_type = other RNA
cacaaagccctcaggaccaggc

SEQ ID NO: 124996 - RNA, 22 nt, synthetic construct
  source 1..22: mol_type = other RNA
cacaaagccttctctactctgc

SEQ ID NO: 124997 - RNA, 22 nt, synthetic construct
  source 1..22: mol_type = other RNA
cacaaagctttaaactggatga

SEQ ID NO: 124998 - RNA, 22 nt, synthetic construct
  source 1..22: mol_type = other RNA
cacaaaggactggaactcattt

SEQ ID NO: 124999 - RNA, 22 nt, synthetic construct
  source 1..22: mol_type = other RNA
cacaaaggattgggaagattgg

SEQ ID NO: 125000 - RNA, 22 nt, synthetic construct
  source 1..22: mol_type = other RNA
cacaaagtccccacatgactgg

SEQ ID NO: 125001 - RNA, 22 nt, synthetic construct
  source 1..22: mol_type = other RNA
cacaaataattaacactatgtg

SEQ ID NO: 125002 - RNA, 22 nt, synthetic construct
  source 1..22: mol_type = other RNA
cacaaatggagtgacttaagca

SEQ ID NO: 125003 - RNA, 22 nt, synthetic construct
  source 1..22: mol_type = other RNA
cacaaattagccaggcgtggtg

SEQ ID NO: 125004 - RNA, 22 nt, synthetic construct
  source 1..22: mol_type = other RNA
cacaaattatgactgagatact

SEQ ID NO: 125005 - RNA, 22 nt, synthetic construct
  source 1..22: mol_type = other RNA
cacaacaatgaattctcatatt

SEQ ID NO: 125006 - RNA, 22 nt, synthetic construct
  source 1..22: mol_type = other RNA
cacaacacatgcacactagacc

SEQ ID NO: 125007 - RNA, 22 nt, synthetic construct
  source 1..22: mol_type = other RNA
cacaacactcagatatcaatct

SEQ ID NO: 125008 - RNA, 22 nt, synthetic construct
  source 1..22: mol_type = other RNA
cacaacaggcctgagccgtcgg

SEQ ID NO: 125009 - RNA, 22 nt, synthetic construct
  source 1..22: mol_type = other RNA
cacaacataccaaaacccttgg

SEQ ID NO: 125010 - RNA, 22 nt, synthetic construct
  source 1..22: mol_type = other RNA
cacaacatgttttatttctgta

SEQ ID NO: 125011 - RNA, 22 nt, synthetic construct
  source 1..22: mol_type = other RNA
cacaacattgtgcaaccatccc

SEQ ID NO: 125012 - RNA, 22 nt, synthetic construct
  source 1..22: mol_type = other RNA
cacaaccactgatggaattctg

SEQ ID NO: 125013 - RNA, 22 nt, synthetic construct
  source 1..22: mol_type = other RNA
cacaaccactggggagtgtgcc

SEQ ID NO: 125014 - RNA, 22 nt, synthetic construct
  source 1..22: mol_type = other RNA
cacaacgatttcttaaaaatga

SEQ ID NO: 125015 - RNA, 22 nt, synthetic construct
  source 1..22: mol_type = other RNA
cacaactagtaagtaaaatcgg

SEQ ID NO: 125016 - RNA, 22 nt, synthetic construct
  source 1..22: mol_type = other RNA
cacaacttgtatgaaattagtt

SEQ ID NO: 125017 - RNA, 22 nt, synthetic construct
  source 1..22: mol_type = other RNA
cacaagaaaaacctaaacctgt

SEQ ID NO: 125018 - RNA, 22 nt, synthetic construct
  source 1..22: mol_type = other RNA
cacaagacagatgtgcttaatc

SEQ ID NO: 125019 - RNA, 22 nt, synthetic construct
  source 1..22: mol_type = other RNA
cacaagacataagcattttcta

SEQ ID NO: 125020 - RNA, 22 nt, synthetic construct
  source 1..22: mol_type = other RNA
cacaagatctctatgcagaaat

SEQ ID NO: 125021 - RNA, 22 nt, synthetic construct
  source 1..22: mol_type = other RNA
cacaagattaatcttgcaaaac

SEQ ID NO: 125022 - RNA, 22 nt, synthetic construct
  source 1..22: mol_type = other RNA
cacaagcacagagtcagaaaat

SEQ ID NO: 125023 - RNA, 22 nt, synthetic construct
  source 1..22: mol_type = other RNA
cacaagccacatgtggttattg

SEQ ID NO: 125024 - RNA, 22 nt, synthetic construct
  source 1..22: mol_type = other RNA
cacaagccagggtctgtctcac

SEQ ID NO: 125025 - RNA, 22 nt, synthetic construct
  source 1..22: mol_type = other RNA
cacaagccttgaaaatatacta

SEQ ID NO: 125026 - RNA, 22 nt, synthetic construct
  source 1..22: mol_type = other RNA
cacaaggaaggtcaaatggtaa

SEQ ID NO: 125027 - RNA, 22 nt, synthetic construct
  source 1..22: mol_type = other RNA
cacaaggacaggtcacattctg

SEQ ID NO: 125028 - RNA, 22 nt, synthetic construct
  source 1..22: mol_type = other RNA
cacaaggactggcttcagtgcc

SEQ ID NO: 125029 - RNA, 22 nt, synthetic construct
  source 1..22: mol_type = other RNA
cacaaggattaatctttctgaa

SEQ ID NO: 125030 - RNA, 22 nt, synthetic construct
  source 1..22: mol_type = other RNA
cacaagggaagaggccacaaag

SEQ ID NO: 125031 - RNA, 22 nt, synthetic construct
  source 1..22: mol_type = other RNA
cacaaggtcaagagcggccttt

SEQ ID NO: 125032 - RNA, 22 nt, synthetic construct
  source 1..22: mol_type = other RNA
cacaaggtcagaagtttggaac

SEQ ID NO: 125033 - RNA, 22 nt, synthetic construct
  source 1..22: mol_type = other RNA
cacaagtagcagggactacagt

SEQ ID NO: 125034 - RNA, 22 nt, synthetic construct
  source 1..22: mol_type = other RNA
cacaagtattaacgaattcttt

SEQ ID NO: 125035 - RNA, 22 nt, synthetic construct
  source 1..22: mol_type = other RNA
cacaagtgtttcatttacaaaa

SEQ ID NO: 125036 - RNA, 22 nt, synthetic construct
  source 1..22: mol_type = other RNA
cacaatactgtctcagtcccaa

SEQ ID NO: 125037 - RNA, 22 nt, synthetic construct
  source 1..22: mol_type = other RNA
cacaatcaaatttaagttactg

SEQ ID NO: 125038 - RNA, 22 nt, synthetic construct
  source 1..22: mol_type = other RNA
cacaatcatagctcactagagc

SEQ ID NO: 125039 - RNA, 22 nt, synthetic construct
  source 1..22: mol_type = other RNA
cacaatccaagtttctagccat

SEQ ID NO: 125040 - RNA, 22 nt, synthetic construct
  source 1..22: mol_type = other RNA
cacaatcttacccccatcacac

SEQ ID NO: 125041 - RNA, 22 nt, synthetic construct
  source 1..22: mol_type = other RNA
cacaatcttgagacggaagact

SEQ ID NO: 125042 - RNA, 22 nt, synthetic construct
  source 1..22: mol_type = other RNA
cacaatgagacatttgagggtg

SEQ ID NO: 125043 - RNA, 22 nt, synthetic construct
  source 1..22: mol_type = other RNA
cacaatgagaccccatctctac

SEQ ID NO: 125044 - RNA, 22 nt, synthetic construct
  source 1..22: mol_type = other RNA
cacaatgcagtattgttaactg

SEQ ID NO: 125045 - RNA, 22 nt, synthetic construct
  source 1..22: mol_type = other RNA
cacaatgcctgccgcagagcaa

SEQ ID NO: 125046 - RNA, 22 nt, synthetic construct
  source 1..22: mol_type = other RNA
cacaatgcgtttgttagatctg

SEQ ID NO: 125047 - RNA, 22 nt, synthetic construct
  source 1..22: mol_type = other RNA
cacaatggaatattactcagtc

SEQ ID NO: 125048 - RNA, 22 nt, synthetic construct
  source 1..22: mol_type = other RNA
cacaatggtcagagttgtatct

SEQ ID NO: 125049 - RNA, 22 nt, synthetic construct
  source 1..22: mol_type = other RNA
cacaatgttgtggatgtcctta

SEQ ID NO: 125050 - RNA, 22 nt, synthetic construct
  source 1..22: mol_type = other RNA
cacaattcacagaatatactca

SEQ ID NO: 125051 - RNA, 22 nt, synthetic construct
  source 1..22: mol_type = other RNA
cacaattgcactccagcctagg

SEQ ID NO: 125052 - RNA, 22 nt, synthetic construct
  source 1..22: mol_type = other RNA
cacaatttgaggtagcacaact

SEQ ID NO: 125053 - RNA, 22 nt, synthetic construct
  source 1..22: mol_type = other RNA
cacacaaaccaacaacaaaaaa

SEQ ID NO: 125054 - RNA, 22 nt, synthetic construct
  source 1..22: mol_type = other RNA
cacacaacaatgaattctcata

SEQ ID NO: 125055 - RNA, 22 nt, synthetic construct
  source 1..22: mol_type = other RNA
cacacaacactcagatatcaat

SEQ ID NO: 125056 - RNA, 22 nt, synthetic construct
  source 1..22: mol_type = other RNA
cacacaatccaagtttctagcc

SEQ ID NO: 125057 - RNA, 22 nt, synthetic construct
  source 1..22: mol_type = other RNA
cacacaatcttgagacggaaga

SEQ ID NO: 125058 - RNA, 22 nt, synthetic construct
  source 1..22: mol_type = other RNA
cacacaatggtcagagttgtat

SEQ ID NO: 125059 - RNA, 22 nt, synthetic construct
  source 1..22: mol_type = other RNA
cacacaatttgaggtagcacaa

SEQ ID NO: 125060 - RNA, 22 nt, synthetic construct
  source 1..22: mol_type = other RNA
cacacacagtcctgtgtttctg

SEQ ID NO: 125061 - RNA, 22 nt, synthetic construct
  source 1..22: mol_type = other RNA
cacacaccaaatcatgaaagtg

SEQ ID NO: 125062 - RNA, 22 nt, synthetic construct
  source 1..22: mol_type = other RNA
cacacaccactacacccggcta

SEQ ID NO: 125063 - RNA, 22 nt, synthetic construct
  source 1..22: mol_type = other RNA
cacacaccctttcttaggaagc

SEQ ID NO: 125064 - RNA, 22 nt, synthetic construct
  source 1..22: mol_type = other RNA
cacacacctaccaccatgcttg

SEQ ID NO: 125065 - RNA, 22 nt, synthetic construct
  source 1..22: mol_type = other RNA
cacacacctattcataggtaat

SEQ ID NO: 125066 - RNA, 22 nt, synthetic construct
  source 1..22: mol_type = other RNA
cacacacgtttatattcctttt

SEQ ID NO: 125067 - RNA, 22 nt, synthetic construct
  source 1..22: mol_type = other RNA
cacacagagaacagcattatct

SEQ ID NO: 125068 - RNA, 22 nt, synthetic construct
  source 1..22: mol_type = other RNA
cacacagagggagcgccacgtg

SEQ ID NO: 125069 - RNA, 22 nt, synthetic construct
  source 1..22: mol_type = other RNA
cacacaggagaacttgtctcgg

SEQ ID NO: 125070 - RNA, 22 nt, synthetic construct
  source 1..22: mol_type = other RNA
cacacagtacaaggctagagct

SEQ ID NO: 125071 - RNA, 22 nt, synthetic construct
  source 1..22: mol_type = other RNA
cacacagtcctgtgtttctgct

SEQ ID NO: 125072 - RNA, 22 nt, synthetic construct
  source 1..22: mol_type = other RNA
cacacagtttgagaagccacac

SEQ ID NO: 125073 - RNA, 22 nt, synthetic construct
  source 1..22: mol_type = other RNA
cacacataagggggaatctact

SEQ ID NO: 125074 - RNA, 22 nt, synthetic construct
  source 1..22: mol_type = other RNA
cacacatcagacacctacatta

SEQ ID NO: 125075 - RNA, 22 nt, synthetic construct
  source 1..22: mol_type = other RNA
cacacatccacgcgtaagggta

SEQ ID NO: 125076 - RNA, 22 nt, synthetic construct
  source 1..22: mol_type = other RNA
cacacatgaacctgcatggtgt

SEQ ID NO: 125077 - RNA, 22 nt, synthetic construct
  source 1..22: mol_type = other RNA
cacacattaactatggacatga

SEQ ID NO: 125078 - RNA, 22 nt, synthetic construct
  source 1..22: mol_type = other RNA
cacacattagcctagacctcaa

SEQ ID NO: 125079 - RNA, 22 nt, synthetic construct
  source 1..22: mol_type = other RNA
cacaccaaatcatgaaagtgga

SEQ ID NO: 125080 - RNA, 22 nt, synthetic construct
  source 1..22: mol_type = other RNA
cacaccaacatggcacatgtct

SEQ ID NO: 125081 - RNA, 22 nt, synthetic construct
  source 1..22: mol_type = other RNA
cacaccaagacatgttaggttg

SEQ ID NO: 125082 - RNA, 22 nt, synthetic construct
  source 1..22: mol_type = other RNA
cacaccaaggtttctctccaag

SEQ ID NO: 125083 - RNA, 22 nt, synthetic construct
  source 1..22: mol_type = other RNA
cacaccacatccagctaatttt

SEQ ID NO: 125084 - RNA, 22 nt, synthetic construct
  source 1..22: mol_type = other RNA
cacaccactacacccggctaat

SEQ ID NO: 125085 - RNA, 22 nt, synthetic construct
  source 1..22: mol_type = other RNA
cacaccatgacagagttccacc

SEQ ID NO: 125086 - RNA, 22 nt, synthetic construct
  source 1..22: mol_type = other RNA
cacaccatttagatcatcttat

SEQ ID NO: 125087 - RNA, 22 nt, synthetic construct
  source 1..22: mol_type = other RNA
cacacccagtatacacgtattt

SEQ ID NO: 125088 - RNA, 22 nt, synthetic construct
  source 1..22: mol_type = other RNA
cacacccagttatctctgccct

SEQ ID NO: 125089 - RNA, 22 nt, synthetic construct
  source 1..22: mol_type = other RNA
cacaccctcctaccttccaaag

SEQ ID NO: 125090 - RNA, 22 nt, synthetic construct
  source 1..22: mol_type = other RNA
cacacccttggtaaacagcagt

SEQ ID NO: 125091 - RNA, 22 nt, synthetic construct
  source 1..22: mol_type = other RNA
cacaccctttcttaggaagcta

SEQ ID NO: 125092 - RNA, 22 nt, synthetic construct
  source 1..22: mol_type = other RNA
cacaccgctgcattccagcctg

SEQ ID NO: 125093 - RNA, 22 nt, synthetic construct
  source 1..22: mol_type = other RNA
cacacctaccaccatgcttggc

SEQ ID NO: 125094 - RNA, 22 nt, synthetic construct
  source 1..22: mol_type = other RNA
cacacctaggcctattttaggc

SEQ ID NO: 125095 - RNA, 22 nt, synthetic construct
  source 1..22: mol_type = other RNA
cacacctattcataggtaatac

SEQ ID NO: 125096 - RNA, 22 nt, synthetic construct
  source 1..22: mol_type = other RNA
cacacctgaaattctcaaatga

SEQ ID NO: 125097 - RNA, 22 nt, synthetic construct
  source 1..22: mol_type = other RNA
cacacctggcccctttcaagat

SEQ ID NO: 125098 - RNA, 22 nt, synthetic construct
  source 1..22: mol_type = other RNA
cacacctgggtatacagcaaaa

SEQ ID NO: 125099 - RNA, 22 nt, synthetic construct
  source 1..22: mol_type = other RNA
cacacgagaaggacagcttcca

SEQ ID NO: 125100 - RNA, 22 nt, synthetic construct
  source 1..22: mol_type = other RNA
cacacgagtattcaagtttcac

SEQ ID NO: 125101 - RNA, 22 nt, synthetic construct
  source 1..22: mol_type = other RNA
cacacgcattgcattgactacc

SEQ ID NO: 125102 - RNA, 22 nt, synthetic construct
  source 1..22: mol_type = other RNA
cacacgccactgcaggtgttgg

SEQ ID NO: 125103 - RNA, 22 nt, synthetic construct
  source 1..22: mol_type = other RNA
cacacgctggaagggagcccaa

SEQ ID NO: 125104 - RNA, 22 nt, synthetic construct
  source 1..22: mol_type = other RNA
cacacggaaaacattattttct

SEQ ID NO: 125105 - RNA, 22 nt, synthetic construct
  source 1..22: mol_type = other RNA
cacacgggctgggcgcgatggc

SEQ ID NO: 125106 - RNA, 22 nt, synthetic construct
  source 1..22: mol_type = other RNA
cacacgggtacacatcctaata

SEQ ID NO: 125107 - RNA, 22 nt, synthetic construct
  source 1..22: mol_type = other RNA
cacacgtttatattccttttat

SEQ ID NO: 125108 - RNA, 22 nt, synthetic construct
  source 1..22: mol_type = other RNA
cacactagacctttcttaggtt

SEQ ID NO: 125109 - RNA, 22 nt, synthetic construct
  source 1..22: mol_type = other RNA
cacactagccactgggtcttat

SEQ ID NO: 125110 - RNA, 22 nt, synthetic construct
  source 1..22: mol_type = other RNA
cacactagctgacccactggtt

SEQ ID NO: 125111 - RNA, 22 nt, synthetic construct
  source 1..22: mol_type = other RNA
cacactagtcaccctacagact

SEQ ID NO: 125112 - RNA, 22 nt, synthetic construct
  source 1..22: mol_type = other RNA
cacactataacagatggaactc

SEQ ID NO: 125113 - RNA, 22 nt, synthetic construct
  source 1..22: mol_type = other RNA
cacactccagcatccctccagt

SEQ ID NO: 125114 - RNA, 22 nt, synthetic construct
  source 1..22: mol_type = other RNA
cacactccccagtggttgtgga

SEQ ID NO: 125115 - RNA, 22 nt, synthetic construct
  source 1..22: mol_type = other RNA
cacactcgcactccacttccca

SEQ ID NO: 125116 - RNA, 22 nt, synthetic construct
  source 1..22: mol_type = other RNA
cacactcgtgtatgatttctag

SEQ ID NO: 125117 - RNA, 22 nt, synthetic construct
  source 1..22: mol_type = other RNA
cacactcttaataactgcctaa

SEQ ID NO: 125118 - RNA, 22 nt, synthetic construct
  source 1..22: mol_type = other RNA
cacactcttggtctttctccca

SEQ ID NO: 125119 - RNA, 22 nt, synthetic construct
  source 1..22: mol_type = other RNA
cacactgaaacaatcgcaatcc

SEQ ID NO: 125120 - RNA, 22 nt, synthetic construct
  source 1..22: mol_type = other RNA
cacactgacaggacagagcagt

SEQ ID NO: 125121 - RNA, 22 nt, synthetic construct
  source 1..22: mol_type = other RNA
cacactgattttctgcttctca

SEQ ID NO: 125122 - RNA, 22 nt, synthetic construct
  source 1..22: mol_type = other RNA
cacactgctcctgcctttgttc

SEQ ID NO: 125123 - RNA, 22 nt, synthetic construct
  source 1..22: mol_type = other RNA
cacactgctcttctattccaga

SEQ ID NO: 125124 - RNA, 22 nt, synthetic construct
  source 1..22: mol_type = other RNA
cacactgggtaaacaagactca

SEQ ID NO: 125125 - RNA, 22 nt, synthetic construct
  source 1..22: mol_type = other RNA
cacactggtcactggccactga

SEQ ID NO: 125126 - RNA, 22 nt, synthetic construct
  source 1..22: mol_type = other RNA
cacactgttgtccaggccagag

SEQ ID NO: 125127 - RNA, 22 nt, synthetic construct
  source 1..22: mol_type = other RNA
cacactgtttgattactgtagc

SEQ ID NO: 125128 - RNA, 22 nt, synthetic construct
  source 1..22: mol_type = other RNA
cacacttactaaatgatctttc

SEQ ID NO: 125129 - RNA, 22 nt, synthetic construct
  source 1..22: mol_type = other RNA
cacacttagttcaagatgcata

SEQ ID NO: 125130 - RNA, 22 nt, synthetic construct
  source 1..22: mol_type = other RNA
cacacttgatggtttggggctt

SEQ ID NO: 125131 - RNA, 22 nt, synthetic construct
  source 1..22: mol_type = other RNA
cacacttgcttgggaacagcag

SEQ ID NO: 125132 - RNA, 22 nt, synthetic construct
  source 1..22: mol_type = other RNA
cacactttccttggagaagagt

SEQ ID NO: 125133 - RNA, 22 nt, synthetic construct
  source 1..22: mol_type = other RNA
cacactttttgtgagttttaac

SEQ ID NO: 125134 - RNA, 22 nt, synthetic construct
  source 1..22: mol_type = other RNA
cacagaaacagaaaaatccatc

SEQ ID NO: 125135 - RNA, 22 nt, synthetic construct
  source 1..22: mol_type = other RNA
cacagaaagcctcttcagaaga

SEQ ID NO: 125136 - RNA, 22 nt, synthetic construct
  source 1..22: mol_type = other RNA
cacagaacactaaaggggattt

SEQ ID NO: 125137 - RNA, 22 nt, synthetic construct
  source 1..22: mol_type = other RNA
cacagaaccatgtaacaggttt

SEQ ID NO: 125138 - RNA, 22 nt, synthetic construct
  source 1..22: mol_type = other RNA
cacagaactgtcactgacacag

SEQ ID NO: 125139 - RNA, 22 nt, synthetic construct
  source 1..22: mol_type = other RNA
cacagaagtgttttgatagttg

SEQ ID NO: 125140 - RNA, 22 nt, synthetic construct
  source 1..22: mol_type = other RNA
cacagaatatactcagaaaaat

SEQ ID NO: 125141 - RNA, 22 nt, synthetic construct
  source 1..22: mol_type = other RNA
cacagaattactatatgatcca

SEQ ID NO: 125142 - RNA, 22 nt, synthetic construct
  source 1..22: mol_type = other RNA
cacagaattattgattggcaaa

SEQ ID NO: 125143 - RNA, 22 nt, synthetic construct
  source 1..22: mol_type = other RNA
cacagacagggaatggggagct

SEQ ID NO: 125144 - RNA, 22 nt, synthetic construct
  source 1..22: mol_type = other RNA
cacagacagtaatttatacaaa

SEQ ID NO: 125145 - RNA, 22 nt, synthetic construct
  source 1..22: mol_type = other RNA
cacagacatgaacaatccttct

SEQ ID NO: 125146 - RNA, 22 nt, synthetic construct
  source 1..22: mol_type = other RNA
cacagacgcaaaggatgtcaac

SEQ ID NO: 125147 - RNA, 22 nt, synthetic construct
  source 1..22: mol_type = other RNA
cacagacgtgcagcaccacacc

SEQ ID NO: 125148 - RNA, 22 nt, synthetic construct
  source 1..22: mol_type = other RNA
cacagactcaagcctgataagc

SEQ ID NO: 125149 - RNA, 22 nt, synthetic construct
  source 1..22: mol_type = other RNA
cacagactgtgccttgatccat

SEQ ID NO: 125150 - RNA, 22 nt, synthetic construct
  source 1..22: mol_type = other RNA
cacagagaacagcattatctta

SEQ ID NO: 125151 - RNA, 22 nt, synthetic construct
  source 1..22: mol_type = other RNA
cacagagccgaaatgcacttag

SEQ ID NO: 125152 - RNA, 22 nt, synthetic construct
  source 1..22: mol_type = other RNA
cacagagcctaaaataggccta

SEQ ID NO: 125153 - RNA, 22 nt, synthetic construct
  source 1..22: mol_type = other RNA
cacagaggcaacagtcattcag

SEQ ID NO: 125154 - RNA, 22 nt, synthetic construct
  source 1..22: mol_type = other RNA
cacagaggctttttatatttcc

SEQ ID NO: 125155 - RNA, 22 nt, synthetic construct
  source 1..22: mol_type = other RNA
cacagagggagcgccacgtgaa

SEQ ID NO: 125156 - RNA, 22 nt, synthetic construct
  source 1..22: mol_type = other RNA
cacagagtcagaaaattaaatt

SEQ ID NO: 125157 - RNA, 22 nt, synthetic construct
  source 1..22: mol_type = other RNA
cacagagttcagcttacagtca

SEQ ID NO: 125158 - RNA, 22 nt, synthetic construct
  source 1..22: mol_type = other RNA
cacagataatttcttcagaaga

SEQ ID NO: 125159 - RNA, 22 nt, synthetic construct
  source 1..22: mol_type = other RNA
cacagatacaactctgaccatt

SEQ ID NO: 125160 - RNA, 22 nt, synthetic construct
  source 1..22: mol_type = other RNA
cacagatctttttgtgtatatg

SEQ ID NO: 125161 - RNA, 22 nt, synthetic construct
  source 1..22: mol_type = other RNA
cacagcactgttaactgactta

SEQ ID NO: 125162 - RNA, 22 nt, synthetic construct
  source 1..22: mol_type = other RNA
cacagcagggctcctccaaggc

SEQ ID NO: 125163 - RNA, 22 nt, synthetic construct
  source 1..22: mol_type = other RNA
cacagcatgaatacctatttag

SEQ ID NO: 125164 - RNA, 22 nt, synthetic construct
  source 1..22: mol_type = other RNA
cacagccagtcagtgatggagg

SEQ ID NO: 125165 - RNA, 22 nt, synthetic construct
  source 1..22: mol_type = other RNA
cacagcgcccggcccgttattt

SEQ ID NO: 125166 - RNA, 22 nt, synthetic construct
  source 1..22: mol_type = other RNA
cacagcgtgcaccttacattgt

SEQ ID NO: 125167 - RNA, 22 nt, synthetic construct
  source 1..22: mol_type = other RNA
cacagcgtggaatggtcaattt

SEQ ID NO: 125168 - RNA, 22 nt, synthetic construct
  source 1..22: mol_type = other RNA
cacagcgttgttcagttgaaaa

SEQ ID NO: 125169 - RNA, 22 nt, synthetic construct
  source 1..22: mol_type = other RNA
cacagctacactcaatacacgt

SEQ ID NO: 125170 - RNA, 22 nt, synthetic construct
  source 1..22: mol_type = other RNA
cacagctatcaggccttccacc

SEQ ID NO: 125171 - RNA, 22 nt, synthetic construct
  source 1..22: mol_type = other RNA
cacagctctcatgagtcctgaa

SEQ ID NO: 125172 - RNA, 22 nt, synthetic construct
  source 1..22: mol_type = other RNA
cacagcttaccaagtgccgcgt

SEQ ID NO: 125173 - RNA, 22 nt, synthetic construct
  source 1..22: mol_type = other RNA
cacagctttcttttccaaccaa

SEQ ID NO: 125174 - RNA, 22 nt, synthetic construct
  source 1..22: mol_type = other RNA
cacaggaaagatgtcttttaac

SEQ ID NO: 125175 - RNA, 22 nt, synthetic construct
  source 1..22: mol_type = other RNA
cacaggactgtgtgtgtccagg

SEQ ID NO: 125176 - RNA, 22 nt, synthetic construct
  source 1..22: mol_type = other RNA
cacaggagaacttgtctcggat

SEQ ID NO: 125177 - RNA, 22 nt, synthetic construct
  source 1..22: mol_type = other RNA
cacaggagagcgacagctacgg

SEQ ID NO: 125178 - RNA, 22 nt, synthetic construct
  source 1..22: mol_type = other RNA
cacaggcatcggccgggcgtgg

SEQ ID NO: 125179 - RNA, 22 nt, synthetic construct
  source 1..22: mol_type = other RNA
cacaggcatctctctaaaaaca

SEQ ID NO: 125180 - RNA, 22 nt, synthetic construct
  source 1..22: mol_type = other RNA
cacaggcatgcgccatcacacc

SEQ ID NO: 125181 - RNA, 22 nt, synthetic construct
  source 1..22: mol_type = other RNA
cacaggcgttgagccatcatgc

SEQ ID NO: 125182 - RNA, 22 nt, synthetic construct
  source 1..22: mol_type = other RNA
cacaggctctcttcaccaactg

SEQ ID NO: 125183 - RNA, 22 nt, synthetic construct
  source 1..22: mol_type = other RNA
cacaggctgaagggaggaaaaa

SEQ ID NO: 125184 - RNA, 22 nt, synthetic construct
  source 1..22: mol_type = other RNA
cacaggctttcctacaatacag

SEQ ID NO: 125185 - RNA, 22 nt, synthetic construct
  source 1..22: mol_type = other RNA
cacaggctttgacttctcaggg

SEQ ID NO: 125186 - RNA, 22 nt, synthetic construct
  source 1..22: mol_type = other RNA
cacagggaaaactacatgtaaa

SEQ ID NO: 125187 - RNA, 22 nt, synthetic construct
  source 1..22: mol_type = other RNA
cacagggactgatgaagaacct

SEQ ID NO: 125188 - RNA, 22 nt, synthetic construct
  source 1..22: mol_type = other RNA
cacagggagatacttgattaca

SEQ ID NO: 125189 - RNA, 22 nt, synthetic construct
  source 1..22: mol_type = other RNA
cacagggcagggagagagaaac

SEQ ID NO: 125190 - RNA, 22 nt, synthetic construct
  source 1..22: mol_type = other RNA
cacagggcccagcctcaacagc

SEQ ID NO: 125191 - RNA, 22 nt, synthetic construct
  source 1..22: mol_type = other RNA
cacaggtagacatgtgccatgt

SEQ ID NO: 125192 - RNA, 22 nt, synthetic construct
  source 1..22: mol_type = other RNA
cacaggtttaggtttttcttgt

SEQ ID NO: 125193 - RNA, 22 nt, synthetic construct
  source 1..22: mol_type = other RNA
cacagtacaaggctagagctca

SEQ ID NO: 125194 - RNA, 22 nt, synthetic construct
  source 1..22: mol_type = other RNA
cacagtacgcttttatgttata

SEQ ID NO: 125195 - RNA, 22 nt, synthetic construct
  source 1..22: mol_type = other RNA
cacagtagaagactcagcagtt

SEQ ID NO: 125196 - RNA, 22 nt, synthetic construct
  source 1..22: mol_type = other RNA
cacagtatgcacaaataattaa

SEQ ID NO: 125197 - RNA, 22 nt, synthetic construct
  source 1..22: mol_type = other RNA
cacagtatgcggggtttcagca

SEQ ID NO: 125198 - RNA, 22 nt, synthetic construct
  source 1..22: mol_type = other RNA
cacagtatgctgtttacattag

SEQ ID NO: 125199 - RNA, 22 nt, synthetic construct
  source 1..22: mol_type = other RNA
cacagtcacaaagctttaaact

SEQ ID NO: 125200 - RNA, 22 nt, synthetic construct
  source 1..22: mol_type = other RNA
cacagtccactcacctgtcatg

SEQ ID NO: 125201 - RNA, 22 nt, synthetic construct
  source 1..22: mol_type = other RNA
cacagtccaggaacttacagta

SEQ ID NO: 125202 - RNA, 22 nt, synthetic construct
  source 1..22: mol_type = other RNA
cacagtcctgtgtttctgctat

SEQ ID NO: 125203 - RNA, 22 nt, synthetic construct
  source 1..22: mol_type = other RNA
cacagtctcccccaggtggttc

SEQ ID NO: 125204 - RNA, 22 nt, synthetic construct
  source 1..22: mol_type = other RNA
cacagtctctgcagagcaggct

SEQ ID NO: 125205 - RNA, 22 nt, synthetic construct
  source 1..22: mol_type = other RNA
cacagtctgtgcttaaggaaat

SEQ ID NO: 125206 - RNA, 22 nt, synthetic construct
  source 1..22: mol_type = other RNA
cacagtgaattctgacttagtg

SEQ ID NO: 125207 - RNA, 22 nt, synthetic construct
  source 1..22: mol_type = other RNA
cacagtgactttactgttctcc

SEQ ID NO: 125208 - RNA, 22 nt, synthetic construct
  source 1..22: mol_type = other RNA
cacagtgaggacgctgatgaca

SEQ ID NO: 125209 - RNA, 22 nt, synthetic construct
  source 1..22: mol_type = other RNA
cacagtgctccatagcttccta

SEQ ID NO: 125210 - RNA, 22 nt, synthetic construct
  source 1..22: mol_type = other RNA
cacagtgttgagaaagcacata

SEQ ID NO: 125211 - RNA, 22 nt, synthetic construct
  source 1..22: mol_type = other RNA
cacagttctagttctaataaac

SEQ ID NO: 125212 - RNA, 22 nt, synthetic construct
  source 1..22: mol_type = other RNA
cacagtttgaaactttaagagt

SEQ ID NO: 125213 - RNA, 22 nt, synthetic construct
  source 1..22: mol_type = other RNA
cacagtttgagaagccacacag

SEQ ID NO: 125214 - RNA, 22 nt, synthetic construct
  source 1..22: mol_type = other RNA
cacataaaaaaggaatctgggc

SEQ ID NO: 125215 - RNA, 22 nt, synthetic construct
  source 1..22: mol_type = other RNA
cacataaaaggatatgggccaa

SEQ ID NO: 125216 - RNA, 22 nt, synthetic construct
  source 1..22: mol_type = other RNA
cacataaagtcttgctggaagt

SEQ ID NO: 125217 - RNA, 22 nt, synthetic construct
  source 1..22: mol_type = other RNA
cacataaatcacaggaaagatg

SEQ ID NO: 125218 - RNA, 22 nt, synthetic construct
  source 1..22: mol_type = other RNA
cacataaatttgccacatttta

SEQ ID NO: 125219 - RNA, 22 nt, synthetic construct
  source 1..22: mol_type = other RNA
cacataagggggaatctactct

SEQ ID NO: 125220 - RNA, 22 nt, synthetic construct
  source 1..22: mol_type = other RNA
cacataaggtatatttctgtaa

SEQ ID NO: 125221 - RNA, 22 nt, synthetic construct
  source 1..22: mol_type = other RNA
cacataattgaacccactgagc

SEQ ID NO: 125222 - RNA, 22 nt, synthetic construct
  source 1..22: mol_type = other RNA
cacatacaaaccaaaaaatgtg

SEQ ID NO: 125223 - RNA, 22 nt, synthetic construct
  source 1..22: mol_type = other RNA
cacatacacagggaaaactaca

SEQ ID NO: 125224 - RNA, 22 nt, synthetic construct
  source 1..22: mol_type = other RNA
cacatactgaaagacagacctc

SEQ ID NO: 125225 - RNA, 22 nt, synthetic construct
  source 1..22: mol_type = other RNA
cacatactgcatattgaagcca

SEQ ID NO: 125226 - RNA, 22 nt, synthetic construct
  source 1..22: mol_type = other RNA
cacatagaagcgctcttcaagc

SEQ ID NO: 125227 - RNA, 22 nt, synthetic construct
  source 1..22: mol_type = other RNA
cacatagacctgaatgactgtt

SEQ ID NO: 125228 - RNA, 22 nt, synthetic construct
  source 1..22: mol_type = other RNA
cacataggatagttaaacatgt

SEQ ID NO: 125229 - RNA, 22 nt, synthetic construct
  source 1..22: mol_type = other RNA
cacatagtgttaattatttgtg

SEQ ID NO: 125230 - RNA, 22 nt, synthetic construct
  source 1..22: mol_type = other RNA
cacatatctaattaacatccag

SEQ ID NO: 125231 - RNA, 22 nt, synthetic construct
  source 1..22: mol_type = other RNA
cacatatctttaggtgtttttt

SEQ ID NO: 125232 - RNA, 22 nt, synthetic construct
  source 1..22: mol_type = other RNA
cacatatttatcaacacatagt

SEQ ID NO: 125233 - RNA, 22 nt, synthetic construct
  source 1..22: mol_type = other RNA
cacatattttaaaagtcagcta

SEQ ID NO: 125234 - RNA, 22 nt, synthetic construct
  source 1..22: mol_type = other RNA
cacatattttatgctttgtctc

SEQ ID NO: 125235 - RNA, 22 nt, synthetic construct
  source 1..22: mol_type = other RNA
cacatcagacacctacattaat

SEQ ID NO: 125236 - RNA, 22 nt, synthetic construct
  source 1..22: mol_type = other RNA
cacatcagattttgaagattta

SEQ ID NO: 125237 - RNA, 22 nt, synthetic construct
  source 1..22: mol_type = other RNA
cacatcagcgctaagtgcattt

SEQ ID NO: 125238 - RNA, 22 nt, synthetic construct
  source 1..22: mol_type = other RNA
cacatcagtgctgctctgacgt

SEQ ID NO: 125239 - RNA, 22 nt, synthetic construct
  source 1..22: mol_type = other RNA
cacatcagttaccaccaagaaa

SEQ ID NO: 125240 - RNA, 22 nt, synthetic construct
  source 1..22: mol_type = other RNA
cacatccacgcgtaagggtaca

SEQ ID NO: 125241 - RNA, 22 nt, synthetic construct
  source 1..22: mol_type = other RNA
cacatccagaagtcacttttta

SEQ ID NO: 125242 - RNA, 22 nt, synthetic construct
  source 1..22: mol_type = other RNA
cacatccagctaattttcatta

SEQ ID NO: 125243 - RNA, 22 nt, synthetic construct
  source 1..22: mol_type = other RNA
cacatcctaatacagtaaagcc

SEQ ID NO: 125244 - RNA, 22 nt, synthetic construct
  source 1..22: mol_type = other RNA
cacatccttgccaacagttact

SEQ ID NO: 125245 - RNA, 22 nt, synthetic construct
  source 1..22: mol_type = other RNA
cacatctcccataccacctgtc

SEQ ID NO: 125246 - RNA, 22 nt, synthetic construct
  source 1..22: mol_type = other RNA
cacatctgtcttgtgcatcctt

SEQ ID NO: 125247 - RNA, 22 nt, synthetic construct
  source 1..22: mol_type = other RNA
cacatgaacctgcatggtgtaa

SEQ ID NO: 125248 - RNA, 22 nt, synthetic construct
  source 1..22: mol_type = other RNA
cacatgactggccatccttccc

SEQ ID NO: 125249 - RNA, 22 nt, synthetic construct
  source 1..22: mol_type = other RNA
cacatgcacaaggtcaagagcg

SEQ ID NO: 125250 - RNA, 22 nt, synthetic construct
  source 1..22: mol_type = other RNA
cacatgcacactagacctttct

SEQ ID NO: 125251 - RNA, 22 nt, synthetic construct
  source 1..22: mol_type = other RNA
cacatgcttccaaaagcaggcc

SEQ ID NO: 125252 - RNA, 22 nt, synthetic construct
  source 1..22: mol_type = other RNA
cacatggcatcggggcctacag

SEQ ID NO: 125253 - RNA, 22 nt, synthetic construct
  source 1..22: mol_type = other RNA
cacatgggcatgggtccaagac

SEQ ID NO: 125254 - RNA, 22 nt, synthetic construct
  source 1..22: mol_type = other RNA
cacatggtgataactggtgctt

SEQ ID NO: 125255 - RNA, 22 nt, synthetic construct
  source 1..22: mol_type = other RNA
cacatgtcagccacaagacata

SEQ ID NO: 125256 - RNA, 22 nt, synthetic construct
  source 1..22: mol_type = other RNA
cacatgtcatgggccgggcgta

SEQ ID NO: 125257 - RNA, 22 nt, synthetic construct
  source 1..22: mol_type = other RNA
cacatgtggcttgtggctacac

SEQ ID NO: 125258 - RNA, 22 nt, synthetic construct
  source 1..22: mol_type = other RNA
cacatgtggttattgagtctgt

SEQ ID NO: 125259 - RNA, 22 nt, synthetic construct
  source 1..22: mol_type = other RNA
cacatgttactcattatggttg

SEQ ID NO: 125260 - RNA, 22 nt, synthetic construct
  source 1..22: mol_type = other RNA
cacatgttccctagaacttaaa

SEQ ID NO: 125261 - RNA, 22 nt, synthetic construct
  source 1..22: mol_type = other RNA
cacatgttgagtcttgtttacc

SEQ ID NO: 125262 - RNA, 22 nt, synthetic construct
  source 1..22: mol_type = other RNA
cacatgtttggtcaattgatct

SEQ ID NO: 125263 - RNA, 22 nt, synthetic construct
  source 1..22: mol_type = other RNA
cacattaaataagggcattttc

SEQ ID NO: 125264 - RNA, 22 nt, synthetic construct
  source 1..22: mol_type = other RNA
cacattaacagaatgaaggaca

SEQ ID NO: 125265 - RNA, 22 nt, synthetic construct
  source 1..22: mol_type = other RNA
cacattaactatggacatgagg

SEQ ID NO: 125266 - RNA, 22 nt, synthetic construct
  source 1..22: mol_type = other RNA
cacattaataagatcatacacc

SEQ ID NO: 125267 - RNA, 22 nt, synthetic construct
  source 1..22: mol_type = other RNA
cacattagaatcatccggggag

SEQ ID NO: 125268 - RNA, 22 nt, synthetic construct
  source 1..22: mol_type = other RNA
cacattagccactctgaattct

SEQ ID NO: 125269 - RNA, 22 nt, synthetic construct
  source 1..22: mol_type = other RNA
cacattagcctagacctcaaat

SEQ ID NO: 125270 - RNA, 22 nt, synthetic construct
  source 1..22: mol_type = other RNA
cacattaggctctgggtcagaa

SEQ ID NO: 125271 - RNA, 22 nt, synthetic construct
  source 1..22: mol_type = other RNA
cacattcaaaattgttctaaca

SEQ ID NO: 125272 - RNA, 22 nt, synthetic construct
  source 1..22: mol_type = other RNA
cacattcaacaacatggatgaa

SEQ ID NO: 125273 - RNA, 22 nt, synthetic construct
  source 1..22: mol_type = other RNA
cacattcaagcagaaatgagtt

SEQ ID NO: 125274 - RNA, 22 nt, synthetic construct
  source 1..22: mol_type = other RNA
cacattcacagcgtgcacctta

SEQ ID NO: 125275 - RNA, 22 nt, synthetic construct
  source 1..22: mol_type = other RNA
cacattcagaggtatttggggc

SEQ ID NO: 125276 - RNA, 22 nt, synthetic construct
  source 1..22: mol_type = other RNA
cacattccaagagaggaataaa

SEQ ID NO: 125277 - RNA, 22 nt, synthetic construct
  source 1..22: mol_type = other RNA
cacattccagaccagcagttca

SEQ ID NO: 125278 - RNA, 22 nt, synthetic construct
  source 1..22: mol_type = other RNA
cacattcccaaatgtcttaaga

SEQ ID NO: 125279 - RNA, 22 nt, synthetic construct
  source 1..22: mol_type = other RNA
cacattccttccgacctgtaga

SEQ ID NO: 125280 - RNA, 22 nt, synthetic construct
  source 1..22: mol_type = other RNA
cacattccttcttcacacatta

SEQ ID NO: 125281 - RNA, 22 nt, synthetic construct
  source 1..22: mol_type = other RNA
cacattcggccaagatctgttt

SEQ ID NO: 125282 - RNA, 22 nt, synthetic construct
  source 1..22: mol_type = other RNA
cacattctagtgatgggagatg

SEQ ID NO: 125283 - RNA, 22 nt, synthetic construct
  source 1..22: mol_type = other RNA
cacattctgcctgcagactgca

SEQ ID NO: 125284 - RNA, 22 nt, synthetic construct
  source 1..22: mol_type = other RNA
cacattcttcaccattccagcc

SEQ ID NO: 125285 - RNA, 22 nt, synthetic construct
  source 1..22: mol_type = other RNA
cacattgcacagtctcccccag

SEQ ID NO: 125286 - RNA, 22 nt, synthetic construct
  source 1..22: mol_type = other RNA
cacattgtatttctgttagatg

SEQ ID NO: 125287 - RNA, 22 nt, synthetic construct
  source 1..22: mol_type = other RNA
cacatttaagaagggaacacta

SEQ ID NO: 125288 - RNA, 22 nt, synthetic construct
  source 1..22: mol_type = other RNA
cacatttagtttcatctatgtc

SEQ ID NO: 125289 - RNA, 22 nt, synthetic construct
  source 1..22: mol_type = other RNA
cacatttcatagcagaatggcc

SEQ ID NO: 125290 - RNA, 22 nt, synthetic construct
  source 1..22: mol_type = other RNA
cacatttcgccttctcagaagg

SEQ ID NO: 125291 - RNA, 22 nt, synthetic construct
  source 1..22: mol_type = other RNA
cacatttctaatttccaagaac

SEQ ID NO: 125292 - RNA, 22 nt, synthetic construct
  source 1..22: mol_type = other RNA
cacatttctacacaacatgttt

SEQ ID NO: 125293 - RNA, 22 nt, synthetic construct
  source 1..22: mol_type = other RNA
cacatttgaaagaaagaaggcc

SEQ ID NO: 125294 - RNA, 22 nt, synthetic construct
  source 1..22: mol_type = other RNA
cacatttgctttactactgcat

SEQ ID NO: 125295 - RNA, 22 nt, synthetic construct
  source 1..22: mol_type = other RNA
cacatttggttttactactgta

SEQ ID NO: 125296 - RNA, 22 nt, synthetic construct
  source 1..22: mol_type = other RNA
cacattttaccaaaacagcttc

SEQ ID NO: 125297 - RNA, 22 nt, synthetic construct
  source 1..22: mol_type = other RNA
cacattttcttatctaggcgaa

SEQ ID NO: 125298 - RNA, 22 nt, synthetic construct
  source 1..22: mol_type = other RNA
cacattttgaatcatgggagcc

SEQ ID NO: 125299 - RNA, 22 nt, synthetic construct
  source 1..22: mol_type = other RNA
cacattttgtgacaagttcagc

SEQ ID NO: 125300 - RNA, 22 nt, synthetic construct
  source 1..22: mol_type = other RNA
cacattttgttcattcatctgt

SEQ ID NO: 125301 - RNA, 22 nt, synthetic construct
  source 1..22: mol_type = other RNA
cacatttttgacagccacgtgt

SEQ ID NO: 125302 - RNA, 22 nt, synthetic construct
  source 1..22: mol_type = other RNA
cacattttttggtttgtatgtg

SEQ ID NO: 125303 - RNA, 22 nt, synthetic construct
  source 1..22: mol_type = other RNA
caccaaaaaagcaccagttatc

SEQ ID NO: 125304 - RNA, 22 nt, synthetic construct
  source 1..22: mol_type = other RNA
caccaaaactacaggcaacaaa

SEQ ID NO: 125305 - RNA, 22 nt, synthetic construct
  source 1..22: mol_type = other RNA
caccaaacaccttacactcaaa

SEQ ID NO: 125306 - RNA, 22 nt, synthetic construct
  source 1..22: mol_type = other RNA
caccaaacgtttagatgaatga

SEQ ID NO: 125307 - RNA, 22 nt, synthetic construct
  source 1..22: mol_type = other RNA
caccaaactcaaaaggacatat

SEQ ID NO: 125308 - RNA, 22 nt, synthetic construct
  source 1..22: mol_type = other RNA
caccaaagacttcaggaacacc

SEQ ID NO: 125309 - RNA, 22 nt, synthetic construct
  source 1..22: mol_type = other RNA
caccaaagattatgttccacat

SEQ ID NO: 125310 - RNA, 22 nt, synthetic construct
  source 1..22: mol_type = other RNA
caccaaagatttactaaactga

SEQ ID NO: 125311 - RNA, 22 nt, synthetic construct
  source 1..22: mol_type = other RNA
caccaaatcatgaaagtggaga

SEQ ID NO: 125312 - RNA, 22 nt, synthetic construct
  source 1..22: mol_type = other RNA
caccaacacaaagccttctcta

SEQ ID NO: 125313 - RNA, 22 nt, synthetic construct
  source 1..22: mol_type = other RNA
caccaacacctgcagtggcgtg

SEQ ID NO: 125314 - RNA, 22 nt, synthetic construct
  source 1..22: mol_type = other RNA
caccaacagatcctcacatcag

SEQ ID NO: 125315 - RNA, 22 nt, synthetic construct
  source 1..22: mol_type = other RNA
caccaacatccacagctttctt

SEQ ID NO: 125316 - RNA, 22 nt, synthetic construct
  source 1..22: mol_type = other RNA
caccaacatggcacatgtctac

SEQ ID NO: 125317 - RNA, 22 nt, synthetic construct
  source 1..22: mol_type = other RNA
caccaacccttgttggacagct

SEQ ID NO: 125318 - RNA, 22 nt, synthetic construct
  source 1..22: mol_type = other RNA
caccaactccacattgtcttaa

SEQ ID NO: 125319 - RNA, 22 nt, synthetic construct
  source 1..22: mol_type = other RNA
caccaactgaagcggggctgcc

SEQ ID NO: 125320 - RNA, 22 nt, synthetic construct
  source 1..22: mol_type = other RNA
caccaagaaaaagcagagaaac

SEQ ID NO: 125321 - RNA, 22 nt, synthetic construct
  source 1..22: mol_type = other RNA
caccaagacatgttaggttgaa

SEQ ID NO: 125322 - RNA, 22 nt, synthetic construct
  source 1..22: mol_type = other RNA
caccaagcaacactaaagattt

SEQ ID NO: 125323 - RNA, 22 nt, synthetic construct
  source 1..22: mol_type = other RNA
caccaagccctgccttaaaaca

SEQ ID NO: 125324 - RNA, 22 nt, synthetic construct
  source 1..22: mol_type = other RNA
caccaaggtttctctccaaggt

SEQ ID NO: 125325 - RNA, 22 nt, synthetic construct
  source 1..22: mol_type = other RNA
caccaattgttaacatttcttc

SEQ ID NO: 125326 - RNA, 22 nt, synthetic construct
  source 1..22: mol_type = other RNA
caccacacttgcttgggaacag

SEQ ID NO: 125327 - RNA, 22 nt, synthetic construct
  source 1..22: mol_type = other RNA
caccacatccagctaattttca

SEQ ID NO: 125328 - RNA, 22 nt, synthetic construct
  source 1..22: mol_type = other RNA
caccacattcggccaagatctg

SEQ ID NO: 125329 - RNA, 22 nt, synthetic construct
  source 1..22: mol_type = other RNA
caccacccttgatgtcacaagc

SEQ ID NO: 125330 - RNA, 22 nt, synthetic construct
  source 1..22: mol_type = other RNA
caccacgtccggtcgttggatt

SEQ ID NO: 125331 - RNA, 22 nt, synthetic construct
  source 1..22: mol_type = other RNA
caccactaatgtcacattttct

SEQ ID NO: 125332 - RNA, 22 nt, synthetic construct
  source 1..22: mol_type = other RNA
caccactacacccggctaatta

SEQ ID NO: 125333 - RNA, 22 nt, synthetic construct
  source 1..22: mol_type = other RNA
caccactagagtattacctatg

SEQ ID NO: 125334 - RNA, 22 nt, synthetic construct
  source 1..22: mol_type = other RNA
caccactccaccttagcccaag

SEQ ID NO: 125335 - RNA, 22 nt, synthetic construct
  source 1..22: mol_type = other RNA
caccactcccggccgtattttt

SEQ ID NO: 125336 - RNA, 22 nt, synthetic construct
  source 1..22: mol_type = other RNA
caccactgagagggaagtttat

SEQ ID NO: 125337 - RNA, 22 nt, synthetic construct
  source 1..22: mol_type = other RNA
caccacttcgagaagggaagta

SEQ ID NO: 125338 - RNA, 22 nt, synthetic construct
  source 1..22: mol_type = other RNA
caccagaactacacattccaga

SEQ ID NO: 125339 - RNA, 22 nt, synthetic construct
  source 1..22: mol_type = other RNA
caccagacaaaaatagaggatg

SEQ ID NO: 125340 - RNA, 22 nt, synthetic construct
  source 1..22: mol_type = other RNA
caccagatactcaatcagtggc

SEQ ID NO: 125341 - RNA, 22 nt, synthetic construct
  source 1..22: mol_type = other RNA
caccagatactcatgcttgctc

SEQ ID NO: 125342 - RNA, 22 nt, synthetic construct
  source 1..22: mol_type = other RNA
caccagcataagacccctcagg

SEQ ID NO: 125343 - RNA, 22 nt, synthetic construct
  source 1..22: mol_type = other RNA
caccagcatcttttgacgcgca

SEQ ID NO: 125344 - RNA, 22 nt, synthetic construct
  source 1..22: mol_type = other RNA
caccagcggcatacaggagttc

SEQ ID NO: 125345 - RNA, 22 nt, synthetic construct
  source 1..22: mol_type = other RNA
caccaggctggaatgcagcggt

SEQ ID NO: 125346 - RNA, 22 nt, synthetic construct
  source 1..22: mol_type = other RNA
caccagggcctctgaagacatg

SEQ ID NO: 125347 - RNA, 22 nt, synthetic construct
  source 1..22: mol_type = other RNA
caccaggggctgggggatccag

SEQ ID NO: 125348 - RNA, 22 nt, synthetic construct
  source 1..22: mol_type = other RNA
caccagtaagattctgtctcta

SEQ ID NO: 125349 - RNA, 22 nt, synthetic construct
  source 1..22: mol_type = other RNA
caccagttatcaccatgtgctt

SEQ ID NO: 125350 - RNA, 22 nt, synthetic construct
  source 1..22: mol_type = other RNA
caccagtttctaattagaatta

SEQ ID NO: 125351 - RNA, 22 nt, synthetic construct
  source 1..22: mol_type = other RNA
caccatagctgaaggcactgta

SEQ ID NO: 125352 - RNA, 22 nt, synthetic construct
  source 1..22: mol_type = other RNA
caccatattggccaggctggtt

SEQ ID NO: 125353 - RNA, 22 nt, synthetic construct
  source 1..22: mol_type = other RNA
caccatcatcatcaggctggct

SEQ ID NO: 125354 - RNA, 22 nt, synthetic construct
  source 1..22: mol_type = other RNA
caccatctaacagaaatacaat

SEQ ID NO: 125355 - RNA, 22 nt, synthetic construct
  source 1..22: mol_type = other RNA
caccatctctctgcctcaaaat

SEQ ID NO: 125356 - RNA, 22 nt, synthetic construct
  source 1..22: mol_type = other RNA
caccatctgataagcccaacct

SEQ ID NO: 125357 - RNA, 22 nt, synthetic construct
  source 1..22: mol_type = other RNA
caccatgacagagttccacctc

SEQ ID NO: 125358 - RNA, 22 nt, synthetic construct
  source 1..22: mol_type = other RNA
caccatgatgcagcccctgcca

SEQ ID NO: 125359 - RNA, 22 nt, synthetic construct
  source 1..22: mol_type = other RNA
caccatgcaggttcatgtgtgc

SEQ ID NO: 125360 - RNA, 22 nt, synthetic construct
  source 1..22: mol_type = other RNA
caccatggcaggtttcaagtga

SEQ ID NO: 125361 - RNA, 22 nt, synthetic construct
  source 1..22: mol_type = other RNA
caccatgtgcttatcaataaaa

SEQ ID NO: 125362 - RNA, 22 nt, synthetic construct
  source 1..22: mol_type = other RNA
caccattccagccattctcttc

SEQ ID NO: 125363 - RNA, 22 nt, synthetic construct
  source 1..22: mol_type = other RNA
caccatttagatcatcttatat

SEQ ID NO: 125364 - RNA, 22 nt, synthetic construct
  source 1..22: mol_type = other RNA
caccatttattgtcaaggtcat

SEQ ID NO: 125365 - RNA, 22 nt, synthetic construct
  source 1..22: mol_type = other RNA
caccattttttcaccagcggca

SEQ ID NO: 125366 - RNA, 22 nt, synthetic construct
  source 1..22: mol_type = other RNA
cacccaagaatttcatgccttt

SEQ ID NO: 125367 - RNA, 22 nt, synthetic construct
  source 1..22: mol_type = other RNA
cacccaagccacagcgtggaat

SEQ ID NO: 125368 - RNA, 22 nt, synthetic construct
  source 1..22: mol_type = other RNA
cacccaagtggagcctgctctg

SEQ ID NO: 125369 - RNA, 22 nt, synthetic construct
  source 1..22: mol_type = other RNA
cacccacgtggagtgcaatggg

SEQ ID NO: 125370 - RNA, 22 nt, synthetic construct
  source 1..22: mol_type = other RNA
cacccacttgtcccatggtcaa

SEQ ID NO: 125371 - RNA, 22 nt, synthetic construct
  source 1..22: mol_type = other RNA
cacccagaccaagtttaaccaa

SEQ ID NO: 125372 - RNA, 22 nt, synthetic construct
  source 1..22: mol_type = other RNA
cacccagagcgggtttcctcgg

SEQ ID NO: 125373 - RNA, 22 nt, synthetic construct
  source 1..22: mol_type = other RNA
cacccagctcgaccaggggaag

SEQ ID NO: 125374 - RNA, 22 nt, synthetic construct
  source 1..22: mol_type = other RNA
cacccagtatacacgtatttat

SEQ ID NO: 125375 - RNA, 22 nt, synthetic construct
  source 1..22: mol_type = other RNA
cacccagttatctctgccctca

SEQ ID NO: 125376 - RNA, 22 nt, synthetic construct
  source 1..22: mol_type = other RNA
cacccagttcaccagtttctaa

SEQ ID NO: 125377 - RNA, 22 nt, synthetic construct
  source 1..22: mol_type = other RNA
cacccatccacccacttgtccc

SEQ ID NO: 125378 - RNA, 22 nt, synthetic construct
  source 1..22: mol_type = other RNA
cacccatgaagccagcattacc

SEQ ID NO: 125379 - RNA, 22 nt, synthetic construct
  source 1..22: mol_type = other RNA
cacccctgctctgcacgtacta

SEQ ID NO: 125380 - RNA, 22 nt, synthetic construct
  source 1..22: mol_type = other RNA
cacccgaagaggacgatttttc

SEQ ID NO: 125381 - RNA, 22 nt, synthetic construct
  source 1..22: mol_type = other RNA
cacccgacccactagtgaagtc

SEQ ID NO: 125382 - RNA, 22 nt, synthetic construct
  source 1..22: mol_type = other RNA
cacccggctaattaaacaaaca

SEQ ID NO: 125383 - RNA, 22 nt, synthetic construct
  source 1..22: mol_type = other RNA
cacccgtccaatttctttggct

SEQ ID NO: 125384 - RNA, 22 nt, synthetic construct
  source 1..22: mol_type = other RNA
caccctacagactcaataacca

SEQ ID NO: 125385 - RNA, 22 nt, synthetic construct
  source 1..22: mol_type = other RNA
caccctaggtagggttggggta

SEQ ID NO: 125386 - RNA, 22 nt, synthetic construct
  source 1..22: mol_type = other RNA
caccctatttatgttgcacaaa

SEQ ID NO: 125387 - RNA, 22 nt, synthetic construct
  source 1..22: mol_type = other RNA
caccctcaaatgtctcattgtg

SEQ ID NO: 125388 - RNA, 22 nt, synthetic construct
  source 1..22: mol_type = other RNA
caccctcaggactctgctcaaa

SEQ ID NO: 125389 - RNA, 22 nt, synthetic construct
  source 1..22: mol_type = other RNA
caccctcctaccttccaaagta

SEQ ID NO: 125390 - RNA, 22 nt, synthetic construct
  source 1..22: mol_type = other RNA
caccctcctcctcctggccaca

SEQ ID NO: 125391 - RNA, 22 nt, synthetic construct
  source 1..22: mol_type = other RNA
caccctgagcatccccgctgcg

SEQ ID NO: 125392 - RNA, 22 nt, synthetic construct
  source 1..22: mol_type = other RNA
caccctgccccttatcctcttc

SEQ ID NO: 125393 - RNA, 22 nt, synthetic construct
  source 1..22: mol_type = other RNA
caccctgcgaaggcaatgtaac

SEQ ID NO: 125394 - RNA, 22 nt, synthetic construct
  source 1..22: mol_type = other RNA
caccctgctccagtatgacctc

SEQ ID NO: 125395 - RNA, 22 nt, synthetic construct
  source 1..22: mol_type = other RNA
caccctgggaaagcctggcttt

SEQ ID NO: 125396 - RNA, 22 nt, synthetic construct
  source 1..22: mol_type = other RNA
cacccttataaaatgagggtaa

SEQ ID NO: 125397 - RNA, 22 nt, synthetic construct
  source 1..22: mol_type = other RNA
cacccttgaaaatttccagcat

SEQ ID NO: 125398 - RNA, 22 nt, synthetic construct
  source 1..22: mol_type = other RNA
cacccttgatgtcacaagccag

SEQ ID NO: 125399 - RNA, 22 nt, synthetic construct
  source 1..22: mol_type = other RNA
cacccttgctgcttctacccac

SEQ ID NO: 125400 - RNA, 22 nt, synthetic construct
  source 1..22: mol_type = other RNA
cacccttggtaaacagcagtct

SEQ ID NO: 125401 - RNA, 22 nt, synthetic construct
  source 1..22: mol_type = other RNA
cacccttgtaatcaagtatctc

SEQ ID NO: 125402 - RNA, 22 nt, synthetic construct
  source 1..22: mol_type = other RNA
caccctttcttaggaagctatg

SEQ ID NO: 125403 - RNA, 22 nt, synthetic construct
  source 1..22: mol_type = other RNA
caccgcaacatctgcctcccgg

SEQ ID NO: 125404 - RNA, 22 nt, synthetic construct
  source 1..22: mol_type = other RNA
caccgcacctggccgggattta

SEQ ID NO: 125405 - RNA, 22 nt, synthetic construct
  source 1..22: mol_type = other RNA
caccgcactcagcctgttggga

SEQ ID NO: 125406 - RNA, 22 nt, synthetic construct
  source 1..22: mol_type = other RNA
caccgccttcctaccctgcctt

SEQ ID NO: 125407 - RNA, 22 nt, synthetic construct
  source 1..22: mol_type = other RNA
caccgcgcccggccaaatatcc

SEQ ID NO: 125408 - RNA, 22 nt, synthetic construct
  source 1..22: mol_type = other RNA
caccgcgcccggcccagattcc

SEQ ID NO: 125409 - RNA, 22 nt, synthetic construct
  source 1..22: mol_type = other RNA
caccgcgcccggccgagaaatc

SEQ ID NO: 125410 - RNA, 22 nt, synthetic construct
  source 1..22: mol_type = other RNA
caccgcgcctggtgattaaagt

SEQ ID NO: 125411 - RNA, 22 nt, synthetic construct
  source 1..22: mol_type = other RNA
caccgctccacgcccattagga

SEQ ID NO: 125412 - RNA, 22 nt, synthetic construct
  source 1..22: mol_type = other RNA
caccgctgcattccagcctggt

SEQ ID NO: 125413 - RNA, 22 nt, synthetic construct
  source 1..22: mol_type = other RNA
caccgtgacagaacaaataaca

SEQ ID NO: 125414 - RNA, 22 nt, synthetic construct
  source 1..22: mol_type = other RNA
caccgtgcaactagagaaagca

SEQ ID NO: 125415 - RNA, 22 nt, synthetic construct
  source 1..22: mol_type = other RNA
caccgtgcccggccagacattt

SEQ ID NO: 125416 - RNA, 22 nt, synthetic construct
  source 1..22: mol_type = other RNA
caccgtgccgggcttggtatgc

SEQ ID NO: 125417 - RNA, 22 nt, synthetic construct
  source 1..22: mol_type = other RNA
cacctaaaaggttgcttaattg

SEQ ID NO: 125418 - RNA, 22 nt, synthetic construct
  source 1..22: mol_type = other RNA
cacctaaagatatgtgtaggaa

SEQ ID NO: 125419 - RNA, 22 nt, synthetic construct
  source 1..22: mol_type = other RNA
cacctaacaatgattatttcga

SEQ ID NO: 125420 - RNA, 22 nt, synthetic construct
  source 1..22: mol_type = other RNA
cacctaactactaataaatgca

SEQ ID NO: 125421 - RNA, 22 nt, synthetic construct
  source 1..22: mol_type = other RNA
cacctaataaaatgtttagcgg

SEQ ID NO: 125422 - RNA, 22 nt, synthetic construct
  source 1..22: mol_type = other RNA
cacctacattaatctcatccac

SEQ ID NO: 125423 - RNA, 22 nt, synthetic construct
  source 1..22: mol_type = other RNA
cacctagcctctctgggcttca

SEQ ID NO: 125424 - RNA, 22 nt, synthetic construct
  source 1..22: mol_type = other RNA
cacctagctgttttcatgcgac

SEQ ID NO: 125425 - RNA, 22 nt, synthetic construct
  source 1..22: mol_type = other RNA
cacctaggcctattttaggctc

SEQ ID NO: 125426 - RNA, 22 nt, synthetic construct
  source 1..22: mol_type = other RNA
cacctattcataggtaatactc

SEQ ID NO: 125427 - RNA, 22 nt, synthetic construct
  source 1..22: mol_type = other RNA
cacctcaaactagaaaaagaat

SEQ ID NO: 125428 - RNA, 22 nt, synthetic construct
  source 1..22: mol_type = other RNA
cacctcaaggcagaacacactg

SEQ ID NO: 125429 - RNA, 22 nt, synthetic construct
  source 1..22: mol_type = other RNA
cacctcaaggccaactgtcctc

SEQ ID NO: 125430 - RNA, 22 nt, synthetic construct
  source 1..22: mol_type = other RNA
cacctcaagtgatgcaactcct

SEQ ID NO: 125431 - RNA, 22 nt, synthetic construct
  source 1..22: mol_type = other RNA
cacctcacattcacagcgtgca

SEQ ID NO: 125432 - RNA, 22 nt, synthetic construct
  source 1..22: mol_type = other RNA
cacctcagaaacaaacaaaaaa

SEQ ID NO: 125433 - RNA, 22 nt, synthetic construct
  source 1..22: mol_type = other RNA
cacctcagccccacaagtagca

SEQ ID NO: 125434 - RNA, 22 nt, synthetic construct
  source 1..22: mol_type = other RNA
cacctcagttaaacccaacaaa

SEQ ID NO: 125435 - RNA, 22 nt, synthetic construct
  source 1..22: mol_type = other RNA
cacctcatccggtctcagtttt

SEQ ID NO: 125436 - RNA, 22 nt, synthetic construct
  source 1..22: mol_type = other RNA
cacctccagtgtcctgaatgat

SEQ ID NO: 125437 - RNA, 22 nt, synthetic construct
  source 1..22: mol_type = other RNA
cacctccatcactgactggctg

SEQ ID NO: 125438 - RNA, 22 nt, synthetic construct
  source 1..22: mol_type = other RNA
cacctcctccggggacccagtg

SEQ ID NO: 125439 - RNA, 22 nt, synthetic construct
  source 1..22: mol_type = other RNA
cacctcgggttcaagccccagt

SEQ ID NO: 125440 - RNA, 22 nt, synthetic construct
  source 1..22: mol_type = other RNA
cacctctacacaaaaatccaga

SEQ ID NO: 125441 - RNA, 22 nt, synthetic construct
  source 1..22: mol_type = other RNA
cacctctccgggtaaaaagcct

SEQ ID NO: 125442 - RNA, 22 nt, synthetic construct
  source 1..22: mol_type = other RNA
cacctctggactcagggtcact

SEQ ID NO: 125443 - RNA, 22 nt, synthetic construct
  source 1..22: mol_type = other RNA
cacctgaaatctgatttgttta

SEQ ID NO: 125444 - RNA, 22 nt, synthetic construct
  source 1..22: mol_type = other RNA
cacctgaaattctcaaatgaac

SEQ ID NO: 125445 - RNA, 22 nt, synthetic construct
  source 1..22: mol_type = other RNA
cacctgaacccaggaggcaaag

SEQ ID NO: 125446 - RNA, 22 nt, synthetic construct
  source 1..22: mol_type = other RNA
cacctgacaagtagtacaaaag

SEQ ID NO: 125447 - RNA, 22 nt, synthetic construct
  source 1..22: mol_type = other RNA
cacctgaggggtcttatgctgg

SEQ ID NO: 125448 - RNA, 22 nt, synthetic construct
  source 1..22: mol_type = other RNA
cacctgcagtggcgtgtgccca

SEQ ID NO: 125449 - RNA, 22 nt, synthetic construct
  source 1..22: mol_type = other RNA
cacctgcgagcggcgggcttcg

SEQ ID NO: 125450 - RNA, 22 nt, synthetic construct
  source 1..22: mol_type = other RNA
cacctgctctttatctccacat

SEQ ID NO: 125451 - RNA, 22 nt, synthetic construct
  source 1..22: mol_type = other RNA
cacctggatcaagtgggattta

SEQ ID NO: 125452 - RNA, 22 nt, synthetic construct
  source 1..22: mol_type = other RNA
cacctggcaacaaaggcgaagc

SEQ ID NO: 125453 - RNA, 22 nt, synthetic construct
  source 1..22: mol_type = other RNA
cacctggcccctttcaagattg

SEQ ID NO: 125454 - RNA, 22 nt, synthetic construct
  source 1..22: mol_type = other RNA
cacctggccgggatttacttct

SEQ ID NO: 125455 - RNA, 22 nt, synthetic construct
  source 1..22: mol_type = other RNA
cacctggctaatttttaaatgt

SEQ ID NO: 125456 - RNA, 22 nt, synthetic construct
  source 1..22: mol_type = other RNA
cacctgggggagactgtgcaat

SEQ ID NO: 125457 - RNA, 22 nt, synthetic construct
  source 1..22: mol_type = other RNA
cacctgggtatacagcaaaaga

SEQ ID NO: 125458 - RNA, 22 nt, synthetic construct
  source 1..22: mol_type = other RNA
cacctgtataaataaaatgtct

SEQ ID NO: 125459 - RNA, 22 nt, synthetic construct
  source 1..22: mol_type = other RNA
cacctgtcagaaacaccaacac

SEQ ID NO: 125460 - RNA, 22 nt, synthetic construct
  source 1..22: mol_type = other RNA
cacctgtcatgtcaaatttttc

SEQ ID NO: 125461 - RNA, 22 nt, synthetic construct
  source 1..22: mol_type = other RNA
cacctgtttaaaaagaaaaagc

SEQ ID NO: 125462 - RNA, 22 nt, synthetic construct
  source 1..22: mol_type = other RNA
caccttacactcaaaagccata

SEQ ID NO: 125463 - RNA, 22 nt, synthetic construct
  source 1..22: mol_type = other RNA
caccttacattgtaatcctgtt

SEQ ID NO: 125464 - RNA, 22 nt, synthetic construct
  source 1..22: mol_type = other RNA
caccttagcccaagctaccatt

SEQ ID NO: 125465 - RNA, 22 nt, synthetic construct
  source 1..22: mol_type = other RNA
caccttcagaagccctgcagcc

SEQ ID NO: 125466 - RNA, 22 nt, synthetic construct
  source 1..22: mol_type = other RNA
caccttccctactcactgaaac

SEQ ID NO: 125467 - RNA, 22 nt, synthetic construct
  source 1..22: mol_type = other RNA
caccttctgctgggcccactct

SEQ ID NO: 125468 - RNA, 22 nt, synthetic construct
  source 1..22: mol_type = other RNA
caccttgaacatgaacgagaac

SEQ ID NO: 125469 - RNA, 22 nt, synthetic construct
  source 1..22: mol_type = other RNA
caccttgaactgggacttctag

SEQ ID NO: 125470 - RNA, 22 nt, synthetic construct
  source 1..22: mol_type = other RNA
caccttgattttgataaaaatc

SEQ ID NO: 125471 - RNA, 22 nt, synthetic construct
  source 1..22: mol_type = other RNA
caccttgggaggctgaggctgg

SEQ ID NO: 125472 - RNA, 22 nt, synthetic construct
  source 1..22: mol_type = other RNA
cacctttattaactagaattga

SEQ ID NO: 125473 - RNA, 22 nt, synthetic construct
  source 1..22: mol_type = other RNA
cacctttcctgcccctccactc

SEQ ID NO: 125474 - RNA, 22 nt, synthetic construct
  source 1..22: mol_type = other RNA
cacctttgtattcatccagttt

SEQ ID NO: 125475 - RNA, 22 nt, synthetic construct
  source 1..22: mol_type = other RNA
caccttttttggtattttttag

SEQ ID NO: 125476 - RNA, 22 nt, synthetic construct
  source 1..22: mol_type = other RNA
cacgaaaatatccctggggttt

SEQ ID NO: 125477 - RNA, 22 nt, synthetic construct
  source 1..22: mol_type = other RNA
cacgaaagcggtcaacgcaccc

SEQ ID NO: 125478 - RNA, 22 nt, synthetic construct
  source 1..22: mol_type = other RNA
cacgagaaaagcacaggcatcg

SEQ ID NO: 125479 - RNA, 22 nt, synthetic construct
  source 1..22: mol_type = other RNA
cacgagaaggacagcttccacc

SEQ ID NO: 125480 - RNA, 22 nt, synthetic construct
  source 1..22: mol_type = other RNA
cacgagactgttagggacttat

SEQ ID NO: 125481 - RNA, 22 nt, synthetic construct
  source 1..22: mol_type = other RNA
cacgagtaatggatgtttttag

SEQ ID NO: 125482 - RNA, 22 nt, synthetic construct
  source 1..22: mol_type = other RNA
cacgagtattcaagtttcaccc

SEQ ID NO: 125483 - RNA, 22 nt, synthetic construct
  source 1..22: mol_type = other RNA
cacgagtgtgtttcgcaaagta

SEQ ID NO: 125484 - RNA, 22 nt, synthetic construct
  source 1..22: mol_type = other RNA
cacgagttcaggaccagcttgg

SEQ ID NO: 125485 - RNA, 22 nt, synthetic construct
  source 1..22: mol_type = other RNA
cacgatactttttattttcatg

SEQ ID NO: 125486 - RNA, 22 nt, synthetic construct
  source 1..22: mol_type = other RNA
cacgatgcttaggtaagaaaaa

SEQ ID NO: 125487 - RNA, 22 nt, synthetic construct
  source 1..22: mol_type = other RNA
cacgattctgacccagagccta

SEQ ID NO: 125488 - RNA, 22 nt, synthetic construct
  source 1..22: mol_type = other RNA
cacgcacagggagatacttgat

SEQ ID NO: 125489 - RNA, 22 nt, synthetic construct
  source 1..22: mol_type = other RNA
cacgcagaacagtgtttacaca

SEQ ID NO: 125490 - RNA, 22 nt, synthetic construct
  source 1..22: mol_type = other RNA
cacgcagaaccactgagcacaa

SEQ ID NO: 125491 - RNA, 22 nt, synthetic construct
  source 1..22: mol_type = other RNA
cacgcagtttgttctgctgttg

SEQ ID NO: 125492 - RNA, 22 nt, synthetic construct
  source 1..22: mol_type = other RNA
cacgcatctggtctatctcatt

SEQ ID NO: 125493 - RNA, 22 nt, synthetic construct
  source 1..22: mol_type = other RNA
cacgcattgcattgactaccaa

SEQ ID NO: 125494 - RNA, 22 nt, synthetic construct
  source 1..22: mol_type = other RNA
cacgccactgcaggtgttggtg

SEQ ID NO: 125495 - RNA, 22 nt, synthetic construct
  source 1..22: mol_type = other RNA
cacgccactgcattccgcctgg

SEQ ID NO: 125496 - RNA, 22 nt, synthetic construct
  source 1..22: mol_type = other RNA
cacgccatctcgcccagctaat

SEQ ID NO: 125497 - RNA, 22 nt, synthetic construct
  source 1..22: mol_type = other RNA
cacgcccattaggatagctatt

SEQ ID NO: 125498 - RNA, 22 nt, synthetic construct
  source 1..22: mol_type = other RNA
cacgcccggccgatgcctgtgc

SEQ ID NO: 125499 - RNA, 22 nt, synthetic construct
  source 1..22: mol_type = other RNA
cacgccttcgcgggcaccttcc

SEQ ID NO: 125500 - RNA, 22 nt, synthetic construct
  source 1..22: mol_type = other RNA
cacgcgtaagggtacagaactg

SEQ ID NO: 125501 - RNA, 22 nt, synthetic construct
  source 1..22: mol_type = other RNA
cacgctggaagggagcccaagc

SEQ ID NO: 125502 - RNA, 22 nt, synthetic construct
  source 1..22: mol_type = other RNA
cacgctgtgaatgtgaggtgag

SEQ ID NO: 125503 - RNA, 22 nt, synthetic construct
  source 1..22: mol_type = other RNA
cacgctgtggcttgggtgacct

SEQ ID NO: 125504 - RNA, 22 nt, synthetic construct
  source 1..22: mol_type = other RNA
cacggaaaacattattttcttt

SEQ ID NO: 125505 - RNA, 22 nt, synthetic construct
  source 1..22: mol_type = other RNA
cacggaatgcccctttgagcag

SEQ ID NO: 125506 - RNA, 22 nt, synthetic construct
  source 1..22: mol_type = other RNA
cacggacttggcacaggagagc

SEQ ID NO: 125507 - RNA, 22 nt, synthetic construct
  source 1..22: mol_type = other RNA
cacggctgattataaccttgaa

SEQ ID NO: 125508 - RNA, 22 nt, synthetic construct
  source 1..22: mol_type = other RNA
cacgggctgggcgcgatggctc

SEQ ID NO: 125509 - RNA, 22 nt, synthetic construct
  source 1..22: mol_type = other RNA
cacgggtaaaaataaatctaat

SEQ ID NO: 125510 - RNA, 22 nt, synthetic construct
  source 1..22: mol_type = other RNA
cacgggtacacatcctaataca

SEQ ID NO: 125511 - RNA, 22 nt, synthetic construct
  source 1..22: mol_type = other RNA
cacggtctcacactgttgtcca

SEQ ID NO: 125512 - RNA, 22 nt, synthetic construct
  source 1..22: mol_type = other RNA
cacggtgaagaaccgactgaaa

SEQ ID NO: 125513 - RNA, 22 nt, synthetic construct
  source 1..22: mol_type = other RNA
cacggtgccctacatatggcaa

SEQ ID NO: 125514 - RNA, 22 nt, synthetic construct
  source 1..22: mol_type = other RNA
cacgtactagtcagcacactct

SEQ ID NO: 125515 - RNA, 22 nt, synthetic construct
  source 1..22: mol_type = other RNA
cacgtatttatattttggtaga

SEQ ID NO: 125516 - RNA, 22 nt, synthetic construct
  source 1..22: mol_type = other RNA
cacgtcaccgcaacctccgcct

SEQ ID NO: 125517 - RNA, 22 nt, synthetic construct
  source 1..22: mol_type = other RNA
cacgtccggtcgttggatttat

SEQ ID NO: 125518 - RNA, 22 nt, synthetic construct
  source 1..22: mol_type = other RNA
cacgtctgtggtctcagctcct

SEQ ID NO: 125519 - RNA, 22 nt, synthetic construct
  source 1..22: mol_type = other RNA
cacgtcttgtcaataatttgga

SEQ ID NO: 125520 - RNA, 22 nt, synthetic construct
  source 1..22: mol_type = other RNA
cacgtgaagatggagttacgct

SEQ ID NO: 125521 - RNA, 22 nt, synthetic construct
  source 1..22: mol_type = other RNA
cacgtgaagctacagactaata

SEQ ID NO: 125522 - RNA, 22 nt, synthetic construct
  source 1..22: mol_type = other RNA
cacgtgcattcatactgaaggc

SEQ ID NO: 125523 - RNA, 22 nt, synthetic construct
  source 1..22: mol_type = other RNA
cacgtggagtgcaatggggcaa

SEQ ID NO: 125524 - RNA, 22 nt, synthetic construct
  source 1..22: mol_type = other RNA
cacgtggcgctccctctgtgtg

SEQ ID NO: 125525 - RNA, 22 nt, synthetic construct
  source 1..22: mol_type = other RNA
cacgtggctgtcaaaaatgtgt

SEQ ID NO: 125526 - RNA, 22 nt, synthetic construct
  source 1..22: mol_type = other RNA
cacgtgggtgacagagcaagac

SEQ ID NO: 125527 - RNA, 22 nt, synthetic construct
  source 1..22: mol_type = other RNA
cacgtgtattgagtgtagctgt

SEQ ID NO: 125528 - RNA, 22 nt, synthetic construct
  source 1..22: mol_type = other RNA
cacgttacaaaatatgtaatga

SEQ ID NO: 125529 - RNA, 22 nt, synthetic construct
  source 1..22: mol_type = other RNA
cacgttaccctctggaatgccc

SEQ ID NO: 125530 - RNA, 22 nt, synthetic construct
  source 1..22: mol_type = other RNA
cacgttagcatcaccatcatca

SEQ ID NO: 125531 - RNA, 22 nt, synthetic construct
  source 1..22: mol_type = other RNA
cacgtttatattccttttattc

SEQ ID NO: 125532 - RNA, 22 nt, synthetic construct
  source 1..22: mol_type = other RNA
cacgtttgatctggtcacaaac

SEQ ID NO: 125533 - RNA, 22 nt, synthetic construct
  source 1..22: mol_type = other RNA
cacgtttgctttggagtgagag

SEQ ID NO: 125534 - RNA, 22 nt, synthetic construct
  source 1..22: mol_type = other RNA
cacgtttttagaaatttaccca

SEQ ID NO: 125535 - RNA, 22 nt, synthetic construct
  source 1..22: mol_type = other RNA
cactaaaaatcagattaagcat

SEQ ID NO: 125536 - RNA, 22 nt, synthetic construct
  source 1..22: mol_type = other RNA
cactaaaacaggaagttgagaa

SEQ ID NO: 125537 - RNA, 22 nt, synthetic construct
  source 1..22: mol_type = other RNA
cactaaactagtatcaacctgc

SEQ ID NO: 125538 - RNA, 22 nt, synthetic construct
  source 1..22: mol_type = other RNA
cactaaagatttgccaatcaat

SEQ ID NO: 125539 - RNA, 22 nt, synthetic construct
  source 1..22: mol_type = other RNA
cactaaaggggatttcatgaac

SEQ ID NO: 125540 - RNA, 22 nt, synthetic construct
  source 1..22: mol_type = other RNA
cactaacaaagggcctgttcca

SEQ ID NO: 125541 - RNA, 22 nt, synthetic construct
  source 1..22: mol_type = other RNA
cactaaccaacattgagtttca

SEQ ID NO: 125542 - RNA, 22 nt, synthetic construct
  source 1..22: mol_type = other RNA
cactaactttaaattttgagac

SEQ ID NO: 125543 - RNA, 22 nt, synthetic construct
  source 1..22: mol_type = other RNA
cactaactttctattcccctgg

SEQ ID NO: 125544 - RNA, 22 nt, synthetic construct
  source 1..22: mol_type = other RNA
cactaagaagatggttggaagt

SEQ ID NO: 125545 - RNA, 22 nt, synthetic construct
  source 1..22: mol_type = other RNA
cactaagagtgaaaaggcaaac

SEQ ID NO: 125546 - RNA, 22 nt, synthetic construct
  source 1..22: mol_type = other RNA
cactaaggtcaacacatcagcg

SEQ ID NO: 125547 - RNA, 22 nt, synthetic construct
  source 1..22: mol_type = other RNA
cactaagtcagaattcactgtg

SEQ ID NO: 125548 - RNA, 22 nt, synthetic construct
  source 1..22: mol_type = other RNA
cactaatccttctcatagtctt

SEQ ID NO: 125549 - RNA, 22 nt, synthetic construct
  source 1..22: mol_type = other RNA
cactaatgcctcaaattagtca

SEQ ID NO: 125550 - RNA, 22 nt, synthetic construct
  source 1..22: mol_type = other RNA
cactaatgtcacattttcttat

SEQ ID NO: 125551 - RNA, 22 nt, synthetic construct
  source 1..22: mol_type = other RNA
cactaatgtccttttcctgttc

SEQ ID NO: 125552 - RNA, 22 nt, synthetic construct
  source 1..22: mol_type = other RNA
cactacacccggctaattaaac

SEQ ID NO: 125553 - RNA, 22 nt, synthetic construct
  source 1..22: mol_type = other RNA
cactacagcatattagctgtct

SEQ ID NO: 125554 - RNA, 22 nt, synthetic construct
  source 1..22: mol_type = other RNA
cactacgcccggcccatgacat

SEQ ID NO: 125555 - RNA, 22 nt, synthetic construct
  source 1..22: mol_type = other RNA
cactacttagcccctgctgcca

SEQ ID NO: 125556 - RNA, 22 nt, synthetic construct
  source 1..22: mol_type = other RNA
cactagaatgtgacttcgtcaa

SEQ ID NO: 125557 - RNA, 22 nt, synthetic construct
  source 1..22: mol_type = other RNA
cactagacacatttttgacagc

SEQ ID NO: 125558 - RNA, 22 nt, synthetic construct
  source 1..22: mol_type = other RNA
cactagacctttcttaggtttc

SEQ ID NO: 125559 - RNA, 22 nt, synthetic construct
  source 1..22: mol_type = other RNA
cactagagcttcaacctcctgg

SEQ ID NO: 125560 - RNA, 22 nt, synthetic construct
  source 1..22: mol_type = other RNA
cactagagtattacctatgaat

SEQ ID NO: 125561 - RNA, 22 nt, synthetic construct
  source 1..22: mol_type = other RNA
cactagatctcttttcctttaa

SEQ ID NO: 125562 - RNA, 22 nt, synthetic construct
  source 1..22: mol_type = other RNA
cactagcaaactactgatagcg

SEQ ID NO: 125563 - RNA, 22 nt, synthetic construct
  source 1..22: mol_type = other RNA
cactagcaatccaggatcttac

SEQ ID NO: 125564 - RNA, 22 nt, synthetic construct
  source 1..22: mol_type = other RNA
cactagccactgggtcttatag

SEQ ID NO: 125565 - RNA, 22 nt, synthetic construct
  source 1..22: mol_type = other RNA
cactagctattagagaaatgca

SEQ ID NO: 125566 - RNA, 22 nt, synthetic construct
  source 1..22: mol_type = other RNA
cactagctattgtcttttctat

SEQ ID NO: 125567 - RNA, 22 nt, synthetic construct
  source 1..22: mol_type = other RNA
cactagctgacccactggtttc

SEQ ID NO: 125568 - RNA, 22 nt, synthetic construct
  source 1..22: mol_type = other RNA
cactagggactggcctcggcca

SEQ ID NO: 125569 - RNA, 22 nt, synthetic construct
  source 1..22: mol_type = other RNA
cactaggggactaacagggtct

SEQ ID NO: 125570 - RNA, 22 nt, synthetic construct
  source 1..22: mol_type = other RNA
cactagtcaccctacagactca

SEQ ID NO: 125571 - RNA, 22 nt, synthetic construct
  source 1..22: mol_type = other RNA
cactagtcagtatatttactgc

SEQ ID NO: 125572 - RNA, 22 nt, synthetic construct
  source 1..22: mol_type = other RNA
cactagtgaagtcccatcttcc

SEQ ID NO: 125573 - RNA, 22 nt, synthetic construct
  source 1..22: mol_type = other RNA
cactagtggaagaatcaggtct

SEQ ID NO: 125574 - RNA, 22 nt, synthetic construct
  source 1..22: mol_type = other RNA
cactagtgggatcaaaccatgt

SEQ ID NO: 125575 - RNA, 22 nt, synthetic construct
  source 1..22: mol_type = other RNA
cactagtgggtcgggtgtcaga

SEQ ID NO: 125576 - RNA, 22 nt, synthetic construct
  source 1..22: mol_type = other RNA
cactataaatcagtaagaaaac

SEQ ID NO: 125577 - RNA, 22 nt, synthetic construct
  source 1..22: mol_type = other RNA
cactataacagatggaactcta

SEQ ID NO: 125578 - RNA, 22 nt, synthetic construct
  source 1..22: mol_type = other RNA
cactataagccaatatccctga

SEQ ID NO: 125579 - RNA, 22 nt, synthetic construct
  source 1..22: mol_type = other RNA
cactataatccagatggacaaa

SEQ ID NO: 125580 - RNA, 22 nt, synthetic construct
  source 1..22: mol_type = other RNA
cactatagaaaatagtatgaag

SEQ ID NO: 125581 - RNA, 22 nt, synthetic construct
  source 1..22: mol_type = other RNA
cactatccacatttggttttac

SEQ ID NO: 125582 - RNA, 22 nt, synthetic construct
  source 1..22: mol_type = other RNA
cactatctaataaaatagcagg

SEQ ID NO: 125583 - RNA, 22 nt, synthetic construct
  source 1..22: mol_type = other RNA
cactatggcttttgagtgtaag

SEQ ID NO: 125584 - RNA, 22 nt, synthetic construct
  source 1..22: mol_type = other RNA
cactatgtgttgataaatatgt

SEQ ID NO: 125585 - RNA, 22 nt, synthetic construct
  source 1..22: mol_type = other RNA
cactattaaccatatggtttac

SEQ ID NO: 125586 - RNA, 22 nt, synthetic construct
  source 1..22: mol_type = other RNA
cactattgaaagcccttgagta

SEQ ID NO: 125587 - RNA, 22 nt, synthetic construct
  source 1..22: mol_type = other RNA
cactattgagagtgaaaacaca

SEQ ID NO: 125588 - RNA, 22 nt, synthetic construct
  source 1..22: mol_type = other RNA
cactcaaaactgaagtttatca

SEQ ID NO: 125589 - RNA, 22 nt, synthetic construct
  source 1..22: mol_type = other RNA
cactcaaaagccatagtgtaaa

SEQ ID NO: 125590 - RNA, 22 nt, synthetic construct
  source 1..22: mol_type = other RNA
cactcaagcaatcctccggcct

SEQ ID NO: 125591 - RNA, 22 nt, synthetic construct
  source 1..22: mol_type = other RNA
cactcaatacacgtggctgtca

SEQ ID NO: 125592 - RNA, 22 nt, synthetic construct
  source 1..22: mol_type = other RNA
cactcacctagctgttttcatg

SEQ ID NO: 125593 - RNA, 22 nt, synthetic construct
  source 1..22: mol_type = other RNA
cactcacctgtcatgtcaaatt

SEQ ID NO: 125594 - RNA, 22 nt, synthetic construct
  source 1..22: mol_type = other RNA
cactcactggcctgagctctca

SEQ ID NO: 125595 - RNA, 22 nt, synthetic construct
  source 1..22: mol_type = other RNA
cactcagaagtactactcatta

SEQ ID NO: 125596 - RNA, 22 nt, synthetic construct
  source 1..22: mol_type = other RNA
cactcagatatcaatctggata

SEQ ID NO: 125597 - RNA, 22 nt, synthetic construct
  source 1..22: mol_type = other RNA
cactcagcataattggttaaac

SEQ ID NO: 125598 - RNA, 22 nt, synthetic construct
  source 1..22: mol_type = other RNA
cactcagcctgttgggaggttt

SEQ ID NO: 125599 - RNA, 22 nt, synthetic construct
  source 1..22: mol_type = other RNA
cactcataccaggttttggtaa

SEQ ID NO: 125600 - RNA, 22 nt, synthetic construct
  source 1..22: mol_type = other RNA
cactcatttccgttgctgcata

SEQ ID NO: 125601 - RNA, 22 nt, synthetic construct
  source 1..22: mol_type = other RNA
cactcatttcctttcagtcggt

SEQ ID NO: 125602 - RNA, 22 nt, synthetic construct
  source 1..22: mol_type = other RNA
cactccaaagcaaacgtgcaca

SEQ ID NO: 125603 - RNA, 22 nt, synthetic construct
  source 1..22: mol_type = other RNA
cactccacacacgaagtagttt

SEQ ID NO: 125604 - RNA, 22 nt, synthetic construct
  source 1..22: mol_type = other RNA
cactccaccttagcccaagcta

SEQ ID NO: 125605 - RNA, 22 nt, synthetic construct
  source 1..22: mol_type = other RNA
cactccacgtgggtgacagagc

SEQ ID NO: 125606 - RNA, 22 nt, synthetic construct
  source 1..22: mol_type = other RNA
cactccactccagcctgagcaa

SEQ ID NO: 125607 - RNA, 22 nt, synthetic construct
  source 1..22: mol_type = other RNA
cactccacttcccactgctatg

SEQ ID NO: 125608 - RNA, 22 nt, synthetic construct
  source 1..22: mol_type = other RNA
cactccagaatgaccgagatac

SEQ ID NO: 125609 - RNA, 22 nt, synthetic construct
  source 1..22: mol_type = other RNA
cactccagactgggcaacagag

SEQ ID NO: 125610 - RNA, 22 nt, synthetic construct
  source 1..22: mol_type = other RNA
cactccagcatccctccagtcc

SEQ ID NO: 125611 - RNA, 22 nt, synthetic construct
  source 1..22: mol_type = other RNA
cactccagcctggtcaacaggg

SEQ ID NO: 125612 - RNA, 22 nt, synthetic construct
  source 1..22: mol_type = other RNA
cactccagccttggtaagagtg

SEQ ID NO: 125613 - RNA, 22 nt, synthetic construct
  source 1..22: mol_type = other RNA
cactccatttgtggcatctttg

SEQ ID NO: 125614 - RNA, 22 nt, synthetic construct
  source 1..22: mol_type = other RNA
cactccccagtggttgtggaat

SEQ ID NO: 125615 - RNA, 22 nt, synthetic construct
  source 1..22: mol_type = other RNA
cactcctcattcacactagtca

SEQ ID NO: 125616 - RNA, 22 nt, synthetic construct
  source 1..22: mol_type = other RNA
cactcgcactccacttcccact

SEQ ID NO: 125617 - RNA, 22 nt, synthetic construct
  source 1..22: mol_type = other RNA
cactcgtgtatgatttctaggc

SEQ ID NO: 125618 - RNA, 22 nt, synthetic construct
  source 1..22: mol_type = other RNA
cactctaatatggttcctagaa

SEQ ID NO: 125619 - RNA, 22 nt, synthetic construct
  source 1..22: mol_type = other RNA
cactctcaatagtgtcctttga

SEQ ID NO: 125620 - RNA, 22 nt, synthetic construct
  source 1..22: mol_type = other RNA
cactctcatctaaattaagctt

SEQ ID NO: 125621 - RNA, 22 nt, synthetic construct
  source 1..22: mol_type = other RNA
cactctccccaagtaaacctca

SEQ ID NO: 125622 - RNA, 22 nt, synthetic construct
  source 1..22: mol_type = other RNA
cactctctggctgcaattgcgc

SEQ ID NO: 125623 - RNA, 22 nt, synthetic construct
  source 1..22: mol_type = other RNA
cactctctttaggaagcttcct

SEQ ID NO: 125624 - RNA, 22 nt, synthetic construct
  source 1..22: mol_type = other RNA
cactctgaatcacctcaaggca

SEQ ID NO: 125625 - RNA, 22 nt, synthetic construct
  source 1..22: mol_type = other RNA
cactctgaattctctggaatag

SEQ ID NO: 125626 - RNA, 22 nt, synthetic construct
  source 1..22: mol_type = other RNA
cactctgcaattttaaatgtac

SEQ ID NO: 125627 - RNA, 22 nt, synthetic construct
  source 1..22: mol_type = other RNA
cactctggcctggacaacagtg

SEQ ID NO: 125628 - RNA, 22 nt, synthetic construct
  source 1..22: mol_type = other RNA
cactctgtcgcccaggctggag

SEQ ID NO: 125629 - RNA, 22 nt, synthetic construct
  source 1..22: mol_type = other RNA
cactcttaaaaggagatataca

SEQ ID NO: 125630 - RNA, 22 nt, synthetic construct
  source 1..22: mol_type = other RNA
cactcttaataactgcctaagt

SEQ ID NO: 125631 - RNA, 22 nt, synthetic construct
  source 1..22: mol_type = other RNA
cactcttaccaaggctggagtg

SEQ ID NO: 125632 - RNA, 22 nt, synthetic construct
  source 1..22: mol_type = other RNA
cactcttagtgatgtcttttga

SEQ ID NO: 125633 - RNA, 22 nt, synthetic construct
  source 1..22: mol_type = other RNA
cactcttatatcctaaacactt

SEQ ID NO: 125634 - RNA, 22 nt, synthetic construct
  source 1..22: mol_type = other RNA
cactcttctgcaagttgctatc

SEQ ID NO: 125635 - RNA, 22 nt, synthetic construct
  source 1..22: mol_type = other RNA
cactcttggtctttctcccagg

SEQ ID NO: 125636 - RNA, 22 nt, synthetic construct
  source 1..22: mol_type = other RNA
cactcttttaaacccatttcat

SEQ ID NO: 125637 - RNA, 22 nt, synthetic construct
  source 1..22: mol_type = other RNA
cactcttttaaggtttagaaaa

SEQ ID NO: 125638 - RNA, 22 nt, synthetic construct
  source 1..22: mol_type = other RNA
cactgaaacaatcgcaatccaa

SEQ ID NO: 125639 - RNA, 22 nt, synthetic construct
  source 1..22: mol_type = other RNA
cactgaaaccctcacgaaagcg

SEQ ID NO: 125640 - RNA, 22 nt, synthetic construct
  source 1..22: mol_type = other RNA
cactgaaacttttcttttcttt

SEQ ID NO: 125641 - RNA, 22 nt, synthetic construct
  source 1..22: mol_type = other RNA
cactgaagccagtccttgtgat

SEQ ID NO: 125642 - RNA, 22 nt, synthetic construct
  source 1..22: mol_type = other RNA
cactgaagggaattttactgat

SEQ ID NO: 125643 - RNA, 22 nt, synthetic construct
  source 1..22: mol_type = other RNA
cactgaagtgttgagaggcttt

SEQ ID NO: 125644 - RNA, 22 nt, synthetic construct
  source 1..22: mol_type = other RNA
cactgaatcagattttaaatgt

SEQ ID NO: 125645 - RNA, 22 nt, synthetic construct
  source 1..22: mol_type = other RNA
cactgacacaggctgaagggag

SEQ ID NO: 125646 - RNA, 22 nt, synthetic construct
  source 1..22: mol_type = other RNA
cactgacaggacagagcagtag

SEQ ID NO: 125647 - RNA, 22 nt, synthetic construct
  source 1..22: mol_type = other RNA
cactgacagtggacaaaggttc

SEQ ID NO: 125648 - RNA, 22 nt, synthetic construct
  source 1..22: mol_type = other RNA
cactgactacacatacacaggg

SEQ ID NO: 125649 - RNA, 22 nt, synthetic construct
  source 1..22: mol_type = other RNA
cactgactggctgtgccaactc

SEQ ID NO: 125650 - RNA, 22 nt, synthetic construct
  source 1..22: mol_type = other RNA
cactgagagctcaggccagtga

SEQ ID NO: 125651 - RNA, 22 nt, synthetic construct
  source 1..22: mol_type = other RNA
cactgagagggaagtttatagc

SEQ ID NO: 125652 - RNA, 22 nt, synthetic construct
  source 1..22: mol_type = other RNA
cactgagcacaatgcctgccgc

SEQ ID NO: 125653 - RNA, 22 nt, synthetic construct
  source 1..22: mol_type = other RNA
cactgagcatttatataagttc

SEQ ID NO: 125654 - RNA, 22 nt, synthetic construct
  source 1..22: mol_type = other RNA
cactgaggtcaagaaataaaac

SEQ ID NO: 125655 - RNA, 22 nt, synthetic construct
  source 1..22: mol_type = other RNA
cactgatggaattctgacaccc

SEQ ID NO: 125656 - RNA, 22 nt, synthetic construct
  source 1..22: mol_type = other RNA
cactgatgtgtagttattattg

SEQ ID NO: 125657 - RNA, 22 nt, synthetic construct
  source 1..22: mol_type = other RNA
cactgattgagtatctggtgct

SEQ ID NO: 125658 - RNA, 22 nt, synthetic construct
  source 1..22: mol_type = other RNA
cactgattttctgcttctcaat

SEQ ID NO: 125659 - RNA, 22 nt, synthetic construct
  source 1..22: mol_type = other RNA
cactgcaagctccgcctcctgg

SEQ ID NO: 125660 - RNA, 22 nt, synthetic construct
  source 1..22: mol_type = other RNA
cactgcacagtatgcggggttt

SEQ ID NO: 125661 - RNA, 22 nt, synthetic construct
  source 1..22: mol_type = other RNA
cactgcactccagccttggtaa

SEQ ID NO: 125662 - RNA, 22 nt, synthetic construct
  source 1..22: mol_type = other RNA
cactgcactctggcctggacaa

SEQ ID NO: 125663 - RNA, 22 nt, synthetic construct
  source 1..22: mol_type = other RNA
cactgcagaattactgacaata

SEQ ID NO: 125664 - RNA, 22 nt, synthetic construct
  source 1..22: mol_type = other RNA
cactgcagatgaatgagcaagg

SEQ ID NO: 125665 - RNA, 22 nt, synthetic construct
  source 1..22: mol_type = other RNA
cactgcaggtgttggtgcattt

SEQ ID NO: 125666 - RNA, 22 nt, synthetic construct
  source 1..22: mol_type = other RNA
cactgcagtctcaaactcctgc

SEQ ID NO: 125667 - RNA, 22 nt, synthetic construct
  source 1..22: mol_type = other RNA
cactgcattcatccaggcaaaa

SEQ ID NO: 125668 - RNA, 22 nt, synthetic construct
  source 1..22: mol_type = other RNA
cactgcattccgcctgggcgac

SEQ ID NO: 125669 - RNA, 22 nt, synthetic construct
  source 1..22: mol_type = other RNA
cactgcgccaagcagggacggg

SEQ ID NO: 125670 - RNA, 22 nt, synthetic construct
  source 1..22: mol_type = other RNA
cactgcgggcccagctcttttg

SEQ ID NO: 125671 - RNA, 22 nt, synthetic construct
  source 1..22: mol_type = other RNA
cactgctatgactaatttgagg

SEQ ID NO: 125672 - RNA, 22 nt, synthetic construct
  source 1..22: mol_type = other RNA
cactgctattgataaatctaaa

SEQ ID NO: 125673 - RNA, 22 nt, synthetic construct
  source 1..22: mol_type = other RNA
cactgctcagaagctttcagac

SEQ ID NO: 125674 - RNA, 22 nt, synthetic construct
  source 1..22: mol_type = other RNA
cactgctcagtccctcaccttc

SEQ ID NO: 125675 - RNA, 22 nt, synthetic construct
  source 1..22: mol_type = other RNA
cactgctcctgcctttgttcat

SEQ ID NO: 125676 - RNA, 22 nt, synthetic construct
  source 1..22: mol_type = other RNA
cactgctcttctattccagaga

SEQ ID NO: 125677 - RNA, 22 nt, synthetic construct
  source 1..22: mol_type = other RNA
cactgctgatgtaagtgggagg

SEQ ID NO: 125678 - RNA, 22 nt, synthetic construct
  source 1..22: mol_type = other RNA
cactggaaaccttttgtagacc

SEQ ID NO: 125679 - RNA, 22 nt, synthetic construct
  source 1..22: mol_type = other RNA
cactggaaatcacaggtttagg

SEQ ID NO: 125680 - RNA, 22 nt, synthetic construct
  source 1..22: mol_type = other RNA
cactggaagtaattgggatctg

SEQ ID NO: 125681 - RNA, 22 nt, synthetic construct
  source 1..22: mol_type = other RNA
cactggagaattctactaaaca

SEQ ID NO: 125682 - RNA, 22 nt, synthetic construct
  source 1..22: mol_type = other RNA
cactggaggtgcacattccaag

SEQ ID NO: 125683 - RNA, 22 nt, synthetic construct
  source 1..22: mol_type = other RNA
cactggatacggaaatataaca

SEQ ID NO: 125684 - RNA, 22 nt, synthetic construct
  source 1..22: mol_type = other RNA
cactggatagaagtgtatcaga

SEQ ID NO: 125685 - RNA, 22 nt, synthetic construct
  source 1..22: mol_type = other RNA
cactggcaaaaatcatcatata

SEQ ID NO: 125686 - RNA, 22 nt, synthetic construct
  source 1..22: mol_type = other RNA
cactggcacagcactgttaact

SEQ ID NO: 125687 - RNA, 22 nt, synthetic construct
  source 1..22: mol_type = other RNA
cactggccactgattgagtatc

SEQ ID NO: 125688 - RNA, 22 nt, synthetic construct
  source 1..22: mol_type = other RNA
cactggccagcattacttaggc

SEQ ID NO: 125689 - RNA, 22 nt, synthetic construct
  source 1..22: mol_type = other RNA
cactggcctgagctctcagtgg

SEQ ID NO: 125690 - RNA, 22 nt, synthetic construct
  source 1..22: mol_type = other RNA
cactggctagtaggcaacatcc

SEQ ID NO: 125691 - RNA, 22 nt, synthetic construct
  source 1..22: mol_type = other RNA
cactggctattagttaaccttc

SEQ ID NO: 125692 - RNA, 22 nt, synthetic construct
  source 1..22: mol_type = other RNA
cactgggagccctccaggatcc

SEQ ID NO: 125693 - RNA, 22 nt, synthetic construct
  source 1..22: mol_type = other RNA
cactggggagtgtgcccaagga

SEQ ID NO: 125694 - RNA, 22 nt, synthetic construct
  source 1..22: mol_type = other RNA
cactgggtaaacaagactcaac

SEQ ID NO: 125695 - RNA, 22 nt, synthetic construct
  source 1..22: mol_type = other RNA
cactgggtccccggaggaggtg

SEQ ID NO: 125696 - RNA, 22 nt, synthetic construct
  source 1..22: mol_type = other RNA
cactgggtcttataggttgaat

SEQ ID NO: 125697 - RNA, 22 nt, synthetic construct
  source 1..22: mol_type = other RNA
cactgggttctcaccaacatcc

SEQ ID NO: 125698 - RNA, 22 nt, synthetic construct
  source 1..22: mol_type = other RNA
cactggtaaggaaacagagttt

SEQ ID NO: 125699 - RNA, 22 nt, synthetic construct
  source 1..22: mol_type = other RNA
cactggtcactggccactgatt

SEQ ID NO: 125700 - RNA, 22 nt, synthetic construct
  source 1..22: mol_type = other RNA
cactggtttcagtacacgaaaa

SEQ ID NO: 125701 - RNA, 22 nt, synthetic construct
  source 1..22: mol_type = other RNA
cactggtttcagtccctccttt

SEQ ID NO: 125702 - RNA, 22 nt, synthetic construct
  source 1..22: mol_type = other RNA
cactgtaacctccacctcccag

SEQ ID NO: 125703 - RNA, 22 nt, synthetic construct
  source 1..22: mol_type = other RNA
cactgtaagaataatgtctttt

SEQ ID NO: 125704 - RNA, 22 nt, synthetic construct
  source 1..22: mol_type = other RNA
cactgtactactgacctgggag

SEQ ID NO: 125705 - RNA, 22 nt, synthetic construct
  source 1..22: mol_type = other RNA
cactgtactcctagatactcgg

SEQ ID NO: 125706 - RNA, 22 nt, synthetic construct
  source 1..22: mol_type = other RNA
cactgtaggccccgatgccatg

SEQ ID NO: 125707 - RNA, 22 nt, synthetic construct
  source 1..22: mol_type = other RNA
cactgtagttcagtttttcttt

SEQ ID NO: 125708 - RNA, 22 nt, synthetic construct
  source 1..22: mol_type = other RNA
cactgtatggttcttaagatga

SEQ ID NO: 125709 - RNA, 22 nt, synthetic construct
  source 1..22: mol_type = other RNA
cactgtcagtgggactggagaa

SEQ ID NO: 125710 - RNA, 22 nt, synthetic construct
  source 1..22: mol_type = other RNA
cactgtctccatgtcctcacct

SEQ ID NO: 125711 - RNA, 22 nt, synthetic construct
  source 1..22: mol_type = other RNA
cactgtgactccaaagcaaacc

SEQ ID NO: 125712 - RNA, 22 nt, synthetic construct
  source 1..22: mol_type = other RNA
cactgtgagccactaaaacagg

SEQ ID NO: 125713 - RNA, 22 nt, synthetic construct
  source 1..22: mol_type = other RNA
cactgtgatacctagtacgtaa

SEQ ID NO: 125714 - RNA, 22 nt, synthetic construct
  source 1..22: mol_type = other RNA
cactgtgttcttttccttctta

SEQ ID NO: 125715 - RNA, 22 nt, synthetic construct
  source 1..22: mol_type = other RNA
cactgttaactgacttacagac

SEQ ID NO: 125716 - RNA, 22 nt, synthetic construct
  source 1..22: mol_type = other RNA
cactgttatctgggaacagccc

SEQ ID NO: 125717 - RNA, 22 nt, synthetic construct
  source 1..22: mol_type = other RNA
cactgttgatttagaaatacct

SEQ ID NO: 125718 - RNA, 22 nt, synthetic construct
  source 1..22: mol_type = other RNA
cactgttgtccaggccagagtg

SEQ ID NO: 125719 - RNA, 22 nt, synthetic construct
  source 1..22: mol_type = other RNA
cactgtttgattactgtagctt

SEQ ID NO: 125720 - RNA, 22 nt, synthetic construct
  source 1..22: mol_type = other RNA
cacttaaaaaatgcgcgtccgc

SEQ ID NO: 125721 - RNA, 22 nt, synthetic construct
  source 1..22: mol_type = other RNA
cacttaaaatttagatctcatg

SEQ ID NO: 125722 - RNA, 22 nt, synthetic construct
  source 1..22: mol_type = other RNA
cacttaacatgagatctaaatt

SEQ ID NO: 125723 - RNA, 22 nt, synthetic construct
  source 1..22: mol_type = other RNA
cacttacatcagcagtgaccat

SEQ ID NO: 125724 - RNA, 22 nt, synthetic construct
  source 1..22: mol_type = other RNA
cacttactaaatgatctttcaa

SEQ ID NO: 125725 - RNA, 22 nt, synthetic construct
  source 1..22: mol_type = other RNA
cacttacttgagccccagaata

SEQ ID NO: 125726 - RNA, 22 nt, synthetic construct
  source 1..22: mol_type = other RNA
cacttagcatgttgctttgcga

SEQ ID NO: 125727 - RNA, 22 nt, synthetic construct
  source 1..22: mol_type = other RNA
cacttagcgctgatgtgttgac

SEQ ID NO: 125728 - RNA, 22 nt, synthetic construct
  source 1..22: mol_type = other RNA
cacttagttcaagatgcatacc

SEQ ID NO: 125729 - RNA, 22 nt, synthetic construct
  source 1..22: mol_type = other RNA
cacttagtttgcaatacagtta

SEQ ID NO: 125730 - RNA, 22 nt, synthetic construct
  source 1..22: mol_type = other RNA
cacttattagcaaagaggcaaa

SEQ ID NO: 125731 - RNA, 22 nt, synthetic construct
  source 1..22: mol_type = other RNA
cacttcagtggtaaggactgaa

SEQ ID NO: 125732 - RNA, 22 nt, synthetic construct
  source 1..22: mol_type = other RNA
cacttccaagtcccggaagctg

SEQ ID NO: 125733 - RNA, 22 nt, synthetic construct
  source 1..22: mol_type = other RNA
cacttccagtacatctcaattc

SEQ ID NO: 125734 - RNA, 22 nt, synthetic construct
  source 1..22: mol_type = other RNA
cacttccattttgcttaataat

SEQ ID NO: 125735 - RNA, 22 nt, synthetic construct
  source 1..22: mol_type = other RNA
cacttcccactgctatgactaa

SEQ ID NO: 125736 - RNA, 22 nt, synthetic construct
  source 1..22: mol_type = other RNA
cacttcctattagaagaatgat

SEQ ID NO: 125737 - RNA, 22 nt, synthetic construct
  source 1..22: mol_type = other RNA
cacttcctctcttaaatccgag

SEQ ID NO: 125738 - RNA, 22 nt, synthetic construct
  source 1..22: mol_type = other RNA
cacttcgaaagttcagatagaa

SEQ ID NO: 125739 - RNA, 22 nt, synthetic construct
  source 1..22: mol_type = other RNA
cacttcgagaagggaagtaaag

SEQ ID NO: 125740 - RNA, 22 nt, synthetic construct
  source 1..22: mol_type = other RNA
cacttcgttcagtttagtaaat

SEQ ID NO: 125741 - RNA, 22 nt, synthetic construct
  source 1..22: mol_type = other RNA
cacttctatccagtgacacctg

SEQ ID NO: 125742 - RNA, 22 nt, synthetic construct
  source 1..22: mol_type = other RNA
cacttctctgctgctgaaaaag

SEQ ID NO: 125743 - RNA, 22 nt, synthetic construct
  source 1..22: mol_type = other RNA
cacttctgatatcctgtaaacc

SEQ ID NO: 125744 - RNA, 22 nt, synthetic construct
  source 1..22: mol_type = other RNA
cacttctgtgatcagaagagca

SEQ ID NO: 125745 - RNA, 22 nt, synthetic construct
  source 1..22: mol_type = other RNA
cacttcttagtaaatatccgaa

SEQ ID NO: 125746 - RNA, 22 nt, synthetic construct
  source 1..22: mol_type = other RNA
cacttcttattggttatctgta

SEQ ID NO: 125747 - RNA, 22 nt, synthetic construct
  source 1..22: mol_type = other RNA
cacttgaaacctgccatggtgt

SEQ ID NO: 125748 - RNA, 22 nt, synthetic construct
  source 1..22: mol_type = other RNA
cacttgaattagtgattttacc

SEQ ID NO: 125749 - RNA, 22 nt, synthetic construct
  source 1..22: mol_type = other RNA
cacttgagcctggaagttcaag

SEQ ID NO: 125750 - RNA, 22 nt, synthetic construct
  source 1..22: mol_type = other RNA
cacttgaggtgattaaaggccc

SEQ ID NO: 125751 - RNA, 22 nt, synthetic construct
  source 1..22: mol_type = other RNA
cacttgatccaggtgtatgatc

SEQ ID NO: 125752 - RNA, 22 nt, synthetic construct
  source 1..22: mol_type = other RNA
cacttgatggtttggggctttt

SEQ ID NO: 125753 - RNA, 22 nt, synthetic construct
  source 1..22: mol_type = other RNA
cacttgattactttacagttat

SEQ ID NO: 125754 - RNA, 22 nt, synthetic construct
  source 1..22: mol_type = other RNA
cacttgcttgggaacagcaggg

SEQ ID NO: 125755 - RNA, 22 nt, synthetic construct
  source 1..22: mol_type = other RNA
cacttggagttttccccctaca

SEQ ID NO: 125756 - RNA, 22 nt, synthetic construct
  source 1..22: mol_type = other RNA
cacttgggatgtttctaccttt

SEQ ID NO: 125757 - RNA, 22 nt, synthetic construct
  source 1..22: mol_type = other RNA
cacttggggaggccaaggcagg

SEQ ID NO: 125758 - RNA, 22 nt, synthetic construct
  source 1..22: mol_type = other RNA
cacttgggtggaagctgtcctt

SEQ ID NO: 125759 - RNA, 22 nt, synthetic construct
  source 1..22: mol_type = other RNA
cacttggtaagctgtgagtcct

SEQ ID NO: 125760 - RNA, 22 nt, synthetic construct
  source 1..22: mol_type = other RNA
cacttgtcccatggtcaaatca

SEQ ID NO: 125761 - RNA, 22 nt, synthetic construct
  source 1..22: mol_type = other RNA
cacttgtgtaactaccactgag

SEQ ID NO: 125762 - RNA, 22 nt, synthetic construct
  source 1..22: mol_type = other RNA
cacttgtttcttttcactctaa

SEQ ID NO: 125763 - RNA, 22 nt, synthetic construct
  source 1..22: mol_type = other RNA
cactttcatgatttggtgtgtg

SEQ ID NO: 125764 - RNA, 22 nt, synthetic construct
  source 1..22: mol_type = other RNA
cactttccatcttaggccataa

SEQ ID NO: 125765 - RNA, 22 nt, synthetic construct
  source 1..22: mol_type = other RNA
cactttcctattcacactgctc

SEQ ID NO: 125766 - RNA, 22 nt, synthetic construct
  source 1..22: mol_type = other RNA
cactttcctgataaggggctat

SEQ ID NO: 125767 - RNA, 22 nt, synthetic construct
  source 1..22: mol_type = other RNA
cactttccttggagaagagttc

SEQ ID NO: 125768 - RNA, 22 nt, synthetic construct
  source 1..22: mol_type = other RNA
cactttcgtcatctataaggta

SEQ ID NO: 125769 - RNA, 22 nt, synthetic construct
  source 1..22: mol_type = other RNA
cactttgaggttattaagataa

SEQ ID NO: 125770 - RNA, 22 nt, synthetic construct
  source 1..22: mol_type = other RNA
cactttgatcatacacatccag

SEQ ID NO: 125771 - RNA, 22 nt, synthetic construct
  source 1..22: mol_type = other RNA
cactttgggattagcttattct

SEQ ID NO: 125772 - RNA, 22 nt, synthetic construct
  source 1..22: mol_type = other RNA
cactttgttgctcaggctggag

SEQ ID NO: 125773 - RNA, 22 nt, synthetic construct
  source 1..22: mol_type = other RNA
cacttttaaggcttggaaaaca

SEQ ID NO: 125774 - RNA, 22 nt, synthetic construct
  source 1..22: mol_type = other RNA
cacttttcaaacacttaacata

SEQ ID NO: 125775 - RNA, 22 nt, synthetic construct
  source 1..22: mol_type = other RNA
cacttttcaggtattgagcctg

SEQ ID NO: 125776 - RNA, 22 nt, synthetic construct
  source 1..22: mol_type = other RNA
cacttttccagtcttctcatac

SEQ ID NO: 125777 - RNA, 22 nt, synthetic construct
  source 1..22: mol_type = other RNA
cacttttctggttttctggagg

SEQ ID NO: 125778 - RNA, 22 nt, synthetic construct
  source 1..22: mol_type = other RNA
cacttttgagttcagaaagatt

SEQ ID NO: 125779 - RNA, 22 nt, synthetic construct
  source 1..22: mol_type = other RNA
cacttttggaatttaaggggta

SEQ ID NO: 125780 - RNA, 22 nt, synthetic construct
  source 1..22: mol_type = other RNA
cacttttgtactacttgtcagg

SEQ ID NO: 125781 - RNA, 22 nt, synthetic construct
  source 1..22: mol_type = other RNA
cacttttgtgcaacataaatag

SEQ ID NO: 125782 - RNA, 22 nt, synthetic construct
  source 1..22: mol_type = other RNA
cactttttaccaagttgaattt

SEQ ID NO: 125783 - RNA, 22 nt, synthetic construct
  source 1..22: mol_type = other RNA
cactttttattctgttctagct

SEQ ID NO: 125784 - RNA, 22 nt, synthetic construct
  source 1..22: mol_type = other RNA
cactttttgtatttccttatag

SEQ ID NO: 125785 - RNA, 22 nt, synthetic construct
  source 1..22: mol_type = other RNA
cactttttgtgagttttaactc

SEQ ID NO: 125786 - RNA, 22 nt, synthetic construct
  source 1..22: mol_type = other RNA
cagaaaaaattagccttttaca

SEQ ID NO: 125787 - RNA, 22 nt, synthetic construct
  source 1..22: mol_type = other RNA
cagaaaaccagaaaagtgaaac

SEQ ID NO: 125788 - RNA, 22 nt, synthetic construct
  source 1..22: mol_type = other RNA
cagaaaacccttcatcatttgt

SEQ ID NO: 125789 - RNA, 22 nt, synthetic construct
  source 1..22: mol_type = other RNA
cagaaaactggcaatcaaatgg

SEQ ID NO: 125790 - RNA, 22 nt, synthetic construct
  source 1..22: mol_type = other RNA
cagaaaagatcagtaaaattcc

SEQ ID NO: 125791 - RNA, 22 nt, synthetic construct
  source 1..22: mol_type = other RNA
cagaaaaggctgagacctcatc

SEQ ID NO: 125792 - RNA, 22 nt, synthetic construct
  source 1..22: mol_type = other RNA
cagaaaataaaccaagtttggt

SEQ ID NO: 125793 - RNA, 22 nt, synthetic construct
  source 1..22: mol_type = other RNA
cagaaaatatctacaaatcaca

SEQ ID NO: 125794 - RNA, 22 nt, synthetic construct
  source 1..22: mol_type = other RNA
cagaaaatcagtgtgaaagtat

SEQ ID NO: 125795 - RNA, 22 nt, synthetic construct
  source 1..22: mol_type = other RNA
cagaaaattttcttttgtgggt

SEQ ID NO: 125796 - RNA, 22 nt, synthetic construct
  source 1..22: mol_type = other RNA
cagaaacaacaacaacaaaata

SEQ ID NO: 125797 - RNA, 22 nt, synthetic construct
  source 1..22: mol_type = other RNA
cagaaacacaggactgtgtgtg

SEQ ID NO: 125798 - RNA, 22 nt, synthetic construct
  source 1..22: mol_type = other RNA
cagaaacaccaacacaaagcct

SEQ ID NO: 125799 - RNA, 22 nt, synthetic construct
  source 1..22: mol_type = other RNA
cagaaacagaaaaatccatctt

SEQ ID NO: 125800 - RNA, 22 nt, synthetic construct
  source 1..22: mol_type = other RNA
cagaaaccagttgtaattttta

SEQ ID NO: 125801 - RNA, 22 nt, synthetic construct
  source 1..22: mol_type = other RNA
cagaaaccatcgttcacactcg

SEQ ID NO: 125802 - RNA, 22 nt, synthetic construct
  source 1..22: mol_type = other RNA
cagaaaccctgtacccattaga

SEQ ID NO: 125803 - RNA, 22 nt, synthetic construct
  source 1..22: mol_type = other RNA
cagaaactgacaggactccaca

SEQ ID NO: 125804 - RNA, 22 nt, synthetic construct
  source 1..22: mol_type = other RNA
cagaaacttccaaccatcttct

SEQ ID NO: 125805 - RNA, 22 nt, synthetic construct
  source 1..22: mol_type = other RNA
cagaaagacagggagagagaga

SEQ ID NO: 125806 - RNA, 22 nt, synthetic construct
  source 1..22: mol_type = other RNA
cagaaagagaatagcagaaaca

SEQ ID NO: 125807 - RNA, 22 nt, synthetic construct
  source 1..22: mol_type = other RNA
cagaaagagagaggggggaagc

SEQ ID NO: 125808 - RNA, 22 nt, synthetic construct
  source 1..22: mol_type = other RNA
cagaaagattaatccttgtggt

SEQ ID NO: 125809 - RNA, 22 nt, synthetic construct
  source 1..22: mol_type = other RNA
cagaaagcctcttcagaagagg

SEQ ID NO: 125810 - RNA, 22 nt, synthetic construct
  source 1..22: mol_type = other RNA
cagaaaggcccaaaaagttttt

SEQ ID NO: 125811 - RNA, 22 nt, synthetic construct
  source 1..22: mol_type = other RNA
cagaaataaaacatgttgtgta

SEQ ID NO: 125812 - RNA, 22 nt, synthetic construct
  source 1..22: mol_type = other RNA
cagaaataaatcctcacatgtt

SEQ ID NO: 125813 - RNA, 22 nt, synthetic construct
  source 1..22: mol_type = other RNA
cagaaatacaatgtgagccaca

SEQ ID NO: 125814 - RNA, 22 nt, synthetic construct
  source 1..22: mol_type = other RNA
cagaaatacagaccgatggaac

SEQ ID NO: 125815 - RNA, 22 nt, synthetic construct
  source 1..22: mol_type = other RNA
cagaaatagactcccaacttat

SEQ ID NO: 125816 - RNA, 22 nt, synthetic construct
  source 1..22: mol_type = other RNA
cagaaatataccttatgtgaaa

SEQ ID NO: 125817 - RNA, 22 nt, synthetic construct
  source 1..22: mol_type = other RNA
cagaaatctaccaaacattgaa

SEQ ID NO: 125818 - RNA, 22 nt, synthetic construct
  source 1..22: mol_type = other RNA
cagaaatgaaatggcccttaac

SEQ ID NO: 125819 - RNA, 22 nt, synthetic construct
  source 1..22: mol_type = other RNA
cagaaatgacaagtaaatgcaa

SEQ ID NO: 125820 - RNA, 22 nt, synthetic construct
  source 1..22: mol_type = other RNA
cagaaatgagttccagtccttt

SEQ ID NO: 125821 - RNA, 22 nt, synthetic construct
  source 1..22: mol_type = other RNA
cagaaatgtttaattcctactt

SEQ ID NO: 125822 - RNA, 22 nt, synthetic construct
  source 1..22: mol_type = other RNA
cagaaattataagcttcctctg

SEQ ID NO: 125823 - RNA, 22 nt, synthetic construct
  source 1..22: mol_type = other RNA
cagaaattcaacttggtaaaaa

SEQ ID NO: 125824 - RNA, 22 nt, synthetic construct
  source 1..22: mol_type = other RNA
cagaacaaactcaagttccggt

SEQ ID NO: 125825 - RNA, 22 nt, synthetic construct
  source 1..22: mol_type = other RNA
cagaacaaactgcgtggtttat

SEQ ID NO: 125826 - RNA, 22 nt, synthetic construct
  source 1..22: mol_type = other RNA
cagaacaaataacaccatagct

SEQ ID NO: 125827 - RNA, 22 nt, synthetic construct
  source 1..22: mol_type = other RNA
cagaacacactgctcttctatt

SEQ ID NO: 125828 - RNA, 22 nt, synthetic construct
  source 1..22: mol_type = other RNA
cagaacactaaaggggatttca

SEQ ID NO: 125829 - RNA, 22 nt, synthetic construct
  source 1..22: mol_type = other RNA
cagaacagtgtttacacacctg

SEQ ID NO: 125830 - RNA, 22 nt, synthetic construct
  source 1..22: mol_type = other RNA
cagaaccacctgggggagactg

SEQ ID NO: 125831 - RNA, 22 nt, synthetic construct
  source 1..22: mol_type = other RNA
cagaaccactgagcacaatgcc

SEQ ID NO: 125832 - RNA, 22 nt, synthetic construct
  source 1..22: mol_type = other RNA
cagaaccatgtaacaggtttaa

SEQ ID NO: 125833 - RNA, 22 nt, synthetic construct
  source 1..22: mol_type = other RNA
cagaaccttagaaatttaagga

SEQ ID NO: 125834 - RNA, 22 nt, synthetic construct
  source 1..22: mol_type = other RNA
cagaactaagaccccagtagaa

SEQ ID NO: 125835 - RNA, 22 nt, synthetic construct
  source 1..22: mol_type = other RNA
cagaactacacattccagacca

SEQ ID NO: 125836 - RNA, 22 nt, synthetic construct
  source 1..22: mol_type = other RNA
cagaactccacctcagaaacaa

SEQ ID NO: 125837 - RNA, 22 nt, synthetic construct
  source 1..22: mol_type = other RNA
cagaactcgaagccttcccctg

SEQ ID NO: 125838 - RNA, 22 nt, synthetic construct
  source 1..22: mol_type = other RNA
cagaactcttctccaaggaaag

SEQ ID NO: 125839 - RNA, 22 nt, synthetic construct
  source 1..22: mol_type = other RNA
cagaactgctaatggtccttgc

SEQ ID NO: 125840 - RNA, 22 nt, synthetic construct
  source 1..22: mol_type = other RNA
cagaactggggcttgaacccga

SEQ ID NO: 125841 - RNA, 22 nt, synthetic construct
  source 1..22: mol_type = other RNA
cagaactgtcactgacacaggc

SEQ ID NO: 125842 - RNA, 22 nt, synthetic construct
  source 1..22: mol_type = other RNA
cagaacttgacaagtatattac

SEQ ID NO: 125843 - RNA, 22 nt, synthetic construct
  source 1..22: mol_type = other RNA
cagaagaaattacttctttctc

SEQ ID NO: 125844 - RNA, 22 nt, synthetic construct
  source 1..22: mol_type = other RNA
cagaagaagaattctataggta

SEQ ID NO: 125845 - RNA, 22 nt, synthetic construct
  source 1..22: mol_type = other RNA
cagaagaagtttctagttatta

SEQ ID NO: 125846 - RNA, 22 nt, synthetic construct
  source 1..22: mol_type = other RNA
cagaagacacaaaatcagatat

SEQ ID NO: 125847 - RNA, 22 nt, synthetic construct
  source 1..22: mol_type = other RNA
cagaagagaatggctggaatgg

SEQ ID NO: 125848 - RNA, 22 nt, synthetic construct
  source 1..22: mol_type = other RNA
cagaagagcactatgtaaatta

SEQ ID NO: 125849 - RNA, 22 nt, synthetic construct
  source 1..22: mol_type = other RNA
cagaagaggataaggggcaggg

SEQ ID NO: 125850 - RNA, 22 nt, synthetic construct
  source 1..22: mol_type = other RNA
cagaagagtgaagctggaccct

SEQ ID NO: 125851 - RNA, 22 nt, synthetic construct
  source 1..22: mol_type = other RNA
cagaagcacaccaaggtttctc

SEQ ID NO: 125852 - RNA, 22 nt, synthetic construct
  source 1..22: mol_type = other RNA
cagaagccctgcagccagattt

SEQ ID NO: 125853 - RNA, 22 nt, synthetic construct
  source 1..22: mol_type = other RNA
cagaagctaaattttcatagga

SEQ ID NO: 125854 - RNA, 22 nt, synthetic construct
  source 1..22: mol_type = other RNA
cagaagctatagctgagaagta

SEQ ID NO: 125855 - RNA, 22 nt, synthetic construct
  source 1..22: mol_type = other RNA
cagaagctttcagacttaacta

SEQ ID NO: 125856 - RNA, 22 nt, synthetic construct
  source 1..22: mol_type = other RNA
cagaaggagaaaacaaaaagaa

SEQ ID NO: 125857 - RNA, 22 nt, synthetic construct
  source 1..22: mol_type = other RNA
cagaaggagaaaccatttaccc

SEQ ID NO: 125858 - RNA, 22 nt, synthetic construct
  source 1..22: mol_type = other RNA
cagaaggaggaaaataatttgc

SEQ ID NO: 125859 - RNA, 22 nt, synthetic construct
  source 1..22: mol_type = other RNA
cagaaggagtccagtcctgcta

SEQ ID NO: 125860 - RNA, 22 nt, synthetic construct
  source 1..22: mol_type = other RNA
cagaagggaaaggatgaccttg

SEQ ID NO: 125861 - RNA, 22 nt, synthetic construct
  source 1..22: mol_type = other RNA
cagaagggtatatacaatatta

SEQ ID NO: 125862 - RNA, 22 nt, synthetic construct
  source 1..22: mol_type = other RNA
cagaaggtgagggactgagcag

SEQ ID NO: 125863 - RNA, 22 nt, synthetic construct
  source 1..22: mol_type = other RNA
cagaaggttaactaatagccag

SEQ ID NO: 125864 - RNA, 22 nt, synthetic construct
  source 1..22: mol_type = other RNA
cagaagtaactcttgagttagg

SEQ ID NO: 125865 - RNA, 22 nt, synthetic construct
  source 1..22: mol_type = other RNA
cagaagtactactcattaaata

SEQ ID NO: 125866 - RNA, 22 nt, synthetic construct
  source 1..22: mol_type = other RNA
cagaagtcactttttattctgt

SEQ ID NO: 125867 - RNA, 22 nt, synthetic construct
  source 1..22: mol_type = other RNA
cagaagtgctgacttggcagca

SEQ ID NO: 125868 - RNA, 22 nt, synthetic construct
  source 1..22: mol_type = other RNA
cagaagtgttttgatagttgca

SEQ ID NO: 125869 - RNA, 22 nt, synthetic construct
  source 1..22: mol_type = other RNA
cagaagttgtggtgagccaaga

SEQ ID NO: 125870 - RNA, 22 nt, synthetic construct
  source 1..22: mol_type = other RNA
cagaagtttggaaccagcctgg

SEQ ID NO: 125871 - RNA, 22 nt, synthetic construct
  source 1..22: mol_type = other RNA
cagaataaaaagtgacttctgg

SEQ ID NO: 125872 - RNA, 22 nt, synthetic construct
  source 1..22: mol_type = other RNA
cagaatacaaaaatgacacaac

SEQ ID NO: 125873 - RNA, 22 nt, synthetic construct
  source 1..22: mol_type = other RNA
cagaataccagagattgggaaa

SEQ ID NO: 125874 - RNA, 22 nt, synthetic construct
  source 1..22: mol_type = other RNA
cagaataggcaaattcatagat

SEQ ID NO: 125875 - RNA, 22 nt, synthetic construct
  source 1..22: mol_type = other RNA
cagaatatataaagaactccaa

SEQ ID NO: 125876 - RNA, 22 nt, synthetic construct
  source 1..22: mol_type = other RNA
cagaatccccaaataacatgca

SEQ ID NO: 125877 - RNA, 22 nt, synthetic construct
  source 1..22: mol_type = other RNA
cagaatccctttcgctaatctc

SEQ ID NO: 125878 - RNA, 22 nt, synthetic construct
  source 1..22: mol_type = other RNA
cagaatcgtgatagtcttccaa

SEQ ID NO: 125879 - RNA, 22 nt, synthetic construct
  source 1..22: mol_type = other RNA
cagaatcttactggtgttaggc

SEQ ID NO: 125880 - RNA, 22 nt, synthetic construct
  source 1..22: mol_type = other RNA
cagaatgaaggacaaaaataat

SEQ ID NO: 125881 - RNA, 22 nt, synthetic construct
  source 1..22: mol_type = other RNA
cagaatgacagaaaatatctac

SEQ ID NO: 125882 - RNA, 22 nt, synthetic construct
  source 1..22: mol_type = other RNA
cagaatgaccgagatacttaag

SEQ ID NO: 125883 - RNA, 22 nt, synthetic construct
  source 1..22: mol_type = other RNA
cagaatgatgctttccagcttc

SEQ ID NO: 125884 - RNA, 22 nt, synthetic construct
  source 1..22: mol_type = other RNA
cagaatgcatcttttaaaaacc

SEQ ID NO: 125885 - RNA, 22 nt, synthetic construct
  source 1..22: mol_type = other RNA
cagaatggccctgcgattggtt

SEQ ID NO: 125886 - RNA, 22 nt, synthetic construct
  source 1..22: mol_type = other RNA
cagaatgtccatcaggaaaacc

SEQ ID NO: 125887 - RNA, 22 nt, synthetic construct
  source 1..22: mol_type = other RNA
cagaatgtgacctgtccttgtg

SEQ ID NO: 125888 - RNA, 22 nt, synthetic construct
  source 1..22: mol_type = other RNA
cagaatgttcaagtatttccac

SEQ ID NO: 125889 - RNA, 22 nt, synthetic construct
  source 1..22: mol_type = other RNA
cagaattaaacaatcttgaaag

SEQ ID NO: 125890 - RNA, 22 nt, synthetic construct
  source 1..22: mol_type = other RNA
cagaattactgacaatagccaa

SEQ ID NO: 125891 - RNA, 22 nt, synthetic construct
  source 1..22: mol_type = other RNA
cagaattagaaagctggactca

SEQ ID NO: 125892 - RNA, 22 nt, synthetic construct
  source 1..22: mol_type = other RNA
cagaattatagagggcctaaat

SEQ ID NO: 125893 - RNA, 22 nt, synthetic construct
  source 1..22: mol_type = other RNA
cagaattattgattggcaaatc

SEQ ID NO: 125894 - RNA, 22 nt, synthetic construct
  source 1..22: mol_type = other RNA
cagaattcaaaaacactgtatt

SEQ ID NO: 125895 - RNA, 22 nt, synthetic construct
  source 1..22: mol_type = other RNA
cagaattcactgtgactccaaa

SEQ ID NO: 125896 - RNA, 22 nt, synthetic construct
  source 1..22: mol_type = other RNA
cagaattccatcagtggttgtg

SEQ ID NO: 125897 - RNA, 22 nt, synthetic construct
  source 1..22: mol_type = other RNA
cagaattccattccttttcgag

SEQ ID NO: 125898 - RNA, 22 nt, synthetic construct
  source 1..22: mol_type = other RNA
cagaatttgaggtcttctagct

SEQ ID NO: 125899 - RNA, 22 nt, synthetic construct
  source 1..22: mol_type = other RNA
cagacaaaaatagaggatgggc

SEQ ID NO: 125900 - RNA, 22 nt, synthetic construct
  source 1..22: mol_type = other RNA
cagacaaaaattttcattctac

SEQ ID NO: 125901 - RNA, 22 nt, synthetic construct
  source 1..22: mol_type = other RNA
cagacaacacattaataagatc

SEQ ID NO: 125902 - RNA, 22 nt, synthetic construct
  source 1..22: mol_type = other RNA
cagacaataattcttcctgtct

SEQ ID NO: 125903 - RNA, 22 nt, synthetic construct
  source 1..22: mol_type = other RNA
cagacacaccatgacagagttc

SEQ ID NO: 125904 - RNA, 22 nt, synthetic construct
  source 1..22: mol_type = other RNA
cagacacactagctgacccact

SEQ ID NO: 125905 - RNA, 22 nt, synthetic construct
  source 1..22: mol_type = other RNA
cagacacctacattaatctcat

SEQ ID NO: 125906 - RNA, 22 nt, synthetic construct
  source 1..22: mol_type = other RNA
cagacactgggttctcaccaac

SEQ ID NO: 125907 - RNA, 22 nt, synthetic construct
  source 1..22: mol_type = other RNA
cagacagaaagacagggagaga

SEQ ID NO: 125908 - RNA, 22 nt, synthetic construct
  source 1..22: mol_type = other RNA
cagacagacatgcatgcacaca

SEQ ID NO: 125909 - RNA, 22 nt, synthetic construct
  source 1..22: mol_type = other RNA
cagacagatatatgcattccca

SEQ ID NO: 125910 - RNA, 22 nt, synthetic construct
  source 1..22: mol_type = other RNA
cagacagctaatatgctgtagt

SEQ ID NO: 125911 - RNA, 22 nt, synthetic construct
  source 1..22: mol_type = other RNA
cagacagggaatgcccctgtag

SEQ ID NO: 125912 - RNA, 22 nt, synthetic construct
  source 1..22: mol_type = other RNA
cagacagggaatggggagctag

SEQ ID NO: 125913 - RNA, 22 nt, synthetic construct
  source 1..22: mol_type = other RNA
cagacatgaacaatccttctaa

SEQ ID NO: 125914 - RNA, 22 nt, synthetic construct
  source 1..22: mol_type = other RNA
cagacatgcacgagaaaagcac

SEQ ID NO: 125915 - RNA, 22 nt, synthetic construct
  source 1..22: mol_type = other RNA
cagacatgcatgcacacagagg

SEQ ID NO: 125916 - RNA, 22 nt, synthetic construct
  source 1..22: mol_type = other RNA
cagacatgccacaccacatcca

SEQ ID NO: 125917 - RNA, 22 nt, synthetic construct
  source 1..22: mol_type = other RNA
cagacatttctcatactttgtc

SEQ ID NO: 125918 - RNA, 22 nt, synthetic construct
  source 1..22: mol_type = other RNA
cagacatttggaatagagagcc

SEQ ID NO: 125919 - RNA, 22 nt, synthetic construct
  source 1..22: mol_type = other RNA
cagacattttatttatacaggt

SEQ ID NO: 125920 - RNA, 22 nt, synthetic construct
  source 1..22: mol_type = other RNA
cagaccaagaaaggacttcagt

SEQ ID NO: 125921 - RNA, 22 nt, synthetic construct
  source 1..22: mol_type = other RNA
cagaccaagtttaaccaattat

SEQ ID NO: 125922 - RNA, 22 nt, synthetic construct
  source 1..22: mol_type = other RNA
cagaccagcagttcaagcacca

SEQ ID NO: 125923 - RNA, 22 nt, synthetic construct
  source 1..22: mol_type = other RNA
cagacccgccgcagagccggac

SEQ ID NO: 125924 - RNA, 22 nt, synthetic construct
  source 1..22: mol_type = other RNA
cagaccctggcttgtgacatca

SEQ ID NO: 125925 - RNA, 22 nt, synthetic construct
  source 1..22: mol_type = other RNA
cagacccttatgtccagccccc

SEQ ID NO: 125926 - RNA, 22 nt, synthetic construct
  source 1..22: mol_type = other RNA
cagaccctttatcggataagga

SEQ ID NO: 125927 - RNA, 22 nt, synthetic construct
  source 1..22: mol_type = other RNA
cagacctctattaaatcatgat

SEQ ID NO: 125928 - RNA, 22 nt, synthetic construct
  source 1..22: mol_type = other RNA
cagacctctgaagagtctatct

SEQ ID NO: 125929 - RNA, 22 nt, synthetic construct
  source 1..22: mol_type = other RNA
cagacctgcacaaaggattggg

SEQ ID NO: 125930 - RNA, 22 nt, synthetic construct
  source 1..22: mol_type = other RNA
cagaccttattcaaataattgc

SEQ ID NO: 125931 - RNA, 22 nt, synthetic construct
  source 1..22: mol_type = other RNA
cagacgcaaaggatgtcaacaa

SEQ ID NO: 125932 - RNA, 22 nt, synthetic construct
  source 1..22: mol_type = other RNA
cagactaagacactagctattg

SEQ ID NO: 125933 - RNA, 22 nt, synthetic construct
  source 1..22: mol_type = other RNA
cagactaatatgagttcctgct

SEQ ID NO: 125934 - RNA, 22 nt, synthetic construct
  source 1..22: mol_type = other RNA
cagactcaagcctgataagctc

SEQ ID NO: 125935 - RNA, 22 nt, synthetic construct
  source 1..22: mol_type = other RNA
cagactcaataaccacatgtgg

SEQ ID NO: 125936 - RNA, 22 nt, synthetic construct
  source 1..22: mol_type = other RNA
cagactcattgcctatagacag

SEQ ID NO: 125937 - RNA, 22 nt, synthetic construct
  source 1..22: mol_type = other RNA
cagactccttcccctggtcgag

SEQ ID NO: 125938 - RNA, 22 nt, synthetic construct
  source 1..22: mol_type = other RNA
cagactcttgtcccggcatgcc

SEQ ID NO: 125939 - RNA, 22 nt, synthetic construct
  source 1..22: mol_type = other RNA
cagactgaccaacatggacaaa

SEQ ID NO: 125940 - RNA, 22 nt, synthetic construct
  source 1..22: mol_type = other RNA
cagactgagccagcaaatcaga

SEQ ID NO: 125941 - RNA, 22 nt, synthetic construct
  source 1..22: mol_type = other RNA
cagactgattaatttgaggtct

SEQ ID NO: 125942 - RNA, 22 nt, synthetic construct
  source 1..22: mol_type = other RNA
cagactgcaggtcttcaacctc

SEQ ID NO: 125943 - RNA, 22 nt, synthetic construct
  source 1..22: mol_type = other RNA
cagactgcagttggattatatg

SEQ ID NO: 125944 - RNA, 22 nt, synthetic construct
  source 1..22: mol_type = other RNA
cagactggagttcactggcaca

SEQ ID NO: 125945 - RNA, 22 nt, synthetic construct
  source 1..22: mol_type = other RNA
cagactgggcaacagagacaga

SEQ ID NO: 125946 - RNA, 22 nt, synthetic construct
  source 1..22: mol_type = other RNA
cagactgtattaccagcttaca

SEQ ID NO: 125947 - RNA, 22 nt, synthetic construct
  source 1..22: mol_type = other RNA
cagactgtgccttgatccatta

SEQ ID NO: 125948 - RNA, 22 nt, synthetic construct
  source 1..22: mol_type = other RNA
cagacttaactataggagttca

SEQ ID NO: 125949 - RNA, 22 nt, synthetic construct
  source 1..22: mol_type = other RNA
cagagaaactggaatcaatcca

SEQ ID NO: 125950 - RNA, 22 nt, synthetic construct
  source 1..22: mol_type = other RNA
cagagaacagcattatcttaat

SEQ ID NO: 125951 - RNA, 22 nt, synthetic construct
  source 1..22: mol_type = other RNA
cagagaactgactgaaggattc

SEQ ID NO: 125952 - RNA, 22 nt, synthetic construct
  source 1..22: mol_type = other RNA
cagagaagtgaagcttcaaacc

SEQ ID NO: 125953 - RNA, 22 nt, synthetic construct
  source 1..22: mol_type = other RNA
cagagaagttttccaggaaaag

SEQ ID NO: 125954 - RNA, 22 nt, synthetic construct
  source 1..22: mol_type = other RNA
cagagaattcagagtggctaat

SEQ ID NO: 125955 - RNA, 22 nt, synthetic construct
  source 1..22: mol_type = other RNA
cagagacaaagcataaaatatg

SEQ ID NO: 125956 - RNA, 22 nt, synthetic construct
  source 1..22: mol_type = other RNA
cagagacacacatcagacacct

SEQ ID NO: 125957 - RNA, 22 nt, synthetic construct
  source 1..22: mol_type = other RNA
cagagacacatactgaaagaca

SEQ ID NO: 125958 - RNA, 22 nt, synthetic construct
  source 1..22: mol_type = other RNA
cagagacagagaatctgtctca

SEQ ID NO: 125959 - RNA, 22 nt, synthetic construct
  source 1..22: mol_type = other RNA
cagagacggggtcccactatat

SEQ ID NO: 125960 - RNA, 22 nt, synthetic construct
  source 1..22: mol_type = other RNA
cagagactggatagcaacttgc

SEQ ID NO: 125961 - RNA, 22 nt, synthetic construct
  source 1..22: mol_type = other RNA
cagagactgtgcttccacagct

SEQ ID NO: 125962 - RNA, 22 nt, synthetic construct
  source 1..22: mol_type = other RNA
cagagagacctgaagactggat

SEQ ID NO: 125963 - RNA, 22 nt, synthetic construct
  source 1..22: mol_type = other RNA
cagagagagaagatgacatttg

SEQ ID NO: 125964 - RNA, 22 nt, synthetic construct
  source 1..22: mol_type = other RNA
cagagagagacctttctttaaa

SEQ ID NO: 125965 - RNA, 22 nt, synthetic construct
  source 1..22: mol_type = other RNA
cagagagagtaactggtccaga

SEQ ID NO: 125966 - RNA, 22 nt, synthetic construct
  source 1..22: mol_type = other RNA
cagagagatggtgggagaggca

SEQ ID NO: 125967 - RNA, 22 nt, synthetic construct
  source 1..22: mol_type = other RNA
cagagaggctaggtgacctgcc

SEQ ID NO: 125968 - RNA, 22 nt, synthetic construct
  source 1..22: mol_type = other RNA
cagagaggctttttattagatt

SEQ ID NO: 125969 - RNA, 22 nt, synthetic construct
  source 1..22: mol_type = other RNA
cagagagtggaaagagccagcc

SEQ ID NO: 125970 - RNA, 22 nt, synthetic construct
  source 1..22: mol_type = other RNA
cagagataactgggtgtgcacg

SEQ ID NO: 125971 - RNA, 22 nt, synthetic construct
  source 1..22: mol_type = other RNA
cagagatctgaaattgacttca

SEQ ID NO: 125972 - RNA, 22 nt, synthetic construct
  source 1..22: mol_type = other RNA
cagagatgaggtctcgctatat

SEQ ID NO: 125973 - RNA, 22 nt, synthetic construct
  source 1..22: mol_type = other RNA
cagagattgggaaaatcttgga

SEQ ID NO: 125974 - RNA, 22 nt, synthetic construct
  source 1..22: mol_type = other RNA
cagagattgtcgttgagtacct

SEQ ID NO: 125975 - RNA, 22 nt, synthetic construct
  source 1..22: mol_type = other RNA
cagagattttcccaaagataga

SEQ ID NO: 125976 - RNA, 22 nt, synthetic construct
  source 1..22: mol_type = other RNA
cagagcaaactcagatctgaga

SEQ ID NO: 125977 - RNA, 22 nt, synthetic construct
  source 1..22: mol_type = other RNA
cagagcaacaacctgtctcaaa

SEQ ID NO: 125978 - RNA, 22 nt, synthetic construct
  source 1..22: mol_type = other RNA
cagagcaagcacgttagcatca

SEQ ID NO: 125979 - RNA, 22 nt, synthetic construct
  source 1..22: mol_type = other RNA
cagagcacagactcaagcctga

SEQ ID NO: 125980 - RNA, 22 nt, synthetic construct
  source 1..22: mol_type = other RNA
cagagcagcactgatgtgtagt

SEQ ID NO: 125981 - RNA, 22 nt, synthetic construct
  source 1..22: mol_type = other RNA
cagagcaggctccacttgggtg

SEQ ID NO: 125982 - RNA, 22 nt, synthetic construct
  source 1..22: mol_type = other RNA
cagagcaggggtggggggatgt

SEQ ID NO: 125983 - RNA, 22 nt, synthetic construct
  source 1..22: mol_type = other RNA
cagagcagtaggcttagatagg

SEQ ID NO: 125984 - RNA, 22 nt, synthetic construct
  source 1..22: mol_type = other RNA
cagagcatgtcccctggagtta

SEQ ID NO: 125985 - RNA, 22 nt, synthetic construct
  source 1..22: mol_type = other RNA
cagagccgaaatgcacttagcg

SEQ ID NO: 125986 - RNA, 22 nt, synthetic construct
  source 1..22: mol_type = other RNA
cagagccgagcagaagggaaag

SEQ ID NO: 125987 - RNA, 22 nt, synthetic construct
  source 1..22: mol_type = other RNA
cagagcctaaaataggcctagg

SEQ ID NO: 125988 - RNA, 22 nt, synthetic construct
  source 1..22: mol_type = other RNA
cagagcctaatgtgtaagaaat

SEQ ID NO: 125989 - RNA, 22 nt, synthetic construct
  source 1..22: mol_type = other RNA
cagagcggaatttttatattaa

SEQ ID NO: 125990 - RNA, 22 nt, synthetic construct
  source 1..22: mol_type = other RNA
cagagcgggtttcctcggtcta

SEQ ID NO: 125991 - RNA, 22 nt, synthetic construct
  source 1..22: mol_type = other RNA
cagagctagaactagaatactc

SEQ ID NO: 125992 - RNA, 22 nt, synthetic construct
  source 1..22: mol_type = other RNA
cagagctccctctccctccccc

SEQ ID NO: 125993 - RNA, 22 nt, synthetic construct
  source 1..22: mol_type = other RNA
cagagctttgttatgaaaatag

SEQ ID NO: 125994 - RNA, 22 nt, synthetic construct
  source 1..22: mol_type = other RNA
cagaggaagcttataatttctg

SEQ ID NO: 125995 - RNA, 22 nt, synthetic construct
  source 1..22: mol_type = other RNA
cagaggagcagttactcctgag

SEQ ID NO: 125996 - RNA, 22 nt, synthetic construct
  source 1..22: mol_type = other RNA
cagaggaggaagagatagtctc

SEQ ID NO: 125997 - RNA, 22 nt, synthetic construct
  source 1..22: mol_type = other RNA
cagaggagggatgcattctaga

SEQ ID NO: 125998 - RNA, 22 nt, synthetic construct
  source 1..22: mol_type = other RNA
cagaggattttggattgcgatt

SEQ ID NO: 125999 - RNA, 22 nt, synthetic construct
  source 1..22: mol_type = other RNA
cagaggcaacagtcattcaggt

SEQ ID NO: 126000 - RNA, 22 nt, synthetic construct
  source 1..22: mol_type = other RNA
cagaggcatgcacggacttggc

SEQ ID NO: 126001 - RNA, 22 nt, synthetic construct
  source 1..22: mol_type = other RNA
cagaggccaaatgaaaggcgtc

SEQ ID NO: 126002 - RNA, 22 nt, synthetic construct
  source 1..22: mol_type = other RNA
cagaggccctggtgctttctat

SEQ ID NO: 126003 - RNA, 22 nt, synthetic construct
  source 1..22: mol_type = other RNA
cagaggctttttatatttccga

SEQ ID NO: 126004 - RNA, 22 nt, synthetic construct
  source 1..22: mol_type = other RNA
cagagggaaactgtttttgcaa

SEQ ID NO: 126005 - RNA, 22 nt, synthetic construct
  source 1..22: mol_type = other RNA
cagagggaatctaggaaacact

SEQ ID NO: 126006 - RNA, 22 nt, synthetic construct
  source 1..22: mol_type = other RNA
cagagggagcagcgggcggcct

SEQ ID NO: 126007 - RNA, 22 nt, synthetic construct
  source 1..22: mol_type = other RNA
cagagggagcgccacgtgaaga

SEQ ID NO: 126008 - RNA, 22 nt, synthetic construct
  source 1..22: mol_type = other RNA
cagagggtaacgtgagctggaa

SEQ ID NO: 126009 - RNA, 22 nt, synthetic construct
  source 1..22: mol_type = other RNA
cagaggtactcaacgacaatct

SEQ ID NO: 126010 - RNA, 22 nt, synthetic construct
  source 1..22: mol_type = other RNA
cagaggtatttggggctaggat

SEQ ID NO: 126011 - RNA, 22 nt, synthetic construct
  source 1..22: mol_type = other RNA
cagaggtcaggaaggcaggagg

SEQ ID NO: 126012 - RNA, 22 nt, synthetic construct
  source 1..22: mol_type = other RNA
cagaggtctgttactcccgatt

SEQ ID NO: 126013 - RNA, 22 nt, synthetic construct
  source 1..22: mol_type = other RNA
cagaggtgagctttttcttttt

SEQ ID NO: 126014 - RNA, 22 nt, synthetic construct
  source 1..22: mol_type = other RNA
cagaggttaaagcaacaggaag

SEQ ID NO: 126015 - RNA, 22 nt, synthetic construct
  source 1..22: mol_type = other RNA
cagaggttcttttaaatgccaa

SEQ ID NO: 126016 - RNA, 22 nt, synthetic construct
  source 1..22: mol_type = other RNA
cagaggttgcagtgaagccgag

SEQ ID NO: 126017 - RNA, 22 nt, synthetic construct
  source 1..22: mol_type = other RNA
cagagtagagaaggctttgtgt

SEQ ID NO: 126018 - RNA, 22 nt, synthetic construct
  source 1..22: mol_type = other RNA
cagagtatatatgctccctaaa

SEQ ID NO: 126019 - RNA, 22 nt, synthetic construct
  source 1..22: mol_type = other RNA
cagagtcctgagggtgagacca

SEQ ID NO: 126020 - RNA, 22 nt, synthetic construct
  source 1..22: mol_type = other RNA
cagagtgaaactctggctcaga

SEQ ID NO: 126021 - RNA, 22 nt, synthetic construct
  source 1..22: mol_type = other RNA
cagagtgaacaggcaaccttgg

SEQ ID NO: 126022 - RNA, 22 nt, synthetic construct
  source 1..22: mol_type = other RNA
cagagtgctgggtagagactgg

SEQ ID NO: 126023 - RNA, 22 nt, synthetic construct
  source 1..22: mol_type = other RNA
cagagtggctaatgtggcttgc

SEQ ID NO: 126024 - RNA, 22 nt, synthetic construct
  source 1..22: mol_type = other RNA
cagagtgttcaaaagccccaaa

SEQ ID NO: 126025 - RNA, 22 nt, synthetic construct
  source 1..22: mol_type = other RNA
cagagttcagcttacagtcatc

SEQ ID NO: 126026 - RNA, 22 nt, synthetic construct
  source 1..22: mol_type = other RNA
cagagttccacctccatcactg

SEQ ID NO: 126027 - RNA, 22 nt, synthetic construct
  source 1..22: mol_type = other RNA
cagagttggcacagccagtcag

SEQ ID NO: 126028 - RNA, 22 nt, synthetic construct
  source 1..22: mol_type = other RNA
cagagttgtatctgtgatccct

SEQ ID NO: 126029 - RNA, 22 nt, synthetic construct
  source 1..22: mol_type = other RNA
cagagttttccaataagttaac

SEQ ID NO: 126030 - RNA, 22 nt, synthetic construct
  source 1..22: mol_type = other RNA
cagataaattatagctccaaaa

SEQ ID NO: 126031 - RNA, 22 nt, synthetic construct
  source 1..22: mol_type = other RNA
cagataacaaagggttcttgga

SEQ ID NO: 126032 - RNA, 22 nt, synthetic construct
  source 1..22: mol_type = other RNA
cagataacagtggttaggaaaa

SEQ ID NO: 126033 - RNA, 22 nt, synthetic construct
  source 1..22: mol_type = other RNA
cagataaccaataagaagtgaa

SEQ ID NO: 126034 - RNA, 22 nt, synthetic construct
  source 1..22: mol_type = other RNA
cagataagatccaagtattgta

SEQ ID NO: 126035 - RNA, 22 nt, synthetic construct
  source 1..22: mol_type = other RNA
cagataatttcttcagaagaaa

SEQ ID NO: 126036 - RNA, 22 nt, synthetic construct
  source 1..22: mol_type = other RNA
cagatacaactctgaccattgt

SEQ ID NO: 126037 - RNA, 22 nt, synthetic construct
  source 1..22: mol_type = other RNA
cagatacgttaaaggaaaagag

SEQ ID NO: 126038 - RNA, 22 nt, synthetic construct
  source 1..22: mol_type = other RNA
cagatactcaatcagtggccag

SEQ ID NO: 126039 - RNA, 22 nt, synthetic construct
  source 1..22: mol_type = other RNA
cagatactcatgcttgctccag

SEQ ID NO: 126040 - RNA, 22 nt, synthetic construct
  source 1..22: mol_type = other RNA
cagatagaaaagacaatagcta

SEQ ID NO: 126041 - RNA, 22 nt, synthetic construct
  source 1..22: mol_type = other RNA
cagatatatgcattcccatgtt

SEQ ID NO: 126042 - RNA, 22 nt, synthetic construct
  source 1..22: mol_type = other RNA
cagatatcaatctggatataac

SEQ ID NO: 126043 - RNA, 22 nt, synthetic construct
  source 1..22: mol_type = other RNA
cagatatcacccagaccaagtt

SEQ ID NO: 126044 - RNA, 22 nt, synthetic construct
  source 1..22: mol_type = other RNA
cagatatccacctgcctcagcc

SEQ ID NO: 126045 - RNA, 22 nt, synthetic construct
  source 1..22: mol_type = other RNA
cagatatgaaagaggagacatt

SEQ ID NO: 126046 - RNA, 22 nt, synthetic construct
  source 1..22: mol_type = other RNA
cagatattatcctccaatgttt

SEQ ID NO: 126047 - RNA, 22 nt, synthetic construct
  source 1..22: mol_type = other RNA
cagatcaaacgtgctttcctta

SEQ ID NO: 126048 - RNA, 22 nt, synthetic construct
  source 1..22: mol_type = other RNA
cagatcaattgaccaaacatgt

SEQ ID NO: 126049 - RNA, 22 nt, synthetic construct
  source 1..22: mol_type = other RNA
cagatcacaaggtcagaagttt

SEQ ID NO: 126050 - RNA, 22 nt, synthetic construct
  source 1..22: mol_type = other RNA
cagatcacgaggtcgagagttc

SEQ ID NO: 126051 - RNA, 22 nt, synthetic construct
  source 1..22: mol_type = other RNA
cagatcagtaacaaataagaag

SEQ ID NO: 126052 - RNA, 22 nt, synthetic construct
  source 1..22: mol_type = other RNA
cagatcccaaaaaggtttttat

SEQ ID NO: 126053 - RNA, 22 nt, synthetic construct
  source 1..22: mol_type = other RNA
cagatcccaattacttccagtg

SEQ ID NO: 126054 - RNA, 22 nt, synthetic construct
  source 1..22: mol_type = other RNA
cagatcctcacatcagttacca

SEQ ID NO: 126055 - RNA, 22 nt, synthetic construct
  source 1..22: mol_type = other RNA
cagatctaacaaacgcattgtg

SEQ ID NO: 126056 - RNA, 22 nt, synthetic construct
  source 1..22: mol_type = other RNA
cagatctctgacattggttatt

SEQ ID NO: 126057 - RNA, 22 nt, synthetic construct
  source 1..22: mol_type = other RNA
cagatctgagaagactaagcag

SEQ ID NO: 126058 - RNA, 22 nt, synthetic construct
  source 1..22: mol_type = other RNA
cagatctgagagatagaaagca

SEQ ID NO: 126059 - RNA, 22 nt, synthetic construct
  source 1..22: mol_type = other RNA
cagatctgagtttgctctgcaa

SEQ ID NO: 126060 - RNA, 22 nt, synthetic construct
  source 1..22: mol_type = other RNA
cagatctgctgtaagctggtaa

SEQ ID NO: 126061 - RNA, 22 nt, synthetic construct
  source 1..22: mol_type = other RNA
cagatctgcttgcagacaataa

SEQ ID NO: 126062 - RNA, 22 nt, synthetic construct
  source 1..22: mol_type = other RNA
cagatctgttgcagtccccggt

SEQ ID NO: 126063 - RNA, 22 nt, synthetic construct
  source 1..22: mol_type = other RNA
cagatcttatggaatagttgat

SEQ ID NO: 126064 - RNA, 22 nt, synthetic construct
  source 1..22: mol_type = other RNA
cagatcttggccgaatgtggtg

SEQ ID NO: 126065 - RNA, 22 nt, synthetic construct
  source 1..22: mol_type = other RNA
cagatctttttgtgtatatggt

SEQ ID NO: 126066 - RNA, 22 nt, synthetic construct
  source 1..22: mol_type = other RNA
cagatgaagcagggaaatggag

SEQ ID NO: 126067 - RNA, 22 nt, synthetic construct
  source 1..22: mol_type = other RNA
cagatgaatgaacaaaatgtgg

SEQ ID NO: 126068 - RNA, 22 nt, synthetic construct
  source 1..22: mol_type = other RNA
cagatgaatgagcaaggtcgtt

SEQ ID NO: 126069 - RNA, 22 nt, synthetic construct
  source 1..22: mol_type = other RNA
cagatgacagaaataatacaaa

SEQ ID NO: 126070 - RNA, 22 nt, synthetic construct
  source 1..22: mol_type = other RNA
cagatgacttcactggagaatt

SEQ ID NO: 126071 - RNA, 22 nt, synthetic construct
  source 1..22: mol_type = other RNA
cagatgagaaatacttggacag

SEQ ID NO: 126072 - RNA, 22 nt, synthetic construct
  source 1..22: mol_type = other RNA
cagatgagactcttaatattga

SEQ ID NO: 126073 - RNA, 22 nt, synthetic construct
  source 1..22: mol_type = other RNA
cagatgatcctcccgccttggc

SEQ ID NO: 126074 - RNA, 22 nt, synthetic construct
  source 1..22: mol_type = other RNA
cagatgcgtggttcacacctgt

SEQ ID NO: 126075 - RNA, 22 nt, synthetic construct
  source 1..22: mol_type = other RNA
cagatgcttctagccaaagcaa

SEQ ID NO: 126076 - RNA, 22 nt, synthetic construct
  source 1..22: mol_type = other RNA
cagatggaactctattttccta

SEQ ID NO: 126077 - RNA, 22 nt, synthetic construct
  source 1..22: mol_type = other RNA
cagatggacaaattaccatgtt

SEQ ID NO: 126078 - RNA, 22 nt, synthetic construct
  source 1..22: mol_type = other RNA
cagatggccccaaaattacccc

SEQ ID NO: 126079 - RNA, 22 nt, synthetic construct
  source 1..22: mol_type = other RNA
cagatggggattgagggttaga

SEQ ID NO: 126080 - RNA, 22 nt, synthetic construct
  source 1..22: mol_type = other RNA
cagatggtaaattggtcctgga

SEQ ID NO: 126081 - RNA, 22 nt, synthetic construct
  source 1..22: mol_type = other RNA
cagatggtccttttttactgac

SEQ ID NO: 126082 - RNA, 22 nt, synthetic construct
  source 1..22: mol_type = other RNA
cagatggtgatacctcttacta

SEQ ID NO: 126083 - RNA, 22 nt, synthetic construct
  source 1..22: mol_type = other RNA
cagatgtagagaaacaggatta

SEQ ID NO: 126084 - RNA, 22 nt, synthetic construct
  source 1..22: mol_type = other RNA
cagatgtctccattttgccagc

SEQ ID NO: 126085 - RNA, 22 nt, synthetic construct
  source 1..22: mol_type = other RNA
cagatgtgagcccccacgcccg

SEQ ID NO: 126086 - RNA, 22 nt, synthetic construct
  source 1..22: mol_type = other RNA
cagatgtgcttaatcttcacac

SEQ ID NO: 126087 - RNA, 22 nt, synthetic construct
  source 1..22: mol_type = other RNA
cagatgttgcggtgagcagaga

SEQ ID NO: 126088 - RNA, 22 nt, synthetic construct
  source 1..22: mol_type = other RNA
cagatgttttacacatgtcagc

SEQ ID NO: 126089 - RNA, 22 nt, synthetic construct
  source 1..22: mol_type = other RNA
cagattaaataccacctgaaat

SEQ ID NO: 126090 - RNA, 22 nt, synthetic construct
  source 1..22: mol_type = other RNA
cagattaagcatagtttgagta

SEQ ID NO: 126091 - RNA, 22 nt, synthetic construct
  source 1..22: mol_type = other RNA
cagattcaatgcaatacttaat

SEQ ID NO: 126092 - RNA, 22 nt, synthetic construct
  source 1..22: mol_type = other RNA
cagattcaccaattgttaacat

SEQ ID NO: 126093 - RNA, 22 nt, synthetic construct
  source 1..22: mol_type = other RNA
cagattcacgcacagggagata

SEQ ID NO: 126094 - RNA, 22 nt, synthetic construct
  source 1..22: mol_type = other RNA
cagattcatcttgacttcactt

SEQ ID NO: 126095 - RNA, 22 nt, synthetic construct
  source 1..22: mol_type = other RNA
cagattccttttttatgtgctt

SEQ ID NO: 126096 - RNA, 22 nt, synthetic construct
  source 1..22: mol_type = other RNA
cagattctctgtctctgttgcc

SEQ ID NO: 126097 - RNA, 22 nt, synthetic construct
  source 1..22: mol_type = other RNA
cagattgaaatctaggcatata

SEQ ID NO: 126098 - RNA, 22 nt, synthetic construct
  source 1..22: mol_type = other RNA
cagattgaccttgtatccagta

SEQ ID NO: 126099 - RNA, 22 nt, synthetic construct
  source 1..22: mol_type = other RNA
cagattgatatctgagtgttgt

SEQ ID NO: 126100 - RNA, 22 nt, synthetic construct
  source 1..22: mol_type = other RNA
cagattgatttatatgttgatg

SEQ ID NO: 126101 - RNA, 22 nt, synthetic construct
  source 1..22: mol_type = other RNA
cagattgcttgagagagataaa

SEQ ID NO: 126102 - RNA, 22 nt, synthetic construct
  source 1..22: mol_type = other RNA
cagatttcaggtggtatttaat

SEQ ID NO: 126103 - RNA, 22 nt, synthetic construct
  source 1..22: mol_type = other RNA
cagatttctttttactcatgtc

SEQ ID NO: 126104 - RNA, 22 nt, synthetic construct
  source 1..22: mol_type = other RNA
cagatttgatcctggaatagta

SEQ ID NO: 126105 - RNA, 22 nt, synthetic construct
  source 1..22: mol_type = other RNA
cagattttcttgttataagcaa

SEQ ID NO: 126106 - RNA, 22 nt, synthetic construct
  source 1..22: mol_type = other RNA
cagcaaaagaattaaactcatt

SEQ ID NO: 126107 - RNA, 22 nt, synthetic construct
  source 1..22: mol_type = other RNA
cagcaaaagcaattattagttg

SEQ ID NO: 126108 - RNA, 22 nt, synthetic construct
  source 1..22: mol_type = other RNA
cagcaaaagcaccactgagagg

SEQ ID NO: 126109 - RNA, 22 nt, synthetic construct
  source 1..22: mol_type = other RNA
cagcaaagcaagaaaaagaaat

SEQ ID NO: 126110 - RNA, 22 nt, synthetic construct
  source 1..22: mol_type = other RNA
cagcaaatcagaaaaggctgag

SEQ ID NO: 126111 - RNA, 22 nt, synthetic construct
  source 1..22: mol_type = other RNA
cagcaaatctctagaacttatg

SEQ ID NO: 126112 - RNA, 22 nt, synthetic construct
  source 1..22: mol_type = other RNA
cagcaacggaaatgagtgagcc

SEQ ID NO: 126113 - RNA, 22 nt, synthetic construct
  source 1..22: mol_type = other RNA
cagcaactcttggccattttct

SEQ ID NO: 126114 - RNA, 22 nt, synthetic construct
  source 1..22: mol_type = other RNA
cagcaagactttatgtggaaaa

SEQ ID NO: 126115 - RNA, 22 nt, synthetic construct
  source 1..22: mol_type = other RNA
cagcaagcagtaaatatactga

SEQ ID NO: 126116 - RNA, 22 nt, synthetic construct
  source 1..22: mol_type = other RNA
cagcaaggaccattagcagttc

SEQ ID NO: 126117 - RNA, 22 nt, synthetic construct
  source 1..22: mol_type = other RNA
cagcaaggctcctgcagacatg

SEQ ID NO: 126118 - RNA, 22 nt, synthetic construct
  source 1..22: mol_type = other RNA
cagcaagggtggctggcacttt

SEQ ID NO: 126119 - RNA, 22 nt, synthetic construct
  source 1..22: mol_type = other RNA
cagcaattatttgaataaggtc

SEQ ID NO: 126120 - RNA, 22 nt, synthetic construct
  source 1..22: mol_type = other RNA
cagcacaatactgtctcagtcc

SEQ ID NO: 126121 - RNA, 22 nt, synthetic construct
  source 1..22: mol_type = other RNA
cagcacaccaacatggcacatg

SEQ ID NO: 126122 - RNA, 22 nt, synthetic construct
  source 1..22: mol_type = other RNA
cagcacactcttaataactgcc

SEQ ID NO: 126123 - RNA, 22 nt, synthetic construct
  source 1..22: mol_type = other RNA
cagcacagagccgaaatgcact

SEQ ID NO: 126124 - RNA, 22 nt, synthetic construct
  source 1..22: mol_type = other RNA
cagcacattaaataagggcatt

SEQ ID NO: 126125 - RNA, 22 nt, synthetic construct
  source 1..22: mol_type = other RNA
cagcaccaaagattatgttcca

SEQ ID NO: 126126 - RNA, 22 nt, synthetic construct
  source 1..22: mol_type = other RNA
cagcaccacccttgatgtcaca

SEQ ID NO: 126127 - RNA, 22 nt, synthetic construct
  source 1..22: mol_type = other RNA
cagcaccagatactcaatcagt

SEQ ID NO: 126128 - RNA, 22 nt, synthetic construct
  source 1..22: mol_type = other RNA
cagcaccatctaacagaaatac

SEQ ID NO: 126129 - RNA, 22 nt, synthetic construct
  source 1..22: mol_type = other RNA
cagcaccctcaaatgtctcatt

SEQ ID NO: 126130 - RNA, 22 nt, synthetic construct
  source 1..22: mol_type = other RNA
cagcacctaacaatgattattt

SEQ ID NO: 126131 - RNA, 22 nt, synthetic construct
  source 1..22: mol_type = other RNA
cagcaccttttttggtattttt

SEQ ID NO: 126132 - RNA, 22 nt, synthetic construct
  source 1..22: mol_type = other RNA
cagcactctgaatcacctcaag

SEQ ID NO: 126133 - RNA, 22 nt, synthetic construct
  source 1..22: mol_type = other RNA
cagcactgatgtgtagttatta

SEQ ID NO: 126134 - RNA, 22 nt, synthetic construct
  source 1..22: mol_type = other RNA
cagcactgctattgataaatct

SEQ ID NO: 126135 - RNA, 22 nt, synthetic construct
  source 1..22: mol_type = other RNA
cagcactgttaactgacttaca

SEQ ID NO: 126136 - RNA, 22 nt, synthetic construct
  source 1..22: mol_type = other RNA
cagcacttccattttgcttaat

SEQ ID NO: 126137 - RNA, 22 nt, synthetic construct
  source 1..22: mol_type = other RNA
cagcacttctgatatcctgtaa

SEQ ID NO: 126138 - RNA, 22 nt, synthetic construct
  source 1..22: mol_type = other RNA
cagcacttggggaggccaaggc

SEQ ID NO: 126139 - RNA, 22 nt, synthetic construct
  source 1..22: mol_type = other RNA
cagcacttttaaggcttggaaa

SEQ ID NO: 126140 - RNA, 22 nt, synthetic construct
  source 1..22: mol_type = other RNA
cagcacttttgtactacttgtc

SEQ ID NO: 126141 - RNA, 22 nt, synthetic construct
  source 1..22: mol_type = other RNA
cagcagaacaaactgcgtggtt

SEQ ID NO: 126142 - RNA, 22 nt, synthetic construct
  source 1..22: mol_type = other RNA
cagcagaaggtgagggactgag

SEQ ID NO: 126143 - RNA, 22 nt, synthetic construct
  source 1..22: mol_type = other RNA
cagcagagaagtgaagcttcaa

SEQ ID NO: 126144 - RNA, 22 nt, synthetic construct
  source 1..22: mol_type = other RNA
cagcagataagatccaagtatt

SEQ ID NO: 126145 - RNA, 22 nt, synthetic construct
  source 1..22: mol_type = other RNA
cagcagatctgcttgcagacaa

SEQ ID NO: 126146 - RNA, 22 nt, synthetic construct
  source 1..22: mol_type = other RNA
cagcagcagagaagtgaagctt

SEQ ID NO: 126147 - RNA, 22 nt, synthetic construct
  source 1..22: mol_type = other RNA
cagcagccccgacgcctttcat

SEQ ID NO: 126148 - RNA, 22 nt, synthetic construct
  source 1..22: mol_type = other RNA
cagcagctctagcaaacaaaca

SEQ ID NO: 126149 - RNA, 22 nt, synthetic construct
  source 1..22: mol_type = other RNA
cagcaggaaaagctaccctcga

SEQ ID NO: 126150 - RNA, 22 nt, synthetic construct
  source 1..22: mol_type = other RNA
cagcagggctcctccaaggctg

SEQ ID NO: 126151 - RNA, 22 nt, synthetic construct
  source 1..22: mol_type = other RNA
cagcaggggaaggcttcgagtt

SEQ ID NO: 126152 - RNA, 22 nt, synthetic construct
  source 1..22: mol_type = other RNA
cagcaggggctaagtagtggca

SEQ ID NO: 126153 - RNA, 22 nt, synthetic construct
  source 1..22: mol_type = other RNA
cagcagggtaaagtcaattcta

SEQ ID NO: 126154 - RNA, 22 nt, synthetic construct
  source 1..22: mol_type = other RNA
cagcagtcttaaccattgagcc

SEQ ID NO: 126155 - RNA, 22 nt, synthetic construct
  source 1..22: mol_type = other RNA
cagcagtgaccatatttccaaa

SEQ ID NO: 126156 - RNA, 22 nt, synthetic construct
  source 1..22: mol_type = other RNA
cagcagttcaagcaccacttcg

SEQ ID NO: 126157 - RNA, 22 nt, synthetic construct
  source 1..22: mol_type = other RNA
cagcagttcagcctgcagaagg

SEQ ID NO: 126158 - RNA, 22 nt, synthetic construct
  source 1..22: mol_type = other RNA
cagcagtttcacttcttagtaa

SEQ ID NO: 126159 - RNA, 22 nt, synthetic construct
  source 1..22: mol_type = other RNA
cagcagttttaaagaattcgtt

SEQ ID NO: 126160 - RNA, 22 nt, synthetic construct
  source 1..22: mol_type = other RNA
cagcataagacccctcaggtgt

SEQ ID NO: 126161 - RNA, 22 nt, synthetic construct
  source 1..22: mol_type = other RNA
cagcataattggttaaacttgg

SEQ ID NO: 126162 - RNA, 22 nt, synthetic construct
  source 1..22: mol_type = other RNA
cagcatactgtggatatctttt

SEQ ID NO: 126163 - RNA, 22 nt, synthetic construct
  source 1..22: mol_type = other RNA
cagcatagcagaaccttagaaa

SEQ ID NO: 126164 - RNA, 22 nt, synthetic construct
  source 1..22: mol_type = other RNA
cagcatatacatgacatggttt

SEQ ID NO: 126165 - RNA, 22 nt, synthetic construct
  source 1..22: mol_type = other RNA
cagcatattagctgtctggatt

SEQ ID NO: 126166 - RNA, 22 nt, synthetic construct
  source 1..22: mol_type = other RNA
cagcatccactaggggactaac

SEQ ID NO: 126167 - RNA, 22 nt, synthetic construct
  source 1..22: mol_type = other RNA
cagcatccccagaaagagagag

SEQ ID NO: 126168 - RNA, 22 nt, synthetic construct
  source 1..22: mol_type = other RNA
cagcatccctccagtccagcac

SEQ ID NO: 126169 - RNA, 22 nt, synthetic construct
  source 1..22: mol_type = other RNA
cagcatccctgccgcgcgcgaa

SEQ ID NO: 126170 - RNA, 22 nt, synthetic construct
  source 1..22: mol_type = other RNA
cagcatcttcactgactacaca

SEQ ID NO: 126171 - RNA, 22 nt, synthetic construct
  source 1..22: mol_type = other RNA
cagcatcttttgacgcgcaaca

SEQ ID NO: 126172 - RNA, 22 nt, synthetic construct
  source 1..22: mol_type = other RNA
cagcatgaagccctctaagtca

SEQ ID NO: 126173 - RNA, 22 nt, synthetic construct
  source 1..22: mol_type = other RNA
cagcatgaatacctatttagag

SEQ ID NO: 126174 - RNA, 22 nt, synthetic construct
  source 1..22: mol_type = other RNA
cagcatgatttataatccattg

SEQ ID NO: 126175 - RNA, 22 nt, synthetic construct
  source 1..22: mol_type = other RNA
cagcatgctcactgtctccatg

SEQ ID NO: 126176 - RNA, 22 nt, synthetic construct
  source 1..22: mol_type = other RNA
cagcatgtcttcagaggccctg

SEQ ID NO: 126177 - RNA, 22 nt, synthetic construct
  source 1..22: mol_type = other RNA
cagcattaccctaataacaaaa

SEQ ID NO: 126178 - RNA, 22 nt, synthetic construct
  source 1..22: mol_type = other RNA
cagcattacttaggcagttatt

SEQ ID NO: 126179 - RNA, 22 nt, synthetic construct
  source 1..22: mol_type = other RNA
cagcattatcttaataacctca

SEQ ID NO: 126180 - RNA, 22 nt, synthetic construct
  source 1..22: mol_type = other RNA
cagcattgtttacagtagccaa

SEQ ID NO: 126181 - RNA, 22 nt, synthetic construct
  source 1..22: mol_type = other RNA
cagcatttcagccaaagctggc

SEQ ID NO: 126182 - RNA, 22 nt, synthetic construct
  source 1..22: mol_type = other RNA
cagcattttataggcattcctt

SEQ ID NO: 126183 - RNA, 22 nt, synthetic construct
  source 1..22: mol_type = other RNA
cagccaaacagtttttacatgt

SEQ ID NO: 126184 - RNA, 22 nt, synthetic construct
  source 1..22: mol_type = other RNA
cagccaaagaaattggacgggt

SEQ ID NO: 126185 - RNA, 22 nt, synthetic construct
  source 1..22: mol_type = other RNA
cagccaaagctggcatgttgga

SEQ ID NO: 126186 - RNA, 22 nt, synthetic construct
  source 1..22: mol_type = other RNA
cagccaaataaaacacaaggac

SEQ ID NO: 126187 - RNA, 22 nt, synthetic construct
  source 1..22: mol_type = other RNA
cagccacaagacataagcattt

SEQ ID NO: 126188 - RNA, 22 nt, synthetic construct
  source 1..22: mol_type = other RNA
cagccacccttgctgcttctac

SEQ ID NO: 126189 - RNA, 22 nt, synthetic construct
  source 1..22: mol_type = other RNA
cagccacgtgtattgagtgtag

SEQ ID NO: 126190 - RNA, 22 nt, synthetic construct
  source 1..22: mol_type = other RNA
cagccactatagaaaatagtat

SEQ ID NO: 126191 - RNA, 22 nt, synthetic construct
  source 1..22: mol_type = other RNA
cagccagagagtggaaagagcc

SEQ ID NO: 126192 - RNA, 22 nt, synthetic construct
  source 1..22: mol_type = other RNA
cagccagaggaagcttataatt

SEQ ID NO: 126193 - RNA, 22 nt, synthetic construct
  source 1..22: mol_type = other RNA
cagccagatttgatcctggaat

SEQ ID NO: 126194 - RNA, 22 nt, synthetic construct
  source 1..22: mol_type = other RNA
cagccagtcagtgatggaggtg

SEQ ID NO: 126195 - RNA, 22 nt, synthetic construct
  source 1..22: mol_type = other RNA
cagccatcaacctaatgaaatt

SEQ ID NO: 126196 - RNA, 22 nt, synthetic construct
  source 1..22: mol_type = other RNA
cagccatcccagctacataact

SEQ ID NO: 126197 - RNA, 22 nt, synthetic construct
  source 1..22: mol_type = other RNA
cagccatggctcactgcggcct

SEQ ID NO: 126198 - RNA, 22 nt, synthetic construct
  source 1..22: mol_type = other RNA
cagccattctcttctggatagc

SEQ ID NO: 126199 - RNA, 22 nt, synthetic construct
  source 1..22: mol_type = other RNA
cagccccacaagtagcagggac

SEQ ID NO: 126200 - RNA, 22 nt, synthetic construct
  source 1..22: mol_type = other RNA
cagcccccagttttgttgaatc

SEQ ID NO: 126201 - RNA, 22 nt, synthetic construct
  source 1..22: mol_type = other RNA
cagccccctccctaccacccgt

SEQ ID NO: 126202 - RNA, 22 nt, synthetic construct
  source 1..22: mol_type = other RNA
cagccccctcgaagagaccaca

SEQ ID NO: 126203 - RNA, 22 nt, synthetic construct
  source 1..22: mol_type = other RNA
cagccccctgagtagctgtgat

SEQ ID NO: 126204 - RNA, 22 nt, synthetic construct
  source 1..22: mol_type = other RNA
cagccccgacgcctttcatttg

SEQ ID NO: 126205 - RNA, 22 nt, synthetic construct
  source 1..22: mol_type = other RNA
cagccccgcttcagttggtgaa

SEQ ID NO: 126206 - RNA, 22 nt, synthetic construct
  source 1..22: mol_type = other RNA
cagcccctagcatgcagtagct

SEQ ID NO: 126207 - RNA, 22 nt, synthetic construct
  source 1..22: mol_type = other RNA
cagcccctcatcctccgtagct

SEQ ID NO: 126208 - RNA, 22 nt, synthetic construct
  source 1..22: mol_type = other RNA
cagcccctgccacactccagca

SEQ ID NO: 126209 - RNA, 22 nt, synthetic construct
  source 1..22: mol_type = other RNA
cagcccctggtgatctatgaat

SEQ ID NO: 126210 - RNA, 22 nt, synthetic construct
  source 1..22: mol_type = other RNA
cagcccgacctccagcgctaag

SEQ ID NO: 126211 - RNA, 22 nt, synthetic construct
  source 1..22: mol_type = other RNA
cagcccgtgtgtttagaataat

SEQ ID NO: 126212 - RNA, 22 nt, synthetic construct
  source 1..22: mol_type = other RNA
cagccctgatagatattggcaa

SEQ ID NO: 126213 - RNA, 22 nt, synthetic construct
  source 1..22: mol_type = other RNA
cagccgccgcagaggccaaatg

SEQ ID NO: 126214 - RNA, 22 nt, synthetic construct
  source 1..22: mol_type = other RNA
cagccggcatatgtcactgtaa

SEQ ID NO: 126215 - RNA, 22 nt, synthetic construct
  source 1..22: mol_type = other RNA
cagccgtgattgcaccactgaa

SEQ ID NO: 126216 - RNA, 22 nt, synthetic construct
  source 1..22: mol_type = other RNA
cagcctaaaccattttcaatct

SEQ ID NO: 126217 - RNA, 22 nt, synthetic construct
  source 1..22: mol_type = other RNA
cagcctaaagtccacagatctt

SEQ ID NO: 126218 - RNA, 22 nt, synthetic construct
  source 1..22: mol_type = other RNA
cagcctaagcaaatgtaatgaa

SEQ ID NO: 126219 - RNA, 22 nt, synthetic construct
  source 1..22: mol_type = other RNA
cagcctaagcaagttacatgct

SEQ ID NO: 126220 - RNA, 22 nt, synthetic construct
  source 1..22: mol_type = other RNA
cagcctaattgtacacctcaaa

SEQ ID NO: 126221 - RNA, 22 nt, synthetic construct
  source 1..22: mol_type = other RNA
cagcctaggcaagagagcaaga

SEQ ID NO: 126222 - RNA, 22 nt, synthetic construct
  source 1..22: mol_type = other RNA
cagcctcaaacaatcctccctc

SEQ ID NO: 126223 - RNA, 22 nt, synthetic construct
  source 1..22: mol_type = other RNA
cagcctcaacagcacttttgta

SEQ ID NO: 126224 - RNA, 22 nt, synthetic construct
  source 1..22: mol_type = other RNA
cagcctcccgagtagttgtaac

SEQ ID NO: 126225 - RNA, 22 nt, synthetic construct
  source 1..22: mol_type = other RNA
cagcctcccgagtatctaggag

SEQ ID NO: 126226 - RNA, 22 nt, synthetic construct
  source 1..22: mol_type = other RNA
cagcctctaatcaggttgggct

SEQ ID NO: 126227 - RNA, 22 nt, synthetic construct
  source 1..22: mol_type = other RNA
cagcctgatgatgatggtgatg

SEQ ID NO: 126228 - RNA, 22 nt, synthetic construct
  source 1..22: mol_type = other RNA
cagcctgcagaaggagaaacca

SEQ ID NO: 126229 - RNA, 22 nt, synthetic construct
  source 1..22: mol_type = other RNA
cagcctggccaacatcgtaaaa

SEQ ID NO: 126230 - RNA, 22 nt, synthetic construct
  source 1..22: mol_type = other RNA
cagcctgggacagagcgagact

SEQ ID NO: 126231 - RNA, 22 nt, synthetic construct
  source 1..22: mol_type = other RNA
cagcctgggcacacgccactgc

SEQ ID NO: 126232 - RNA, 22 nt, synthetic construct
  source 1..22: mol_type = other RNA
cagcctgggcgacagagtgaaa

SEQ ID NO: 126233 - RNA, 22 nt, synthetic construct
  source 1..22: mol_type = other RNA
cagcctggtaatgaatagaaaa

SEQ ID NO: 126234 - RNA, 22 nt, synthetic construct
  source 1..22: mol_type = other RNA
cagcctggtcaacagggtaaga

SEQ ID NO: 126235 - RNA, 22 nt, synthetic construct
  source 1..22: mol_type = other RNA
cagcctgtgtcagtgacagttc

SEQ ID NO: 126236 - RNA, 22 nt, synthetic construct
  source 1..22: mol_type = other RNA
cagccttaatctcctgagtagc

SEQ ID NO: 126237 - RNA, 22 nt, synthetic construct
  source 1..22: mol_type = other RNA
cagccttccctgaacaatgatt

SEQ ID NO: 126238 - RNA, 22 nt, synthetic construct
  source 1..22: mol_type = other RNA
cagccttctctcttccaaataa

SEQ ID NO: 126239 - RNA, 22 nt, synthetic construct
  source 1..22: mol_type = other RNA
cagccttggaggagccctgctg

SEQ ID NO: 126240 - RNA, 22 nt, synthetic construct
  source 1..22: mol_type = other RNA
cagccttggtaagagtgagacc

SEQ ID NO: 126241 - RNA, 22 nt, synthetic construct
  source 1..22: mol_type = other RNA
cagcctttaatttagcgttcat

SEQ ID NO: 126242 - RNA, 22 nt, synthetic construct
  source 1..22: mol_type = other RNA
cagccttttctgatttgctggc

SEQ ID NO: 126243 - RNA, 22 nt, synthetic construct
  source 1..22: mol_type = other RNA
cagcgccacttaaaaaatgcgc

SEQ ID NO: 126244 - RNA, 22 nt, synthetic construct
  source 1..22: mol_type = other RNA
cagcgcccggcccgttattttt

SEQ ID NO: 126245 - RNA, 22 nt, synthetic construct
  source 1..22: mol_type = other RNA
cagcgctaagcactgcgccaag

SEQ ID NO: 126246 - RNA, 22 nt, synthetic construct
  source 1..22: mol_type = other RNA
cagcgctaagtgcatttcggct

SEQ ID NO: 126247 - RNA, 22 nt, synthetic construct
  source 1..22: mol_type = other RNA
cagcgcttgaacaaatatgaat

SEQ ID NO: 126248 - RNA, 22 nt, synthetic construct
  source 1..22: mol_type = other RNA
cagcggcatacaggagttccga

SEQ ID NO: 126249 - RNA, 22 nt, synthetic construct
  source 1..22: mol_type = other RNA
cagcggggatgctcagggtgcg

SEQ ID NO: 126250 - RNA, 22 nt, synthetic construct
  source 1..22: mol_type = other RNA
cagcggggatggttgcacaatg

SEQ ID NO: 126251 - RNA, 22 nt, synthetic construct
  source 1..22: mol_type = other RNA
cagcgtaactccatcttcacgt

SEQ ID NO: 126252 - RNA, 22 nt, synthetic construct
  source 1..22: mol_type = other RNA
cagcgtcctcactgtgatacct

SEQ ID NO: 126253 - RNA, 22 nt, synthetic construct
  source 1..22: mol_type = other RNA
cagcgtgcaccttacattgtaa

SEQ ID NO: 126254 - RNA, 22 nt, synthetic construct
  source 1..22: mol_type = other RNA
cagcgtggaatggtcaatttca

SEQ ID NO: 126255 - RNA, 22 nt, synthetic construct
  source 1..22: mol_type = other RNA
cagcgtgggcaacacaatgaga

SEQ ID NO: 126256 - RNA, 22 nt, synthetic construct
  source 1..22: mol_type = other RNA
cagcgtgtgcatgaccctgcta

SEQ ID NO: 126257 - RNA, 22 nt, synthetic construct
  source 1..22: mol_type = other RNA
cagcgttgttcagttgaaaagt

SEQ ID NO: 126258 - RNA, 22 nt, synthetic construct
  source 1..22: mol_type = other RNA
cagctaaaatgttcagatagaa

SEQ ID NO: 126259 - RNA, 22 nt, synthetic construct
  source 1..22: mol_type = other RNA
cagctaacttttaacccacaga

SEQ ID NO: 126260 - RNA, 22 nt, synthetic construct
  source 1..22: mol_type = other RNA
cagctaagcaccaacagatcct

SEQ ID NO: 126261 - RNA, 22 nt, synthetic construct
  source 1..22: mol_type = other RNA
cagctaatatgctgtagtgatt

SEQ ID NO: 126262 - RNA, 22 nt, synthetic construct
  source 1..22: mol_type = other RNA
cagctaattttctaatcttcat

SEQ ID NO: 126263 - RNA, 22 nt, synthetic construct
  source 1..22: mol_type = other RNA
cagctacactcaatacacgtgg

SEQ ID NO: 126264 - RNA, 22 nt, synthetic construct
  source 1..22: mol_type = other RNA
cagctacataacttcccagaca

SEQ ID NO: 126265 - RNA, 22 nt, synthetic construct
  source 1..22: mol_type = other RNA
cagctacctgttgattgttgcc

SEQ ID NO: 126266 - RNA, 22 nt, synthetic construct
  source 1..22: mol_type = other RNA
cagctacggaggatgaggggct

SEQ ID NO: 126267 - RNA, 22 nt, synthetic construct
  source 1..22: mol_type = other RNA
cagctactaaacaaatcagatt

SEQ ID NO: 126268 - RNA, 22 nt, synthetic construct
  source 1..22: mol_type = other RNA
cagctactatgaatatactgga

SEQ ID NO: 126269 - RNA, 22 nt, synthetic construct
  source 1..22: mol_type = other RNA
cagctaggcgtagtatctcatg

SEQ ID NO: 126270 - RNA, 22 nt, synthetic construct
  source 1..22: mol_type = other RNA
cagctaggtgagtgagatggga

SEQ ID NO: 126271 - RNA, 22 nt, synthetic construct
  source 1..22: mol_type = other RNA
cagctagtgtgtctgactacac

SEQ ID NO: 126272 - RNA, 22 nt, synthetic construct
  source 1..22: mol_type = other RNA
cagctatagcttctgagctgtt

SEQ ID NO: 126273 - RNA, 22 nt, synthetic construct
  source 1..22: mol_type = other RNA
cagctatcaggccttccacctg

SEQ ID NO: 126274 - RNA, 22 nt, synthetic construct
  source 1..22: mol_type = other RNA
cagctatggtgttatttgttct

SEQ ID NO: 126275 - RNA, 22 nt, synthetic construct
  source 1..22: mol_type = other RNA
cagctcaaacagcttgacattc

SEQ ID NO: 126276 - RNA, 22 nt, synthetic construct
  source 1..22: mol_type = other RNA
cagctcaattaagcaacctttt

SEQ ID NO: 126277 - RNA, 22 nt, synthetic construct
  source 1..22: mol_type = other RNA
cagctcacgttaccctctggaa

SEQ ID NO: 126278 - RNA, 22 nt, synthetic construct
  source 1..22: mol_type = other RNA
cagctcagaagctatagctgag

SEQ ID NO: 126279 - RNA, 22 nt, synthetic construct
  source 1..22: mol_type = other RNA
cagctcattacagtctcgaccc

SEQ ID NO: 126280 - RNA, 22 nt, synthetic construct
  source 1..22: mol_type = other RNA
cagctccaaagaacaggagtta

SEQ ID NO: 126281 - RNA, 22 nt, synthetic construct
  source 1..22: mol_type = other RNA
cagctcctcagaaggccaaggc

SEQ ID NO: 126282 - RNA, 22 nt, synthetic construct
  source 1..22: mol_type = other RNA
cagctcgaccaggggaaggagt

SEQ ID NO: 126283 - RNA, 22 nt, synthetic construct
  source 1..22: mol_type = other RNA
cagctctagcaaacaaacacac

SEQ ID NO: 126284 - RNA, 22 nt, synthetic construct
  source 1..22: mol_type = other RNA
cagctctcatgagtcctgaaaa

SEQ ID NO: 126285 - RNA, 22 nt, synthetic construct
  source 1..22: mol_type = other RNA
cagctcttctcagttgcagcat

SEQ ID NO: 126286 - RNA, 22 nt, synthetic construct
  source 1..22: mol_type = other RNA
cagctcttttgtgtctttttat

SEQ ID NO: 126287 - RNA, 22 nt, synthetic construct
  source 1..22: mol_type = other RNA
cagctgagtagcgctttaagca

SEQ ID NO: 126288 - RNA, 22 nt, synthetic construct
  source 1..22: mol_type = other RNA
cagctgggagaaagctaatttg

SEQ ID NO: 126289 - RNA, 22 nt, synthetic construct
  source 1..22: mol_type = other RNA
cagctgggcgtgatggcgggca

SEQ ID NO: 126290 - RNA, 22 nt, synthetic construct
  source 1..22: mol_type = other RNA
cagctgtcactctctttaggaa

SEQ ID NO: 126291 - RNA, 22 nt, synthetic construct
  source 1..22: mol_type = other RNA
cagctgtccaacaagggttggt

SEQ ID NO: 126292 - RNA, 22 nt, synthetic construct
  source 1..22: mol_type = other RNA
cagcttacagcagatctgcttg

SEQ ID NO: 126293 - RNA, 22 nt, synthetic construct
  source 1..22: mol_type = other RNA
cagcttacagtcatcacagtcc

SEQ ID NO: 126294 - RNA, 22 nt, synthetic construct
  source 1..22: mol_type = other RNA
cagcttaccaagtgccgcgttt

SEQ ID NO: 126295 - RNA, 22 nt, synthetic construct
  source 1..22: mol_type = other RNA
cagcttcactcttctgcaagtt

SEQ ID NO: 126296 - RNA, 22 nt, synthetic construct
  source 1..22: mol_type = other RNA
cagcttccacccaagtggagcc

SEQ ID NO: 126297 - RNA, 22 nt, synthetic construct
  source 1..22: mol_type = other RNA
cagcttccgggacttggaagtg

SEQ ID NO: 126298 - RNA, 22 nt, synthetic construct
  source 1..22: mol_type = other RNA
cagcttcctacccaagcttagg

SEQ ID NO: 126299 - RNA, 22 nt, synthetic construct
  source 1..22: mol_type = other RNA
cagcttcttgttagaattttgc

SEQ ID NO: 126300 - RNA, 22 nt, synthetic construct
  source 1..22: mol_type = other RNA
cagcttgacattcttaccttct

SEQ ID NO: 126301 - RNA, 22 nt, synthetic construct
  source 1..22: mol_type = other RNA
cagcttggccaacatggcgaaa

SEQ ID NO: 126302 - RNA, 22 nt, synthetic construct
  source 1..22: mol_type = other RNA
cagcttgggcaagagagcaagt

SEQ ID NO: 126303 - RNA, 22 nt, synthetic construct
  source 1..22: mol_type = other RNA
cagctttaaagagaaatagtta

SEQ ID NO: 126304 - RNA, 22 nt, synthetic construct
  source 1..22: mol_type = other RNA
cagctttctaattctgacaact

SEQ ID NO: 126305 - RNA, 22 nt, synthetic construct
  source 1..22: mol_type = other RNA
cagctttcttttccaaccaagc

SEQ ID NO: 126306 - RNA, 22 nt, synthetic construct
  source 1..22: mol_type = other RNA
cagctttggctgaaatgctgta

SEQ ID NO: 126307 - RNA, 22 nt, synthetic construct
  source 1..22: mol_type = other RNA
cagcttttattagagctttaaa

SEQ ID NO: 126308 - RNA, 22 nt, synthetic construct
  source 1..22: mol_type = other RNA
caggaaaaccagtttagaaaaa

SEQ ID NO: 126309 - RNA, 22 nt, synthetic construct
  source 1..22: mol_type = other RNA
caggaaaagcaaatgtcatctt

SEQ ID NO: 126310 - RNA, 22 nt, synthetic construct
  source 1..22: mol_type = other RNA
caggaaaagctaccctcgagta

SEQ ID NO: 126311 - RNA, 22 nt, synthetic construct
  source 1..22: mol_type = other RNA
caggaaacttccagaaacttcc

SEQ ID NO: 126312 - RNA, 22 nt, synthetic construct
  source 1..22: mol_type = other RNA
caggaaagaccggggactgcaa

SEQ ID NO: 126313 - RNA, 22 nt, synthetic construct
  source 1..22: mol_type = other RNA
caggaaagatgaagtatagaaa

SEQ ID NO: 126314 - RNA, 22 nt, synthetic construct
  source 1..22: mol_type = other RNA
caggaaagatgtcttttaactt

SEQ ID NO: 126315 - RNA, 22 nt, synthetic construct
  source 1..22: mol_type = other RNA
caggaaaggtggggaagggatt

SEQ ID NO: 126316 - RNA, 22 nt, synthetic construct
  source 1..22: mol_type = other RNA
caggaaagtgccagccaccctt

SEQ ID NO: 126317 - RNA, 22 nt, synthetic construct
  source 1..22: mol_type = other RNA
caggaacaccttgaacatgaac

SEQ ID NO: 126318 - RNA, 22 nt, synthetic construct
  source 1..22: mol_type = other RNA
caggaacagattcacgcacagg

SEQ ID NO: 126319 - RNA, 22 nt, synthetic construct
  source 1..22: mol_type = other RNA
caggaactcatattagtctgta

SEQ ID NO: 126320 - RNA, 22 nt, synthetic construct
  source 1..22: mol_type = other RNA
caggaacttacagtaagatcct

SEQ ID NO: 126321 - RNA, 22 nt, synthetic construct
  source 1..22: mol_type = other RNA
caggaagaattattgtctgcaa

SEQ ID NO: 126322 - RNA, 22 nt, synthetic construct
  source 1..22: mol_type = other RNA
caggaagagactatctcttcct

SEQ ID NO: 126323 - RNA, 22 nt, synthetic construct
  source 1..22: mol_type = other RNA
caggaagaggcagctaagcacc

SEQ ID NO: 126324 - RNA, 22 nt, synthetic construct
  source 1..22: mol_type = other RNA
caggaaggcaggaggcctcaga

SEQ ID NO: 126325 - RNA, 22 nt, synthetic construct
  source 1..22: mol_type = other RNA
caggaagggagagatgcctatg

SEQ ID NO: 126326 - RNA, 22 nt, synthetic construct
  source 1..22: mol_type = other RNA
caggaagtatgagtcttccgtc

SEQ ID NO: 126327 - RNA, 22 nt, synthetic construct
  source 1..22: mol_type = other RNA
caggaagtcagcaactcttggc

SEQ ID NO: 126328 - RNA, 22 nt, synthetic construct
  source 1..22: mol_type = other RNA
caggaagttgagaaagagggaa

SEQ ID NO: 126329 - RNA, 22 nt, synthetic construct
  source 1..22: mol_type = other RNA
caggaatgcaaagtttcctaca

SEQ ID NO: 126330 - RNA, 22 nt, synthetic construct
  source 1..22: mol_type = other RNA
caggacaattgaatggggatgc

SEQ ID NO: 126331 - RNA, 22 nt, synthetic construct
  source 1..22: mol_type = other RNA
caggacactggaggtgcacatt

SEQ ID NO: 126332 - RNA, 22 nt, synthetic construct
  source 1..22: mol_type = other RNA
caggacagagcagtaggcttag

SEQ ID NO: 126333 - RNA, 22 nt, synthetic construct
  source 1..22: mol_type = other RNA
caggacagattaaaatcagatt

SEQ ID NO: 126334 - RNA, 22 nt, synthetic construct
  source 1..22: mol_type = other RNA
caggacagtcatcctcaacaag

SEQ ID NO: 126335 - RNA, 22 nt, synthetic construct
  source 1..22: mol_type = other RNA
caggacagttattcttcagcaa

SEQ ID NO: 126336 - RNA, 22 nt, synthetic construct
  source 1..22: mol_type = other RNA
caggaccaactttaagcaaaat

SEQ ID NO: 126337 - RNA, 22 nt, synthetic construct
  source 1..22: mol_type = other RNA
caggaccaatttaccatctgac

SEQ ID NO: 126338 - RNA, 22 nt, synthetic construct
  source 1..22: mol_type = other RNA
caggaccagcttgggcaagaga

SEQ ID NO: 126339 - RNA, 22 nt, synthetic construct
  source 1..22: mol_type = other RNA
caggaccaggcagtcctctcac

SEQ ID NO: 126340 - RNA, 22 nt, synthetic construct
  source 1..22: mol_type = other RNA
caggactcatgagagctgtgcc

SEQ ID NO: 126341 - RNA, 22 nt, synthetic construct
  source 1..22: mol_type = other RNA
caggactccacagagttcagct

SEQ ID NO: 126342 - RNA, 22 nt, synthetic construct
  source 1..22: mol_type = other RNA
caggactctgctcaaaggggca

SEQ ID NO: 126343 - RNA, 22 nt, synthetic construct
  source 1..22: mol_type = other RNA
caggactgcttgaggccacgag

SEQ ID NO: 126344 - RNA, 22 nt, synthetic construct
  source 1..22: mol_type = other RNA
caggactggactccttctgaag

SEQ ID NO: 126345 - RNA, 22 nt, synthetic construct
  source 1..22: mol_type = other RNA
caggactgtgtgtgtccaggcc

SEQ ID NO: 126346 - RNA, 22 nt, synthetic construct
  source 1..22: mol_type = other RNA
caggacttttggtacacatctt

SEQ ID NO: 126347 - RNA, 22 nt, synthetic construct
  source 1..22: mol_type = other RNA
caggagaaacatggcttagaaa

SEQ ID NO: 126348 - RNA, 22 nt, synthetic construct
  source 1..22: mol_type = other RNA
caggagaactgcctggacccgg

SEQ ID NO: 126349 - RNA, 22 nt, synthetic construct
  source 1..22: mol_type = other RNA
caggagaacttgtctcggattt

SEQ ID NO: 126350 - RNA, 22 nt, synthetic construct
  source 1..22: mol_type = other RNA
caggagaatctgggaggtggag

SEQ ID NO: 126351 - RNA, 22 nt, synthetic construct
  source 1..22: mol_type = other RNA
caggagaatggcatgaacccac

SEQ ID NO: 126352 - RNA, 22 nt, synthetic construct
  source 1..22: mol_type = other RNA
caggagagcgacagctacggag

SEQ ID NO: 126353 - RNA, 22 nt, synthetic construct
  source 1..22: mol_type = other RNA
caggagagtcgcttgaacctga

SEQ ID NO: 126354 - RNA, 22 nt, synthetic construct
  source 1..22: mol_type = other RNA
caggagattaaggctggaggat

SEQ ID NO: 126355 - RNA, 22 nt, synthetic construct
  source 1..22: mol_type = other RNA
caggagcagtgtgaataggaaa

SEQ ID NO: 126356 - RNA, 22 nt, synthetic construct
  source 1..22: mol_type = other RNA
caggagcatagcttgaaccagg

SEQ ID NO: 126357 - RNA, 22 nt, synthetic construct
  source 1..22: mol_type = other RNA
caggagcccaccaccatgcctg

SEQ ID NO: 126358 - RNA, 22 nt, synthetic construct
  source 1..22: mol_type = other RNA
caggagcctagtcatccactgc

SEQ ID NO: 126359 - RNA, 22 nt, synthetic construct
  source 1..22: mol_type = other RNA
caggagccttgctgttgtaatg

SEQ ID NO: 126360 - RNA, 22 nt, synthetic construct
  source 1..22: mol_type = other RNA
caggagctagaacagaataaaa

SEQ ID NO: 126361 - RNA, 22 nt, synthetic construct
  source 1..22: mol_type = other RNA
caggaggaggagggtgcagcct

SEQ ID NO: 126362 - RNA, 22 nt, synthetic construct
  source 1..22: mol_type = other RNA
caggaggcaaaggttgagacaa

SEQ ID NO: 126363 - RNA, 22 nt, synthetic construct
  source 1..22: mol_type = other RNA
caggaggcacctgaacccagga

SEQ ID NO: 126364 - RNA, 22 nt, synthetic construct
  source 1..22: mol_type = other RNA
caggaggcctcagaattaatat

SEQ ID NO: 126365 - RNA, 22 nt, synthetic construct
  source 1..22: mol_type = other RNA
caggaggctgaggcaggaggca

SEQ ID NO: 126366 - RNA, 22 nt, synthetic construct
  source 1..22: mol_type = other RNA
caggaggttgaagctctagtga

SEQ ID NO: 126367 - RNA, 22 nt, synthetic construct
  source 1..22: mol_type = other RNA
caggaggtttgcactggcacag

SEQ ID NO: 126368 - RNA, 22 nt, synthetic construct
  source 1..22: mol_type = other RNA
caggagtaactgctcctctgac

SEQ ID NO: 126369 - RNA, 22 nt, synthetic construct
  source 1..22: mol_type = other RNA
caggagttaccataaaaccatt

SEQ ID NO: 126370 - RNA, 22 nt, synthetic construct
  source 1..22: mol_type = other RNA
caggagttccgatttctcggcc

SEQ ID NO: 126371 - RNA, 22 nt, synthetic construct
  source 1..22: mol_type = other RNA
caggagttcttatgaggttatt

SEQ ID NO: 126372 - RNA, 22 nt, synthetic construct
  source 1..22: mol_type = other RNA
caggagttgcatcacttgaggt

SEQ ID NO: 126373 - RNA, 22 nt, synthetic construct
  source 1..22: mol_type = other RNA
caggagtttgagactgcagtga

SEQ ID NO: 126374 - RNA, 22 nt, synthetic construct
  source 1..22: mol_type = other RNA
caggagttttgcctctttgcta

SEQ ID NO: 126375 - RNA, 22 nt, synthetic construct
  source 1..22: mol_type = other RNA
caggatacaaaaagcacctacc

SEQ ID NO: 126376 - RNA, 22 nt, synthetic construct
  source 1..22: mol_type = other RNA
caggatatcagaagtgctgact

SEQ ID NO: 126377 - RNA, 22 nt, synthetic construct
  source 1..22: mol_type = other RNA
caggatcaaatctggctgcagg

SEQ ID NO: 126378 - RNA, 22 nt, synthetic construct
  source 1..22: mol_type = other RNA
caggatccagatgtagagaaac

SEQ ID NO: 126379 - RNA, 22 nt, synthetic construct
  source 1..22: mol_type = other RNA
caggatccagtctctacccagc

SEQ ID NO: 126380 - RNA, 22 nt, synthetic construct
  source 1..22: mol_type = other RNA
caggatcccggaacaggaaaag

SEQ ID NO: 126381 - RNA, 22 nt, synthetic construct
  source 1..22: mol_type = other RNA
caggatcttactgtaagttcct

SEQ ID NO: 126382 - RNA, 22 nt, synthetic construct
  source 1..22: mol_type = other RNA
caggatggcatgaaatgggttt

SEQ ID NO: 126383 - RNA, 22 nt, synthetic construct
  source 1..22: mol_type = other RNA
caggatgtctttgggaaggccc

SEQ ID NO: 126384 - RNA, 22 nt, synthetic construct
  source 1..22: mol_type = other RNA
caggattacaatgtaaggtgca

SEQ ID NO: 126385 - RNA, 22 nt, synthetic construct
  source 1..22: mol_type = other RNA
caggattcttgttaagcatttt

SEQ ID NO: 126386 - RNA, 22 nt, synthetic construct
  source 1..22: mol_type = other RNA
caggcaaaagatgatgaacaaa

SEQ ID NO: 126387 - RNA, 22 nt, synthetic construct
  source 1..22: mol_type = other RNA
caggcaaacagcgccacttaaa

SEQ ID NO: 126388 - RNA, 22 nt, synthetic construct
  source 1..22: mol_type = other RNA
caggcaaccttgggagaaaatt

SEQ ID NO: 126389 - RNA, 22 nt, synthetic construct
  source 1..22: mol_type = other RNA
caggcaagggactgtcgaagct

SEQ ID NO: 126390 - RNA, 22 nt, synthetic construct
  source 1..22: mol_type = other RNA
caggcaccttcagaagccctgc

SEQ ID NO: 126391 - RNA, 22 nt, synthetic construct
  source 1..22: mol_type = other RNA
caggcagaatgtgacctgtcct

SEQ ID NO: 126392 - RNA, 22 nt, synthetic construct
  source 1..22: mol_type = other RNA
caggcagatcacaaggtcagaa

SEQ ID NO: 126393 - RNA, 22 nt, synthetic construct
  source 1..22: mol_type = other RNA
caggcagatcacgaggtcgaga

SEQ ID NO: 126394 - RNA, 22 nt, synthetic construct
  source 1..22: mol_type = other RNA
caggcagtcctctcactccaaa

SEQ ID NO: 126395 - RNA, 22 nt, synthetic construct
  source 1..22: mol_type = other RNA
caggcagtctagtccatgaaga

SEQ ID NO: 126396 - RNA, 22 nt, synthetic construct
  source 1..22: mol_type = other RNA
caggcataagccaccgcactca

SEQ ID NO: 126397 - RNA, 22 nt, synthetic construct
  source 1..22: mol_type = other RNA
caggcatctctctaaaaacatc

SEQ ID NO: 126398 - RNA, 22 nt, synthetic construct
  source 1..22: mol_type = other RNA
caggcatgagccacagggccca

SEQ ID NO: 126399 - RNA, 22 nt, synthetic construct
  source 1..22: mol_type = other RNA
caggcatgagccactgcgggcc

SEQ ID NO: 126400 - RNA, 22 nt, synthetic construct
  source 1..22: mol_type = other RNA
caggcatgagtcgccatacctg

SEQ ID NO: 126401 - RNA, 22 nt, synthetic construct
  source 1..22: mol_type = other RNA
caggcatgatggctcaacgcct

SEQ ID NO: 126402 - RNA, 22 nt, synthetic construct
  source 1..22: mol_type = other RNA
caggcatgcgccatcacaccca

SEQ ID NO: 126403 - RNA, 22 nt, synthetic construct
  source 1..22: mol_type = other RNA
caggcatgctaactgcagaggt

SEQ ID NO: 126404 - RNA, 22 nt, synthetic construct
  source 1..22: mol_type = other RNA
caggcatgggggcgcgtgccta

SEQ ID NO: 126405 - RNA, 22 nt, synthetic construct
  source 1..22: mol_type = other RNA
caggcattgtgctcagtggttc

SEQ ID NO: 126406 - RNA, 22 nt, synthetic construct
  source 1..22: mol_type = other RNA
caggccaacagggccactgaga

SEQ ID NO: 126407 - RNA, 22 nt, synthetic construct
  source 1..22: mol_type = other RNA
caggccagatatccataaggaa

SEQ ID NO: 126408 - RNA, 22 nt, synthetic construct
  source 1..22: mol_type = other RNA
caggccagtgagtgatgaaaag

SEQ ID NO: 126409 - RNA, 22 nt, synthetic construct
  source 1..22: mol_type = other RNA
caggcccggggcagagaactga

SEQ ID NO: 126410 - RNA, 22 nt, synthetic construct
  source 1..22: mol_type = other RNA
caggccctgagaagtcaaagcc

SEQ ID NO: 126411 - RNA, 22 nt, synthetic construct
  source 1..22: mol_type = other RNA
caggccctttgttagtgccttc

SEQ ID NO: 126412 - RNA, 22 nt, synthetic construct
  source 1..22: mol_type = other RNA
caggccgcccgctgctccctct

SEQ ID NO: 126413 - RNA, 22 nt, synthetic construct
  source 1..22: mol_type = other RNA
caggcctcgctcttggcttttg

SEQ ID NO: 126414 - RNA, 22 nt, synthetic construct
  source 1..22: mol_type = other RNA
caggcctgagccgtcggtatgt

SEQ ID NO: 126415 - RNA, 22 nt, synthetic construct
  source 1..22: mol_type = other RNA
caggcctgttgtgaggattcga

SEQ ID NO: 126416 - RNA, 22 nt, synthetic construct
  source 1..22: mol_type = other RNA
caggccttccacctgctcttta

SEQ ID NO: 126417 - RNA, 22 nt, synthetic construct
  source 1..22: mol_type = other RNA
caggccttcgaggcatctagtt

SEQ ID NO: 126418 - RNA, 22 nt, synthetic construct
  source 1..22: mol_type = other RNA
caggcgcacgccatctcgccca

SEQ ID NO: 126419 - RNA, 22 nt, synthetic construct
  source 1..22: mol_type = other RNA
caggcgcctgcattgcatttac

SEQ ID NO: 126420 - RNA, 22 nt, synthetic construct
  source 1..22: mol_type = other RNA
caggcgcctggacaggatcccg

SEQ ID NO: 126421 - RNA, 22 nt, synthetic construct
  source 1..22: mol_type = other RNA
caggcggaatgcagtggcgtga

SEQ ID NO: 126422 - RNA, 22 nt, synthetic construct
  source 1..22: mol_type = other RNA
caggcggcagagggagcagcgg

SEQ ID NO: 126423 - RNA, 22 nt, synthetic construct
  source 1..22: mol_type = other RNA
caggcgtgagccaccacgtccg

SEQ ID NO: 126424 - RNA, 22 nt, synthetic construct
  source 1..22: mol_type = other RNA
caggcgtgagccaccgcgcctg

SEQ ID NO: 126425 - RNA, 22 nt, synthetic construct
  source 1..22: mol_type = other RNA
caggcgtgagccacctcatccg

SEQ ID NO: 126426 - RNA, 22 nt, synthetic construct
  source 1..22: mol_type = other RNA
caggcgtgagcctccacacctg

SEQ ID NO: 126427 - RNA, 22 nt, synthetic construct
  source 1..22: mol_type = other RNA
caggcgtggtggcggatgccgg

SEQ ID NO: 126428 - RNA, 22 nt, synthetic construct
  source 1..22: mol_type = other RNA
caggcgttgagccatcatgcct

SEQ ID NO: 126429 - RNA, 22 nt, synthetic construct
  source 1..22: mol_type = other RNA
caggctcaatacctgaaaagtg

SEQ ID NO: 126430 - RNA, 22 nt, synthetic construct
  source 1..22: mol_type = other RNA
caggctccacttgggtggaagc

SEQ ID NO: 126431 - RNA, 22 nt, synthetic construct
  source 1..22: mol_type = other RNA
caggctccaggtagaatgaaaa

SEQ ID NO: 126432 - RNA, 22 nt, synthetic construct
  source 1..22: mol_type = other RNA
caggctctcttcaccaactgaa

SEQ ID NO: 126433 - RNA, 22 nt, synthetic construct
  source 1..22: mol_type = other RNA
caggctgaactgctgacagatt

SEQ ID NO: 126434 - RNA, 22 nt, synthetic construct
  source 1..22: mol_type = other RNA
caggctgaagggaggaaaaaac

SEQ ID NO: 126435 - RNA, 22 nt, synthetic construct
  source 1..22: mol_type = other RNA
caggctgacttagagggcttca

SEQ ID NO: 126436 - RNA, 22 nt, synthetic construct
  source 1..22: mol_type = other RNA
caggctgagtgcggtggcttat

SEQ ID NO: 126437 - RNA, 22 nt, synthetic construct
  source 1..22: mol_type = other RNA
caggctggaagaattttaagcc

SEQ ID NO: 126438 - RNA, 22 nt, synthetic construct
  source 1..22: mol_type = other RNA
caggctggagctcactgcagcc

SEQ ID NO: 126439 - RNA, 22 nt, synthetic construct
  source 1..22: mol_type = other RNA
caggctggctctttccactctc

SEQ ID NO: 126440 - RNA, 22 nt, synthetic construct
  source 1..22: mol_type = other RNA
caggctggtctcaaactccaag

SEQ ID NO: 126441 - RNA, 22 nt, synthetic construct
  source 1..22: mol_type = other RNA
caggctggtcttgtactcccag

SEQ ID NO: 126442 - RNA, 22 nt, synthetic construct
  source 1..22: mol_type = other RNA
caggctggttccaaacttctga

SEQ ID NO: 126443 - RNA, 22 nt, synthetic construct
  source 1..22: mol_type = other RNA
caggcttgagtctgtgctctgt

SEQ ID NO: 126444 - RNA, 22 nt, synthetic construct
  source 1..22: mol_type = other RNA
caggctttcccagggtgtagcc

SEQ ID NO: 126445 - RNA, 22 nt, synthetic construct
  source 1..22: mol_type = other RNA
caggctttcctacaatacagcc

SEQ ID NO: 126446 - RNA, 22 nt, synthetic construct
  source 1..22: mol_type = other RNA
caggctttgacttctcagggcc

SEQ ID NO: 126447 - RNA, 22 nt, synthetic construct
  source 1..22: mol_type = other RNA
caggctttttacccggagaggt

SEQ ID NO: 126448 - RNA, 22 nt, synthetic construct
  source 1..22: mol_type = other RNA
cagggaaaactacatgtaaaaa

SEQ ID NO: 126449 - RNA, 22 nt, synthetic construct
  source 1..22: mol_type = other RNA
cagggaaaccttactgtaatat

SEQ ID NO: 126450 - RNA, 22 nt, synthetic construct
  source 1..22: mol_type = other RNA
cagggaaatcattcaggacact

SEQ ID NO: 126451 - RNA, 22 nt, synthetic construct
  source 1..22: mol_type = other RNA
cagggaaatggagggccagagg

SEQ ID NO: 126452 - RNA, 22 nt, synthetic construct
  source 1..22: mol_type = other RNA
cagggaaccgtaacttcttttc

SEQ ID NO: 126453 - RNA, 22 nt, synthetic construct
  source 1..22: mol_type = other RNA
cagggaaggctgcaagcactgg

SEQ ID NO: 126454 - RNA, 22 nt, synthetic construct
  source 1..22: mol_type = other RNA
cagggaatgcccctgtagcaga

SEQ ID NO: 126455 - RNA, 22 nt, synthetic construct
  source 1..22: mol_type = other RNA
cagggaatggggagctagaggg

SEQ ID NO: 126456 - RNA, 22 nt, synthetic construct
  source 1..22: mol_type = other RNA
cagggaccacaggcatgcgcca

SEQ ID NO: 126457 - RNA, 22 nt, synthetic construct
  source 1..22: mol_type = other RNA
cagggactacagtcacacacca

SEQ ID NO: 126458 - RNA, 22 nt, synthetic construct
  source 1..22: mol_type = other RNA
cagggactcccatatctacatg

SEQ ID NO: 126459 - RNA, 22 nt, synthetic construct
  source 1..22: mol_type = other RNA
cagggactgatgaagaacctgt

SEQ ID NO: 126460 - RNA, 22 nt, synthetic construct
  source 1..22: mol_type = other RNA
cagggagaattggtagtcaatg

SEQ ID NO: 126461 - RNA, 22 nt, synthetic construct
  source 1..22: mol_type = other RNA
cagggagagagaaactttacac

SEQ ID NO: 126462 - RNA, 22 nt, synthetic construct
  source 1..22: mol_type = other RNA
cagggagatacttgattacaag

SEQ ID NO: 126463 - RNA, 22 nt, synthetic construct
  source 1..22: mol_type = other RNA
cagggaggaatccttcagtcag

SEQ ID NO: 126464 - RNA, 22 nt, synthetic construct
  source 1..22: mol_type = other RNA
cagggaggcggaggttgcggtg

SEQ ID NO: 126465 - RNA, 22 nt, synthetic construct
  source 1..22: mol_type = other RNA
cagggaggggtccccagcatcc

SEQ ID NO: 126466 - RNA, 22 nt, synthetic construct
  source 1..22: mol_type = other RNA
cagggataaatcccacttgatc

SEQ ID NO: 126467 - RNA, 22 nt, synthetic construct
  source 1..22: mol_type = other RNA
cagggatattggcttatagtgt

SEQ ID NO: 126468 - RNA, 22 nt, synthetic construct
  source 1..22: mol_type = other RNA
cagggatattttcgtgtactga

SEQ ID NO: 126469 - RNA, 22 nt, synthetic construct
  source 1..22: mol_type = other RNA
cagggatcacagatacaactct

SEQ ID NO: 126470 - RNA, 22 nt, synthetic construct
  source 1..22: mol_type = other RNA
cagggatgctgcgagccccggg

SEQ ID NO: 126471 - RNA, 22 nt, synthetic construct
  source 1..22: mol_type = other RNA
cagggatttggccagaatccct

SEQ ID NO: 126472 - RNA, 22 nt, synthetic construct
  source 1..22: mol_type = other RNA
cagggcagggagagagaaactt

SEQ ID NO: 126473 - RNA, 22 nt, synthetic construct
  source 1..22: mol_type = other RNA
cagggccactgagagctcaggc

SEQ ID NO: 126474 - RNA, 22 nt, synthetic construct
  source 1..22: mol_type = other RNA
cagggccattctgctatgaaat

SEQ ID NO: 126475 - RNA, 22 nt, synthetic construct
  source 1..22: mol_type = other RNA
cagggcccagcctcaacagcac

SEQ ID NO: 126476 - RNA, 22 nt, synthetic construct
  source 1..22: mol_type = other RNA
cagggcctctgaagacatgctg

SEQ ID NO: 126477 - RNA, 22 nt, synthetic construct
  source 1..22: mol_type = other RNA
cagggcctgcttttggaagcat

SEQ ID NO: 126478 - RNA, 22 nt, synthetic construct
  source 1..22: mol_type = other RNA
cagggccttcccaaagacatcc

SEQ ID NO: 126479 - RNA, 22 nt, synthetic construct
  source 1..22: mol_type = other RNA
cagggcctttaatcacctcaag

SEQ ID NO: 126480 - RNA, 22 nt, synthetic construct
  source 1..22: mol_type = other RNA
cagggctcctccaaggctgccc

SEQ ID NO: 126481 - RNA, 22 nt, synthetic construct
  source 1..22: mol_type = other RNA
cagggctgaaaaacacctcagt

SEQ ID NO: 126482 - RNA, 22 nt, synthetic construct
  source 1..22: mol_type = other RNA
cagggcttctgaaggtgcctgc

SEQ ID NO: 126483 - RNA, 22 nt, synthetic construct
  source 1..22: mol_type = other RNA
cagggcttggtggcccacacct

SEQ ID NO: 126484 - RNA, 22 nt, synthetic construct
  source 1..22: mol_type = other RNA
caggggaaggagtctgcccatc

SEQ ID NO: 126485 - RNA, 22 nt, synthetic construct
  source 1..22: mol_type = other RNA
caggggaaggcttcgagttctg

SEQ ID NO: 126486 - RNA, 22 nt, synthetic construct
  source 1..22: mol_type = other RNA
caggggaatagaaagttagtgt

SEQ ID NO: 126487 - RNA, 22 nt, synthetic construct
  source 1..22: mol_type = other RNA
caggggacatagatgaaactaa

SEQ ID NO: 126488 - RNA, 22 nt, synthetic construct
  source 1..22: mol_type = other RNA
caggggacatgaaggaaggatt

SEQ ID NO: 126489 - RNA, 22 nt, synthetic construct
  source 1..22: mol_type = other RNA
caggggacatgctctgatagga

SEQ ID NO: 126490 - RNA, 22 nt, synthetic construct
  source 1..22: mol_type = other RNA
caggggactttgatgttttaca

SEQ ID NO: 126491 - RNA, 22 nt, synthetic construct
  source 1..22: mol_type = other RNA
caggggcattccctgtctggga

SEQ ID NO: 126492 - RNA, 22 nt, synthetic construct
  source 1..22: mol_type = other RNA
caggggctaagtagtggcagcc

SEQ ID NO: 126493 - RNA, 22 nt, synthetic construct
  source 1..22: mol_type = other RNA
caggggctgcatcatggtgggc

SEQ ID NO: 126494 - RNA, 22 nt, synthetic construct
  source 1..22: mol_type = other RNA
caggggctgggggatccagggg

SEQ ID NO: 126495 - RNA, 22 nt, synthetic construct
  source 1..22: mol_type = other RNA
cagggggctaaatgctcacatt

SEQ ID NO: 126496 - RNA, 22 nt, synthetic construct
  source 1..22: mol_type = other RNA
caggggggaaaaaaccataaaa

SEQ ID NO: 126497 - RNA, 22 nt, synthetic construct
  source 1..22: mol_type = other RNA
caggggggccactggaaacctt

SEQ ID NO: 126498 - RNA, 22 nt, synthetic construct
  source 1..22: mol_type = other RNA
cagggggtatggagacactagg

SEQ ID NO: 126499 - RNA, 22 nt, synthetic construct
  source 1..22: mol_type = other RNA
cagggggtcgagactgtaatga

SEQ ID NO: 126500 - RNA, 22 nt, synthetic construct
  source 1..22: mol_type = other RNA
caggggtaaaggggatggggga

SEQ ID NO: 126501 - RNA, 22 nt, synthetic construct
  source 1..22: mol_type = other RNA
caggggtggggggatgtagaag

SEQ ID NO: 126502 - RNA, 22 nt, synthetic construct
  source 1..22: mol_type = other RNA
cagggtaaagtcaattctagtt

SEQ ID NO: 126503 - RNA, 22 nt, synthetic construct
  source 1..22: mol_type = other RNA
cagggtaagattccgtctcaaa

SEQ ID NO: 126504 - RNA, 22 nt, synthetic construct
  source 1..22: mol_type = other RNA
cagggtaggaaaagacttctca

SEQ ID NO: 126505 - RNA, 22 nt, synthetic construct
  source 1..22: mol_type = other RNA
cagggtaggaaggcggtgggga

SEQ ID NO: 126506 - RNA, 22 nt, synthetic construct
  source 1..22: mol_type = other RNA
cagggtcacttcctctcttaaa

SEQ ID NO: 126507 - RNA, 22 nt, synthetic construct
  source 1..22: mol_type = other RNA
cagggtcatgcacacgctggaa

SEQ ID NO: 126508 - RNA, 22 nt, synthetic construct
  source 1..22: mol_type = other RNA
cagggtctacaaaaggtttcca

SEQ ID NO: 126509 - RNA, 22 nt, synthetic construct
  source 1..22: mol_type = other RNA
cagggtctcactcttaccaagg

SEQ ID NO: 126510 - RNA, 22 nt, synthetic construct
  source 1..22: mol_type = other RNA
cagggtctgtctcacctcaagg

SEQ ID NO: 126511 - RNA, 22 nt, synthetic construct
  source 1..22: mol_type = other RNA
cagggtcttgctctgtcaccca

SEQ ID NO: 126512 - RNA, 22 nt, synthetic construct
  source 1..22: mol_type = other RNA
cagggtgaaacttgaatactcg

SEQ ID NO: 126513 - RNA, 22 nt, synthetic construct
  source 1..22: mol_type = other RNA
cagggtgcgacctcgaagcaca

SEQ ID NO: 126514 - RNA, 22 nt, synthetic construct
  source 1..22: mol_type = other RNA
cagggtggagtccaaccaatcg

SEQ ID NO: 126515 - RNA, 22 nt, synthetic construct
  source 1..22: mol_type = other RNA
cagggtgtagccacaagccaca

SEQ ID NO: 126516 - RNA, 22 nt, synthetic construct
  source 1..22: mol_type = other RNA
cagggttacagtataggggaac

SEQ ID NO: 126517 - RNA, 22 nt, synthetic construct
  source 1..22: mol_type = other RNA
cagggttattaacataccgacg

SEQ ID NO: 126518 - RNA, 22 nt, synthetic construct
  source 1..22: mol_type = other RNA
cagggtttctgtttggatgaaa

SEQ ID NO: 126519 - RNA, 22 nt, synthetic construct
  source 1..22: mol_type = other RNA
cagggttttgttttgttttttc

SEQ ID NO: 126520 - RNA, 22 nt, synthetic construct
  source 1..22: mol_type = other RNA
caggtagaatgaaaatttttgt

SEQ ID NO: 126521 - RNA, 22 nt, synthetic construct
  source 1..22: mol_type = other RNA
caggtagacatgagtaaaaaga

SEQ ID NO: 126522 - RNA, 22 nt, synthetic construct
  source 1..22: mol_type = other RNA
caggtagacatgtgccatgttg

SEQ ID NO: 126523 - RNA, 22 nt, synthetic construct
  source 1..22: mol_type = other RNA
caggtagctgctttttaaaaat

SEQ ID NO: 126524 - RNA, 22 nt, synthetic construct
  source 1..22: mol_type = other RNA
caggtagggaggggtattcagg

SEQ ID NO: 126525 - RNA, 22 nt, synthetic construct
  source 1..22: mol_type = other RNA
caggtataaagtttccgttttg

SEQ ID NO: 126526 - RNA, 22 nt, synthetic construct
  source 1..22: mol_type = other RNA
caggtatggcgactcatgcctg

SEQ ID NO: 126527 - RNA, 22 nt, synthetic construct
  source 1..22: mol_type = other RNA
caggtattgagcctgttccgat

SEQ ID NO: 126528 - RNA, 22 nt, synthetic construct
  source 1..22: mol_type = other RNA
caggtatttctaaatcaacagt

SEQ ID NO: 126529 - RNA, 22 nt, synthetic construct
  source 1..22: mol_type = other RNA
caggtattttgttctctttgaa

SEQ ID NO: 126530 - RNA, 22 nt, synthetic construct
  source 1..22: mol_type = other RNA
caggtcaaactcacttattagc

SEQ ID NO: 126531 - RNA, 22 nt, synthetic construct
  source 1..22: mol_type = other RNA
caggtcacattctgcctgcaga

SEQ ID NO: 126532 - RNA, 22 nt, synthetic construct
  source 1..22: mol_type = other RNA
caggtcacctagcctctctggg

SEQ ID NO: 126533 - RNA, 22 nt, synthetic construct
  source 1..22: mol_type = other RNA
caggtcagccagaggaagctta

SEQ ID NO: 126534 - RNA, 22 nt, synthetic construct
  source 1..22: mol_type = other RNA
caggtcagtagtacagtgagta

SEQ ID NO: 126535 - RNA, 22 nt, synthetic construct
  source 1..22: mol_type = other RNA
caggtcatgacttttttgccca

SEQ ID NO: 126536 - RNA, 22 nt, synthetic construct
  source 1..22: mol_type = other RNA
caggtcattacatattttgtaa

SEQ ID NO: 126537 - RNA, 22 nt, synthetic construct
  source 1..22: mol_type = other RNA
caggtccctacaaaggacatga

SEQ ID NO: 126538 - RNA, 22 nt, synthetic construct
  source 1..22: mol_type = other RNA
caggtcggaaggaatgtgcttc

SEQ ID NO: 126539 - RNA, 22 nt, synthetic construct
  source 1..22: mol_type = other RNA
caggtctatgtgacagaatgca

SEQ ID NO: 126540 - RNA, 22 nt, synthetic construct
  source 1..22: mol_type = other RNA
caggtctctctgaaattagcta

SEQ ID NO: 126541 - RNA, 22 nt, synthetic construct
  source 1..22: mol_type = other RNA
caggtctctttgaaaggaatcc

SEQ ID NO: 126542 - RNA, 22 nt, synthetic construct
  source 1..22: mol_type = other RNA
caggtcttcaacctcaacttta

SEQ ID NO: 126543 - RNA, 22 nt, synthetic construct
  source 1..22: mol_type = other RNA
caggtgagtggactgtgaggga

SEQ ID NO: 126544 - RNA, 22 nt, synthetic construct
  source 1..22: mol_type = other RNA
caggtgcctcctgcctcagcct

SEQ ID NO: 126545 - RNA, 22 nt, synthetic construct
  source 1..22: mol_type = other RNA
caggtgcttacagactgattaa

SEQ ID NO: 126546 - RNA, 22 nt, synthetic construct
  source 1..22: mol_type = other RNA
caggtggaaggcctgatagctg

SEQ ID NO: 126547 - RNA, 22 nt, synthetic construct
  source 1..22: mol_type = other RNA
caggtggatatctgaggtcagg

SEQ ID NO: 126548 - RNA, 22 nt, synthetic construct
  source 1..22: mol_type = other RNA
caggtggatcaggagattgaga

SEQ ID NO: 126549 - RNA, 22 nt, synthetic construct
  source 1..22: mol_type = other RNA
caggtgggaggcccggagccga

SEQ ID NO: 126550 - RNA, 22 nt, synthetic construct
  source 1..22: mol_type = other RNA
caggtgggcactgggagccctc

SEQ ID NO: 126551 - RNA, 22 nt, synthetic construct
  source 1..22: mol_type = other RNA
caggtggtatgggagatgtgta

SEQ ID NO: 126552 - RNA, 22 nt, synthetic construct
  source 1..22: mol_type = other RNA
caggtggtatttaatctgtcag

SEQ ID NO: 126553 - RNA, 22 nt, synthetic construct
  source 1..22: mol_type = other RNA
caggtggttctgcctaatctct

SEQ ID NO: 126554 - RNA, 22 nt, synthetic construct
  source 1..22: mol_type = other RNA
caggtgtaagagattaattcag

SEQ ID NO: 126555 - RNA, 22 nt, synthetic construct
  source 1..22: mol_type = other RNA
caggtgtatgatcttattaatg

SEQ ID NO: 126556 - RNA, 22 nt, synthetic construct
  source 1..22: mol_type = other RNA
caggtgtcactggatagaagtg

SEQ ID NO: 126557 - RNA, 22 nt, synthetic construct
  source 1..22: mol_type = other RNA
caggtgtgaaccacgcatctgg

SEQ ID NO: 126558 - RNA, 22 nt, synthetic construct
  source 1..22: mol_type = other RNA
caggtgtgagattgatagatca

SEQ ID NO: 126559 - RNA, 22 nt, synthetic construct
  source 1..22: mol_type = other RNA
caggtgtgagccaccgtgccgg

SEQ ID NO: 126560 - RNA, 22 nt, synthetic construct
  source 1..22: mol_type = other RNA
caggtgtgggccaccaagccct

SEQ ID NO: 126561 - RNA, 22 nt, synthetic construct
  source 1..22: mol_type = other RNA
caggtgtggtgctgcacgtctg

SEQ ID NO: 126562 - RNA, 22 nt, synthetic construct
  source 1..22: mol_type = other RNA
caggtgtgtaaacactgttctg

SEQ ID NO: 126563 - RNA, 22 nt, synthetic construct
  source 1..22: mol_type = other RNA
caggtgttggtgcatttgggac

SEQ ID NO: 126564 - RNA, 22 nt, synthetic construct
  source 1..22: mol_type = other RNA
caggttcatccatgttgttgaa

SEQ ID NO: 126565 - RNA, 22 nt, synthetic construct
  source 1..22: mol_type = other RNA
caggttcatgtgtgcttacaca

SEQ ID NO: 126566 - RNA, 22 nt, synthetic construct
  source 1..22: mol_type = other RNA
caggttcattttaataagcttc

SEQ ID NO: 126567 - RNA, 22 nt, synthetic construct
  source 1..22: mol_type = other RNA
caggttcttcatcagtccctgt

SEQ ID NO: 126568 - RNA, 22 nt, synthetic construct
  source 1..22: mol_type = other RNA
caggttgatactagtttagtgc

SEQ ID NO: 126569 - RNA, 22 nt, synthetic construct
  source 1..22: mol_type = other RNA
caggttgcattaatgcttcata

SEQ ID NO: 126570 - RNA, 22 nt, synthetic construct
  source 1..22: mol_type = other RNA
caggttgggcttatcagatggt

SEQ ID NO: 126571 - RNA, 22 nt, synthetic construct
  source 1..22: mol_type = other RNA
caggtttaataaatactagtag

SEQ ID NO: 126572 - RNA, 22 nt, synthetic construct
  source 1..22: mol_type = other RNA
caggtttacaggatatcagaag

SEQ ID NO: 126573 - RNA, 22 nt, synthetic construct
  source 1..22: mol_type = other RNA
caggtttactccaagaaggcta

SEQ ID NO: 126574 - RNA, 22 nt, synthetic construct
  source 1..22: mol_type = other RNA
caggtttaggaagcacattcct

SEQ ID NO: 126575 - RNA, 22 nt, synthetic construct
  source 1..22: mol_type = other RNA
caggtttaggtttttcttgtgg

SEQ ID NO: 126576 - RNA, 22 nt, synthetic construct
  source 1..22: mol_type = other RNA
caggtttcaagtgaaccaaaaa

SEQ ID NO: 126577 - RNA, 22 nt, synthetic construct
  source 1..22: mol_type = other RNA
caggtttgtgcttggatattct

SEQ ID NO: 126578 - RNA, 22 nt, synthetic construct
  source 1..22: mol_type = other RNA
caggttttatctctctcaagca

SEQ ID NO: 126579 - RNA, 22 nt, synthetic construct
  source 1..22: mol_type = other RNA
caggttttcgaccaagttacta

SEQ ID NO: 126580 - RNA, 22 nt, synthetic construct
  source 1..22: mol_type = other RNA
caggttttggtaatgggaaaga

SEQ ID NO: 126581 - RNA, 22 nt, synthetic construct
  source 1..22: mol_type = other RNA
cagtaaaaaaggaccatctgtt

SEQ ID NO: 126582 - RNA, 22 nt, synthetic construct
  source 1..22: mol_type = other RNA
cagtaaaattcccttcagtgta

SEQ ID NO: 126583 - RNA, 22 nt, synthetic construct
  source 1..22: mol_type = other RNA
cagtaaagccccattgtacaca

SEQ ID NO: 126584 - RNA, 22 nt, synthetic construct
  source 1..22: mol_type = other RNA
cagtaaagtcactgtggaaaac

SEQ ID NO: 126585 - RNA, 22 nt, synthetic construct
  source 1..22: mol_type = other RNA
cagtaaatatactgactagtgg

SEQ ID NO: 126586 - RNA, 22 nt, synthetic construct
  source 1..22: mol_type = other RNA
cagtaaatgaaatttgaggccc

SEQ ID NO: 126587 - RNA, 22 nt, synthetic construct
  source 1..22: mol_type = other RNA
cagtaaatgcctacattaaaaa

SEQ ID NO: 126588 - RNA, 22 nt, synthetic construct
  source 1..22: mol_type = other RNA
cagtaacaaataagaagattga

SEQ ID NO: 126589 - RNA, 22 nt, synthetic construct
  source 1..22: mol_type = other RNA
cagtaacttaaatttgattgtg

SEQ ID NO: 126590 - RNA, 22 nt, synthetic construct
  source 1..22: mol_type = other RNA
cagtaagaaaacagataaccta

SEQ ID NO: 126591 - RNA, 22 nt, synthetic construct
  source 1..22: mol_type = other RNA
cagtaagatcctggattgctag

SEQ ID NO: 126592 - RNA, 22 nt, synthetic construct
  source 1..22: mol_type = other RNA
cagtaagattctgtctctacaa

SEQ ID NO: 126593 - RNA, 22 nt, synthetic construct
  source 1..22: mol_type = other RNA
cagtaaggtttccctggggaat

SEQ ID NO: 126594 - RNA, 22 nt, synthetic construct
  source 1..22: mol_type = other RNA
cagtaatcaaacagtgtgatat

SEQ ID NO: 126595 - RNA, 22 nt, synthetic construct
  source 1..22: mol_type = other RNA
cagtaatcttgctaaacatgta

SEQ ID NO: 126596 - RNA, 22 nt, synthetic construct
  source 1..22: mol_type = other RNA
cagtaattagttacatgaggtc

SEQ ID NO: 126597 - RNA, 22 nt, synthetic construct
  source 1..22: mol_type = other RNA
cagtaattctgcagtgaacatg

SEQ ID NO: 126598 - RNA, 22 nt, synthetic construct
  source 1..22: mol_type = other RNA
cagtaattgtagtttccatgga

SEQ ID NO: 126599 - RNA, 22 nt, synthetic construct
  source 1..22: mol_type = other RNA
cagtacaaggctagagctcaca

SEQ ID NO: 126600 - RNA, 22 nt, synthetic construct
  source 1..22: mol_type = other RNA
cagtacacgaaaatatccctgg

SEQ ID NO: 126601 - RNA, 22 nt, synthetic construct
  source 1..22: mol_type = other RNA
cagtacagtagtaaaaccaaat

SEQ ID NO: 126602 - RNA, 22 nt, synthetic construct
  source 1..22: mol_type = other RNA
cagtacatctcaattcagaagc

SEQ ID NO: 126603 - RNA, 22 nt, synthetic construct
  source 1..22: mol_type = other RNA
cagtaccattccccttgccaag

SEQ ID NO: 126604 - RNA, 22 nt, synthetic construct
  source 1..22: mol_type = other RNA
cagtacgcttttatgttataat

SEQ ID NO: 126605 - RNA, 22 nt, synthetic construct
  source 1..22: mol_type = other RNA
cagtactatcttccctaaagag

SEQ ID NO: 126606 - RNA, 22 nt, synthetic construct
  source 1..22: mol_type = other RNA
cagtacttccctctttctcaac

SEQ ID NO: 126607 - RNA, 22 nt, synthetic construct
  source 1..22: mol_type = other RNA
cagtacttgtctttttgtgact

SEQ ID NO: 126608 - RNA, 22 nt, synthetic construct
  source 1..22: mol_type = other RNA
cagtactttttcatccaaacag

SEQ ID NO: 126609 - RNA, 22 nt, synthetic construct
  source 1..22: mol_type = other RNA
cagtagaaatcttccagaagga

SEQ ID NO: 126610 - RNA, 22 nt, synthetic construct
  source 1..22: mol_type = other RNA
cagtagaagactcagcagtttt

SEQ ID NO: 126611 - RNA, 22 nt, synthetic construct
  source 1..22: mol_type = other RNA
cagtagaggccgagggttgaac

SEQ ID NO: 126612 - RNA, 22 nt, synthetic construct
  source 1..22: mol_type = other RNA
cagtagccaaaggtagaaacat

SEQ ID NO: 126613 - RNA, 22 nt, synthetic construct
  source 1..22: mol_type = other RNA
cagtagctcatcatttataccc

SEQ ID NO: 126614 - RNA, 22 nt, synthetic construct
  source 1..22: mol_type = other RNA
cagtaggcttagataggatggg

SEQ ID NO: 126615 - RNA, 22 nt, synthetic construct
  source 1..22: mol_type = other RNA
cagtagtaaaaccaaatgtgga

SEQ ID NO: 126616 - RNA, 22 nt, synthetic construct
  source 1..22: mol_type = other RNA
cagtagtaaagcaaatgtgact

SEQ ID NO: 126617 - RNA, 22 nt, synthetic construct
  source 1..22: mol_type = other RNA
cagtagtacagtgagtagaaga

SEQ ID NO: 126618 - RNA, 22 nt, synthetic construct
  source 1..22: mol_type = other RNA
cagtagtattgaactgttactt

SEQ ID NO: 126619 - RNA, 22 nt, synthetic construct
  source 1..22: mol_type = other RNA
cagtagtttgctagtggtaact

SEQ ID NO: 126620 - RNA, 22 nt, synthetic construct
  source 1..22: mol_type = other RNA
cagtataggggaactcttgtag

SEQ ID NO: 126621 - RNA, 22 nt, synthetic construct
  source 1..22: mol_type = other RNA
cagtatatattttctaagagcc

SEQ ID NO: 126622 - RNA, 22 nt, synthetic construct
  source 1..22: mol_type = other RNA
cagtatattcatagtagctgtt

SEQ ID NO: 126623 - RNA, 22 nt, synthetic construct
  source 1..22: mol_type = other RNA
cagtatatttactgcttgctgc

SEQ ID NO: 126624 - RNA, 22 nt, synthetic construct
  source 1..22: mol_type = other RNA
cagtatcctttcaaggtatctc

SEQ ID NO: 126625 - RNA, 22 nt, synthetic construct
  source 1..22: mol_type = other RNA
cagtatctcctttccttccttg

SEQ ID NO: 126626 - RNA, 22 nt, synthetic construct
  source 1..22: mol_type = other RNA
cagtatcttgaagaaaccaaga

SEQ ID NO: 126627 - RNA, 22 nt, synthetic construct
  source 1..22: mol_type = other RNA
cagtatgaatgcacgtgaagct

SEQ ID NO: 126628 - RNA, 22 nt, synthetic construct
  source 1..22: mol_type = other RNA
cagtatgacctcctcccactta

SEQ ID NO: 126629 - RNA, 22 nt, synthetic construct
  source 1..22: mol_type = other RNA
cagtatgatgccactcaaaact

SEQ ID NO: 126630 - RNA, 22 nt, synthetic construct
  source 1..22: mol_type = other RNA
cagtatgcacaaataattaaca

SEQ ID NO: 126631 - RNA, 22 nt, synthetic construct
  source 1..22: mol_type = other RNA
cagtatgcatagatcacaagga

SEQ ID NO: 126632 - RNA, 22 nt, synthetic construct
  source 1..22: mol_type = other RNA
cagtatgcggggtttcagcaca

SEQ ID NO: 126633 - RNA, 22 nt, synthetic construct
  source 1..22: mol_type = other RNA
cagtatgctgtttacattagag

SEQ ID NO: 126634 - RNA, 22 nt, synthetic construct
  source 1..22: mol_type = other RNA
cagtatgtaggaaactttgcat

SEQ ID NO: 126635 - RNA, 22 nt, synthetic construct
  source 1..22: mol_type = other RNA
cagtatgtcagactcattgcct

SEQ ID NO: 126636 - RNA, 22 nt, synthetic construct
  source 1..22: mol_type = other RNA
cagtatgtgccatttttataaa

SEQ ID NO: 126637 - RNA, 22 nt, synthetic construct
  source 1..22: mol_type = other RNA
cagtatgtgtctctgacatgag

SEQ ID NO: 126638 - RNA, 22 nt, synthetic construct
  source 1..22: mol_type = other RNA
cagtattacacagaaagcctct

SEQ ID NO: 126639 - RNA, 22 nt, synthetic construct
  source 1..22: mol_type = other RNA
cagtattgtcttctaaccctca

SEQ ID NO: 126640 - RNA, 22 nt, synthetic construct
  source 1..22: mol_type = other RNA
cagtattgtgctgaaaccccgc

SEQ ID NO: 126641 - RNA, 22 nt, synthetic construct
  source 1..22: mol_type = other RNA
cagtattgttaactgtagagaa

SEQ ID NO: 126642 - RNA, 22 nt, synthetic construct
  source 1..22: mol_type = other RNA
cagtcaacacactagccactgg

SEQ ID NO: 126643 - RNA, 22 nt, synthetic construct
  source 1..22: mol_type = other RNA
cagtcaacaccaagcaacacta

SEQ ID NO: 126644 - RNA, 22 nt, synthetic construct
  source 1..22: mol_type = other RNA
cagtcacaaagctttaaactgg

SEQ ID NO: 126645 - RNA, 22 nt, synthetic construct
  source 1..22: mol_type = other RNA
cagtcacacaccactacacccg

SEQ ID NO: 126646 - RNA, 22 nt, synthetic construct
  source 1..22: mol_type = other RNA
cagtcaccaaacgtttagatga

SEQ ID NO: 126647 - RNA, 22 nt, synthetic construct
  source 1..22: mol_type = other RNA
cagtcactaaaaatcagattaa

SEQ ID NO: 126648 - RNA, 22 nt, synthetic construct
  source 1..22: mol_type = other RNA
cagtcagtgatggaggtggaac

SEQ ID NO: 126649 - RNA, 22 nt, synthetic construct
  source 1..22: mol_type = other RNA
cagtcagttctctgccccgggc

SEQ ID NO: 126650 - RNA, 22 nt, synthetic construct
  source 1..22: mol_type = other RNA
cagtcataatttgtgtcctttt

SEQ ID NO: 126651 - RNA, 22 nt, synthetic construct
  source 1..22: mol_type = other RNA
cagtcatcacagtccaggaact

SEQ ID NO: 126652 - RNA, 22 nt, synthetic construct
  source 1..22: mol_type = other RNA
cagtcatcctcaacaagagagg

SEQ ID NO: 126653 - RNA, 22 nt, synthetic construct
  source 1..22: mol_type = other RNA
cagtcatgtggggactttgtgg

SEQ ID NO: 126654 - RNA, 22 nt, synthetic construct
  source 1..22: mol_type = other RNA
cagtcattcaggtctatgtgac

SEQ ID NO: 126655 - RNA, 22 nt, synthetic construct
  source 1..22: mol_type = other RNA
cagtccactcacctgtcatgtc

SEQ ID NO: 126656 - RNA, 22 nt, synthetic construct
  source 1..22: mol_type = other RNA
cagtccagatattatcctccaa

SEQ ID NO: 126657 - RNA, 22 nt, synthetic construct
  source 1..22: mol_type = other RNA
cagtccagcaccacccttgatg

SEQ ID NO: 126658 - RNA, 22 nt, synthetic construct
  source 1..22: mol_type = other RNA
cagtccaggaacttacagtaag

SEQ ID NO: 126659 - RNA, 22 nt, synthetic construct
  source 1..22: mol_type = other RNA
cagtcccaaatgggagcatgca

SEQ ID NO: 126660 - RNA, 22 nt, synthetic construct
  source 1..22: mol_type = other RNA
cagtcccactgacagtggacaa

SEQ ID NO: 126661 - RNA, 22 nt, synthetic construct
  source 1..22: mol_type = other RNA
cagtccccggtctttcctgatc

SEQ ID NO: 126662 - RNA, 22 nt, synthetic construct
  source 1..22: mol_type = other RNA
cagtccctagtgtctccatacc

SEQ ID NO: 126663 - RNA, 22 nt, synthetic construct
  source 1..22: mol_type = other RNA
cagtccctcaccttctgctggg

SEQ ID NO: 126664 - RNA, 22 nt, synthetic construct
  source 1..22: mol_type = other RNA
cagtccctcctttctagaatgc

SEQ ID NO: 126665 - RNA, 22 nt, synthetic construct
  source 1..22: mol_type = other RNA
cagtcccttgcctgacagcaaa

SEQ ID NO: 126666 - RNA, 22 nt, synthetic construct
  source 1..22: mol_type = other RNA
cagtcctctactttcacataag

SEQ ID NO: 126667 - RNA, 22 nt, synthetic construct
  source 1..22: mol_type = other RNA
cagtcctctcactccaaagcaa

SEQ ID NO: 126668 - RNA, 22 nt, synthetic construct
  source 1..22: mol_type = other RNA
cagtcctgccttggcctcccca

SEQ ID NO: 126669 - RNA, 22 nt, synthetic construct
  source 1..22: mol_type = other RNA
cagtcctgctaacaccttgaac

SEQ ID NO: 126670 - RNA, 22 nt, synthetic construct
  source 1..22: mol_type = other RNA
cagtcctgtgtttctgctattc

SEQ ID NO: 126671 - RNA, 22 nt, synthetic construct
  source 1..22: mol_type = other RNA
cagtccttaccactgaagtgtt

SEQ ID NO: 126672 - RNA, 22 nt, synthetic construct
  source 1..22: mol_type = other RNA
cagtccttgtgatctatgcata

SEQ ID NO: 126673 - RNA, 22 nt, synthetic construct
  source 1..22: mol_type = other RNA
cagtcctttgggaggtcaaggc

SEQ ID NO: 126674 - RNA, 22 nt, synthetic construct
  source 1..22: mol_type = other RNA
cagtcctttgtgtcaagtacaa

SEQ ID NO: 126675 - RNA, 22 nt, synthetic construct
  source 1..22: mol_type = other RNA
cagtcggttcttcaccgtgcaa

SEQ ID NO: 126676 - RNA, 22 nt, synthetic construct
  source 1..22: mol_type = other RNA
cagtctaaccattaacagctca

SEQ ID NO: 126677 - RNA, 22 nt, synthetic construct
  source 1..22: mol_type = other RNA
cagtctaggaaaagacttgagg

SEQ ID NO: 126678 - RNA, 22 nt, synthetic construct
  source 1..22: mol_type = other RNA
cagtctagtccatgaagaaaac

SEQ ID NO: 126679 - RNA, 22 nt, synthetic construct
  source 1..22: mol_type = other RNA
cagtctcaaactcctgcactca

SEQ ID NO: 126680 - RNA, 22 nt, synthetic construct
  source 1..22: mol_type = other RNA
cagtctccaatcctcagccccc

SEQ ID NO: 126681 - RNA, 22 nt, synthetic construct
  source 1..22: mol_type = other RNA
cagtctcccccaggtggttctg

SEQ ID NO: 126682 - RNA, 22 nt, synthetic construct
  source 1..22: mol_type = other RNA
cagtctcgaaaaggaatggaat

SEQ ID NO: 126683 - RNA, 22 nt, synthetic construct
  source 1..22: mol_type = other RNA
cagtctcgaccccctgggctca

SEQ ID NO: 126684 - RNA, 22 nt, synthetic construct
  source 1..22: mol_type = other RNA
cagtctcgtgaatttggtattc

SEQ ID NO: 126685 - RNA, 22 nt, synthetic construct
  source 1..22: mol_type = other RNA
cagtctctacccagcactctga

SEQ ID NO: 126686 - RNA, 22 nt, synthetic construct
  source 1..22: mol_type = other RNA
cagtctctgcaacatttgttgc

SEQ ID NO: 126687 - RNA, 22 nt, synthetic construct
  source 1..22: mol_type = other RNA
cagtctctgcagagcaggctcc

SEQ ID NO: 126688 - RNA, 22 nt, synthetic construct
  source 1..22: mol_type = other RNA
cagtctctgctcactgcaacct

SEQ ID NO: 126689 - RNA, 22 nt, synthetic construct
  source 1..22: mol_type = other RNA
cagtctgcaggcagaatgtgac

SEQ ID NO: 126690 - RNA, 22 nt, synthetic construct
  source 1..22: mol_type = other RNA
cagtctgtaagcacctgtataa

SEQ ID NO: 126691 - RNA, 22 nt, synthetic construct
  source 1..22: mol_type = other RNA
cagtctgtcctcgtaaaagcta

SEQ ID NO: 126692 - RNA, 22 nt, synthetic construct
  source 1..22: mol_type = other RNA
cagtctgtgcttaaggaaatgg

SEQ ID NO: 126693 - RNA, 22 nt, synthetic construct
  source 1..22: mol_type = other RNA
cagtctgtttgccatcttcaag

SEQ ID NO: 126694 - RNA, 22 nt, synthetic construct
  source 1..22: mol_type = other RNA
cagtcttaaccattgagccaaa

SEQ ID NO: 126695 - RNA, 22 nt, synthetic construct
  source 1..22: mol_type = other RNA
cagtcttcaggtctctctgaaa

SEQ ID NO: 126696 - RNA, 22 nt, synthetic construct
  source 1..22: mol_type = other RNA
cagtcttctcatacagatttta

SEQ ID NO: 126697 - RNA, 22 nt, synthetic construct
  source 1..22: mol_type = other RNA
cagtcttggtagtttgcacgtt

SEQ ID NO: 126698 - RNA, 22 nt, synthetic construct
  source 1..22: mol_type = other RNA
cagtgaaagtctccctaaccag

SEQ ID NO: 126699 - RNA, 22 nt, synthetic construct
  source 1..22: mol_type = other RNA
cagtgaacatgggaatgcatat

SEQ ID NO: 126700 - RNA, 22 nt, synthetic construct
  source 1..22: mol_type = other RNA
cagtgaactccagtctgggcaa

SEQ ID NO: 126701 - RNA, 22 nt, synthetic construct
  source 1..22: mol_type = other RNA
cagtgaagatgctgaacttgtc

SEQ ID NO: 126702 - RNA, 22 nt, synthetic construct
  source 1..22: mol_type = other RNA
cagtgaagtcatctggtcctga

SEQ ID NO: 126703 - RNA, 22 nt, synthetic construct
  source 1..22: mol_type = other RNA
cagtgaatatcatttgaatgat

SEQ ID NO: 126704 - RNA, 22 nt, synthetic construct
  source 1..22: mol_type = other RNA
cagtgaattctgacttagtgag

SEQ ID NO: 126705 - RNA, 22 nt, synthetic construct
  source 1..22: mol_type = other RNA
cagtgacacctgaggggtctta

SEQ ID NO: 126706 - RNA, 22 nt, synthetic construct
  source 1..22: mol_type = other RNA
cagtgacagttctgtgaatttg

SEQ ID NO: 126707 - RNA, 22 nt, synthetic construct
  source 1..22: mol_type = other RNA
cagtgacatatgccggctgtta

SEQ ID NO: 126708 - RNA, 22 nt, synthetic construct
  source 1..22: mol_type = other RNA
cagtgaccacagtttgaaactt

SEQ ID NO: 126709 - RNA, 22 nt, synthetic construct
  source 1..22: mol_type = other RNA
cagtgaccagtgtgatgggggt

SEQ ID NO: 126710 - RNA, 22 nt, synthetic construct
  source 1..22: mol_type = other RNA
cagtgactttactgttctccag

SEQ ID NO: 126711 - RNA, 22 nt, synthetic construct
  source 1..22: mol_type = other RNA
cagtgagcatgctgcaactgag

SEQ ID NO: 126712 - RNA, 22 nt, synthetic construct
  source 1..22: mol_type = other RNA
cagtgagcccagagatcccacc

SEQ ID NO: 126713 - RNA, 22 nt, synthetic construct
  source 1..22: mol_type = other RNA
cagtgagctccagcctgggcga

SEQ ID NO: 126714 - RNA, 22 nt, synthetic construct
  source 1..22: mol_type = other RNA
cagtgaggacgctgatgacagt

SEQ ID NO: 126715 - RNA, 22 nt, synthetic construct
  source 1..22: mol_type = other RNA
cagtgagtagaagagtaatggt

SEQ ID NO: 126716 - RNA, 22 nt, synthetic construct
  source 1..22: mol_type = other RNA
cagtgagtagggaaggtgcccg

SEQ ID NO: 126717 - RNA, 22 nt, synthetic construct
  source 1..22: mol_type = other RNA
cagtgagtgatgaaaagagcac

SEQ ID NO: 126718 - RNA, 22 nt, synthetic construct
  source 1..22: mol_type = other RNA
cagtgagttcaaatgttaagcc

SEQ ID NO: 126719 - RNA, 22 nt, synthetic construct
  source 1..22: mol_type = other RNA
cagtgatggaggtggaactctg

SEQ ID NO: 126720 - RNA, 22 nt, synthetic construct
  source 1..22: mol_type = other RNA
cagtgattggatatttgcagta

SEQ ID NO: 126721 - RNA, 22 nt, synthetic construct
  source 1..22: mol_type = other RNA
cagtgcaaacctcctggttttg

SEQ ID NO: 126722 - RNA, 22 nt, synthetic construct
  source 1..22: mol_type = other RNA
cagtgcagcaagcagtaaatat

SEQ ID NO: 126723 - RNA, 22 nt, synthetic construct
  source 1..22: mol_type = other RNA
cagtgcataccaccacattcgg

SEQ ID NO: 126724 - RNA, 22 nt, synthetic construct
  source 1..22: mol_type = other RNA
cagtgccaacacatggggcatt

SEQ ID NO: 126725 - RNA, 22 nt, synthetic construct
  source 1..22: mol_type = other RNA
cagtgcccacctgacaagtagt

SEQ ID NO: 126726 - RNA, 22 nt, synthetic construct
  source 1..22: mol_type = other RNA
cagtgccttcagctatggtgtt

SEQ ID NO: 126727 - RNA, 22 nt, synthetic construct
  source 1..22: mol_type = other RNA
cagtgctccatagcttcctaag

SEQ ID NO: 126728 - RNA, 22 nt, synthetic construct
  source 1..22: mol_type = other RNA
cagtgctctcccccgaatcctt

SEQ ID NO: 126729 - RNA, 22 nt, synthetic construct
  source 1..22: mol_type = other RNA
cagtgctgaaagctagaagacc

SEQ ID NO: 126730 - RNA, 22 nt, synthetic construct
  source 1..22: mol_type = other RNA
cagtgctgctctgacgtttaaa

SEQ ID NO: 126731 - RNA, 22 nt, synthetic construct
  source 1..22: mol_type = other RNA
cagtgctgtgccagtgcaaacc

SEQ ID NO: 126732 - RNA, 22 nt, synthetic construct
  source 1..22: mol_type = other RNA
cagtgcttagcgctggaggtcg

SEQ ID NO: 126733 - RNA, 22 nt, synthetic construct
  source 1..22: mol_type = other RNA
cagtgcttgcagccttccctga

SEQ ID NO: 126734 - RNA, 22 nt, synthetic construct
  source 1..22: mol_type = other RNA
cagtggatgactaggctcctga

SEQ ID NO: 126735 - RNA, 22 nt, synthetic construct
  source 1..22: mol_type = other RNA
cagtggccagtgaccagtgtga

SEQ ID NO: 126736 - RNA, 22 nt, synthetic construct
  source 1..22: mol_type = other RNA
cagtggcccccctgaaaaatga

SEQ ID NO: 126737 - RNA, 22 nt, synthetic construct
  source 1..22: mol_type = other RNA
cagtggccctgttggcctggac

SEQ ID NO: 126738 - RNA, 22 nt, synthetic construct
  source 1..22: mol_type = other RNA
cagtggcgcagccatggctcac

SEQ ID NO: 126739 - RNA, 22 nt, synthetic construct
  source 1..22: mol_type = other RNA
cagtggcgtgtgcccaggctga

SEQ ID NO: 126740 - RNA, 22 nt, synthetic construct
  source 1..22: mol_type = other RNA
cagtggctagtgtgttgactga

SEQ ID NO: 126741 - RNA, 22 nt, synthetic construct
  source 1..22: mol_type = other RNA
cagtggcttcctaactggtctc

SEQ ID NO: 126742 - RNA, 22 nt, synthetic construct
  source 1..22: mol_type = other RNA
cagtgggaagtggagtgcgagt

SEQ ID NO: 126743 - RNA, 22 nt, synthetic construct
  source 1..22: mol_type = other RNA
cagtgggactggagaacagtaa

SEQ ID NO: 126744 - RNA, 22 nt, synthetic construct
  source 1..22: mol_type = other RNA
cagtgggtcagctagtgtgtct

SEQ ID NO: 126745 - RNA, 22 nt, synthetic construct
  source 1..22: mol_type = other RNA
cagtgggttcaattatgtggaa

SEQ ID NO: 126746 - RNA, 22 nt, synthetic construct
  source 1..22: mol_type = other RNA
cagtggtaaggactgaagtcct

SEQ ID NO: 126747 - RNA, 22 nt, synthetic construct
  source 1..22: mol_type = other RNA
cagtggtagttacacaagtgtt

SEQ ID NO: 126748 - RNA, 22 nt, synthetic construct
  source 1..22: mol_type = other RNA
cagtggtgcaatcacggctgat

SEQ ID NO: 126749 - RNA, 22 nt, synthetic construct
  source 1..22: mol_type = other RNA
cagtggtgcaatgataggtcac

SEQ ID NO: 126750 - RNA, 22 nt, synthetic construct
  source 1..22: mol_type = other RNA
cagtggtgcttttgctgcatcc

SEQ ID NO: 126751 - RNA, 22 nt, synthetic construct
  source 1..22: mol_type = other RNA
cagtggtgtggtcttgtctcaa

SEQ ID NO: 126752 - RNA, 22 nt, synthetic construct
  source 1..22: mol_type = other RNA
cagtggttaggaaaatacatga

SEQ ID NO: 126753 - RNA, 22 nt, synthetic construct
  source 1..22: mol_type = other RNA
cagtggttccatttgttttgtg

SEQ ID NO: 126754 - RNA, 22 nt, synthetic construct
  source 1..22: mol_type = other RNA
cagtggttctgcgtgttatttt

SEQ ID NO: 126755 - RNA, 22 nt, synthetic construct
  source 1..22: mol_type = other RNA
cagtggttggaaaacttttaac

SEQ ID NO: 126756 - RNA, 22 nt, synthetic construct
  source 1..22: mol_type = other RNA
cagtggttgtgcttcgaggtcg

SEQ ID NO: 126757 - RNA, 22 nt, synthetic construct
  source 1..22: mol_type = other RNA
cagtggttgtggaattaactcc

SEQ ID NO: 126758 - RNA, 22 nt, synthetic construct
  source 1..22: mol_type = other RNA
cagtgtactagtctccatacaa

SEQ ID NO: 126759 - RNA, 22 nt, synthetic construct
  source 1..22: mol_type = other RNA
cagtgtagtcagacacactagc

SEQ ID NO: 126760 - RNA, 22 nt, synthetic construct
  source 1..22: mol_type = other RNA
cagtgtccatctcccatcacta

SEQ ID NO: 126761 - RNA, 22 nt, synthetic construct
  source 1..22: mol_type = other RNA
cagtgtcctgaatgatttccct

SEQ ID NO: 126762 - RNA, 22 nt, synthetic construct
  source 1..22: mol_type = other RNA
cagtgtctgctacaggggcatt

SEQ ID NO: 126763 - RNA, 22 nt, synthetic construct
  source 1..22: mol_type = other RNA
cagtgtgaaagtattaaaagca

SEQ ID NO: 126764 - RNA, 22 nt, synthetic construct
  source 1..22: mol_type = other RNA
cagtgtgaataggaaagtgaca

SEQ ID NO: 126765 - RNA, 22 nt, synthetic construct
  source 1..22: mol_type = other RNA
cagtgtgatgggggtaagattg

SEQ ID NO: 126766 - RNA, 22 nt, synthetic construct
  source 1..22: mol_type = other RNA
cagtgtggttcatatttccctt

SEQ ID NO: 126767 - RNA, 22 nt, synthetic construct
  source 1..22: mol_type = other RNA
cagtgtgtccacacaatggtca

SEQ ID NO: 126768 - RNA, 22 nt, synthetic construct
  source 1..22: mol_type = other RNA
cagtgtgttctgccttgaggtg

SEQ ID NO: 126769 - RNA, 22 nt, synthetic construct
  source 1..22: mol_type = other RNA
cagtgtgtttgtttgctagagc

SEQ ID NO: 126770 - RNA, 22 nt, synthetic construct
  source 1..22: mol_type = other RNA
cagtgtgtttttgtaaatgaaa

SEQ ID NO: 126771 - RNA, 22 nt, synthetic construct
  source 1..22: mol_type = other RNA
cagtgttgagaaagcacataaa

SEQ ID NO: 126772 - RNA, 22 nt, synthetic construct
  source 1..22: mol_type = other RNA
cagtgtttacacacctgaaatt

SEQ ID NO: 126773 - RNA, 22 nt, synthetic construct
  source 1..22: mol_type = other RNA
cagtgtttagggacgaatgcat

SEQ ID NO: 126774 - RNA, 22 nt, synthetic construct
  source 1..22: mol_type = other RNA
cagtgtttcctagattccctct

SEQ ID NO: 126775 - RNA, 22 nt, synthetic construct
  source 1..22: mol_type = other RNA
cagtgtttggtttttatggaat

SEQ ID NO: 126776 - RNA, 22 nt, synthetic construct
  source 1..22: mol_type = other RNA
cagtgttttaaagcagggaggg

SEQ ID NO: 126777 - RNA, 22 nt, synthetic construct
  source 1..22: mol_type = other RNA
cagtgttttaggggggaaaaca

SEQ ID NO: 126778 - RNA, 22 nt, synthetic construct
  source 1..22: mol_type = other RNA
cagtgtttttgaattctgctta

SEQ ID NO: 126779 - RNA, 22 nt, synthetic construct
  source 1..22: mol_type = other RNA
cagttaaaagttttccaaccac

SEQ ID NO: 126780 - RNA, 22 nt, synthetic construct
  source 1..22: mol_type = other RNA
cagttaaaatgaaaatgttccc

SEQ ID NO: 126781 - RNA, 22 nt, synthetic construct
  source 1..22: mol_type = other RNA
cagttaaacccaacaaacaatt

SEQ ID NO: 126782 - RNA, 22 nt, synthetic construct
  source 1..22: mol_type = other RNA
cagttaacaatactgcattgtg

SEQ ID NO: 126783 - RNA, 22 nt, synthetic construct
  source 1..22: mol_type = other RNA
cagttaacagtgctgtgccagt

SEQ ID NO: 126784 - RNA, 22 nt, synthetic construct
  source 1..22: mol_type = other RNA
cagttaacgtatgaataaacta

SEQ ID NO: 126785 - RNA, 22 nt, synthetic construct
  source 1..22: mol_type = other RNA
cagttaacttattggaaaactc

SEQ ID NO: 126786 - RNA, 22 nt, synthetic construct
  source 1..22: mol_type = other RNA
cagttacagcatttcagccaaa

SEQ ID NO: 126787 - RNA, 22 nt, synthetic construct
  source 1..22: mol_type = other RNA
cagttaccaccaagaaaaagca

SEQ ID NO: 126788 - RNA, 22 nt, synthetic construct
  source 1..22: mol_type = other RNA
cagttactcctgagcaaggaag

SEQ ID NO: 126789 - RNA, 22 nt, synthetic construct
  source 1..22: mol_type = other RNA
cagttactctctctgcctcggc

SEQ ID NO: 126790 - RNA, 22 nt, synthetic construct
  source 1..22: mol_type = other RNA
cagttactttcctttttcaaat

SEQ ID NO: 126791 - RNA, 22 nt, synthetic construct
  source 1..22: mol_type = other RNA
cagttagcatgcctgacaaagt

SEQ ID NO: 126792 - RNA, 22 nt, synthetic construct
  source 1..22: mol_type = other RNA
cagttaggaagccactgcattc

SEQ ID NO: 126793 - RNA, 22 nt, synthetic construct
  source 1..22: mol_type = other RNA
cagttatcacacctaggcctat

SEQ ID NO: 126794 - RNA, 22 nt, synthetic construct
  source 1..22: mol_type = other RNA
cagttatcaccatgtgcttatc

SEQ ID NO: 126795 - RNA, 22 nt, synthetic construct
  source 1..22: mol_type = other RNA
cagttatctctgccctcattga

SEQ ID NO: 126796 - RNA, 22 nt, synthetic construct
  source 1..22: mol_type = other RNA
cagttatgtcagtcaacacact

SEQ ID NO: 126797 - RNA, 22 nt, synthetic construct
  source 1..22: mol_type = other RNA
cagttattaagagtgtgctgac

SEQ ID NO: 126798 - RNA, 22 nt, synthetic construct
  source 1..22: mol_type = other RNA
cagttattcttcagcaaggacc

SEQ ID NO: 126799 - RNA, 22 nt, synthetic construct
  source 1..22: mol_type = other RNA
cagttcaagcaccacttcgaga

SEQ ID NO: 126800 - RNA, 22 nt, synthetic construct
  source 1..22: mol_type = other RNA
cagttcaaggtgttagcaggac

SEQ ID NO: 126801 - RNA, 22 nt, synthetic construct
  source 1..22: mol_type = other RNA
cagttcaatactactgcaaata

SEQ ID NO: 126802 - RNA, 22 nt, synthetic construct
  source 1..22: mol_type = other RNA
cagttcaccagtttctaattag

SEQ ID NO: 126803 - RNA, 22 nt, synthetic construct
  source 1..22: mol_type = other RNA
cagttcagcctgcagaaggaga

SEQ ID NO: 126804 - RNA, 22 nt, synthetic construct
  source 1..22: mol_type = other RNA
cagttctagttctaataaacgc

SEQ ID NO: 126805 - RNA, 22 nt, synthetic construct
  source 1..22: mol_type = other RNA
cagttctatttctttccattca

SEQ ID NO: 126806 - RNA, 22 nt, synthetic construct
  source 1..22: mol_type = other RNA
cagttctctgccccgggcctgg

SEQ ID NO: 126807 - RNA, 22 nt, synthetic construct
  source 1..22: mol_type = other RNA
cagttctgcgcaattgcagcca

SEQ ID NO: 126808 - RNA, 22 nt, synthetic construct
  source 1..22: mol_type = other RNA
cagttctgtacccttacgcgtg

SEQ ID NO: 126809 - RNA, 22 nt, synthetic construct
  source 1..22: mol_type = other RNA
cagttctgtgaatttgattatg

SEQ ID NO: 126810 - RNA, 22 nt, synthetic construct
  source 1..22: mol_type = other RNA
cagttcttaagttaaaacttgt

SEQ ID NO: 126811 - RNA, 22 nt, synthetic construct
  source 1..22: mol_type = other RNA
cagttctttcggatatttacta

SEQ ID NO: 126812 - RNA, 22 nt, synthetic construct
  source 1..22: mol_type = other RNA
cagttgaaaagtatggttgaag

SEQ ID NO: 126813 - RNA, 22 nt, synthetic construct
  source 1..22: mol_type = other RNA
cagttgacatcctttaatttgg

SEQ ID NO: 126814 - RNA, 22 nt, synthetic construct
  source 1..22: mol_type = other RNA
cagttgagagagaattctaaat

SEQ ID NO: 126815 - RNA, 22 nt, synthetic construct
  source 1..22: mol_type = other RNA
cagttgagttttcaacctttgt

SEQ ID NO: 126816 - RNA, 22 nt, synthetic construct
  source 1..22: mol_type = other RNA
cagttgatgcaatttgttttcc

SEQ ID NO: 126817 - RNA, 22 nt, synthetic construct
  source 1..22: mol_type = other RNA
cagttgcagcatgctcactgtc

SEQ ID NO: 126818 - RNA, 22 nt, synthetic construct
  source 1..22: mol_type = other RNA
cagttgcatgaatttgttttct

SEQ ID NO: 126819 - RNA, 22 nt, synthetic construct
  source 1..22: mol_type = other RNA
cagttgctattcaacaggtata

SEQ ID NO: 126820 - RNA, 22 nt, synthetic construct
  source 1..22: mol_type = other RNA
cagttgcttactctaatgggga

SEQ ID NO: 126821 - RNA, 22 nt, synthetic construct
  source 1..22: mol_type = other RNA
cagttggaactcttgcggtctt

SEQ ID NO: 126822 - RNA, 22 nt, synthetic construct
  source 1..22: mol_type = other RNA
cagttggattatatgttctaaa

SEQ ID NO: 126823 - RNA, 22 nt, synthetic construct
  source 1..22: mol_type = other RNA
cagttggccttgaggtgagaca

SEQ ID NO: 126824 - RNA, 22 nt, synthetic construct
  source 1..22: mol_type = other RNA
cagttggggactcttatggcta

SEQ ID NO: 126825 - RNA, 22 nt, synthetic construct
  source 1..22: mol_type = other RNA
cagttggtgaagagagcctgtg

SEQ ID NO: 126826 - RNA, 22 nt, synthetic construct
  source 1..22: mol_type = other RNA
cagttgtaatttttaaaagagc

SEQ ID NO: 126827 - RNA, 22 nt, synthetic construct
  source 1..22: mol_type = other RNA
cagttgtatgccaaaaaattgg

SEQ ID NO: 126828 - RNA, 22 nt, synthetic construct
  source 1..22: mol_type = other RNA
cagttgtcagaattagaaagct

SEQ ID NO: 126829 - RNA, 22 nt, synthetic construct
  source 1..22: mol_type = other RNA
cagttgtttacttgggtataaa

SEQ ID NO: 126830 - RNA, 22 nt, synthetic construct
  source 1..22: mol_type = other RNA
cagtttaaaagtaaattcgcat

SEQ ID NO: 126831 - RNA, 22 nt, synthetic construct
  source 1..22: mol_type = other RNA
cagtttaaagctttgtgactgt

SEQ ID NO: 126832 - RNA, 22 nt, synthetic construct
  source 1..22: mol_type = other RNA
cagtttacacgccttcgcgggc

SEQ ID NO: 126833 - RNA, 22 nt, synthetic construct
  source 1..22: mol_type = other RNA
cagtttagcaatccaaggacag

SEQ ID NO: 126834 - RNA, 22 nt, synthetic construct
  source 1..22: mol_type = other RNA
cagtttagtaaatctttggtga

SEQ ID NO: 126835 - RNA, 22 nt, synthetic construct
  source 1..22: mol_type = other RNA
cagtttatatgcctagatgatt

SEQ ID NO: 126836 - RNA, 22 nt, synthetic construct
  source 1..22: mol_type = other RNA
cagtttatgggtcaaccactaa

SEQ ID NO: 126837 - RNA, 22 nt, synthetic construct
  source 1..22: mol_type = other RNA
cagtttcaaaagctccccggat

SEQ ID NO: 126838 - RNA, 22 nt, synthetic construct
  source 1..22: mol_type = other RNA
cagtttcacttcttagtaaata

SEQ ID NO: 126839 - RNA, 22 nt, synthetic construct
  source 1..22: mol_type = other RNA
cagtttccctctgagagaagtc

SEQ ID NO: 126840 - RNA, 22 nt, synthetic construct
  source 1..22: mol_type = other RNA
cagtttctctgctttttcttgg

SEQ ID NO: 126841 - RNA, 22 nt, synthetic construct
  source 1..22: mol_type = other RNA
cagtttctgatttatctttctt

SEQ ID NO: 126842 - RNA, 22 nt, synthetic construct
  source 1..22: mol_type = other RNA
cagtttgaaactttaagagtat

SEQ ID NO: 126843 - RNA, 22 nt, synthetic construct
  source 1..22: mol_type = other RNA
cagtttgagaagccacacagta

SEQ ID NO: 126844 - RNA, 22 nt, synthetic construct
  source 1..22: mol_type = other RNA
cagtttgctagtattttgttga

SEQ ID NO: 126845 - RNA, 22 nt, synthetic construct
  source 1..22: mol_type = other RNA
cagtttggcaatttctcaaaaa

SEQ ID NO: 126846 - RNA, 22 nt, synthetic construct
  source 1..22: mol_type = other RNA
cagtttgggtgacagagagaga

SEQ ID NO: 126847 - RNA, 22 nt, synthetic construct
  source 1..22: mol_type = other RNA
cagtttgtgttttcactctcaa

SEQ ID NO: 126848 - RNA, 22 nt, synthetic construct
  source 1..22: mol_type = other RNA
cagtttgttctgctgttgatgg

SEQ ID NO: 126849 - RNA, 22 nt, synthetic construct
  source 1..22: mol_type = other RNA
cagttttatcaattagttcctc

SEQ ID NO: 126850 - RNA, 22 nt, synthetic construct
  source 1..22: mol_type = other RNA
cagttttctggaaactcaaacc

SEQ ID NO: 126851 - RNA, 22 nt, synthetic construct
  source 1..22: mol_type = other RNA
cagttttgaccaaaacaaaaaa

SEQ ID NO: 126852 - RNA, 22 nt, synthetic construct
  source 1..22: mol_type = other RNA
cagttttgagtggcatcatact

SEQ ID NO: 126853 - RNA, 22 nt, synthetic construct
  source 1..22: mol_type = other RNA
cagttttgtatatggtttaagg

SEQ ID NO: 126854 - RNA, 22 nt, synthetic construct
  source 1..22: mol_type = other RNA
cagttttgttgaatcttaacat

SEQ ID NO: 126855 - RNA, 22 nt, synthetic construct
  source 1..22: mol_type = other RNA
cagtttttacatgtagttttcc

SEQ ID NO: 126856 - RNA, 22 nt, synthetic construct
  source 1..22: mol_type = other RNA
cataaaaaaggaatctgggccg

SEQ ID NO: 126857 - RNA, 22 nt, synthetic construct
  source 1..22: mol_type = other RNA
cataaaaaccaaacactggaaa

SEQ ID NO: 126858 - RNA, 22 nt, synthetic construct
  source 1..22: mol_type = other RNA
cataaaaagcgttggagacagc

SEQ ID NO: 126859 - RNA, 22 nt, synthetic construct
  source 1..22: mol_type = other RNA
cataaaagcgtactgtgattac

SEQ ID NO: 126860 - RNA, 22 nt, synthetic construct
  source 1..22: mol_type = other RNA
cataaaaggatatgggccaaag

SEQ ID NO: 126861 - RNA, 22 nt, synthetic construct
  source 1..22: mol_type = other RNA
cataaaatatgtccttttgagt

SEQ ID NO: 126862 - RNA, 22 nt, synthetic construct
  source 1..22: mol_type = other RNA
cataaaatgatggcaacaatca

SEQ ID NO: 126863 - RNA, 22 nt, synthetic construct
  source 1..22: mol_type = other RNA
cataaaatggaatattgttcag

SEQ ID NO: 126864 - RNA, 22 nt, synthetic construct
  source 1..22: mol_type = other RNA
cataaacacagaacactaaagg

SEQ ID NO: 126865 - RNA, 22 nt, synthetic construct
  source 1..22: mol_type = other RNA
cataaacgacagcaggaaaagc

SEQ ID NO: 126866 - RNA, 22 nt, synthetic construct
  source 1..22: mol_type = other RNA
cataaactgaacatttatacag

SEQ ID NO: 126867 - RNA, 22 nt, synthetic construct
  source 1..22: mol_type = other RNA
cataaagacagacatttggaat

SEQ ID NO: 126868 - RNA, 22 nt, synthetic construct
  source 1..22: mol_type = other RNA
cataaagccggattcctttcaa

SEQ ID NO: 126869 - RNA, 22 nt, synthetic construct
  source 1..22: mol_type = other RNA
cataaagtcagaggagcagtta

SEQ ID NO: 126870 - RNA, 22 nt, synthetic construct
  source 1..22: mol_type = other RNA
cataaagtcttccattttagat

SEQ ID NO: 126871 - RNA, 22 nt, synthetic construct
  source 1..22: mol_type = other RNA
cataaagtcttgctggaagttg

SEQ ID NO: 126872 - RNA, 22 nt, synthetic construct
  source 1..22: mol_type = other RNA
cataaatagggtgctactcaaa

SEQ ID NO: 126873 - RNA, 22 nt, synthetic construct
  source 1..22: mol_type = other RNA
cataaatcaaggtacaatacac

SEQ ID NO: 126874 - RNA, 22 nt, synthetic construct
  source 1..22: mol_type = other RNA
cataaatcacaggaaagatgtc

SEQ ID NO: 126875 - RNA, 22 nt, synthetic construct
  source 1..22: mol_type = other RNA
cataaatttgccacattttacc

SEQ ID NO: 126876 - RNA, 22 nt, synthetic construct
  source 1..22: mol_type = other RNA
cataacaaagctctgatgcttt

SEQ ID NO: 126877 - RNA, 22 nt, synthetic construct
  source 1..22: mol_type = other RNA
cataacagtattgtcttctaac

SEQ ID NO: 126878 - RNA, 22 nt, synthetic construct
  source 1..22: mol_type = other RNA
cataacatctatgaagtaattg

SEQ ID NO: 126879 - RNA, 22 nt, synthetic construct
  source 1..22: mol_type = other RNA
cataacattatatttcacaacg

SEQ ID NO: 126880 - RNA, 22 nt, synthetic construct
  source 1..22: mol_type = other RNA
cataactcgtaatgcgatgatc

SEQ ID NO: 126881 - RNA, 22 nt, synthetic construct
  source 1..22: mol_type = other RNA
cataactgtaaagtaatcaagt

SEQ ID NO: 126882 - RNA, 22 nt, synthetic construct
  source 1..22: mol_type = other RNA
cataacttcccagacagggaat

SEQ ID NO: 126883 - RNA, 22 nt, synthetic construct
  source 1..22: mol_type = other RNA
cataagaactcctggtctccca

SEQ ID NO: 126884 - RNA, 22 nt, synthetic construct
  source 1..22: mol_type = other RNA
cataagacccctcaggtgtcac

SEQ ID NO: 126885 - RNA, 22 nt, synthetic construct
  source 1..22: mol_type = other RNA
cataagagtccccaactgcaaa

SEQ ID NO: 126886 - RNA, 22 nt, synthetic construct
  source 1..22: mol_type = other RNA
cataagatctgtctttggccca

SEQ ID NO: 126887 - RNA, 22 nt, synthetic construct
  source 1..22: mol_type = other RNA
cataagccaccgcactcagcct

SEQ ID NO: 126888 - RNA, 22 nt, synthetic construct
  source 1..22: mol_type = other RNA
cataagggggaatctactcttt

SEQ ID NO: 126889 - RNA, 22 nt, synthetic construct
  source 1..22: mol_type = other RNA
cataagggtctgttttacatgt

SEQ ID NO: 126890 - RNA, 22 nt, synthetic construct
  source 1..22: mol_type = other RNA
cataaggtatatttctgtaaac

SEQ ID NO: 126891 - RNA, 22 nt, synthetic construct
  source 1..22: mol_type = other RNA
cataagtccctaacagtctcgt

SEQ ID NO: 126892 - RNA, 22 nt, synthetic construct
  source 1..22: mol_type = other RNA
cataagttctagagatttgctg

SEQ ID NO: 126893 - RNA, 22 nt, synthetic construct
  source 1..22: mol_type = other RNA
cataatagtctcacgatacttt

SEQ ID NO: 126894 - RNA, 22 nt, synthetic construct
  source 1..22: mol_type = other RNA
cataatcaaattcacagaactg

SEQ ID NO: 126895 - RNA, 22 nt, synthetic construct
  source 1..22: mol_type = other RNA
cataatccttagattacaaaag

SEQ ID NO: 126896 - RNA, 22 nt, synthetic construct
  source 1..22: mol_type = other RNA
cataatctttggtgctgataaa

SEQ ID NO: 126897 - RNA, 22 nt, synthetic construct
  source 1..22: mol_type = other RNA
cataatgagtaacatgtggaac

SEQ ID NO: 126898 - RNA, 22 nt, synthetic construct
  source 1..22: mol_type = other RNA
cataattgaacccactgagcat

SEQ ID NO: 126899 - RNA, 22 nt, synthetic construct
  source 1..22: mol_type = other RNA
cataattggttaaacttggtct

SEQ ID NO: 126900 - RNA, 22 nt, synthetic construct
  source 1..22: mol_type = other RNA
catacaaaccaaaaaatgtggc

SEQ ID NO: 126901 - RNA, 22 nt, synthetic construct
  source 1..22: mol_type = other RNA
catacaactgctcataatagtc

SEQ ID NO: 126902 - RNA, 22 nt, synthetic construct
  source 1..22: mol_type = other RNA
catacaaggagacctactaaaa

SEQ ID NO: 126903 - RNA, 22 nt, synthetic construct
  source 1..22: mol_type = other RNA
catacaatagtttagttactca

SEQ ID NO: 126904 - RNA, 22 nt, synthetic construct
  source 1..22: mol_type = other RNA
catacacagggaaaactacatg

SEQ ID NO: 126905 - RNA, 22 nt, synthetic construct
  source 1..22: mol_type = other RNA
catacacatcagattttgaaga

SEQ ID NO: 126906 - RNA, 22 nt, synthetic construct
  source 1..22: mol_type = other RNA
catacacatccagaagtcactt

SEQ ID NO: 126907 - RNA, 22 nt, synthetic construct
  source 1..22: mol_type = other RNA
catacacctggatcaagtggga

SEQ ID NO: 126908 - RNA, 22 nt, synthetic construct
  source 1..22: mol_type = other RNA
catacacgagtgtgtttcgcaa

SEQ ID NO: 126909 - RNA, 22 nt, synthetic construct
  source 1..22: mol_type = other RNA
catacactcatttcctttcagt

SEQ ID NO: 126910 - RNA, 22 nt, synthetic construct
  source 1..22: mol_type = other RNA
catacaggagttccgatttctc

SEQ ID NO: 126911 - RNA, 22 nt, synthetic construct
  source 1..22: mol_type = other RNA
catacagtgccttcagctatgg

SEQ ID NO: 126912 - RNA, 22 nt, synthetic construct
  source 1..22: mol_type = other RNA
catacatgagaaatgttaagat

SEQ ID NO: 126913 - RNA, 22 nt, synthetic construct
  source 1..22: mol_type = other RNA
catacatgttcagttataaaag

SEQ ID NO: 126914 - RNA, 22 nt, synthetic construct
  source 1..22: mol_type = other RNA
cataccaaaacccttgggatgc

SEQ ID NO: 126915 - RNA, 22 nt, synthetic construct
  source 1..22: mol_type = other RNA
cataccaagcccggcacggtgg

SEQ ID NO: 126916 - RNA, 22 nt, synthetic construct
  source 1..22: mol_type = other RNA
cataccaccacattcggccaag

SEQ ID NO: 126917 - RNA, 22 nt, synthetic construct
  source 1..22: mol_type = other RNA
cataccacctgtcagaaacacc

SEQ ID NO: 126918 - RNA, 22 nt, synthetic construct
  source 1..22: mol_type = other RNA
cataccaggttttggtaatggg

SEQ ID NO: 126919 - RNA, 22 nt, synthetic construct
  source 1..22: mol_type = other RNA
cataccccaaccctacctaggg

SEQ ID NO: 126920 - RNA, 22 nt, synthetic construct
  source 1..22: mol_type = other RNA
cataccccctggaaataagttt

SEQ ID NO: 126921 - RNA, 22 nt, synthetic construct
  source 1..22: mol_type = other RNA
cataccgacggctcaggcctgt

SEQ ID NO: 126922 - RNA, 22 nt, synthetic construct
  source 1..22: mol_type = other RNA
cataccgagtaatgggatggct

SEQ ID NO: 126923 - RNA, 22 nt, synthetic construct
  source 1..22: mol_type = other RNA
catacctggtccttaaatttct

SEQ ID NO: 126924 - RNA, 22 nt, synthetic construct
  source 1..22: mol_type = other RNA
catacgaaagcctttatttttt

SEQ ID NO: 126925 - RNA, 22 nt, synthetic construct
  source 1..22: mol_type = other RNA
catacgtcgtcccccatcccct

SEQ ID NO: 126926 - RNA, 22 nt, synthetic construct
  source 1..22: mol_type = other RNA
catacgttaactgtattgcaaa

SEQ ID NO: 126927 - RNA, 22 nt, synthetic construct
  source 1..22: mol_type = other RNA
catactattttctatagtggct

SEQ ID NO: 126928 - RNA, 22 nt, synthetic construct
  source 1..22: mol_type = other RNA
catactcagccccctcgaagag

SEQ ID NO: 126929 - RNA, 22 nt, synthetic construct
  source 1..22: mol_type = other RNA
catactgaaagacagacctcta

SEQ ID NO: 126930 - RNA, 22 nt, synthetic construct
  source 1..22: mol_type = other RNA
catactgaaggcatagggcctt

SEQ ID NO: 126931 - RNA, 22 nt, synthetic construct
  source 1..22: mol_type = other RNA
catactgcactctcaaaattaa

SEQ ID NO: 126932 - RNA, 22 nt, synthetic construct
  source 1..22: mol_type = other RNA
catactgcagcacttttaaggc

SEQ ID NO: 126933 - RNA, 22 nt, synthetic construct
  source 1..22: mol_type = other RNA
catactgcatattgaagccagc

SEQ ID NO: 126934 - RNA, 22 nt, synthetic construct
  source 1..22: mol_type = other RNA
catactggaaggactcacagct

SEQ ID NO: 126935 - RNA, 22 nt, synthetic construct
  source 1..22: mol_type = other RNA
catactgtcacaggctttccta

SEQ ID NO: 126936 - RNA, 22 nt, synthetic construct
  source 1..22: mol_type = other RNA
catactgtgatgattttagaag

SEQ ID NO: 126937 - RNA, 22 nt, synthetic construct
  source 1..22: mol_type = other RNA
catactgtgcagtggatgacta

SEQ ID NO: 126938 - RNA, 22 nt, synthetic construct
  source 1..22: mol_type = other RNA
catactgtggatatcttttaaa

SEQ ID NO: 126939 - RNA, 22 nt, synthetic construct
  source 1..22: mol_type = other RNA
catacttagctaatttcagaga

SEQ ID NO: 126940 - RNA, 22 nt, synthetic construct
  source 1..22: mol_type = other RNA
catacttcaaagggtcactatt

SEQ ID NO: 126941 - RNA, 22 nt, synthetic construct
  source 1..22: mol_type = other RNA
catacttgctttattacttcag

SEQ ID NO: 126942 - RNA, 22 nt, synthetic construct
  source 1..22: mol_type = other RNA
catactttggaaggtaggaggg

SEQ ID NO: 126943 - RNA, 22 nt, synthetic construct
  source 1..22: mol_type = other RNA
catactttgtcaggcatgctaa

SEQ ID NO: 126944 - RNA, 22 nt, synthetic construct
  source 1..22: mol_type = other RNA
catacttttcaactgaacaacg

SEQ ID NO: 126945 - RNA, 22 nt, synthetic construct
  source 1..22: mol_type = other RNA
catagaagcgctcttcaagcat

SEQ ID NO: 126946 - RNA, 22 nt, synthetic construct
  source 1..22: mol_type = other RNA
catagacctgaatgactgttgc

SEQ ID NO: 126947 - RNA, 22 nt, synthetic construct
  source 1..22: mol_type = other RNA
catagactttagagtcagttgt

SEQ ID NO: 126948 - RNA, 22 nt, synthetic construct
  source 1..22: mol_type = other RNA
catagagatcttgtgtatcttt

SEQ ID NO: 126949 - RNA, 22 nt, synthetic construct
  source 1..22: mol_type = other RNA
catagagggagcatcttcccat

SEQ ID NO: 126950 - RNA, 22 nt, synthetic construct
  source 1..22: mol_type = other RNA
catagagtaccaggtcagccag

SEQ ID NO: 126951 - RNA, 22 nt, synthetic construct
  source 1..22: mol_type = other RNA
catagatcacaaggactggctt

SEQ ID NO: 126952 - RNA, 22 nt, synthetic construct
  source 1..22: mol_type = other RNA
catagatcaccaggggctgggg

SEQ ID NO: 126953 - RNA, 22 nt, synthetic construct
  source 1..22: mol_type = other RNA
catagatgaaactaaatgtgag

SEQ ID NO: 126954 - RNA, 22 nt, synthetic construct
  source 1..22: mol_type = other RNA
catagatgttatgccccctctt

SEQ ID NO: 126955 - RNA, 22 nt, synthetic construct
  source 1..22: mol_type = other RNA
catagcaaggaagcagaatgtc

SEQ ID NO: 126956 - RNA, 22 nt, synthetic construct
  source 1..22: mol_type = other RNA
catagcagaaccttagaaattt

SEQ ID NO: 126957 - RNA, 22 nt, synthetic construct
  source 1..22: mol_type = other RNA
catagcagaatggccctgcgat

SEQ ID NO: 126958 - RNA, 22 nt, synthetic construct
  source 1..22: mol_type = other RNA
catagcagcattgtttacagta

SEQ ID NO: 126959 - RNA, 22 nt, synthetic construct
  source 1..22: mol_type = other RNA
catagcagggtcatgcacacgc

SEQ ID NO: 126960 - RNA, 22 nt, synthetic construct
  source 1..22: mol_type = other RNA
catagcagtgggaagtggagtg

SEQ ID NO: 126961 - RNA, 22 nt, synthetic construct
  source 1..22: mol_type = other RNA
catagctcactagagcttcaac

SEQ ID NO: 126962 - RNA, 22 nt, synthetic construct
  source 1..22: mol_type = other RNA
catagctgaaggcactgtatgg

SEQ ID NO: 126963 - RNA, 22 nt, synthetic construct
  source 1..22: mol_type = other RNA
catagcttcctaagaaagggtg

SEQ ID NO: 126964 - RNA, 22 nt, synthetic construct
  source 1..22: mol_type = other RNA
catagcttgaaccagggaggcg

SEQ ID NO: 126965 - RNA, 22 nt, synthetic construct
  source 1..22: mol_type = other RNA
cataggaaatacttgatctaca

SEQ ID NO: 126966 - RNA, 22 nt, synthetic construct
  source 1..22: mol_type = other RNA
cataggatagttaaacatgtaa

SEQ ID NO: 126967 - RNA, 22 nt, synthetic construct
  source 1..22: mol_type = other RNA
cataggcacgcgcccccatgcc

SEQ ID NO: 126968 - RNA, 22 nt, synthetic construct
  source 1..22: mol_type = other RNA
cataggcatctctcccttcctg

SEQ ID NO: 126969 - RNA, 22 nt, synthetic construct
  source 1..22: mol_type = other RNA
cataggcttagtacagccatca

SEQ ID NO: 126970 - RNA, 22 nt, synthetic construct
  source 1..22: mol_type = other RNA
catagggatgttgcctactagc

SEQ ID NO: 126971 - RNA, 22 nt, synthetic construct
  source 1..22: mol_type = other RNA
catagggccttctactttaata

SEQ ID NO: 126972 - RNA, 22 nt, synthetic construct
  source 1..22: mol_type = other RNA
cataggtaatactctagtggtg

SEQ ID NO: 126973 - RNA, 22 nt, synthetic construct
  source 1..22: mol_type = other RNA
catagtactccattatatgaat

SEQ ID NO: 126974 - RNA, 22 nt, synthetic construct
  source 1..22: mol_type = other RNA
catagtagctgttgaattgttg

SEQ ID NO: 126975 - RNA, 22 nt, synthetic construct
  source 1..22: mol_type = other RNA
catagtattccatggtatgtgc

SEQ ID NO: 126976 - RNA, 22 nt, synthetic construct
  source 1..22: mol_type = other RNA
catagtcatcattattagcaaa

SEQ ID NO: 126977 - RNA, 22 nt, synthetic construct
  source 1..22: mol_type = other RNA
catagtccactttccatcttag

SEQ ID NO: 126978 - RNA, 22 nt, synthetic construct
  source 1..22: mol_type = other RNA
catagtcttccaaaatattgaa

SEQ ID NO: 126979 - RNA, 22 nt, synthetic construct
  source 1..22: mol_type = other RNA
catagtgctcttctgatcacag

SEQ ID NO: 126980 - RNA, 22 nt, synthetic construct
  source 1..22: mol_type = other RNA
catagtgttaattatttgtgca

SEQ ID NO: 126981 - RNA, 22 nt, synthetic construct
  source 1..22: mol_type = other RNA
catagttaatgtgtgaagaagg

SEQ ID NO: 126982 - RNA, 22 nt, synthetic construct
  source 1..22: mol_type = other RNA
catagtttgagtatttcatgta

SEQ ID NO: 126983 - RNA, 22 nt, synthetic construct
  source 1..22: mol_type = other RNA
catataaactggaaggaaataa

SEQ ID NO: 126984 - RNA, 22 nt, synthetic construct
  source 1..22: mol_type = other RNA
catataaatcaatctgtttcct

SEQ ID NO: 126985 - RNA, 22 nt, synthetic construct
  source 1..22: mol_type = other RNA
catataaggggaatcatgcagt

SEQ ID NO: 126986 - RNA, 22 nt, synthetic construct
  source 1..22: mol_type = other RNA
catataagtggaatcattccgt

SEQ ID NO: 126987 - RNA, 22 nt, synthetic construct
  source 1..22: mol_type = other RNA
catataatccaactgcagtctg

SEQ ID NO: 126988 - RNA, 22 nt, synthetic construct
  source 1..22: mol_type = other RNA
catataatctaaccctcctcct

SEQ ID NO: 126989 - RNA, 22 nt, synthetic construct
  source 1..22: mol_type = other RNA
catataatggagtactatgcag

SEQ ID NO: 126990 - RNA, 22 nt, synthetic construct
  source 1..22: mol_type = other RNA
catatacacaaaaagatctgtg

SEQ ID NO: 126991 - RNA, 22 nt, synthetic construct
  source 1..22: mol_type = other RNA
catatacatgacatggttttcc

SEQ ID NO: 126992 - RNA, 22 nt, synthetic construct
  source 1..22: mol_type = other RNA
catatacgtatttatcatgtct

SEQ ID NO: 126993 - RNA, 22 nt, synthetic construct
  source 1..22: mol_type = other RNA
catatagaagtaaatcccggcc

SEQ ID NO: 126994 - RNA, 22 nt, synthetic construct
  source 1..22: mol_type = other RNA
catatagtaattctgtgcttaa

SEQ ID NO: 126995 - RNA, 22 nt, synthetic construct
  source 1..22: mol_type = other RNA
catatataccacattttgttca

SEQ ID NO: 126996 - RNA, 22 nt, synthetic construct
  source 1..22: mol_type = other RNA
catatatactctgagacaggat

SEQ ID NO: 126997 - RNA, 22 nt, synthetic construct
  source 1..22: mol_type = other RNA
catatatctgtctgggataatg

SEQ ID NO: 126998 - RNA, 22 nt, synthetic construct
  source 1..22: mol_type = other RNA
catatcacattaacagaatgaa

SEQ ID NO: 126999 - RNA, 22 nt, synthetic construct
  source 1..22: mol_type = other RNA
catatcagggatcacagataca

SEQ ID NO: 127000 - RNA, 22 nt, synthetic construct
  source 1..22: mol_type = other RNA
catatcagttatcacacctagg

SEQ ID NO: 127001 - RNA, 22 nt, synthetic construct
  source 1..22: mol_type = other RNA
catatcatcatcttatacttgg

SEQ ID NO: 127002 - RNA, 22 nt, synthetic construct
  source 1..22: mol_type = other RNA
catatccttctacatcccccca

SEQ ID NO: 127003 - RNA, 22 nt, synthetic construct
  source 1..22: mol_type = other RNA
catatccttttatgtgcagtct

SEQ ID NO: 127004 - RNA, 22 nt, synthetic construct
  source 1..22: mol_type = other RNA
catatctaattaacatccagaa

SEQ ID NO: 127005 - RNA, 22 nt, synthetic construct
  source 1..22: mol_type = other RNA
catatctacatgtacgccaatt

SEQ ID NO: 127006 - RNA, 22 nt, synthetic construct
  source 1..22: mol_type = other RNA
catatctgattttgtgtcttct

SEQ ID NO: 127007 - RNA, 22 nt, synthetic construct
  source 1..22: mol_type = other RNA
catatctttaggtgttttttcc

SEQ ID NO: 127008 - RNA, 22 nt, synthetic construct
  source 1..22: mol_type = other RNA
catatctttgcttataacaaga

SEQ ID NO: 127009 - RNA, 22 nt, synthetic construct
  source 1..22: mol_type = other RNA
catatgaaatcacacaatcttg

SEQ ID NO: 127010 - RNA, 22 nt, synthetic construct
  source 1..22: mol_type = other RNA
catatgatctatcaatctcaca

SEQ ID NO: 127011 - RNA, 22 nt, synthetic construct
  source 1..22: mol_type = other RNA
catatgcaggaccaactttaag

SEQ ID NO: 127012 - RNA, 22 nt, synthetic construct
  source 1..22: mol_type = other RNA
catatgcatgttatttggggat

SEQ ID NO: 127013 - RNA, 22 nt, synthetic construct
  source 1..22: mol_type = other RNA
catatgccggctgttaggtatt

SEQ ID NO: 127014 - RNA, 22 nt, synthetic construct
  source 1..22: mol_type = other RNA
catatgctttgagctacaaact

SEQ ID NO: 127015 - RNA, 22 nt, synthetic construct
  source 1..22: mol_type = other RNA
catatggaggcaatgttgattt

SEQ ID NO: 127016 - RNA, 22 nt, synthetic construct
  source 1..22: mol_type = other RNA
catatggcaattccataaatgt

SEQ ID NO: 127017 - RNA, 22 nt, synthetic construct
  source 1..22: mol_type = other RNA
catatgggatgcttaaagcgct

SEQ ID NO: 127018 - RNA, 22 nt, synthetic construct
  source 1..22: mol_type = other RNA
catatggttaatagtgaccctt

SEQ ID NO: 127019 - RNA, 22 nt, synthetic construct
  source 1..22: mol_type = other RNA
catatggtttacaatggttcat

SEQ ID NO: 127020 - RNA, 22 nt, synthetic construct
  source 1..22: mol_type = other RNA
catatgtagggcaccgtgacag

SEQ ID NO: 127021 - RNA, 22 nt, synthetic construct
  source 1..22: mol_type = other RNA
catatgtcactgtaagaataat

SEQ ID NO: 127022 - RNA, 22 nt, synthetic construct
  source 1..22: mol_type = other RNA
catatgtcagatggtaaattgg

SEQ ID NO: 127023 - RNA, 22 nt, synthetic construct
  source 1..22: mol_type = other RNA
catatgtttgtaacttgttcat

SEQ ID NO: 127024 - RNA, 22 nt, synthetic construct
  source 1..22: mol_type = other RNA
catatgttttgcttcgaagctt

SEQ ID NO: 127025 - RNA, 22 nt, synthetic construct
  source 1..22: mol_type = other RNA
catattagagtgaaaagaaaca

SEQ ID NO: 127026 - RNA, 22 nt, synthetic construct
  source 1..22: mol_type = other RNA
catattagctgtctggattgat

SEQ ID NO: 127027 - RNA, 22 nt, synthetic construct
  source 1..22: mol_type = other RNA
catattagtctgtagcttcacg

SEQ ID NO: 127028 - RNA, 22 nt, synthetic construct
  source 1..22: mol_type = other RNA
catattattttttcccgctaca

SEQ ID NO: 127029 - RNA, 22 nt, synthetic construct
  source 1..22: mol_type = other RNA
catattgaagccagcacctaac

SEQ ID NO: 127030 - RNA, 22 nt, synthetic construct
  source 1..22: mol_type = other RNA
catattgaataatttccaggtc

SEQ ID NO: 127031 - RNA, 22 nt, synthetic construct
  source 1..22: mol_type = other RNA
catattggattaagggcccacc

SEQ ID NO: 127032 - RNA, 22 nt, synthetic construct
  source 1..22: mol_type = other RNA
catattggccaggctggttcca

SEQ ID NO: 127033 - RNA, 22 nt, synthetic construct
  source 1..22: mol_type = other RNA
catatttatcaacacatagtgt

SEQ ID NO: 127034 - RNA, 22 nt, synthetic construct
  source 1..22: mol_type = other RNA
catatttatttccttaagccat

SEQ ID NO: 127035 - RNA, 22 nt, synthetic construct
  source 1..22: mol_type = other RNA
catatttccaaataaggtcaca

SEQ ID NO: 127036 - RNA, 22 nt, synthetic construct
  source 1..22: mol_type = other RNA
catatttcccttttggatgcag

SEQ ID NO: 127037 - RNA, 22 nt, synthetic construct
  source 1..22: mol_type = other RNA
catatttgttcaagcgctgaag

SEQ ID NO: 127038 - RNA, 22 nt, synthetic construct
  source 1..22: mol_type = other RNA
catattttaaaagtcagctagg

SEQ ID NO: 127039 - RNA, 22 nt, synthetic construct
  source 1..22: mol_type = other RNA
catattttatgctttgtctctg

SEQ ID NO: 127040 - RNA, 22 nt, synthetic construct
  source 1..22: mol_type = other RNA
catattttccttatccattcat

SEQ ID NO: 127041 - RNA, 22 nt, synthetic construct
  source 1..22: mol_type = other RNA
catattttgtaacgtgtatagc

SEQ ID NO: 127042 - RNA, 22 nt, synthetic construct
  source 1..22: mol_type = other RNA
catattttgtgggaattcagtc

SEQ ID NO: 127043 - RNA, 22 nt, synthetic construct
  source 1..22: mol_type = other RNA
catcaaagctaccctttcttgt

SEQ ID NO: 127044 - RNA, 22 nt, synthetic construct
  source 1..22: mol_type = other RNA
catcaaaggaaggaattttagg

SEQ ID NO: 127045 - RNA, 22 nt, synthetic construct
  source 1..22: mol_type = other RNA
catcaaaggacactattgagag

SEQ ID NO: 127046 - RNA, 22 nt, synthetic construct
  source 1..22: mol_type = other RNA
catcaaagtcccctgtaattac

SEQ ID NO: 127047 - RNA, 22 nt, synthetic construct
  source 1..22: mol_type = other RNA
catcaaagttaaacttttgtgc

SEQ ID NO: 127048 - RNA, 22 nt, synthetic construct
  source 1..22: mol_type = other RNA
catcaacagcagaacaaactgc

SEQ ID NO: 127049 - RNA, 22 nt, synthetic construct
  source 1..22: mol_type = other RNA
catcaacatataaatcaatctg

SEQ ID NO: 127050 - RNA, 22 nt, synthetic construct
  source 1..22: mol_type = other RNA
catcaacctaatgaaatttaac

SEQ ID NO: 127051 - RNA, 22 nt, synthetic construct
  source 1..22: mol_type = other RNA
catcaactgcttccctagccca

SEQ ID NO: 127052 - RNA, 22 nt, synthetic construct
  source 1..22: mol_type = other RNA
catcaagacagagctccctctc

SEQ ID NO: 127053 - RNA, 22 nt, synthetic construct
  source 1..22: mol_type = other RNA
catcaagggtggtgctggactg

SEQ ID NO: 127054 - RNA, 22 nt, synthetic construct
  source 1..22: mol_type = other RNA
catcaagtgtgatcccaaaaaa

SEQ ID NO: 127055 - RNA, 22 nt, synthetic construct
  source 1..22: mol_type = other RNA
catcaatgatagactggattaa

SEQ ID NO: 127056 - RNA, 22 nt, synthetic construct
  source 1..22: mol_type = other RNA
catcacaatgcgtttgttagat

SEQ ID NO: 127057 - RNA, 22 nt, synthetic construct
  source 1..22: mol_type = other RNA
catcacacccagtatacacgta

SEQ ID NO: 127058 - RNA, 22 nt, synthetic construct
  source 1..22: mol_type = other RNA
catcacactggtcactggccac

SEQ ID NO: 127059 - RNA, 22 nt, synthetic construct
  source 1..22: mol_type = other RNA
catcacagacagggaatgggga

SEQ ID NO: 127060 - RNA, 22 nt, synthetic construct
  source 1..22: mol_type = other RNA
catcacagtatgcacaaataat

SEQ ID NO: 127061 - RNA, 22 nt, synthetic construct
  source 1..22: mol_type = other RNA
catcacagtccaggaacttaca

SEQ ID NO: 127062 - RNA, 22 nt, synthetic construct
  source 1..22: mol_type = other RNA
catcacattttgaatcatggga

SEQ ID NO: 127063 - RNA, 22 nt, synthetic construct
  source 1..22: mol_type = other RNA
catcaccatcatcatcaggctg

SEQ ID NO: 127064 - RNA, 22 nt, synthetic construct
  source 1..22: mol_type = other RNA
catcacccagctcgaccagggg

SEQ ID NO: 127065 - RNA, 22 nt, synthetic construct
  source 1..22: mol_type = other RNA
catcactaagagtgaaaaggca

SEQ ID NO: 127066 - RNA, 22 nt, synthetic construct
  source 1..22: mol_type = other RNA
catcactagaatgtgacttcgt

SEQ ID NO: 127067 - RNA, 22 nt, synthetic construct
  source 1..22: mol_type = other RNA
catcactagctattagagaaat

SEQ ID NO: 127068 - RNA, 22 nt, synthetic construct
  source 1..22: mol_type = other RNA
catcactcactggcctgagctc

SEQ ID NO: 127069 - RNA, 22 nt, synthetic construct
  source 1..22: mol_type = other RNA
catcactgactggctgtgccaa

SEQ ID NO: 127070 - RNA, 22 nt, synthetic construct
  source 1..22: mol_type = other RNA
catcacttgaggtgattaaagg

SEQ ID NO: 127071 - RNA, 22 nt, synthetic construct
  source 1..22: mol_type = other RNA
catcagaattccattccttttc

SEQ ID NO: 127072 - RNA, 22 nt, synthetic construct
  source 1..22: mol_type = other RNA
catcagacacctacattaatct

SEQ ID NO: 127073 - RNA, 22 nt, synthetic construct
  source 1..22: mol_type = other RNA
catcagagaggctttttattag

SEQ ID NO: 127074 - RNA, 22 nt, synthetic construct
  source 1..22: mol_type = other RNA
catcagagctttgttatgaaaa

SEQ ID NO: 127075 - RNA, 22 nt, synthetic construct
  source 1..22: mol_type = other RNA
catcagagtgaacaggcaacct

SEQ ID NO: 127076 - RNA, 22 nt, synthetic construct
  source 1..22: mol_type = other RNA
catcagcagtgaccatatttcc

SEQ ID NO: 127077 - RNA, 22 nt, synthetic construct
  source 1..22: mol_type = other RNA
catcagcgctaagtgcatttcg

SEQ ID NO: 127078 - RNA, 22 nt, synthetic construct
  source 1..22: mol_type = other RNA
catcagcgtcctcactgtgata

SEQ ID NO: 127079 - RNA, 22 nt, synthetic construct
  source 1..22: mol_type = other RNA
catcaggaaaaccagtttagaa

SEQ ID NO: 127080 - RNA, 22 nt, synthetic construct
  source 1..22: mol_type = other RNA
catcaggctggctctttccact

SEQ ID NO: 127081 - RNA, 22 nt, synthetic construct
  source 1..22: mol_type = other RNA
catcagtgctgctctgacgttt

SEQ ID NO: 127082 - RNA, 22 nt, synthetic construct
  source 1..22: mol_type = other RNA
catcagtggttgtgcttcgagg

SEQ ID NO: 127083 - RNA, 22 nt, synthetic construct
  source 1..22: mol_type = other RNA
catcagttaccaccaagaaaaa

SEQ ID NO: 127084 - RNA, 22 nt, synthetic construct
  source 1..22: mol_type = other RNA
catcatactggaaggactcaca

SEQ ID NO: 127085 - RNA, 22 nt, synthetic construct
  source 1..22: mol_type = other RNA
catcatcaggctggctctttcc

SEQ ID NO: 127086 - RNA, 22 nt, synthetic construct
  source 1..22: mol_type = other RNA
catcatcatcaggctggctctt

SEQ ID NO: 127087 - RNA, 22 nt, synthetic construct
  source 1..22: mol_type = other RNA
catcatctaatttcccatttga

SEQ ID NO: 127088 - RNA, 22 nt, synthetic construct
  source 1..22: mol_type = other RNA
catcatcttatacttggcaaaa

SEQ ID NO: 127089 - RNA, 22 nt, synthetic construct
  source 1..22: mol_type = other RNA
catcatcttttgcctggatgaa

SEQ ID NO: 127090 - RNA, 22 nt, synthetic construct
  source 1..22: mol_type = other RNA
catcatgatttaatagaggtct

SEQ ID NO: 127091 - RNA, 22 nt, synthetic construct
  source 1..22: mol_type = other RNA
catcatgcctgggtaattaaac

SEQ ID NO: 127092 - RNA, 22 nt, synthetic construct
  source 1..22: mol_type = other RNA
catcatggtgggccttgcaagc

SEQ ID NO: 127093 - RNA, 22 nt, synthetic construct
  source 1..22: mol_type = other RNA
catcattcaaatgatattcact

SEQ ID NO: 127094 - RNA, 22 nt, synthetic construct
  source 1..22: mol_type = other RNA
catcattcataaacacagaaca

SEQ ID NO: 127095 - RNA, 22 nt, synthetic construct
  source 1..22: mol_type = other RNA
catcatttatacccaagtaaac

SEQ ID NO: 127096 - RNA, 22 nt, synthetic construct
  source 1..22: mol_type = other RNA
catcatttgtattatttctgtc

SEQ ID NO: 127097 - RNA, 22 nt, synthetic construct
  source 1..22: mol_type = other RNA
catccaaaagggaaatatgaac

SEQ ID NO: 127098 - RNA, 22 nt, synthetic construct
  source 1..22: mol_type = other RNA
catccaaacagaaaccctgtac

SEQ ID NO: 127099 - RNA, 22 nt, synthetic construct
  source 1..22: mol_type = other RNA
catccaaattattgacaagacg

SEQ ID NO: 127100 - RNA, 22 nt, synthetic construct
  source 1..22: mol_type = other RNA
catccacaacattgtgcaacca

SEQ ID NO: 127101 - RNA, 22 nt, synthetic construct
  source 1..22: mol_type = other RNA
catccacaatgagacatttgag

SEQ ID NO: 127102 - RNA, 22 nt, synthetic construct
  source 1..22: mol_type = other RNA
catccacagctttcttttccaa

SEQ ID NO: 127103 - RNA, 22 nt, synthetic construct
  source 1..22: mol_type = other RNA
catccacattttgtgacaagtt

SEQ ID NO: 127104 - RNA, 22 nt, synthetic construct
  source 1..22: mol_type = other RNA
catccacccacttgtcccatgg

SEQ ID NO: 127105 - RNA, 22 nt, synthetic construct
  source 1..22: mol_type = other RNA
catccacgcgtaagggtacaga

SEQ ID NO: 127106 - RNA, 22 nt, synthetic construct
  source 1..22: mol_type = other RNA
catccactaggggactaacagg

SEQ ID NO: 127107 - RNA, 22 nt, synthetic construct
  source 1..22: mol_type = other RNA
catccactgcacagtatgcggg

SEQ ID NO: 127108 - RNA, 22 nt, synthetic construct
  source 1..22: mol_type = other RNA
catccagaagtcactttttatt

SEQ ID NO: 127109 - RNA, 22 nt, synthetic construct
  source 1..22: mol_type = other RNA
catccagctaattttcattact

SEQ ID NO: 127110 - RNA, 22 nt, synthetic construct
  source 1..22: mol_type = other RNA
catccaggcaaaagatgatgaa

SEQ ID NO: 127111 - RNA, 22 nt, synthetic construct
  source 1..22: mol_type = other RNA
catccagtttaaagctttgtga

SEQ ID NO: 127112 - RNA, 22 nt, synthetic construct
  source 1..22: mol_type = other RNA
catccatgttgttgaatgtggc

SEQ ID NO: 127113 - RNA, 22 nt, synthetic construct
  source 1..22: mol_type = other RNA
catccattactcgtggttatag

SEQ ID NO: 127114 - RNA, 22 nt, synthetic construct
  source 1..22: mol_type = other RNA
catcccaagggttttggtatgt

SEQ ID NO: 127115 - RNA, 22 nt, synthetic construct
  source 1..22: mol_type = other RNA
catcccaagtgcccattaacag

SEQ ID NO: 127116 - RNA, 22 nt, synthetic construct
  source 1..22: mol_type = other RNA
catcccagaggtactcaacgac

SEQ ID NO: 127117 - RNA, 22 nt, synthetic construct
  source 1..22: mol_type = other RNA
catcccagctacataacttccc

SEQ ID NO: 127118 - RNA, 22 nt, synthetic construct
  source 1..22: mol_type = other RNA
catcccatatggaggcaatgtt

SEQ ID NO: 127119 - RNA, 22 nt, synthetic construct
  source 1..22: mol_type = other RNA
catcccattactcggtatgtac

SEQ ID NO: 127120 - RNA, 22 nt, synthetic construct
  source 1..22: mol_type = other RNA
catccccagaaagagagagggg

SEQ ID NO: 127121 - RNA, 22 nt, synthetic construct
  source 1..22: mol_type = other RNA
catccccattcaattgtcctgg

SEQ ID NO: 127122 - RNA, 22 nt, synthetic construct
  source 1..22: mol_type = other RNA
catccccccacccctgctctgc

SEQ ID NO: 127123 - RNA, 22 nt, synthetic construct
  source 1..22: mol_type = other RNA
catccccgctgcgagaaaggcg

SEQ ID NO: 127124 - RNA, 22 nt, synthetic construct
  source 1..22: mol_type = other RNA
catccccgctgtccatttccag

SEQ ID NO: 127125 - RNA, 22 nt, synthetic construct
  source 1..22: mol_type = other RNA
catcccctttacccctgagaac

SEQ ID NO: 127126 - RNA, 22 nt, synthetic construct
  source 1..22: mol_type = other RNA
catccctatgcaataactcaaa

SEQ ID NO: 127127 - RNA, 22 nt, synthetic construct
  source 1..22: mol_type = other RNA
catccctcatatcagttatcac

SEQ ID NO: 127128 - RNA, 22 nt, synthetic construct
  source 1..22: mol_type = other RNA
catccctccagtccagcaccac

SEQ ID NO: 127129 - RNA, 22 nt, synthetic construct
  source 1..22: mol_type = other RNA
catccctcctctggccctccat

SEQ ID NO: 127130 - RNA, 22 nt, synthetic construct
  source 1..22: mol_type = other RNA
catccctctaaataggtattca

SEQ ID NO: 127131 - RNA, 22 nt, synthetic construct
  source 1..22: mol_type = other RNA
catccctgccgcgcgcgaaggc

SEQ ID NO: 127132 - RNA, 22 nt, synthetic construct
  source 1..22: mol_type = other RNA
catccgccaccacgcctggcta

SEQ ID NO: 127133 - RNA, 22 nt, synthetic construct
  source 1..22: mol_type = other RNA
catccgggagggaggtaggggg

SEQ ID NO: 127134 - RNA, 22 nt, synthetic construct
  source 1..22: mol_type = other RNA
catccggggagcttttgaaact

SEQ ID NO: 127135 - RNA, 22 nt, synthetic construct
  source 1..22: mol_type = other RNA
catccggtctcagtttttaatt

SEQ ID NO: 127136 - RNA, 22 nt, synthetic construct
  source 1..22: mol_type = other RNA
catcctaatacagtaaagcccc

SEQ ID NO: 127137 - RNA, 22 nt, synthetic construct
  source 1..22: mol_type = other RNA
catcctatctaagcctactgct

SEQ ID NO: 127138 - RNA, 22 nt, synthetic construct
  source 1..22: mol_type = other RNA
catcctcaacaagagaggacag

SEQ ID NO: 127139 - RNA, 22 nt, synthetic construct
  source 1..22: mol_type = other RNA
catcctccagccttaatctcct

SEQ ID NO: 127140 - RNA, 22 nt, synthetic construct
  source 1..22: mol_type = other RNA
catcctccgtagctgtcgctct

SEQ ID NO: 127141 - RNA, 22 nt, synthetic construct
  source 1..22: mol_type = other RNA
catcctctatttttgtctggtg

SEQ ID NO: 127142 - RNA, 22 nt, synthetic construct
  source 1..22: mol_type = other RNA
catcctgatttaggccactctc

SEQ ID NO: 127143 - RNA, 22 nt, synthetic construct
  source 1..22: mol_type = other RNA
catcctggatttgggaaggatg

SEQ ID NO: 127144 - RNA, 22 nt, synthetic construct
  source 1..22: mol_type = other RNA
catccttcccaaatccaggatg

SEQ ID NO: 127145 - RNA, 22 nt, synthetic construct
  source 1..22: mol_type = other RNA
catccttgccaacagttacttt

SEQ ID NO: 127146 - RNA, 22 nt, synthetic construct
  source 1..22: mol_type = other RNA
catcctttaatttgggtttgag

SEQ ID NO: 127147 - RNA, 22 nt, synthetic construct
  source 1..22: mol_type = other RNA
catcctttataccttttaatga

SEQ ID NO: 127148 - RNA, 22 nt, synthetic construct
  source 1..22: mol_type = other RNA
catcctttcccttctgctcggc

SEQ ID NO: 127149 - RNA, 22 nt, synthetic construct
  source 1..22: mol_type = other RNA
catcctttccttgtcctaaaat

SEQ ID NO: 127150 - RNA, 22 nt, synthetic construct
  source 1..22: mol_type = other RNA
catcctttgcgtctgtgattat

SEQ ID NO: 127151 - RNA, 22 nt, synthetic construct
  source 1..22: mol_type = other RNA
catcgagagatgaatggataag

SEQ ID NO: 127152 - RNA, 22 nt, synthetic construct
  source 1..22: mol_type = other RNA
catcgcattacgagttatgcaa

SEQ ID NO: 127153 - RNA, 22 nt, synthetic construct
  source 1..22: mol_type = other RNA
catcgcgcccagcccgtgtgtt

SEQ ID NO: 127154 - RNA, 22 nt, synthetic construct
  source 1..22: mol_type = other RNA
catcggaaatataaaaagcctc

SEQ ID NO: 127155 - RNA, 22 nt, synthetic construct
  source 1..22: mol_type = other RNA
catcggggcctacagtggttcc

SEQ ID NO: 127156 - RNA, 22 nt, synthetic construct
  source 1..22: mol_type = other RNA
catcggtctgtatttctgcttt

SEQ ID NO: 127157 - RNA, 22 nt, synthetic construct
  source 1..22: mol_type = other RNA
catcgtaaaaagccatttatca

SEQ ID NO: 127158 - RNA, 22 nt, synthetic construct
  source 1..22: mol_type = other RNA
catcgtaaaacctcatctctac

SEQ ID NO: 127159 - RNA, 22 nt, synthetic construct
  source 1..22: mol_type = other RNA
catcgtgaagtctttattttta

SEQ ID NO: 127160 - RNA, 22 nt, synthetic construct
  source 1..22: mol_type = other RNA
catcgttcacactcgcactcca

SEQ ID NO: 127161 - RNA, 22 nt, synthetic construct
  source 1..22: mol_type = other RNA
catcgtttcaatattaagagtc

SEQ ID NO: 127162 - RNA, 22 nt, synthetic construct
  source 1..22: mol_type = other RNA
catctaaacgtttggtgactga

SEQ ID NO: 127163 - RNA, 22 nt, synthetic construct
  source 1..22: mol_type = other RNA
catctaaagccaggctttccca

SEQ ID NO: 127164 - RNA, 22 nt, synthetic construct
  source 1..22: mol_type = other RNA
catctaaattaagcttcgacag

SEQ ID NO: 127165 - RNA, 22 nt, synthetic construct
  source 1..22: mol_type = other RNA
catctaacagaaatacaatgtg

SEQ ID NO: 127166 - RNA, 22 nt, synthetic construct
  source 1..22: mol_type = other RNA
catctaagcctacctcccttca

SEQ ID NO: 127167 - RNA, 22 nt, synthetic construct
  source 1..22: mol_type = other RNA
catctaattcacatttaagaag

SEQ ID NO: 127168 - RNA, 22 nt, synthetic construct
  source 1..22: mol_type = other RNA
catctaatttcccatttgattt

SEQ ID NO: 127169 - RNA, 22 nt, synthetic construct
  source 1..22: mol_type = other RNA
catctagcacagaaccatgtaa

SEQ ID NO: 127170 - RNA, 22 nt, synthetic construct
  source 1..22: mol_type = other RNA
catctaggcatataaactggaa

SEQ ID NO: 127171 - RNA, 22 nt, synthetic construct
  source 1..22: mol_type = other RNA
catctagttaccactagcaaac

SEQ ID NO: 127172 - RNA, 22 nt, synthetic construct
  source 1..22: mol_type = other RNA
catctataaggtaatgacaata

SEQ ID NO: 127173 - RNA, 22 nt, synthetic construct
  source 1..22: mol_type = other RNA
catctatgaagtaattgtttga

SEQ ID NO: 127174 - RNA, 22 nt, synthetic construct
  source 1..22: mol_type = other RNA
catctatgtcccctggggcctc

SEQ ID NO: 127175 - RNA, 22 nt, synthetic construct
  source 1..22: mol_type = other RNA
catctatttccccattagagta

SEQ ID NO: 127176 - RNA, 22 nt, synthetic construct
  source 1..22: mol_type = other RNA
catctcaagaaaacaagaataa

SEQ ID NO: 127177 - RNA, 22 nt, synthetic construct
  source 1..22: mol_type = other RNA
catctcactcacctagctgttt

SEQ ID NO: 127178 - RNA, 22 nt, synthetic construct
  source 1..22: mol_type = other RNA
catctcagcacagagccgaaat

SEQ ID NO: 127179 - RNA, 22 nt, synthetic construct
  source 1..22: mol_type = other RNA
catctcccataccacctgtcag

SEQ ID NO: 127180 - RNA, 22 nt, synthetic construct
  source 1..22: mol_type = other RNA
catctcccatcactagaatgtg

SEQ ID NO: 127181 - RNA, 22 nt, synthetic construct
  source 1..22: mol_type = other RNA
catctccttaatccagtctatc

SEQ ID NO: 127182 - RNA, 22 nt, synthetic construct
  source 1..22: mol_type = other RNA
catctctagttttccagtatat

SEQ ID NO: 127183 - RNA, 22 nt, synthetic construct
  source 1..22: mol_type = other RNA
catctctccaacagaagaagtt

SEQ ID NO: 127184 - RNA, 22 nt, synthetic construct
  source 1..22: mol_type = other RNA
catctctcccttcctgttcttt

SEQ ID NO: 127185 - RNA, 22 nt, synthetic construct
  source 1..22: mol_type = other RNA
catctctcgatggacatttagg

SEQ ID NO: 127186 - RNA, 22 nt, synthetic construct
  source 1..22: mol_type = other RNA
catctctctaaaaacatccatt

SEQ ID NO: 127187 - RNA, 22 nt, synthetic construct
  source 1..22: mol_type = other RNA
catctctctgcctcaaaatcaa

SEQ ID NO: 127188 - RNA, 22 nt, synthetic construct
  source 1..22: mol_type = other RNA
catctctgcaaaacatttaaaa

SEQ ID NO: 127189 - RNA, 22 nt, synthetic construct
  source 1..22: mol_type = other RNA
catctgaatcaataagaatgat

SEQ ID NO: 127190 - RNA, 22 nt, synthetic construct
  source 1..22: mol_type = other RNA
catctgaattcaagttacaata

SEQ ID NO: 127191 - RNA, 22 nt, synthetic construct
  source 1..22: mol_type = other RNA
catctgacatatgttttgcttc

SEQ ID NO: 127192 - RNA, 22 nt, synthetic construct
  source 1..22: mol_type = other RNA
catctgagacatcacaatgcgt

SEQ ID NO: 127193 - RNA, 22 nt, synthetic construct
  source 1..22: mol_type = other RNA
catctgataagcccaacctgat

SEQ ID NO: 127194 - RNA, 22 nt, synthetic construct
  source 1..22: mol_type = other RNA
catctgatacacttctatccag

SEQ ID NO: 127195 - RNA, 22 nt, synthetic construct
  source 1..22: mol_type = other RNA
catctgcagtgtccatctccca

SEQ ID NO: 127196 - RNA, 22 nt, synthetic construct
  source 1..22: mol_type = other RNA
catctgcctcccgggtccaggc

SEQ ID NO: 127197 - RNA, 22 nt, synthetic construct
  source 1..22: mol_type = other RNA
catctggaaggaaacactataa

SEQ ID NO: 127198 - RNA, 22 nt, synthetic construct
  source 1..22: mol_type = other RNA
catctggaccagttactctctc

SEQ ID NO: 127199 - RNA, 22 nt, synthetic construct
  source 1..22: mol_type = other RNA
catctggatcctgtctcagagt

SEQ ID NO: 127200 - RNA, 22 nt, synthetic construct
  source 1..22: mol_type = other RNA
catctggattatagtggtaagg

SEQ ID NO: 127201 - RNA, 22 nt, synthetic construct
  source 1..22: mol_type = other RNA
catctggcagcaggggctaagt

SEQ ID NO: 127202 - RNA, 22 nt, synthetic construct
  source 1..22: mol_type = other RNA
catctgggatacttctaacttt

SEQ ID NO: 127203 - RNA, 22 nt, synthetic construct
  source 1..22: mol_type = other RNA
catctggtcctgagctttcctt

SEQ ID NO: 127204 - RNA, 22 nt, synthetic construct
  source 1..22: mol_type = other RNA
catctggtctatctcattataa

SEQ ID NO: 127205 - RNA, 22 nt, synthetic construct
  source 1..22: mol_type = other RNA
catctgtcaaaaagagaacaca

SEQ ID NO: 127206 - RNA, 22 nt, synthetic construct
  source 1..22: mol_type = other RNA
catctgtcactttcctattcac

SEQ ID NO: 127207 - RNA, 22 nt, synthetic construct
  source 1..22: mol_type = other RNA
catctgtcttgtgcatccttta

SEQ ID NO: 127208 - RNA, 22 nt, synthetic construct
  source 1..22: mol_type = other RNA
catctgttaaaagatacgaaaa

SEQ ID NO: 127209 - RNA, 22 nt, synthetic construct
  source 1..22: mol_type = other RNA
catctgttaatgggcacttggg

SEQ ID NO: 127210 - RNA, 22 nt, synthetic construct
  source 1..22: mol_type = other RNA
catctgttatagtgtgaaaaaa

SEQ ID NO: 127211 - RNA, 22 nt, synthetic construct
  source 1..22: mol_type = other RNA
catcttaagaaccatacagtgc

SEQ ID NO: 127212 - RNA, 22 nt, synthetic construct
  source 1..22: mol_type = other RNA
catcttagccgggaggagccaa

SEQ ID NO: 127213 - RNA, 22 nt, synthetic construct
  source 1..22: mol_type = other RNA
catcttagctcttcccttaacc

SEQ ID NO: 127214 - RNA, 22 nt, synthetic construct
  source 1..22: mol_type = other RNA
catcttaggccataaatcaagg

SEQ ID NO: 127215 - RNA, 22 nt, synthetic construct
  source 1..22: mol_type = other RNA
catcttatattaattctgaggc

SEQ ID NO: 127216 - RNA, 22 nt, synthetic construct
  source 1..22: mol_type = other RNA
catcttcaagatttcataggca

SEQ ID NO: 127217 - RNA, 22 nt, synthetic construct
  source 1..22: mol_type = other RNA
catcttcacgtggcgctccctc

SEQ ID NO: 127218 - RNA, 22 nt, synthetic construct
  source 1..22: mol_type = other RNA
catcttcactgactacacatac

SEQ ID NO: 127219 - RNA, 22 nt, synthetic construct
  source 1..22: mol_type = other RNA
catcttcatttctaagccatgt

SEQ ID NO: 127220 - RNA, 22 nt, synthetic construct
  source 1..22: mol_type = other RNA
catcttccatacgaaagccttt

SEQ ID NO: 127221 - RNA, 22 nt, synthetic construct
  source 1..22: mol_type = other RNA
catcttcccatgaacatggttt

SEQ ID NO: 127222 - RNA, 22 nt, synthetic construct
  source 1..22: mol_type = other RNA
catcttctctctctgcttcact

SEQ ID NO: 127223 - RNA, 22 nt, synthetic construct
  source 1..22: mol_type = other RNA
catcttcttagtgttcccttct

SEQ ID NO: 127224 - RNA, 22 nt, synthetic construct
  source 1..22: mol_type = other RNA
catcttcttttacttgcttggt

SEQ ID NO: 127225 - RNA, 22 nt, synthetic construct
  source 1..22: mol_type = other RNA
catcttgaactaagtgtgaaga

SEQ ID NO: 127226 - RNA, 22 nt, synthetic construct
  source 1..22: mol_type = other RNA
catcttgacttcacttccaagt

SEQ ID NO: 127227 - RNA, 22 nt, synthetic construct
  source 1..22: mol_type = other RNA
catcttgcaaaacggaaacttt

SEQ ID NO: 127228 - RNA, 22 nt, synthetic construct
  source 1..22: mol_type = other RNA
catcttgcataactcgtaatgc

SEQ ID NO: 127229 - RNA, 22 nt, synthetic construct
  source 1..22: mol_type = other RNA
catctttcctgatcacaccctc

SEQ ID NO: 127230 - RNA, 22 nt, synthetic construct
  source 1..22: mol_type = other RNA
catctttcctgtgatttatgtg

SEQ ID NO: 127231 - RNA, 22 nt, synthetic construct
  source 1..22: mol_type = other RNA
catctttgttacagcagctcta

SEQ ID NO: 127232 - RNA, 22 nt, synthetic construct
  source 1..22: mol_type = other RNA
catcttttgacgcgcaacaatt

SEQ ID NO: 127233 - RNA, 22 nt, synthetic construct
  source 1..22: mol_type = other RNA
catcttttgagggtatcatatt

SEQ ID NO: 127234 - RNA, 22 nt, synthetic construct
  source 1..22: mol_type = other RNA
catcttttgcctggatgaatgc

SEQ ID NO: 127235 - RNA, 22 nt, synthetic construct
  source 1..22: mol_type = other RNA
catgaaaacagctaggtgagtg

SEQ ID NO: 127236 - RNA, 22 nt, synthetic construct
  source 1..22: mol_type = other RNA
catgaaaagatactcaacatca

SEQ ID NO: 127237 - RNA, 22 nt, synthetic construct
  source 1..22: mol_type = other RNA
catgaaaataaaaagtatcgtg

SEQ ID NO: 127238 - RNA, 22 nt, synthetic construct
  source 1..22: mol_type = other RNA
catgaaaattgaattataggca

SEQ ID NO: 127239 - RNA, 22 nt, synthetic construct
  source 1..22: mol_type = other RNA
catgaaacttatttccaggggg

SEQ ID NO: 127240 - RNA, 22 nt, synthetic construct
  source 1..22: mol_type = other RNA
catgaaagtggagaattactaa

SEQ ID NO: 127241 - RNA, 22 nt, synthetic construct
  source 1..22: mol_type = other RNA
catgaaatactcaaactatgct

SEQ ID NO: 127242 - RNA, 22 nt, synthetic construct
  source 1..22: mol_type = other RNA
catgaaatcccctttagtgttc

SEQ ID NO: 127243 - RNA, 22 nt, synthetic construct
  source 1..22: mol_type = other RNA
catgaaatgggtttaaaagagt

SEQ ID NO: 127244 - RNA, 22 nt, synthetic construct
  source 1..22: mol_type = other RNA
catgaaattcttgggtgaataa

SEQ ID NO: 127245 - RNA, 22 nt, synthetic construct
  source 1..22: mol_type = other RNA
catgaacaagttacaaacatat

SEQ ID NO: 127246 - RNA, 22 nt, synthetic construct
  source 1..22: mol_type = other RNA
catgaacaatccttctaatcag

SEQ ID NO: 127247 - RNA, 22 nt, synthetic construct
  source 1..22: mol_type = other RNA
catgaacaattttctctcatgt

SEQ ID NO: 127248 - RNA, 22 nt, synthetic construct
  source 1..22: mol_type = other RNA
catgaacatggtttgatcccac

SEQ ID NO: 127249 - RNA, 22 nt, synthetic construct
  source 1..22: mol_type = other RNA
catgaacccaccaggaggcgga

SEQ ID NO: 127250 - RNA, 22 nt, synthetic construct
  source 1..22: mol_type = other RNA
catgaacctgcatggtgtaaaa

SEQ ID NO: 127251 - RNA, 22 nt, synthetic construct
  source 1..22: mol_type = other RNA
catgaaccttcaccaaagattt

SEQ ID NO: 127252 - RNA, 22 nt, synthetic construct
  source 1..22: mol_type = other RNA
catgaacgagaacaaaacaaga

SEQ ID NO: 127253 - RNA, 22 nt, synthetic construct
  source 1..22: mol_type = other RNA
catgaactactcaaagaaaata

SEQ ID NO: 127254 - RNA, 22 nt, synthetic construct
  source 1..22: mol_type = other RNA
catgaagaaaacactccagaat

SEQ ID NO: 127255 - RNA, 22 nt, synthetic construct
  source 1..22: mol_type = other RNA
catgaagccagcattaccctaa

SEQ ID NO: 127256 - RNA, 22 nt, synthetic construct
  source 1..22: mol_type = other RNA
catgaagccctctaagtcagcc

SEQ ID NO: 127257 - RNA, 22 nt, synthetic construct
  source 1..22: mol_type = other RNA
catgaaggaaggattggaatga

SEQ ID NO: 127258 - RNA, 22 nt, synthetic construct
  source 1..22: mol_type = other RNA
catgaagtcctcaatcatgtca

SEQ ID NO: 127259 - RNA, 22 nt, synthetic construct
  source 1..22: mol_type = other RNA
catgaataaccaatgtcagaga

SEQ ID NO: 127260 - RNA, 22 nt, synthetic construct
  source 1..22: mol_type = other RNA
catgaatacctatttagaggga

SEQ ID NO: 127261 - RNA, 22 nt, synthetic construct
  source 1..22: mol_type = other RNA
catgaatgaatgttgagttttt

SEQ ID NO: 127262 - RNA, 22 nt, synthetic construct
  source 1..22: mol_type = other RNA
catgaatggaaaattcttggtc

SEQ ID NO: 127263 - RNA, 22 nt, synthetic construct
  source 1..22: mol_type = other RNA
catgacaagaatctttggcaaa

SEQ ID NO: 127264 - RNA, 22 nt, synthetic construct
  source 1..22: mol_type = other RNA
catgacagagttccacctccat

SEQ ID NO: 127265 - RNA, 22 nt, synthetic construct
  source 1..22: mol_type = other RNA
catgacagatcccaaaaaggtt

SEQ ID NO: 127266 - RNA, 22 nt, synthetic construct
  source 1..22: mol_type = other RNA
catgacaggtgagtggactgtg

SEQ ID NO: 127267 - RNA, 22 nt, synthetic construct
  source 1..22: mol_type = other RNA
catgacatggttttcctactaa

SEQ ID NO: 127268 - RNA, 22 nt, synthetic construct
  source 1..22: mol_type = other RNA
catgacatgtgttttatttagg

SEQ ID NO: 127269 - RNA, 22 nt, synthetic construct
  source 1..22: mol_type = other RNA
catgaccctgctatgcatactt

SEQ ID NO: 127270 - RNA, 22 nt, synthetic construct
  source 1..22: mol_type = other RNA
catgacctatctattaacagaa

SEQ ID NO: 127271 - RNA, 22 nt, synthetic construct
  source 1..22: mol_type = other RNA
catgacctgctttcttggggct

SEQ ID NO: 127272 - RNA, 22 nt, synthetic construct
  source 1..22: mol_type = other RNA
catgactggccatccttcccaa

SEQ ID NO: 127273 - RNA, 22 nt, synthetic construct
  source 1..22: mol_type = other RNA
catgacttttttgcccactctt

SEQ ID NO: 127274 - RNA, 22 nt, synthetic construct
  source 1..22: mol_type = other RNA
catgagaaatgttaagattcaa

SEQ ID NO: 127275 - RNA, 22 nt, synthetic construct
  source 1..22: mol_type = other RNA
catgagacttggagtttgagac

SEQ ID NO: 127276 - RNA, 22 nt, synthetic construct
  source 1..22: mol_type = other RNA
catgagagaaaattgttcatga

SEQ ID NO: 127277 - RNA, 22 nt, synthetic construct
  source 1..22: mol_type = other RNA
catgagagctaagggaagtttt

SEQ ID NO: 127278 - RNA, 22 nt, synthetic construct
  source 1..22: mol_type = other RNA
catgagagctgtgccgaggcag

SEQ ID NO: 127279 - RNA, 22 nt, synthetic construct
  source 1..22: mol_type = other RNA
catgagagggagaccgtggggg

SEQ ID NO: 127280 - RNA, 22 nt, synthetic construct
  source 1..22: mol_type = other RNA
catgagatactacgcctagctg

SEQ ID NO: 127281 - RNA, 22 nt, synthetic construct
  source 1..22: mol_type = other RNA
catgagatctaaattttaagtg

SEQ ID NO: 127282 - RNA, 22 nt, synthetic construct
  source 1..22: mol_type = other RNA
catgagattacatagcaaggaa

SEQ ID NO: 127283 - RNA, 22 nt, synthetic construct
  source 1..22: mol_type = other RNA
catgagccacagggcccagcct

SEQ ID NO: 127284 - RNA, 22 nt, synthetic construct
  source 1..22: mol_type = other RNA
catgagccaccgtgcccggcca

SEQ ID NO: 127285 - RNA, 22 nt, synthetic construct
  source 1..22: mol_type = other RNA
catgagccactgcgggcccagc

SEQ ID NO: 127286 - RNA, 22 nt, synthetic construct
  source 1..22: mol_type = other RNA
catgaggaaagcaggttgcatt

SEQ ID NO: 127287 - RNA, 22 nt, synthetic construct
  source 1..22: mol_type = other RNA
catgaggcatattattgtaact

SEQ ID NO: 127288 - RNA, 22 nt, synthetic construct
  source 1..22: mol_type = other RNA
catgaggcctctccccttgacg

SEQ ID NO: 127289 - RNA, 22 nt, synthetic construct
  source 1..22: mol_type = other RNA
catgaggtcacccaagccacag

SEQ ID NO: 127290 - RNA, 22 nt, synthetic construct
  source 1..22: mol_type = other RNA
catgagtaaaaagaaatctgca

SEQ ID NO: 127291 - RNA, 22 nt, synthetic construct
  source 1..22: mol_type = other RNA
catgagtatctggtgttgcttg

SEQ ID NO: 127292 - RNA, 22 nt, synthetic construct
  source 1..22: mol_type = other RNA
catgagtcctgaaaattccttc

SEQ ID NO: 127293 - RNA, 22 nt, synthetic construct
  source 1..22: mol_type = other RNA
catgagtcgccatacctggtcc

SEQ ID NO: 127294 - RNA, 22 nt, synthetic construct
  source 1..22: mol_type = other RNA
catgatctcacgtcaccgcaac

SEQ ID NO: 127295 - RNA, 22 nt, synthetic construct
  source 1..22: mol_type = other RNA
catgatctttggaaatgaatat

SEQ ID NO: 127296 - RNA, 22 nt, synthetic construct
  source 1..22: mol_type = other RNA
catgatgcagcccctgccacac

SEQ ID NO: 127297 - RNA, 22 nt, synthetic construct
  source 1..22: mol_type = other RNA
catgatggctcaacgcctgtga

SEQ ID NO: 127298 - RNA, 22 nt, synthetic construct
  source 1..22: mol_type = other RNA
catgatgtttggctccttacca

SEQ ID NO: 127299 - RNA, 22 nt, synthetic construct
  source 1..22: mol_type = other RNA
catgattcaaaatgtgatggca

SEQ ID NO: 127300 - RNA, 22 nt, synthetic construct
  source 1..22: mol_type = other RNA
catgattcagtcttggtagttt

SEQ ID NO: 127301 - RNA, 22 nt, synthetic construct
  source 1..22: mol_type = other RNA
catgattccccttatatgggat

SEQ ID NO: 127302 - RNA, 22 nt, synthetic construct
  source 1..22: mol_type = other RNA
catgattgaggacttcatgtac

SEQ ID NO: 127303 - RNA, 22 nt, synthetic construct
  source 1..22: mol_type = other RNA
catgattgggtcaacaaactaa

SEQ ID NO: 127304 - RNA, 22 nt, synthetic construct
  source 1..22: mol_type = other RNA
catgatttaatagaggtctgtc

SEQ ID NO: 127305 - RNA, 22 nt, synthetic construct
  source 1..22: mol_type = other RNA
catgatttataatccattgggt

SEQ ID NO: 127306 - RNA, 22 nt, synthetic construct
  source 1..22: mol_type = other RNA
catgatttggtgtgtgcaaagg

SEQ ID NO: 127307 - RNA, 22 nt, synthetic construct
  source 1..22: mol_type = other RNA
catgcaactgaaaacatctttt

SEQ ID NO: 127308 - RNA, 22 nt, synthetic construct
  source 1..22: mol_type = other RNA
catgcaattccccagcctcagc

SEQ ID NO: 127309 - RNA, 22 nt, synthetic construct
  source 1..22: mol_type = other RNA
catgcacaaggtcaagagcggc

SEQ ID NO: 127310 - RNA, 22 nt, synthetic construct
  source 1..22: mol_type = other RNA
catgcacacagagggagcgcca

SEQ ID NO: 127311 - RNA, 22 nt, synthetic construct
  source 1..22: mol_type = other RNA
catgcacacaggagaacttgtc

SEQ ID NO: 127312 - RNA, 22 nt, synthetic construct
  source 1..22: mol_type = other RNA
catgcacacgctggaagggagc

SEQ ID NO: 127313 - RNA, 22 nt, synthetic construct
  source 1..22: mol_type = other RNA
catgcacactagacctttctta

SEQ ID NO: 127314 - RNA, 22 nt, synthetic construct
  source 1..22: mol_type = other RNA
catgcacgagaaaagcacaggc

SEQ ID NO: 127315 - RNA, 22 nt, synthetic construct
  source 1..22: mol_type = other RNA
catgcacggacttggcacagga

SEQ ID NO: 127316 - RNA, 22 nt, synthetic construct
  source 1..22: mol_type = other RNA
catgcaggagaaacatggctta

SEQ ID NO: 127317 - RNA, 22 nt, synthetic construct
  source 1..22: mol_type = other RNA
catgcaggttcatgtgtgctta

SEQ ID NO: 127318 - RNA, 22 nt, synthetic construct
  source 1..22: mol_type = other RNA
catgcagtacttgtctttttgt

SEQ ID NO: 127319 - RNA, 22 nt, synthetic construct
  source 1..22: mol_type = other RNA
catgcagtagctcatcatttat

SEQ ID NO: 127320 - RNA, 22 nt, synthetic construct
  source 1..22: mol_type = other RNA
catgcatatgtttgtaacttgt

SEQ ID NO: 127321 - RNA, 22 nt, synthetic construct
  source 1..22: mol_type = other RNA
catgcatccacattttgtgaca

SEQ ID NO: 127322 - RNA, 22 nt, synthetic construct
  source 1..22: mol_type = other RNA
catgcatgcacacagagggagc

SEQ ID NO: 127323 - RNA, 22 nt, synthetic construct
  source 1..22: mol_type = other RNA
catgcatgtctgtctgttcaca

SEQ ID NO: 127324 - RNA, 22 nt, synthetic construct
  source 1..22: mol_type = other RNA
catgcattcgtccctaaacact

SEQ ID NO: 127325 - RNA, 22 nt, synthetic construct
  source 1..22: mol_type = other RNA
catgccacaccacatccagcta

SEQ ID NO: 127326 - RNA, 22 nt, synthetic construct
  source 1..22: mol_type = other RNA
catgccagctttggctgaaatg

SEQ ID NO: 127327 - RNA, 22 nt, synthetic construct
  source 1..22: mol_type = other RNA
catgccatcctggatttgggaa

SEQ ID NO: 127328 - RNA, 22 nt, synthetic construct
  source 1..22: mol_type = other RNA
catgcccatgtgcattattgta

SEQ ID NO: 127329 - RNA, 22 nt, synthetic construct
  source 1..22: mol_type = other RNA
catgccgggacaagagtctgca

SEQ ID NO: 127330 - RNA, 22 nt, synthetic construct
  source 1..22: mol_type = other RNA
catgcctctcccaccatctctc

SEQ ID NO: 127331 - RNA, 22 nt, synthetic construct
  source 1..22: mol_type = other RNA
catgcctctgttacagctcttc

SEQ ID NO: 127332 - RNA, 22 nt, synthetic construct
  source 1..22: mol_type = other RNA
catgcctgacaaagtatgagaa

SEQ ID NO: 127333 - RNA, 22 nt, synthetic construct
  source 1..22: mol_type = other RNA
catgcctgggtaattaaacatt

SEQ ID NO: 127334 - RNA, 22 nt, synthetic construct
  source 1..22: mol_type = other RNA
catgcctttcagcatagcagaa

SEQ ID NO: 127335 - RNA, 22 nt, synthetic construct
  source 1..22: mol_type = other RNA
catgcgacatatcagggatcac

SEQ ID NO: 127336 - RNA, 22 nt, synthetic construct
  source 1..22: mol_type = other RNA
catgcgccatcacacccagtat

SEQ ID NO: 127337 - RNA, 22 nt, synthetic construct
  source 1..22: mol_type = other RNA
catgctaactgcagaggtcagg

SEQ ID NO: 127338 - RNA, 22 nt, synthetic construct
  source 1..22: mol_type = other RNA
catgctaagtgtttaggatata

SEQ ID NO: 127339 - RNA, 22 nt, synthetic construct
  source 1..22: mol_type = other RNA
catgctaggggctgttcccaga

SEQ ID NO: 127340 - RNA, 22 nt, synthetic construct
  source 1..22: mol_type = other RNA
catgctcactgtctccatgtcc

SEQ ID NO: 127341 - RNA, 22 nt, synthetic construct
  source 1..22: mol_type = other RNA
catgctcccatttgggactgag

SEQ ID NO: 127342 - RNA, 22 nt, synthetic construct
  source 1..22: mol_type = other RNA
catgctctgataggataatgtc

SEQ ID NO: 127343 - RNA, 22 nt, synthetic construct
  source 1..22: mol_type = other RNA
catgctcttaagtatttttgtt

SEQ ID NO: 127344 - RNA, 22 nt, synthetic construct
  source 1..22: mol_type = other RNA
catgctgaggccccaggggaca

SEQ ID NO: 127345 - RNA, 22 nt, synthetic construct
  source 1..22: mol_type = other RNA
catgctgcaactgagaagagct

SEQ ID NO: 127346 - RNA, 22 nt, synthetic construct
  source 1..22: mol_type = other RNA
catgctgggagaccaggagttc

SEQ ID NO: 127347 - RNA, 22 nt, synthetic construct
  source 1..22: mol_type = other RNA
catgctgtgaatttggatttga

SEQ ID NO: 127348 - RNA, 22 nt, synthetic construct
  source 1..22: mol_type = other RNA
catgctgttttgcttactgtag

SEQ ID NO: 127349 - RNA, 22 nt, synthetic construct
  source 1..22: mol_type = other RNA
catgcttagccttccagagaca

SEQ ID NO: 127350 - RNA, 22 nt, synthetic construct
  source 1..22: mol_type = other RNA
catgcttaggatcccagtcctt

SEQ ID NO: 127351 - RNA, 22 nt, synthetic construct
  source 1..22: mol_type = other RNA
catgcttccaaaagcaggccct

SEQ ID NO: 127352 - RNA, 22 nt, synthetic construct
  source 1..22: mol_type = other RNA
catgcttgctccagagaagttt

SEQ ID NO: 127353 - RNA, 22 nt, synthetic construct
  source 1..22: mol_type = other RNA
catggaaacaacctaaatgtcc

SEQ ID NO: 127354 - RNA, 22 nt, synthetic construct
  source 1..22: mol_type = other RNA
catggaaactacaattactgta

SEQ ID NO: 127355 - RNA, 22 nt, synthetic construct
  source 1..22: mol_type = other RNA
catggaagttatttaatctctc

SEQ ID NO: 127356 - RNA, 22 nt, synthetic construct
  source 1..22: mol_type = other RNA
catggactagactgcctgaggt

SEQ ID NO: 127357 - RNA, 22 nt, synthetic construct
  source 1..22: mol_type = other RNA
catggacttcctattttataat

SEQ ID NO: 127358 - RNA, 22 nt, synthetic construct
  source 1..22: mol_type = other RNA
catggagacagtgagcatgctg

SEQ ID NO: 127359 - RNA, 22 nt, synthetic construct
  source 1..22: mol_type = other RNA
catggaggggccagttgagaga

SEQ ID NO: 127360 - RNA, 22 nt, synthetic construct
  source 1..22: mol_type = other RNA
catggatatttggccgggcgcg

SEQ ID NO: 127361 - RNA, 22 nt, synthetic construct
  source 1..22: mol_type = other RNA
catggcaggtttcaagtgaacc

SEQ ID NO: 127362 - RNA, 22 nt, synthetic construct
  source 1..22: mol_type = other RNA
catggcatcggggcctacagtg

SEQ ID NO: 127363 - RNA, 22 nt, synthetic construct
  source 1..22: mol_type = other RNA
catggccagtatctcctttcct

SEQ ID NO: 127364 - RNA, 22 nt, synthetic construct
  source 1..22: mol_type = other RNA
catggctgcgccactgcactcc

SEQ ID NO: 127365 - RNA, 22 nt, synthetic construct
  source 1..22: mol_type = other RNA
catggcttagaaatgaagatgg

SEQ ID NO: 127366 - RNA, 22 nt, synthetic construct
  source 1..22: mol_type = other RNA
catgggaagatgctccctctat

SEQ ID NO: 127367 - RNA, 22 nt, synthetic construct
  source 1..22: mol_type = other RNA
catgggaatgcatatatctgtc

SEQ ID NO: 127368 - RNA, 22 nt, synthetic construct
  source 1..22: mol_type = other RNA
catgggacaagtgggtggatgg

SEQ ID NO: 127369 - RNA, 22 nt, synthetic construct
  source 1..22: mol_type = other RNA
catgggagccaaacttgaacct

SEQ ID NO: 127370 - RNA, 22 nt, synthetic construct
  source 1..22: mol_type = other RNA
catgggaggtaatactataagg

SEQ ID NO: 127371 - RNA, 22 nt, synthetic construct
  source 1..22: mol_type = other RNA
catgggcatgggtccaagacag

SEQ ID NO: 127372 - RNA, 22 nt, synthetic construct
  source 1..22: mol_type = other RNA
catgggccgggcgtagtggctc

SEQ ID NO: 127373 - RNA, 22 nt, synthetic construct
  source 1..22: mol_type = other RNA
catgggctaaataaaacattaa

SEQ ID NO: 127374 - RNA, 22 nt, synthetic construct
  source 1..22: mol_type = other RNA
catggggagttttaggaaaata

SEQ ID NO: 127375 - RNA, 22 nt, synthetic construct
  source 1..22: mol_type = other RNA
catgggggcgcgtgcctatggt

SEQ ID NO: 127376 - RNA, 22 nt, synthetic construct
  source 1..22: mol_type = other RNA
catgggtccaagacaggaagaa

SEQ ID NO: 127377 - RNA, 22 nt, synthetic construct
  source 1..22: mol_type = other RNA
catgggtggaaattaaacacac

SEQ ID NO: 127378 - RNA, 22 nt, synthetic construct
  source 1..22: mol_type = other RNA
catgggttgatttttaatgaga

SEQ ID NO: 127379 - RNA, 22 nt, synthetic construct
  source 1..22: mol_type = other RNA
catggtaatttgtccatctgga

SEQ ID NO: 127380 - RNA, 22 nt, synthetic construct
  source 1..22: mol_type = other RNA
catggtactggtaccaaagcag

SEQ ID NO: 127381 - RNA, 22 nt, synthetic construct
  source 1..22: mol_type = other RNA
catggtagaccatataatctaa

SEQ ID NO: 127382 - RNA, 22 nt, synthetic construct
  source 1..22: mol_type = other RNA
catggtatcaattgtaatgtct

SEQ ID NO: 127383 - RNA, 22 nt, synthetic construct
  source 1..22: mol_type = other RNA
catggtatgtgccatctcctta

SEQ ID NO: 127384 - RNA, 22 nt, synthetic construct
  source 1..22: mol_type = other RNA
catggtcaaatcaatacttcat

SEQ ID NO: 127385 - RNA, 22 nt, synthetic construct
  source 1..22: mol_type = other RNA
catggtccacagaggcttttta

SEQ ID NO: 127386 - RNA, 22 nt, synthetic construct
  source 1..22: mol_type = other RNA
catggtgataactggtgctttt

SEQ ID NO: 127387 - RNA, 22 nt, synthetic construct
  source 1..22: mol_type = other RNA
catggtgggccttgcaagccac

SEQ ID NO: 127388 - RNA, 22 nt, synthetic construct
  source 1..22: mol_type = other RNA
catggtggtaggtgtgtgtaat

SEQ ID NO: 127389 - RNA, 22 nt, synthetic construct
  source 1..22: mol_type = other RNA
catggtgtaaaatacaacagca

SEQ ID NO: 127390 - RNA, 22 nt, synthetic construct
  source 1..22: mol_type = other RNA
catggtgtgtctgcgccttaaa

SEQ ID NO: 127391 - RNA, 22 nt, synthetic construct
  source 1..22: mol_type = other RNA
catggtgttaaatatttactac

SEQ ID NO: 127392 - RNA, 22 nt, synthetic construct
  source 1..22: mol_type = other RNA
catggttctgtgctagatgcta

SEQ ID NO: 127393 - RNA, 22 nt, synthetic construct
  source 1..22: mol_type = other RNA
catggtttgatcccactagtgg

SEQ ID NO: 127394 - RNA, 22 nt, synthetic construct
  source 1..22: mol_type = other RNA
catggttttaatgggcattaga

SEQ ID NO: 127395 - RNA, 22 nt, synthetic construct
  source 1..22: mol_type = other RNA
catggttttcctactaacaaga

SEQ ID NO: 127396 - RNA, 22 nt, synthetic construct
  source 1..22: mol_type = other RNA
catgtaaaaactgtttggctgg

SEQ ID NO: 127397 - RNA, 22 nt, synthetic construct
  source 1..22: mol_type = other RNA
catgtaaaacagacccttatgt

SEQ ID NO: 127398 - RNA, 22 nt, synthetic construct
  source 1..22: mol_type = other RNA
catgtaactaattactgtttct

SEQ ID NO: 127399 - RNA, 22 nt, synthetic construct
  source 1..22: mol_type = other RNA
catgtaacttgcttaggctgaa

SEQ ID NO: 127400 - RNA, 22 nt, synthetic construct
  source 1..22: mol_type = other RNA
catgtaatgcaaactctaaata

SEQ ID NO: 127401 - RNA, 22 nt, synthetic construct
  source 1..22: mol_type = other RNA
catgtacaatgaattagcaatg

SEQ ID NO: 127402 - RNA, 22 nt, synthetic construct
  source 1..22: mol_type = other RNA
catgtacgccaattttcatagc

SEQ ID NO: 127403 - RNA, 22 nt, synthetic construct
  source 1..22: mol_type = other RNA
catgtagatatgggagtccctg

SEQ ID NO: 127404 - RNA, 22 nt, synthetic construct
  source 1..22: mol_type = other RNA
catgtagttttccctgtgtatg

SEQ ID NO: 127405 - RNA, 22 nt, synthetic construct
  source 1..22: mol_type = other RNA
catgtatatgctgtttttgaaa

SEQ ID NO: 127406 - RNA, 22 nt, synthetic construct
  source 1..22: mol_type = other RNA
catgtatgtttctcattcttct

SEQ ID NO: 127407 - RNA, 22 nt, synthetic construct
  source 1..22: mol_type = other RNA
catgtatgttttagccttaaaa

SEQ ID NO: 127408 - RNA, 22 nt, synthetic construct
  source 1..22: mol_type = other RNA
catgtattttcctaaccactgt

SEQ ID NO: 127409 - RNA, 22 nt, synthetic construct
  source 1..22: mol_type = other RNA
catgtcaaatttttcacattct

SEQ ID NO: 127410 - RNA, 22 nt, synthetic construct
  source 1..22: mol_type = other RNA
catgtcaagaatgaagtcagag

SEQ ID NO: 127411 - RNA, 22 nt, synthetic construct
  source 1..22: mol_type = other RNA
catgtcagagacacatactgaa

SEQ ID NO: 127412 - RNA, 22 nt, synthetic construct
  source 1..22: mol_type = other RNA
catgtcagccacaagacataag

SEQ ID NO: 127413 - RNA, 22 nt, synthetic construct
  source 1..22: mol_type = other RNA
catgtcatgggccgggcgtagt

SEQ ID NO: 127414 - RNA, 22 nt, synthetic construct
  source 1..22: mol_type = other RNA
catgtcatgtatatgctgtttt

SEQ ID NO: 127415 - RNA, 22 nt, synthetic construct
  source 1..22: mol_type = other RNA
catgtcatgttcccggattgga

SEQ ID NO: 127416 - RNA, 22 nt, synthetic construct
  source 1..22: mol_type = other RNA
catgtccatagttaatgtgtga

SEQ ID NO: 127417 - RNA, 22 nt, synthetic construct
  source 1..22: mol_type = other RNA
catgtcccctggagttaattcc

SEQ ID NO: 127418 - RNA, 22 nt, synthetic construct
  source 1..22: mol_type = other RNA
catgtcccctgtccaagtattt

SEQ ID NO: 127419 - RNA, 22 nt, synthetic construct
  source 1..22: mol_type = other RNA
catgtcctcacctcacattcac

SEQ ID NO: 127420 - RNA, 22 nt, synthetic construct
  source 1..22: mol_type = other RNA
catgtctaaagtattgtttcaa

SEQ ID NO: 127421 - RNA, 22 nt, synthetic construct
  source 1..22: mol_type = other RNA
catgtctacctgtctttcccat

SEQ ID NO: 127422 - RNA, 22 nt, synthetic construct
  source 1..22: mol_type = other RNA
catgtctacctgtgtaacaaac

SEQ ID NO: 127423 - RNA, 22 nt, synthetic construct
  source 1..22: mol_type = other RNA
catgtctgcaggagccttgctg

SEQ ID NO: 127424 - RNA, 22 nt, synthetic construct
  source 1..22: mol_type = other RNA
catgtctgtagttacaactact

SEQ ID NO: 127425 - RNA, 22 nt, synthetic construct
  source 1..22: mol_type = other RNA
catgtctgtctgttcacatttc

SEQ ID NO: 127426 - RNA, 22 nt, synthetic construct
  source 1..22: mol_type = other RNA
catgtctgtgtagttcatcagc

SEQ ID NO: 127427 - RNA, 22 nt, synthetic construct
  source 1..22: mol_type = other RNA
catgtcttcagaggccctggtg

SEQ ID NO: 127428 - RNA, 22 nt, synthetic construct
  source 1..22: mol_type = other RNA
catgtcttcttggattttcttc

SEQ ID NO: 127429 - RNA, 22 nt, synthetic construct
  source 1..22: mol_type = other RNA
catgtcttggctattgtcagta

SEQ ID NO: 127430 - RNA, 22 nt, synthetic construct
  source 1..22: mol_type = other RNA
catgtcttggtgtgctcttttc

SEQ ID NO: 127431 - RNA, 22 nt, synthetic construct
  source 1..22: mol_type = other RNA
catgtgaggatttatttctggg

SEQ ID NO: 127432 - RNA, 22 nt, synthetic construct
  source 1..22: mol_type = other RNA
catgtgcaggaaacttccagaa

SEQ ID NO: 127433 - RNA, 22 nt, synthetic construct
  source 1..22: mol_type = other RNA
catgtgcattattgtaattatc

SEQ ID NO: 127434 - RNA, 22 nt, synthetic construct
  source 1..22: mol_type = other RNA
catgtggaacataatctttggt

SEQ ID NO: 127435 - RNA, 22 nt, synthetic construct
  source 1..22: mol_type = other RNA
catgtggccaggaggaggaggg

SEQ ID NO: 127436 - RNA, 22 nt, synthetic construct
  source 1..22: mol_type = other RNA
catgtggcttgtggctacaccc

SEQ ID NO: 127437 - RNA, 22 nt, synthetic construct
  source 1..22: mol_type = other RNA
catgtggggactttgtggcctc

SEQ ID NO: 127438 - RNA, 22 nt, synthetic construct
  source 1..22: mol_type = other RNA
catgtggttattgagtctgtag

SEQ ID NO: 127439 - RNA, 22 nt, synthetic construct
  source 1..22: mol_type = other RNA
catgtgtaaaacatctggaagg

SEQ ID NO: 127440 - RNA, 22 nt, synthetic construct
  source 1..22: mol_type = other RNA
catgtgtatttagggagcatat

SEQ ID NO: 127441 - RNA, 22 nt, synthetic construct
  source 1..22: mol_type = other RNA
catgtgtgcttacacacacgtt

SEQ ID NO: 127442 - RNA, 22 nt, synthetic construct
  source 1..22: mol_type = other RNA
catgtgttggcactgaagccag

SEQ ID NO: 127443 - RNA, 22 nt, synthetic construct
  source 1..22: mol_type = other RNA
catgtgttgtgcacacatccac

SEQ ID NO: 127444 - RNA, 22 nt, synthetic construct
  source 1..22: mol_type = other RNA
catgtgttttatttaggccctc

SEQ ID NO: 127445 - RNA, 22 nt, synthetic construct
  source 1..22: mol_type = other RNA
catgtgttttgttttgaataac

SEQ ID NO: 127446 - RNA, 22 nt, synthetic construct
  source 1..22: mol_type = other RNA
catgttactcattatggttgtt

SEQ ID NO: 127447 - RNA, 22 nt, synthetic construct
  source 1..22: mol_type = other RNA
catgttagattaggaaacagat

SEQ ID NO: 127448 - RNA, 22 nt, synthetic construct
  source 1..22: mol_type = other RNA
catgttagcataattcgaaata

SEQ ID NO: 127449 - RNA, 22 nt, synthetic construct
  source 1..22: mol_type = other RNA
catgttaggttgaaagttcaga

SEQ ID NO: 127450 - RNA, 22 nt, synthetic construct
  source 1..22: mol_type = other RNA
catgttatttggggattctgct

SEQ ID NO: 127451 - RNA, 22 nt, synthetic construct
  source 1..22: mol_type = other RNA
catgttcaaggtgttcctgaag

SEQ ID NO: 127452 - RNA, 22 nt, synthetic construct
  source 1..22: mol_type = other RNA
catgttcactgcagaattactg

SEQ ID NO: 127453 - RNA, 22 nt, synthetic construct
  source 1..22: mol_type = other RNA
catgttcagttataaaagaatc

SEQ ID NO: 127454 - RNA, 22 nt, synthetic construct
  source 1..22: mol_type = other RNA
catgttcatgggaagatgctcc

SEQ ID NO: 127455 - RNA, 22 nt, synthetic construct
  source 1..22: mol_type = other RNA
catgttcccggattggaaaact

SEQ ID NO: 127456 - RNA, 22 nt, synthetic construct
  source 1..22: mol_type = other RNA
catgttccctagaacttaaaat

SEQ ID NO: 127457 - RNA, 22 nt, synthetic construct
  source 1..22: mol_type = other RNA
catgttctttatagcatttgaa

SEQ ID NO: 127458 - RNA, 22 nt, synthetic construct
  source 1..22: mol_type = other RNA
catgttgaccatttttatatct

SEQ ID NO: 127459 - RNA, 22 nt, synthetic construct
  source 1..22: mol_type = other RNA
catgttgagtcttgtttaccca

SEQ ID NO: 127460 - RNA, 22 nt, synthetic construct
  source 1..22: mol_type = other RNA
catgttgctttgcgaaatagta

SEQ ID NO: 127461 - RNA, 22 nt, synthetic construct
  source 1..22: mol_type = other RNA
catgttggatagtttctcaact

SEQ ID NO: 127462 - RNA, 22 nt, synthetic construct
  source 1..22: mol_type = other RNA
catgttgggccaacttccagca

SEQ ID NO: 127463 - RNA, 22 nt, synthetic construct
  source 1..22: mol_type = other RNA
catgttgggtaaaaataatcaa

SEQ ID NO: 127464 - RNA, 22 nt, synthetic construct
  source 1..22: mol_type = other RNA
catgttgtgtagaaatgtggag

SEQ ID NO: 127465 - RNA, 22 nt, synthetic construct
  source 1..22: mol_type = other RNA
catgttgttcttttcaaaaaca

SEQ ID NO: 127466 - RNA, 22 nt, synthetic construct
  source 1..22: mol_type = other RNA
catgttgttgaatgtggcagaa

SEQ ID NO: 127467 - RNA, 22 nt, synthetic construct
  source 1..22: mol_type = other RNA
catgtttaactatcctatgtgg

SEQ ID NO: 127468 - RNA, 22 nt, synthetic construct
  source 1..22: mol_type = other RNA
catgtttacagaaatatacctt

SEQ ID NO: 127469 - RNA, 22 nt, synthetic construct
  source 1..22: mol_type = other RNA
catgtttagcaagattactgga

SEQ ID NO: 127470 - RNA, 22 nt, synthetic construct
  source 1..22: mol_type = other RNA
catgtttccataaaaagcgttg

SEQ ID NO: 127471 - RNA, 22 nt, synthetic construct
  source 1..22: mol_type = other RNA
catgtttctcctgcatggggag

SEQ ID NO: 127472 - RNA, 22 nt, synthetic construct
  source 1..22: mol_type = other RNA
catgtttgaattttccattcac

SEQ ID NO: 127473 - RNA, 22 nt, synthetic construct
  source 1..22: mol_type = other RNA
catgtttggtcaattgatctgc

SEQ ID NO: 127474 - RNA, 22 nt, synthetic construct
  source 1..22: mol_type = other RNA
catgtttgtggttttaacctct

SEQ ID NO: 127475 - RNA, 22 nt, synthetic construct
  source 1..22: mol_type = other RNA
catgttttaggagtcaactaat

SEQ ID NO: 127476 - RNA, 22 nt, synthetic construct
  source 1..22: mol_type = other RNA
catgttttatttcttgacctca

SEQ ID NO: 127477 - RNA, 22 nt, synthetic construct
  source 1..22: mol_type = other RNA
catgttttcaaatgctataaag

SEQ ID NO: 127478 - RNA, 22 nt, synthetic construct
  source 1..22: mol_type = other RNA
cattaaaaatcaacccatgaaa

SEQ ID NO: 127479 - RNA, 22 nt, synthetic construct
  source 1..22: mol_type = other RNA
cattaaaaggtataaaggatgc

SEQ ID NO: 127480 - RNA, 22 nt, synthetic construct
  source 1..22: mol_type = other RNA
cattaaagacagctactaaaca

SEQ ID NO: 127481 - RNA, 22 nt, synthetic construct
  source 1..22: mol_type = other RNA
cattaaataagggcattttcaa

SEQ ID NO: 127482 - RNA, 22 nt, synthetic construct
  source 1..22: mol_type = other RNA
cattaacagatgaatgaacaaa

SEQ ID NO: 127483 - RNA, 22 nt, synthetic construct
  source 1..22: mol_type = other RNA
cattaacagctcagaagctata

SEQ ID NO: 127484 - RNA, 22 nt, synthetic construct
  source 1..22: mol_type = other RNA
cattaactatggacatgaggaa

SEQ ID NO: 127485 - RNA, 22 nt, synthetic construct
  source 1..22: mol_type = other RNA
cattaagccagtcactaaaaat

SEQ ID NO: 127486 - RNA, 22 nt, synthetic construct
  source 1..22: mol_type = other RNA
cattaaggaagaattaacacta

SEQ ID NO: 127487 - RNA, 22 nt, synthetic construct
  source 1..22: mol_type = other RNA
cattaaggacatccacaacatt

SEQ ID NO: 127488 - RNA, 22 nt, synthetic construct
  source 1..22: mol_type = other RNA
cattaagggaaacagggttaca

SEQ ID NO: 127489 - RNA, 22 nt, synthetic construct
  source 1..22: mol_type = other RNA
cattaataagatcatacacctg

SEQ ID NO: 127490 - RNA, 22 nt, synthetic construct
  source 1..22: mol_type = other RNA
cattaatctcatccacaatgag

SEQ ID NO: 127491 - RNA, 22 nt, synthetic construct
  source 1..22: mol_type = other RNA
cattaatgcaacctgctttcct

SEQ ID NO: 127492 - RNA, 22 nt, synthetic construct
  source 1..22: mol_type = other RNA
cattaatgcttcatattttgtg

SEQ ID NO: 127493 - RNA, 22 nt, synthetic construct
  source 1..22: mol_type = other RNA
cattaattgagagctttctttt

SEQ ID NO: 127494 - RNA, 22 nt, synthetic construct
  source 1..22: mol_type = other RNA
cattacaacagcaaggctcctg

SEQ ID NO: 127495 - RNA, 22 nt, synthetic construct
  source 1..22: mol_type = other RNA
cattacaattgataccatgaaa

SEQ ID NO: 127496 - RNA, 22 nt, synthetic construct
  source 1..22: mol_type = other RNA
cattacagaaaaaattagcctt

SEQ ID NO: 127497 - RNA, 22 nt, synthetic construct
  source 1..22: mol_type = other RNA
cattacagtctcgaccccctgg

SEQ ID NO: 127498 - RNA, 22 nt, synthetic construct
  source 1..22: mol_type = other RNA
cattacatattttgtaacgtgt

SEQ ID NO: 127499 - RNA, 22 nt, synthetic construct
  source 1..22: mol_type = other RNA
cattacatgaatggaaaattct

SEQ ID NO: 127500 - RNA, 22 nt, synthetic construct
  source 1..22: mol_type = other RNA
cattacatttgcttaggctgtt

SEQ ID NO: 127501 - RNA, 22 nt, synthetic construct
  source 1..22: mol_type = other RNA
cattaccaaaacctggtatgag

SEQ ID NO: 127502 - RNA, 22 nt, synthetic construct
  source 1..22: mol_type = other RNA
cattaccaataaaagcctcatt

SEQ ID NO: 127503 - RNA, 22 nt, synthetic construct
  source 1..22: mol_type = other RNA
cattaccaggctggaagaattt

SEQ ID NO: 127504 - RNA, 22 nt, synthetic construct
  source 1..22: mol_type = other RNA
cattaccctaataacaaaatag

SEQ ID NO: 127505 - RNA, 22 nt, synthetic construct
  source 1..22: mol_type = other RNA
cattaccttatagatgacgaaa

SEQ ID NO: 127506 - RNA, 22 nt, synthetic construct
  source 1..22: mol_type = other RNA
cattacgagttatgcaagatgt

SEQ ID NO: 127507 - RNA, 22 nt, synthetic construct
  source 1..22: mol_type = other RNA
cattactcggtatgtacccaat

SEQ ID NO: 127508 - RNA, 22 nt, synthetic construct
  source 1..22: mol_type = other RNA
cattactcgtggttatagccat

SEQ ID NO: 127509 - RNA, 22 nt, synthetic construct
  source 1..22: mol_type = other RNA
cattactcttctactcactgta

SEQ ID NO: 127510 - RNA, 22 nt, synthetic construct
  source 1..22: mol_type = other RNA
cattacttaggcagttattaag

SEQ ID NO: 127511 - RNA, 22 nt, synthetic construct
  source 1..22: mol_type = other RNA
cattacttttttgtagagacag

SEQ ID NO: 127512 - RNA, 22 nt, synthetic construct
  source 1..22: mol_type = other RNA
cattagaatcatccggggagct

SEQ ID NO: 127513 - RNA, 22 nt, synthetic construct
  source 1..22: mol_type = other RNA
cattagaattcaggacagtcat

SEQ ID NO: 127514 - RNA, 22 nt, synthetic construct
  source 1..22: mol_type = other RNA
cattagacactaactttctatt

SEQ ID NO: 127515 - RNA, 22 nt, synthetic construct
  source 1..22: mol_type = other RNA
cattagagaagaatgagaaaca

SEQ ID NO: 127516 - RNA, 22 nt, synthetic construct
  source 1..22: mol_type = other RNA
cattagagccccaagaaagcag

SEQ ID NO: 127517 - RNA, 22 nt, synthetic construct
  source 1..22: mol_type = other RNA
cattagagtaagcaactgcatc

SEQ ID NO: 127518 - RNA, 22 nt, synthetic construct
  source 1..22: mol_type = other RNA
cattagcagttctgtaccctta

SEQ ID NO: 127519 - RNA, 22 nt, synthetic construct
  source 1..22: mol_type = other RNA
cattagccactctgaattctct

SEQ ID NO: 127520 - RNA, 22 nt, synthetic construct
  source 1..22: mol_type = other RNA
cattagcctagacctcaaatta

SEQ ID NO: 127521 - RNA, 22 nt, synthetic construct
  source 1..22: mol_type = other RNA
cattaggatagctattatttga

SEQ ID NO: 127522 - RNA, 22 nt, synthetic construct
  source 1..22: mol_type = other RNA
cattaggctctgggtcagaatc

SEQ ID NO: 127523 - RNA, 22 nt, synthetic construct
  source 1..22: mol_type = other RNA
cattaggttgatggctgtacta

SEQ ID NO: 127524 - RNA, 22 nt, synthetic construct
  source 1..22: mol_type = other RNA
cattagtgaattcacagtagaa

SEQ ID NO: 127525 - RNA, 22 nt, synthetic construct
  source 1..22: mol_type = other RNA
cattagtggaaaaactgcagca

SEQ ID NO: 127526 - RNA, 22 nt, synthetic construct
  source 1..22: mol_type = other RNA
cattagtggtggtagtaaggat

SEQ ID NO: 127527 - RNA, 22 nt, synthetic construct
  source 1..22: mol_type = other RNA
cattagttatctcttagacctc

SEQ ID NO: 127528 - RNA, 22 nt, synthetic construct
  source 1..22: mol_type = other RNA
cattataaaataggaagtccat

SEQ ID NO: 127529 - RNA, 22 nt, synthetic construct
  source 1..22: mol_type = other RNA
cattataacataaaagcgtact

SEQ ID NO: 127530 - RNA, 22 nt, synthetic construct
  source 1..22: mol_type = other RNA
cattatatgaataaaccacgca

SEQ ID NO: 127531 - RNA, 22 nt, synthetic construct
  source 1..22: mol_type = other RNA
cattatatttcacaacgatttc

SEQ ID NO: 127532 - RNA, 22 nt, synthetic construct
  source 1..22: mol_type = other RNA
cattatcccagacagatatatg

SEQ ID NO: 127533 - RNA, 22 nt, synthetic construct
  source 1..22: mol_type = other RNA
cattatcccagatctaacaaac

SEQ ID NO: 127534 - RNA, 22 nt, synthetic construct
  source 1..22: mol_type = other RNA
cattatccctttaaaatgatag

SEQ ID NO: 127535 - RNA, 22 nt, synthetic construct
  source 1..22: mol_type = other RNA
cattatcctatcagagcatgtc

SEQ ID NO: 127536 - RNA, 22 nt, synthetic construct
  source 1..22: mol_type = other RNA
cattatcttaataacctcaaag

SEQ ID NO: 127537 - RNA, 22 nt, synthetic construct
  source 1..22: mol_type = other RNA
cattatcttctaccttttgtta

SEQ ID NO: 127538 - RNA, 22 nt, synthetic construct
  source 1..22: mol_type = other RNA
cattatggttgttggctaaaag

SEQ ID NO: 127539 - RNA, 22 nt, synthetic construct
  source 1..22: mol_type = other RNA
cattattagcaaacatttatgg

SEQ ID NO: 127540 - RNA, 22 nt, synthetic construct
  source 1..22: mol_type = other RNA
cattattccataaaaaccaaac

SEQ ID NO: 127541 - RNA, 22 nt, synthetic construct
  source 1..22: mol_type = other RNA
cattattcttacagtgacatat

SEQ ID NO: 127542 - RNA, 22 nt, synthetic construct
  source 1..22: mol_type = other RNA
cattattttctttgagtagttc

SEQ ID NO: 127543 - RNA, 22 nt, synthetic construct
  source 1..22: mol_type = other RNA
cattcaaatgatattcactgat

SEQ ID NO: 127544 - RNA, 22 nt, synthetic construct
  source 1..22: mol_type = other RNA
cattcaacaacatggatgaacc

SEQ ID NO: 127545 - RNA, 22 nt, synthetic construct
  source 1..22: mol_type = other RNA
cattcaagcagaaatgagttcc

SEQ ID NO: 127546 - RNA, 22 nt, synthetic construct
  source 1..22: mol_type = other RNA
cattcaatccttgtaactttta

SEQ ID NO: 127547 - RNA, 22 nt, synthetic construct
  source 1..22: mol_type = other RNA
cattcaattgtcctggcagatc

SEQ ID NO: 127548 - RNA, 22 nt, synthetic construct
  source 1..22: mol_type = other RNA
cattcacacaccctttcttagg

SEQ ID NO: 127549 - RNA, 22 nt, synthetic construct
  source 1..22: mol_type = other RNA
cattcacactagtcaccctaca

SEQ ID NO: 127550 - RNA, 22 nt, synthetic construct
  source 1..22: mol_type = other RNA
cattcacagcgtgcaccttaca

SEQ ID NO: 127551 - RNA, 22 nt, synthetic construct
  source 1..22: mol_type = other RNA
cattcactagacacatttttga

SEQ ID NO: 127552 - RNA, 22 nt, synthetic construct
  source 1..22: mol_type = other RNA
cattcactcagcataattggtt

SEQ ID NO: 127553 - RNA, 22 nt, synthetic construct
  source 1..22: mol_type = other RNA
cattcagaggtatttggggcta

SEQ ID NO: 127554 - RNA, 22 nt, synthetic construct
  source 1..22: mol_type = other RNA
cattcaggacactggaggtgca

SEQ ID NO: 127555 - RNA, 22 nt, synthetic construct
  source 1..22: mol_type = other RNA
cattcaggtctatgtgacagaa

SEQ ID NO: 127556 - RNA, 22 nt, synthetic construct
  source 1..22: mol_type = other RNA
cattcataaacacagaacacta

SEQ ID NO: 127557 - RNA, 22 nt, synthetic construct
  source 1..22: mol_type = other RNA
cattcatactgaaggcataggg

SEQ ID NO: 127558 - RNA, 22 nt, synthetic construct
  source 1..22: mol_type = other RNA
cattcatatttgttcaagcgct

SEQ ID NO: 127559 - RNA, 22 nt, synthetic construct
  source 1..22: mol_type = other RNA
cattcatccaggcaaaagatga

SEQ ID NO: 127560 - RNA, 22 nt, synthetic construct
  source 1..22: mol_type = other RNA
cattcatccctctaaataggta

SEQ ID NO: 127561 - RNA, 22 nt, synthetic construct
  source 1..22: mol_type = other RNA
cattcatctaaacgtttggtga

SEQ ID NO: 127562 - RNA, 22 nt, synthetic construct
  source 1..22: mol_type = other RNA
cattcatctctcgatggacatt

SEQ ID NO: 127563 - RNA, 22 nt, synthetic construct
  source 1..22: mol_type = other RNA
cattcatctgcagtgtccatct

SEQ ID NO: 127564 - RNA, 22 nt, synthetic construct
  source 1..22: mol_type = other RNA
cattcatctgttaatgggcact

SEQ ID NO: 127565 - RNA, 22 nt, synthetic construct
  source 1..22: mol_type = other RNA
cattcatgacaagaatctttgg

SEQ ID NO: 127566 - RNA, 22 nt, synthetic construct
  source 1..22: mol_type = other RNA
cattcatgtaatgcaaactcta

SEQ ID NO: 127567 - RNA, 22 nt, synthetic construct
  source 1..22: mol_type = other RNA
cattcattcatgacaagaatct

SEQ ID NO: 127568 - RNA, 22 nt, synthetic construct
  source 1..22: mol_type = other RNA
cattccaagagaggaataaatg

SEQ ID NO: 127569 - RNA, 22 nt, synthetic construct
  source 1..22: mol_type = other RNA
cattccaatccttccttcatgt

SEQ ID NO: 127570 - RNA, 22 nt, synthetic construct
  source 1..22: mol_type = other RNA
cattccacgctgtggcttgggt

SEQ ID NO: 127571 - RNA, 22 nt, synthetic construct
  source 1..22: mol_type = other RNA
cattccagaccagcagttcaag

SEQ ID NO: 127572 - RNA, 22 nt, synthetic construct
  source 1..22: mol_type = other RNA
cattccagagggtaacgtgagc

SEQ ID NO: 127573 - RNA, 22 nt, synthetic construct
  source 1..22: mol_type = other RNA
cattccagattgaaatctaggc

SEQ ID NO: 127574 - RNA, 22 nt, synthetic construct
  source 1..22: mol_type = other RNA
cattccagccattctcttctgg

SEQ ID NO: 127575 - RNA, 22 nt, synthetic construct
  source 1..22: mol_type = other RNA
cattccaggttttatctctctc

SEQ ID NO: 127576 - RNA, 22 nt, synthetic construct
  source 1..22: mol_type = other RNA
cattcccaaatgtcttaagaag

SEQ ID NO: 127577 - RNA, 22 nt, synthetic construct
  source 1..22: mol_type = other RNA
cattcccatgttcactgcagaa

SEQ ID NO: 127578 - RNA, 22 nt, synthetic construct
  source 1..22: mol_type = other RNA
cattccccacataggatagtta

SEQ ID NO: 127579 - RNA, 22 nt, synthetic construct
  source 1..22: mol_type = other RNA
cattccccttgccaaggcttgc

SEQ ID NO: 127580 - RNA, 22 nt, synthetic construct
  source 1..22: mol_type = other RNA
cattccctgtctgggaagttat

SEQ ID NO: 127581 - RNA, 22 nt, synthetic construct
  source 1..22: mol_type = other RNA
cattccctgtctgtgatgtaga

SEQ ID NO: 127582 - RNA, 22 nt, synthetic construct
  source 1..22: mol_type = other RNA
cattccgcctgggcgacagagc

SEQ ID NO: 127583 - RNA, 22 nt, synthetic construct
  source 1..22: mol_type = other RNA
cattccgcgtttattagaacta

SEQ ID NO: 127584 - RNA, 22 nt, synthetic construct
  source 1..22: mol_type = other RNA
cattccgctaaacattttatta

SEQ ID NO: 127585 - RNA, 22 nt, synthetic construct
  source 1..22: mol_type = other RNA
cattccgtatatatttttatgc

SEQ ID NO: 127586 - RNA, 22 nt, synthetic construct
  source 1..22: mol_type = other RNA
cattccgtggaaggccttctcc

SEQ ID NO: 127587 - RNA, 22 nt, synthetic construct
  source 1..22: mol_type = other RNA
cattcctgaaatgaaccaaact

SEQ ID NO: 127588 - RNA, 22 nt, synthetic construct
  source 1..22: mol_type = other RNA
cattccttccgacctgtagatt

SEQ ID NO: 127589 - RNA, 22 nt, synthetic construct
  source 1..22: mol_type = other RNA
cattccttcttcacacattaac

SEQ ID NO: 127590 - RNA, 22 nt, synthetic construct
  source 1..22: mol_type = other RNA
cattccttttcgagactgagta

SEQ ID NO: 127591 - RNA, 22 nt, synthetic construct
  source 1..22: mol_type = other RNA
cattcggccaagatctgttttt

SEQ ID NO: 127592 - RNA, 22 nt, synthetic construct
  source 1..22: mol_type = other RNA
cattcgtagcaggtttaggaag

SEQ ID NO: 127593 - RNA, 22 nt, synthetic construct
  source 1..22: mol_type = other RNA
cattcgtccctaaacactgtag

SEQ ID NO: 127594 - RNA, 22 nt, synthetic construct
  source 1..22: mol_type = other RNA
cattcgttcaaaacatcatcta

SEQ ID NO: 127595 - RNA, 22 nt, synthetic construct
  source 1..22: mol_type = other RNA
cattctacagtattacacagaa

SEQ ID NO: 127596 - RNA, 22 nt, synthetic construct
  source 1..22: mol_type = other RNA
cattctacctggagcctgagga

SEQ ID NO: 127597 - RNA, 22 nt, synthetic construct
  source 1..22: mol_type = other RNA
cattctagaaaggagggactga

SEQ ID NO: 127598 - RNA, 22 nt, synthetic construct
  source 1..22: mol_type = other RNA
cattctagtgatgggagatgga

SEQ ID NO: 127599 - RNA, 22 nt, synthetic construct
  source 1..22: mol_type = other RNA
cattctcccagttgtcagaatt

SEQ ID NO: 127600 - RNA, 22 nt, synthetic construct
  source 1..22: mol_type = other RNA
cattctcttctggatagcatta

SEQ ID NO: 127601 - RNA, 22 nt, synthetic construct
  source 1..22: mol_type = other RNA
cattctgcagtttgtgttttca

SEQ ID NO: 127602 - RNA, 22 nt, synthetic construct
  source 1..22: mol_type = other RNA
cattctgcctgcagactgcagg

SEQ ID NO: 127603 - RNA, 22 nt, synthetic construct
  source 1..22: mol_type = other RNA
cattctgctatgaaatgtggtt

SEQ ID NO: 127604 - RNA, 22 nt, synthetic construct
  source 1..22: mol_type = other RNA
cattctgcttccttgctatgta

SEQ ID NO: 127605 - RNA, 22 nt, synthetic construct
  source 1..22: mol_type = other RNA
cattctggagtgttttcttcat

SEQ ID NO: 127606 - RNA, 22 nt, synthetic construct
  source 1..22: mol_type = other RNA
cattctgtcacatagacctgaa

SEQ ID NO: 127607 - RNA, 22 nt, synthetic construct
  source 1..22: mol_type = other RNA
cattctgttaatgtgatatgcc

SEQ ID NO: 127608 - RNA, 22 nt, synthetic construct
  source 1..22: mol_type = other RNA
cattcttaccttctaaaatcat

SEQ ID NO: 127609 - RNA, 22 nt, synthetic construct
  source 1..22: mol_type = other RNA
cattcttattgattcagatgac

SEQ ID NO: 127610 - RNA, 22 nt, synthetic construct
  source 1..22: mol_type = other RNA
cattcttcaccattccagccat

SEQ ID NO: 127611 - RNA, 22 nt, synthetic construct
  source 1..22: mol_type = other RNA
cattcttctaataggaagtggc

SEQ ID NO: 127612 - RNA, 22 nt, synthetic construct
  source 1..22: mol_type = other RNA
cattcttctctaatgtaaacag

SEQ ID NO: 127613 - RNA, 22 nt, synthetic construct
  source 1..22: mol_type = other RNA
cattcttgacatgattgaggac

SEQ ID NO: 127614 - RNA, 22 nt, synthetic construct
  source 1..22: mol_type = other RNA
cattctttttactcgagggtag

SEQ ID NO: 127615 - RNA, 22 nt, synthetic construct
  source 1..22: mol_type = other RNA
cattgaaactcaatgttggtta

SEQ ID NO: 127616 - RNA, 22 nt, synthetic construct
  source 1..22: mol_type = other RNA
cattgaagctactattccagga

SEQ ID NO: 127617 - RNA, 22 nt, synthetic construct
  source 1..22: mol_type = other RNA
cattgaaggcagaattatagag

SEQ ID NO: 127618 - RNA, 22 nt, synthetic construct
  source 1..22: mol_type = other RNA
cattgaagtatagtttgaagtc

SEQ ID NO: 127619 - RNA, 22 nt, synthetic construct
  source 1..22: mol_type = other RNA
cattgacaatataggagactat

SEQ ID NO: 127620 - RNA, 22 nt, synthetic construct
  source 1..22: mol_type = other RNA
cattgactaccaattctccctg

SEQ ID NO: 127621 - RNA, 22 nt, synthetic construct
  source 1..22: mol_type = other RNA
cattgagccaaagaagaaatca

SEQ ID NO: 127622 - RNA, 22 nt, synthetic construct
  source 1..22: mol_type = other RNA
cattgagtttcaatgactttta

SEQ ID NO: 127623 - RNA, 22 nt, synthetic construct
  source 1..22: mol_type = other RNA
cattgatacaatacttggatct

SEQ ID NO: 127624 - RNA, 22 nt, synthetic construct
  source 1..22: mol_type = other RNA
cattgattttgtatcctgagac

SEQ ID NO: 127625 - RNA, 22 nt, synthetic construct
  source 1..22: mol_type = other RNA
cattgcacagtctcccccaggt

SEQ ID NO: 127626 - RNA, 22 nt, synthetic construct
  source 1..22: mol_type = other RNA
cattgcaccactgcactccagt

SEQ ID NO: 127627 - RNA, 22 nt, synthetic construct
  source 1..22: mol_type = other RNA
cattgcactccacgtgggtgac

SEQ ID NO: 127628 - RNA, 22 nt, synthetic construct
  source 1..22: mol_type = other RNA
cattgcattgactaccaattct

SEQ ID NO: 127629 - RNA, 22 nt, synthetic construct
  source 1..22: mol_type = other RNA
cattgcatttacttgtcatttc

SEQ ID NO: 127630 - RNA, 22 nt, synthetic construct
  source 1..22: mol_type = other RNA
cattgcctatagacagcatccc

SEQ ID NO: 127631 - RNA, 22 nt, synthetic construct
  source 1..22: mol_type = other RNA
cattgcctccatatgggatgct

SEQ ID NO: 127632 - RNA, 22 nt, synthetic construct
  source 1..22: mol_type = other RNA
cattgccttcaagttgcttttt

SEQ ID NO: 127633 - RNA, 22 nt, synthetic construct
  source 1..22: mol_type = other RNA
cattgccttcgcagggtgaaac

SEQ ID NO: 127634 - RNA, 22 nt, synthetic construct
  source 1..22: mol_type = other RNA
cattgctaattcattgtacatg

SEQ ID NO: 127635 - RNA, 22 nt, synthetic construct
  source 1..22: mol_type = other RNA
cattggaggataatatctggac

SEQ ID NO: 127636 - RNA, 22 nt, synthetic construct
  source 1..22: mol_type = other RNA
cattgggagctttcattattac

SEQ ID NO: 127637 - RNA, 22 nt, synthetic construct
  source 1..22: mol_type = other RNA
cattgggtacataccgagtaat

SEQ ID NO: 127638 - RNA, 22 nt, synthetic construct
  source 1..22: mol_type = other RNA
cattggttattcatgtttgtgg

SEQ ID NO: 127639 - RNA, 22 nt, synthetic construct
  source 1..22: mol_type = other RNA
cattggtttgaaatgatctttt

SEQ ID NO: 127640 - RNA, 22 nt, synthetic construct
  source 1..22: mol_type = other RNA
cattgtaaaccatatggttaat

SEQ ID NO: 127641 - RNA, 22 nt, synthetic construct
  source 1..22: mol_type = other RNA
cattgtaatcctgtttctctac

SEQ ID NO: 127642 - RNA, 22 nt, synthetic construct
  source 1..22: mol_type = other RNA
cattgtacatgaagtcctcaat

SEQ ID NO: 127643 - RNA, 22 nt, synthetic construct
  source 1..22: mol_type = other RNA
cattgtagctatatcccaaatt

SEQ ID NO: 127644 - RNA, 22 nt, synthetic construct
  source 1..22: mol_type = other RNA
cattgtatttctgttagatggt

SEQ ID NO: 127645 - RNA, 22 nt, synthetic construct
  source 1..22: mol_type = other RNA
cattgtcccgggggagggcggg

SEQ ID NO: 127646 - RNA, 22 nt, synthetic construct
  source 1..22: mol_type = other RNA
cattgtcttacataggcttagt

SEQ ID NO: 127647 - RNA, 22 nt, synthetic construct
  source 1..22: mol_type = other RNA
cattgtgatgtctcagatgtct

SEQ ID NO: 127648 - RNA, 22 nt, synthetic construct
  source 1..22: mol_type = other RNA
cattgtgcaaccatccccgctg

SEQ ID NO: 127649 - RNA, 22 nt, synthetic construct
  source 1..22: mol_type = other RNA
cattgtgcacttaaaatttaga

SEQ ID NO: 127650 - RNA, 22 nt, synthetic construct
  source 1..22: mol_type = other RNA
cattgtgcatatataccacatt

SEQ ID NO: 127651 - RNA, 22 nt, synthetic construct
  source 1..22: mol_type = other RNA
cattgtgctcagtggttctgcg

SEQ ID NO: 127652 - RNA, 22 nt, synthetic construct
  source 1..22: mol_type = other RNA
cattgtggatgagattaatgta

SEQ ID NO: 127653 - RNA, 22 nt, synthetic construct
  source 1..22: mol_type = other RNA
cattgtgtggacacactgaaac

SEQ ID NO: 127654 - RNA, 22 nt, synthetic construct
  source 1..22: mol_type = other RNA
cattgtgttgcccacgctggtc

SEQ ID NO: 127655 - RNA, 22 nt, synthetic construct
  source 1..22: mol_type = other RNA
cattgttaggtgctggcttcaa

SEQ ID NO: 127656 - RNA, 22 nt, synthetic construct
  source 1..22: mol_type = other RNA
cattgttcagggaaggctgcaa

SEQ ID NO: 127657 - RNA, 22 nt, synthetic construct
  source 1..22: mol_type = other RNA
cattgttctctttgtttatcct

SEQ ID NO: 127658 - RNA, 22 nt, synthetic construct
  source 1..22: mol_type = other RNA
cattgttgtgtgttaaatttga

SEQ ID NO: 127659 - RNA, 22 nt, synthetic construct
  source 1..22: mol_type = other RNA
cattgtttacagtagccaaagg

SEQ ID NO: 127660 - RNA, 22 nt, synthetic construct
  source 1..22: mol_type = other RNA
catttaaaaattagccaggtgt

SEQ ID NO: 127661 - RNA, 22 nt, synthetic construct
  source 1..22: mol_type = other RNA
catttaaaagaaaatggccaag

SEQ ID NO: 127662 - RNA, 22 nt, synthetic construct
  source 1..22: mol_type = other RNA
catttaaaagaacctctggaaa

SEQ ID NO: 127663 - RNA, 22 nt, synthetic construct
  source 1..22: mol_type = other RNA
catttaaaatctgattcagtgg

SEQ ID NO: 127664 - RNA, 22 nt, synthetic construct
  source 1..22: mol_type = other RNA
catttaaaattgcagagtgttc

SEQ ID NO: 127665 - RNA, 22 nt, synthetic construct
  source 1..22: mol_type = other RNA
catttaaacgtcagagcagcac

SEQ ID NO: 127666 - RNA, 22 nt, synthetic construct
  source 1..22: mol_type = other RNA
catttaagaagggaacactaag

SEQ ID NO: 127667 - RNA, 22 nt, synthetic construct
  source 1..22: mol_type = other RNA
catttacaaaaacacactgagc

SEQ ID NO: 127668 - RNA, 22 nt, synthetic construct
  source 1..22: mol_type = other RNA
catttaccccttaaattccaaa

SEQ ID NO: 127669 - RNA, 22 nt, synthetic construct
  source 1..22: mol_type = other RNA
catttactgaaatcctagcccc

SEQ ID NO: 127670 - RNA, 22 nt, synthetic construct
  source 1..22: mol_type = other RNA
catttactgctataaacttccc

SEQ ID NO: 127671 - RNA, 22 nt, synthetic construct
  source 1..22: mol_type = other RNA
catttacttgtcatttctgctt

SEQ ID NO: 127672 - RNA, 22 nt, synthetic construct
  source 1..22: mol_type = other RNA
catttagccccctgaatacccc

SEQ ID NO: 127673 - RNA, 22 nt, synthetic construct
  source 1..22: mol_type = other RNA
catttagtaagtgtgagcaaaa

SEQ ID NO: 127674 - RNA, 22 nt, synthetic construct
  source 1..22: mol_type = other RNA
catttagtttcatctatgtccc

SEQ ID NO: 127675 - RNA, 22 nt, synthetic construct
  source 1..22: mol_type = other RNA
catttatacagttggaactctt

SEQ ID NO: 127676 - RNA, 22 nt, synthetic construct
  source 1..22: mol_type = other RNA
catttatacccaagtaaacaac

SEQ ID NO: 127677 - RNA, 22 nt, synthetic construct
  source 1..22: mol_type = other RNA
catttatcagcaccaaagatta

SEQ ID NO: 127678 - RNA, 22 nt, synthetic construct
  source 1..22: mol_type = other RNA
catttatggaattgccatatgt

SEQ ID NO: 127679 - RNA, 22 nt, synthetic construct
  source 1..22: mol_type = other RNA
catttattaaagtagaaggccc

SEQ ID NO: 127680 - RNA, 22 nt, synthetic construct
  source 1..22: mol_type = other RNA
catttattagtagttaggtggt

SEQ ID NO: 127681 - RNA, 22 nt, synthetic construct
  source 1..22: mol_type = other RNA
catttattcctctcttggaatg

SEQ ID NO: 127682 - RNA, 22 nt, synthetic construct
  source 1..22: mol_type = other RNA
catttattgtcaaggtcatcct

SEQ ID NO: 127683 - RNA, 22 nt, synthetic construct
  source 1..22: mol_type = other RNA
catttcaaaccaatgttctctt

SEQ ID NO: 127684 - RNA, 22 nt, synthetic construct
  source 1..22: mol_type = other RNA
catttcactcttttaaggttta

SEQ ID NO: 127685 - RNA, 22 nt, synthetic construct
  source 1..22: mol_type = other RNA
catttcacttgattactttaca

SEQ ID NO: 127686 - RNA, 22 nt, synthetic construct
  source 1..22: mol_type = other RNA
catttcagccaaagctggcatg

SEQ ID NO: 127687 - RNA, 22 nt, synthetic construct
  source 1..22: mol_type = other RNA
catttcaggaatgcaaagtttc

SEQ ID NO: 127688 - RNA, 22 nt, synthetic construct
  source 1..22: mol_type = other RNA
catttcaggttttcgaccaagt

SEQ ID NO: 127689 - RNA, 22 nt, synthetic construct
  source 1..22: mol_type = other RNA
catttcatagcagaatggccct

SEQ ID NO: 127690 - RNA, 22 nt, synthetic construct
  source 1..22: mol_type = other RNA
catttcatgccatcctggattt

SEQ ID NO: 127691 - RNA, 22 nt, synthetic construct
  source 1..22: mol_type = other RNA
catttccaaagatcatgggttt

SEQ ID NO: 127692 - RNA, 22 nt, synthetic construct
  source 1..22: mol_type = other RNA
catttccaagattgaaaatggt

SEQ ID NO: 127693 - RNA, 22 nt, synthetic construct
  source 1..22: mol_type = other RNA
catttccagtactttttcatcc

SEQ ID NO: 127694 - RNA, 22 nt, synthetic construct
  source 1..22: mol_type = other RNA
catttccctgcttcatctggac

SEQ ID NO: 127695 - RNA, 22 nt, synthetic construct
  source 1..22: mol_type = other RNA
catttccgttgctgcatagtac

SEQ ID NO: 127696 - RNA, 22 nt, synthetic construct
  source 1..22: mol_type = other RNA
catttccttaagcacagactgt

SEQ ID NO: 127697 - RNA, 22 nt, synthetic construct
  source 1..22: mol_type = other RNA
catttcctttcagtcggttctt

SEQ ID NO: 127698 - RNA, 22 nt, synthetic construct
  source 1..22: mol_type = other RNA
catttcgccttctcagaaggac

SEQ ID NO: 127699 - RNA, 22 nt, synthetic construct
  source 1..22: mol_type = other RNA
catttcggctctgtgctgagat

SEQ ID NO: 127700 - RNA, 22 nt, synthetic construct
  source 1..22: mol_type = other RNA
catttctaagccatgtttctcc

SEQ ID NO: 127701 - RNA, 22 nt, synthetic construct
  source 1..22: mol_type = other RNA
catttctaatttccaagaaccc

SEQ ID NO: 127702 - RNA, 22 nt, synthetic construct
  source 1..22: mol_type = other RNA
catttctacacaacatgtttta

SEQ ID NO: 127703 - RNA, 22 nt, synthetic construct
  source 1..22: mol_type = other RNA
catttctcatactttgtcaggc

SEQ ID NO: 127704 - RNA, 22 nt, synthetic construct
  source 1..22: mol_type = other RNA
catttctcatgtatgttttagc

SEQ ID NO: 127705 - RNA, 22 nt, synthetic construct
  source 1..22: mol_type = other RNA
catttctctaatagctagtgat

SEQ ID NO: 127706 - RNA, 22 nt, synthetic construct
  source 1..22: mol_type = other RNA
catttctgcttagtcttctcag

SEQ ID NO: 127707 - RNA, 22 nt, synthetic construct
  source 1..22: mol_type = other RNA
catttctgcttgaatgtgccta

SEQ ID NO: 127708 - RNA, 22 nt, synthetic construct
  source 1..22: mol_type = other RNA
catttcttacacattaggctct

SEQ ID NO: 127709 - RNA, 22 nt, synthetic construct
  source 1..22: mol_type = other RNA
catttcttctagtcacatttgc

SEQ ID NO: 127710 - RNA, 22 nt, synthetic construct
  source 1..22: mol_type = other RNA
catttgaaaacatgttttgttg

SEQ ID NO: 127711 - RNA, 22 nt, synthetic construct
  source 1..22: mol_type = other RNA
catttgaaagaaagaaggccat

SEQ ID NO: 127712 - RNA, 22 nt, synthetic construct
  source 1..22: mol_type = other RNA
catttgaactcactggccagca

SEQ ID NO: 127713 - RNA, 22 nt, synthetic construct
  source 1..22: mol_type = other RNA
catttgaactttccagaagtaa

SEQ ID NO: 127714 - RNA, 22 nt, synthetic construct
  source 1..22: mol_type = other RNA
catttgaatgatgcgaaagaaa

SEQ ID NO: 127715 - RNA, 22 nt, synthetic construct
  source 1..22: mol_type = other RNA
catttgaccttccttgtgtctt

SEQ ID NO: 127716 - RNA, 22 nt, synthetic construct
  source 1..22: mol_type = other RNA
catttgagaatttcaggtgtgt

SEQ ID NO: 127717 - RNA, 22 nt, synthetic construct
  source 1..22: mol_type = other RNA
catttgagcccaggaggttgaa

SEQ ID NO: 127718 - RNA, 22 nt, synthetic construct
  source 1..22: mol_type = other RNA
catttgagggtgctgatcagga

SEQ ID NO: 127719 - RNA, 22 nt, synthetic construct
  source 1..22: mol_type = other RNA
catttgagggttagaagacaat

SEQ ID NO: 127720 - RNA, 22 nt, synthetic construct
  source 1..22: mol_type = other RNA
catttgattgccagttttctgg

SEQ ID NO: 127721 - RNA, 22 nt, synthetic construct
  source 1..22: mol_type = other RNA
catttgatttcttctttggctc

SEQ ID NO: 127722 - RNA, 22 nt, synthetic construct
  source 1..22: mol_type = other RNA
catttgcagagcaaactcagat

SEQ ID NO: 127723 - RNA, 22 nt, synthetic construct
  source 1..22: mol_type = other RNA
catttgcttaggctgttattag

SEQ ID NO: 127724 - RNA, 22 nt, synthetic construct
  source 1..22: mol_type = other RNA
catttgctttactactgcattt

SEQ ID NO: 127725 - RNA, 22 nt, synthetic construct
  source 1..22: mol_type = other RNA
catttgcttttcctggaaaact

SEQ ID NO: 127726 - RNA, 22 nt, synthetic construct
  source 1..22: mol_type = other RNA
catttggaatagagagcccaga

SEQ ID NO: 127727 - RNA, 22 nt, synthetic construct
  source 1..22: mol_type = other RNA
catttggcccagccatcccatt

SEQ ID NO: 127728 - RNA, 22 nt, synthetic construct
  source 1..22: mol_type = other RNA
catttggcctctgcggcggctg

SEQ ID NO: 127729 - RNA, 22 nt, synthetic construct
  source 1..22: mol_type = other RNA
catttgggaatgtggtcacact

SEQ ID NO: 127730 - RNA, 22 nt, synthetic construct
  source 1..22: mol_type = other RNA
catttgggacagcctagttttg

SEQ ID NO: 127731 - RNA, 22 nt, synthetic construct
  source 1..22: mol_type = other RNA
catttgggactgagacagtatt

SEQ ID NO: 127732 - RNA, 22 nt, synthetic construct
  source 1..22: mol_type = other RNA
catttggtctcattcactagac

SEQ ID NO: 127733 - RNA, 22 nt, synthetic construct
  source 1..22: mol_type = other RNA
catttggtttgcaaaaattttg

SEQ ID NO: 127734 - RNA, 22 nt, synthetic construct
  source 1..22: mol_type = other RNA
catttggttttactactgtact

SEQ ID NO: 127735 - RNA, 22 nt, synthetic construct
  source 1..22: mol_type = other RNA
catttgtaacatgttagattag

SEQ ID NO: 127736 - RNA, 22 nt, synthetic construct
  source 1..22: mol_type = other RNA
catttgtaattcatcctactag

SEQ ID NO: 127737 - RNA, 22 nt, synthetic construct
  source 1..22: mol_type = other RNA
catttgtattatttctgtcatc

SEQ ID NO: 127738 - RNA, 22 nt, synthetic construct
  source 1..22: mol_type = other RNA
catttgtggcatctttgttaca

SEQ ID NO: 127739 - RNA, 22 nt, synthetic construct
  source 1..22: mol_type = other RNA
catttgttgcatccccattcaa

SEQ ID NO: 127740 - RNA, 22 nt, synthetic construct
  source 1..22: mol_type = other RNA
catttgttttgtgtttgtgacc

SEQ ID NO: 127741 - RNA, 22 nt, synthetic construct
  source 1..22: mol_type = other RNA
cattttaaagggataatgctat

SEQ ID NO: 127742 - RNA, 22 nt, synthetic construct
  source 1..22: mol_type = other RNA
cattttaataagcttcgaagca

SEQ ID NO: 127743 - RNA, 22 nt, synthetic construct
  source 1..22: mol_type = other RNA
cattttaccaaaacagcttctt

SEQ ID NO: 127744 - RNA, 22 nt, synthetic construct
  source 1..22: mol_type = other RNA
cattttactgctatacaaccgg

SEQ ID NO: 127745 - RNA, 22 nt, synthetic construct
  source 1..22: mol_type = other RNA
cattttagatcaagtcctttcc

SEQ ID NO: 127746 - RNA, 22 nt, synthetic construct
  source 1..22: mol_type = other RNA
cattttagctggggcagcaaag

SEQ ID NO: 127747 - RNA, 22 nt, synthetic construct
  source 1..22: mol_type = other RNA
cattttataggcattccttaat

SEQ ID NO: 127748 - RNA, 22 nt, synthetic construct
  source 1..22: mol_type = other RNA
cattttattaatttggcttggg

SEQ ID NO: 127749 - RNA, 22 nt, synthetic construct
  source 1..22: mol_type = other RNA
cattttattaggtgcacacaac

SEQ ID NO: 127750 - RNA, 22 nt, synthetic construct
  source 1..22: mol_type = other RNA
cattttatttatacaggtgctt

SEQ ID NO: 127751 - RNA, 22 nt, synthetic construct
  source 1..22: mol_type = other RNA
cattttcaaggtagaagtacaa

SEQ ID NO: 127752 - RNA, 22 nt, synthetic construct
  source 1..22: mol_type = other RNA
cattttcaatcttggaaatgat

SEQ ID NO: 127753 - RNA, 22 nt, synthetic construct
  source 1..22: mol_type = other RNA
cattttccctcctttttatcac

SEQ ID NO: 127754 - RNA, 22 nt, synthetic construct
  source 1..22: mol_type = other RNA
cattttccggttgtatagcagt

SEQ ID NO: 127755 - RNA, 22 nt, synthetic construct
  source 1..22: mol_type = other RNA
cattttctaaattgaacagcct

SEQ ID NO: 127756 - RNA, 22 nt, synthetic construct
  source 1..22: mol_type = other RNA
cattttctctacagttaacaat

SEQ ID NO: 127757 - RNA, 22 nt, synthetic construct
  source 1..22: mol_type = other RNA
cattttcttatctaggcgaaat

SEQ ID NO: 127758 - RNA, 22 nt, synthetic construct
  source 1..22: mol_type = other RNA
cattttgaaaaacagatcttgg

SEQ ID NO: 127759 - RNA, 22 nt, synthetic construct
  source 1..22: mol_type = other RNA
cattttgaatcatgggagccaa

SEQ ID NO: 127760 - RNA, 22 nt, synthetic construct
  source 1..22: mol_type = other RNA
cattttgagttattgcataggg

SEQ ID NO: 127761 - RNA, 22 nt, synthetic construct
  source 1..22: mol_type = other RNA
cattttgagttcagttttgtat

SEQ ID NO: 127762 - RNA, 22 nt, synthetic construct
  source 1..22: mol_type = other RNA
cattttgccagctaacttttaa

SEQ ID NO: 127763 - RNA, 22 nt, synthetic construct
  source 1..22: mol_type = other RNA
cattttggcaaattgtcagatt

SEQ ID NO: 127764 - RNA, 22 nt, synthetic construct
  source 1..22: mol_type = other RNA
cattttggtcttaccctctagc

SEQ ID NO: 127765 - RNA, 22 nt, synthetic construct
  source 1..22: mol_type = other RNA
cattttgtgacaagttcagcat

SEQ ID NO: 127766 - RNA, 22 nt, synthetic construct
  source 1..22: mol_type = other RNA
cattttgttcattcatctgtta

SEQ ID NO: 127767 - RNA, 22 nt, synthetic construct
  source 1..22: mol_type = other RNA
catttttaagaaatcgttgtga

SEQ ID NO: 127768 - RNA, 22 nt, synthetic construct
  source 1..22: mol_type = other RNA
catttttcacttcttattggtt

SEQ ID NO: 127769 - RNA, 22 nt, synthetic construct
  source 1..22: mol_type = other RNA
catttttcaggggggccactgg

SEQ ID NO: 127770 - RNA, 22 nt, synthetic construct
  source 1..22: mol_type = other RNA
catttttctcgacacacaatcc

SEQ ID NO: 127771 - RNA, 22 nt, synthetic construct
  source 1..22: mol_type = other RNA
catttttctgaccaactatttc

SEQ ID NO: 127772 - RNA, 22 nt, synthetic construct
  source 1..22: mol_type = other RNA
catttttgacagccacgtgtat

SEQ ID NO: 127773 - RNA, 22 nt, synthetic construct
  source 1..22: mol_type = other RNA
catttttgtattctgacctaaa

SEQ ID NO: 127774 - RNA, 22 nt, synthetic construct
  source 1..22: mol_type = other RNA
cattttttaagtggcgctgttt

SEQ ID NO: 127775 - RNA, 22 nt, synthetic construct
  source 1..22: mol_type = other RNA
cattttttcaccagcggcatac

SEQ ID NO: 127776 - RNA, 22 nt, synthetic construct
  source 1..22: mol_type = other RNA
cattttttgcagagacggggtc

SEQ ID NO: 127777 - RNA, 22 nt, synthetic construct
  source 1..22: mol_type = other RNA
cattttttggtttgtatgtgtt

SEQ ID NO: 127778 - RNA, 22 nt, synthetic construct
  source 1..22: mol_type = other RNA
ccaaaaaactacgagtatcata

SEQ ID NO: 127779 - RNA, 22 nt, synthetic construct
  source 1..22: mol_type = other RNA
ccaaaaaagcaccagttatcac

SEQ ID NO: 127780 - RNA, 22 nt, synthetic construct
  source 1..22: mol_type = other RNA
ccaaaaaaggtgctgttgtatt

SEQ ID NO: 127781 - RNA, 22 nt, synthetic construct
  source 1..22: mol_type = other RNA
ccaaaaaatgtggcatatcaca

SEQ ID NO: 127782 - RNA, 22 nt, synthetic construct
  source 1..22: mol_type = other RNA
ccaaaaacaaaagagtagattc

SEQ ID NO: 127783 - RNA, 22 nt, synthetic construct
  source 1..22: mol_type = other RNA
ccaaaaaccacatttcatagca

SEQ ID NO: 127784 - RNA, 22 nt, synthetic construct
  source 1..22: mol_type = other RNA
ccaaaacaaaaaacaaaccccc

SEQ ID NO: 127785 - RNA, 22 nt, synthetic construct
  source 1..22: mol_type = other RNA
ccaaaacagcttcttgttagaa

SEQ ID NO: 127786 - RNA, 22 nt, synthetic construct
  source 1..22: mol_type = other RNA
ccaaaacccttgggatgcagca

SEQ ID NO: 127787 - RNA, 22 nt, synthetic construct
  source 1..22: mol_type = other RNA
ccaaaacctggtatgagtgttt

SEQ ID NO: 127788 - RNA, 22 nt, synthetic construct
  source 1..22: mol_type = other RNA
ccaaaacttaggaggctattaa

SEQ ID NO: 127789 - RNA, 22 nt, synthetic construct
  source 1..22: mol_type = other RNA
ccaaaagcaggccctgagaagt

SEQ ID NO: 127790 - RNA, 22 nt, synthetic construct
  source 1..22: mol_type = other RNA
ccaaaagccaagagcgaggcct

SEQ ID NO: 127791 - RNA, 22 nt, synthetic construct
  source 1..22: mol_type = other RNA
ccaaaagcctcaaaatttagta

SEQ ID NO: 127792 - RNA, 22 nt, synthetic construct
  source 1..22: mol_type = other RNA
ccaaaagggaaatatgaaccac

SEQ ID NO: 127793 - RNA, 22 nt, synthetic construct
  source 1..22: mol_type = other RNA
ccaaaagtcctgttcttttgta

SEQ ID NO: 127794 - RNA, 22 nt, synthetic construct
  source 1..22: mol_type = other RNA
ccaaaagtgaatatagctaaga

SEQ ID NO: 127795 - RNA, 22 nt, synthetic construct
  source 1..22: mol_type = other RNA
ccaaaatattgaagagggaaca

SEQ ID NO: 127796 - RNA, 22 nt, synthetic construct
  source 1..22: mol_type = other RNA
ccaaaatcctctgtagataaac

SEQ ID NO: 127797 - RNA, 22 nt, synthetic construct
  source 1..22: mol_type = other RNA
ccaaaatgattttcacagggca

SEQ ID NO: 127798 - RNA, 22 nt, synthetic construct
  source 1..22: mol_type = other RNA
ccaaaatggagacccatactca

SEQ ID NO: 127799 - RNA, 22 nt, synthetic construct
  source 1..22: mol_type = other RNA
ccaaaattaccccattcactca

SEQ ID NO: 127800 - RNA, 22 nt, synthetic construct
  source 1..22: mol_type = other RNA
ccaaacaccttacactcaaaag

SEQ ID NO: 127801 - RNA, 22 nt, synthetic construct
  source 1..22: mol_type = other RNA
ccaaacactggaaatcacaggt

SEQ ID NO: 127802 - RNA, 22 nt, synthetic construct
  source 1..22: mol_type = other RNA
ccaaacagaaaccctgtaccca

SEQ ID NO: 127803 - RNA, 22 nt, synthetic construct
  source 1..22: mol_type = other RNA
ccaaacagtgaccacagtttga

SEQ ID NO: 127804 - RNA, 22 nt, synthetic construct
  source 1..22: mol_type = other RNA
ccaaacagtttttacatgtagt

SEQ ID NO: 127805 - RNA, 22 nt, synthetic construct
  source 1..22: mol_type = other RNA
ccaaacatcatgatttaataga

SEQ ID NO: 127806 - RNA, 22 nt, synthetic construct
  source 1..22: mol_type = other RNA
ccaaacatgtgaggatttattt

SEQ ID NO: 127807 - RNA, 22 nt, synthetic construct
  source 1..22: mol_type = other RNA
ccaaacattgaaggcagaatta

SEQ ID NO: 127808 - RNA, 22 nt, synthetic construct
  source 1..22: mol_type = other RNA
ccaaaccatcaagtgtgatccc

SEQ ID NO: 127809 - RNA, 22 nt, synthetic construct
  source 1..22: mol_type = other RNA
ccaaaccctacacccatccacc

SEQ ID NO: 127810 - RNA, 22 nt, synthetic construct
  source 1..22: mol_type = other RNA
ccaaacctttaagttctccaag

SEQ ID NO: 127811 - RNA, 22 nt, synthetic construct
  source 1..22: mol_type = other RNA
ccaaacgtttagatgaatgatt

SEQ ID NO: 127812 - RNA, 22 nt, synthetic construct
  source 1..22: mol_type = other RNA
ccaaactcaaaaggacatattt

SEQ ID NO: 127813 - RNA, 22 nt, synthetic construct
  source 1..22: mol_type = other RNA
ccaaactggagtgcagtggtgc

SEQ ID NO: 127814 - RNA, 22 nt, synthetic construct
  source 1..22: mol_type = other RNA
ccaaactgttttccacagtgac

SEQ ID NO: 127815 - RNA, 22 nt, synthetic construct
  source 1..22: mol_type = other RNA
ccaaacttctgaccttgtgatc

SEQ ID NO: 127816 - RNA, 22 nt, synthetic construct
  source 1..22: mol_type = other RNA
ccaaacttgaaccttcctcttc

SEQ ID NO: 127817 - RNA, 22 nt, synthetic construct
  source 1..22: mol_type = other RNA
ccaaacttggtttattttctgc

SEQ ID NO: 127818 - RNA, 22 nt, synthetic construct
  source 1..22: mol_type = other RNA
ccaaagaaaggggaaggaattt

SEQ ID NO: 127819 - RNA, 22 nt, synthetic construct
  source 1..22: mol_type = other RNA
ccaaagaaattggacgggtggt

SEQ ID NO: 127820 - RNA, 22 nt, synthetic construct
  source 1..22: mol_type = other RNA
ccaaagaacaggagttaccata

SEQ ID NO: 127821 - RNA, 22 nt, synthetic construct
  source 1..22: mol_type = other RNA
ccaaagaagaaatcaaatggga

SEQ ID NO: 127822 - RNA, 22 nt, synthetic construct
  source 1..22: mol_type = other RNA
ccaaagaaggaaaaaacaccta

SEQ ID NO: 127823 - RNA, 22 nt, synthetic construct
  source 1..22: mol_type = other RNA
ccaaagacagatcttatggaat

SEQ ID NO: 127824 - RNA, 22 nt, synthetic construct
  source 1..22: mol_type = other RNA
ccaaagacatcctgatttaggc

SEQ ID NO: 127825 - RNA, 22 nt, synthetic construct
  source 1..22: mol_type = other RNA
ccaaagacattgtcttacatag

SEQ ID NO: 127826 - RNA, 22 nt, synthetic construct
  source 1..22: mol_type = other RNA
ccaaagacttcaacggacattt

SEQ ID NO: 127827 - RNA, 22 nt, synthetic construct
  source 1..22: mol_type = other RNA
ccaaagacttcaggaacacctt

SEQ ID NO: 127828 - RNA, 22 nt, synthetic construct
  source 1..22: mol_type = other RNA
ccaaagactttgttttgttttt

SEQ ID NO: 127829 - RNA, 22 nt, synthetic construct
  source 1..22: mol_type = other RNA
ccaaagagctgggactacaggt

SEQ ID NO: 127830 - RNA, 22 nt, synthetic construct
  source 1..22: mol_type = other RNA
ccaaagataaaggtaaggaaac

SEQ ID NO: 127831 - RNA, 22 nt, synthetic construct
  source 1..22: mol_type = other RNA
ccaaagatagactcttcagagg

SEQ ID NO: 127832 - RNA, 22 nt, synthetic construct
  source 1..22: mol_type = other RNA
ccaaagatataaaaatggtcaa

SEQ ID NO: 127833 - RNA, 22 nt, synthetic construct
  source 1..22: mol_type = other RNA
ccaaagatattagctacaaaag

SEQ ID NO: 127834 - RNA, 22 nt, synthetic construct
  source 1..22: mol_type = other RNA
ccaaagatcatgggttttaata

SEQ ID NO: 127835 - RNA, 22 nt, synthetic construct
  source 1..22: mol_type = other RNA
ccaaagattatgttccacatgt

SEQ ID NO: 127836 - RNA, 22 nt, synthetic construct
  source 1..22: mol_type = other RNA
ccaaagattcttgtcatgaatg

SEQ ID NO: 127837 - RNA, 22 nt, synthetic construct
  source 1..22: mol_type = other RNA
ccaaagatttactaaactgaac

SEQ ID NO: 127838 - RNA, 22 nt, synthetic construct
  source 1..22: mol_type = other RNA
ccaaagcaaaagcaaaattcta

SEQ ID NO: 127839 - RNA, 22 nt, synthetic construct
  source 1..22: mol_type = other RNA
ccaaagcaaaccagacatttct

SEQ ID NO: 127840 - RNA, 22 nt, synthetic construct
  source 1..22: mol_type = other RNA
ccaaagcaaacgtgcacaccca

SEQ ID NO: 127841 - RNA, 22 nt, synthetic construct
  source 1..22: mol_type = other RNA
ccaaagcaagccttggcaaggg

SEQ ID NO: 127842 - RNA, 22 nt, synthetic construct
  source 1..22: mol_type = other RNA
ccaaagcagaaatacagaccga

SEQ ID NO: 127843 - RNA, 22 nt, synthetic construct
  source 1..22: mol_type = other RNA
ccaaagctggcatgttggatag

SEQ ID NO: 127844 - RNA, 22 nt, synthetic construct
  source 1..22: mol_type = other RNA
ccaaaggactgggatcctaagc

SEQ ID NO: 127845 - RNA, 22 nt, synthetic construct
  source 1..22: mol_type = other RNA
ccaaaggtagaaacatcccaag

SEQ ID NO: 127846 - RNA, 22 nt, synthetic construct
  source 1..22: mol_type = other RNA
ccaaagtatgcatagcagggtc

SEQ ID NO: 127847 - RNA, 22 nt, synthetic construct
  source 1..22: mol_type = other RNA
ccaaagtgagcagaaggaggaa

SEQ ID NO: 127848 - RNA, 22 nt, synthetic construct
  source 1..22: mol_type = other RNA
ccaaataaaacacaaggacagg

SEQ ID NO: 127849 - RNA, 22 nt, synthetic construct
  source 1..22: mol_type = other RNA
ccaaataacatgcatatgtttg

SEQ ID NO: 127850 - RNA, 22 nt, synthetic construct
  source 1..22: mol_type = other RNA
ccaaataaggtcacattcagag

SEQ ID NO: 127851 - RNA, 22 nt, synthetic construct
  source 1..22: mol_type = other RNA
ccaaataatcccgcaccttgat

SEQ ID NO: 127852 - RNA, 22 nt, synthetic construct
  source 1..22: mol_type = other RNA
ccaaatacctctgaatgtgacc

SEQ ID NO: 127853 - RNA, 22 nt, synthetic construct
  source 1..22: mol_type = other RNA
ccaaatcatgaaagtggagaat

SEQ ID NO: 127854 - RNA, 22 nt, synthetic construct
  source 1..22: mol_type = other RNA
ccaaatccaggatggcatgaaa

SEQ ID NO: 127855 - RNA, 22 nt, synthetic construct
  source 1..22: mol_type = other RNA
ccaaatccctgatcaagttgct

SEQ ID NO: 127856 - RNA, 22 nt, synthetic construct
  source 1..22: mol_type = other RNA
ccaaatgaaaggcgtcggggct

SEQ ID NO: 127857 - RNA, 22 nt, synthetic construct
  source 1..22: mol_type = other RNA
ccaaatgcaccaacacctgcag

SEQ ID NO: 127858 - RNA, 22 nt, synthetic construct
  source 1..22: mol_type = other RNA
ccaaatgcagaaaataaaccaa

SEQ ID NO: 127859 - RNA, 22 nt, synthetic construct
  source 1..22: mol_type = other RNA
ccaaatgggagcatgcacacag

SEQ ID NO: 127860 - RNA, 22 nt, synthetic construct
  source 1..22: mol_type = other RNA
ccaaatgtctgtctttatgcca

SEQ ID NO: 127861 - RNA, 22 nt, synthetic construct
  source 1..22: mol_type = other RNA
ccaaatgtcttaagaaggaaaa

SEQ ID NO: 127862 - RNA, 22 nt, synthetic construct
  source 1..22: mol_type = other RNA
ccaaatgtggatagtgcttttt

SEQ ID NO: 127863 - RNA, 22 nt, synthetic construct
  source 1..22: mol_type = other RNA
ccaaattaaaggatgtcaactg

SEQ ID NO: 127864 - RNA, 22 nt, synthetic construct
  source 1..22: mol_type = other RNA
ccaaattagctttctcccagct

SEQ ID NO: 127865 - RNA, 22 nt, synthetic construct
  source 1..22: mol_type = other RNA
ccaaattattgacaagacgtgt

SEQ ID NO: 127866 - RNA, 22 nt, synthetic construct
  source 1..22: mol_type = other RNA
ccaaattatttgagagtaagtt

SEQ ID NO: 127867 - RNA, 22 nt, synthetic construct
  source 1..22: mol_type = other RNA
ccaaattcaaagcaagttaaaa

SEQ ID NO: 127868 - RNA, 22 nt, synthetic construct
  source 1..22: mol_type = other RNA
ccaaattcacagcatgaatacc

SEQ ID NO: 127869 - RNA, 22 nt, synthetic construct
  source 1..22: mol_type = other RNA
ccaaattcacgagactgttagg

SEQ ID NO: 127870 - RNA, 22 nt, synthetic construct
  source 1..22: mol_type = other RNA
ccaaattggcatttaaaagaac

SEQ ID NO: 127871 - RNA, 22 nt, synthetic construct
  source 1..22: mol_type = other RNA
ccaacaaacaattagcaccttt

SEQ ID NO: 127872 - RNA, 22 nt, synthetic construct
  source 1..22: mol_type = other RNA
ccaacaacaaaaaatcttaaag

SEQ ID NO: 127873 - RNA, 22 nt, synthetic construct
  source 1..22: mol_type = other RNA
ccaacaaccataatgagtaaca

SEQ ID NO: 127874 - RNA, 22 nt, synthetic construct
  source 1..22: mol_type = other RNA
ccaacaagggttggtgcttcct

SEQ ID NO: 127875 - RNA, 22 nt, synthetic construct
  source 1..22: mol_type = other RNA
ccaacaattcaacaatagcaac

SEQ ID NO: 127876 - RNA, 22 nt, synthetic construct
  source 1..22: mol_type = other RNA
ccaacacaaagccttctctact

SEQ ID NO: 127877 - RNA, 22 nt, synthetic construct
  source 1..22: mol_type = other RNA
ccaacacatggggcattaattt

SEQ ID NO: 127878 - RNA, 22 nt, synthetic construct
  source 1..22: mol_type = other RNA
ccaacacctgcagtggcgtgtg

SEQ ID NO: 127879 - RNA, 22 nt, synthetic construct
  source 1..22: mol_type = other RNA
ccaacaccttgggaggctgagg

SEQ ID NO: 127880 - RNA, 22 nt, synthetic construct
  source 1..22: mol_type = other RNA
ccaacagaagaagtttctagtt

SEQ ID NO: 127881 - RNA, 22 nt, synthetic construct
  source 1..22: mol_type = other RNA
ccaacagatcctcacatcagtt

SEQ ID NO: 127882 - RNA, 22 nt, synthetic construct
  source 1..22: mol_type = other RNA
ccaacaggctgagtgcggtggc

SEQ ID NO: 127883 - RNA, 22 nt, synthetic construct
  source 1..22: mol_type = other RNA
ccaacagggccactgagagctc

SEQ ID NO: 127884 - RNA, 22 nt, synthetic construct
  source 1..22: mol_type = other RNA
ccaacagggttttgttttgttt

SEQ ID NO: 127885 - RNA, 22 nt, synthetic construct
  source 1..22: mol_type = other RNA
ccaacagttactttcctttttc

SEQ ID NO: 127886 - RNA, 22 nt, synthetic construct
  source 1..22: mol_type = other RNA
ccaacagtttacacgccttcgc

SEQ ID NO: 127887 - RNA, 22 nt, synthetic construct
  source 1..22: mol_type = other RNA
ccaacatccacagctttctttt

SEQ ID NO: 127888 - RNA, 22 nt, synthetic construct
  source 1..22: mol_type = other RNA
ccaacatcgtaaaacctcatct

SEQ ID NO: 127889 - RNA, 22 nt, synthetic construct
  source 1..22: mol_type = other RNA
ccaacatgagagaaaattgttc

SEQ ID NO: 127890 - RNA, 22 nt, synthetic construct
  source 1..22: mol_type = other RNA
ccaacatgccagctttggctga

SEQ ID NO: 127891 - RNA, 22 nt, synthetic construct
  source 1..22: mol_type = other RNA
ccaacatgctcttaagtatttt

SEQ ID NO: 127892 - RNA, 22 nt, synthetic construct
  source 1..22: mol_type = other RNA
ccaacatggcacatgtctacct

SEQ ID NO: 127893 - RNA, 22 nt, synthetic construct
  source 1..22: mol_type = other RNA
ccaacattgagtttcaatgact

SEQ ID NO: 127894 - RNA, 22 nt, synthetic construct
  source 1..22: mol_type = other RNA
ccaaccaagcccaactttttct

SEQ ID NO: 127895 - RNA, 22 nt, synthetic construct
  source 1..22: mol_type = other RNA
ccaaccaatcgcagggccattc

SEQ ID NO: 127896 - RNA, 22 nt, synthetic construct
  source 1..22: mol_type = other RNA
ccaaccactgaatcagatttta

SEQ ID NO: 127897 - RNA, 22 nt, synthetic construct
  source 1..22: mol_type = other RNA
ccaaccatcttcttagtgttcc

SEQ ID NO: 127898 - RNA, 22 nt, synthetic construct
  source 1..22: mol_type = other RNA
ccaaccattactcttctactca

SEQ ID NO: 127899 - RNA, 22 nt, synthetic construct
  source 1..22: mol_type = other RNA
ccaacccattccaggttttatc

SEQ ID NO: 127900 - RNA, 22 nt, synthetic construct
  source 1..22: mol_type = other RNA
ccaacccccggccctgccgctt

SEQ ID NO: 127901 - RNA, 22 nt, synthetic construct
  source 1..22: mol_type = other RNA
ccaaccctacctagggtgtaaa

SEQ ID NO: 127902 - RNA, 22 nt, synthetic construct
  source 1..22: mol_type = other RNA
ccaacccttgttggacagctgg

SEQ ID NO: 127903 - RNA, 22 nt, synthetic construct
  source 1..22: mol_type = other RNA
ccaacctgattagaggctgcac

SEQ ID NO: 127904 - RNA, 22 nt, synthetic construct
  source 1..22: mol_type = other RNA
ccaacgaccggacgtggtggct

SEQ ID NO: 127905 - RNA, 22 nt, synthetic construct
  source 1..22: mol_type = other RNA
ccaacgctttttatggaaacat

SEQ ID NO: 127906 - RNA, 22 nt, synthetic construct
  source 1..22: mol_type = other RNA
ccaactatttcactaaataaac

SEQ ID NO: 127907 - RNA, 22 nt, synthetic construct
  source 1..22: mol_type = other RNA
ccaactcaaaaaagaaaaacaa

SEQ ID NO: 127908 - RNA, 22 nt, synthetic construct
  source 1..22: mol_type = other RNA
ccaactccacattgtcttaatt

SEQ ID NO: 127909 - RNA, 22 nt, synthetic construct
  source 1..22: mol_type = other RNA
ccaactctggcaggtcacctag

SEQ ID NO: 127910 - RNA, 22 nt, synthetic construct
  source 1..22: mol_type = other RNA
ccaactctttctttgatttttt

SEQ ID NO: 127911 - RNA, 22 nt, synthetic construct
  source 1..22: mol_type = other RNA
ccaactgaagcggggctgccac

SEQ ID NO: 127912 - RNA, 22 nt, synthetic construct
  source 1..22: mol_type = other RNA
ccaactgcaaaactttcttcaa

SEQ ID NO: 127913 - RNA, 22 nt, synthetic construct
  source 1..22: mol_type = other RNA
ccaactgcagtctgtcctcgta

SEQ ID NO: 127914 - RNA, 22 nt, synthetic construct
  source 1..22: mol_type = other RNA
ccaactgtataaatgttcagtt

SEQ ID NO: 127915 - RNA, 22 nt, synthetic construct
  source 1..22: mol_type = other RNA
ccaactgtcctctcttgttgag

SEQ ID NO: 127916 - RNA, 22 nt, synthetic construct
  source 1..22: mol_type = other RNA
ccaacttcacaccatttagatc

SEQ ID NO: 127917 - RNA, 22 nt, synthetic construct
  source 1..22: mol_type = other RNA
ccaacttccagcaagactttat

SEQ ID NO: 127918 - RNA, 22 nt, synthetic construct
  source 1..22: mol_type = other RNA
ccaactttttctttttagtaag

SEQ ID NO: 127919 - RNA, 22 nt, synthetic construct
  source 1..22: mol_type = other RNA
ccaagaaaaagcagagaaactg

SEQ ID NO: 127920 - RNA, 22 nt, synthetic construct
  source 1..22: mol_type = other RNA
ccaagaaagcaggtcatgactt

SEQ ID NO: 127921 - RNA, 22 nt, synthetic construct
  source 1..22: mol_type = other RNA
ccaagaaaggacttcagtcctt

SEQ ID NO: 127922 - RNA, 22 nt, synthetic construct
  source 1..22: mol_type = other RNA
ccaagaacaaccttatctattt

SEQ ID NO: 127923 - RNA, 22 nt, synthetic construct
  source 1..22: mol_type = other RNA
ccaagaaccctttgttatctga

SEQ ID NO: 127924 - RNA, 22 nt, synthetic construct
  source 1..22: mol_type = other RNA
ccaagaagacatgataaatacg

SEQ ID NO: 127925 - RNA, 22 nt, synthetic construct
  source 1..22: mol_type = other RNA
ccaagaaggctagcacagaggc

SEQ ID NO: 127926 - RNA, 22 nt, synthetic construct
  source 1..22: mol_type = other RNA
ccaagaatttcatgcctttcag

SEQ ID NO: 127927 - RNA, 22 nt, synthetic construct
  source 1..22: mol_type = other RNA
ccaagaattttccattcatgta

SEQ ID NO: 127928 - RNA, 22 nt, synthetic construct
  source 1..22: mol_type = other RNA
ccaagacaggaagaattattgt

SEQ ID NO: 127929 - RNA, 22 nt, synthetic construct
  source 1..22: mol_type = other RNA
ccaagacatgttaggttgaaag

SEQ ID NO: 127930 - RNA, 22 nt, synthetic construct
  source 1..22: mol_type = other RNA
ccaagagaggaataaatggtag

SEQ ID NO: 127931 - RNA, 22 nt, synthetic construct
  source 1..22: mol_type = other RNA
ccaagagcatagactttagagt

SEQ ID NO: 127932 - RNA, 22 nt, synthetic construct
  source 1..22: mol_type = other RNA
ccaagagcgaggcctggaacag

SEQ ID NO: 127933 - RNA, 22 nt, synthetic construct
  source 1..22: mol_type = other RNA
ccaagagtgtggctttaaggcg

SEQ ID NO: 127934 - RNA, 22 nt, synthetic construct
  source 1..22: mol_type = other RNA
ccaagagttgctgacttcctgg

SEQ ID NO: 127935 - RNA, 22 nt, synthetic construct
  source 1..22: mol_type = other RNA
ccaagatcataagcttttattt

SEQ ID NO: 127936 - RNA, 22 nt, synthetic construct
  source 1..22: mol_type = other RNA
ccaagatctgtttttcaaaatg

SEQ ID NO: 127937 - RNA, 22 nt, synthetic construct
  source 1..22: mol_type = other RNA
ccaagattgaaaatggtttagg

SEQ ID NO: 127938 - RNA, 22 nt, synthetic construct
  source 1..22: mol_type = other RNA
ccaagattttcccaatctctgg

SEQ ID NO: 127939 - RNA, 22 nt, synthetic construct
  source 1..22: mol_type = other RNA
ccaagcaacactaaagatttgc

SEQ ID NO: 127940 - RNA, 22 nt, synthetic construct
  source 1..22: mol_type = other RNA
ccaagcaacttgatcagggatt

SEQ ID NO: 127941 - RNA, 22 nt, synthetic construct
  source 1..22: mol_type = other RNA
ccaagcaagtaaaagaagatgc

SEQ ID NO: 127942 - RNA, 22 nt, synthetic construct
  source 1..22: mol_type = other RNA
ccaagcaagtgtggtggtctca

SEQ ID NO: 127943 - RNA, 22 nt, synthetic construct
  source 1..22: mol_type = other RNA
ccaagcacaaacctggcaatac

SEQ ID NO: 127944 - RNA, 22 nt, synthetic construct
  source 1..22: mol_type = other RNA
ccaagcacacagtttgagaagc

SEQ ID NO: 127945 - RNA, 22 nt, synthetic construct
  source 1..22: mol_type = other RNA
ccaagcacactttccttggaga

SEQ ID NO: 127946 - RNA, 22 nt, synthetic construct
  source 1..22: mol_type = other RNA
ccaagcagggacgggcggggga

SEQ ID NO: 127947 - RNA, 22 nt, synthetic construct
  source 1..22: mol_type = other RNA
ccaagcatggtggtaggtgtgt

SEQ ID NO: 127948 - RNA, 22 nt, synthetic construct
  source 1..22: mol_type = other RNA
ccaagccaaattaataaaatgg

SEQ ID NO: 127949 - RNA, 22 nt, synthetic construct
  source 1..22: mol_type = other RNA
ccaagccacagcgtggaatggt

SEQ ID NO: 127950 - RNA, 22 nt, synthetic construct
  source 1..22: mol_type = other RNA
ccaagcccaactttttcttttt

SEQ ID NO: 127951 - RNA, 22 nt, synthetic construct
  source 1..22: mol_type = other RNA
ccaagcccggcacggtggctca

SEQ ID NO: 127952 - RNA, 22 nt, synthetic construct
  source 1..22: mol_type = other RNA
ccaagccctgccttaaaacatt

SEQ ID NO: 127953 - RNA, 22 nt, synthetic construct
  source 1..22: mol_type = other RNA
ccaagccttaaaagtgctgcag

SEQ ID NO: 127954 - RNA, 22 nt, synthetic construct
  source 1..22: mol_type = other RNA
ccaagctaccatttattcctct

SEQ ID NO: 127955 - RNA, 22 nt, synthetic construct
  source 1..22: mol_type = other RNA
ccaagcttaggtcagattcctt

SEQ ID NO: 127956 - RNA, 22 nt, synthetic construct
  source 1..22: mol_type = other RNA
ccaaggaaagtgtgcttgggct

SEQ ID NO: 127957 - RNA, 22 nt, synthetic construct
  source 1..22: mol_type = other RNA
ccaaggaaggcagggtaggaag

SEQ ID NO: 127958 - RNA, 22 nt, synthetic construct
  source 1..22: mol_type = other RNA
ccaaggacagaaattcaacttg

SEQ ID NO: 127959 - RNA, 22 nt, synthetic construct
  source 1..22: mol_type = other RNA
ccaaggagggaggattgtttga

SEQ ID NO: 127960 - RNA, 22 nt, synthetic construct
  source 1..22: mol_type = other RNA
ccaaggcaggactgcttgaggc

SEQ ID NO: 127961 - RNA, 22 nt, synthetic construct
  source 1..22: mol_type = other RNA
ccaaggctaagttgagaaacta

SEQ ID NO: 127962 - RNA, 22 nt, synthetic construct
  source 1..22: mol_type = other RNA
ccaaggctggagtgcagtggcg

SEQ ID NO: 127963 - RNA, 22 nt, synthetic construct
  source 1..22: mol_type = other RNA
ccaaggcttgctttggctagaa

SEQ ID NO: 127964 - RNA, 22 nt, synthetic construct
  source 1..22: mol_type = other RNA
ccaagggtgtgtttaatttcca

SEQ ID NO: 127965 - RNA, 22 nt, synthetic construct
  source 1..22: mol_type = other RNA
ccaagggtttgtcaattttgct

SEQ ID NO: 127966 - RNA, 22 nt, synthetic construct
  source 1..22: mol_type = other RNA
ccaagggttttggtatgttgtg

SEQ ID NO: 127967 - RNA, 22 nt, synthetic construct
  source 1..22: mol_type = other RNA
ccaaggtacaattacacatctc

SEQ ID NO: 127968 - RNA, 22 nt, synthetic construct
  source 1..22: mol_type = other RNA
ccaaggttgcctgttcactctg

SEQ ID NO: 127969 - RNA, 22 nt, synthetic construct
  source 1..22: mol_type = other RNA
ccaaggtttctctccaaggtac

SEQ ID NO: 127970 - RNA, 22 nt, synthetic construct
  source 1..22: mol_type = other RNA
ccaagtaaaagcaacctcattt

SEQ ID NO: 127971 - RNA, 22 nt, synthetic construct
  source 1..22: mol_type = other RNA
ccaagtaaacaactgactctaa

SEQ ID NO: 127972 - RNA, 22 nt, synthetic construct
  source 1..22: mol_type = other RNA
ccaagtaaacctcaagtctttt

SEQ ID NO: 127973 - RNA, 22 nt, synthetic construct
  source 1..22: mol_type = other RNA
ccaagtagctaggaccataggc

SEQ ID NO: 127974 - RNA, 22 nt, synthetic construct
  source 1..22: mol_type = other RNA
ccaagtagctgggatcacaggc

SEQ ID NO: 127975 - RNA, 22 nt, synthetic construct
  source 1..22: mol_type = other RNA
ccaagtataagatgatgatatg

SEQ ID NO: 127976 - RNA, 22 nt, synthetic construct
  source 1..22: mol_type = other RNA
ccaagtattgtatcaatgttaa

SEQ ID NO: 127977 - RNA, 22 nt, synthetic construct
  source 1..22: mol_type = other RNA
ccaagtatttctcatctgtcac

SEQ ID NO: 127978 - RNA, 22 nt, synthetic construct
  source 1..22: mol_type = other RNA
ccaagtcagcacttctgatatc

SEQ ID NO: 127979 - RNA, 22 nt, synthetic construct
  source 1..22: mol_type = other RNA
ccaagtcccggaagctgggcta

SEQ ID NO: 127980 - RNA, 22 nt, synthetic construct
  source 1..22: mol_type = other RNA
ccaagtccgtgcatgcctctgt

SEQ ID NO: 127981 - RNA, 22 nt, synthetic construct
  source 1..22: mol_type = other RNA
ccaagtctcatgcaattcccca

SEQ ID NO: 127982 - RNA, 22 nt, synthetic construct
  source 1..22: mol_type = other RNA
ccaagtgcccattaacagatga

SEQ ID NO: 127983 - RNA, 22 nt, synthetic construct
  source 1..22: mol_type = other RNA
ccaagtgccgcgttttttgtcc

SEQ ID NO: 127984 - RNA, 22 nt, synthetic construct
  source 1..22: mol_type = other RNA
ccaagtgctgtgattgcaggtg

SEQ ID NO: 127985 - RNA, 22 nt, synthetic construct
  source 1..22: mol_type = other RNA
ccaagtggagcctgctctgcag

SEQ ID NO: 127986 - RNA, 22 nt, synthetic construct
  source 1..22: mol_type = other RNA
ccaagtgtaaaaagacattatt

SEQ ID NO: 127987 - RNA, 22 nt, synthetic construct
  source 1..22: mol_type = other RNA
ccaagttactagaagcactttt

SEQ ID NO: 127988 - RNA, 22 nt, synthetic construct
  source 1..22: mol_type = other RNA
ccaagttgaatttctgtccttg

SEQ ID NO: 127989 - RNA, 22 nt, synthetic construct
  source 1..22: mol_type = other RNA
ccaagtttaaccaattatgctg

SEQ ID NO: 127990 - RNA, 22 nt, synthetic construct
  source 1..22: mol_type = other RNA
ccaagtttctagccataatcct

SEQ ID NO: 127991 - RNA, 22 nt, synthetic construct
  source 1..22: mol_type = other RNA
ccaagtttggttcatttcagga

SEQ ID NO: 127992 - RNA, 22 nt, synthetic construct
  source 1..22: mol_type = other RNA
ccaataaaagcctcatttgaac

SEQ ID NO: 127993 - RNA, 22 nt, synthetic construct
  source 1..22: mol_type = other RNA
ccaataagaagtgaaaaatgac

SEQ ID NO: 127994 - RNA, 22 nt, synthetic construct
  source 1..22: mol_type = other RNA
ccaataagttaactgaaatcgg

SEQ ID NO: 127995 - RNA, 22 nt, synthetic construct
  source 1..22: mol_type = other RNA
ccaatatcacactgtttgatta

SEQ ID NO: 127996 - RNA, 22 nt, synthetic construct
  source 1..22: mol_type = other RNA
ccaatatccctgataatcacag

SEQ ID NO: 127997 - RNA, 22 nt, synthetic construct
  source 1..22: mol_type = other RNA
ccaatatctatcagggctgaaa

SEQ ID NO: 127998 - RNA, 22 nt, synthetic construct
  source 1..22: mol_type = other RNA
ccaatatgactggtgtccttct

SEQ ID NO: 127999 - RNA, 22 nt, synthetic construct
  source 1..22: mol_type = other RNA
ccaatcaaatccagtcttcagg

SEQ ID NO: 128000 - RNA, 22 nt, synthetic construct
  source 1..22: mol_type = other RNA
ccaatcaataattctgtgccaa

SEQ ID NO: 128001 - RNA, 22 nt, synthetic construct
  source 1..22: mol_type = other RNA
ccaatcactggctagtaggcaa

SEQ ID NO: 128002 - RNA, 22 nt, synthetic construct
  source 1..22: mol_type = other RNA
ccaatcatgttctttatagcat

SEQ ID NO: 128003 - RNA, 22 nt, synthetic construct
  source 1..22: mol_type = other RNA
ccaatccgggaacatgacatgt

SEQ ID NO: 128004 - RNA, 22 nt, synthetic construct
  source 1..22: mol_type = other RNA
ccaatcctcagccccctcccta

SEQ ID NO: 128005 - RNA, 22 nt, synthetic construct
  source 1..22: mol_type = other RNA
ccaatccttccttcatgtcccc

SEQ ID NO: 128006 - RNA, 22 nt, synthetic construct
  source 1..22: mol_type = other RNA
ccaatcctttgtgcaggtctgg

SEQ ID NO: 128007 - RNA, 22 nt, synthetic construct
  source 1..22: mol_type = other RNA
ccaatcgcagggccattctgct

SEQ ID NO: 128008 - RNA, 22 nt, synthetic construct
  source 1..22: mol_type = other RNA
ccaatctacaggtcggaaggaa

SEQ ID NO: 128009 - RNA, 22 nt, synthetic construct
  source 1..22: mol_type = other RNA
ccaatctctggtattctgaact

SEQ ID NO: 128010 - RNA, 22 nt, synthetic construct
  source 1..22: mol_type = other RNA
ccaatcttcccaatcctttgtg

SEQ ID NO: 128011 - RNA, 22 nt, synthetic construct
  source 1..22: mol_type = other RNA
ccaatgcctgcgattgcaggca

SEQ ID NO: 128012 - RNA, 22 nt, synthetic construct
  source 1..22: mol_type = other RNA
ccaatgcttgaagagcgcttct

SEQ ID NO: 128013 - RNA, 22 nt, synthetic construct
  source 1..22: mol_type = other RNA
ccaatgtcagagatctgaaatt

SEQ ID NO: 128014 - RNA, 22 nt, synthetic construct
  source 1..22: mol_type = other RNA
ccaatgttctcttttcctcgtt

SEQ ID NO: 128015 - RNA, 22 nt, synthetic construct
  source 1..22: mol_type = other RNA
ccaattaaactatagacccaaa

SEQ ID NO: 128016 - RNA, 22 nt, synthetic construct
  source 1..22: mol_type = other RNA
ccaattaccataaagtcttcca

SEQ ID NO: 128017 - RNA, 22 nt, synthetic construct
  source 1..22: mol_type = other RNA
ccaattacttccagtgttttag

SEQ ID NO: 128018 - RNA, 22 nt, synthetic construct
  source 1..22: mol_type = other RNA
ccaattatgctgagtgaatggg

SEQ ID NO: 128019 - RNA, 22 nt, synthetic construct
  source 1..22: mol_type = other RNA
ccaattctccctgaaattgtca

SEQ ID NO: 128020 - RNA, 22 nt, synthetic construct
  source 1..22: mol_type = other RNA
ccaattgcagaaaaatagaatt

SEQ ID NO: 128021 - RNA, 22 nt, synthetic construct
  source 1..22: mol_type = other RNA
ccaattgttaacatttcttcta

SEQ ID NO: 128022 - RNA, 22 nt, synthetic construct
  source 1..22: mol_type = other RNA
ccaatttaccatctgacatatg

SEQ ID NO: 128023 - RNA, 22 nt, synthetic construct
  source 1..22: mol_type = other RNA
ccaatttctttggctgttagcc

SEQ ID NO: 128024 - RNA, 22 nt, synthetic construct
  source 1..22: mol_type = other RNA
ccaatttgggatatagctacaa

SEQ ID NO: 128025 - RNA, 22 nt, synthetic construct
  source 1..22: mol_type = other RNA
ccaattttcatagcagcattgt

SEQ ID NO: 128026 - RNA, 22 nt, synthetic construct
  source 1..22: mol_type = other RNA
ccaattttttggcatacaactg

SEQ ID NO: 128027 - RNA, 22 nt, synthetic construct
  source 1..22: mol_type = other RNA
ccacaaaagaaaattttctgag

SEQ ID NO: 128028 - RNA, 22 nt, synthetic construct
  source 1..22: mol_type = other RNA
ccacaaaatatgaagcattaat

SEQ ID NO: 128029 - RNA, 22 nt, synthetic construct
  source 1..22: mol_type = other RNA
ccacaaacatgaataaccaatg

SEQ ID NO: 128030 - RNA, 22 nt, synthetic construct
  source 1..22: mol_type = other RNA
ccacaaagtccccacatgactg

SEQ ID NO: 128031 - RNA, 22 nt, synthetic construct
  source 1..22: mol_type = other RNA
ccacaaatggagtgacttaagc

SEQ ID NO: 128032 - RNA, 22 nt, synthetic construct
  source 1..22: mol_type = other RNA
ccacaacattgtgcaaccatcc

SEQ ID NO: 128033 - RNA, 22 nt, synthetic construct
  source 1..22: mol_type = other RNA
ccacaaccactggggagtgtgc

SEQ ID NO: 128034 - RNA, 22 nt, synthetic construct
  source 1..22: mol_type = other RNA
ccacaagaaaaacctaaacctg

SEQ ID NO: 128035 - RNA, 22 nt, synthetic construct
  source 1..22: mol_type = other RNA
ccacaagacataagcattttct

SEQ ID NO: 128036 - RNA, 22 nt, synthetic construct
  source 1..22: mol_type = other RNA
ccacaagccacatgtggttatt

SEQ ID NO: 128037 - RNA, 22 nt, synthetic construct
  source 1..22: mol_type = other RNA
ccacaaggattaatctttctga

SEQ ID NO: 128038 - RNA, 22 nt, synthetic construct
  source 1..22: mol_type = other RNA
ccacaagtagcagggactacag

SEQ ID NO: 128039 - RNA, 22 nt, synthetic construct
  source 1..22: mol_type = other RNA
ccacaatcttacccccatcaca

SEQ ID NO: 128040 - RNA, 22 nt, synthetic construct
  source 1..22: mol_type = other RNA
ccacaatgagacatttgagggt

SEQ ID NO: 128041 - RNA, 22 nt, synthetic construct
  source 1..22: mol_type = other RNA
ccacacaatggtcagagttgta

SEQ ID NO: 128042 - RNA, 22 nt, synthetic construct
  source 1..22: mol_type = other RNA
ccacacagagaacagcattatc

SEQ ID NO: 128043 - RNA, 22 nt, synthetic construct
  source 1..22: mol_type = other RNA
ccacacagtacaaggctagagc

SEQ ID NO: 128044 - RNA, 22 nt, synthetic construct
  source 1..22: mol_type = other RNA
ccacaccacatccagctaattt

SEQ ID NO: 128045 - RNA, 22 nt, synthetic construct
  source 1..22: mol_type = other RNA
ccacacctgcaatcacagcact

SEQ ID NO: 128046 - RNA, 22 nt, synthetic construct
  source 1..22: mol_type = other RNA
ccacacctggcccctttcaaga

SEQ ID NO: 128047 - RNA, 22 nt, synthetic construct
  source 1..22: mol_type = other RNA
ccacactccagcatccctccag

SEQ ID NO: 128048 - RNA, 22 nt, synthetic construct
  source 1..22: mol_type = other RNA
ccacactcttggtctttctccc

SEQ ID NO: 128049 - RNA, 22 nt, synthetic construct
  source 1..22: mol_type = other RNA
ccacactgacaggacagagcag

SEQ ID NO: 128050 - RNA, 22 nt, synthetic construct
  source 1..22: mol_type = other RNA
ccacacttgcttgggaacagca

SEQ ID NO: 128051 - RNA, 22 nt, synthetic construct
  source 1..22: mol_type = other RNA
ccacagagcctaaaataggcct

SEQ ID NO: 128052 - RNA, 22 nt, synthetic construct
  source 1..22: mol_type = other RNA
ccacagaggctttttatatttc

SEQ ID NO: 128053 - RNA, 22 nt, synthetic construct
  source 1..22: mol_type = other RNA
ccacagagttcagcttacagtc

SEQ ID NO: 128054 - RNA, 22 nt, synthetic construct
  source 1..22: mol_type = other RNA
ccacagataatttcttcagaag

SEQ ID NO: 128055 - RNA, 22 nt, synthetic construct
  source 1..22: mol_type = other RNA
ccacagatctttttgtgtatat

SEQ ID NO: 128056 - RNA, 22 nt, synthetic construct
  source 1..22: mol_type = other RNA
ccacagcagggctcctccaagg

SEQ ID NO: 128057 - RNA, 22 nt, synthetic construct
  source 1..22: mol_type = other RNA
ccacagcgcccggcccgttatt

SEQ ID NO: 128058 - RNA, 22 nt, synthetic construct
  source 1..22: mol_type = other RNA
ccacagcgtggaatggtcaatt

SEQ ID NO: 128059 - RNA, 22 nt, synthetic construct
  source 1..22: mol_type = other RNA
ccacagcgttgttcagttgaaa

SEQ ID NO: 128060 - RNA, 22 nt, synthetic construct
  source 1..22: mol_type = other RNA
ccacagctacactcaatacacg

SEQ ID NO: 128061 - RNA, 22 nt, synthetic construct
  source 1..22: mol_type = other RNA
ccacagctatcaggccttccac

SEQ ID NO: 128062 - RNA, 22 nt, synthetic construct
  source 1..22: mol_type = other RNA
ccacagctttcttttccaacca

SEQ ID NO: 128063 - RNA, 22 nt, synthetic construct
  source 1..22: mol_type = other RNA
ccacaggcatgcgccatcacac

SEQ ID NO: 128064 - RNA, 22 nt, synthetic construct
  source 1..22: mol_type = other RNA
ccacaggctctcttcaccaact

SEQ ID NO: 128065 - RNA, 22 nt, synthetic construct
  source 1..22: mol_type = other RNA
ccacaggctttgacttctcagg

SEQ ID NO: 128066 - RNA, 22 nt, synthetic construct
  source 1..22: mol_type = other RNA
ccacagggcccagcctcaacag

SEQ ID NO: 128067 - RNA, 22 nt, synthetic construct
  source 1..22: mol_type = other RNA
ccacagtatgctgtttacatta

SEQ ID NO: 128068 - RNA, 22 nt, synthetic construct
  source 1..22: mol_type = other RNA
ccacagtgactttactgttctc

SEQ ID NO: 128069 - RNA, 22 nt, synthetic construct
  source 1..22: mol_type = other RNA
ccacagtttgaaactttaagag

SEQ ID NO: 128070 - RNA, 22 nt, synthetic construct
  source 1..22: mol_type = other RNA
ccacataaagtcttgctggaag

SEQ ID NO: 128071 - RNA, 22 nt, synthetic construct
  source 1..22: mol_type = other RNA
ccacataaatcacaggaaagat

SEQ ID NO: 128072 - RNA, 22 nt, synthetic construct
  source 1..22: mol_type = other RNA
ccacataattgaacccactgag

SEQ ID NO: 128073 - RNA, 22 nt, synthetic construct
  source 1..22: mol_type = other RNA
ccacataggatagttaaacatg

SEQ ID NO: 128074 - RNA, 22 nt, synthetic construct
  source 1..22: mol_type = other RNA
ccacatattttaaaagtcagct

SEQ ID NO: 128075 - RNA, 22 nt, synthetic construct
  source 1..22: mol_type = other RNA
ccacatccagctaattttcatt

SEQ ID NO: 128076 - RNA, 22 nt, synthetic construct
  source 1..22: mol_type = other RNA
ccacatccttgccaacagttac

SEQ ID NO: 128077 - RNA, 22 nt, synthetic construct
  source 1..22: mol_type = other RNA
ccacatgactggccatccttcc

SEQ ID NO: 128078 - RNA, 22 nt, synthetic construct
  source 1..22: mol_type = other RNA
ccacatgcttccaaaagcaggc

SEQ ID NO: 128079 - RNA, 22 nt, synthetic construct
  source 1..22: mol_type = other RNA
ccacatgtggcttgtggctaca

SEQ ID NO: 128080 - RNA, 22 nt, synthetic construct
  source 1..22: mol_type = other RNA
ccacatgtggttattgagtctg

SEQ ID NO: 128081 - RNA, 22 nt, synthetic construct
  source 1..22: mol_type = other RNA
ccacatgttactcattatggtt

SEQ ID NO: 128082 - RNA, 22 nt, synthetic construct
  source 1..22: mol_type = other RNA
ccacattagccactctgaattc

SEQ ID NO: 128083 - RNA, 22 nt, synthetic construct
  source 1..22: mol_type = other RNA
ccacattcaacaacatggatga

SEQ ID NO: 128084 - RNA, 22 nt, synthetic construct
  source 1..22: mol_type = other RNA
ccacattcccaaatgtcttaag

SEQ ID NO: 128085 - RNA, 22 nt, synthetic construct
  source 1..22: mol_type = other RNA
ccacattcggccaagatctgtt

SEQ ID NO: 128086 - RNA, 22 nt, synthetic construct
  source 1..22: mol_type = other RNA
ccacatttcatagcagaatggc

SEQ ID NO: 128087 - RNA, 22 nt, synthetic construct
  source 1..22: mol_type = other RNA
ccacatttctaatttccaagaa

SEQ ID NO: 128088 - RNA, 22 nt, synthetic construct
  source 1..22: mol_type = other RNA
ccacatttctacacaacatgtt

SEQ ID NO: 128089 - RNA, 22 nt, synthetic construct
  source 1..22: mol_type = other RNA
ccacatttggttttactactgt

SEQ ID NO: 128090 - RNA, 22 nt, synthetic construct
  source 1..22: mol_type = other RNA
ccacattttaccaaaacagctt

SEQ ID NO: 128091 - RNA, 22 nt, synthetic construct
  source 1..22: mol_type = other RNA
ccacattttgtgacaagttcag

SEQ ID NO: 128092 - RNA, 22 nt, synthetic construct
  source 1..22: mol_type = other RNA
ccacattttgttcattcatctg

SEQ ID NO: 128093 - RNA, 22 nt, synthetic construct
  source 1..22: mol_type = other RNA
ccacattttttggtttgtatgt

SEQ ID NO: 128094 - RNA, 22 nt, synthetic construct
  source 1..22: mol_type = other RNA
ccaccaagaaaaagcagagaaa

SEQ ID NO: 128095 - RNA, 22 nt, synthetic construct
  source 1..22: mol_type = other RNA
ccaccaagccctgccttaaaac

SEQ ID NO: 128096 - RNA, 22 nt, synthetic construct
  source 1..22: mol_type = other RNA
ccaccacacttgcttgggaaca

SEQ ID NO: 128097 - RNA, 22 nt, synthetic construct
  source 1..22: mol_type = other RNA
ccaccacattcggccaagatct

SEQ ID NO: 128098 - RNA, 22 nt, synthetic construct
  source 1..22: mol_type = other RNA
ccaccacgtccggtcgttggat

SEQ ID NO: 128099 - RNA, 22 nt, synthetic construct
  source 1..22: mol_type = other RNA
ccaccactaatgtcacattttc

SEQ ID NO: 128100 - RNA, 22 nt, synthetic construct
  source 1..22: mol_type = other RNA
ccaccactccaccttagcccaa

SEQ ID NO: 128101 - RNA, 22 nt, synthetic construct
  source 1..22: mol_type = other RNA
ccaccactcccggccgtatttt

SEQ ID NO: 128102 - RNA, 22 nt, synthetic construct
  source 1..22: mol_type = other RNA
ccaccagacaaaaatagaggat

SEQ ID NO: 128103 - RNA, 22 nt, synthetic construct
  source 1..22: mol_type = other RNA
ccaccagcataagacccctcag

SEQ ID NO: 128104 - RNA, 22 nt, synthetic construct
  source 1..22: mol_type = other RNA
ccaccagcatcttttgacgcgc

SEQ ID NO: 128105 - RNA, 22 nt, synthetic construct
  source 1..22: mol_type = other RNA
ccaccaggaggcggagcttgca

SEQ ID NO: 128106 - RNA, 22 nt, synthetic construct
  source 1..22: mol_type = other RNA
ccaccatctctctgcctcaaaa

SEQ ID NO: 128107 - RNA, 22 nt, synthetic construct
  source 1..22: mol_type = other RNA
ccaccatgatgcagcccctgcc

SEQ ID NO: 128108 - RNA, 22 nt, synthetic construct
  source 1..22: mol_type = other RNA
ccacccaagtggagcctgctct

SEQ ID NO: 128109 - RNA, 22 nt, synthetic construct
  source 1..22: mol_type = other RNA
ccacccacttgtcccatggtca

SEQ ID NO: 128110 - RNA, 22 nt, synthetic construct
  source 1..22: mol_type = other RNA
ccacccatgaagccagcattac

SEQ ID NO: 128111 - RNA, 22 nt, synthetic construct
  source 1..22: mol_type = other RNA
ccacccctgctctgcacgtact

SEQ ID NO: 128112 - RNA, 22 nt, synthetic construct
  source 1..22: mol_type = other RNA
ccacccgtccaatttctttggc

SEQ ID NO: 128113 - RNA, 22 nt, synthetic construct
  source 1..22: mol_type = other RNA
ccaccctgccccttatcctctt

SEQ ID NO: 128114 - RNA, 22 nt, synthetic construct
  source 1..22: mol_type = other RNA
ccaccctgctccagtatgacct

SEQ ID NO: 128115 - RNA, 22 nt, synthetic construct
  source 1..22: mol_type = other RNA
ccacccttgatgtcacaagcca

SEQ ID NO: 128116 - RNA, 22 nt, synthetic construct
  source 1..22: mol_type = other RNA
ccacccttgctgcttctaccca

SEQ ID NO: 128117 - RNA, 22 nt, synthetic construct
  source 1..22: mol_type = other RNA
ccaccgcacctggccgggattt

SEQ ID NO: 128118 - RNA, 22 nt, synthetic construct
  source 1..22: mol_type = other RNA
ccaccgcactcagcctgttggg

SEQ ID NO: 128119 - RNA, 22 nt, synthetic construct
  source 1..22: mol_type = other RNA
ccaccgccttcctaccctgcct

SEQ ID NO: 128120 - RNA, 22 nt, synthetic construct
  source 1..22: mol_type = other RNA
ccaccgcgcccggccaaatatc

SEQ ID NO: 128121 - RNA, 22 nt, synthetic construct
  source 1..22: mol_type = other RNA
ccaccgcgcccggcccagattc

SEQ ID NO: 128122 - RNA, 22 nt, synthetic construct
  source 1..22: mol_type = other RNA
ccaccgcgcctggtgattaaag

SEQ ID NO: 128123 - RNA, 22 nt, synthetic construct
  source 1..22: mol_type = other RNA
ccaccgtgcccggccagacatt

SEQ ID NO: 128124 - RNA, 22 nt, synthetic construct
  source 1..22: mol_type = other RNA
ccaccgtgccgggcttggtatg

SEQ ID NO: 128125 - RNA, 22 nt, synthetic construct
  source 1..22: mol_type = other RNA
ccacctaactactaataaatgc

SEQ ID NO: 128126 - RNA, 22 nt, synthetic construct
  source 1..22: mol_type = other RNA
ccacctcagaaacaaacaaaaa

SEQ ID NO: 128127 - RNA, 22 nt, synthetic construct
  source 1..22: mol_type = other RNA
ccacctcagccccacaagtagc

SEQ ID NO: 128128 - RNA, 22 nt, synthetic construct
  source 1..22: mol_type = other RNA
ccacctcatccggtctcagttt

SEQ ID NO: 128129 - RNA, 22 nt, synthetic construct
  source 1..22: mol_type = other RNA
ccacctccatcactgactggct

SEQ ID NO: 128130 - RNA, 22 nt, synthetic construct
  source 1..22: mol_type = other RNA
ccacctcctccggggacccagt

SEQ ID NO: 128131 - RNA, 22 nt, synthetic construct
  source 1..22: mol_type = other RNA
ccacctgaaatctgatttgttt

SEQ ID NO: 128132 - RNA, 22 nt, synthetic construct
  source 1..22: mol_type = other RNA
ccacctgacaagtagtacaaaa

SEQ ID NO: 128133 - RNA, 22 nt, synthetic construct
  source 1..22: mol_type = other RNA
ccacctgcgagcggcgggcttc

SEQ ID NO: 128134 - RNA, 22 nt, synthetic construct
  source 1..22: mol_type = other RNA
ccacctgctctttatctccaca

SEQ ID NO: 128135 - RNA, 22 nt, synthetic construct
  source 1..22: mol_type = other RNA
ccacctggcaacaaaggcgaag

SEQ ID NO: 128136 - RNA, 22 nt, synthetic construct
  source 1..22: mol_type = other RNA
ccacctgggggagactgtgcaa

SEQ ID NO: 128137 - RNA, 22 nt, synthetic construct
  source 1..22: mol_type = other RNA
ccacctgtcagaaacaccaaca

SEQ ID NO: 128138 - RNA, 22 nt, synthetic construct
  source 1..22: mol_type = other RNA
ccaccttagcccaagctaccat

SEQ ID NO: 128139 - RNA, 22 nt, synthetic construct
  source 1..22: mol_type = other RNA
ccacctttcctgcccctccact

SEQ ID NO: 128140 - RNA, 22 nt, synthetic construct
  source 1..22: mol_type = other RNA
ccacgagtaatggatgttttta

SEQ ID NO: 128141 - RNA, 22 nt, synthetic construct
  source 1..22: mol_type = other RNA
ccacgagttcaggaccagcttg

SEQ ID NO: 128142 - RNA, 22 nt, synthetic construct
  source 1..22: mol_type = other RNA
ccacgcagaacagtgtttacac

SEQ ID NO: 128143 - RNA, 22 nt, synthetic construct
  source 1..22: mol_type = other RNA
ccacgcagtttgttctgctgtt

SEQ ID NO: 128144 - RNA, 22 nt, synthetic construct
  source 1..22: mol_type = other RNA
ccacgcatctggtctatctcat

SEQ ID NO: 128145 - RNA, 22 nt, synthetic construct
  source 1..22: mol_type = other RNA
ccacgcccattaggatagctat

SEQ ID NO: 128146 - RNA, 22 nt, synthetic construct
  source 1..22: mol_type = other RNA
ccacgcccggccgatgcctgtg

SEQ ID NO: 128147 - RNA, 22 nt, synthetic construct
  source 1..22: mol_type = other RNA
ccacgcgtaagggtacagaact

SEQ ID NO: 128148 - RNA, 22 nt, synthetic construct
  source 1..22: mol_type = other RNA
ccacgctgtggcttgggtgacc

SEQ ID NO: 128149 - RNA, 22 nt, synthetic construct
  source 1..22: mol_type = other RNA
ccacggaatgcccctttgagca

SEQ ID NO: 128150 - RNA, 22 nt, synthetic construct
  source 1..22: mol_type = other RNA
ccacgggtaaaaataaatctaa

SEQ ID NO: 128151 - RNA, 22 nt, synthetic construct
  source 1..22: mol_type = other RNA
ccacgtccggtcgttggattta

SEQ ID NO: 128152 - RNA, 22 nt, synthetic construct
  source 1..22: mol_type = other RNA
ccacgtgaagatggagttacgc

SEQ ID NO: 128153 - RNA, 22 nt, synthetic construct
  source 1..22: mol_type = other RNA
ccacgtggagtgcaatggggca

SEQ ID NO: 128154 - RNA, 22 nt, synthetic construct
  source 1..22: mol_type = other RNA
ccacgtgggtgacagagcaaga

SEQ ID NO: 128155 - RNA, 22 nt, synthetic construct
  source 1..22: mol_type = other RNA
ccacgtgtattgagtgtagctg

SEQ ID NO: 128156 - RNA, 22 nt, synthetic construct
  source 1..22: mol_type = other RNA
ccactaaaacaggaagttgaga

SEQ ID NO: 128157 - RNA, 22 nt, synthetic construct
  source 1..22: mol_type = other RNA
ccactaaggtcaacacatcagc

SEQ ID NO: 128158 - RNA, 22 nt, synthetic construct
  source 1..22: mol_type = other RNA
ccactaatgtcacattttctta

SEQ ID NO: 128159 - RNA, 22 nt, synthetic construct
  source 1..22: mol_type = other RNA
ccactaatgtccttttcctgtt

SEQ ID NO: 128160 - RNA, 22 nt, synthetic construct
  source 1..22: mol_type = other RNA
ccactacacccggctaattaaa

SEQ ID NO: 128161 - RNA, 22 nt, synthetic construct
  source 1..22: mol_type = other RNA
ccactacgcccggcccatgaca

SEQ ID NO: 128162 - RNA, 22 nt, synthetic construct
  source 1..22: mol_type = other RNA
ccactacttagcccctgctgcc

SEQ ID NO: 128163 - RNA, 22 nt, synthetic construct
  source 1..22: mol_type = other RNA
ccactagagtattacctatgaa

SEQ ID NO: 128164 - RNA, 22 nt, synthetic construct
  source 1..22: mol_type = other RNA
ccactagcaaactactgatagc

SEQ ID NO: 128165 - RNA, 22 nt, synthetic construct
  source 1..22: mol_type = other RNA
ccactaggggactaacagggtc

SEQ ID NO: 128166 - RNA, 22 nt, synthetic construct
  source 1..22: mol_type = other RNA
ccactagtcagtatatttactg

SEQ ID NO: 128167 - RNA, 22 nt, synthetic construct
  source 1..22: mol_type = other RNA
ccactagtgaagtcccatcttc

SEQ ID NO: 128168 - RNA, 22 nt, synthetic construct
  source 1..22: mol_type = other RNA
ccactagtggaagaatcaggtc

SEQ ID NO: 128169 - RNA, 22 nt, synthetic construct
  source 1..22: mol_type = other RNA
ccactagtgggatcaaaccatg

SEQ ID NO: 128170 - RNA, 22 nt, synthetic construct
  source 1..22: mol_type = other RNA
ccactataatccagatggacaa

SEQ ID NO: 128171 - RNA, 22 nt, synthetic construct
  source 1..22: mol_type = other RNA
ccactatagaaaatagtatgaa

SEQ ID NO: 128172 - RNA, 22 nt, synthetic construct
  source 1..22: mol_type = other RNA
ccactatattgcccaggctggt

SEQ ID NO: 128173 - RNA, 22 nt, synthetic construct
  source 1..22: mol_type = other RNA
ccactatctaataaaatagcag

SEQ ID NO: 128174 - RNA, 22 nt, synthetic construct
  source 1..22: mol_type = other RNA
ccactattgaaagcccttgagt

SEQ ID NO: 128175 - RNA, 22 nt, synthetic construct
  source 1..22: mol_type = other RNA
ccactcaaaactgaagtttatc

SEQ ID NO: 128176 - RNA, 22 nt, synthetic construct
  source 1..22: mol_type = other RNA
ccactcacctgtcatgtcaaat

SEQ ID NO: 128177 - RNA, 22 nt, synthetic construct
  source 1..22: mol_type = other RNA
ccactccacacacgaagtagtt

SEQ ID NO: 128178 - RNA, 22 nt, synthetic construct
  source 1..22: mol_type = other RNA
ccactccaccttagcccaagct

SEQ ID NO: 128179 - RNA, 22 nt, synthetic construct
  source 1..22: mol_type = other RNA
ccactccagcctgagcaacaaa

SEQ ID NO: 128180 - RNA, 22 nt, synthetic construct
  source 1..22: mol_type = other RNA
ccactctcatctaaattaagct

SEQ ID NO: 128181 - RNA, 22 nt, synthetic construct
  source 1..22: mol_type = other RNA
ccactctccccaagtaaacctc

SEQ ID NO: 128182 - RNA, 22 nt, synthetic construct
  source 1..22: mol_type = other RNA
ccactctctggctgcaattgcg

SEQ ID NO: 128183 - RNA, 22 nt, synthetic construct
  source 1..22: mol_type = other RNA
ccactctgaattctctggaata

SEQ ID NO: 128184 - RNA, 22 nt, synthetic construct
  source 1..22: mol_type = other RNA
ccactcttatatcctaaacact

SEQ ID NO: 128185 - RNA, 22 nt, synthetic construct
  source 1..22: mol_type = other RNA
ccactgaaacttttcttttctt

SEQ ID NO: 128186 - RNA, 22 nt, synthetic construct
  source 1..22: mol_type = other RNA
ccactgaagtgttgagaggctt

SEQ ID NO: 128187 - RNA, 22 nt, synthetic construct
  source 1..22: mol_type = other RNA
ccactgaatcagattttaaatg

SEQ ID NO: 128188 - RNA, 22 nt, synthetic construct
  source 1..22: mol_type = other RNA
ccactgacagtggacaaaggtt

SEQ ID NO: 128189 - RNA, 22 nt, synthetic construct
  source 1..22: mol_type = other RNA
ccactgagagctcaggccagtg

SEQ ID NO: 128190 - RNA, 22 nt, synthetic construct
  source 1..22: mol_type = other RNA
ccactgagagggaagtttatag

SEQ ID NO: 128191 - RNA, 22 nt, synthetic construct
  source 1..22: mol_type = other RNA
ccactgagcacaatgcctgccg

SEQ ID NO: 128192 - RNA, 22 nt, synthetic construct
  source 1..22: mol_type = other RNA
ccactgagcatttatataagtt

SEQ ID NO: 128193 - RNA, 22 nt, synthetic construct
  source 1..22: mol_type = other RNA
ccactgaggtcaagaaataaaa

SEQ ID NO: 128194 - RNA, 22 nt, synthetic construct
  source 1..22: mol_type = other RNA
ccactgatggaattctgacacc

SEQ ID NO: 128195 - RNA, 22 nt, synthetic construct
  source 1..22: mol_type = other RNA
ccactgattgagtatctggtgc

SEQ ID NO: 128196 - RNA, 22 nt, synthetic construct
  source 1..22: mol_type = other RNA
ccactgcacagtatgcggggtt

SEQ ID NO: 128197 - RNA, 22 nt, synthetic construct
  source 1..22: mol_type = other RNA
ccactgcactccagccttggta

SEQ ID NO: 128198 - RNA, 22 nt, synthetic construct
  source 1..22: mol_type = other RNA
ccactgcactctggcctggaca

SEQ ID NO: 128199 - RNA, 22 nt, synthetic construct
  source 1..22: mol_type = other RNA
ccactgcaggtgttggtgcatt

SEQ ID NO: 128200 - RNA, 22 nt, synthetic construct
  source 1..22: mol_type = other RNA
ccactgcattcatccaggcaaa

SEQ ID NO: 128201 - RNA, 22 nt, synthetic construct
  source 1..22: mol_type = other RNA
ccactgcattccgcctgggcga

SEQ ID NO: 128202 - RNA, 22 nt, synthetic construct
  source 1..22: mol_type = other RNA
ccactgcgggcccagctctttt

SEQ ID NO: 128203 - RNA, 22 nt, synthetic construct
  source 1..22: mol_type = other RNA
ccactgctatgactaatttgag

SEQ ID NO: 128204 - RNA, 22 nt, synthetic construct
  source 1..22: mol_type = other RNA
ccactggaaaccttttgtagac

SEQ ID NO: 128205 - RNA, 22 nt, synthetic construct
  source 1..22: mol_type = other RNA
ccactggatacggaaatataac

SEQ ID NO: 128206 - RNA, 22 nt, synthetic construct
  source 1..22: mol_type = other RNA
ccactggggagtgtgcccaagg

SEQ ID NO: 128207 - RNA, 22 nt, synthetic construct
  source 1..22: mol_type = other RNA
ccactgggtcttataggttgaa

SEQ ID NO: 128208 - RNA, 22 nt, synthetic construct
  source 1..22: mol_type = other RNA
ccactggtttcagtccctcctt

SEQ ID NO: 128209 - RNA, 22 nt, synthetic construct
  source 1..22: mol_type = other RNA
ccactgtaggccccgatgccat

SEQ ID NO: 128210 - RNA, 22 nt, synthetic construct
  source 1..22: mol_type = other RNA
ccactgtcagtgggactggaga

SEQ ID NO: 128211 - RNA, 22 nt, synthetic construct
  source 1..22: mol_type = other RNA
ccactgttatctgggaacagcc

SEQ ID NO: 128212 - RNA, 22 nt, synthetic construct
  source 1..22: mol_type = other RNA
ccacttaaaaaatgcgcgtccg

SEQ ID NO: 128213 - RNA, 22 nt, synthetic construct
  source 1..22: mol_type = other RNA
ccacttacatcagcagtgacca

SEQ ID NO: 128214 - RNA, 22 nt, synthetic construct
  source 1..22: mol_type = other RNA
ccacttagtttgcaatacagtt

SEQ ID NO: 128215 - RNA, 22 nt, synthetic construct
  source 1..22: mol_type = other RNA
ccacttatatgaagctaaaaaa

SEQ ID NO: 128216 - RNA, 22 nt, synthetic construct
  source 1..22: mol_type = other RNA
ccacttcccactgctatgacta

SEQ ID NO: 128217 - RNA, 22 nt, synthetic construct
  source 1..22: mol_type = other RNA
ccacttcctattagaagaatga

SEQ ID NO: 128218 - RNA, 22 nt, synthetic construct
  source 1..22: mol_type = other RNA
ccacttcgaaagttcagataga

SEQ ID NO: 128219 - RNA, 22 nt, synthetic construct
  source 1..22: mol_type = other RNA
ccacttcgagaagggaagtaaa

SEQ ID NO: 128220 - RNA, 22 nt, synthetic construct
  source 1..22: mol_type = other RNA
ccacttgatccaggtgtatgat

SEQ ID NO: 128221 - RNA, 22 nt, synthetic construct
  source 1..22: mol_type = other RNA
ccacttgggtggaagctgtcct

SEQ ID NO: 128222 - RNA, 22 nt, synthetic construct
  source 1..22: mol_type = other RNA
ccacttgtcccatggtcaaatc

SEQ ID NO: 128223 - RNA, 22 nt, synthetic construct
  source 1..22: mol_type = other RNA
ccactttcatgatttggtgtgt

SEQ ID NO: 128224 - RNA, 22 nt, synthetic construct
  source 1..22: mol_type = other RNA
ccactttccatcttaggccata

SEQ ID NO: 128225 - RNA, 22 nt, synthetic construct
  source 1..22: mol_type = other RNA
ccactttgaggttattaagata

SEQ ID NO: 128226 - RNA, 22 nt, synthetic construct
  source 1..22: mol_type = other RNA
ccagaaaaccagaaaagtgaaa

SEQ ID NO: 128227 - RNA, 22 nt, synthetic construct
  source 1..22: mol_type = other RNA
ccagaaaactggcaatcaaatg

SEQ ID NO: 128228 - RNA, 22 nt, synthetic construct
  source 1..22: mol_type = other RNA
ccagaaaagtgaaacaataaat

SEQ ID NO: 128229 - RNA, 22 nt, synthetic construct
  source 1..22: mol_type = other RNA
ccagaaacttccaaccatcttc

SEQ ID NO: 128230 - RNA, 22 nt, synthetic construct
  source 1..22: mol_type = other RNA
ccagaaagagagaggggggaag

SEQ ID NO: 128231 - RNA, 22 nt, synthetic construct
  source 1..22: mol_type = other RNA
ccagaaataaatcctcacatgt

SEQ ID NO: 128232 - RNA, 22 nt, synthetic construct
  source 1..22: mol_type = other RNA
ccagaactacacattccagacc

SEQ ID NO: 128233 - RNA, 22 nt, synthetic construct
  source 1..22: mol_type = other RNA
ccagaactcgaagccttcccct

SEQ ID NO: 128234 - RNA, 22 nt, synthetic construct
  source 1..22: mol_type = other RNA
ccagaagagaatggctggaatg

SEQ ID NO: 128235 - RNA, 22 nt, synthetic construct
  source 1..22: mol_type = other RNA
ccagaaggagaaaacaaaaaga

SEQ ID NO: 128236 - RNA, 22 nt, synthetic construct
  source 1..22: mol_type = other RNA
ccagaaggttaactaatagcca

SEQ ID NO: 128237 - RNA, 22 nt, synthetic construct
  source 1..22: mol_type = other RNA
ccagaagtaactcttgagttag

SEQ ID NO: 128238 - RNA, 22 nt, synthetic construct
  source 1..22: mol_type = other RNA
ccagaagtcactttttattctg

SEQ ID NO: 128239 - RNA, 22 nt, synthetic construct
  source 1..22: mol_type = other RNA
ccagaataggcaaattcataga

SEQ ID NO: 128240 - RNA, 22 nt, synthetic construct
  source 1..22: mol_type = other RNA
ccagaatccctttcgctaatct

SEQ ID NO: 128241 - RNA, 22 nt, synthetic construct
  source 1..22: mol_type = other RNA
ccagaatgaccgagatacttaa

SEQ ID NO: 128242 - RNA, 22 nt, synthetic construct
  source 1..22: mol_type = other RNA
ccagacaaaaatagaggatggg

SEQ ID NO: 128243 - RNA, 22 nt, synthetic construct
  source 1..22: mol_type = other RNA
ccagacaaaaattttcattcta

SEQ ID NO: 128244 - RNA, 22 nt, synthetic construct
  source 1..22: mol_type = other RNA
ccagacagatatatgcattccc

SEQ ID NO: 128245 - RNA, 22 nt, synthetic construct
  source 1..22: mol_type = other RNA
ccagacagctaatatgctgtag

SEQ ID NO: 128246 - RNA, 22 nt, synthetic construct
  source 1..22: mol_type = other RNA
ccagacagggaatgcccctgta

SEQ ID NO: 128247 - RNA, 22 nt, synthetic construct
  source 1..22: mol_type = other RNA
ccagacatttctcatactttgt

SEQ ID NO: 128248 - RNA, 22 nt, synthetic construct
  source 1..22: mol_type = other RNA
ccagacattttatttatacagg

SEQ ID NO: 128249 - RNA, 22 nt, synthetic construct
  source 1..22: mol_type = other RNA
ccagaccaagtttaaccaatta

SEQ ID NO: 128250 - RNA, 22 nt, synthetic construct
  source 1..22: mol_type = other RNA
ccagaccagcagttcaagcacc

SEQ ID NO: 128251 - RNA, 22 nt, synthetic construct
  source 1..22: mol_type = other RNA
ccagacccgccgcagagccgga

SEQ ID NO: 128252 - RNA, 22 nt, synthetic construct
  source 1..22: mol_type = other RNA
ccagaccctttatcggataagg

SEQ ID NO: 128253 - RNA, 22 nt, synthetic construct
  source 1..22: mol_type = other RNA
ccagacctgcacaaaggattgg

SEQ ID NO: 128254 - RNA, 22 nt, synthetic construct
  source 1..22: mol_type = other RNA
ccagactgaccaacatggacaa

SEQ ID NO: 128255 - RNA, 22 nt, synthetic construct
  source 1..22: mol_type = other RNA
ccagactggagttcactggcac

SEQ ID NO: 128256 - RNA, 22 nt, synthetic construct
  source 1..22: mol_type = other RNA
ccagactgggcaacagagacag

SEQ ID NO: 128257 - RNA, 22 nt, synthetic construct
  source 1..22: mol_type = other RNA
ccagagaagttttccaggaaaa

SEQ ID NO: 128258 - RNA, 22 nt, synthetic construct
  source 1..22: mol_type = other RNA
ccagagaattcagagtggctaa

SEQ ID NO: 128259 - RNA, 22 nt, synthetic construct
  source 1..22: mol_type = other RNA
ccagagacaaagcataaaatat

SEQ ID NO: 128260 - RNA, 22 nt, synthetic construct
  source 1..22: mol_type = other RNA
ccagagaggctaggtgacctgc

SEQ ID NO: 128261 - RNA, 22 nt, synthetic construct
  source 1..22: mol_type = other RNA
ccagagagtggaaagagccagc

SEQ ID NO: 128262 - RNA, 22 nt, synthetic construct
  source 1..22: mol_type = other RNA
ccagagatcccaccattgcact

SEQ ID NO: 128263 - RNA, 22 nt, synthetic construct
  source 1..22: mol_type = other RNA
ccagagattgggaaaatcttgg

SEQ ID NO: 128264 - RNA, 22 nt, synthetic construct
  source 1..22: mol_type = other RNA
ccagagattgtcgttgagtacc

SEQ ID NO: 128265 - RNA, 22 nt, synthetic construct
  source 1..22: mol_type = other RNA
ccagagcctaatgtgtaagaaa

SEQ ID NO: 128266 - RNA, 22 nt, synthetic construct
  source 1..22: mol_type = other RNA
ccagagcggaatttttatatta

SEQ ID NO: 128267 - RNA, 22 nt, synthetic construct
  source 1..22: mol_type = other RNA
ccagagcgggtttcctcggtct

SEQ ID NO: 128268 - RNA, 22 nt, synthetic construct
  source 1..22: mol_type = other RNA
ccagaggaagcttataatttct

SEQ ID NO: 128269 - RNA, 22 nt, synthetic construct
  source 1..22: mol_type = other RNA
ccagaggaggaagagatagtct

SEQ ID NO: 128270 - RNA, 22 nt, synthetic construct
  source 1..22: mol_type = other RNA
ccagaggagggatgcattctag

SEQ ID NO: 128271 - RNA, 22 nt, synthetic construct
  source 1..22: mol_type = other RNA
ccagagggaatctaggaaacac

SEQ ID NO: 128272 - RNA, 22 nt, synthetic construct
  source 1..22: mol_type = other RNA
ccagagggtaacgtgagctgga

SEQ ID NO: 128273 - RNA, 22 nt, synthetic construct
  source 1..22: mol_type = other RNA
ccagaggtactcaacgacaatc

SEQ ID NO: 128274 - RNA, 22 nt, synthetic construct
  source 1..22: mol_type = other RNA
ccagaggtgagctttttctttt

SEQ ID NO: 128275 - RNA, 22 nt, synthetic construct
  source 1..22: mol_type = other RNA
ccagaggttaaagcaacaggaa

SEQ ID NO: 128276 - RNA, 22 nt, synthetic construct
  source 1..22: mol_type = other RNA
ccagaggttcttttaaatgcca

SEQ ID NO: 128277 - RNA, 22 nt, synthetic construct
  source 1..22: mol_type = other RNA
ccagagttggcacagccagtca

SEQ ID NO: 128278 - RNA, 22 nt, synthetic construct
  source 1..22: mol_type = other RNA
ccagagtttcactctgtcgccc

SEQ ID NO: 128279 - RNA, 22 nt, synthetic construct
  source 1..22: mol_type = other RNA
ccagataaattatagctccaaa

SEQ ID NO: 128280 - RNA, 22 nt, synthetic construct
  source 1..22: mol_type = other RNA
ccagataacagtggttaggaaa

SEQ ID NO: 128281 - RNA, 22 nt, synthetic construct
  source 1..22: mol_type = other RNA
ccagatacgttaaaggaaaaga

SEQ ID NO: 128282 - RNA, 22 nt, synthetic construct
  source 1..22: mol_type = other RNA
ccagatactcaatcagtggcca

SEQ ID NO: 128283 - RNA, 22 nt, synthetic construct
  source 1..22: mol_type = other RNA
ccagatactcatgcttgctcca

SEQ ID NO: 128284 - RNA, 22 nt, synthetic construct
  source 1..22: mol_type = other RNA
ccagatatccataaggaaaaaa

SEQ ID NO: 128285 - RNA, 22 nt, synthetic construct
  source 1..22: mol_type = other RNA
ccagatattatcctccaatgtt

SEQ ID NO: 128286 - RNA, 22 nt, synthetic construct
  source 1..22: mol_type = other RNA
ccagatcaaacgtgctttcctt

SEQ ID NO: 128287 - RNA, 22 nt, synthetic construct
  source 1..22: mol_type = other RNA
ccagatctaacaaacgcattgt

SEQ ID NO: 128288 - RNA, 22 nt, synthetic construct
  source 1..22: mol_type = other RNA
ccagatgaagcagggaaatgga

SEQ ID NO: 128289 - RNA, 22 nt, synthetic construct
  source 1..22: mol_type = other RNA
ccagatgacttcactggagaat

SEQ ID NO: 128290 - RNA, 22 nt, synthetic construct
  source 1..22: mol_type = other RNA
ccagatgcgtggttcacacctg

SEQ ID NO: 128291 - RNA, 22 nt, synthetic construct
  source 1..22: mol_type = other RNA
ccagatggacaaattaccatgt

SEQ ID NO: 128292 - RNA, 22 nt, synthetic construct
  source 1..22: mol_type = other RNA
ccagatggggattgagggttag

SEQ ID NO: 128293 - RNA, 22 nt, synthetic construct
  source 1..22: mol_type = other RNA
ccagatgtagagaaacaggatt

SEQ ID NO: 128294 - RNA, 22 nt, synthetic construct
  source 1..22: mol_type = other RNA
ccagatgttctaatttctttaa

SEQ ID NO: 128295 - RNA, 22 nt, synthetic construct
  source 1..22: mol_type = other RNA
ccagatgttttacacatgtcag

SEQ ID NO: 128296 - RNA, 22 nt, synthetic construct
  source 1..22: mol_type = other RNA
ccagattccttttttatgtgct

SEQ ID NO: 128297 - RNA, 22 nt, synthetic construct
  source 1..22: mol_type = other RNA
ccagattgaaatctaggcatat

SEQ ID NO: 128298 - RNA, 22 nt, synthetic construct
  source 1..22: mol_type = other RNA
ccagattgatatctgagtgttg

SEQ ID NO: 128299 - RNA, 22 nt, synthetic construct
  source 1..22: mol_type = other RNA
ccagatttgatcctggaatagt

SEQ ID NO: 128300 - RNA, 22 nt, synthetic construct
  source 1..22: mol_type = other RNA
ccagcaaatcagaaaaggctga

SEQ ID NO: 128301 - RNA, 22 nt, synthetic construct
  source 1..22: mol_type = other RNA
ccagcaagactttatgtggaaa

SEQ ID NO: 128302 - RNA, 22 nt, synthetic construct
  source 1..22: mol_type = other RNA
ccagcaccacccttgatgtcac

SEQ ID NO: 128303 - RNA, 22 nt, synthetic construct
  source 1..22: mol_type = other RNA
ccagcaccagatactcaatcag

SEQ ID NO: 128304 - RNA, 22 nt, synthetic construct
  source 1..22: mol_type = other RNA
ccagcacctaacaatgattatt

SEQ ID NO: 128305 - RNA, 22 nt, synthetic construct
  source 1..22: mol_type = other RNA
ccagcactctgaatcacctcaa

SEQ ID NO: 128306 - RNA, 22 nt, synthetic construct
  source 1..22: mol_type = other RNA
ccagcacttccattttgcttaa

SEQ ID NO: 128307 - RNA, 22 nt, synthetic construct
  source 1..22: mol_type = other RNA
ccagcagaaggtgagggactga

SEQ ID NO: 128308 - RNA, 22 nt, synthetic construct
  source 1..22: mol_type = other RNA
ccagcagccccgacgcctttca

SEQ ID NO: 128309 - RNA, 22 nt, synthetic construct
  source 1..22: mol_type = other RNA
ccagcagggtaaagtcaattct

SEQ ID NO: 128310 - RNA, 22 nt, synthetic construct
  source 1..22: mol_type = other RNA
ccagcagttcaagcaccacttc

SEQ ID NO: 128311 - RNA, 22 nt, synthetic construct
  source 1..22: mol_type = other RNA
ccagcagtttcacttcttagta

SEQ ID NO: 128312 - RNA, 22 nt, synthetic construct
  source 1..22: mol_type = other RNA
ccagcataagacccctcaggtg

SEQ ID NO: 128313 - RNA, 22 nt, synthetic construct
  source 1..22: mol_type = other RNA
ccagcatccactaggggactaa

SEQ ID NO: 128314 - RNA, 22 nt, synthetic construct
  source 1..22: mol_type = other RNA
ccagcatccctccagtccagca

SEQ ID NO: 128315 - RNA, 22 nt, synthetic construct
  source 1..22: mol_type = other RNA
ccagcatcttttgacgcgcaac

SEQ ID NO: 128316 - RNA, 22 nt, synthetic construct
  source 1..22: mol_type = other RNA
ccagcatgaagccctctaagtc

SEQ ID NO: 128317 - RNA, 22 nt, synthetic construct
  source 1..22: mol_type = other RNA
ccagcattaccctaataacaaa

SEQ ID NO: 128318 - RNA, 22 nt, synthetic construct
  source 1..22: mol_type = other RNA
ccagcattacttaggcagttat

SEQ ID NO: 128319 - RNA, 22 nt, synthetic construct
  source 1..22: mol_type = other RNA
ccagcattttataggcattcct

SEQ ID NO: 128320 - RNA, 22 nt, synthetic construct
  source 1..22: mol_type = other RNA
ccagccaaacagtttttacatg

SEQ ID NO: 128321 - RNA, 22 nt, synthetic construct
  source 1..22: mol_type = other RNA
ccagccacccttgctgcttcta

SEQ ID NO: 128322 - RNA, 22 nt, synthetic construct
  source 1..22: mol_type = other RNA
ccagccattctcttctggatag

SEQ ID NO: 128323 - RNA, 22 nt, synthetic construct
  source 1..22: mol_type = other RNA
ccagcccccagttttgttgaat

SEQ ID NO: 128324 - RNA, 22 nt, synthetic construct
  source 1..22: mol_type = other RNA
ccagcccctggtgatctatgaa

SEQ ID NO: 128325 - RNA, 22 nt, synthetic construct
  source 1..22: mol_type = other RNA
ccagcccgtgtgtttagaataa

SEQ ID NO: 128326 - RNA, 22 nt, synthetic construct
  source 1..22: mol_type = other RNA
ccagcctaggcaagagagcaag

SEQ ID NO: 128327 - RNA, 22 nt, synthetic construct
  source 1..22: mol_type = other RNA
ccagcctcaaacaatcctccct

SEQ ID NO: 128328 - RNA, 22 nt, synthetic construct
  source 1..22: mol_type = other RNA
ccagcctcaacagcacttttgt

SEQ ID NO: 128329 - RNA, 22 nt, synthetic construct
  source 1..22: mol_type = other RNA
ccagcctgatgatgatggtgat

SEQ ID NO: 128330 - RNA, 22 nt, synthetic construct
  source 1..22: mol_type = other RNA
ccagcctggccaacatcgtaaa

SEQ ID NO: 128331 - RNA, 22 nt, synthetic construct
  source 1..22: mol_type = other RNA
ccagcctgggacagagcgagac

SEQ ID NO: 128332 - RNA, 22 nt, synthetic construct
  source 1..22: mol_type = other RNA
ccagcctggtaatgaatagaaa

SEQ ID NO: 128333 - RNA, 22 nt, synthetic construct
  source 1..22: mol_type = other RNA
ccagcctggtcaacagggtaag

SEQ ID NO: 128334 - RNA, 22 nt, synthetic construct
  source 1..22: mol_type = other RNA
ccagccttaatctcctgagtag

SEQ ID NO: 128335 - RNA, 22 nt, synthetic construct
  source 1..22: mol_type = other RNA
ccagccttggtaagagtgagac

SEQ ID NO: 128336 - RNA, 22 nt, synthetic construct
  source 1..22: mol_type = other RNA
ccagcctttaatttagcgttca

SEQ ID NO: 128337 - RNA, 22 nt, synthetic construct
  source 1..22: mol_type = other RNA
ccagcgctaagcactgcgccaa

SEQ ID NO: 128338 - RNA, 22 nt, synthetic construct
  source 1..22: mol_type = other RNA
ccagcggcatacaggagttccg

SEQ ID NO: 128339 - RNA, 22 nt, synthetic construct
  source 1..22: mol_type = other RNA
ccagcgtgggcaacacaatgag

SEQ ID NO: 128340 - RNA, 22 nt, synthetic construct
  source 1..22: mol_type = other RNA
ccagcgtgtgcatgaccctgct

SEQ ID NO: 128341 - RNA, 22 nt, synthetic construct
  source 1..22: mol_type = other RNA
ccagctaaaatgttcagataga

SEQ ID NO: 128342 - RNA, 22 nt, synthetic construct
  source 1..22: mol_type = other RNA
ccagctaacttttaacccacag

SEQ ID NO: 128343 - RNA, 22 nt, synthetic construct
  source 1..22: mol_type = other RNA
ccagctaattttcattactttt

SEQ ID NO: 128344 - RNA, 22 nt, synthetic construct
  source 1..22: mol_type = other RNA
ccagctacataacttcccagac

SEQ ID NO: 128345 - RNA, 22 nt, synthetic construct
  source 1..22: mol_type = other RNA
ccagctcacgttaccctctgga

SEQ ID NO: 128346 - RNA, 22 nt, synthetic construct
  source 1..22: mol_type = other RNA
ccagctcgaccaggggaaggag

SEQ ID NO: 128347 - RNA, 22 nt, synthetic construct
  source 1..22: mol_type = other RNA
ccagctcttttgtgtcttttta

SEQ ID NO: 128348 - RNA, 22 nt, synthetic construct
  source 1..22: mol_type = other RNA
ccagctgtccaacaagggttgg

SEQ ID NO: 128349 - RNA, 22 nt, synthetic construct
  source 1..22: mol_type = other RNA
ccagcttacagcagatctgctt

SEQ ID NO: 128350 - RNA, 22 nt, synthetic construct
  source 1..22: mol_type = other RNA
ccagcttcactcttctgcaagt

SEQ ID NO: 128351 - RNA, 22 nt, synthetic construct
  source 1..22: mol_type = other RNA
ccagcttccgggacttggaagt

SEQ ID NO: 128352 - RNA, 22 nt, synthetic construct
  source 1..22: mol_type = other RNA
ccagcttggccaacatggcgaa

SEQ ID NO: 128353 - RNA, 22 nt, synthetic construct
  source 1..22: mol_type = other RNA
ccagcttgggcaagagagcaag

SEQ ID NO: 128354 - RNA, 22 nt, synthetic construct
  source 1..22: mol_type = other RNA
ccagctttctaattctgacaac

SEQ ID NO: 128355 - RNA, 22 nt, synthetic construct
  source 1..22: mol_type = other RNA
ccagctttggctgaaatgctgt

SEQ ID NO: 128356 - RNA, 22 nt, synthetic construct
  source 1..22: mol_type = other RNA
ccagcttttattagagctttaa

SEQ ID NO: 128357 - RNA, 22 nt, synthetic construct
  source 1..22: mol_type = other RNA
ccaggaaaagcaaatgtcatct

SEQ ID NO: 128358 - RNA, 22 nt, synthetic construct
  source 1..22: mol_type = other RNA
ccaggaacagattcacgcacag

SEQ ID NO: 128359 - RNA, 22 nt, synthetic construct
  source 1..22: mol_type = other RNA
ccaggaacttacagtaagatcc

SEQ ID NO: 128360 - RNA, 22 nt, synthetic construct
  source 1..22: mol_type = other RNA
ccaggaagtcagcaactcttgg

SEQ ID NO: 128361 - RNA, 22 nt, synthetic construct
  source 1..22: mol_type = other RNA
ccaggacaattgaatggggatg

SEQ ID NO: 128362 - RNA, 22 nt, synthetic construct
  source 1..22: mol_type = other RNA
ccaggaccaatttaccatctga

SEQ ID NO: 128363 - RNA, 22 nt, synthetic construct
  source 1..22: mol_type = other RNA
ccaggagctagaacagaataaa

SEQ ID NO: 128364 - RNA, 22 nt, synthetic construct
  source 1..22: mol_type = other RNA
ccaggaggaggagggtgcagcc

SEQ ID NO: 128365 - RNA, 22 nt, synthetic construct
  source 1..22: mol_type = other RNA
ccaggaggcaaaggttgagaca

SEQ ID NO: 128366 - RNA, 22 nt, synthetic construct
  source 1..22: mol_type = other RNA
ccaggaggttgaagctctagtg

SEQ ID NO: 128367 - RNA, 22 nt, synthetic construct
  source 1..22: mol_type = other RNA
ccaggaggtttgcactggcaca

SEQ ID NO: 128368 - RNA, 22 nt, synthetic construct
  source 1..22: mol_type = other RNA
ccaggagttcttatgaggttat

SEQ ID NO: 128369 - RNA, 22 nt, synthetic construct
  source 1..22: mol_type = other RNA
ccaggagttgcatcacttgagg

SEQ ID NO: 128370 - RNA, 22 nt, synthetic construct
  source 1..22: mol_type = other RNA
ccaggatcaaatctggctgcag

SEQ ID NO: 128371 - RNA, 22 nt, synthetic construct
  source 1..22: mol_type = other RNA
ccaggatccagtctctacccag

SEQ ID NO: 128372 - RNA, 22 nt, synthetic construct
  source 1..22: mol_type = other RNA
ccaggatcttactgtaagttcc

SEQ ID NO: 128373 - RNA, 22 nt, synthetic construct
  source 1..22: mol_type = other RNA
ccaggatggcatgaaatgggtt

SEQ ID NO: 128374 - RNA, 22 nt, synthetic construct
  source 1..22: mol_type = other RNA
ccaggcaaaagatgatgaacaa

SEQ ID NO: 128375 - RNA, 22 nt, synthetic construct
  source 1..22: mol_type = other RNA
ccaggcagtcctctcactccaa

SEQ ID NO: 128376 - RNA, 22 nt, synthetic construct
  source 1..22: mol_type = other RNA
ccaggcagttctcctgcctcag

SEQ ID NO: 128377 - RNA, 22 nt, synthetic construct
  source 1..22: mol_type = other RNA
ccaggcatgatggctcaacgcc

SEQ ID NO: 128378 - RNA, 22 nt, synthetic construct
  source 1..22: mol_type = other RNA
ccaggcatgggggcgcgtgcct

SEQ ID NO: 128379 - RNA, 22 nt, synthetic construct
  source 1..22: mol_type = other RNA
ccaggccaacagggccactgag

SEQ ID NO: 128380 - RNA, 22 nt, synthetic construct
  source 1..22: mol_type = other RNA
ccaggcccggggcagagaactg

SEQ ID NO: 128381 - RNA, 22 nt, synthetic construct
  source 1..22: mol_type = other RNA
ccaggcctcgctcttggctttt

SEQ ID NO: 128382 - RNA, 22 nt, synthetic construct
  source 1..22: mol_type = other RNA
ccaggcgcctgcattgcattta

SEQ ID NO: 128383 - RNA, 22 nt, synthetic construct
  source 1..22: mol_type = other RNA
ccaggcggaatgcagtggcgtg

SEQ ID NO: 128384 - RNA, 22 nt, synthetic construct
  source 1..22: mol_type = other RNA
ccaggcggcagagggagcagcg

SEQ ID NO: 128385 - RNA, 22 nt, synthetic construct
  source 1..22: mol_type = other RNA
ccaggcgtggtggcggatgccg

SEQ ID NO: 128386 - RNA, 22 nt, synthetic construct
  source 1..22: mol_type = other RNA
ccaggctgacttagagggcttc

SEQ ID NO: 128387 - RNA, 22 nt, synthetic construct
  source 1..22: mol_type = other RNA
ccaggctggaagaattttaagc

SEQ ID NO: 128388 - RNA, 22 nt, synthetic construct
  source 1..22: mol_type = other RNA
ccaggctggtcttgtactccca

SEQ ID NO: 128389 - RNA, 22 nt, synthetic construct
  source 1..22: mol_type = other RNA
ccaggctggttccaaacttctg

SEQ ID NO: 128390 - RNA, 22 nt, synthetic construct
  source 1..22: mol_type = other RNA
ccaggctttcccagggtgtagc

SEQ ID NO: 128391 - RNA, 22 nt, synthetic construct
  source 1..22: mol_type = other RNA
ccagggaaaccttactgtaata

SEQ ID NO: 128392 - RNA, 22 nt, synthetic construct
  source 1..22: mol_type = other RNA
ccagggaggaatccttcagtca

SEQ ID NO: 128393 - RNA, 22 nt, synthetic construct
  source 1..22: mol_type = other RNA
ccagggaggcggaggttgcggt

SEQ ID NO: 128394 - RNA, 22 nt, synthetic construct
  source 1..22: mol_type = other RNA
ccagggataaatcccacttgat

SEQ ID NO: 128395 - RNA, 22 nt, synthetic construct
  source 1..22: mol_type = other RNA
ccagggatattttcgtgtactg

SEQ ID NO: 128396 - RNA, 22 nt, synthetic construct
  source 1..22: mol_type = other RNA
ccagggcctctgaagacatgct

SEQ ID NO: 128397 - RNA, 22 nt, synthetic construct
  source 1..22: mol_type = other RNA
ccaggggaaggagtctgcccat

SEQ ID NO: 128398 - RNA, 22 nt, synthetic construct
  source 1..22: mol_type = other RNA
ccaggggaatagaaagttagtg

SEQ ID NO: 128399 - RNA, 22 nt, synthetic construct
  source 1..22: mol_type = other RNA
ccaggggacatagatgaaacta

SEQ ID NO: 128400 - RNA, 22 nt, synthetic construct
  source 1..22: mol_type = other RNA
ccaggggacatgctctgatagg

SEQ ID NO: 128401 - RNA, 22 nt, synthetic construct
  source 1..22: mol_type = other RNA
ccaggggctgggggatccaggg

SEQ ID NO: 128402 - RNA, 22 nt, synthetic construct
  source 1..22: mol_type = other RNA
ccaggggggaaaaaaccataaa

SEQ ID NO: 128403 - RNA, 22 nt, synthetic construct
  source 1..22: mol_type = other RNA
ccagggggtatggagacactag

SEQ ID NO: 128404 - RNA, 22 nt, synthetic construct
  source 1..22: mol_type = other RNA
ccagggggtcgagactgtaatg

SEQ ID NO: 128405 - RNA, 22 nt, synthetic construct
  source 1..22: mol_type = other RNA
ccagggtctgtctcacctcaag

SEQ ID NO: 128406 - RNA, 22 nt, synthetic construct
  source 1..22: mol_type = other RNA
ccagggtgtagccacaagccac

SEQ ID NO: 128407 - RNA, 22 nt, synthetic construct
  source 1..22: mol_type = other RNA
ccaggtagaatgaaaatttttg

SEQ ID NO: 128408 - RNA, 22 nt, synthetic construct
  source 1..22: mol_type = other RNA
ccaggtagggaggggtattcag

SEQ ID NO: 128409 - RNA, 22 nt, synthetic construct
  source 1..22: mol_type = other RNA
ccaggtatggcgactcatgcct

SEQ ID NO: 128410 - RNA, 22 nt, synthetic construct
  source 1..22: mol_type = other RNA
ccaggtattttgttctctttga

SEQ ID NO: 128411 - RNA, 22 nt, synthetic construct
  source 1..22: mol_type = other RNA
ccaggtcagccagaggaagctt

SEQ ID NO: 128412 - RNA, 22 nt, synthetic construct
  source 1..22: mol_type = other RNA
ccaggtcagtagtacagtgagt

SEQ ID NO: 128413 - RNA, 22 nt, synthetic construct
  source 1..22: mol_type = other RNA
ccaggtcattacatattttgta

SEQ ID NO: 128414 - RNA, 22 nt, synthetic construct
  source 1..22: mol_type = other RNA
ccaggtggttctgcctaatctc

SEQ ID NO: 128415 - RNA, 22 nt, synthetic construct
  source 1..22: mol_type = other RNA
ccaggtgtatgatcttattaat

SEQ ID NO: 128416 - RNA, 22 nt, synthetic construct
  source 1..22: mol_type = other RNA
ccaggtgtgagattgatagatc

SEQ ID NO: 128417 - RNA, 22 nt, synthetic construct
  source 1..22: mol_type = other RNA
ccaggttcatccatgttgttga

SEQ ID NO: 128418 - RNA, 22 nt, synthetic construct
  source 1..22: mol_type = other RNA
ccaggtttacaggatatcagaa

SEQ ID NO: 128419 - RNA, 22 nt, synthetic construct
  source 1..22: mol_type = other RNA
ccaggtttgtgcttggatattc

SEQ ID NO: 128420 - RNA, 22 nt, synthetic construct
  source 1..22: mol_type = other RNA
ccaggttttatctctctcaagc

SEQ ID NO: 128421 - RNA, 22 nt, synthetic construct
  source 1..22: mol_type = other RNA
ccaggttttggtaatgggaaag

SEQ ID NO: 128422 - RNA, 22 nt, synthetic construct
  source 1..22: mol_type = other RNA
ccagtaagattctgtctctaca

SEQ ID NO: 128423 - RNA, 22 nt, synthetic construct
  source 1..22: mol_type = other RNA
ccagtaatcttgctaaacatgt

SEQ ID NO: 128424 - RNA, 22 nt, synthetic construct
  source 1..22: mol_type = other RNA
ccagtacatctcaattcagaag

SEQ ID NO: 128425 - RNA, 22 nt, synthetic construct
  source 1..22: mol_type = other RNA
ccagtactttttcatccaaaca

SEQ ID NO: 128426 - RNA, 22 nt, synthetic construct
  source 1..22: mol_type = other RNA
ccagtagaaatcttccagaagg

SEQ ID NO: 128427 - RNA, 22 nt, synthetic construct
  source 1..22: mol_type = other RNA
ccagtatacacgtatttatatt

SEQ ID NO: 128428 - RNA, 22 nt, synthetic construct
  source 1..22: mol_type = other RNA
ccagtatattcatagtagctgt

SEQ ID NO: 128429 - RNA, 22 nt, synthetic construct
  source 1..22: mol_type = other RNA
ccagtatctcctttccttcctt

SEQ ID NO: 128430 - RNA, 22 nt, synthetic construct
  source 1..22: mol_type = other RNA
ccagtatgacctcctcccactt

SEQ ID NO: 128431 - RNA, 22 nt, synthetic construct
  source 1..22: mol_type = other RNA
ccagtatgatgccactcaaaac

SEQ ID NO: 128432 - RNA, 22 nt, synthetic construct
  source 1..22: mol_type = other RNA
ccagtcactaaaaatcagatta

SEQ ID NO: 128433 - RNA, 22 nt, synthetic construct
  source 1..22: mol_type = other RNA
ccagtcagtgatggaggtggaa

SEQ ID NO: 128434 - RNA, 22 nt, synthetic construct
  source 1..22: mol_type = other RNA
ccagtcatgtggggactttgtg

SEQ ID NO: 128435 - RNA, 22 nt, synthetic construct
  source 1..22: mol_type = other RNA
ccagtccagcaccacccttgat

SEQ ID NO: 128436 - RNA, 22 nt, synthetic construct
  source 1..22: mol_type = other RNA
ccagtcccactgacagtggaca

SEQ ID NO: 128437 - RNA, 22 nt, synthetic construct
  source 1..22: mol_type = other RNA
ccagtccctagtgtctccatac

SEQ ID NO: 128438 - RNA, 22 nt, synthetic construct
  source 1..22: mol_type = other RNA
ccagtcctgctaacaccttgaa

SEQ ID NO: 128439 - RNA, 22 nt, synthetic construct
  source 1..22: mol_type = other RNA
ccagtccttgtgatctatgcat

SEQ ID NO: 128440 - RNA, 22 nt, synthetic construct
  source 1..22: mol_type = other RNA
ccagtcctttgggaggtcaagg

SEQ ID NO: 128441 - RNA, 22 nt, synthetic construct
  source 1..22: mol_type = other RNA
ccagtcctttgtgtcaagtaca

SEQ ID NO: 128442 - RNA, 22 nt, synthetic construct
  source 1..22: mol_type = other RNA
ccagtctctacccagcactctg

SEQ ID NO: 128443 - RNA, 22 nt, synthetic construct
  source 1..22: mol_type = other RNA
ccagtctctgcaacatttgttg

SEQ ID NO: 128444 - RNA, 22 nt, synthetic construct
  source 1..22: mol_type = other RNA
ccagtcttcaggtctctctgaa

SEQ ID NO: 128445 - RNA, 22 nt, synthetic construct
  source 1..22: mol_type = other RNA
ccagtcttctcatacagatttt

SEQ ID NO: 128446 - RNA, 22 nt, synthetic construct
  source 1..22: mol_type = other RNA
ccagtgaactccagtctgggca

SEQ ID NO: 128447 - RNA, 22 nt, synthetic construct
  source 1..22: mol_type = other RNA
ccagtgaagtcatctggtcctg

SEQ ID NO: 128448 - RNA, 22 nt, synthetic construct
  source 1..22: mol_type = other RNA
ccagtgacacctgaggggtctt

SEQ ID NO: 128449 - RNA, 22 nt, synthetic construct
  source 1..22: mol_type = other RNA
ccagtgaccagtgtgatggggg

SEQ ID NO: 128450 - RNA, 22 nt, synthetic construct
  source 1..22: mol_type = other RNA
ccagtgagtgatgaaaagagca

SEQ ID NO: 128451 - RNA, 22 nt, synthetic construct
  source 1..22: mol_type = other RNA
ccagtgagttcaaatgttaagc

SEQ ID NO: 128452 - RNA, 22 nt, synthetic construct
  source 1..22: mol_type = other RNA
ccagtgattggatatttgcagt

SEQ ID NO: 128453 - RNA, 22 nt, synthetic construct
  source 1..22: mol_type = other RNA
ccagtgcaaacctcctggtttt

SEQ ID NO: 128454 - RNA, 22 nt, synthetic construct
  source 1..22: mol_type = other RNA
ccagtgcagcaagcagtaaata

SEQ ID NO: 128455 - RNA, 22 nt, synthetic construct
  source 1..22: mol_type = other RNA
ccagtgcccacctgacaagtag

SEQ ID NO: 128456 - RNA, 22 nt, synthetic construct
  source 1..22: mol_type = other RNA
ccagtgctctcccccgaatcct

SEQ ID NO: 128457 - RNA, 22 nt, synthetic construct
  source 1..22: mol_type = other RNA
ccagtgcttgcagccttccctg

SEQ ID NO: 128458 - RNA, 22 nt, synthetic construct
  source 1..22: mol_type = other RNA
ccagtggcccccctgaaaaatg

SEQ ID NO: 128459 - RNA, 22 nt, synthetic construct
  source 1..22: mol_type = other RNA
ccagtggctagtgtgttgactg

SEQ ID NO: 128460 - RNA, 22 nt, synthetic construct
  source 1..22: mol_type = other RNA
ccagtgggtcagctagtgtgtc

SEQ ID NO: 128461 - RNA, 22 nt, synthetic construct
  source 1..22: mol_type = other RNA
ccagtggttgtggaattaactc

SEQ ID NO: 128462 - RNA, 22 nt, synthetic construct
  source 1..22: mol_type = other RNA
ccagtgtcctgaatgatttccc

SEQ ID NO: 128463 - RNA, 22 nt, synthetic construct
  source 1..22: mol_type = other RNA
ccagtgtctgctacaggggcat

SEQ ID NO: 128464 - RNA, 22 nt, synthetic construct
  source 1..22: mol_type = other RNA
ccagtgtgatgggggtaagatt

SEQ ID NO: 128465 - RNA, 22 nt, synthetic construct
  source 1..22: mol_type = other RNA
ccagtgtgtttgtttgctagag

SEQ ID NO: 128466 - RNA, 22 nt, synthetic construct
  source 1..22: mol_type = other RNA
ccagtgtttggtttttatggaa

SEQ ID NO: 128467 - RNA, 22 nt, synthetic construct
  source 1..22: mol_type = other RNA
ccagtgttttaaagcagggagg

SEQ ID NO: 128468 - RNA, 22 nt, synthetic construct
  source 1..22: mol_type = other RNA
ccagtgttttaggggggaaaac

SEQ ID NO: 128469 - RNA, 22 nt, synthetic construct
  source 1..22: mol_type = other RNA
ccagttactctctctgcctcgg

SEQ ID NO: 128470 - RNA, 22 nt, synthetic construct
  source 1..22: mol_type = other RNA
ccagttaggaagccactgcatt

SEQ ID NO: 128471 - RNA, 22 nt, synthetic construct
  source 1..22: mol_type = other RNA
ccagttatcaccatgtgcttat

SEQ ID NO: 128472 - RNA, 22 nt, synthetic construct
  source 1..22: mol_type = other RNA
ccagttatctctgccctcattg

SEQ ID NO: 128473 - RNA, 22 nt, synthetic construct
  source 1..22: mol_type = other RNA
ccagttcaaggtgttagcagga

SEQ ID NO: 128474 - RNA, 22 nt, synthetic construct
  source 1..22: mol_type = other RNA
ccagttcaccagtttctaatta

SEQ ID NO: 128475 - RNA, 22 nt, synthetic construct
  source 1..22: mol_type = other RNA
ccagttctgcgcaattgcagcc

SEQ ID NO: 128476 - RNA, 22 nt, synthetic construct
  source 1..22: mol_type = other RNA
ccagttgagagagaattctaaa

SEQ ID NO: 128477 - RNA, 22 nt, synthetic construct
  source 1..22: mol_type = other RNA
ccagttgtaatttttaaaagag

SEQ ID NO: 128478 - RNA, 22 nt, synthetic construct
  source 1..22: mol_type = other RNA
ccagttgtcagaattagaaagc

SEQ ID NO: 128479 - RNA, 22 nt, synthetic construct
  source 1..22: mol_type = other RNA
ccagtttaaagctttgtgactg

SEQ ID NO: 128480 - RNA, 22 nt, synthetic construct
  source 1..22: mol_type = other RNA
ccagtttatatgcctagatgat

SEQ ID NO: 128481 - RNA, 22 nt, synthetic construct
  source 1..22: mol_type = other RNA
ccagtttctaattagaattaag

SEQ ID NO: 128482 - RNA, 22 nt, synthetic construct
  source 1..22: mol_type = other RNA
ccagtttctctgctttttcttg

SEQ ID NO: 128483 - RNA, 22 nt, synthetic construct
  source 1..22: mol_type = other RNA
ccagtttgggtgacagagagag

SEQ ID NO: 128484 - RNA, 22 nt, synthetic construct
  source 1..22: mol_type = other RNA
ccagttttctggaaactcaaac

SEQ ID NO: 128485 - RNA, 22 nt, synthetic construct
  source 1..22: mol_type = other RNA
ccagttttgttgaatcttaaca

SEQ ID NO: 128486 - RNA, 22 nt, synthetic construct
  source 1..22: mol_type = other RNA
ccataaaaaccaaacactggaa

SEQ ID NO: 128487 - RNA, 22 nt, synthetic construct
  source 1..22: mol_type = other RNA
ccataaaaagcgttggagacag

SEQ ID NO: 128488 - RNA, 22 nt, synthetic construct
  source 1..22: mol_type = other RNA
ccataaaaccatttttcagaaa

SEQ ID NO: 128489 - RNA, 22 nt, synthetic construct
  source 1..22: mol_type = other RNA
ccataaactgaacatttataca

SEQ ID NO: 128490 - RNA, 22 nt, synthetic construct
  source 1..22: mol_type = other RNA
ccataaagtcagaggagcagtt

SEQ ID NO: 128491 - RNA, 22 nt, synthetic construct
  source 1..22: mol_type = other RNA
ccataaagtcttccattttaga

SEQ ID NO: 128492 - RNA, 22 nt, synthetic construct
  source 1..22: mol_type = other RNA
ccataaatcaaggtacaataca

SEQ ID NO: 128493 - RNA, 22 nt, synthetic construct
  source 1..22: mol_type = other RNA
ccataaatgtttgctaataatg

SEQ ID NO: 128494 - RNA, 22 nt, synthetic construct
  source 1..22: mol_type = other RNA
ccataagagtccccaactgcaa

SEQ ID NO: 128495 - RNA, 22 nt, synthetic construct
  source 1..22: mol_type = other RNA
ccataagatctgtctttggccc

SEQ ID NO: 128496 - RNA, 22 nt, synthetic construct
  source 1..22: mol_type = other RNA
ccataagtccctaacagtctcg

SEQ ID NO: 128497 - RNA, 22 nt, synthetic construct
  source 1..22: mol_type = other RNA
ccataatccttagattacaaaa

SEQ ID NO: 128498 - RNA, 22 nt, synthetic construct
  source 1..22: mol_type = other RNA
ccataatgagtaacatgtggaa

SEQ ID NO: 128499 - RNA, 22 nt, synthetic construct
  source 1..22: mol_type = other RNA
ccatacaaggagacctactaaa

SEQ ID NO: 128500 - RNA, 22 nt, synthetic construct
  source 1..22: mol_type = other RNA
ccatacagtgccttcagctatg

SEQ ID NO: 128501 - RNA, 22 nt, synthetic construct
  source 1..22: mol_type = other RNA
ccataccacctgtcagaaacac

SEQ ID NO: 128502 - RNA, 22 nt, synthetic construct
  source 1..22: mol_type = other RNA
ccataccccctggaaataagtt

SEQ ID NO: 128503 - RNA, 22 nt, synthetic construct
  source 1..22: mol_type = other RNA
ccatacctggtccttaaatttc

SEQ ID NO: 128504 - RNA, 22 nt, synthetic construct
  source 1..22: mol_type = other RNA
ccatacgaaagcctttattttt

SEQ ID NO: 128505 - RNA, 22 nt, synthetic construct
  source 1..22: mol_type = other RNA
ccatactcagccccctcgaaga

SEQ ID NO: 128506 - RNA, 22 nt, synthetic construct
  source 1..22: mol_type = other RNA
ccatacttttcaactgaacaac

SEQ ID NO: 128507 - RNA, 22 nt, synthetic construct
  source 1..22: mol_type = other RNA
ccatagagctttaaagttaatt

SEQ ID NO: 128508 - RNA, 22 nt, synthetic construct
  source 1..22: mol_type = other RNA
ccatagagggagcatcttccca

SEQ ID NO: 128509 - RNA, 22 nt, synthetic construct
  source 1..22: mol_type = other RNA
ccatagctgaaggcactgtatg

SEQ ID NO: 128510 - RNA, 22 nt, synthetic construct
  source 1..22: mol_type = other RNA
ccatagcttcctaagaaagggt

SEQ ID NO: 128511 - RNA, 22 nt, synthetic construct
  source 1..22: mol_type = other RNA
ccataggcacgcgcccccatgc

SEQ ID NO: 128512 - RNA, 22 nt, synthetic construct
  source 1..22: mol_type = other RNA
ccatagtgtaaactaaaagtaa

SEQ ID NO: 128513 - RNA, 22 nt, synthetic construct
  source 1..22: mol_type = other RNA
ccatagttaatgtgtgaagaag

SEQ ID NO: 128514 - RNA, 22 nt, synthetic construct
  source 1..22: mol_type = other RNA
ccatataaggggaatcatgcag

SEQ ID NO: 128515 - RNA, 22 nt, synthetic construct
  source 1..22: mol_type = other RNA
ccatataatctaaccctcctcc

SEQ ID NO: 128516 - RNA, 22 nt, synthetic construct
  source 1..22: mol_type = other RNA
ccatatacacaaaaagatctgt

SEQ ID NO: 128517 - RNA, 22 nt, synthetic construct
  source 1..22: mol_type = other RNA
ccatatccttttatgtgcagtc

SEQ ID NO: 128518 - RNA, 22 nt, synthetic construct
  source 1..22: mol_type = other RNA
ccatatctacatgtacgccaat

SEQ ID NO: 128519 - RNA, 22 nt, synthetic construct
  source 1..22: mol_type = other RNA
ccatatctttgcttataacaag

SEQ ID NO: 128520 - RNA, 22 nt, synthetic construct
  source 1..22: mol_type = other RNA
ccatatggaggcaatgttgatt

SEQ ID NO: 128521 - RNA, 22 nt, synthetic construct
  source 1..22: mol_type = other RNA
ccatatgggatgcttaaagcgc

SEQ ID NO: 128522 - RNA, 22 nt, synthetic construct
  source 1..22: mol_type = other RNA
ccatatggttaatagtgaccct

SEQ ID NO: 128523 - RNA, 22 nt, synthetic construct
  source 1..22: mol_type = other RNA
ccatatggtttacaatggttca

SEQ ID NO: 128524 - RNA, 22 nt, synthetic construct
  source 1..22: mol_type = other RNA
ccatatgtagggcaccgtgaca

SEQ ID NO: 128525 - RNA, 22 nt, synthetic construct
  source 1..22: mol_type = other RNA
ccatattagagtgaaaagaaac

SEQ ID NO: 128526 - RNA, 22 nt, synthetic construct
  source 1..22: mol_type = other RNA
ccatattggccaggctggttcc

SEQ ID NO: 128527 - RNA, 22 nt, synthetic construct
  source 1..22: mol_type = other RNA
ccatatttccaaataaggtcac

SEQ ID NO: 128528 - RNA, 22 nt, synthetic construct
  source 1..22: mol_type = other RNA
ccatcaacagcagaacaaactg

SEQ ID NO: 128529 - RNA, 22 nt, synthetic construct
  source 1..22: mol_type = other RNA
ccatcaacctaatgaaatttaa

SEQ ID NO: 128530 - RNA, 22 nt, synthetic construct
  source 1..22: mol_type = other RNA
ccatcaagtgtgatcccaaaaa

SEQ ID NO: 128531 - RNA, 22 nt, synthetic construct
  source 1..22: mol_type = other RNA
ccatcaatgatagactggatta

SEQ ID NO: 128532 - RNA, 22 nt, synthetic construct
  source 1..22: mol_type = other RNA
ccatcacacccagtatacacgt

SEQ ID NO: 128533 - RNA, 22 nt, synthetic construct
  source 1..22: mol_type = other RNA
ccatcacactggtcactggcca

SEQ ID NO: 128534 - RNA, 22 nt, synthetic construct
  source 1..22: mol_type = other RNA
ccatcacattttgaatcatggg

SEQ ID NO: 128535 - RNA, 22 nt, synthetic construct
  source 1..22: mol_type = other RNA
ccatcactagaatgtgacttcg

SEQ ID NO: 128536 - RNA, 22 nt, synthetic construct
  source 1..22: mol_type = other RNA
ccatcactgactggctgtgcca

SEQ ID NO: 128537 - RNA, 22 nt, synthetic construct
  source 1..22: mol_type = other RNA
ccatcagagaggctttttatta

SEQ ID NO: 128538 - RNA, 22 nt, synthetic construct
  source 1..22: mol_type = other RNA
ccatcagagtgaacaggcaacc

SEQ ID NO: 128539 - RNA, 22 nt, synthetic construct
  source 1..22: mol_type = other RNA
ccatcaggaaaaccagtttaga

SEQ ID NO: 128540 - RNA, 22 nt, synthetic construct
  source 1..22: mol_type = other RNA
ccatcagtggttgtgcttcgag

SEQ ID NO: 128541 - RNA, 22 nt, synthetic construct
  source 1..22: mol_type = other RNA
ccatcatcatcaggctggctct

SEQ ID NO: 128542 - RNA, 22 nt, synthetic construct
  source 1..22: mol_type = other RNA
ccatcatgcctgggtaattaaa

SEQ ID NO: 128543 - RNA, 22 nt, synthetic construct
  source 1..22: mol_type = other RNA
ccatcattttatgaaaccattt

SEQ ID NO: 128544 - RNA, 22 nt, synthetic construct
  source 1..22: mol_type = other RNA
ccatccacccacttgtcccatg

SEQ ID NO: 128545 - RNA, 22 nt, synthetic construct
  source 1..22: mol_type = other RNA
ccatcccagctacataacttcc

SEQ ID NO: 128546 - RNA, 22 nt, synthetic construct
  source 1..22: mol_type = other RNA
ccatcccattactcggtatgta

SEQ ID NO: 128547 - RNA, 22 nt, synthetic construct
  source 1..22: mol_type = other RNA
ccatccccgctgtccatttcca

SEQ ID NO: 128548 - RNA, 22 nt, synthetic construct
  source 1..22: mol_type = other RNA
ccatcccctttacccctgagaa

SEQ ID NO: 128549 - RNA, 22 nt, synthetic construct
  source 1..22: mol_type = other RNA
ccatccgggagggaggtagggg

SEQ ID NO: 128550 - RNA, 22 nt, synthetic construct
  source 1..22: mol_type = other RNA
ccatcctatctaagcctactgc

SEQ ID NO: 128551 - RNA, 22 nt, synthetic construct
  source 1..22: mol_type = other RNA
ccatcctccagccttaatctcc

SEQ ID NO: 128552 - RNA, 22 nt, synthetic construct
  source 1..22: mol_type = other RNA
ccatcctctatttttgtctggt

SEQ ID NO: 128553 - RNA, 22 nt, synthetic construct
  source 1..22: mol_type = other RNA
ccatcctggatttgggaaggat

SEQ ID NO: 128554 - RNA, 22 nt, synthetic construct
  source 1..22: mol_type = other RNA
ccatccttcccaaatccaggat

SEQ ID NO: 128555 - RNA, 22 nt, synthetic construct
  source 1..22: mol_type = other RNA
ccatcctttccttgtcctaaaa

SEQ ID NO: 128556 - RNA, 22 nt, synthetic construct
  source 1..22: mol_type = other RNA
ccatcgagagatgaatggataa

SEQ ID NO: 128557 - RNA, 22 nt, synthetic construct
  source 1..22: mol_type = other RNA
ccatcgcgcccagcccgtgtgt

SEQ ID NO: 128558 - RNA, 22 nt, synthetic construct
  source 1..22: mol_type = other RNA
ccatcggtctgtatttctgctt

SEQ ID NO: 128559 - RNA, 22 nt, synthetic construct
  source 1..22: mol_type = other RNA
ccatcgttcacactcgcactcc

SEQ ID NO: 128560 - RNA, 22 nt, synthetic construct
  source 1..22: mol_type = other RNA
ccatctaaagccaggctttccc

SEQ ID NO: 128561 - RNA, 22 nt, synthetic construct
  source 1..22: mol_type = other RNA
ccatctaacagaaatacaatgt

SEQ ID NO: 128562 - RNA, 22 nt, synthetic construct
  source 1..22: mol_type = other RNA
ccatctaattcacatttaagaa

SEQ ID NO: 128563 - RNA, 22 nt, synthetic construct
  source 1..22: mol_type = other RNA
ccatctcaagaaaacaagaata

SEQ ID NO: 128564 - RNA, 22 nt, synthetic construct
  source 1..22: mol_type = other RNA
ccatctcactcacctagctgtt

SEQ ID NO: 128565 - RNA, 22 nt, synthetic construct
  source 1..22: mol_type = other RNA
ccatctcagcacagagccgaaa

SEQ ID NO: 128566 - RNA, 22 nt, synthetic construct
  source 1..22: mol_type = other RNA
ccatctcccatcactagaatgt

SEQ ID NO: 128567 - RNA, 22 nt, synthetic construct
  source 1..22: mol_type = other RNA
ccatctccttaatccagtctat

SEQ ID NO: 128568 - RNA, 22 nt, synthetic construct
  source 1..22: mol_type = other RNA
ccatctctaccaaaatataaat

SEQ ID NO: 128569 - RNA, 22 nt, synthetic construct
  source 1..22: mol_type = other RNA
ccatctctagttttccagtata

SEQ ID NO: 128570 - RNA, 22 nt, synthetic construct
  source 1..22: mol_type = other RNA
ccatctctccaacagaagaagt

SEQ ID NO: 128571 - RNA, 22 nt, synthetic construct
  source 1..22: mol_type = other RNA
ccatctctctgcctcaaaatca

SEQ ID NO: 128572 - RNA, 22 nt, synthetic construct
  source 1..22: mol_type = other RNA
ccatctgaattcaagttacaat

SEQ ID NO: 128573 - RNA, 22 nt, synthetic construct
  source 1..22: mol_type = other RNA
ccatctgacatatgttttgctt

SEQ ID NO: 128574 - RNA, 22 nt, synthetic construct
  source 1..22: mol_type = other RNA
ccatctgataagcccaacctga

SEQ ID NO: 128575 - RNA, 22 nt, synthetic construct
  source 1..22: mol_type = other RNA
ccatctggattatagtggtaag

SEQ ID NO: 128576 - RNA, 22 nt, synthetic construct
  source 1..22: mol_type = other RNA
ccatctgggatacttctaactt

SEQ ID NO: 128577 - RNA, 22 nt, synthetic construct
  source 1..22: mol_type = other RNA
ccatctgttaaaagatacgaaa

SEQ ID NO: 128578 - RNA, 22 nt, synthetic construct
  source 1..22: mol_type = other RNA
ccatctgttatagtgtgaaaaa

SEQ ID NO: 128579 - RNA, 22 nt, synthetic construct
  source 1..22: mol_type = other RNA
ccatcttaggccataaatcaag

SEQ ID NO: 128580 - RNA, 22 nt, synthetic construct
  source 1..22: mol_type = other RNA
ccatcttcaagatttcataggc

SEQ ID NO: 128581 - RNA, 22 nt, synthetic construct
  source 1..22: mol_type = other RNA
ccatcttcacgtggcgctccct

SEQ ID NO: 128582 - RNA, 22 nt, synthetic construct
  source 1..22: mol_type = other RNA
ccatcttcatttctaagccatg

SEQ ID NO: 128583 - RNA, 22 nt, synthetic construct
  source 1..22: mol_type = other RNA
ccatcttccatacgaaagcctt

SEQ ID NO: 128584 - RNA, 22 nt, synthetic construct
  source 1..22: mol_type = other RNA
ccatcttcttagtgttcccttc

SEQ ID NO: 128585 - RNA, 22 nt, synthetic construct
  source 1..22: mol_type = other RNA
ccatgaaaataaaaagtatcgt

SEQ ID NO: 128586 - RNA, 22 nt, synthetic construct
  source 1..22: mol_type = other RNA
ccatgaaaataacaaaaatacg

SEQ ID NO: 128587 - RNA, 22 nt, synthetic construct
  source 1..22: mol_type = other RNA
ccatgaaaattgaattataggc

SEQ ID NO: 128588 - RNA, 22 nt, synthetic construct
  source 1..22: mol_type = other RNA
ccatgaaacttatttccagggg

SEQ ID NO: 128589 - RNA, 22 nt, synthetic construct
  source 1..22: mol_type = other RNA
ccatgaacatggtttgatccca

SEQ ID NO: 128590 - RNA, 22 nt, synthetic construct
  source 1..22: mol_type = other RNA
ccatgaagaaaacactccagaa

SEQ ID NO: 128591 - RNA, 22 nt, synthetic construct
  source 1..22: mol_type = other RNA
ccatgaagccagcattacccta

SEQ ID NO: 128592 - RNA, 22 nt, synthetic construct
  source 1..22: mol_type = other RNA
ccatgacagagttccacctcca

SEQ ID NO: 128593 - RNA, 22 nt, synthetic construct
  source 1..22: mol_type = other RNA
ccatgacatgtgttttatttag

SEQ ID NO: 128594 - RNA, 22 nt, synthetic construct
  source 1..22: mol_type = other RNA
ccatgagattacatagcaagga

SEQ ID NO: 128595 - RNA, 22 nt, synthetic construct
  source 1..22: mol_type = other RNA
ccatgatctttggaaatgaata

SEQ ID NO: 128596 - RNA, 22 nt, synthetic construct
  source 1..22: mol_type = other RNA
ccatgatgcagcccctgccaca

SEQ ID NO: 128597 - RNA, 22 nt, synthetic construct
  source 1..22: mol_type = other RNA
ccatgattcaaaatgtgatggc

SEQ ID NO: 128598 - RNA, 22 nt, synthetic construct
  source 1..22: mol_type = other RNA
ccatgcaggagaaacatggctt

SEQ ID NO: 128599 - RNA, 22 nt, synthetic construct
  source 1..22: mol_type = other RNA
ccatgcaggttcatgtgtgctt

SEQ ID NO: 128600 - RNA, 22 nt, synthetic construct
  source 1..22: mol_type = other RNA
ccatgcattcgtccctaaacac

SEQ ID NO: 128601 - RNA, 22 nt, synthetic construct
  source 1..22: mol_type = other RNA
ccatgcccatgtgcattattgt

SEQ ID NO: 128602 - RNA, 22 nt, synthetic construct
  source 1..22: mol_type = other RNA
ccatggaaactacaattactgt

SEQ ID NO: 128603 - RNA, 22 nt, synthetic construct
  source 1..22: mol_type = other RNA
ccatggaggggccagttgagag

SEQ ID NO: 128604 - RNA, 22 nt, synthetic construct
  source 1..22: mol_type = other RNA
ccatggcaggtttcaagtgaac

SEQ ID NO: 128605 - RNA, 22 nt, synthetic construct
  source 1..22: mol_type = other RNA
ccatggctcactgcggcctcaa

SEQ ID NO: 128606 - RNA, 22 nt, synthetic construct
  source 1..22: mol_type = other RNA
ccatgggacaagtgggtggatg

SEQ ID NO: 128607 - RNA, 22 nt, synthetic construct
  source 1..22: mol_type = other RNA
ccatggtatgtgccatctcctt

SEQ ID NO: 128608 - RNA, 22 nt, synthetic construct
  source 1..22: mol_type = other RNA
ccatggtcaaatcaatacttca

SEQ ID NO: 128609 - RNA, 22 nt, synthetic construct
  source 1..22: mol_type = other RNA
ccatggtgttaaatatttacta

SEQ ID NO: 128610 - RNA, 22 nt, synthetic construct
  source 1..22: mol_type = other RNA
ccatgtaacaggtttaataaat

SEQ ID NO: 128611 - RNA, 22 nt, synthetic construct
  source 1..22: mol_type = other RNA
ccatgtcatgtatatgctgttt

SEQ ID NO: 128612 - RNA, 22 nt, synthetic construct
  source 1..22: mol_type = other RNA
ccatgtcctcacctcacattca

SEQ ID NO: 128613 - RNA, 22 nt, synthetic construct
  source 1..22: mol_type = other RNA
ccatgtctaaagtattgtttca

SEQ ID NO: 128614 - RNA, 22 nt, synthetic construct
  source 1..22: mol_type = other RNA
ccatgtcttggctattgtcagt

SEQ ID NO: 128615 - RNA, 22 nt, synthetic construct
  source 1..22: mol_type = other RNA
ccatgtgcattattgtaattat

SEQ ID NO: 128616 - RNA, 22 nt, synthetic construct
  source 1..22: mol_type = other RNA
ccatgtgcttatcaataaaata

SEQ ID NO: 128617 - RNA, 22 nt, synthetic construct
  source 1..22: mol_type = other RNA
ccatgtgttggcactgaagcca

SEQ ID NO: 128618 - RNA, 22 nt, synthetic construct
  source 1..22: mol_type = other RNA
ccatgtgttttgttttgaataa

SEQ ID NO: 128619 - RNA, 22 nt, synthetic construct
  source 1..22: mol_type = other RNA
ccatgttcactgcagaattact

SEQ ID NO: 128620 - RNA, 22 nt, synthetic construct
  source 1..22: mol_type = other RNA
ccatgttcatgggaagatgctc

SEQ ID NO: 128621 - RNA, 22 nt, synthetic construct
  source 1..22: mol_type = other RNA
ccatgttgttcttttcaaaaac

SEQ ID NO: 128622 - RNA, 22 nt, synthetic construct
  source 1..22: mol_type = other RNA
ccatgttgttgaatgtggcaga

SEQ ID NO: 128623 - RNA, 22 nt, synthetic construct
  source 1..22: mol_type = other RNA
ccatgtttccataaaaagcgtt

SEQ ID NO: 128624 - RNA, 22 nt, synthetic construct
  source 1..22: mol_type = other RNA
ccatgtttctcctgcatgggga

SEQ ID NO: 128625 - RNA, 22 nt, synthetic construct
  source 1..22: mol_type = other RNA
ccatgttttaggagtcaactaa

SEQ ID NO: 128626 - RNA, 22 nt, synthetic construct
  source 1..22: mol_type = other RNA
ccatgttttatttcttgacctc

SEQ ID NO: 128627 - RNA, 22 nt, synthetic construct
  source 1..22: mol_type = other RNA
ccattaaaaccatgaaaataac

SEQ ID NO: 128628 - RNA, 22 nt, synthetic construct
  source 1..22: mol_type = other RNA
ccattaacagatgaatgaacaa

SEQ ID NO: 128629 - RNA, 22 nt, synthetic construct
  source 1..22: mol_type = other RNA
ccattaacagctcagaagctat

SEQ ID NO: 128630 - RNA, 22 nt, synthetic construct
  source 1..22: mol_type = other RNA
ccattacatcaacatataaatc

SEQ ID NO: 128631 - RNA, 22 nt, synthetic construct
  source 1..22: mol_type = other RNA
ccattaccaaaacctggtatga

SEQ ID NO: 128632 - RNA, 22 nt, synthetic construct
  source 1..22: mol_type = other RNA
ccattactcggtatgtacccaa

SEQ ID NO: 128633 - RNA, 22 nt, synthetic construct
  source 1..22: mol_type = other RNA
ccattactcgtggttatagcca

SEQ ID NO: 128634 - RNA, 22 nt, synthetic construct
  source 1..22: mol_type = other RNA
ccattactcttctactcactgt

SEQ ID NO: 128635 - RNA, 22 nt, synthetic construct
  source 1..22: mol_type = other RNA
ccattagacactaactttctat

SEQ ID NO: 128636 - RNA, 22 nt, synthetic construct
  source 1..22: mol_type = other RNA
ccattagagtaagcaactgcat

SEQ ID NO: 128637 - RNA, 22 nt, synthetic construct
  source 1..22: mol_type = other RNA
ccattagcagttctgtaccctt

SEQ ID NO: 128638 - RNA, 22 nt, synthetic construct
  source 1..22: mol_type = other RNA
ccattaggatagctattatttg

SEQ ID NO: 128639 - RNA, 22 nt, synthetic construct
  source 1..22: mol_type = other RNA
ccattataaaataggaagtcca

SEQ ID NO: 128640 - RNA, 22 nt, synthetic construct
  source 1..22: mol_type = other RNA
ccattatatgaataaaccacgc

SEQ ID NO: 128641 - RNA, 22 nt, synthetic construct
  source 1..22: mol_type = other RNA
ccattattccataaaaaccaaa

SEQ ID NO: 128642 - RNA, 22 nt, synthetic construct
  source 1..22: mol_type = other RNA
ccattcaatccttgtaactttt

SEQ ID NO: 128643 - RNA, 22 nt, synthetic construct
  source 1..22: mol_type = other RNA
ccattcaattgtcctggcagat

SEQ ID NO: 128644 - RNA, 22 nt, synthetic construct
  source 1..22: mol_type = other RNA
ccattcacacaccctttcttag

SEQ ID NO: 128645 - RNA, 22 nt, synthetic construct
  source 1..22: mol_type = other RNA
ccattcactcagcataattggt

SEQ ID NO: 128646 - RNA, 22 nt, synthetic construct
  source 1..22: mol_type = other RNA
ccattcatctctcgatggacat

SEQ ID NO: 128647 - RNA, 22 nt, synthetic construct
  source 1..22: mol_type = other RNA
ccattcatgtaatgcaaactct

SEQ ID NO: 128648 - RNA, 22 nt, synthetic construct
  source 1..22: mol_type = other RNA
ccattccacgctgtggcttggg

SEQ ID NO: 128649 - RNA, 22 nt, synthetic construct
  source 1..22: mol_type = other RNA
ccattccagccattctcttctg

SEQ ID NO: 128650 - RNA, 22 nt, synthetic construct
  source 1..22: mol_type = other RNA
ccattccaggttttatctctct

SEQ ID NO: 128651 - RNA, 22 nt, synthetic construct
  source 1..22: mol_type = other RNA
ccattccccttgccaaggcttg

SEQ ID NO: 128652 - RNA, 22 nt, synthetic construct
  source 1..22: mol_type = other RNA
ccattccctgtctgtgatgtag

SEQ ID NO: 128653 - RNA, 22 nt, synthetic construct
  source 1..22: mol_type = other RNA
ccattccttttcgagactgagt

SEQ ID NO: 128654 - RNA, 22 nt, synthetic construct
  source 1..22: mol_type = other RNA
ccattctcccagttgtcagaat

SEQ ID NO: 128655 - RNA, 22 nt, synthetic construct
  source 1..22: mol_type = other RNA
ccattctcttctggatagcatt

SEQ ID NO: 128656 - RNA, 22 nt, synthetic construct
  source 1..22: mol_type = other RNA
ccattctgctatgaaatgtggt

SEQ ID NO: 128657 - RNA, 22 nt, synthetic construct
  source 1..22: mol_type = other RNA
ccattgacaatataggagacta

SEQ ID NO: 128658 - RNA, 22 nt, synthetic construct
  source 1..22: mol_type = other RNA
ccattgagccaaagaagaaatc

SEQ ID NO: 128659 - RNA, 22 nt, synthetic construct
  source 1..22: mol_type = other RNA
ccattgcactccacgtgggtga

SEQ ID NO: 128660 - RNA, 22 nt, synthetic construct
  source 1..22: mol_type = other RNA
ccattgggtacataccgagtaa

SEQ ID NO: 128661 - RNA, 22 nt, synthetic construct
  source 1..22: mol_type = other RNA
ccattgtaaaccatatggttaa

SEQ ID NO: 128662 - RNA, 22 nt, synthetic construct
  source 1..22: mol_type = other RNA
ccattgtacacatattaaattc

SEQ ID NO: 128663 - RNA, 22 nt, synthetic construct
  source 1..22: mol_type = other RNA
ccattgtgtggacacactgaaa

SEQ ID NO: 128664 - RNA, 22 nt, synthetic construct
  source 1..22: mol_type = other RNA
ccattgttctctttgtttatcc

SEQ ID NO: 128665 - RNA, 22 nt, synthetic construct
  source 1..22: mol_type = other RNA
ccatttaccccttaaattccaa

SEQ ID NO: 128666 - RNA, 22 nt, synthetic construct
  source 1..22: mol_type = other RNA
ccatttatcagcaccaaagatt

SEQ ID NO: 128667 - RNA, 22 nt, synthetic construct
  source 1..22: mol_type = other RNA
ccatttattcctctcttggaat

SEQ ID NO: 128668 - RNA, 22 nt, synthetic construct
  source 1..22: mol_type = other RNA
ccatttattgtcaaggtcatcc

SEQ ID NO: 128669 - RNA, 22 nt, synthetic construct
  source 1..22: mol_type = other RNA
ccatttcaggttttcgaccaag

SEQ ID NO: 128670 - RNA, 22 nt, synthetic construct
  source 1..22: mol_type = other RNA
ccatttcatgccatcctggatt

SEQ ID NO: 128671 - RNA, 22 nt, synthetic construct
  source 1..22: mol_type = other RNA
ccatttccagtactttttcatc

SEQ ID NO: 128672 - RNA, 22 nt, synthetic construct
  source 1..22: mol_type = other RNA
ccatttccctgcttcatctgga

SEQ ID NO: 128673 - RNA, 22 nt, synthetic construct
  source 1..22: mol_type = other RNA
ccatttccttaagcacagactg

SEQ ID NO: 128674 - RNA, 22 nt, synthetic construct
  source 1..22: mol_type = other RNA
ccatttgaccttccttgtgtct

SEQ ID NO: 128675 - RNA, 22 nt, synthetic construct
  source 1..22: mol_type = other RNA
ccatttgattgccagttttctg

SEQ ID NO: 128676 - RNA, 22 nt, synthetic construct
  source 1..22: mol_type = other RNA
ccatttgatttcttctttggct

SEQ ID NO: 128677 - RNA, 22 nt, synthetic construct
  source 1..22: mol_type = other RNA
ccatttggcccagccatcccat

SEQ ID NO: 128678 - RNA, 22 nt, synthetic construct
  source 1..22: mol_type = other RNA
ccatttgggactgagacagtat

SEQ ID NO: 128679 - RNA, 22 nt, synthetic construct
  source 1..22: mol_type = other RNA
ccatttgtaacatgttagatta

SEQ ID NO: 128680 - RNA, 22 nt, synthetic construct
  source 1..22: mol_type = other RNA
ccatttgtggcatctttgttac

SEQ ID NO: 128681 - RNA, 22 nt, synthetic construct
  source 1..22: mol_type = other RNA
ccatttgttttgtgtttgtgac

SEQ ID NO: 128682 - RNA, 22 nt, synthetic construct
  source 1..22: mol_type = other RNA
ccattttaataacaaaaggtag

SEQ ID NO: 128683 - RNA, 22 nt, synthetic construct
  source 1..22: mol_type = other RNA
ccattttagatcaagtcctttc

SEQ ID NO: 128684 - RNA, 22 nt, synthetic construct
  source 1..22: mol_type = other RNA
ccattttattaatttggcttgg

SEQ ID NO: 128685 - RNA, 22 nt, synthetic construct
  source 1..22: mol_type = other RNA
ccattttcaatcttggaaatga

SEQ ID NO: 128686 - RNA, 22 nt, synthetic construct
  source 1..22: mol_type = other RNA
ccattttcgaattagattgttt

SEQ ID NO: 128687 - RNA, 22 nt, synthetic construct
  source 1..22: mol_type = other RNA
ccattttgccagctaactttta

SEQ ID NO: 128688 - RNA, 22 nt, synthetic construct
  source 1..22: mol_type = other RNA
ccattttggtcttaccctctag

SEQ ID NO: 128689 - RNA, 22 nt, synthetic construct
  source 1..22: mol_type = other RNA
ccatttttctcgacacacaatc

SEQ ID NO: 128690 - RNA, 22 nt, synthetic construct
  source 1..22: mol_type = other RNA
ccatttttctgaccaactattt

SEQ ID NO: 128691 - RNA, 22 nt, synthetic construct
  source 1..22: mol_type = other RNA
ccattttttcaccagcggcata

SEQ ID NO: 128692 - RNA, 22 nt, synthetic construct
  source 1..22: mol_type = other RNA
cccaaaaacaaaagagtagatt

SEQ ID NO: 128693 - RNA, 22 nt, synthetic construct
  source 1..22: mol_type = other RNA
cccaaaacttaggaggctatta

SEQ ID NO: 128694 - RNA, 22 nt, synthetic construct
  source 1..22: mol_type = other RNA
cccaaaattaccccattcactc

SEQ ID NO: 128695 - RNA, 22 nt, synthetic construct
  source 1..22: mol_type = other RNA
cccaaaccatcaagtgtgatcc

SEQ ID NO: 128696 - RNA, 22 nt, synthetic construct
  source 1..22: mol_type = other RNA
cccaaactggagtgcagtggtg

SEQ ID NO: 128697 - RNA, 22 nt, synthetic construct
  source 1..22: mol_type = other RNA
cccaaagaaggaaaaaacacct

SEQ ID NO: 128698 - RNA, 22 nt, synthetic construct
  source 1..22: mol_type = other RNA
cccaaagacatcctgatttagg

SEQ ID NO: 128699 - RNA, 22 nt, synthetic construct
  source 1..22: mol_type = other RNA
cccaaagactttgttttgtttt

SEQ ID NO: 128700 - RNA, 22 nt, synthetic construct
  source 1..22: mol_type = other RNA
cccaaagagctgggactacagg

SEQ ID NO: 128701 - RNA, 22 nt, synthetic construct
  source 1..22: mol_type = other RNA
cccaaagatagactcttcagag

SEQ ID NO: 128702 - RNA, 22 nt, synthetic construct
  source 1..22: mol_type = other RNA
cccaaagatattagctacaaaa

SEQ ID NO: 128703 - RNA, 22 nt, synthetic construct
  source 1..22: mol_type = other RNA
cccaaagcaaaagcaaaattct

SEQ ID NO: 128704 - RNA, 22 nt, synthetic construct
  source 1..22: mol_type = other RNA
cccaaaggactgggatcctaag

SEQ ID NO: 128705 - RNA, 22 nt, synthetic construct
  source 1..22: mol_type = other RNA
cccaaagtgagcagaaggagga

SEQ ID NO: 128706 - RNA, 22 nt, synthetic construct
  source 1..22: mol_type = other RNA
cccaaataacatgcatatgttt

SEQ ID NO: 128707 - RNA, 22 nt, synthetic construct
  source 1..22: mol_type = other RNA
cccaaatacctctgaatgtgac

SEQ ID NO: 128708 - RNA, 22 nt, synthetic construct
  source 1..22: mol_type = other RNA
cccaaatccaggatggcatgaa

SEQ ID NO: 128709 - RNA, 22 nt, synthetic construct
  source 1..22: mol_type = other RNA
cccaaatgcaccaacacctgca

SEQ ID NO: 128710 - RNA, 22 nt, synthetic construct
  source 1..22: mol_type = other RNA
cccaaatgggagcatgcacaca

SEQ ID NO: 128711 - RNA, 22 nt, synthetic construct
  source 1..22: mol_type = other RNA
cccaaatgtcttaagaaggaaa

SEQ ID NO: 128712 - RNA, 22 nt, synthetic construct
  source 1..22: mol_type = other RNA
cccaaattaaaggatgtcaact

SEQ ID NO: 128713 - RNA, 22 nt, synthetic construct
  source 1..22: mol_type = other RNA
cccaaattggcatttaaaagaa

SEQ ID NO: 128714 - RNA, 22 nt, synthetic construct
  source 1..22: mol_type = other RNA
cccaacaaacaattagcacctt

SEQ ID NO: 128715 - RNA, 22 nt, synthetic construct
  source 1..22: mol_type = other RNA
cccaacaccttgggaggctgag

SEQ ID NO: 128716 - RNA, 22 nt, synthetic construct
  source 1..22: mol_type = other RNA
cccaacaggctgagtgcggtgg

SEQ ID NO: 128717 - RNA, 22 nt, synthetic construct
  source 1..22: mol_type = other RNA
cccaacagggttttgttttgtt

SEQ ID NO: 128718 - RNA, 22 nt, synthetic construct
  source 1..22: mol_type = other RNA
cccaacatgagagaaaattgtt

SEQ ID NO: 128719 - RNA, 22 nt, synthetic construct
  source 1..22: mol_type = other RNA
cccaacatgctcttaagtattt

SEQ ID NO: 128720 - RNA, 22 nt, synthetic construct
  source 1..22: mol_type = other RNA
cccaaccctacctagggtgtaa

SEQ ID NO: 128721 - RNA, 22 nt, synthetic construct
  source 1..22: mol_type = other RNA
cccaacctgattagaggctgca

SEQ ID NO: 128722 - RNA, 22 nt, synthetic construct
  source 1..22: mol_type = other RNA
cccaactctttctttgattttt

SEQ ID NO: 128723 - RNA, 22 nt, synthetic construct
  source 1..22: mol_type = other RNA
cccaactgcaaaactttcttca

SEQ ID NO: 128724 - RNA, 22 nt, synthetic construct
  source 1..22: mol_type = other RNA
cccaacttcacaccatttagat

SEQ ID NO: 128725 - RNA, 22 nt, synthetic construct
  source 1..22: mol_type = other RNA
cccaactttttctttttagtaa

SEQ ID NO: 128726 - RNA, 22 nt, synthetic construct
  source 1..22: mol_type = other RNA
cccaagaaagcaggtcatgact

SEQ ID NO: 128727 - RNA, 22 nt, synthetic construct
  source 1..22: mol_type = other RNA
cccaagaatttcatgcctttca

SEQ ID NO: 128728 - RNA, 22 nt, synthetic construct
  source 1..22: mol_type = other RNA
cccaagatcataagcttttatt

SEQ ID NO: 128729 - RNA, 22 nt, synthetic construct
  source 1..22: mol_type = other RNA
cccaagcaagtgtggtggtctc

SEQ ID NO: 128730 - RNA, 22 nt, synthetic construct
  source 1..22: mol_type = other RNA
cccaagcacactttccttggag

SEQ ID NO: 128731 - RNA, 22 nt, synthetic construct
  source 1..22: mol_type = other RNA
cccaagccaaattaataaaatg

SEQ ID NO: 128732 - RNA, 22 nt, synthetic construct
  source 1..22: mol_type = other RNA
cccaagccacagcgtggaatgg

SEQ ID NO: 128733 - RNA, 22 nt, synthetic construct
  source 1..22: mol_type = other RNA
cccaagctaccatttattcctc

SEQ ID NO: 128734 - RNA, 22 nt, synthetic construct
  source 1..22: mol_type = other RNA
cccaagcttaggtcagattcct

SEQ ID NO: 128735 - RNA, 22 nt, synthetic construct
  source 1..22: mol_type = other RNA
cccaaggaaggcagggtaggaa

SEQ ID NO: 128736 - RNA, 22 nt, synthetic construct
  source 1..22: mol_type = other RNA
cccaagggttttggtatgttgt

SEQ ID NO: 128737 - RNA, 22 nt, synthetic construct
  source 1..22: mol_type = other RNA
cccaaggttgcctgttcactct

SEQ ID NO: 128738 - RNA, 22 nt, synthetic construct
  source 1..22: mol_type = other RNA
cccaagtaaacaactgactcta

SEQ ID NO: 128739 - RNA, 22 nt, synthetic construct
  source 1..22: mol_type = other RNA
cccaagtaaacctcaagtcttt

SEQ ID NO: 128740 - RNA, 22 nt, synthetic construct
  source 1..22: mol_type = other RNA
cccaagtagctaggaccatagg

SEQ ID NO: 128741 - RNA, 22 nt, synthetic construct
  source 1..22: mol_type = other RNA
cccaagtagctgggatcacagg

SEQ ID NO: 128742 - RNA, 22 nt, synthetic construct
  source 1..22: mol_type = other RNA
cccaagtgcccattaacagatg

SEQ ID NO: 128743 - RNA, 22 nt, synthetic construct
  source 1..22: mol_type = other RNA
cccaagtgctgtgattgcaggt

SEQ ID NO: 128744 - RNA, 22 nt, synthetic construct
  source 1..22: mol_type = other RNA
cccaagtggagcctgctctgca

SEQ ID NO: 128745 - RNA, 22 nt, synthetic construct
  source 1..22: mol_type = other RNA
cccaatcaaatccagtcttcag

SEQ ID NO: 128746 - RNA, 22 nt, synthetic construct
  source 1..22: mol_type = other RNA
cccaatcatgttctttatagca

SEQ ID NO: 128747 - RNA, 22 nt, synthetic construct
  source 1..22: mol_type = other RNA
cccaatcctttgtgcaggtctg

SEQ ID NO: 128748 - RNA, 22 nt, synthetic construct
  source 1..22: mol_type = other RNA
cccaatctacaggtcggaagga

SEQ ID NO: 128749 - RNA, 22 nt, synthetic construct
  source 1..22: mol_type = other RNA
cccaatctctggtattctgaac

SEQ ID NO: 128750 - RNA, 22 nt, synthetic construct
  source 1..22: mol_type = other RNA
cccaatgcctgcgattgcaggc

SEQ ID NO: 128751 - RNA, 22 nt, synthetic construct
  source 1..22: mol_type = other RNA
cccaatgcttgaagagcgcttc

SEQ ID NO: 128752 - RNA, 22 nt, synthetic construct
  source 1..22: mol_type = other RNA
cccaattaaactatagacccaa

SEQ ID NO: 128753 - RNA, 22 nt, synthetic construct
  source 1..22: mol_type = other RNA
cccaattacttccagtgtttta

SEQ ID NO: 128754 - RNA, 22 nt, synthetic construct
  source 1..22: mol_type = other RNA
cccacaaaagaaaattttctga

SEQ ID NO: 128755 - RNA, 22 nt, synthetic construct
  source 1..22: mol_type = other RNA
cccacaaaatatgaagcattaa

SEQ ID NO: 128756 - RNA, 22 nt, synthetic construct
  source 1..22: mol_type = other RNA
cccacaagaaaaacctaaacct

SEQ ID NO: 128757 - RNA, 22 nt, synthetic construct
  source 1..22: mol_type = other RNA
cccacaagtagcagggactaca

SEQ ID NO: 128758 - RNA, 22 nt, synthetic construct
  source 1..22: mol_type = other RNA
cccacacctgcaatcacagcac

SEQ ID NO: 128759 - RNA, 22 nt, synthetic construct
  source 1..22: mol_type = other RNA
cccacagataatttcttcagaa

SEQ ID NO: 128760 - RNA, 22 nt, synthetic construct
  source 1..22: mol_type = other RNA
cccacataggatagttaaacat

SEQ ID NO: 128761 - RNA, 22 nt, synthetic construct
  source 1..22: mol_type = other RNA
cccacatgactggccatccttc

SEQ ID NO: 128762 - RNA, 22 nt, synthetic construct
  source 1..22: mol_type = other RNA
cccaccagcataagacccctca

SEQ ID NO: 128763 - RNA, 22 nt, synthetic construct
  source 1..22: mol_type = other RNA
cccaccaggaggcggagcttgc

SEQ ID NO: 128764 - RNA, 22 nt, synthetic construct
  source 1..22: mol_type = other RNA
cccaccatctctctgcctcaaa

SEQ ID NO: 128765 - RNA, 22 nt, synthetic construct
  source 1..22: mol_type = other RNA
cccaccatgatgcagcccctgc

SEQ ID NO: 128766 - RNA, 22 nt, synthetic construct
  source 1..22: mol_type = other RNA
cccacccctgctctgcacgtac

SEQ ID NO: 128767 - RNA, 22 nt, synthetic construct
  source 1..22: mol_type = other RNA
cccaccctgctccagtatgacc

SEQ ID NO: 128768 - RNA, 22 nt, synthetic construct
  source 1..22: mol_type = other RNA
cccaccgccttcctaccctgcc

SEQ ID NO: 128769 - RNA, 22 nt, synthetic construct
  source 1..22: mol_type = other RNA
cccacctcagccccacaagtag

SEQ ID NO: 128770 - RNA, 22 nt, synthetic construct
  source 1..22: mol_type = other RNA
cccacctgacaagtagtacaaa

SEQ ID NO: 128771 - RNA, 22 nt, synthetic construct
  source 1..22: mol_type = other RNA
cccacctgcgagcggcgggctt

SEQ ID NO: 128772 - RNA, 22 nt, synthetic construct
  source 1..22: mol_type = other RNA
cccacctttcctgcccctccac

SEQ ID NO: 128773 - RNA, 22 nt, synthetic construct
  source 1..22: mol_type = other RNA
cccacgcccggccgatgcctgt

SEQ ID NO: 128774 - RNA, 22 nt, synthetic construct
  source 1..22: mol_type = other RNA
cccacgtggagtgcaatggggc

SEQ ID NO: 128775 - RNA, 22 nt, synthetic construct
  source 1..22: mol_type = other RNA
cccactagtgaagtcccatctt

SEQ ID NO: 128776 - RNA, 22 nt, synthetic construct
  source 1..22: mol_type = other RNA
cccactagtggaagaatcaggt

SEQ ID NO: 128777 - RNA, 22 nt, synthetic construct
  source 1..22: mol_type = other RNA
cccactatattgcccaggctgg

SEQ ID NO: 128778 - RNA, 22 nt, synthetic construct
  source 1..22: mol_type = other RNA
cccactattgaaagcccttgag

SEQ ID NO: 128779 - RNA, 22 nt, synthetic construct
  source 1..22: mol_type = other RNA
cccactccacacacgaagtagt

SEQ ID NO: 128780 - RNA, 22 nt, synthetic construct
  source 1..22: mol_type = other RNA
cccactctccccaagtaaacct

SEQ ID NO: 128781 - RNA, 22 nt, synthetic construct
  source 1..22: mol_type = other RNA
cccactcttatatcctaaacac

SEQ ID NO: 128782 - RNA, 22 nt, synthetic construct
  source 1..22: mol_type = other RNA
cccactgacagtggacaaaggt

SEQ ID NO: 128783 - RNA, 22 nt, synthetic construct
  source 1..22: mol_type = other RNA
cccactgagcatttatataagt

SEQ ID NO: 128784 - RNA, 22 nt, synthetic construct
  source 1..22: mol_type = other RNA
cccactgctatgactaatttga

SEQ ID NO: 128785 - RNA, 22 nt, synthetic construct
  source 1..22: mol_type = other RNA
cccactggtttcagtccctcct

SEQ ID NO: 128786 - RNA, 22 nt, synthetic construct
  source 1..22: mol_type = other RNA
cccacttacatcagcagtgacc

SEQ ID NO: 128787 - RNA, 22 nt, synthetic construct
  source 1..22: mol_type = other RNA
cccacttcgaaagttcagatag

SEQ ID NO: 128788 - RNA, 22 nt, synthetic construct
  source 1..22: mol_type = other RNA
cccacttgatccaggtgtatga

SEQ ID NO: 128789 - RNA, 22 nt, synthetic construct
  source 1..22: mol_type = other RNA
cccacttgtcccatggtcaaat

SEQ ID NO: 128790 - RNA, 22 nt, synthetic construct
  source 1..22: mol_type = other RNA
cccagaaagagagaggggggaa

SEQ ID NO: 128791 - RNA, 22 nt, synthetic construct
  source 1..22: mol_type = other RNA
cccagaaataaatcctcacatg

SEQ ID NO: 128792 - RNA, 22 nt, synthetic construct
  source 1..22: mol_type = other RNA
cccagaactcgaagccttcccc

SEQ ID NO: 128793 - RNA, 22 nt, synthetic construct
  source 1..22: mol_type = other RNA
cccagaaggttaactaatagcc

SEQ ID NO: 128794 - RNA, 22 nt, synthetic construct
  source 1..22: mol_type = other RNA
cccagaataggcaaattcatag

SEQ ID NO: 128795 - RNA, 22 nt, synthetic construct
  source 1..22: mol_type = other RNA
cccagacagatatatgcattcc

SEQ ID NO: 128796 - RNA, 22 nt, synthetic construct
  source 1..22: mol_type = other RNA
cccagacagggaatgcccctgt

SEQ ID NO: 128797 - RNA, 22 nt, synthetic construct
  source 1..22: mol_type = other RNA
cccagaccaagtttaaccaatt

SEQ ID NO: 128798 - RNA, 22 nt, synthetic construct
  source 1..22: mol_type = other RNA
cccagacctgcacaaaggattg

SEQ ID NO: 128799 - RNA, 22 nt, synthetic construct
  source 1..22: mol_type = other RNA
cccagactggagttcactggca

SEQ ID NO: 128800 - RNA, 22 nt, synthetic construct
  source 1..22: mol_type = other RNA
cccagagaggctaggtgacctg

SEQ ID NO: 128801 - RNA, 22 nt, synthetic construct
  source 1..22: mol_type = other RNA
cccagagatcccaccattgcac

SEQ ID NO: 128802 - RNA, 22 nt, synthetic construct
  source 1..22: mol_type = other RNA
cccagagattgtcgttgagtac

SEQ ID NO: 128803 - RNA, 22 nt, synthetic construct
  source 1..22: mol_type = other RNA
cccagagcctaatgtgtaagaa

SEQ ID NO: 128804 - RNA, 22 nt, synthetic construct
  source 1..22: mol_type = other RNA
cccagagcgggtttcctcggtc

SEQ ID NO: 128805 - RNA, 22 nt, synthetic construct
  source 1..22: mol_type = other RNA
cccagaggtactcaacgacaat

SEQ ID NO: 128806 - RNA, 22 nt, synthetic construct
  source 1..22: mol_type = other RNA
cccagataacagtggttaggaa

SEQ ID NO: 128807 - RNA, 22 nt, synthetic construct
  source 1..22: mol_type = other RNA
cccagatacgttaaaggaaaag

SEQ ID NO: 128808 - RNA, 22 nt, synthetic construct
  source 1..22: mol_type = other RNA
cccagatctaacaaacgcattg

SEQ ID NO: 128809 - RNA, 22 nt, synthetic construct
  source 1..22: mol_type = other RNA
cccagatggggattgagggtta

SEQ ID NO: 128810 - RNA, 22 nt, synthetic construct
  source 1..22: mol_type = other RNA
cccagattccttttttatgtgc

SEQ ID NO: 128811 - RNA, 22 nt, synthetic construct
  source 1..22: mol_type = other RNA
cccagcactctgaatcacctca

SEQ ID NO: 128812 - RNA, 22 nt, synthetic construct
  source 1..22: mol_type = other RNA
cccagcacttccattttgctta

SEQ ID NO: 128813 - RNA, 22 nt, synthetic construct
  source 1..22: mol_type = other RNA
cccagcagaaggtgagggactg

SEQ ID NO: 128814 - RNA, 22 nt, synthetic construct
  source 1..22: mol_type = other RNA
cccagcagccccgacgcctttc

SEQ ID NO: 128815 - RNA, 22 nt, synthetic construct
  source 1..22: mol_type = other RNA
cccagcatccactaggggacta

SEQ ID NO: 128816 - RNA, 22 nt, synthetic construct
  source 1..22: mol_type = other RNA
cccagcatgaagccctctaagt

SEQ ID NO: 128817 - RNA, 22 nt, synthetic construct
  source 1..22: mol_type = other RNA
cccagccaaacagtttttacat

SEQ ID NO: 128818 - RNA, 22 nt, synthetic construct
  source 1..22: mol_type = other RNA
cccagcccctggtgatctatga

SEQ ID NO: 128819 - RNA, 22 nt, synthetic construct
  source 1..22: mol_type = other RNA
cccagcccgtgtgtttagaata

SEQ ID NO: 128820 - RNA, 22 nt, synthetic construct
  source 1..22: mol_type = other RNA
cccagcctcaaacaatcctccc

SEQ ID NO: 128821 - RNA, 22 nt, synthetic construct
  source 1..22: mol_type = other RNA
cccagcctcaacagcacttttg

SEQ ID NO: 128822 - RNA, 22 nt, synthetic construct
  source 1..22: mol_type = other RNA
cccagcctcagcctcccaaggt

SEQ ID NO: 128823 - RNA, 22 nt, synthetic construct
  source 1..22: mol_type = other RNA
cccagctaaaatgttcagatag

SEQ ID NO: 128824 - RNA, 22 nt, synthetic construct
  source 1..22: mol_type = other RNA
cccagctacataacttcccaga

SEQ ID NO: 128825 - RNA, 22 nt, synthetic construct
  source 1..22: mol_type = other RNA
cccagctcgaccaggggaagga

SEQ ID NO: 128826 - RNA, 22 nt, synthetic construct
  source 1..22: mol_type = other RNA
cccagctctttgggaggctgag

SEQ ID NO: 128827 - RNA, 22 nt, synthetic construct
  source 1..22: mol_type = other RNA
cccagctcttttgtgtcttttt

SEQ ID NO: 128828 - RNA, 22 nt, synthetic construct
  source 1..22: mol_type = other RNA
cccagctgtccaacaagggttg

SEQ ID NO: 128829 - RNA, 22 nt, synthetic construct
  source 1..22: mol_type = other RNA
cccagcttccgggacttggaag

SEQ ID NO: 128830 - RNA, 22 nt, synthetic construct
  source 1..22: mol_type = other RNA
cccaggaacagattcacgcaca

SEQ ID NO: 128831 - RNA, 22 nt, synthetic construct
  source 1..22: mol_type = other RNA
cccaggagctagaacagaataa

SEQ ID NO: 128832 - RNA, 22 nt, synthetic construct
  source 1..22: mol_type = other RNA
cccaggaggcaaaggttgagac

SEQ ID NO: 128833 - RNA, 22 nt, synthetic construct
  source 1..22: mol_type = other RNA
cccaggaggttgaagctctagt

SEQ ID NO: 128834 - RNA, 22 nt, synthetic construct
  source 1..22: mol_type = other RNA
cccaggagttgcatcacttgag

SEQ ID NO: 128835 - RNA, 22 nt, synthetic construct
  source 1..22: mol_type = other RNA
cccaggcatgatggctcaacgc

SEQ ID NO: 128836 - RNA, 22 nt, synthetic construct
  source 1..22: mol_type = other RNA
cccaggcggaatgcagtggcgt

SEQ ID NO: 128837 - RNA, 22 nt, synthetic construct
  source 1..22: mol_type = other RNA
cccaggcggcagagggagcagc

SEQ ID NO: 128838 - RNA, 22 nt, synthetic construct
  source 1..22: mol_type = other RNA
cccaggctgacttagagggctt

SEQ ID NO: 128839 - RNA, 22 nt, synthetic construct
  source 1..22: mol_type = other RNA
cccaggctggtcttgtactccc

SEQ ID NO: 128840 - RNA, 22 nt, synthetic construct
  source 1..22: mol_type = other RNA
cccagggaaaccttactgtaat

SEQ ID NO: 128841 - RNA, 22 nt, synthetic construct
  source 1..22: mol_type = other RNA
cccagggataaatcccacttga

SEQ ID NO: 128842 - RNA, 22 nt, synthetic construct
  source 1..22: mol_type = other RNA
cccagggatattttcgtgtact

SEQ ID NO: 128843 - RNA, 22 nt, synthetic construct
  source 1..22: mol_type = other RNA
cccaggggacatagatgaaact

SEQ ID NO: 128844 - RNA, 22 nt, synthetic construct
  source 1..22: mol_type = other RNA
cccagggggtcgagactgtaat

SEQ ID NO: 128845 - RNA, 22 nt, synthetic construct
  source 1..22: mol_type = other RNA
cccagggtgtagccacaagcca

SEQ ID NO: 128846 - RNA, 22 nt, synthetic construct
  source 1..22: mol_type = other RNA
cccaggtattttgttctctttg

SEQ ID NO: 128847 - RNA, 22 nt, synthetic construct
  source 1..22: mol_type = other RNA
cccaggtcagtagtacagtgag

SEQ ID NO: 128848 - RNA, 22 nt, synthetic construct
  source 1..22: mol_type = other RNA
cccaggtggttctgcctaatct

SEQ ID NO: 128849 - RNA, 22 nt, synthetic construct
  source 1..22: mol_type = other RNA
cccaggtgtgagattgatagat

SEQ ID NO: 128850 - RNA, 22 nt, synthetic construct
  source 1..22: mol_type = other RNA
cccagtagaaatcttccagaag

SEQ ID NO: 128851 - RNA, 22 nt, synthetic construct
  source 1..22: mol_type = other RNA
cccagtatacacgtatttatat

SEQ ID NO: 128852 - RNA, 22 nt, synthetic construct
  source 1..22: mol_type = other RNA
cccagtcctttgggaggtcaag

SEQ ID NO: 128853 - RNA, 22 nt, synthetic construct
  source 1..22: mol_type = other RNA
cccagtgcccacctgacaagta

SEQ ID NO: 128854 - RNA, 22 nt, synthetic construct
  source 1..22: mol_type = other RNA
cccagtggctagtgtgttgact

SEQ ID NO: 128855 - RNA, 22 nt, synthetic construct
  source 1..22: mol_type = other RNA
cccagtggttgtggaattaact

SEQ ID NO: 128856 - RNA, 22 nt, synthetic construct
  source 1..22: mol_type = other RNA
cccagtgtctgctacaggggca

SEQ ID NO: 128857 - RNA, 22 nt, synthetic construct
  source 1..22: mol_type = other RNA
cccagtgtgtttgtttgctaga

SEQ ID NO: 128858 - RNA, 22 nt, synthetic construct
  source 1..22: mol_type = other RNA
cccagttatctctgccctcatt

SEQ ID NO: 128859 - RNA, 22 nt, synthetic construct
  source 1..22: mol_type = other RNA
cccagttcaaggtgttagcagg

SEQ ID NO: 128860 - RNA, 22 nt, synthetic construct
  source 1..22: mol_type = other RNA
cccagttcaccagtttctaatt

SEQ ID NO: 128861 - RNA, 22 nt, synthetic construct
  source 1..22: mol_type = other RNA
cccagttctgcgcaattgcagc

SEQ ID NO: 128862 - RNA, 22 nt, synthetic construct
  source 1..22: mol_type = other RNA
cccagttgtcagaattagaaag

SEQ ID NO: 128863 - RNA, 22 nt, synthetic construct
  source 1..22: mol_type = other RNA
cccagttttgttgaatcttaac

SEQ ID NO: 128864 - RNA, 22 nt, synthetic construct
  source 1..22: mol_type = other RNA
cccataaactgaacatttatac

SEQ ID NO: 128865 - RNA, 22 nt, synthetic construct
  source 1..22: mol_type = other RNA
cccataccacctgtcagaaaca

SEQ ID NO: 128866 - RNA, 22 nt, synthetic construct
  source 1..22: mol_type = other RNA
cccatactcagccccctcgaag

SEQ ID NO: 128867 - RNA, 22 nt, synthetic construct
  source 1..22: mol_type = other RNA
cccatataaggggaatcatgca

SEQ ID NO: 128868 - RNA, 22 nt, synthetic construct
  source 1..22: mol_type = other RNA
cccatatccttttatgtgcagt

SEQ ID NO: 128869 - RNA, 22 nt, synthetic construct
  source 1..22: mol_type = other RNA
cccatatctacatgtacgccaa

SEQ ID NO: 128870 - RNA, 22 nt, synthetic construct
  source 1..22: mol_type = other RNA
cccatatctttgcttataacaa

SEQ ID NO: 128871 - RNA, 22 nt, synthetic construct
  source 1..22: mol_type = other RNA
cccatatggaggcaatgttgat

SEQ ID NO: 128872 - RNA, 22 nt, synthetic construct
  source 1..22: mol_type = other RNA
cccatcacactggtcactggcc

SEQ ID NO: 128873 - RNA, 22 nt, synthetic construct
  source 1..22: mol_type = other RNA
cccatcactagaatgtgacttc

SEQ ID NO: 128874 - RNA, 22 nt, synthetic construct
  source 1..22: mol_type = other RNA
cccatccacccacttgtcccat

SEQ ID NO: 128875 - RNA, 22 nt, synthetic construct
  source 1..22: mol_type = other RNA
cccatcccctttacccctgaga

SEQ ID NO: 128876 - RNA, 22 nt, synthetic construct
  source 1..22: mol_type = other RNA
cccatccgggagggaggtaggg

SEQ ID NO: 128877 - RNA, 22 nt, synthetic construct
  source 1..22: mol_type = other RNA
cccatcctatctaagcctactg

SEQ ID NO: 128878 - RNA, 22 nt, synthetic construct
  source 1..22: mol_type = other RNA
cccatcctctatttttgtctgg

SEQ ID NO: 128879 - RNA, 22 nt, synthetic construct
  source 1..22: mol_type = other RNA
cccatctcactcacctagctgt

SEQ ID NO: 128880 - RNA, 22 nt, synthetic construct
  source 1..22: mol_type = other RNA
cccatctctaccaaaatataaa

SEQ ID NO: 128881 - RNA, 22 nt, synthetic construct
  source 1..22: mol_type = other RNA
cccatctctagttttccagtat

SEQ ID NO: 128882 - RNA, 22 nt, synthetic construct
  source 1..22: mol_type = other RNA
cccatctgggatacttctaact

SEQ ID NO: 128883 - RNA, 22 nt, synthetic construct
  source 1..22: mol_type = other RNA
cccatcttccatacgaaagcct

SEQ ID NO: 128884 - RNA, 22 nt, synthetic construct
  source 1..22: mol_type = other RNA
cccatgaaaattgaattatagg

SEQ ID NO: 128885 - RNA, 22 nt, synthetic construct
  source 1..22: mol_type = other RNA
cccatgaacatggtttgatccc

SEQ ID NO: 128886 - RNA, 22 nt, synthetic construct
  source 1..22: mol_type = other RNA
cccatgaagccagcattaccct

SEQ ID NO: 128887 - RNA, 22 nt, synthetic construct
  source 1..22: mol_type = other RNA
cccatgacatgtgttttattta

SEQ ID NO: 128888 - RNA, 22 nt, synthetic construct
  source 1..22: mol_type = other RNA
cccatgatctttggaaatgaat

SEQ ID NO: 128889 - RNA, 22 nt, synthetic construct
  source 1..22: mol_type = other RNA
cccatgattcaaaatgtgatgg

SEQ ID NO: 128890 - RNA, 22 nt, synthetic construct
  source 1..22: mol_type = other RNA
cccatgcaggagaaacatggct

SEQ ID NO: 128891 - RNA, 22 nt, synthetic construct
  source 1..22: mol_type = other RNA
cccatgcattcgtccctaaaca

SEQ ID NO: 128892 - RNA, 22 nt, synthetic construct
  source 1..22: mol_type = other RNA
cccatgcccatgtgcattattg

SEQ ID NO: 128893 - RNA, 22 nt, synthetic construct
  source 1..22: mol_type = other RNA
cccatggtcaaatcaatacttc

SEQ ID NO: 128894 - RNA, 22 nt, synthetic construct
  source 1..22: mol_type = other RNA
cccatgtctaaagtattgtttc

SEQ ID NO: 128895 - RNA, 22 nt, synthetic construct
  source 1..22: mol_type = other RNA
cccatgtgcattattgtaatta

SEQ ID NO: 128896 - RNA, 22 nt, synthetic construct
  source 1..22: mol_type = other RNA
cccatgtgttggcactgaagcc

SEQ ID NO: 128897 - RNA, 22 nt, synthetic construct
  source 1..22: mol_type = other RNA
cccatgttcactgcagaattac

SEQ ID NO: 128898 - RNA, 22 nt, synthetic construct
  source 1..22: mol_type = other RNA
cccattaaaaccatgaaaataa

SEQ ID NO: 128899 - RNA, 22 nt, synthetic construct
  source 1..22: mol_type = other RNA
cccattaacagatgaatgaaca

SEQ ID NO: 128900 - RNA, 22 nt, synthetic construct
  source 1..22: mol_type = other RNA
cccattaccaaaacctggtatg

SEQ ID NO: 128901 - RNA, 22 nt, synthetic construct
  source 1..22: mol_type = other RNA
cccattactcggtatgtaccca

SEQ ID NO: 128902 - RNA, 22 nt, synthetic construct
  source 1..22: mol_type = other RNA
cccattagacactaactttcta

SEQ ID NO: 128903 - RNA, 22 nt, synthetic construct
  source 1..22: mol_type = other RNA
cccattagagtaagcaactgca

SEQ ID NO: 128904 - RNA, 22 nt, synthetic construct
  source 1..22: mol_type = other RNA
cccattaggatagctattattt

SEQ ID NO: 128905 - RNA, 22 nt, synthetic construct
  source 1..22: mol_type = other RNA
cccattataaaataggaagtcc

SEQ ID NO: 128906 - RNA, 22 nt, synthetic construct
  source 1..22: mol_type = other RNA
cccattcaattgtcctggcaga

SEQ ID NO: 128907 - RNA, 22 nt, synthetic construct
  source 1..22: mol_type = other RNA
cccattcactcagcataattgg

SEQ ID NO: 128908 - RNA, 22 nt, synthetic construct
  source 1..22: mol_type = other RNA
cccattccaggttttatctctc

SEQ ID NO: 128909 - RNA, 22 nt, synthetic construct
  source 1..22: mol_type = other RNA
cccattccctgtctgtgatgta

SEQ ID NO: 128910 - RNA, 22 nt, synthetic construct
  source 1..22: mol_type = other RNA
cccattgacaatataggagact

SEQ ID NO: 128911 - RNA, 22 nt, synthetic construct
  source 1..22: mol_type = other RNA
cccattgcactccacgtgggtg

SEQ ID NO: 128912 - RNA, 22 nt, synthetic construct
  source 1..22: mol_type = other RNA
cccattgtacacatattaaatt

SEQ ID NO: 128913 - RNA, 22 nt, synthetic construct
  source 1..22: mol_type = other RNA
cccatttcatgccatcctggat

SEQ ID NO: 128914 - RNA, 22 nt, synthetic construct
  source 1..22: mol_type = other RNA
cccatttcttctaggttatcca

SEQ ID NO: 128915 - RNA, 22 nt, synthetic construct
  source 1..22: mol_type = other RNA
cccatttgatttcttctttggc

SEQ ID NO: 128916 - RNA, 22 nt, synthetic construct
  source 1..22: mol_type = other RNA
cccatttgggactgagacagta

SEQ ID NO: 128917 - RNA, 22 nt, synthetic construct
  source 1..22: mol_type = other RNA
cccatttgtaacatgttagatt

SEQ ID NO: 128918 - RNA, 22 nt, synthetic construct
  source 1..22: mol_type = other RNA
cccattttcgaattagattgtt

SEQ ID NO: 128919 - RNA, 22 nt, synthetic construct
  source 1..22: mol_type = other RNA
cccatttttctcgacacacaat

SEQ ID NO: 128920 - RNA, 22 nt, synthetic construct
  source 1..22: mol_type = other RNA
ccccaaaaacaaaagagtagat

SEQ ID NO: 128921 - RNA, 22 nt, synthetic construct
  source 1..22: mol_type = other RNA
ccccaaaacttaggaggctatt

SEQ ID NO: 128922 - RNA, 22 nt, synthetic construct
  source 1..22: mol_type = other RNA
ccccaaaattaccccattcact

SEQ ID NO: 128923 - RNA, 22 nt, synthetic construct
  source 1..22: mol_type = other RNA
ccccaaaccatcaagtgtgatc

SEQ ID NO: 128924 - RNA, 22 nt, synthetic construct
  source 1..22: mol_type = other RNA
ccccaaagaaggaaaaaacacc

SEQ ID NO: 128925 - RNA, 22 nt, synthetic construct
  source 1..22: mol_type = other RNA
ccccaaagatattagctacaaa

SEQ ID NO: 128926 - RNA, 22 nt, synthetic construct
  source 1..22: mol_type = other RNA
ccccaaataacatgcatatgtt

SEQ ID NO: 128927 - RNA, 22 nt, synthetic construct
  source 1..22: mol_type = other RNA
ccccaaatacctctgaatgtga

SEQ ID NO: 128928 - RNA, 22 nt, synthetic construct
  source 1..22: mol_type = other RNA
ccccaaccctacctagggtgta

SEQ ID NO: 128929 - RNA, 22 nt, synthetic construct
  source 1..22: mol_type = other RNA
ccccaactgcaaaactttcttc

SEQ ID NO: 128930 - RNA, 22 nt, synthetic construct
  source 1..22: mol_type = other RNA
ccccaagaaagcaggtcatgac

SEQ ID NO: 128931 - RNA, 22 nt, synthetic construct
  source 1..22: mol_type = other RNA
ccccaagccaaattaataaaat

SEQ ID NO: 128932 - RNA, 22 nt, synthetic construct
  source 1..22: mol_type = other RNA
ccccaagtaaacctcaagtctt

SEQ ID NO: 128933 - RNA, 22 nt, synthetic construct
  source 1..22: mol_type = other RNA
ccccaagtgctgtgattgcagg

SEQ ID NO: 128934 - RNA, 22 nt, synthetic construct
  source 1..22: mol_type = other RNA
ccccaattaaactatagaccca

SEQ ID NO: 128935 - RNA, 22 nt, synthetic construct
  source 1..22: mol_type = other RNA
ccccacaagtagcagggactac

SEQ ID NO: 128936 - RNA, 22 nt, synthetic construct
  source 1..22: mol_type = other RNA
ccccacataggatagttaaaca

SEQ ID NO: 128937 - RNA, 22 nt, synthetic construct
  source 1..22: mol_type = other RNA
ccccacatgactggccatcctt

SEQ ID NO: 128938 - RNA, 22 nt, synthetic construct
  source 1..22: mol_type = other RNA
ccccacccctgctctgcacgta

SEQ ID NO: 128939 - RNA, 22 nt, synthetic construct
  source 1..22: mol_type = other RNA
ccccaccgccttcctaccctgc

SEQ ID NO: 128940 - RNA, 22 nt, synthetic construct
  source 1..22: mol_type = other RNA
ccccacctttcctgcccctcca

SEQ ID NO: 128941 - RNA, 22 nt, synthetic construct
  source 1..22: mol_type = other RNA
ccccactccacacacgaagtag

SEQ ID NO: 128942 - RNA, 22 nt, synthetic construct
  source 1..22: mol_type = other RNA
ccccagaaagagagagggggga

SEQ ID NO: 128943 - RNA, 22 nt, synthetic construct
  source 1..22: mol_type = other RNA
ccccagaaggttaactaatagc

SEQ ID NO: 128944 - RNA, 22 nt, synthetic construct
  source 1..22: mol_type = other RNA
ccccagaataggcaaattcata

SEQ ID NO: 128945 - RNA, 22 nt, synthetic construct
  source 1..22: mol_type = other RNA
ccccagagattgtcgttgagta

SEQ ID NO: 128946 - RNA, 22 nt, synthetic construct
  source 1..22: mol_type = other RNA
ccccagcagccccgacgccttt

SEQ ID NO: 128947 - RNA, 22 nt, synthetic construct
  source 1..22: mol_type = other RNA
ccccagcatccactaggggact

SEQ ID NO: 128948 - RNA, 22 nt, synthetic construct
  source 1..22: mol_type = other RNA
ccccagcccctggtgatctatg

SEQ ID NO: 128949 - RNA, 22 nt, synthetic construct
  source 1..22: mol_type = other RNA
ccccagcctcagcctcccaagg

SEQ ID NO: 128950 - RNA, 22 nt, synthetic construct
  source 1..22: mol_type = other RNA
ccccagctaaaatgttcagata

SEQ ID NO: 128951 - RNA, 22 nt, synthetic construct
  source 1..22: mol_type = other RNA
ccccaggcggcagagggagcag

SEQ ID NO: 128952 - RNA, 22 nt, synthetic construct
  source 1..22: mol_type = other RNA
ccccagggaaaccttactgtaa

SEQ ID NO: 128953 - RNA, 22 nt, synthetic construct
  source 1..22: mol_type = other RNA
ccccagggatattttcgtgtac

SEQ ID NO: 128954 - RNA, 22 nt, synthetic construct
  source 1..22: mol_type = other RNA
ccccaggggacatagatgaaac

SEQ ID NO: 128955 - RNA, 22 nt, synthetic construct
  source 1..22: mol_type = other RNA
ccccaggtggttctgcctaatc

SEQ ID NO: 128956 - RNA, 22 nt, synthetic construct
  source 1..22: mol_type = other RNA
ccccagtagaaatcttccagaa

SEQ ID NO: 128957 - RNA, 22 nt, synthetic construct
  source 1..22: mol_type = other RNA
ccccagtggttgtggaattaac

SEQ ID NO: 128958 - RNA, 22 nt, synthetic construct
  source 1..22: mol_type = other RNA
ccccagttctgcgcaattgcag

SEQ ID NO: 128959 - RNA, 22 nt, synthetic construct
  source 1..22: mol_type = other RNA
ccccagttttgttgaatcttaa

SEQ ID NO: 128960 - RNA, 22 nt, synthetic construct
  source 1..22: mol_type = other RNA
ccccatcacactggtcactggc

SEQ ID NO: 128961 - RNA, 22 nt, synthetic construct
  source 1..22: mol_type = other RNA
ccccatcccctttacccctgag

SEQ ID NO: 128962 - RNA, 22 nt, synthetic construct
  source 1..22: mol_type = other RNA
ccccatctctaccaaaatataa

SEQ ID NO: 128963 - RNA, 22 nt, synthetic construct
  source 1..22: mol_type = other RNA
ccccatctgggatacttctaac

SEQ ID NO: 128964 - RNA, 22 nt, synthetic construct
  source 1..22: mol_type = other RNA
ccccatgcaggagaaacatggc

SEQ ID NO: 128965 - RNA, 22 nt, synthetic construct
  source 1..22: mol_type = other RNA
ccccatgtgttggcactgaagc

SEQ ID NO: 128966 - RNA, 22 nt, synthetic construct
  source 1..22: mol_type = other RNA
ccccattagagtaagcaactgc

SEQ ID NO: 128967 - RNA, 22 nt, synthetic construct
  source 1..22: mol_type = other RNA
ccccattcaattgtcctggcag

SEQ ID NO: 128968 - RNA, 22 nt, synthetic construct
  source 1..22: mol_type = other RNA
ccccattcactcagcataattg

SEQ ID NO: 128969 - RNA, 22 nt, synthetic construct
  source 1..22: mol_type = other RNA
ccccattccctgtctgtgatgt

SEQ ID NO: 128970 - RNA, 22 nt, synthetic construct
  source 1..22: mol_type = other RNA
ccccattgacaatataggagac

SEQ ID NO: 128971 - RNA, 22 nt, synthetic construct
  source 1..22: mol_type = other RNA
ccccattgcactccacgtgggt

SEQ ID NO: 128972 - RNA, 22 nt, synthetic construct
  source 1..22: mol_type = other RNA
ccccattgtacacatattaaat

SEQ ID NO: 128973 - RNA, 22 nt, synthetic construct
  source 1..22: mol_type = other RNA
ccccatttttctcgacacacaa

SEQ ID NO: 128974 - RNA, 22 nt, synthetic construct
  source 1..22: mol_type = other RNA
cccccaaaaacaaaagagtaga

SEQ ID NO: 128975 - RNA, 22 nt, synthetic construct
  source 1..22: mol_type = other RNA
cccccaaaacttaggaggctat

SEQ ID NO: 128976 - RNA, 22 nt, synthetic construct
  source 1..22: mol_type = other RNA
cccccaaagaaggaaaaaacac

SEQ ID NO: 128977 - RNA, 22 nt, synthetic construct
  source 1..22: mol_type = other RNA
cccccaattaaactatagaccc

SEQ ID NO: 128978 - RNA, 22 nt, synthetic construct
  source 1..22: mol_type = other RNA
cccccacccctgctctgcacgt

SEQ ID NO: 128979 - RNA, 22 nt, synthetic construct
  source 1..22: mol_type = other RNA
cccccagcagccccgacgcctt

SEQ ID NO: 128980 - RNA, 22 nt, synthetic construct
  source 1..22: mol_type = other RNA
cccccagcccctggtgatctat

SEQ ID NO: 128981 - RNA, 22 nt, synthetic construct
  source 1..22: mol_type = other RNA
cccccaggtggttctgcctaat

SEQ ID NO: 128982 - RNA, 22 nt, synthetic construct
  source 1..22: mol_type = other RNA
cccccagttttgttgaatctta

SEQ ID NO: 128983 - RNA, 22 nt, synthetic construct
  source 1..22: mol_type = other RNA
cccccatcacactggtcactgg

SEQ ID NO: 128984 - RNA, 22 nt, synthetic construct
  source 1..22: mol_type = other RNA
cccccatcccctttacccctga

SEQ ID NO: 128985 - RNA, 22 nt, synthetic construct
  source 1..22: mol_type = other RNA
ccccccaaaaacaaaagagtag

SEQ ID NO: 128986 - RNA, 22 nt, synthetic construct
  source 1..22: mol_type = other RNA
ccccccacccctgctctgcacg

SEQ ID NO: 128987 - RNA, 22 nt, synthetic construct
  source 1..22: mol_type = other RNA
cccccctaaaacactggaagta

SEQ ID NO: 128988 - RNA, 22 nt, synthetic construct
  source 1..22: mol_type = other RNA
cccccctctctctttctgggga

SEQ ID NO: 128989 - RNA, 22 nt, synthetic construct
  source 1..22: mol_type = other RNA
cccccctgaaaaatgagaaacc

SEQ ID NO: 128990 - RNA, 22 nt, synthetic construct
  source 1..22: mol_type = other RNA
cccccctggaacaatcaaacca

SEQ ID NO: 128991 - RNA, 22 nt, synthetic construct
  source 1..22: mol_type = other RNA
cccccgaatcctttgcttccca

SEQ ID NO: 128992 - RNA, 22 nt, synthetic construct
  source 1..22: mol_type = other RNA
cccccgggacaatgccagggcg

SEQ ID NO: 128993 - RNA, 22 nt, synthetic construct
  source 1..22: mol_type = other RNA
ccccctaaaacactggaagtaa

SEQ ID NO: 128994 - RNA, 22 nt, synthetic construct
  source 1..22: mol_type = other RNA
ccccctacacccagttcaccag

SEQ ID NO: 128995 - RNA, 22 nt, synthetic construct
  source 1..22: mol_type = other RNA
ccccctccctaccacccgtcca

SEQ ID NO: 128996 - RNA, 22 nt, synthetic construct
  source 1..22: mol_type = other RNA
ccccctcgaagagaccacaggc

SEQ ID NO: 128997 - RNA, 22 nt, synthetic construct
  source 1..22: mol_type = other RNA
ccccctctctctttctggggat

SEQ ID NO: 128998 - RNA, 22 nt, synthetic construct
  source 1..22: mol_type = other RNA
ccccctcttctctcctttgagg

SEQ ID NO: 128999 - RNA, 22 nt, synthetic construct
  source 1..22: mol_type = other RNA
ccccctgaaaaatgagaaacct

SEQ ID NO: 129000 - RNA, 22 nt, synthetic construct
  source 1..22: mol_type = other RNA
ccccctgaatacccctccctac

SEQ ID NO: 129001 - RNA, 22 nt, synthetic construct
  source 1..22: mol_type = other RNA
ccccctgagtagctgtgattac

SEQ ID NO: 129002 - RNA, 22 nt, synthetic construct
  source 1..22: mol_type = other RNA
ccccctggaaataagtttcatg

SEQ ID NO: 129003 - RNA, 22 nt, synthetic construct
  source 1..22: mol_type = other RNA
ccccctggaacaatcaaaccat

SEQ ID NO: 129004 - RNA, 22 nt, synthetic construct
  source 1..22: mol_type = other RNA
ccccctgggctcaagccatcct

SEQ ID NO: 129005 - RNA, 22 nt, synthetic construct
  source 1..22: mol_type = other RNA
cccccttatgtgtgtataaccc

SEQ ID NO: 129006 - RNA, 22 nt, synthetic construct
  source 1..22: mol_type = other RNA
ccccgaatcctttgcttcccac

SEQ ID NO: 129007 - RNA, 22 nt, synthetic construct
  source 1..22: mol_type = other RNA
ccccgacgcctttcatttggcc

SEQ ID NO: 129008 - RNA, 22 nt, synthetic construct
  source 1..22: mol_type = other RNA
ccccgatgccatgtgttttgtt

SEQ ID NO: 129009 - RNA, 22 nt, synthetic construct
  source 1..22: mol_type = other RNA
ccccgcatactgtgcagtggat

SEQ ID NO: 129010 - RNA, 22 nt, synthetic construct
  source 1..22: mol_type = other RNA
ccccgccctcccccgggacaat

SEQ ID NO: 129011 - RNA, 22 nt, synthetic construct
  source 1..22: mol_type = other RNA
ccccgctgcgagaaaggcgaag

SEQ ID NO: 129012 - RNA, 22 nt, synthetic construct
  source 1..22: mol_type = other RNA
ccccgctgtccatttccagtac

SEQ ID NO: 129013 - RNA, 22 nt, synthetic construct
  source 1..22: mol_type = other RNA
ccccgcttcagttggtgaagag

SEQ ID NO: 129014 - RNA, 22 nt, synthetic construct
  source 1..22: mol_type = other RNA
ccccggatgattctaatgtgca

SEQ ID NO: 129015 - RNA, 22 nt, synthetic construct
  source 1..22: mol_type = other RNA
ccccgggacaatgccagggcgc

SEQ ID NO: 129016 - RNA, 22 nt, synthetic construct
  source 1..22: mol_type = other RNA
ccccgggcctggttagggagac

SEQ ID NO: 129017 - RNA, 22 nt, synthetic construct
  source 1..22: mol_type = other RNA
ccccggggctcgcagcatccct

SEQ ID NO: 129018 - RNA, 22 nt, synthetic construct
  source 1..22: mol_type = other RNA
ccccggtctttcctgatcagca

SEQ ID NO: 129019 - RNA, 22 nt, synthetic construct
  source 1..22: mol_type = other RNA
ccccgtctctgcaaaaaatgtt

SEQ ID NO: 129020 - RNA, 22 nt, synthetic construct
  source 1..22: mol_type = other RNA
cccctaaaacactggaagtaat

SEQ ID NO: 129021 - RNA, 22 nt, synthetic construct
  source 1..22: mol_type = other RNA
cccctacacccagttcaccagt

SEQ ID NO: 129022 - RNA, 22 nt, synthetic construct
  source 1..22: mol_type = other RNA
cccctactttttgtcacacgga

SEQ ID NO: 129023 - RNA, 22 nt, synthetic construct
  source 1..22: mol_type = other RNA
cccctagcatgcagtagctcat

SEQ ID NO: 129024 - RNA, 22 nt, synthetic construct
  source 1..22: mol_type = other RNA
cccctagtggatgctggggacc

SEQ ID NO: 129025 - RNA, 22 nt, synthetic construct
  source 1..22: mol_type = other RNA
cccctatactgtaaccctgttt

SEQ ID NO: 129026 - RNA, 22 nt, synthetic construct
  source 1..22: mol_type = other RNA
cccctcaggtgtcactggatag

SEQ ID NO: 129027 - RNA, 22 nt, synthetic construct
  source 1..22: mol_type = other RNA
cccctcatcctccgtagctgtc

SEQ ID NO: 129028 - RNA, 22 nt, synthetic construct
  source 1..22: mol_type = other RNA
cccctccatggaaactacaatt

SEQ ID NO: 129029 - RNA, 22 nt, synthetic construct
  source 1..22: mol_type = other RNA
cccctccctaccacccgtccaa

SEQ ID NO: 129030 - RNA, 22 nt, synthetic construct
  source 1..22: mol_type = other RNA
cccctccctacctggcagtcta

SEQ ID NO: 129031 - RNA, 22 nt, synthetic construct
  source 1..22: mol_type = other RNA
cccctccctccccccacggtct

SEQ ID NO: 129032 - RNA, 22 nt, synthetic construct
  source 1..22: mol_type = other RNA
cccctccctgctttaaaacact

SEQ ID NO: 129033 - RNA, 22 nt, synthetic construct
  source 1..22: mol_type = other RNA
cccctcgaagagaccacaggct

SEQ ID NO: 129034 - RNA, 22 nt, synthetic construct
  source 1..22: mol_type = other RNA
cccctctctctttctggggatg

SEQ ID NO: 129035 - RNA, 22 nt, synthetic construct
  source 1..22: mol_type = other RNA
cccctcttctctcctttgaggt

SEQ ID NO: 129036 - RNA, 22 nt, synthetic construct
  source 1..22: mol_type = other RNA
cccctgaaaaatgagaaaccta

SEQ ID NO: 129037 - RNA, 22 nt, synthetic construct
  source 1..22: mol_type = other RNA
cccctgaatacccctccctacc

SEQ ID NO: 129038 - RNA, 22 nt, synthetic construct
  source 1..22: mol_type = other RNA
cccctgagaacttcagtatata

SEQ ID NO: 129039 - RNA, 22 nt, synthetic construct
  source 1..22: mol_type = other RNA
cccctgagtagctgtgattacc

SEQ ID NO: 129040 - RNA, 22 nt, synthetic construct
  source 1..22: mol_type = other RNA
cccctgccacactccagcatcc

SEQ ID NO: 129041 - RNA, 22 nt, synthetic construct
  source 1..22: mol_type = other RNA
cccctgctctgcacgtactagt

SEQ ID NO: 129042 - RNA, 22 nt, synthetic construct
  source 1..22: mol_type = other RNA
cccctgctgccagatgttctaa

SEQ ID NO: 129043 - RNA, 22 nt, synthetic construct
  source 1..22: mol_type = other RNA
cccctgctgttcccaagcaagt

SEQ ID NO: 129044 - RNA, 22 nt, synthetic construct
  source 1..22: mol_type = other RNA
cccctggaaataagtttcatgg

SEQ ID NO: 129045 - RNA, 22 nt, synthetic construct
  source 1..22: mol_type = other RNA
cccctggaacaatcaaaccatc

SEQ ID NO: 129046 - RNA, 22 nt, synthetic construct
  source 1..22: mol_type = other RNA
cccctggagaaagcccagccgc

SEQ ID NO: 129047 - RNA, 22 nt, synthetic construct
  source 1..22: mol_type = other RNA
cccctggagttaattccacaac

SEQ ID NO: 129048 - RNA, 22 nt, synthetic construct
  source 1..22: mol_type = other RNA
cccctggatcccccagcccctg

SEQ ID NO: 129049 - RNA, 22 nt, synthetic construct
  source 1..22: mol_type = other RNA
cccctgggctcaagccatcctc

SEQ ID NO: 129050 - RNA, 22 nt, synthetic construct
  source 1..22: mol_type = other RNA
cccctggggcctcagcatgtct

SEQ ID NO: 129051 - RNA, 22 nt, synthetic construct
  source 1..22: mol_type = other RNA
cccctggtcgagctgggtgatg

SEQ ID NO: 129052 - RNA, 22 nt, synthetic construct
  source 1..22: mol_type = other RNA
cccctggtgatctatgaatttg

SEQ ID NO: 129053 - RNA, 22 nt, synthetic construct
  source 1..22: mol_type = other RNA
cccctgtaattacatacttcaa

SEQ ID NO: 129054 - RNA, 22 nt, synthetic construct
  source 1..22: mol_type = other RNA
cccctgtagcagacactgggtt

SEQ ID NO: 129055 - RNA, 22 nt, synthetic construct
  source 1..22: mol_type = other RNA
cccctgtccaagtatttctcat

SEQ ID NO: 129056 - RNA, 22 nt, synthetic construct
  source 1..22: mol_type = other RNA
ccccttaaattccaaaagtgaa

SEQ ID NO: 129057 - RNA, 22 nt, synthetic construct
  source 1..22: mol_type = other RNA
ccccttatatgggatatctaac

SEQ ID NO: 129058 - RNA, 22 nt, synthetic construct
  source 1..22: mol_type = other RNA
ccccttatcaggaaagtgccag

SEQ ID NO: 129059 - RNA, 22 nt, synthetic construct
  source 1..22: mol_type = other RNA
ccccttatcctcttctgaagag

SEQ ID NO: 129060 - RNA, 22 nt, synthetic construct
  source 1..22: mol_type = other RNA
ccccttatgtgtgtataacccg

SEQ ID NO: 129061 - RNA, 22 nt, synthetic construct
  source 1..22: mol_type = other RNA
ccccttgaaagatcatttagta

SEQ ID NO: 129062 - RNA, 22 nt, synthetic construct
  source 1..22: mol_type = other RNA
ccccttgacgaagtcacattct

SEQ ID NO: 129063 - RNA, 22 nt, synthetic construct
  source 1..22: mol_type = other RNA
ccccttgccaaggcttgctttg

SEQ ID NO: 129064 - RNA, 22 nt, synthetic construct
  source 1..22: mol_type = other RNA
cccctttacccctgagaacttc

SEQ ID NO: 129065 - RNA, 22 nt, synthetic construct
  source 1..22: mol_type = other RNA
cccctttagtgttctgtgttta

SEQ ID NO: 129066 - RNA, 22 nt, synthetic construct
  source 1..22: mol_type = other RNA
cccctttcaagattgtttaatt

SEQ ID NO: 129067 - RNA, 22 nt, synthetic construct
  source 1..22: mol_type = other RNA
cccctttctttggttttgactc

SEQ ID NO: 129068 - RNA, 22 nt, synthetic construct
  source 1..22: mol_type = other RNA
cccctttgagcagagtcctgag

SEQ ID NO: 129069 - RNA, 22 nt, synthetic construct
  source 1..22: mol_type = other RNA
cccgaagaggacgatttttcca

SEQ ID NO: 129070 - RNA, 22 nt, synthetic construct
  source 1..22: mol_type = other RNA
cccgaatcctttgcttcccact

SEQ ID NO: 129071 - RNA, 22 nt, synthetic construct
  source 1..22: mol_type = other RNA
cccgacccactagtgaagtccc

SEQ ID NO: 129072 - RNA, 22 nt, synthetic construct
  source 1..22: mol_type = other RNA
cccgacctccagcgctaagcac

SEQ ID NO: 129073 - RNA, 22 nt, synthetic construct
  source 1..22: mol_type = other RNA
cccgacgcctttcatttggcct

SEQ ID NO: 129074 - RNA, 22 nt, synthetic construct
  source 1..22: mol_type = other RNA
cccgaggtgcacaagggaagag

SEQ ID NO: 129075 - RNA, 22 nt, synthetic construct
  source 1..22: mol_type = other RNA
cccgagtagttgtaactacaga

SEQ ID NO: 129076 - RNA, 22 nt, synthetic construct
  source 1..22: mol_type = other RNA
cccgagtatctaggagtacagt

SEQ ID NO: 129077 - RNA, 22 nt, synthetic construct
  source 1..22: mol_type = other RNA
cccgatgccatgtgttttgttt

SEQ ID NO: 129078 - RNA, 22 nt, synthetic construct
  source 1..22: mol_type = other RNA
cccgatttcagttaacttattg

SEQ ID NO: 129079 - RNA, 22 nt, synthetic construct
  source 1..22: mol_type = other RNA
cccgcaccttgattttgataaa

SEQ ID NO: 129080 - RNA, 22 nt, synthetic construct
  source 1..22: mol_type = other RNA
cccgcatactgtgcagtggatg

SEQ ID NO: 129081 - RNA, 22 nt, synthetic construct
  source 1..22: mol_type = other RNA
cccgccctcccccgggacaatg

SEQ ID NO: 129082 - RNA, 22 nt, synthetic construct
  source 1..22: mol_type = other RNA
cccgcgaaggcgtgtaaactgt

SEQ ID NO: 129083 - RNA, 22 nt, synthetic construct
  source 1..22: mol_type = other RNA
cccgctacacaagtattaacga

SEQ ID NO: 129084 - RNA, 22 nt, synthetic construct
  source 1..22: mol_type = other RNA
cccgctctgggtgcgttgaccg

SEQ ID NO: 129085 - RNA, 22 nt, synthetic construct
  source 1..22: mol_type = other RNA
cccgctgcgagaaaggcgaagc

SEQ ID NO: 129086 - RNA, 22 nt, synthetic construct
  source 1..22: mol_type = other RNA
cccgctgctccctctgccgcct

SEQ ID NO: 129087 - RNA, 22 nt, synthetic construct
  source 1..22: mol_type = other RNA
cccgctgtccatttccagtact

SEQ ID NO: 129088 - RNA, 22 nt, synthetic construct
  source 1..22: mol_type = other RNA
cccgcttcagttggtgaagaga

SEQ ID NO: 129089 - RNA, 22 nt, synthetic construct
  source 1..22: mol_type = other RNA
cccggaacaggaaaaggacatt

SEQ ID NO: 129090 - RNA, 22 nt, synthetic construct
  source 1..22: mol_type = other RNA
cccggaagctgggctagagcca

SEQ ID NO: 129091 - RNA, 22 nt, synthetic construct
  source 1..22: mol_type = other RNA
cccggagaggtgaactattaga

SEQ ID NO: 129092 - RNA, 22 nt, synthetic construct
  source 1..22: mol_type = other RNA
cccggatgattctaatgtgcaa

SEQ ID NO: 129093 - RNA, 22 nt, synthetic construct
  source 1..22: mol_type = other RNA
cccggattggaaaactaggtat

SEQ ID NO: 129094 - RNA, 22 nt, synthetic construct
  source 1..22: mol_type = other RNA
cccggcatgcctctcccaccat

SEQ ID NO: 129095 - RNA, 22 nt, synthetic construct
  source 1..22: mol_type = other RNA
cccggccaaatatccatgtttt

SEQ ID NO: 129096 - RNA, 22 nt, synthetic construct
  source 1..22: mol_type = other RNA
cccggccagacattttatttat

SEQ ID NO: 129097 - RNA, 22 nt, synthetic construct
  source 1..22: mol_type = other RNA
cccggcccagattcctttttta

SEQ ID NO: 129098 - RNA, 22 nt, synthetic construct
  source 1..22: mol_type = other RNA
cccggcccatgacatgtgtttt

SEQ ID NO: 129099 - RNA, 22 nt, synthetic construct
  source 1..22: mol_type = other RNA
cccggcccgttatttttatcat

SEQ ID NO: 129100 - RNA, 22 nt, synthetic construct
  source 1..22: mol_type = other RNA
cccggccctgccgcttcgcctt

SEQ ID NO: 129101 - RNA, 22 nt, synthetic construct
  source 1..22: mol_type = other RNA
cccggccgagaaatcggaactc

SEQ ID NO: 129102 - RNA, 22 nt, synthetic construct
  source 1..22: mol_type = other RNA
cccggccgatgcctgtgctttt

SEQ ID NO: 129103 - RNA, 22 nt, synthetic construct
  source 1..22: mol_type = other RNA
cccggctaagatgaggtctcag

SEQ ID NO: 129104 - RNA, 22 nt, synthetic construct
  source 1..22: mol_type = other RNA
cccggctaattaaacaaacatt

SEQ ID NO: 129105 - RNA, 22 nt, synthetic construct
  source 1..22: mol_type = other RNA
cccgggacaatgccagggcgct

SEQ ID NO: 129106 - RNA, 22 nt, synthetic construct
  source 1..22: mol_type = other RNA
cccgggagacaaaggttgcagt

SEQ ID NO: 129107 - RNA, 22 nt, synthetic construct
  source 1..22: mol_type = other RNA
cccgggaggcagatgttgcggt

SEQ ID NO: 129108 - RNA, 22 nt, synthetic construct
  source 1..22: mol_type = other RNA
cccgggcctggttagggagact

SEQ ID NO: 129109 - RNA, 22 nt, synthetic construct
  source 1..22: mol_type = other RNA
cccggggcagagaactgactga

SEQ ID NO: 129110 - RNA, 22 nt, synthetic construct
  source 1..22: mol_type = other RNA
cccggggctcgcagcatccctg

SEQ ID NO: 129111 - RNA, 22 nt, synthetic construct
  source 1..22: mol_type = other RNA
cccgggtccaggcagttctcct

SEQ ID NO: 129112 - RNA, 22 nt, synthetic construct
  source 1..22: mol_type = other RNA
cccgggtttaagcgattctcct

SEQ ID NO: 129113 - RNA, 22 nt, synthetic construct
  source 1..22: mol_type = other RNA
cccggtctttcctgatcagcac

SEQ ID NO: 129114 - RNA, 22 nt, synthetic construct
  source 1..22: mol_type = other RNA
cccgtccaatttctttggctgt

SEQ ID NO: 129115 - RNA, 22 nt, synthetic construct
  source 1..22: mol_type = other RNA
cccgtccctgcttggcgcagtg

SEQ ID NO: 129116 - RNA, 22 nt, synthetic construct
  source 1..22: mol_type = other RNA
cccgtctctgcaaaaaatgttt

SEQ ID NO: 129117 - RNA, 22 nt, synthetic construct
  source 1..22: mol_type = other RNA
cccgtggaaatacttgaacatt

SEQ ID NO: 129118 - RNA, 22 nt, synthetic construct
  source 1..22: mol_type = other RNA
cccgtgtgtttagaataataca

SEQ ID NO: 129119 - RNA, 22 nt, synthetic construct
  source 1..22: mol_type = other RNA
cccgtgtgttttgttgttgttg

SEQ ID NO: 129120 - RNA, 22 nt, synthetic construct
  source 1..22: mol_type = other RNA
cccgttatttttatcataacta

SEQ ID NO: 129121 - RNA, 22 nt, synthetic construct
  source 1..22: mol_type = other RNA
cccgttttttccttcatttaac

SEQ ID NO: 129122 - RNA, 22 nt, synthetic construct
  source 1..22: mol_type = other RNA
ccctaaaacactggaagtaatt

SEQ ID NO: 129123 - RNA, 22 nt, synthetic construct
  source 1..22: mol_type = other RNA
ccctaaacactgtagttcagtt

SEQ ID NO: 129124 - RNA, 22 nt, synthetic construct
  source 1..22: mol_type = other RNA
ccctaaagagaatcttaaaata

SEQ ID NO: 129125 - RNA, 22 nt, synthetic construct
  source 1..22: mol_type = other RNA
ccctaaatacacatgttgagtc

SEQ ID NO: 129126 - RNA, 22 nt, synthetic construct
  source 1..22: mol_type = other RNA
ccctaacagtctcgtgaatttg

SEQ ID NO: 129127 - RNA, 22 nt, synthetic construct
  source 1..22: mol_type = other RNA
ccctaaccaggcccggggcaga

SEQ ID NO: 129128 - RNA, 22 nt, synthetic construct
  source 1..22: mol_type = other RNA
ccctaaccccagagattgtcgt

SEQ ID NO: 129129 - RNA, 22 nt, synthetic construct
  source 1..22: mol_type = other RNA
ccctaataacaaaataggatta

SEQ ID NO: 129130 - RNA, 22 nt, synthetic construct
  source 1..22: mol_type = other RNA
ccctacacccagttcaccagtt

SEQ ID NO: 129131 - RNA, 22 nt, synthetic construct
  source 1..22: mol_type = other RNA
ccctacacccatccacccactt

SEQ ID NO: 129132 - RNA, 22 nt, synthetic construct
  source 1..22: mol_type = other RNA
ccctacagactcaataaccaca

SEQ ID NO: 129133 - RNA, 22 nt, synthetic construct
  source 1..22: mol_type = other RNA
ccctacatatggcaattccata

SEQ ID NO: 129134 - RNA, 22 nt, synthetic construct
  source 1..22: mol_type = other RNA
ccctacattgccttcaagttgc

SEQ ID NO: 129135 - RNA, 22 nt, synthetic construct
  source 1..22: mol_type = other RNA
ccctaccacccgtccaatttct

SEQ ID NO: 129136 - RNA, 22 nt, synthetic construct
  source 1..22: mol_type = other RNA
ccctacctaaaaagggagtcag

SEQ ID NO: 129137 - RNA, 22 nt, synthetic construct
  source 1..22: mol_type = other RNA
ccctacctagggtgtaaaaggc

SEQ ID NO: 129138 - RNA, 22 nt, synthetic construct
  source 1..22: mol_type = other RNA
ccctacctggcagtctaggaaa

SEQ ID NO: 129139 - RNA, 22 nt, synthetic construct
  source 1..22: mol_type = other RNA
ccctactcactgaaaccctcac

SEQ ID NO: 129140 - RNA, 22 nt, synthetic construct
  source 1..22: mol_type = other RNA
ccctactttttgtcacacggaa

SEQ ID NO: 129141 - RNA, 22 nt, synthetic construct
  source 1..22: mol_type = other RNA
ccctagcatgcagtagctcatc

SEQ ID NO: 129142 - RNA, 22 nt, synthetic construct
  source 1..22: mol_type = other RNA
ccctagcccagcacttccattt

SEQ ID NO: 129143 - RNA, 22 nt, synthetic construct
  source 1..22: mol_type = other RNA
ccctaggtagggttggggtatg

SEQ ID NO: 129144 - RNA, 22 nt, synthetic construct
  source 1..22: mol_type = other RNA
ccctagtggatgctggggaccc

SEQ ID NO: 129145 - RNA, 22 nt, synthetic construct
  source 1..22: mol_type = other RNA
ccctagtgtctccataccccct

SEQ ID NO: 129146 - RNA, 22 nt, synthetic construct
  source 1..22: mol_type = other RNA
ccctatactgtaaccctgtttc

SEQ ID NO: 129147 - RNA, 22 nt, synthetic construct
  source 1..22: mol_type = other RNA
ccctatgcaataactcaaaatg

SEQ ID NO: 129148 - RNA, 22 nt, synthetic construct
  source 1..22: mol_type = other RNA
ccctatgccttcagtatgaatg

SEQ ID NO: 129149 - RNA, 22 nt, synthetic construct
  source 1..22: mol_type = other RNA
ccctattcaacctataagaccc

SEQ ID NO: 129150 - RNA, 22 nt, synthetic construct
  source 1..22: mol_type = other RNA
ccctatttatgttgcacaaaag

SEQ ID NO: 129151 - RNA, 22 nt, synthetic construct
  source 1..22: mol_type = other RNA
ccctattttctacaggtatatt

SEQ ID NO: 129152 - RNA, 22 nt, synthetic construct
  source 1..22: mol_type = other RNA
ccctcaaaagatgcagaaaaag

SEQ ID NO: 129153 - RNA, 22 nt, synthetic construct
  source 1..22: mol_type = other RNA
ccctcaaatgccatagagcttt

SEQ ID NO: 129154 - RNA, 22 nt, synthetic construct
  source 1..22: mol_type = other RNA
ccctcaaatgtctcattgtgga

SEQ ID NO: 129155 - RNA, 22 nt, synthetic construct
  source 1..22: mol_type = other RNA
ccctcaatccccatctgggata

SEQ ID NO: 129156 - RNA, 22 nt, synthetic construct
  source 1..22: mol_type = other RNA
ccctcacagtcacaaagcttta

SEQ ID NO: 129157 - RNA, 22 nt, synthetic construct
  source 1..22: mol_type = other RNA
ccctcacagtccactcacctgt

SEQ ID NO: 129158 - RNA, 22 nt, synthetic construct
  source 1..22: mol_type = other RNA
ccctcaccttctgctgggccca

SEQ ID NO: 129159 - RNA, 22 nt, synthetic construct
  source 1..22: mol_type = other RNA
ccctcacgaaagcggtcaacgc

SEQ ID NO: 129160 - RNA, 22 nt, synthetic construct
  source 1..22: mol_type = other RNA
ccctcactaagtcagaattcac

SEQ ID NO: 129161 - RNA, 22 nt, synthetic construct
  source 1..22: mol_type = other RNA
ccctcagaatttgaggtcttct

SEQ ID NO: 129162 - RNA, 22 nt, synthetic construct
  source 1..22: mol_type = other RNA
ccctcagcaaaagcaattatta

SEQ ID NO: 129163 - RNA, 22 nt, synthetic construct
  source 1..22: mol_type = other RNA
ccctcaggaccaggcagtcctc

SEQ ID NO: 129164 - RNA, 22 nt, synthetic construct
  source 1..22: mol_type = other RNA
ccctcaggactctgctcaaagg

SEQ ID NO: 129165 - RNA, 22 nt, synthetic construct
  source 1..22: mol_type = other RNA
ccctcaggtgtcactggataga

SEQ ID NO: 129166 - RNA, 22 nt, synthetic construct
  source 1..22: mol_type = other RNA
ccctcatatcagttatcacacc

SEQ ID NO: 129167 - RNA, 22 nt, synthetic construct
  source 1..22: mol_type = other RNA
ccctcatcctccgtagctgtcg

SEQ ID NO: 129168 - RNA, 22 nt, synthetic construct
  source 1..22: mol_type = other RNA
ccctcattgaagctactattcc

SEQ ID NO: 129169 - RNA, 22 nt, synthetic construct
  source 1..22: mol_type = other RNA
ccctcattttataagggtgata

SEQ ID NO: 129170 - RNA, 22 nt, synthetic construct
  source 1..22: mol_type = other RNA
ccctccaggatccagtctctac

SEQ ID NO: 129171 - RNA, 22 nt, synthetic construct
  source 1..22: mol_type = other RNA
ccctccagtccagcaccaccct

SEQ ID NO: 129172 - RNA, 22 nt, synthetic construct
  source 1..22: mol_type = other RNA
ccctccatggaaactacaatta

SEQ ID NO: 129173 - RNA, 22 nt, synthetic construct
  source 1..22: mol_type = other RNA
ccctccatttccctgcttcatc

SEQ ID NO: 129174 - RNA, 22 nt, synthetic construct
  source 1..22: mol_type = other RNA
ccctcccccgggacaatgccag

SEQ ID NO: 129175 - RNA, 22 nt, synthetic construct
  source 1..22: mol_type = other RNA
ccctccctaccacccgtccaat

SEQ ID NO: 129176 - RNA, 22 nt, synthetic construct
  source 1..22: mol_type = other RNA
ccctccctacctggcagtctag

SEQ ID NO: 129177 - RNA, 22 nt, synthetic construct
  source 1..22: mol_type = other RNA
ccctccctccccccacggtctc

SEQ ID NO: 129178 - RNA, 22 nt, synthetic construct
  source 1..22: mol_type = other RNA
ccctccctgctttaaaacactg

SEQ ID NO: 129179 - RNA, 22 nt, synthetic construct
  source 1..22: mol_type = other RNA
ccctcctaccttccaaagtatg

SEQ ID NO: 129180 - RNA, 22 nt, synthetic construct
  source 1..22: mol_type = other RNA
ccctcctcctcctggccacatg

SEQ ID NO: 129181 - RNA, 22 nt, synthetic construct
  source 1..22: mol_type = other RNA
ccctcctcctctacaagtttta

SEQ ID NO: 129182 - RNA, 22 nt, synthetic construct
  source 1..22: mol_type = other RNA
ccctcctctggccctccatttc

SEQ ID NO: 129183 - RNA, 22 nt, synthetic construct
  source 1..22: mol_type = other RNA
ccctcctttctagaatgcatcc

SEQ ID NO: 129184 - RNA, 22 nt, synthetic construct
  source 1..22: mol_type = other RNA
ccctcctttttatcacccttat

SEQ ID NO: 129185 - RNA, 22 nt, synthetic construct
  source 1..22: mol_type = other RNA
ccctcgaagagaccacaggctc

SEQ ID NO: 129186 - RNA, 22 nt, synthetic construct
  source 1..22: mol_type = other RNA
ccctcgagtaaaaagaatgaat

SEQ ID NO: 129187 - RNA, 22 nt, synthetic construct
  source 1..22: mol_type = other RNA
ccctcggccacagcagggctcc

SEQ ID NO: 129188 - RNA, 22 nt, synthetic construct
  source 1..22: mol_type = other RNA
ccctcggcctctactgactccc

SEQ ID NO: 129189 - RNA, 22 nt, synthetic construct
  source 1..22: mol_type = other RNA
ccctctaaataggtattcatgc

SEQ ID NO: 129190 - RNA, 22 nt, synthetic construct
  source 1..22: mol_type = other RNA
ccctctaagtcagcctgggcac

SEQ ID NO: 129191 - RNA, 22 nt, synthetic construct
  source 1..22: mol_type = other RNA
ccctctacaaaaggaggaacta

SEQ ID NO: 129192 - RNA, 22 nt, synthetic construct
  source 1..22: mol_type = other RNA
ccctctagctccccattccctg

SEQ ID NO: 129193 - RNA, 22 nt, synthetic construct
  source 1..22: mol_type = other RNA
ccctctataattctgccttcaa

SEQ ID NO: 129194 - RNA, 22 nt, synthetic construct
  source 1..22: mol_type = other RNA
ccctctatggcaggcaccttca

SEQ ID NO: 129195 - RNA, 22 nt, synthetic construct
  source 1..22: mol_type = other RNA
ccctctcagtggtgcttttgct

SEQ ID NO: 129196 - RNA, 22 nt, synthetic construct
  source 1..22: mol_type = other RNA
ccctctctctttctggggatgc

SEQ ID NO: 129197 - RNA, 22 nt, synthetic construct
  source 1..22: mol_type = other RNA
ccctctgagagaagtcagacta

SEQ ID NO: 129198 - RNA, 22 nt, synthetic construct
  source 1..22: mol_type = other RNA
ccctctggaatgcccatcctct

SEQ ID NO: 129199 - RNA, 22 nt, synthetic construct
  source 1..22: mol_type = other RNA
ccctctggccttctatattttt

SEQ ID NO: 129200 - RNA, 22 nt, synthetic construct
  source 1..22: mol_type = other RNA
ccctctgtcaccaggctggaat

SEQ ID NO: 129201 - RNA, 22 nt, synthetic construct
  source 1..22: mol_type = other RNA
ccctctgtgtgcatgcatgtct

SEQ ID NO: 129202 - RNA, 22 nt, synthetic construct
  source 1..22: mol_type = other RNA
ccctcttcaatattttggaaga

SEQ ID NO: 129203 - RNA, 22 nt, synthetic construct
  source 1..22: mol_type = other RNA
ccctcttcgctcttttaaaaat

SEQ ID NO: 129204 - RNA, 22 nt, synthetic construct
  source 1..22: mol_type = other RNA
ccctcttctctcctttgaggta

SEQ ID NO: 129205 - RNA, 22 nt, synthetic construct
  source 1..22: mol_type = other RNA
ccctctttctcaacttcctgtt

SEQ ID NO: 129206 - RNA, 22 nt, synthetic construct
  source 1..22: mol_type = other RNA
ccctgaaaaatgagaaacctaa

SEQ ID NO: 129207 - RNA, 22 nt, synthetic construct
  source 1..22: mol_type = other RNA
ccctgaaattgtcagaaaagat

SEQ ID NO: 129208 - RNA, 22 nt, synthetic construct
  source 1..22: mol_type = other RNA
ccctgaacaatgattttcttaa

SEQ ID NO: 129209 - RNA, 22 nt, synthetic construct
  source 1..22: mol_type = other RNA
ccctgaatacccctccctacct

SEQ ID NO: 129210 - RNA, 22 nt, synthetic construct
  source 1..22: mol_type = other RNA
ccctgagaacttcagtatatat

SEQ ID NO: 129211 - RNA, 22 nt, synthetic construct
  source 1..22: mol_type = other RNA
ccctgagaagtcaaagcctgtg

SEQ ID NO: 129212 - RNA, 22 nt, synthetic construct
  source 1..22: mol_type = other RNA
ccctgagcatccccgctgcgag

SEQ ID NO: 129213 - RNA, 22 nt, synthetic construct
  source 1..22: mol_type = other RNA
ccctgaggatataacgatagtc

SEQ ID NO: 129214 - RNA, 22 nt, synthetic construct
  source 1..22: mol_type = other RNA
ccctgagtagctgtgattaccg

SEQ ID NO: 129215 - RNA, 22 nt, synthetic construct
  source 1..22: mol_type = other RNA
ccctgagtccagaggtgagctt

SEQ ID NO: 129216 - RNA, 22 nt, synthetic construct
  source 1..22: mol_type = other RNA
ccctgataatcacagacgcaaa

SEQ ID NO: 129217 - RNA, 22 nt, synthetic construct
  source 1..22: mol_type = other RNA
ccctgatagatattggcaacat

SEQ ID NO: 129218 - RNA, 22 nt, synthetic construct
  source 1..22: mol_type = other RNA
ccctgatatgtcgcatgaaaac

SEQ ID NO: 129219 - RNA, 22 nt, synthetic construct
  source 1..22: mol_type = other RNA
ccctgatcaagttgcttggcac

SEQ ID NO: 129220 - RNA, 22 nt, synthetic construct
  source 1..22: mol_type = other RNA
ccctgattgagattagcgaaag

SEQ ID NO: 129221 - RNA, 22 nt, synthetic construct
  source 1..22: mol_type = other RNA
ccctgatttaaagtaggttgag

SEQ ID NO: 129222 - RNA, 22 nt, synthetic construct
  source 1..22: mol_type = other RNA
ccctgcagccagatttgatcct

SEQ ID NO: 129223 - RNA, 22 nt, synthetic construct
  source 1..22: mol_type = other RNA
ccctgcatacactcatttcctt

SEQ ID NO: 129224 - RNA, 22 nt, synthetic construct
  source 1..22: mol_type = other RNA
ccctgccacactccagcatccc

SEQ ID NO: 129225 - RNA, 22 nt, synthetic construct
  source 1..22: mol_type = other RNA
ccctgccccttatcctcttctg

SEQ ID NO: 129226 - RNA, 22 nt, synthetic construct
  source 1..22: mol_type = other RNA
ccctgccctgtgaaaatcattt

SEQ ID NO: 129227 - RNA, 22 nt, synthetic construct
  source 1..22: mol_type = other RNA
ccctgccgcttcgcctttctcg

SEQ ID NO: 129228 - RNA, 22 nt, synthetic construct
  source 1..22: mol_type = other RNA
ccctgccttccttgggcacact

SEQ ID NO: 129229 - RNA, 22 nt, synthetic construct
  source 1..22: mol_type = other RNA
ccctgcgaaggcaatgtaacac

SEQ ID NO: 129230 - RNA, 22 nt, synthetic construct
  source 1..22: mol_type = other RNA
ccctgcgattggttggactcca

SEQ ID NO: 129231 - RNA, 22 nt, synthetic construct
  source 1..22: mol_type = other RNA
ccctgctactcaggagattaag

SEQ ID NO: 129232 - RNA, 22 nt, synthetic construct
  source 1..22: mol_type = other RNA
ccctgctacttgtggggctgag

SEQ ID NO: 129233 - RNA, 22 nt, synthetic construct
  source 1..22: mol_type = other RNA
ccctgctatgcatactttggaa

SEQ ID NO: 129234 - RNA, 22 nt, synthetic construct
  source 1..22: mol_type = other RNA
ccctgctccagtatgacctcct

SEQ ID NO: 129235 - RNA, 22 nt, synthetic construct
  source 1..22: mol_type = other RNA
ccctgctctgcacgtactagtc

SEQ ID NO: 129236 - RNA, 22 nt, synthetic construct
  source 1..22: mol_type = other RNA
ccctgctgccagatgttctaat

SEQ ID NO: 129237 - RNA, 22 nt, synthetic construct
  source 1..22: mol_type = other RNA
ccctgctggaacgaatattcat

SEQ ID NO: 129238 - RNA, 22 nt, synthetic construct
  source 1..22: mol_type = other RNA
ccctgctgtggccgagggagac

SEQ ID NO: 129239 - RNA, 22 nt, synthetic construct
  source 1..22: mol_type = other RNA
ccctgctgttcccaagcaagtg

SEQ ID NO: 129240 - RNA, 22 nt, synthetic construct
  source 1..22: mol_type = other RNA
ccctgcttcatctggaccagtt

SEQ ID NO: 129241 - RNA, 22 nt, synthetic construct
  source 1..22: mol_type = other RNA
ccctgcttggcgcagtgcttag

SEQ ID NO: 129242 - RNA, 22 nt, synthetic construct
  source 1..22: mol_type = other RNA
ccctgctttaaaacactggcaa

SEQ ID NO: 129243 - RNA, 22 nt, synthetic construct
  source 1..22: mol_type = other RNA
ccctgctttcagttctttcgga

SEQ ID NO: 129244 - RNA, 22 nt, synthetic construct
  source 1..22: mol_type = other RNA
ccctggaaataagtttcatgga

SEQ ID NO: 129245 - RNA, 22 nt, synthetic construct
  source 1..22: mol_type = other RNA
ccctggaacaatcaaaccatcc

SEQ ID NO: 129246 - RNA, 22 nt, synthetic construct
  source 1..22: mol_type = other RNA
ccctggagaaagcccagccgcg

SEQ ID NO: 129247 - RNA, 22 nt, synthetic construct
  source 1..22: mol_type = other RNA
ccctggagaggcaaaggccgct

SEQ ID NO: 129248 - RNA, 22 nt, synthetic construct
  source 1..22: mol_type = other RNA
ccctggagttaattccacaacc

SEQ ID NO: 129249 - RNA, 22 nt, synthetic construct
  source 1..22: mol_type = other RNA
ccctggatcccccagcccctgg

SEQ ID NO: 129250 - RNA, 22 nt, synthetic construct
  source 1..22: mol_type = other RNA
ccctggcattgtcccgggggag

SEQ ID NO: 129251 - RNA, 22 nt, synthetic construct
  source 1..22: mol_type = other RNA
ccctggcttgtgacatcaaggg

SEQ ID NO: 129252 - RNA, 22 nt, synthetic construct
  source 1..22: mol_type = other RNA
ccctgggaaagcctggctttag

SEQ ID NO: 129253 - RNA, 22 nt, synthetic construct
  source 1..22: mol_type = other RNA
ccctgggatgcaagaatggttt

SEQ ID NO: 129254 - RNA, 22 nt, synthetic construct
  source 1..22: mol_type = other RNA
ccctgggctcaagccatcctcc

SEQ ID NO: 129255 - RNA, 22 nt, synthetic construct
  source 1..22: mol_type = other RNA
ccctggggaataagattttagg

SEQ ID NO: 129256 - RNA, 22 nt, synthetic construct
  source 1..22: mol_type = other RNA
ccctggggcctcagcatgtctt

SEQ ID NO: 129257 - RNA, 22 nt, synthetic construct
  source 1..22: mol_type = other RNA
ccctggggtttccttaccttta

SEQ ID NO: 129258 - RNA, 22 nt, synthetic construct
  source 1..22: mol_type = other RNA
ccctggtcgagctgggtgatgt

SEQ ID NO: 129259 - RNA, 22 nt, synthetic construct
  source 1..22: mol_type = other RNA
ccctggtgatctatgaatttgc

SEQ ID NO: 129260 - RNA, 22 nt, synthetic construct
  source 1..22: mol_type = other RNA
ccctggtgctttctatctctca

SEQ ID NO: 129261 - RNA, 22 nt, synthetic construct
  source 1..22: mol_type = other RNA
ccctggttcaagctatgctcct

SEQ ID NO: 129262 - RNA, 22 nt, synthetic construct
  source 1..22: mol_type = other RNA
ccctgtaattacatacttcaaa

SEQ ID NO: 129263 - RNA, 22 nt, synthetic construct
  source 1..22: mol_type = other RNA
ccctgtacccattagacactaa

SEQ ID NO: 129264 - RNA, 22 nt, synthetic construct
  source 1..22: mol_type = other RNA
ccctgtagagatttttatcaaa

SEQ ID NO: 129265 - RNA, 22 nt, synthetic construct
  source 1..22: mol_type = other RNA
ccctgtagcagacactgggttc

SEQ ID NO: 129266 - RNA, 22 nt, synthetic construct
  source 1..22: mol_type = other RNA
ccctgtccaagtatttctcatc

SEQ ID NO: 129267 - RNA, 22 nt, synthetic construct
  source 1..22: mol_type = other RNA
ccctgtctctaaaaaataccaa

SEQ ID NO: 129268 - RNA, 22 nt, synthetic construct
  source 1..22: mol_type = other RNA
ccctgtctgggaagttatgtag

SEQ ID NO: 129269 - RNA, 22 nt, synthetic construct
  source 1..22: mol_type = other RNA
ccctgtctgtgatgtagaggca

SEQ ID NO: 129270 - RNA, 22 nt, synthetic construct
  source 1..22: mol_type = other RNA
ccctgtctttctgtctgctttt

SEQ ID NO: 129271 - RNA, 22 nt, synthetic construct
  source 1..22: mol_type = other RNA
ccctgtgaaaatcattttggca

SEQ ID NO: 129272 - RNA, 22 nt, synthetic construct
  source 1..22: mol_type = other RNA
ccctgtgcgtgaatctgttcct

SEQ ID NO: 129273 - RNA, 22 nt, synthetic construct
  source 1..22: mol_type = other RNA
ccctgtggctcatgcctgtaat

SEQ ID NO: 129274 - RNA, 22 nt, synthetic construct
  source 1..22: mol_type = other RNA
ccctgtgtatgtgtagtcagtg

SEQ ID NO: 129275 - RNA, 22 nt, synthetic construct
  source 1..22: mol_type = other RNA
ccctgttagtcccctagtggat

SEQ ID NO: 129276 - RNA, 22 nt, synthetic construct
  source 1..22: mol_type = other RNA
ccctgttggcctggacacacac

SEQ ID NO: 129277 - RNA, 22 nt, synthetic construct
  source 1..22: mol_type = other RNA
ccctgttgggctattaagtatt

SEQ ID NO: 129278 - RNA, 22 nt, synthetic construct
  source 1..22: mol_type = other RNA
ccctgtttcccttaatgttgac

SEQ ID NO: 129279 - RNA, 22 nt, synthetic construct
  source 1..22: mol_type = other RNA
ccctgttttgtagattaaaaaa

SEQ ID NO: 129280 - RNA, 22 nt, synthetic construct
  source 1..22: mol_type = other RNA
cccttaaaaggaactaatttca

SEQ ID NO: 129281 - RNA, 22 nt, synthetic construct
  source 1..22: mol_type = other RNA
cccttaaattccaaaagtgaat

SEQ ID NO: 129282 - RNA, 22 nt, synthetic construct
  source 1..22: mol_type = other RNA
cccttaacctttttcttttcac

SEQ ID NO: 129283 - RNA, 22 nt, synthetic construct
  source 1..22: mol_type = other RNA
cccttaacttcacctctacaca

SEQ ID NO: 129284 - RNA, 22 nt, synthetic construct
  source 1..22: mol_type = other RNA
cccttaatgttgacatcttgca

SEQ ID NO: 129285 - RNA, 22 nt, synthetic construct
  source 1..22: mol_type = other RNA
cccttaccttaaaccatataca

SEQ ID NO: 129286 - RNA, 22 nt, synthetic construct
  source 1..22: mol_type = other RNA
cccttacgcgtggatgtgtgca

SEQ ID NO: 129287 - RNA, 22 nt, synthetic construct
  source 1..22: mol_type = other RNA
cccttactaaattttgaggctt

SEQ ID NO: 129288 - RNA, 22 nt, synthetic construct
  source 1..22: mol_type = other RNA
cccttagctctcatgtcagaga

SEQ ID NO: 129289 - RNA, 22 nt, synthetic construct
  source 1..22: mol_type = other RNA
cccttataaaatgagggtaaaa

SEQ ID NO: 129290 - RNA, 22 nt, synthetic construct
  source 1..22: mol_type = other RNA
cccttatatgggatatctaaca

SEQ ID NO: 129291 - RNA, 22 nt, synthetic construct
  source 1..22: mol_type = other RNA
cccttatcaggaaagtgccagc

SEQ ID NO: 129292 - RNA, 22 nt, synthetic construct
  source 1..22: mol_type = other RNA
cccttatcctcttctgaagagg

SEQ ID NO: 129293 - RNA, 22 nt, synthetic construct
  source 1..22: mol_type = other RNA
cccttatgtccagcccccagtt

SEQ ID NO: 129294 - RNA, 22 nt, synthetic construct
  source 1..22: mol_type = other RNA
cccttatgtgtgtataacccgt

SEQ ID NO: 129295 - RNA, 22 nt, synthetic construct
  source 1..22: mol_type = other RNA
cccttatttaatgtgctgtcca

SEQ ID NO: 129296 - RNA, 22 nt, synthetic construct
  source 1..22: mol_type = other RNA
cccttcacaaagccctcaggac

SEQ ID NO: 129297 - RNA, 22 nt, synthetic construct
  source 1..22: mol_type = other RNA
cccttcagcctgtgtcagtgac

SEQ ID NO: 129298 - RNA, 22 nt, synthetic construct
  source 1..22: mol_type = other RNA
cccttcagtgtagtcagacaca

SEQ ID NO: 129299 - RNA, 22 nt, synthetic construct
  source 1..22: mol_type = other RNA
cccttcatcatttgtattattt

SEQ ID NO: 129300 - RNA, 22 nt, synthetic construct
  source 1..22: mol_type = other RNA
cccttccagcgtgtgcatgacc

SEQ ID NO: 129301 - RNA, 22 nt, synthetic construct
  source 1..22: mol_type = other RNA
cccttccccacctttcctgccc

SEQ ID NO: 129302 - RNA, 22 nt, synthetic construct
  source 1..22: mol_type = other RNA
cccttcctgttctttgttagtt

SEQ ID NO: 129303 - RNA, 22 nt, synthetic construct
  source 1..22: mol_type = other RNA
cccttccttgcttgtcttgaat

SEQ ID NO: 129304 - RNA, 22 nt, synthetic construct
  source 1..22: mol_type = other RNA
cccttctattccattgttctct

SEQ ID NO: 129305 - RNA, 22 nt, synthetic construct
  source 1..22: mol_type = other RNA
cccttctcgaagtggtgcttga

SEQ ID NO: 129306 - RNA, 22 nt, synthetic construct
  source 1..22: mol_type = other RNA
cccttctgctcggctctgtcac

SEQ ID NO: 129307 - RNA, 22 nt, synthetic construct
  source 1..22: mol_type = other RNA
cccttctgttaatagataggtc

SEQ ID NO: 129308 - RNA, 22 nt, synthetic construct
  source 1..22: mol_type = other RNA
cccttcttaaatgtgaattaga

SEQ ID NO: 129309 - RNA, 22 nt, synthetic construct
  source 1..22: mol_type = other RNA
cccttgaaaatttccagcattt

SEQ ID NO: 129310 - RNA, 22 nt, synthetic construct
  source 1..22: mol_type = other RNA
cccttgaaagatcatttagtaa

SEQ ID NO: 129311 - RNA, 22 nt, synthetic construct
  source 1..22: mol_type = other RNA
cccttgacgaagtcacattcta

SEQ ID NO: 129312 - RNA, 22 nt, synthetic construct
  source 1..22: mol_type = other RNA
cccttgagtatttttgagcttt

SEQ ID NO: 129313 - RNA, 22 nt, synthetic construct
  source 1..22: mol_type = other RNA
cccttgatgtcacaagccaggg

SEQ ID NO: 129314 - RNA, 22 nt, synthetic construct
  source 1..22: mol_type = other RNA
cccttgccaaggcttgctttgg

SEQ ID NO: 129315 - RNA, 22 nt, synthetic construct
  source 1..22: mol_type = other RNA
cccttgcctgacagcaaataaa

SEQ ID NO: 129316 - RNA, 22 nt, synthetic construct
  source 1..22: mol_type = other RNA
cccttgctgcttctacccacta

SEQ ID NO: 129317 - RNA, 22 nt, synthetic construct
  source 1..22: mol_type = other RNA
cccttggctagactaagaaaaa

SEQ ID NO: 129318 - RNA, 22 nt, synthetic construct
  source 1..22: mol_type = other RNA
cccttgggatgcagcaaaagca

SEQ ID NO: 129319 - RNA, 22 nt, synthetic construct
  source 1..22: mol_type = other RNA
cccttggtaaacagcagtctta

SEQ ID NO: 129320 - RNA, 22 nt, synthetic construct
  source 1..22: mol_type = other RNA
cccttgtaatcaagtatctccc

SEQ ID NO: 129321 - RNA, 22 nt, synthetic construct
  source 1..22: mol_type = other RNA
cccttgtgcacctcgggttcaa

SEQ ID NO: 129322 - RNA, 22 nt, synthetic construct
  source 1..22: mol_type = other RNA
cccttgttggacagctgggaga

SEQ ID NO: 129323 - RNA, 22 nt, synthetic construct
  source 1..22: mol_type = other RNA
ccctttaaaatgatagcattat

SEQ ID NO: 129324 - RNA, 22 nt, synthetic construct
  source 1..22: mol_type = other RNA
ccctttacccctgagaacttca

SEQ ID NO: 129325 - RNA, 22 nt, synthetic construct
  source 1..22: mol_type = other RNA
ccctttactcagattcaccaat

SEQ ID NO: 129326 - RNA, 22 nt, synthetic construct
  source 1..22: mol_type = other RNA
ccctttagtgttctgtgtttat

SEQ ID NO: 129327 - RNA, 22 nt, synthetic construct
  source 1..22: mol_type = other RNA
ccctttatcggataaggaagag

SEQ ID NO: 129328 - RNA, 22 nt, synthetic construct
  source 1..22: mol_type = other RNA
ccctttattcaaagatcatttc

SEQ ID NO: 129329 - RNA, 22 nt, synthetic construct
  source 1..22: mol_type = other RNA
ccctttcaagattgtttaattc

SEQ ID NO: 129330 - RNA, 22 nt, synthetic construct
  source 1..22: mol_type = other RNA
ccctttccaaattcaaagcaag

SEQ ID NO: 129331 - RNA, 22 nt, synthetic construct
  source 1..22: mol_type = other RNA
ccctttcgctaatctcaatcag

SEQ ID NO: 129332 - RNA, 22 nt, synthetic construct
  source 1..22: mol_type = other RNA
ccctttcttaggaagctatgga

SEQ ID NO: 129333 - RNA, 22 nt, synthetic construct
  source 1..22: mol_type = other RNA
ccctttcttgttagtaggaaaa

SEQ ID NO: 129334 - RNA, 22 nt, synthetic construct
  source 1..22: mol_type = other RNA
ccctttctttggttttgactca

SEQ ID NO: 129335 - RNA, 22 nt, synthetic construct
  source 1..22: mol_type = other RNA
ccctttgaagtatgtaattaca

SEQ ID NO: 129336 - RNA, 22 nt, synthetic construct
  source 1..22: mol_type = other RNA
ccctttgagcagagtcctgagg

SEQ ID NO: 129337 - RNA, 22 nt, synthetic construct
  source 1..22: mol_type = other RNA
ccctttgttagtgccttcagaa

SEQ ID NO: 129338 - RNA, 22 nt, synthetic construct
  source 1..22: mol_type = other RNA
ccctttgttatctgaacgtctt

SEQ ID NO: 129339 - RNA, 22 nt, synthetic construct
  source 1..22: mol_type = other RNA
cccttttggatgcagatttctt

SEQ ID NO: 129340 - RNA, 22 nt, synthetic construct
  source 1..22: mol_type = other RNA
cccttttgtagctaatatcttt

SEQ ID NO: 129341 - RNA, 22 nt, synthetic construct
  source 1..22: mol_type = other RNA
ccctttttaggtagggataaga

SEQ ID NO: 129342 - RNA, 22 nt, synthetic construct
  source 1..22: mol_type = other RNA
ccgaaagaactgaaagcaggga

SEQ ID NO: 129343 - RNA, 22 nt, synthetic construct
  source 1..22: mol_type = other RNA
ccgaaatgcacttagcgctgat

SEQ ID NO: 129344 - RNA, 22 nt, synthetic construct
  source 1..22: mol_type = other RNA
ccgaagaggacgatttttccaa

SEQ ID NO: 129345 - RNA, 22 nt, synthetic construct
  source 1..22: mol_type = other RNA
ccgaatcctttgcttcccactt

SEQ ID NO: 129346 - RNA, 22 nt, synthetic construct
  source 1..22: mol_type = other RNA
ccgaatgtggtggtatgcactg

SEQ ID NO: 129347 - RNA, 22 nt, synthetic construct
  source 1..22: mol_type = other RNA
ccgacagcagataagatccaag

SEQ ID NO: 129348 - RNA, 22 nt, synthetic construct
  source 1..22: mol_type = other RNA
ccgacccactagtgaagtccca

SEQ ID NO: 129349 - RNA, 22 nt, synthetic construct
  source 1..22: mol_type = other RNA
ccgacccccctacctccctccc

SEQ ID NO: 129350 - RNA, 22 nt, synthetic construct
  source 1..22: mol_type = other RNA
ccgacctccagcgctaagcact

SEQ ID NO: 129351 - RNA, 22 nt, synthetic construct
  source 1..22: mol_type = other RNA
ccgacctgtagattgggctttt

SEQ ID NO: 129352 - RNA, 22 nt, synthetic construct
  source 1..22: mol_type = other RNA
ccgacgcctttcatttggcctc

SEQ ID NO: 129353 - RNA, 22 nt, synthetic construct
  source 1..22: mol_type = other RNA
ccgacggctcaggcctgttgtg

SEQ ID NO: 129354 - RNA, 22 nt, synthetic construct
  source 1..22: mol_type = other RNA
ccgactgaaaggaaatgagtgt

SEQ ID NO: 129355 - RNA, 22 nt, synthetic construct
  source 1..22: mol_type = other RNA
ccgagaaatcggaactcctgta

SEQ ID NO: 129356 - RNA, 22 nt, synthetic construct
  source 1..22: mol_type = other RNA
ccgagacaagttctcctgtgtg

SEQ ID NO: 129357 - RNA, 22 nt, synthetic construct
  source 1..22: mol_type = other RNA
ccgagatacttaagtttttaac

SEQ ID NO: 129358 - RNA, 22 nt, synthetic construct
  source 1..22: mol_type = other RNA
ccgagatcacgccactgcattc

SEQ ID NO: 129359 - RNA, 22 nt, synthetic construct
  source 1..22: mol_type = other RNA
ccgagcagaagggaaaggatga

SEQ ID NO: 129360 - RNA, 22 nt, synthetic construct
  source 1..22: mol_type = other RNA
ccgaggaaacccgctctgggtg

SEQ ID NO: 129361 - RNA, 22 nt, synthetic construct
  source 1..22: mol_type = other RNA
ccgaggcagagagagtaactgg

SEQ ID NO: 129362 - RNA, 22 nt, synthetic construct
  source 1..22: mol_type = other RNA
ccgaggcaggtggatcaggaga

SEQ ID NO: 129363 - RNA, 22 nt, synthetic construct
  source 1..22: mol_type = other RNA
ccgaggccagtccctagtgtct

SEQ ID NO: 129364 - RNA, 22 nt, synthetic construct
  source 1..22: mol_type = other RNA
ccgagggagacggcgagcttga

SEQ ID NO: 129365 - RNA, 22 nt, synthetic construct
  source 1..22: mol_type = other RNA
ccgagggttgaacatcacccag

SEQ ID NO: 129366 - RNA, 22 nt, synthetic construct
  source 1..22: mol_type = other RNA
ccgaggtgcacaagggaagagg

SEQ ID NO: 129367 - RNA, 22 nt, synthetic construct
  source 1..22: mol_type = other RNA
ccgagtaatgggatggctgggc

SEQ ID NO: 129368 - RNA, 22 nt, synthetic construct
  source 1..22: mol_type = other RNA
ccgagtagttgtaactacagac

SEQ ID NO: 129369 - RNA, 22 nt, synthetic construct
  source 1..22: mol_type = other RNA
ccgagtatctaggagtacagtg

SEQ ID NO: 129370 - RNA, 22 nt, synthetic construct
  source 1..22: mol_type = other RNA
ccgataaagggtctggtatcta

SEQ ID NO: 129371 - RNA, 22 nt, synthetic construct
  source 1..22: mol_type = other RNA
ccgatgataccttcttgagagt

SEQ ID NO: 129372 - RNA, 22 nt, synthetic construct
  source 1..22: mol_type = other RNA
ccgatgccatgtgttttgtttt

SEQ ID NO: 129373 - RNA, 22 nt, synthetic construct
  source 1..22: mol_type = other RNA
ccgatgcctgtgcttttctcgt

SEQ ID NO: 129374 - RNA, 22 nt, synthetic construct
  source 1..22: mol_type = other RNA
ccgatttcagttaacttattgg

SEQ ID NO: 129375 - RNA, 22 nt, synthetic construct
  source 1..22: mol_type = other RNA
ccgatttctcggccgggcgcgg

SEQ ID NO: 129376 - RNA, 22 nt, synthetic construct
  source 1..22: mol_type = other RNA
ccgattttacttactagttgtg

SEQ ID NO: 129377 - RNA, 22 nt, synthetic construct
  source 1..22: mol_type = other RNA
ccgcaaataatcattcttctaa

SEQ ID NO: 129378 - RNA, 22 nt, synthetic construct
  source 1..22: mol_type = other RNA
ccgcaacatctgcctcccgggt

SEQ ID NO: 129379 - RNA, 22 nt, synthetic construct
  source 1..22: mol_type = other RNA
ccgcaagagttccaactgtata

SEQ ID NO: 129380 - RNA, 22 nt, synthetic construct
  source 1..22: mol_type = other RNA
ccgcacctggccgggatttact

SEQ ID NO: 129381 - RNA, 22 nt, synthetic construct
  source 1..22: mol_type = other RNA
ccgcaccttgattttgataaaa

SEQ ID NO: 129382 - RNA, 22 nt, synthetic construct
  source 1..22: mol_type = other RNA
ccgcactcagcctgttgggagg

SEQ ID NO: 129383 - RNA, 22 nt, synthetic construct
  source 1..22: mol_type = other RNA
ccgcagagcaagcacgttagca

SEQ ID NO: 129384 - RNA, 22 nt, synthetic construct
  source 1..22: mol_type = other RNA
ccgcagaggccaaatgaaaggc

SEQ ID NO: 129385 - RNA, 22 nt, synthetic construct
  source 1..22: mol_type = other RNA
ccgcagtgagccatggctgcgc

SEQ ID NO: 129386 - RNA, 22 nt, synthetic construct
  source 1..22: mol_type = other RNA
ccgcatactgtgcagtggatga

SEQ ID NO: 129387 - RNA, 22 nt, synthetic construct
  source 1..22: mol_type = other RNA
ccgcccctggagaaagcccagc

SEQ ID NO: 129388 - RNA, 22 nt, synthetic construct
  source 1..22: mol_type = other RNA
ccgcccgtccctgcttggcgca

SEQ ID NO: 129389 - RNA, 22 nt, synthetic construct
  source 1..22: mol_type = other RNA
ccgccctcccccgggacaatgc

SEQ ID NO: 129390 - RNA, 22 nt, synthetic construct
  source 1..22: mol_type = other RNA
ccgccgcagaggccaaatgaaa

SEQ ID NO: 129391 - RNA, 22 nt, synthetic construct
  source 1..22: mol_type = other RNA
ccgcctccctggttcaagctat

SEQ ID NO: 129392 - RNA, 22 nt, synthetic construct
  source 1..22: mol_type = other RNA
ccgcctcctggtgggttcatgc

SEQ ID NO: 129393 - RNA, 22 nt, synthetic construct
  source 1..22: mol_type = other RNA
ccgccttcctaccctgccttcc

SEQ ID NO: 129394 - RNA, 22 nt, synthetic construct
  source 1..22: mol_type = other RNA
ccgcgaaggcgtgtaaactgtt

SEQ ID NO: 129395 - RNA, 22 nt, synthetic construct
  source 1..22: mol_type = other RNA
ccgcgcccggccaaatatccat

SEQ ID NO: 129396 - RNA, 22 nt, synthetic construct
  source 1..22: mol_type = other RNA
ccgcgcccggcccagattcctt

SEQ ID NO: 129397 - RNA, 22 nt, synthetic construct
  source 1..22: mol_type = other RNA
ccgcgcccggccgagaaatcgg

SEQ ID NO: 129398 - RNA, 22 nt, synthetic construct
  source 1..22: mol_type = other RNA
ccgcgcctggtgattaaagtta

SEQ ID NO: 129399 - RNA, 22 nt, synthetic construct
  source 1..22: mol_type = other RNA
ccgcggctgggctttctccagg

SEQ ID NO: 129400 - RNA, 22 nt, synthetic construct
  source 1..22: mol_type = other RNA
ccgcgtccacctggcaacaaag

SEQ ID NO: 129401 - RNA, 22 nt, synthetic construct
  source 1..22: mol_type = other RNA
ccgcgtttattagaactagaac

SEQ ID NO: 129402 - RNA, 22 nt, synthetic construct
  source 1..22: mol_type = other RNA
ccgcgttttttgtccaccagac

SEQ ID NO: 129403 - RNA, 22 nt, synthetic construct
  source 1..22: mol_type = other RNA
ccgctaaacattttattaggtg

SEQ ID NO: 129404 - RNA, 22 nt, synthetic construct
  source 1..22: mol_type = other RNA
ccgctacacaagtattaacgaa

SEQ ID NO: 129405 - RNA, 22 nt, synthetic construct
  source 1..22: mol_type = other RNA
ccgctccacgcccattaggata

SEQ ID NO: 129406 - RNA, 22 nt, synthetic construct
  source 1..22: mol_type = other RNA
ccgctctgggtgcgttgaccgc

SEQ ID NO: 129407 - RNA, 22 nt, synthetic construct
  source 1..22: mol_type = other RNA
ccgctctggttttaaagaaatt

SEQ ID NO: 129408 - RNA, 22 nt, synthetic construct
  source 1..22: mol_type = other RNA
ccgctcttgaccttgtgcatgt

SEQ ID NO: 129409 - RNA, 22 nt, synthetic construct
  source 1..22: mol_type = other RNA
ccgctgcattccagcctggtga

SEQ ID NO: 129410 - RNA, 22 nt, synthetic construct
  source 1..22: mol_type = other RNA
ccgctgcgagaaaggcgaagcg

SEQ ID NO: 129411 - RNA, 22 nt, synthetic construct
  source 1..22: mol_type = other RNA
ccgctgctccctctgccgcctg

SEQ ID NO: 129412 - RNA, 22 nt, synthetic construct
  source 1..22: mol_type = other RNA
ccgctggtgaaaaaatggtgca

SEQ ID NO: 129413 - RNA, 22 nt, synthetic construct
  source 1..22: mol_type = other RNA
ccgctgtccatttccagtactt

SEQ ID NO: 129414 - RNA, 22 nt, synthetic construct
  source 1..22: mol_type = other RNA
ccgcttcagttggtgaagagag

SEQ ID NO: 129415 - RNA, 22 nt, synthetic construct
  source 1..22: mol_type = other RNA
ccgcttcgcctttctcgcagcg

SEQ ID NO: 129416 - RNA, 22 nt, synthetic construct
  source 1..22: mol_type = other RNA
ccgctttcgtgagggtttcagt

SEQ ID NO: 129417 - RNA, 22 nt, synthetic construct
  source 1..22: mol_type = other RNA
ccggaaaatgcttaacaagaat

SEQ ID NO: 129418 - RNA, 22 nt, synthetic construct
  source 1..22: mol_type = other RNA
ccggaacaggaaaaggacatta

SEQ ID NO: 129419 - RNA, 22 nt, synthetic construct
  source 1..22: mol_type = other RNA
ccggaacttgagtttgttctgt

SEQ ID NO: 129420 - RNA, 22 nt, synthetic construct
  source 1..22: mol_type = other RNA
ccggaagctgggctagagccag

SEQ ID NO: 129421 - RNA, 22 nt, synthetic construct
  source 1..22: mol_type = other RNA
ccggagaggtgaactattagag

SEQ ID NO: 129422 - RNA, 22 nt, synthetic construct
  source 1..22: mol_type = other RNA
ccggagcgggcagccttggagg

SEQ ID NO: 129423 - RNA, 22 nt, synthetic construct
  source 1..22: mol_type = other RNA
ccggaggattgcttgagtgcag

SEQ ID NO: 129424 - RNA, 22 nt, synthetic construct
  source 1..22: mol_type = other RNA
ccggagtagctgggattacaca

SEQ ID NO: 129425 - RNA, 22 nt, synthetic construct
  source 1..22: mol_type = other RNA
ccggagtccgcggctgggcttt

SEQ ID NO: 129426 - RNA, 22 nt, synthetic construct
  source 1..22: mol_type = other RNA
ccggatgattctaatgtgcaag

SEQ ID NO: 129427 - RNA, 22 nt, synthetic construct
  source 1..22: mol_type = other RNA
ccggattcctttcaaagagacc

SEQ ID NO: 129428 - RNA, 22 nt, synthetic construct
  source 1..22: mol_type = other RNA
ccggattggaaaactaggtatt

SEQ ID NO: 129429 - RNA, 22 nt, synthetic construct
  source 1..22: mol_type = other RNA
ccggcatatgtcactgtaagaa

SEQ ID NO: 129430 - RNA, 22 nt, synthetic construct
  source 1..22: mol_type = other RNA
ccggcatccgccaccacgcctg

SEQ ID NO: 129431 - RNA, 22 nt, synthetic construct
  source 1..22: mol_type = other RNA
ccggcatgcctctcccaccatc

SEQ ID NO: 129432 - RNA, 22 nt, synthetic construct
  source 1..22: mol_type = other RNA
ccggccaaatatccatgtttta

SEQ ID NO: 129433 - RNA, 22 nt, synthetic construct
  source 1..22: mol_type = other RNA
ccggccagacattttatttata

SEQ ID NO: 129434 - RNA, 22 nt, synthetic construct
  source 1..22: mol_type = other RNA
ccggcccagattccttttttat

SEQ ID NO: 129435 - RNA, 22 nt, synthetic construct
  source 1..22: mol_type = other RNA
ccggcccatgacatgtgtttta

SEQ ID NO: 129436 - RNA, 22 nt, synthetic construct
  source 1..22: mol_type = other RNA
ccggcccgttatttttatcata

SEQ ID NO: 129437 - RNA, 22 nt, synthetic construct
  source 1..22: mol_type = other RNA
ccggccctgccgcttcgccttt

SEQ ID NO: 129438 - RNA, 22 nt, synthetic construct
  source 1..22: mol_type = other RNA
ccggccgagaaatcggaactcc

SEQ ID NO: 129439 - RNA, 22 nt, synthetic construct
  source 1..22: mol_type = other RNA
ccggccgatgcctgtgcttttc

SEQ ID NO: 129440 - RNA, 22 nt, synthetic construct
  source 1..22: mol_type = other RNA
ccggcctcagcctcccgagtag

SEQ ID NO: 129441 - RNA, 22 nt, synthetic construct
  source 1..22: mol_type = other RNA
ccggctaagatgaggtctcagc

SEQ ID NO: 129442 - RNA, 22 nt, synthetic construct
  source 1..22: mol_type = other RNA
ccggctaattaaacaaacattt

SEQ ID NO: 129443 - RNA, 22 nt, synthetic construct
  source 1..22: mol_type = other RNA
ccggctgttaggtattattttc

SEQ ID NO: 129444 - RNA, 22 nt, synthetic construct
  source 1..22: mol_type = other RNA
ccggctttatgagacacacgag

SEQ ID NO: 129445 - RNA, 22 nt, synthetic construct
  source 1..22: mol_type = other RNA
ccgggaacatgacatgtatttt

SEQ ID NO: 129446 - RNA, 22 nt, synthetic construct
  source 1..22: mol_type = other RNA
ccgggacaagagtctgcagacc

SEQ ID NO: 129447 - RNA, 22 nt, synthetic construct
  source 1..22: mol_type = other RNA
ccgggacaatgccagggcgctc

SEQ ID NO: 129448 - RNA, 22 nt, synthetic construct
  source 1..22: mol_type = other RNA
ccgggacttggaagtgaagtca

SEQ ID NO: 129449 - RNA, 22 nt, synthetic construct
  source 1..22: mol_type = other RNA
ccgggagacaaaggttgcagtg

SEQ ID NO: 129450 - RNA, 22 nt, synthetic construct
  source 1..22: mol_type = other RNA
ccgggaggagccaagtaaaagc

SEQ ID NO: 129451 - RNA, 22 nt, synthetic construct
  source 1..22: mol_type = other RNA
ccgggaggcagatgttgcggtg

SEQ ID NO: 129452 - RNA, 22 nt, synthetic construct
  source 1..22: mol_type = other RNA
ccgggatcctgtccaggcgcct

SEQ ID NO: 129453 - RNA, 22 nt, synthetic construct
  source 1..22: mol_type = other RNA
ccgggatttacttctatatgta

SEQ ID NO: 129454 - RNA, 22 nt, synthetic construct
  source 1..22: mol_type = other RNA
ccgggcctggttagggagactt

SEQ ID NO: 129455 - RNA, 22 nt, synthetic construct
  source 1..22: mol_type = other RNA
ccgggcttggtatgcatcttga

SEQ ID NO: 129456 - RNA, 22 nt, synthetic construct
  source 1..22: mol_type = other RNA
ccggggactgcaacagatctga

SEQ ID NO: 129457 - RNA, 22 nt, synthetic construct
  source 1..22: mol_type = other RNA
ccggggagcttttgaaactgag

SEQ ID NO: 129458 - RNA, 22 nt, synthetic construct
  source 1..22: mol_type = other RNA
ccggggcagagaactgactgaa

SEQ ID NO: 129459 - RNA, 22 nt, synthetic construct
  source 1..22: mol_type = other RNA
ccggggctcgcagcatccctgc

SEQ ID NO: 129460 - RNA, 22 nt, synthetic construct
  source 1..22: mol_type = other RNA
ccgggtaaaaagcctgcttcag

SEQ ID NO: 129461 - RNA, 22 nt, synthetic construct
  source 1..22: mol_type = other RNA
ccgggtccaggcagttctcctg

SEQ ID NO: 129462 - RNA, 22 nt, synthetic construct
  source 1..22: mol_type = other RNA
ccgggtcgcggacgcgcatttt

SEQ ID NO: 129463 - RNA, 22 nt, synthetic construct
  source 1..22: mol_type = other RNA
ccgggtgtagtggtgtgtgact

SEQ ID NO: 129464 - RNA, 22 nt, synthetic construct
  source 1..22: mol_type = other RNA
ccgggtttaagcgattctcctt

SEQ ID NO: 129465 - RNA, 22 nt, synthetic construct
  source 1..22: mol_type = other RNA
ccggtaatcacagctactcagg

SEQ ID NO: 129466 - RNA, 22 nt, synthetic construct
  source 1..22: mol_type = other RNA
ccggtcgttggatttatctttc

SEQ ID NO: 129467 - RNA, 22 nt, synthetic construct
  source 1..22: mol_type = other RNA
ccggtctcagtttttaatttaa

SEQ ID NO: 129468 - RNA, 22 nt, synthetic construct
  source 1..22: mol_type = other RNA
ccggtctttcctgatcagcacc

SEQ ID NO: 129469 - RNA, 22 nt, synthetic construct
  source 1..22: mol_type = other RNA
ccggttctcaggagcctagtca

SEQ ID NO: 129470 - RNA, 22 nt, synthetic construct
  source 1..22: mol_type = other RNA
ccggttgtatagcagtaaaatg

SEQ ID NO: 129471 - RNA, 22 nt, synthetic construct
  source 1..22: mol_type = other RNA
ccgtaacttcttttcttaaaac

SEQ ID NO: 129472 - RNA, 22 nt, synthetic construct
  source 1..22: mol_type = other RNA
ccgtacgctccctcgcgcggca

SEQ ID NO: 129473 - RNA, 22 nt, synthetic construct
  source 1..22: mol_type = other RNA
ccgtagaccgaggaaacccgct

SEQ ID NO: 129474 - RNA, 22 nt, synthetic construct
  source 1..22: mol_type = other RNA
ccgtagctgtcgctctcctgtg

SEQ ID NO: 129475 - RNA, 22 nt, synthetic construct
  source 1..22: mol_type = other RNA
ccgtatccagtggttttttgtt

SEQ ID NO: 129476 - RNA, 22 nt, synthetic construct
  source 1..22: mol_type = other RNA
ccgtccaatttctttggctgtt

SEQ ID NO: 129477 - RNA, 22 nt, synthetic construct
  source 1..22: mol_type = other RNA
ccgtccctattttctacaggta

SEQ ID NO: 129478 - RNA, 22 nt, synthetic construct
  source 1..22: mol_type = other RNA
ccgtccctgcttggcgcagtgc

SEQ ID NO: 129479 - RNA, 22 nt, synthetic construct
  source 1..22: mol_type = other RNA
ccgtcggtatgttaataaccct

SEQ ID NO: 129480 - RNA, 22 nt, synthetic construct
  source 1..22: mol_type = other RNA
ccgtctagccacttcctattag

SEQ ID NO: 129481 - RNA, 22 nt, synthetic construct
  source 1..22: mol_type = other RNA
ccgtctcaaaaaattataatag

SEQ ID NO: 129482 - RNA, 22 nt, synthetic construct
  source 1..22: mol_type = other RNA
ccgtctcaagattgtgtgattt

SEQ ID NO: 129483 - RNA, 22 nt, synthetic construct
  source 1..22: mol_type = other RNA
ccgtctccctcggccacagcag

SEQ ID NO: 129484 - RNA, 22 nt, synthetic construct
  source 1..22: mol_type = other RNA
ccgtctctgcaaaaaatgtttg

SEQ ID NO: 129485 - RNA, 22 nt, synthetic construct
  source 1..22: mol_type = other RNA
ccgtgacagaacaaataacacc

SEQ ID NO: 129486 - RNA, 22 nt, synthetic construct
  source 1..22: mol_type = other RNA
ccgtgcaactagagaaagcatc

SEQ ID NO: 129487 - RNA, 22 nt, synthetic construct
  source 1..22: mol_type = other RNA
ccgtgcatgcctctgttacagc

SEQ ID NO: 129488 - RNA, 22 nt, synthetic construct
  source 1..22: mol_type = other RNA
ccgtgcccggccagacatttta

SEQ ID NO: 129489 - RNA, 22 nt, synthetic construct
  source 1..22: mol_type = other RNA
ccgtgccgggcttggtatgcat

SEQ ID NO: 129490 - RNA, 22 nt, synthetic construct
  source 1..22: mol_type = other RNA
ccgtggaaatacttgaacattc

SEQ ID NO: 129491 - RNA, 22 nt, synthetic construct
  source 1..22: mol_type = other RNA
ccgtggaaggccttctcctcca

SEQ ID NO: 129492 - RNA, 22 nt, synthetic construct
  source 1..22: mol_type = other RNA
ccgtgtgacaaaaagtaggggt

SEQ ID NO: 129493 - RNA, 22 nt, synthetic construct
  source 1..22: mol_type = other RNA
ccgtgtgtttagaataatacac

SEQ ID NO: 129494 - RNA, 22 nt, synthetic construct
  source 1..22: mol_type = other RNA
ccgtgtgttttgttgttgttgt

SEQ ID NO: 129495 - RNA, 22 nt, synthetic construct
  source 1..22: mol_type = other RNA
ccgttccatcagagaggctttt

SEQ ID NO: 129496 - RNA, 22 nt, synthetic construct
  source 1..22: mol_type = other RNA
ccgttgaagtctttggcccatt

SEQ ID NO: 129497 - RNA, 22 nt, synthetic construct
  source 1..22: mol_type = other RNA
ccgttgctgcatagtactccat

SEQ ID NO: 129498 - RNA, 22 nt, synthetic construct
  source 1..22: mol_type = other RNA
ccgttttgcaagatgcataagt

SEQ ID NO: 129499 - RNA, 22 nt, synthetic construct
  source 1..22: mol_type = other RNA
ccgtttttcaggttcaagcgac

SEQ ID NO: 129500 - RNA, 22 nt, synthetic construct
  source 1..22: mol_type = other RNA
ccgttttttccttcatttaaca

SEQ ID NO: 129501 - RNA, 22 nt, synthetic construct
  source 1..22: mol_type = other RNA
cctaaaaagggagtcagtagag

SEQ ID NO: 129502 - RNA, 22 nt, synthetic construct
  source 1..22: mol_type = other RNA
cctaaaacactggaagtaattg

SEQ ID NO: 129503 - RNA, 22 nt, synthetic construct
  source 1..22: mol_type = other RNA
cctaaaacatggtccacagagg

SEQ ID NO: 129504 - RNA, 22 nt, synthetic construct
  source 1..22: mol_type = other RNA
cctaaaactccccatgcaggag

SEQ ID NO: 129505 - RNA, 22 nt, synthetic construct
  source 1..22: mol_type = other RNA
cctaaaaggttgcttaattgag

SEQ ID NO: 129506 - RNA, 22 nt, synthetic construct
  source 1..22: mol_type = other RNA
cctaaaataggcctaggtgtga

SEQ ID NO: 129507 - RNA, 22 nt, synthetic construct
  source 1..22: mol_type = other RNA
cctaaaatcttattccccaggg

SEQ ID NO: 129508 - RNA, 22 nt, synthetic construct
  source 1..22: mol_type = other RNA
cctaaaattccttcctttgatg

SEQ ID NO: 129509 - RNA, 22 nt, synthetic construct
  source 1..22: mol_type = other RNA
cctaaacactgtagttcagttt

SEQ ID NO: 129510 - RNA, 22 nt, synthetic construct
  source 1..22: mol_type = other RNA
cctaaacacttagcatgttgct

SEQ ID NO: 129511 - RNA, 22 nt, synthetic construct
  source 1..22: mol_type = other RNA
cctaaaccattttcaatcttgg

SEQ ID NO: 129512 - RNA, 22 nt, synthetic construct
  source 1..22: mol_type = other RNA
cctaaacctgctacgaatgaac

SEQ ID NO: 129513 - RNA, 22 nt, synthetic construct
  source 1..22: mol_type = other RNA
cctaaacctgtgatttccagtg

SEQ ID NO: 129514 - RNA, 22 nt, synthetic construct
  source 1..22: mol_type = other RNA
cctaaagagaatcttaaaatac

SEQ ID NO: 129515 - RNA, 22 nt, synthetic construct
  source 1..22: mol_type = other RNA
cctaaagagagtgacagctgag

SEQ ID NO: 129516 - RNA, 22 nt, synthetic construct
  source 1..22: mol_type = other RNA
cctaaagatatgtgtaggaagg

SEQ ID NO: 129517 - RNA, 22 nt, synthetic construct
  source 1..22: mol_type = other RNA
cctaaagtccacagatcttttt

SEQ ID NO: 129518 - RNA, 22 nt, synthetic construct
  source 1..22: mol_type = other RNA
cctaaagttgaggttgaagacc

SEQ ID NO: 129519 - RNA, 22 nt, synthetic construct
  source 1..22: mol_type = other RNA
cctaaagttttaagaaaagaag

SEQ ID NO: 129520 - RNA, 22 nt, synthetic construct
  source 1..22: mol_type = other RNA
cctaaataaaacacatgtcatg

SEQ ID NO: 129521 - RNA, 22 nt, synthetic construct
  source 1..22: mol_type = other RNA
cctaaatacacatgttgagtct

SEQ ID NO: 129522 - RNA, 22 nt, synthetic construct
  source 1..22: mol_type = other RNA
cctaaatcaggatgtctttggg

SEQ ID NO: 129523 - RNA, 22 nt, synthetic construct
  source 1..22: mol_type = other RNA
cctaaatgtccatcgagagatg

SEQ ID NO: 129524 - RNA, 22 nt, synthetic construct
  source 1..22: mol_type = other RNA
cctaacaatgattatttcgaat

SEQ ID NO: 129525 - RNA, 22 nt, synthetic construct
  source 1..22: mol_type = other RNA
cctaacaccagtaagattctgt

SEQ ID NO: 129526 - RNA, 22 nt, synthetic construct
  source 1..22: mol_type = other RNA
cctaacagccggcatatgtcac

SEQ ID NO: 129527 - RNA, 22 nt, synthetic construct
  source 1..22: mol_type = other RNA
cctaacagtctcgtgaatttgg

SEQ ID NO: 129528 - RNA, 22 nt, synthetic construct
  source 1..22: mol_type = other RNA
cctaacatgtcttggtgtgctc

SEQ ID NO: 129529 - RNA, 22 nt, synthetic construct
  source 1..22: mol_type = other RNA
cctaaccactgttatctgggaa

SEQ ID NO: 129530 - RNA, 22 nt, synthetic construct
  source 1..22: mol_type = other RNA
cctaaccaggcccggggcagag

SEQ ID NO: 129531 - RNA, 22 nt, synthetic construct
  source 1..22: mol_type = other RNA
cctaaccccagagattgtcgtt

SEQ ID NO: 129532 - RNA, 22 nt, synthetic construct
  source 1..22: mol_type = other RNA
cctaactactaataaatgcata

SEQ ID NO: 129533 - RNA, 22 nt, synthetic construct
  source 1..22: mol_type = other RNA
cctaactcaagagttacttctg

SEQ ID NO: 129534 - RNA, 22 nt, synthetic construct
  source 1..22: mol_type = other RNA
cctaactggtctcctttctata

SEQ ID NO: 129535 - RNA, 22 nt, synthetic construct
  source 1..22: mol_type = other RNA
cctaagaaagggtgtgtgaatg

SEQ ID NO: 129536 - RNA, 22 nt, synthetic construct
  source 1..22: mol_type = other RNA
cctaagaaaggtctagtgtgca

SEQ ID NO: 129537 - RNA, 22 nt, synthetic construct
  source 1..22: mol_type = other RNA
cctaagatggaaagtggactat

SEQ ID NO: 129538 - RNA, 22 nt, synthetic construct
  source 1..22: mol_type = other RNA
cctaagcaaatgtaatgaaaat

SEQ ID NO: 129539 - RNA, 22 nt, synthetic construct
  source 1..22: mol_type = other RNA
cctaagcaagttacatgcttag

SEQ ID NO: 129540 - RNA, 22 nt, synthetic construct
  source 1..22: mol_type = other RNA
cctaagcatcgtgaagtcttta

SEQ ID NO: 129541 - RNA, 22 nt, synthetic construct
  source 1..22: mol_type = other RNA
cctaagcatgagatactacgcc

SEQ ID NO: 129542 - RNA, 22 nt, synthetic construct
  source 1..22: mol_type = other RNA
cctaagccatctaattcacatt

SEQ ID NO: 129543 - RNA, 22 nt, synthetic construct
  source 1..22: mol_type = other RNA
cctaagcttaagagctaagact

SEQ ID NO: 129544 - RNA, 22 nt, synthetic construct
  source 1..22: mol_type = other RNA
cctaagcttgggtaggaagctg

SEQ ID NO: 129545 - RNA, 22 nt, synthetic construct
  source 1..22: mol_type = other RNA
cctaagtaatgctggccagtga

SEQ ID NO: 129546 - RNA, 22 nt, synthetic construct
  source 1..22: mol_type = other RNA
cctaagtctcaggatacaaaat

SEQ ID NO: 129547 - RNA, 22 nt, synthetic construct
  source 1..22: mol_type = other RNA
cctaagtcttcttctaagctaa

SEQ ID NO: 129548 - RNA, 22 nt, synthetic construct
  source 1..22: mol_type = other RNA
cctaagttttgggggaagagag

SEQ ID NO: 129549 - RNA, 22 nt, synthetic construct
  source 1..22: mol_type = other RNA
cctaataaaatgtttagcggaa

SEQ ID NO: 129550 - RNA, 22 nt, synthetic construct
  source 1..22: mol_type = other RNA
cctaatacagtaaagccccatt

SEQ ID NO: 129551 - RNA, 22 nt, synthetic construct
  source 1..22: mol_type = other RNA
cctaatctaacatgttacaaat

SEQ ID NO: 129552 - RNA, 22 nt, synthetic construct
  source 1..22: mol_type = other RNA
cctaatctctaggcttaaaatt

SEQ ID NO: 129553 - RNA, 22 nt, synthetic construct
  source 1..22: mol_type = other RNA
cctaatgggcgtggagcggtgt

SEQ ID NO: 129554 - RNA, 22 nt, synthetic construct
  source 1..22: mol_type = other RNA
cctaatgtgtaagaaatgccac

SEQ ID NO: 129555 - RNA, 22 nt, synthetic construct
  source 1..22: mol_type = other RNA
cctaattgtacacctcaaacta

SEQ ID NO: 129556 - RNA, 22 nt, synthetic construct
  source 1..22: mol_type = other RNA
cctacacatatctttaggtgtt

SEQ ID NO: 129557 - RNA, 22 nt, synthetic construct
  source 1..22: mol_type = other RNA
cctacacccagttcaccagttt

SEQ ID NO: 129558 - RNA, 22 nt, synthetic construct
  source 1..22: mol_type = other RNA
cctacacccatccacccacttg

SEQ ID NO: 129559 - RNA, 22 nt, synthetic construct
  source 1..22: mol_type = other RNA
cctacagactcaataaccacat

SEQ ID NO: 129560 - RNA, 22 nt, synthetic construct
  source 1..22: mol_type = other RNA
cctacagtggttccatttgttt

SEQ ID NO: 129561 - RNA, 22 nt, synthetic construct
  source 1..22: mol_type = other RNA
cctacatactgcactctcaaaa

SEQ ID NO: 129562 - RNA, 22 nt, synthetic construct
  source 1..22: mol_type = other RNA
cctacatagtccactttccatc

SEQ ID NO: 129563 - RNA, 22 nt, synthetic construct
  source 1..22: mol_type = other RNA
cctacatatggcaattccataa

SEQ ID NO: 129564 - RNA, 22 nt, synthetic construct
  source 1..22: mol_type = other RNA
cctacattaatctcatccacaa

SEQ ID NO: 129565 - RNA, 22 nt, synthetic construct
  source 1..22: mol_type = other RNA
cctacattgccttcaagttgct

SEQ ID NO: 129566 - RNA, 22 nt, synthetic construct
  source 1..22: mol_type = other RNA
cctaccacccgtccaatttctt

SEQ ID NO: 129567 - RNA, 22 nt, synthetic construct
  source 1..22: mol_type = other RNA
cctacccaagcttaggtcagat

SEQ ID NO: 129568 - RNA, 22 nt, synthetic construct
  source 1..22: mol_type = other RNA
cctaccctgaggatataacgat

SEQ ID NO: 129569 - RNA, 22 nt, synthetic construct
  source 1..22: mol_type = other RNA
cctaccctgccttccttgggca

SEQ ID NO: 129570 - RNA, 22 nt, synthetic construct
  source 1..22: mol_type = other RNA
cctacctaaaaagggagtcagt

SEQ ID NO: 129571 - RNA, 22 nt, synthetic construct
  source 1..22: mol_type = other RNA
cctacctagggtgtaaaaggct

SEQ ID NO: 129572 - RNA, 22 nt, synthetic construct
  source 1..22: mol_type = other RNA
cctacctcccttcacaaagccc

SEQ ID NO: 129573 - RNA, 22 nt, synthetic construct
  source 1..22: mol_type = other RNA
cctacctggcagtctaggaaaa

SEQ ID NO: 129574 - RNA, 22 nt, synthetic construct
  source 1..22: mol_type = other RNA
cctaccttccaaagtatgcata

SEQ ID NO: 129575 - RNA, 22 nt, synthetic construct
  source 1..22: mol_type = other RNA
cctactaaaagttgacaaatta

SEQ ID NO: 129576 - RNA, 22 nt, synthetic construct
  source 1..22: mol_type = other RNA
cctactaacaagaaagggtagc

SEQ ID NO: 129577 - RNA, 22 nt, synthetic construct
  source 1..22: mol_type = other RNA
cctactagccagtgattggata

SEQ ID NO: 129578 - RNA, 22 nt, synthetic construct
  source 1..22: mol_type = other RNA
cctactagtatttattaaacct

SEQ ID NO: 129579 - RNA, 22 nt, synthetic construct
  source 1..22: mol_type = other RNA
cctactcactgaaaccctcacg

SEQ ID NO: 129580 - RNA, 22 nt, synthetic construct
  source 1..22: mol_type = other RNA
cctactgctctgtcctgtcagt

SEQ ID NO: 129581 - RNA, 22 nt, synthetic construct
  source 1..22: mol_type = other RNA
cctactttaaatcagggccttt

SEQ ID NO: 129582 - RNA, 22 nt, synthetic construct
  source 1..22: mol_type = other RNA
cctactttcttcaaccatactt

SEQ ID NO: 129583 - RNA, 22 nt, synthetic construct
  source 1..22: mol_type = other RNA
cctactttttgtcacacggaaa

SEQ ID NO: 129584 - RNA, 22 nt, synthetic construct
  source 1..22: mol_type = other RNA
cctagaaaaacaccaaaaaagc

SEQ ID NO: 129585 - RNA, 22 nt, synthetic construct
  source 1..22: mol_type = other RNA
cctagaaaatcatacattttcc

SEQ ID NO: 129586 - RNA, 22 nt, synthetic construct
  source 1..22: mol_type = other RNA
cctagaaaggaattgtaatcac

SEQ ID NO: 129587 - RNA, 22 nt, synthetic construct
  source 1..22: mol_type = other RNA
cctagaaatcatacacgagtgt

SEQ ID NO: 129588 - RNA, 22 nt, synthetic construct
  source 1..22: mol_type = other RNA
cctagaagaaatgggtaaattt

SEQ ID NO: 129589 - RNA, 22 nt, synthetic construct
  source 1..22: mol_type = other RNA
cctagacctcaaattaatcagt

SEQ ID NO: 129590 - RNA, 22 nt, synthetic construct
  source 1..22: mol_type = other RNA
cctagactgccaggtagggagg

SEQ ID NO: 129591 - RNA, 22 nt, synthetic construct
  source 1..22: mol_type = other RNA
cctagagattaggcagaaccac

SEQ ID NO: 129592 - RNA, 22 nt, synthetic construct
  source 1..22: mol_type = other RNA
cctagataagaaaatgtgacat

SEQ ID NO: 129593 - RNA, 22 nt, synthetic construct
  source 1..22: mol_type = other RNA
cctagatgattcgcattgctaa

SEQ ID NO: 129594 - RNA, 22 nt, synthetic construct
  source 1..22: mol_type = other RNA
cctagattccctctggccttct

SEQ ID NO: 129595 - RNA, 22 nt, synthetic construct
  source 1..22: mol_type = other RNA
cctagattgaccttctacttat

SEQ ID NO: 129596 - RNA, 22 nt, synthetic construct
  source 1..22: mol_type = other RNA
cctagatttcaatctggaatgc

SEQ ID NO: 129597 - RNA, 22 nt, synthetic construct
  source 1..22: mol_type = other RNA
cctagcatgcagtagctcatca

SEQ ID NO: 129598 - RNA, 22 nt, synthetic construct
  source 1..22: mol_type = other RNA
cctagcccagcacttccatttt

SEQ ID NO: 129599 - RNA, 22 nt, synthetic construct
  source 1..22: mol_type = other RNA
cctagccccaaatacctctgaa

SEQ ID NO: 129600 - RNA, 22 nt, synthetic construct
  source 1..22: mol_type = other RNA
cctagcctctctgggcttcact

SEQ ID NO: 129601 - RNA, 22 nt, synthetic construct
  source 1..22: mol_type = other RNA
cctagctacttgggaggctgag

SEQ ID NO: 129602 - RNA, 22 nt, synthetic construct
  source 1..22: mol_type = other RNA
cctagctgacttttaaaatatg

SEQ ID NO: 129603 - RNA, 22 nt, synthetic construct
  source 1..22: mol_type = other RNA
cctagctgttttcatgcgacat

SEQ ID NO: 129604 - RNA, 22 nt, synthetic construct
  source 1..22: mol_type = other RNA
cctaggcaagagagcaagactc

SEQ ID NO: 129605 - RNA, 22 nt, synthetic construct
  source 1..22: mol_type = other RNA
cctaggcctattttaggctctg

SEQ ID NO: 129606 - RNA, 22 nt, synthetic construct
  source 1..22: mol_type = other RNA
cctagggtgtaaaaggctaatt

SEQ ID NO: 129607 - RNA, 22 nt, synthetic construct
  source 1..22: mol_type = other RNA
cctaggtagggttggggtatgt

SEQ ID NO: 129608 - RNA, 22 nt, synthetic construct
  source 1..22: mol_type = other RNA
cctaggtgtgataactgatatg

SEQ ID NO: 129609 - RNA, 22 nt, synthetic construct
  source 1..22: mol_type = other RNA
cctagtacgtaacctaaagttg

SEQ ID NO: 129610 - RNA, 22 nt, synthetic construct
  source 1..22: mol_type = other RNA
cctagtcatccactgcacagta

SEQ ID NO: 129611 - RNA, 22 nt, synthetic construct
  source 1..22: mol_type = other RNA
cctagtggatgctggggacccc

SEQ ID NO: 129612 - RNA, 22 nt, synthetic construct
  source 1..22: mol_type = other RNA
cctagtgtctccataccccctg

SEQ ID NO: 129613 - RNA, 22 nt, synthetic construct
  source 1..22: mol_type = other RNA
cctagttttccaatccgggaac

SEQ ID NO: 129614 - RNA, 22 nt, synthetic construct
  source 1..22: mol_type = other RNA
cctataaaatgctggaaatttt

SEQ ID NO: 129615 - RNA, 22 nt, synthetic construct
  source 1..22: mol_type = other RNA
cctataagacccagtggctagt

SEQ ID NO: 129616 - RNA, 22 nt, synthetic construct
  source 1..22: mol_type = other RNA
cctataattcaattttcatggg

SEQ ID NO: 129617 - RNA, 22 nt, synthetic construct
  source 1..22: mol_type = other RNA
cctatactgtaaccctgtttcc

SEQ ID NO: 129618 - RNA, 22 nt, synthetic construct
  source 1..22: mol_type = other RNA
cctatagaattcttcttctgtt

SEQ ID NO: 129619 - RNA, 22 nt, synthetic construct
  source 1..22: mol_type = other RNA
cctatagacagcatccccagaa

SEQ ID NO: 129620 - RNA, 22 nt, synthetic construct
  source 1..22: mol_type = other RNA
cctatagttaagtctgaaagct

SEQ ID NO: 129621 - RNA, 22 nt, synthetic construct
  source 1..22: mol_type = other RNA
cctatattgtcaatggggaact

SEQ ID NO: 129622 - RNA, 22 nt, synthetic construct
  source 1..22: mol_type = other RNA
cctatatttttccacataaagt

SEQ ID NO: 129623 - RNA, 22 nt, synthetic construct
  source 1..22: mol_type = other RNA
cctatcagaagcacaccaaggt

SEQ ID NO: 129624 - RNA, 22 nt, synthetic construct
  source 1..22: mol_type = other RNA
cctatcagagcatgtcccctgg

SEQ ID NO: 129625 - RNA, 22 nt, synthetic construct
  source 1..22: mol_type = other RNA
cctatcattgcaccactgcact

SEQ ID NO: 129626 - RNA, 22 nt, synthetic construct
  source 1..22: mol_type = other RNA
cctatctaagcctactgctctg

SEQ ID NO: 129627 - RNA, 22 nt, synthetic construct
  source 1..22: mol_type = other RNA
cctatctattaacagaagggta

SEQ ID NO: 129628 - RNA, 22 nt, synthetic construct
  source 1..22: mol_type = other RNA
cctatgaaaatttagcttctga

SEQ ID NO: 129629 - RNA, 22 nt, synthetic construct
  source 1..22: mol_type = other RNA
cctatgaaatcttgaagatggc

SEQ ID NO: 129630 - RNA, 22 nt, synthetic construct
  source 1..22: mol_type = other RNA
cctatgaataggtgtgtgttcc

SEQ ID NO: 129631 - RNA, 22 nt, synthetic construct
  source 1..22: mol_type = other RNA
cctatgcaataactcaaaatgt

SEQ ID NO: 129632 - RNA, 22 nt, synthetic construct
  source 1..22: mol_type = other RNA
cctatgccttcagtatgaatgc

SEQ ID NO: 129633 - RNA, 22 nt, synthetic construct
  source 1..22: mol_type = other RNA
cctatgtaagacaatgtctttg

SEQ ID NO: 129634 - RNA, 22 nt, synthetic construct
  source 1..22: mol_type = other RNA
cctatgtggggaatgctcataa

SEQ ID NO: 129635 - RNA, 22 nt, synthetic construct
  source 1..22: mol_type = other RNA
cctattatttagagtttgcatt

SEQ ID NO: 129636 - RNA, 22 nt, synthetic construct
  source 1..22: mol_type = other RNA
cctattcaacctataagaccca

SEQ ID NO: 129637 - RNA, 22 nt, synthetic construct
  source 1..22: mol_type = other RNA
cctattcacactgctcctgcct

SEQ ID NO: 129638 - RNA, 22 nt, synthetic construct
  source 1..22: mol_type = other RNA
cctattcataggtaatactcta

SEQ ID NO: 129639 - RNA, 22 nt, synthetic construct
  source 1..22: mol_type = other RNA
cctattctggggctcaagtaag

SEQ ID NO: 129640 - RNA, 22 nt, synthetic construct
  source 1..22: mol_type = other RNA
cctattgtttaaaaacaacact

SEQ ID NO: 129641 - RNA, 22 nt, synthetic construct
  source 1..22: mol_type = other RNA
cctatttagagggatgaatgtt

SEQ ID NO: 129642 - RNA, 22 nt, synthetic construct
  source 1..22: mol_type = other RNA
cctatttatgttgcacaaaagt

SEQ ID NO: 129643 - RNA, 22 nt, synthetic construct
  source 1..22: mol_type = other RNA
cctattttaggctctgtggttt

SEQ ID NO: 129644 - RNA, 22 nt, synthetic construct
  source 1..22: mol_type = other RNA
cctattttataatgggcaatca

SEQ ID NO: 129645 - RNA, 22 nt, synthetic construct
  source 1..22: mol_type = other RNA
cctattttctacaggtatatta

SEQ ID NO: 129646 - RNA, 22 nt, synthetic construct
  source 1..22: mol_type = other RNA
cctattttgttattagggtaat

SEQ ID NO: 129647 - RNA, 22 nt, synthetic construct
  source 1..22: mol_type = other RNA
cctcaaaagatgcagaaaaagc

SEQ ID NO: 129648 - RNA, 22 nt, synthetic construct
  source 1..22: mol_type = other RNA
cctcaaaatcaacattgcctcc

SEQ ID NO: 129649 - RNA, 22 nt, synthetic construct
  source 1..22: mol_type = other RNA
cctcaaaatttagtaagggtaa

SEQ ID NO: 129650 - RNA, 22 nt, synthetic construct
  source 1..22: mol_type = other RNA
cctcaaacgaaccaattaccat

SEQ ID NO: 129651 - RNA, 22 nt, synthetic construct
  source 1..22: mol_type = other RNA
cctcaaactagaaaaagaataa

SEQ ID NO: 129652 - RNA, 22 nt, synthetic construct
  source 1..22: mol_type = other RNA
cctcaaaggagagaagaggggg

SEQ ID NO: 129653 - RNA, 22 nt, synthetic construct
  source 1..22: mol_type = other RNA
cctcaaagtggaaacaactcaa

SEQ ID NO: 129654 - RNA, 22 nt, synthetic construct
  source 1..22: mol_type = other RNA
cctcaaatgccatagagcttta

SEQ ID NO: 129655 - RNA, 22 nt, synthetic construct
  source 1..22: mol_type = other RNA
cctcaaatgtctcattgtggat

SEQ ID NO: 129656 - RNA, 22 nt, synthetic construct
  source 1..22: mol_type = other RNA
cctcaaattaatcagtctgtaa

SEQ ID NO: 129657 - RNA, 22 nt, synthetic construct
  source 1..22: mol_type = other RNA
cctcaaattagtcatagcagtg

SEQ ID NO: 129658 - RNA, 22 nt, synthetic construct
  source 1..22: mol_type = other RNA
cctcaaattctgagggaaatta

SEQ ID NO: 129659 - RNA, 22 nt, synthetic construct
  source 1..22: mol_type = other RNA
cctcaaattgtgtgttctcttt

SEQ ID NO: 129660 - RNA, 22 nt, synthetic construct
  source 1..22: mol_type = other RNA
cctcaaatttcatttactgaaa

SEQ ID NO: 129661 - RNA, 22 nt, synthetic construct
  source 1..22: mol_type = other RNA
cctcaacaagagaggacagttg

SEQ ID NO: 129662 - RNA, 22 nt, synthetic construct
  source 1..22: mol_type = other RNA
cctcaacagcacttttgtacta

SEQ ID NO: 129663 - RNA, 22 nt, synthetic construct
  source 1..22: mol_type = other RNA
cctcaactttaggttacgtact

SEQ ID NO: 129664 - RNA, 22 nt, synthetic construct
  source 1..22: mol_type = other RNA
cctcaagcagtcctgccttggc

SEQ ID NO: 129665 - RNA, 22 nt, synthetic construct
  source 1..22: mol_type = other RNA
cctcaaggcagaacacactgct

SEQ ID NO: 129666 - RNA, 22 nt, synthetic construct
  source 1..22: mol_type = other RNA
cctcaaggccaactgtcctctc

SEQ ID NO: 129667 - RNA, 22 nt, synthetic construct
  source 1..22: mol_type = other RNA
cctcaagtcttttcctagactg

SEQ ID NO: 129668 - RNA, 22 nt, synthetic construct
  source 1..22: mol_type = other RNA
cctcaagtgatgcaactcctgg

SEQ ID NO: 129669 - RNA, 22 nt, synthetic construct
  source 1..22: mol_type = other RNA
cctcaatcatgtcaagaatgaa

SEQ ID NO: 129670 - RNA, 22 nt, synthetic construct
  source 1..22: mol_type = other RNA
cctcaatccccatctgggatac

SEQ ID NO: 129671 - RNA, 22 nt, synthetic construct
  source 1..22: mol_type = other RNA
cctcacaacaggcctgagccgt

SEQ ID NO: 129672 - RNA, 22 nt, synthetic construct
  source 1..22: mol_type = other RNA
cctcacagtcacaaagctttaa

SEQ ID NO: 129673 - RNA, 22 nt, synthetic construct
  source 1..22: mol_type = other RNA
cctcacagtccactcacctgtc

SEQ ID NO: 129674 - RNA, 22 nt, synthetic construct
  source 1..22: mol_type = other RNA
cctcacatcagttaccaccaag

SEQ ID NO: 129675 - RNA, 22 nt, synthetic construct
  source 1..22: mol_type = other RNA
cctcacatgtttggtcaattga

SEQ ID NO: 129676 - RNA, 22 nt, synthetic construct
  source 1..22: mol_type = other RNA
cctcacattcacagcgtgcacc

SEQ ID NO: 129677 - RNA, 22 nt, synthetic construct
  source 1..22: mol_type = other RNA
cctcacctcacattcacagcgt

SEQ ID NO: 129678 - RNA, 22 nt, synthetic construct
  source 1..22: mol_type = other RNA
cctcaccttctgctgggcccac

SEQ ID NO: 129679 - RNA, 22 nt, synthetic construct
  source 1..22: mol_type = other RNA
cctcacgaaagcggtcaacgca

SEQ ID NO: 129680 - RNA, 22 nt, synthetic construct
  source 1..22: mol_type = other RNA
cctcactaagtcagaattcact

SEQ ID NO: 129681 - RNA, 22 nt, synthetic construct
  source 1..22: mol_type = other RNA
cctcactgtgatacctagtacg

SEQ ID NO: 129682 - RNA, 22 nt, synthetic construct
  source 1..22: mol_type = other RNA
cctcagaaggccaaggcaggag

SEQ ID NO: 129683 - RNA, 22 nt, synthetic construct
  source 1..22: mol_type = other RNA
cctcagaattaatataagatga

SEQ ID NO: 129684 - RNA, 22 nt, synthetic construct
  source 1..22: mol_type = other RNA
cctcagaatttgaggtcttcta

SEQ ID NO: 129685 - RNA, 22 nt, synthetic construct
  source 1..22: mol_type = other RNA
cctcagcaaaagcaattattag

SEQ ID NO: 129686 - RNA, 22 nt, synthetic construct
  source 1..22: mol_type = other RNA
cctcagcatgtcttcagaggcc

SEQ ID NO: 129687 - RNA, 22 nt, synthetic construct
  source 1..22: mol_type = other RNA
cctcagccccctccctaccacc

SEQ ID NO: 129688 - RNA, 22 nt, synthetic construct
  source 1..22: mol_type = other RNA
cctcagccgccgcagaggccaa

SEQ ID NO: 129689 - RNA, 22 nt, synthetic construct
  source 1..22: mol_type = other RNA
cctcagcctcccgagtagttgt

SEQ ID NO: 129690 - RNA, 22 nt, synthetic construct
  source 1..22: mol_type = other RNA
cctcagcctcccgagtatctag

SEQ ID NO: 129691 - RNA, 22 nt, synthetic construct
  source 1..22: mol_type = other RNA
cctcaggaccaggcagtcctct

SEQ ID NO: 129692 - RNA, 22 nt, synthetic construct
  source 1..22: mol_type = other RNA
cctcaggactctgctcaaaggg

SEQ ID NO: 129693 - RNA, 22 nt, synthetic construct
  source 1..22: mol_type = other RNA
cctcaggatctacattaaaaaa

SEQ ID NO: 129694 - RNA, 22 nt, synthetic construct
  source 1..22: mol_type = other RNA
cctcaggcagtctagtccatga

SEQ ID NO: 129695 - RNA, 22 nt, synthetic construct
  source 1..22: mol_type = other RNA
cctcaggctccaggtagaatga

SEQ ID NO: 129696 - RNA, 22 nt, synthetic construct
  source 1..22: mol_type = other RNA
cctcagggtaggaaaagacttc

SEQ ID NO: 129697 - RNA, 22 nt, synthetic construct
  source 1..22: mol_type = other RNA
cctcaggtgtcactggatagaa

SEQ ID NO: 129698 - RNA, 22 nt, synthetic construct
  source 1..22: mol_type = other RNA
cctcaggtttagaatatattta

SEQ ID NO: 129699 - RNA, 22 nt, synthetic construct
  source 1..22: mol_type = other RNA
cctcagtggtagttacacaagt

SEQ ID NO: 129700 - RNA, 22 nt, synthetic construct
  source 1..22: mol_type = other RNA
cctcagttaaacccaacaaaca

SEQ ID NO: 129701 - RNA, 22 nt, synthetic construct
  source 1..22: mol_type = other RNA
cctcagttgacatcctttaatt

SEQ ID NO: 129702 - RNA, 22 nt, synthetic construct
  source 1..22: mol_type = other RNA
cctcataagaactcctggtctc

SEQ ID NO: 129703 - RNA, 22 nt, synthetic construct
  source 1..22: mol_type = other RNA
cctcatatcagttatcacacct

SEQ ID NO: 129704 - RNA, 22 nt, synthetic construct
  source 1..22: mol_type = other RNA
cctcatccctcatatcagttat

SEQ ID NO: 129705 - RNA, 22 nt, synthetic construct
  source 1..22: mol_type = other RNA
cctcatccggtctcagttttta

SEQ ID NO: 129706 - RNA, 22 nt, synthetic construct
  source 1..22: mol_type = other RNA
cctcatcctccgtagctgtcgc

SEQ ID NO: 129707 - RNA, 22 nt, synthetic construct
  source 1..22: mol_type = other RNA
cctcatctctgcaaaacattta

SEQ ID NO: 129708 - RNA, 22 nt, synthetic construct
  source 1..22: mol_type = other RNA
cctcatcttagccgggaggagc

SEQ ID NO: 129709 - RNA, 22 nt, synthetic construct
  source 1..22: mol_type = other RNA
cctcatgcatccacattttgtg

SEQ ID NO: 129710 - RNA, 22 nt, synthetic construct
  source 1..22: mol_type = other RNA
cctcatgtaactaattactgtt

SEQ ID NO: 129711 - RNA, 22 nt, synthetic construct
  source 1..22: mol_type = other RNA
cctcatgtattttcctaaccac

SEQ ID NO: 129712 - RNA, 22 nt, synthetic construct
  source 1..22: mol_type = other RNA
cctcatgtccatagttaatgtg

SEQ ID NO: 129713 - RNA, 22 nt, synthetic construct
  source 1..22: mol_type = other RNA
cctcattcacactagtcaccct

SEQ ID NO: 129714 - RNA, 22 nt, synthetic construct
  source 1..22: mol_type = other RNA
cctcattgaagctactattcca

SEQ ID NO: 129715 - RNA, 22 nt, synthetic construct
  source 1..22: mol_type = other RNA
cctcatttgaactttccagaag

SEQ ID NO: 129716 - RNA, 22 nt, synthetic construct
  source 1..22: mol_type = other RNA
cctcatttgcagagcaaactca

SEQ ID NO: 129717 - RNA, 22 nt, synthetic construct
  source 1..22: mol_type = other RNA
cctcattttataagggtgataa

SEQ ID NO: 129718 - RNA, 22 nt, synthetic construct
  source 1..22: mol_type = other RNA
cctccaacccattccaggtttt

SEQ ID NO: 129719 - RNA, 22 nt, synthetic construct
  source 1..22: mol_type = other RNA
cctccaaggctgcccgctccgg

SEQ ID NO: 129720 - RNA, 22 nt, synthetic construct
  source 1..22: mol_type = other RNA
cctccaatgtttttaattctta

SEQ ID NO: 129721 - RNA, 22 nt, synthetic construct
  source 1..22: mol_type = other RNA
cctccacacctggcccctttca

SEQ ID NO: 129722 - RNA, 22 nt, synthetic construct
  source 1..22: mol_type = other RNA
cctccacaggctttgacttctc

SEQ ID NO: 129723 - RNA, 22 nt, synthetic construct
  source 1..22: mol_type = other RNA
cctccagaaaaccagaaaagtg

SEQ ID NO: 129724 - RNA, 22 nt, synthetic construct
  source 1..22: mol_type = other RNA
cctccagccttaatctcctgag

SEQ ID NO: 129725 - RNA, 22 nt, synthetic construct
  source 1..22: mol_type = other RNA
cctccagcgctaagcactgcgc

SEQ ID NO: 129726 - RNA, 22 nt, synthetic construct
  source 1..22: mol_type = other RNA
cctccaggatccagtctctacc

SEQ ID NO: 129727 - RNA, 22 nt, synthetic construct
  source 1..22: mol_type = other RNA
cctccaggttcatccatgttgt

SEQ ID NO: 129728 - RNA, 22 nt, synthetic construct
  source 1..22: mol_type = other RNA
cctccagtccagcaccaccctt

SEQ ID NO: 129729 - RNA, 22 nt, synthetic construct
  source 1..22: mol_type = other RNA
cctccagtgtcctgaatgattt

SEQ ID NO: 129730 - RNA, 22 nt, synthetic construct
  source 1..22: mol_type = other RNA
cctccatatgggatgcttaaag

SEQ ID NO: 129731 - RNA, 22 nt, synthetic construct
  source 1..22: mol_type = other RNA
cctccatcactgactggctgtg

SEQ ID NO: 129732 - RNA, 22 nt, synthetic construct
  source 1..22: mol_type = other RNA
cctccatggaaactacaattac

SEQ ID NO: 129733 - RNA, 22 nt, synthetic construct
  source 1..22: mol_type = other RNA
cctccatttccctgcttcatct

SEQ ID NO: 129734 - RNA, 22 nt, synthetic construct
  source 1..22: mol_type = other RNA
cctcccaaaggactgggatcct

SEQ ID NO: 129735 - RNA, 22 nt, synthetic construct
  source 1..22: mol_type = other RNA
cctcccaacaggctgagtgcgg

SEQ ID NO: 129736 - RNA, 22 nt, synthetic construct
  source 1..22: mol_type = other RNA
cctcccacctcagccccacaag

SEQ ID NO: 129737 - RNA, 22 nt, synthetic construct
  source 1..22: mol_type = other RNA
cctcccacttacatcagcagtg

SEQ ID NO: 129738 - RNA, 22 nt, synthetic construct
  source 1..22: mol_type = other RNA
cctcccatgcattcgtccctaa

SEQ ID NO: 129739 - RNA, 22 nt, synthetic construct
  source 1..22: mol_type = other RNA
cctcccccgcccgtccctgctt

SEQ ID NO: 129740 - RNA, 22 nt, synthetic construct
  source 1..22: mol_type = other RNA
cctcccccgggacaatgccagg

SEQ ID NO: 129741 - RNA, 22 nt, synthetic construct
  source 1..22: mol_type = other RNA
cctcccgagtagttgtaactac

SEQ ID NO: 129742 - RNA, 22 nt, synthetic construct
  source 1..22: mol_type = other RNA
cctcccgagtatctaggagtac

SEQ ID NO: 129743 - RNA, 22 nt, synthetic construct
  source 1..22: mol_type = other RNA
cctcccggctaagatgaggtct

SEQ ID NO: 129744 - RNA, 22 nt, synthetic construct
  source 1..22: mol_type = other RNA
cctcccgggtccaggcagttct

SEQ ID NO: 129745 - RNA, 22 nt, synthetic construct
  source 1..22: mol_type = other RNA
cctcccgggtttaagcgattct

SEQ ID NO: 129746 - RNA, 22 nt, synthetic construct
  source 1..22: mol_type = other RNA
cctccctaccacccgtccaatt

SEQ ID NO: 129747 - RNA, 22 nt, synthetic construct
  source 1..22: mol_type = other RNA
cctccctacctggcagtctagg

SEQ ID NO: 129748 - RNA, 22 nt, synthetic construct
  source 1..22: mol_type = other RNA
cctccctcactaagtcagaatt

SEQ ID NO: 129749 - RNA, 22 nt, synthetic construct
  source 1..22: mol_type = other RNA
cctccctccccccacggtctcc

SEQ ID NO: 129750 - RNA, 22 nt, synthetic construct
  source 1..22: mol_type = other RNA
cctccctgctttaaaacactgg

SEQ ID NO: 129751 - RNA, 22 nt, synthetic construct
  source 1..22: mol_type = other RNA
cctccctggagaggcaaaggcc

SEQ ID NO: 129752 - RNA, 22 nt, synthetic construct
  source 1..22: mol_type = other RNA
cctccctggttcaagctatgct

SEQ ID NO: 129753 - RNA, 22 nt, synthetic construct
  source 1..22: mol_type = other RNA
cctcccttcacaaagccctcag

SEQ ID NO: 129754 - RNA, 22 nt, synthetic construct
  source 1..22: mol_type = other RNA
cctcccttcagcctgtgtcagt

SEQ ID NO: 129755 - RNA, 22 nt, synthetic construct
  source 1..22: mol_type = other RNA
cctccgcctccctggttcaagc

SEQ ID NO: 129756 - RNA, 22 nt, synthetic construct
  source 1..22: mol_type = other RNA
cctccgtagctgtcgctctcct

SEQ ID NO: 129757 - RNA, 22 nt, synthetic construct
  source 1..22: mol_type = other RNA
cctccgtttttcaggttcaagc

SEQ ID NO: 129758 - RNA, 22 nt, synthetic construct
  source 1..22: mol_type = other RNA
cctcctaagttttgggggaaga

SEQ ID NO: 129759 - RNA, 22 nt, synthetic construct
  source 1..22: mol_type = other RNA
cctcctaccttccaaagtatgc

SEQ ID NO: 129760 - RNA, 22 nt, synthetic construct
  source 1..22: mol_type = other RNA
cctcctagattgaccttctact

SEQ ID NO: 129761 - RNA, 22 nt, synthetic construct
  source 1..22: mol_type = other RNA
cctcctcccacttacatcagca

SEQ ID NO: 129762 - RNA, 22 nt, synthetic construct
  source 1..22: mol_type = other RNA
cctcctccggggacccagtgcc

SEQ ID NO: 129763 - RNA, 22 nt, synthetic construct
  source 1..22: mol_type = other RNA
cctcctcctcctggccacatgc

SEQ ID NO: 129764 - RNA, 22 nt, synthetic construct
  source 1..22: mol_type = other RNA
cctcctcctctacaagttttaa

SEQ ID NO: 129765 - RNA, 22 nt, synthetic construct
  source 1..22: mol_type = other RNA
cctcctcctggccacatgcttc

SEQ ID NO: 129766 - RNA, 22 nt, synthetic construct
  source 1..22: mol_type = other RNA
cctcctctacaagttttaactt

SEQ ID NO: 129767 - RNA, 22 nt, synthetic construct
  source 1..22: mol_type = other RNA
cctcctctggacattatcctat

SEQ ID NO: 129768 - RNA, 22 nt, synthetic construct
  source 1..22: mol_type = other RNA
cctcctctggccctccatttcc

SEQ ID NO: 129769 - RNA, 22 nt, synthetic construct
  source 1..22: mol_type = other RNA
cctcctgccttcctgacctctg

SEQ ID NO: 129770 - RNA, 22 nt, synthetic construct
  source 1..22: mol_type = other RNA
cctcctgccttggccttctgag

SEQ ID NO: 129771 - RNA, 22 nt, synthetic construct
  source 1..22: mol_type = other RNA
cctcctggccacatgcttccaa

SEQ ID NO: 129772 - RNA, 22 nt, synthetic construct
  source 1..22: mol_type = other RNA
cctcctgggttcaggtgcctcc

SEQ ID NO: 129773 - RNA, 22 nt, synthetic construct
  source 1..22: mol_type = other RNA
cctcctggtgggttcatgccat

SEQ ID NO: 129774 - RNA, 22 nt, synthetic construct
  source 1..22: mol_type = other RNA
cctcctggttttgatcatcgca

SEQ ID NO: 129775 - RNA, 22 nt, synthetic construct
  source 1..22: mol_type = other RNA
cctccttctgctcactttggga

SEQ ID NO: 129776 - RNA, 22 nt, synthetic construct
  source 1..22: mol_type = other RNA
cctcctttctagaatgcatccc

SEQ ID NO: 129777 - RNA, 22 nt, synthetic construct
  source 1..22: mol_type = other RNA
cctccttttgtagagggaattt

SEQ ID NO: 129778 - RNA, 22 nt, synthetic construct
  source 1..22: mol_type = other RNA
cctcctttttatcacccttata

SEQ ID NO: 129779 - RNA, 22 nt, synthetic construct
  source 1..22: mol_type = other RNA
cctcgaagagaccacaggctct

SEQ ID NO: 129780 - RNA, 22 nt, synthetic construct
  source 1..22: mol_type = other RNA
cctcgaagcacaaccactgatg

SEQ ID NO: 129781 - RNA, 22 nt, synthetic construct
  source 1..22: mol_type = other RNA
cctcgaaggcctgcttcattcc

SEQ ID NO: 129782 - RNA, 22 nt, synthetic construct
  source 1..22: mol_type = other RNA
cctcgagtaaaaagaatgaata

SEQ ID NO: 129783 - RNA, 22 nt, synthetic construct
  source 1..22: mol_type = other RNA
cctcgctcttggcttttggcag

SEQ ID NO: 129784 - RNA, 22 nt, synthetic construct
  source 1..22: mol_type = other RNA
cctcggcacagctctcatgagt

SEQ ID NO: 129785 - RNA, 22 nt, synthetic construct
  source 1..22: mol_type = other RNA
cctcggccaaccattactcttc

SEQ ID NO: 129786 - RNA, 22 nt, synthetic construct
  source 1..22: mol_type = other RNA
cctcggccacagcagggctcct

SEQ ID NO: 129787 - RNA, 22 nt, synthetic construct
  source 1..22: mol_type = other RNA
cctcggccgacccagcccccaa

SEQ ID NO: 129788 - RNA, 22 nt, synthetic construct
  source 1..22: mol_type = other RNA
cctcggcctctactgactccct

SEQ ID NO: 129789 - RNA, 22 nt, synthetic construct
  source 1..22: mol_type = other RNA
cctcgggttcaagccccagttc

SEQ ID NO: 129790 - RNA, 22 nt, synthetic construct
  source 1..22: mol_type = other RNA
cctcggtctacggacgcaggca

SEQ ID NO: 129791 - RNA, 22 nt, synthetic construct
  source 1..22: mol_type = other RNA
cctcgtaaaagctaatctactt

SEQ ID NO: 129792 - RNA, 22 nt, synthetic construct
  source 1..22: mol_type = other RNA
cctcgttttcaacaaaggttga

SEQ ID NO: 129793 - RNA, 22 nt, synthetic construct
  source 1..22: mol_type = other RNA
cctctaaataggtattcatgct

SEQ ID NO: 129794 - RNA, 22 nt, synthetic construct
  source 1..22: mol_type = other RNA
cctctaacaaaactaggctgtc

SEQ ID NO: 129795 - RNA, 22 nt, synthetic construct
  source 1..22: mol_type = other RNA
cctctaagtcagcctgggcaca

SEQ ID NO: 129796 - RNA, 22 nt, synthetic construct
  source 1..22: mol_type = other RNA
cctctaatcaggttgggcttat

SEQ ID NO: 129797 - RNA, 22 nt, synthetic construct
  source 1..22: mol_type = other RNA
cctctacaaaaggaggaactaa

SEQ ID NO: 129798 - RNA, 22 nt, synthetic construct
  source 1..22: mol_type = other RNA
cctctacaagttttaacttaag

SEQ ID NO: 129799 - RNA, 22 nt, synthetic construct
  source 1..22: mol_type = other RNA
cctctacacaaaaatccagata

SEQ ID NO: 129800 - RNA, 22 nt, synthetic construct
  source 1..22: mol_type = other RNA
cctctacatcacagacagggaa

SEQ ID NO: 129801 - RNA, 22 nt, synthetic construct
  source 1..22: mol_type = other RNA
cctctactgactccctttttag

SEQ ID NO: 129802 - RNA, 22 nt, synthetic construct
  source 1..22: mol_type = other RNA
cctctactttcacataaggtat

SEQ ID NO: 129803 - RNA, 22 nt, synthetic construct
  source 1..22: mol_type = other RNA
cctctagctccccattccctgt

SEQ ID NO: 129804 - RNA, 22 nt, synthetic construct
  source 1..22: mol_type = other RNA
cctctataattctgccttcaat

SEQ ID NO: 129805 - RNA, 22 nt, synthetic construct
  source 1..22: mol_type = other RNA
cctctatggcaggcaccttcag

SEQ ID NO: 129806 - RNA, 22 nt, synthetic construct
  source 1..22: mol_type = other RNA
cctctattaaatcatgatgttt

SEQ ID NO: 129807 - RNA, 22 nt, synthetic construct
  source 1..22: mol_type = other RNA
cctctatttttgtctggtggac

SEQ ID NO: 129808 - RNA, 22 nt, synthetic construct
  source 1..22: mol_type = other RNA
cctctcaacacttcagtggtaa

SEQ ID NO: 129809 - RNA, 22 nt, synthetic construct
  source 1..22: mol_type = other RNA
cctctcactccaaagcaaacgt

SEQ ID NO: 129810 - RNA, 22 nt, synthetic construct
  source 1..22: mol_type = other RNA
cctctcagtggtgcttttgctg

SEQ ID NO: 129811 - RNA, 22 nt, synthetic construct
  source 1..22: mol_type = other RNA
cctctccagggaggaatccttc

SEQ ID NO: 129812 - RNA, 22 nt, synthetic construct
  source 1..22: mol_type = other RNA
cctctcccaccatctctctgcc

SEQ ID NO: 129813 - RNA, 22 nt, synthetic construct
  source 1..22: mol_type = other RNA
cctctccccttgacgaagtcac

SEQ ID NO: 129814 - RNA, 22 nt, synthetic construct
  source 1..22: mol_type = other RNA
cctctccgggtaaaaagcctgc

SEQ ID NO: 129815 - RNA, 22 nt, synthetic construct
  source 1..22: mol_type = other RNA
cctctctctttctggggatgct

SEQ ID NO: 129816 - RNA, 22 nt, synthetic construct
  source 1..22: mol_type = other RNA
cctctctgatggaacggcttaa

SEQ ID NO: 129817 - RNA, 22 nt, synthetic construct
  source 1..22: mol_type = other RNA
cctctctgggcttcactttcgt

SEQ ID NO: 129818 - RNA, 22 nt, synthetic construct
  source 1..22: mol_type = other RNA
cctctcttaaatccgagacaag

SEQ ID NO: 129819 - RNA, 22 nt, synthetic construct
  source 1..22: mol_type = other RNA
cctctcttggaatgtgcacctc

SEQ ID NO: 129820 - RNA, 22 nt, synthetic construct
  source 1..22: mol_type = other RNA
cctctcttgttgaggatgactg

SEQ ID NO: 129821 - RNA, 22 nt, synthetic construct
  source 1..22: mol_type = other RNA
cctctgaagacatgctgaggcc

SEQ ID NO: 129822 - RNA, 22 nt, synthetic construct
  source 1..22: mol_type = other RNA
cctctgaagagtctatctttgg

SEQ ID NO: 129823 - RNA, 22 nt, synthetic construct
  source 1..22: mol_type = other RNA
cctctgactttatggtatcact

SEQ ID NO: 129824 - RNA, 22 nt, synthetic construct
  source 1..22: mol_type = other RNA
cctctgagagaagtcagactaa

SEQ ID NO: 129825 - RNA, 22 nt, synthetic construct
  source 1..22: mol_type = other RNA
cctctgcagttagcatgcctga

SEQ ID NO: 129826 - RNA, 22 nt, synthetic construct
  source 1..22: mol_type = other RNA
cctctgcggcggctgaggcagc

SEQ ID NO: 129827 - RNA, 22 nt, synthetic construct
  source 1..22: mol_type = other RNA
cctctggaaaggacttgatcta

SEQ ID NO: 129828 - RNA, 22 nt, synthetic construct
  source 1..22: mol_type = other RNA
cctctggaatgcccatcctcta

SEQ ID NO: 129829 - RNA, 22 nt, synthetic construct
  source 1..22: mol_type = other RNA
cctctggacattatcctatcag

SEQ ID NO: 129830 - RNA, 22 nt, synthetic construct
  source 1..22: mol_type = other RNA
cctctggactcagggtcacttc

SEQ ID NO: 129831 - RNA, 22 nt, synthetic construct
  source 1..22: mol_type = other RNA
cctctggccctccatttccctg

SEQ ID NO: 129832 - RNA, 22 nt, synthetic construct
  source 1..22: mol_type = other RNA
cctctggccttctatattttta

SEQ ID NO: 129833 - RNA, 22 nt, synthetic construct
  source 1..22: mol_type = other RNA
cctctggctgacctggtactct

SEQ ID NO: 129834 - RNA, 22 nt, synthetic construct
  source 1..22: mol_type = other RNA
cctctgggatgctcagtttcaa

SEQ ID NO: 129835 - RNA, 22 nt, synthetic construct
  source 1..22: mol_type = other RNA
cctctggtattttaagattctc

SEQ ID NO: 129836 - RNA, 22 nt, synthetic construct
  source 1..22: mol_type = other RNA
cctctgtagataaacgttaact

SEQ ID NO: 129837 - RNA, 22 nt, synthetic construct
  source 1..22: mol_type = other RNA
cctctgtcaccaggctggaatg

SEQ ID NO: 129838 - RNA, 22 nt, synthetic construct
  source 1..22: mol_type = other RNA
cctctgtgctagccttcttgga

SEQ ID NO: 129839 - RNA, 22 nt, synthetic construct
  source 1..22: mol_type = other RNA
cctctgtggaccatgttttagg

SEQ ID NO: 129840 - RNA, 22 nt, synthetic construct
  source 1..22: mol_type = other RNA
cctctgtgtgcatgcatgtctg

SEQ ID NO: 129841 - RNA, 22 nt, synthetic construct
  source 1..22: mol_type = other RNA
cctctgttacagctcttctcag

SEQ ID NO: 129842 - RNA, 22 nt, synthetic construct
  source 1..22: mol_type = other RNA
cctcttactaaaaagaaaaagt

SEQ ID NO: 129843 - RNA, 22 nt, synthetic construct
  source 1..22: mol_type = other RNA
cctcttcaatattttggaagac

SEQ ID NO: 129844 - RNA, 22 nt, synthetic construct
  source 1..22: mol_type = other RNA
cctcttcagaagaggataaggg

SEQ ID NO: 129845 - RNA, 22 nt, synthetic construct
  source 1..22: mol_type = other RNA
cctcttcccttgtgcacctcgg

SEQ ID NO: 129846 - RNA, 22 nt, synthetic construct
  source 1..22: mol_type = other RNA
cctcttcctcatccctcatatc

SEQ ID NO: 129847 - RNA, 22 nt, synthetic construct
  source 1..22: mol_type = other RNA
cctcttcctgttgctttaacct

SEQ ID NO: 129848 - RNA, 22 nt, synthetic construct
  source 1..22: mol_type = other RNA
cctcttcgctcttttaaaaatt

SEQ ID NO: 129849 - RNA, 22 nt, synthetic construct
  source 1..22: mol_type = other RNA
cctcttcgggtgtcagaattcc

SEQ ID NO: 129850 - RNA, 22 nt, synthetic construct
  source 1..22: mol_type = other RNA
cctcttctctcctttgaggtaa

SEQ ID NO: 129851 - RNA, 22 nt, synthetic construct
  source 1..22: mol_type = other RNA
cctcttctgaagaggctttctg

SEQ ID NO: 129852 - RNA, 22 nt, synthetic construct
  source 1..22: mol_type = other RNA
cctcttgaagtcagttacagca

SEQ ID NO: 129853 - RNA, 22 nt, synthetic construct
  source 1..22: mol_type = other RNA
cctctttcatatctgattttgt

SEQ ID NO: 129854 - RNA, 22 nt, synthetic construct
  source 1..22: mol_type = other RNA
cctctttctcaacttcctgttt

SEQ ID NO: 129855 - RNA, 22 nt, synthetic construct
  source 1..22: mol_type = other RNA
cctctttgctaataagtgagtt

SEQ ID NO: 129856 - RNA, 22 nt, synthetic construct
  source 1..22: mol_type = other RNA
cctgaaaaacggaggttgcagt

SEQ ID NO: 129857 - RNA, 22 nt, synthetic construct
  source 1..22: mol_type = other RNA
cctgaaaaatgagaaacctaag

SEQ ID NO: 129858 - RNA, 22 nt, synthetic construct
  source 1..22: mol_type = other RNA
cctgaaaagtgtattattctaa

SEQ ID NO: 129859 - RNA, 22 nt, synthetic construct
  source 1..22: mol_type = other RNA
cctgaaaattccttcccctttc

SEQ ID NO: 129860 - RNA, 22 nt, synthetic construct
  source 1..22: mol_type = other RNA
cctgaaatctgatttgtttagt

SEQ ID NO: 129861 - RNA, 22 nt, synthetic construct
  source 1..22: mol_type = other RNA
cctgaaatgaaccaaacttggt

SEQ ID NO: 129862 - RNA, 22 nt, synthetic construct
  source 1..22: mol_type = other RNA
cctgaaatggcttaaggaaata

SEQ ID NO: 129863 - RNA, 22 nt, synthetic construct
  source 1..22: mol_type = other RNA
cctgaaattctcaaatgaacag

SEQ ID NO: 129864 - RNA, 22 nt, synthetic construct
  source 1..22: mol_type = other RNA
cctgaaattgtcagaaaagatc

SEQ ID NO: 129865 - RNA, 22 nt, synthetic construct
  source 1..22: mol_type = other RNA
cctgaacaaaatttttgcaaac

SEQ ID NO: 129866 - RNA, 22 nt, synthetic construct
  source 1..22: mol_type = other RNA
cctgaacaatgattttcttaaa

SEQ ID NO: 129867 - RNA, 22 nt, synthetic construct
  source 1..22: mol_type = other RNA
cctgaacccaggaggcaaaggt

SEQ ID NO: 129868 - RNA, 22 nt, synthetic construct
  source 1..22: mol_type = other RNA
cctgaactcgtggcctcaagca

SEQ ID NO: 129869 - RNA, 22 nt, synthetic construct
  source 1..22: mol_type = other RNA
cctgaagactggatttgattgg

SEQ ID NO: 129870 - RNA, 22 nt, synthetic construct
  source 1..22: mol_type = other RNA
cctgaagtctttggtgatccta

SEQ ID NO: 129871 - RNA, 22 nt, synthetic construct
  source 1..22: mol_type = other RNA
cctgaatacccctccctacctg

SEQ ID NO: 129872 - RNA, 22 nt, synthetic construct
  source 1..22: mol_type = other RNA
cctgaatactattcctattgtt

SEQ ID NO: 129873 - RNA, 22 nt, synthetic construct
  source 1..22: mol_type = other RNA
cctgaatgactgttgcctctgt

SEQ ID NO: 129874 - RNA, 22 nt, synthetic construct
  source 1..22: mol_type = other RNA
cctgaatgatttccctgcatac

SEQ ID NO: 129875 - RNA, 22 nt, synthetic construct
  source 1..22: mol_type = other RNA
cctgaattctaacattatcttc

SEQ ID NO: 129876 - RNA, 22 nt, synthetic construct
  source 1..22: mol_type = other RNA
cctgaattctaatgaactccca

SEQ ID NO: 129877 - RNA, 22 nt, synthetic construct
  source 1..22: mol_type = other RNA
cctgacaaagtatgagaaatgt

SEQ ID NO: 129878 - RNA, 22 nt, synthetic construct
  source 1..22: mol_type = other RNA
cctgacaagtagtacaaaagtg

SEQ ID NO: 129879 - RNA, 22 nt, synthetic construct
  source 1..22: mol_type = other RNA
cctgacagcaaataaacaaaat

SEQ ID NO: 129880 - RNA, 22 nt, synthetic construct
  source 1..22: mol_type = other RNA
cctgacctcaagcgatccagcc

SEQ ID NO: 129881 - RNA, 22 nt, synthetic construct
  source 1..22: mol_type = other RNA
cctgacctcagatatccacctg

SEQ ID NO: 129882 - RNA, 22 nt, synthetic construct
  source 1..22: mol_type = other RNA
cctgacctctgcagttagcatg

SEQ ID NO: 129883 - RNA, 22 nt, synthetic construct
  source 1..22: mol_type = other RNA
cctgacttcaaactatacttca

SEQ ID NO: 129884 - RNA, 22 nt, synthetic construct
  source 1..22: mol_type = other RNA
cctgagaaccggaacttgagtt

SEQ ID NO: 129885 - RNA, 22 nt, synthetic construct
  source 1..22: mol_type = other RNA
cctgagaacttcagtatatatt

SEQ ID NO: 129886 - RNA, 22 nt, synthetic construct
  source 1..22: mol_type = other RNA
cctgagaagtcaaagcctgtgg

SEQ ID NO: 129887 - RNA, 22 nt, synthetic construct
  source 1..22: mol_type = other RNA
cctgagacttaggcaaaggaaa

SEQ ID NO: 129888 - RNA, 22 nt, synthetic construct
  source 1..22: mol_type = other RNA
cctgagcaaggaaggaaaggag

SEQ ID NO: 129889 - RNA, 22 nt, synthetic construct
  source 1..22: mol_type = other RNA
cctgagcatccccgctgcgaga

SEQ ID NO: 129890 - RNA, 22 nt, synthetic construct
  source 1..22: mol_type = other RNA
cctgagccgtcggtatgttaat

SEQ ID NO: 129891 - RNA, 22 nt, synthetic construct
  source 1..22: mol_type = other RNA
cctgagctctcagtggccctgt

SEQ ID NO: 129892 - RNA, 22 nt, synthetic construct
  source 1..22: mol_type = other RNA
cctgagctttccttagttcgaa

SEQ ID NO: 129893 - RNA, 22 nt, synthetic construct
  source 1..22: mol_type = other RNA
cctgaggaagctaatcaagccg

SEQ ID NO: 129894 - RNA, 22 nt, synthetic construct
  source 1..22: mol_type = other RNA
cctgaggacactagcaatccag

SEQ ID NO: 129895 - RNA, 22 nt, synthetic construct
  source 1..22: mol_type = other RNA
cctgaggatataacgatagtct

SEQ ID NO: 129896 - RNA, 22 nt, synthetic construct
  source 1..22: mol_type = other RNA
cctgagggctttgtgaagggag

SEQ ID NO: 129897 - RNA, 22 nt, synthetic construct
  source 1..22: mol_type = other RNA
cctgaggggtcttatgctggtg

SEQ ID NO: 129898 - RNA, 22 nt, synthetic construct
  source 1..22: mol_type = other RNA
cctgagggtgagaccaccacac

SEQ ID NO: 129899 - RNA, 22 nt, synthetic construct
  source 1..22: mol_type = other RNA
cctgaggtctcaaaatttaaag

SEQ ID NO: 129900 - RNA, 22 nt, synthetic construct
  source 1..22: mol_type = other RNA
cctgaggtctttaaaagaaagc

SEQ ID NO: 129901 - RNA, 22 nt, synthetic construct
  source 1..22: mol_type = other RNA
cctgagtagctgtgattaccgg

SEQ ID NO: 129902 - RNA, 22 nt, synthetic construct
  source 1..22: mol_type = other RNA
cctgagtccagaggtgagcttt

SEQ ID NO: 129903 - RNA, 22 nt, synthetic construct
  source 1..22: mol_type = other RNA
cctgataagctcccagccaaac

SEQ ID NO: 129904 - RNA, 22 nt, synthetic construct
  source 1..22: mol_type = other RNA
cctgataaggggctatctttac

SEQ ID NO: 129905 - RNA, 22 nt, synthetic construct
  source 1..22: mol_type = other RNA
cctgataatcacagacgcaaag

SEQ ID NO: 129906 - RNA, 22 nt, synthetic construct
  source 1..22: mol_type = other RNA
cctgatagatattggcaacatt

SEQ ID NO: 129907 - RNA, 22 nt, synthetic construct
  source 1..22: mol_type = other RNA
cctgatagctgtggaagcacag

SEQ ID NO: 129908 - RNA, 22 nt, synthetic construct
  source 1..22: mol_type = other RNA
cctgatatgtcgcatgaaaaca

SEQ ID NO: 129909 - RNA, 22 nt, synthetic construct
  source 1..22: mol_type = other RNA
cctgatcaagttgcttggcaca

SEQ ID NO: 129910 - RNA, 22 nt, synthetic construct
  source 1..22: mol_type = other RNA
cctgatcacaccctcctacctt

SEQ ID NO: 129911 - RNA, 22 nt, synthetic construct
  source 1..22: mol_type = other RNA
cctgatcagcaccctcaaatgt

SEQ ID NO: 129912 - RNA, 22 nt, synthetic construct
  source 1..22: mol_type = other RNA
cctgatgatgatggtgatgcta

SEQ ID NO: 129913 - RNA, 22 nt, synthetic construct
  source 1..22: mol_type = other RNA
cctgatggacattctgcttcct

SEQ ID NO: 129914 - RNA, 22 nt, synthetic construct
  source 1..22: mol_type = other RNA
cctgattagaggctgcaccctc

SEQ ID NO: 129915 - RNA, 22 nt, synthetic construct
  source 1..22: mol_type = other RNA
cctgattcttccactagtggga

SEQ ID NO: 129916 - RNA, 22 nt, synthetic construct
  source 1..22: mol_type = other RNA
cctgattgagattagcgaaagg

SEQ ID NO: 129917 - RNA, 22 nt, synthetic construct
  source 1..22: mol_type = other RNA
cctgatttaaagtaggttgaga

SEQ ID NO: 129918 - RNA, 22 nt, synthetic construct
  source 1..22: mol_type = other RNA
cctgatttaggccactctcatc

SEQ ID NO: 129919 - RNA, 22 nt, synthetic construct
  source 1..22: mol_type = other RNA
cctgcaatcacagcacttgggg

SEQ ID NO: 129920 - RNA, 22 nt, synthetic construct
  source 1..22: mol_type = other RNA
cctgcacaaaggattgggaaga

SEQ ID NO: 129921 - RNA, 22 nt, synthetic construct
  source 1..22: mol_type = other RNA
cctgcacatgcacaaggtcaag

SEQ ID NO: 129922 - RNA, 22 nt, synthetic construct
  source 1..22: mol_type = other RNA
cctgcaccatttattgtcaagg

SEQ ID NO: 129923 - RNA, 22 nt, synthetic construct
  source 1..22: mol_type = other RNA
cctgcactcaagcaatcctccg

SEQ ID NO: 129924 - RNA, 22 nt, synthetic construct
  source 1..22: mol_type = other RNA
cctgcagaaggagaaaccattt

SEQ ID NO: 129925 - RNA, 22 nt, synthetic construct
  source 1..22: mol_type = other RNA
cctgcagacatgcacgagaaaa

SEQ ID NO: 129926 - RNA, 22 nt, synthetic construct
  source 1..22: mol_type = other RNA
cctgcagactgcaggtcttcaa

SEQ ID NO: 129927 - RNA, 22 nt, synthetic construct
  source 1..22: mol_type = other RNA
cctgcagccagatttgatcctg

SEQ ID NO: 129928 - RNA, 22 nt, synthetic construct
  source 1..22: mol_type = other RNA
cctgcaggtatttctaaatcaa

SEQ ID NO: 129929 - RNA, 22 nt, synthetic construct
  source 1..22: mol_type = other RNA
cctgcaggttgatactagttta

SEQ ID NO: 129930 - RNA, 22 nt, synthetic construct
  source 1..22: mol_type = other RNA
cctgcagtctgcaggcagaatg

SEQ ID NO: 129931 - RNA, 22 nt, synthetic construct
  source 1..22: mol_type = other RNA
cctgcagtggcgtgtgcccagg

SEQ ID NO: 129932 - RNA, 22 nt, synthetic construct
  source 1..22: mol_type = other RNA
cctgcatacactcatttccttt

SEQ ID NO: 129933 - RNA, 22 nt, synthetic construct
  source 1..22: mol_type = other RNA
cctgcatatgtttttattagca

SEQ ID NO: 129934 - RNA, 22 nt, synthetic construct
  source 1..22: mol_type = other RNA
cctgcatggggagttttaggaa

SEQ ID NO: 129935 - RNA, 22 nt, synthetic construct
  source 1..22: mol_type = other RNA
cctgcatggtgtaaaatacaac

SEQ ID NO: 129936 - RNA, 22 nt, synthetic construct
  source 1..22: mol_type = other RNA
cctgcattgcatttacttgtca

SEQ ID NO: 129937 - RNA, 22 nt, synthetic construct
  source 1..22: mol_type = other RNA
cctgccacactccagcatccct

SEQ ID NO: 129938 - RNA, 22 nt, synthetic construct
  source 1..22: mol_type = other RNA
cctgccagagttggcacagcca

SEQ ID NO: 129939 - RNA, 22 nt, synthetic construct
  source 1..22: mol_type = other RNA
cctgccatagagggagcatctt

SEQ ID NO: 129940 - RNA, 22 nt, synthetic construct
  source 1..22: mol_type = other RNA
cctgccatggtgttaaatattt

SEQ ID NO: 129941 - RNA, 22 nt, synthetic construct
  source 1..22: mol_type = other RNA
cctgcccctccactccacaaag

SEQ ID NO: 129942 - RNA, 22 nt, synthetic construct
  source 1..22: mol_type = other RNA
cctgccccttatcctcttctga

SEQ ID NO: 129943 - RNA, 22 nt, synthetic construct
  source 1..22: mol_type = other RNA
cctgccctgtgaaaatcatttt

SEQ ID NO: 129944 - RNA, 22 nt, synthetic construct
  source 1..22: mol_type = other RNA
cctgccgcagagcaagcacgtt

SEQ ID NO: 129945 - RNA, 22 nt, synthetic construct
  source 1..22: mol_type = other RNA
cctgccgcttcgcctttctcgc

SEQ ID NO: 129946 - RNA, 22 nt, synthetic construct
  source 1..22: mol_type = other RNA
cctgccttcctgacctctgcag

SEQ ID NO: 129947 - RNA, 22 nt, synthetic construct
  source 1..22: mol_type = other RNA
cctgccttccttgggcacactc

SEQ ID NO: 129948 - RNA, 22 nt, synthetic construct
  source 1..22: mol_type = other RNA
cctgccttggccttctgaggag

SEQ ID NO: 129949 - RNA, 22 nt, synthetic construct
  source 1..22: mol_type = other RNA
cctgcctttgttcatcatcttt

SEQ ID NO: 129950 - RNA, 22 nt, synthetic construct
  source 1..22: mol_type = other RNA
cctgcgaaggcaatgtaacaca

SEQ ID NO: 129951 - RNA, 22 nt, synthetic construct
  source 1..22: mol_type = other RNA
cctgcgattggttggactccac

SEQ ID NO: 129952 - RNA, 22 nt, synthetic construct
  source 1..22: mol_type = other RNA
cctgcgtccgtagaccgaggaa

SEQ ID NO: 129953 - RNA, 22 nt, synthetic construct
  source 1..22: mol_type = other RNA
cctgctaacaccttgaactggg

SEQ ID NO: 129954 - RNA, 22 nt, synthetic construct
  source 1..22: mol_type = other RNA
cctgctacgaatgaactcctat

SEQ ID NO: 129955 - RNA, 22 nt, synthetic construct
  source 1..22: mol_type = other RNA
cctgctactcaggagattaagg

SEQ ID NO: 129956 - RNA, 22 nt, synthetic construct
  source 1..22: mol_type = other RNA
cctgctacttgtggggctgagg

SEQ ID NO: 129957 - RNA, 22 nt, synthetic construct
  source 1..22: mol_type = other RNA
cctgctatgcatactttggaag

SEQ ID NO: 129958 - RNA, 22 nt, synthetic construct
  source 1..22: mol_type = other RNA
cctgctattttattagatagtg

SEQ ID NO: 129959 - RNA, 22 nt, synthetic construct
  source 1..22: mol_type = other RNA
cctgctccagtatgacctcctc

SEQ ID NO: 129960 - RNA, 22 nt, synthetic construct
  source 1..22: mol_type = other RNA
cctgctctgcacgtactagtca

SEQ ID NO: 129961 - RNA, 22 nt, synthetic construct
  source 1..22: mol_type = other RNA
cctgctctgcagagactgtgct

SEQ ID NO: 129962 - RNA, 22 nt, synthetic construct
  source 1..22: mol_type = other RNA
cctgctctttatctccacattt

SEQ ID NO: 129963 - RNA, 22 nt, synthetic construct
  source 1..22: mol_type = other RNA
cctgctgccagatgttctaatt

SEQ ID NO: 129964 - RNA, 22 nt, synthetic construct
  source 1..22: mol_type = other RNA
cctgctggaacgaatattcatt

SEQ ID NO: 129965 - RNA, 22 nt, synthetic construct
  source 1..22: mol_type = other RNA
cctgctgggctattgttttgca

SEQ ID NO: 129966 - RNA, 22 nt, synthetic construct
  source 1..22: mol_type = other RNA
cctgctgtcgtttatgcattta

SEQ ID NO: 129967 - RNA, 22 nt, synthetic construct
  source 1..22: mol_type = other RNA
cctgctgtggccgagggagacg

SEQ ID NO: 129968 - RNA, 22 nt, synthetic construct
  source 1..22: mol_type = other RNA
cctgctgttcccaagcaagtgt

SEQ ID NO: 129969 - RNA, 22 nt, synthetic construct
  source 1..22: mol_type = other RNA
cctgcttcagcctaagcaagtt

SEQ ID NO: 129970 - RNA, 22 nt, synthetic construct
  source 1..22: mol_type = other RNA
cctgcttcatctggaccagtta

SEQ ID NO: 129971 - RNA, 22 nt, synthetic construct
  source 1..22: mol_type = other RNA
cctgcttcattccgcgtttatt

SEQ ID NO: 129972 - RNA, 22 nt, synthetic construct
  source 1..22: mol_type = other RNA
cctgcttcccccaaagaaggaa

SEQ ID NO: 129973 - RNA, 22 nt, synthetic construct
  source 1..22: mol_type = other RNA
cctgcttggcgcagtgcttagc

SEQ ID NO: 129974 - RNA, 22 nt, synthetic construct
  source 1..22: mol_type = other RNA
cctgctttaaaacactggcaaa

SEQ ID NO: 129975 - RNA, 22 nt, synthetic construct
  source 1..22: mol_type = other RNA
cctgctttcagttctttcggat

SEQ ID NO: 129976 - RNA, 22 nt, synthetic construct
  source 1..22: mol_type = other RNA
cctgctttcctcatgtccatag

SEQ ID NO: 129977 - RNA, 22 nt, synthetic construct
  source 1..22: mol_type = other RNA
cctgctttctactagtataaga

SEQ ID NO: 129978 - RNA, 22 nt, synthetic construct
  source 1..22: mol_type = other RNA
cctgctttcttggggctctaat

SEQ ID NO: 129979 - RNA, 22 nt, synthetic construct
  source 1..22: mol_type = other RNA
cctgcttttggaagcatgtggc

SEQ ID NO: 129980 - RNA, 22 nt, synthetic construct
  source 1..22: mol_type = other RNA
cctggaaaaagaccataatata

SEQ ID NO: 129981 - RNA, 22 nt, synthetic construct
  source 1..22: mol_type = other RNA
cctggaaaacttctctggagca

SEQ ID NO: 129982 - RNA, 22 nt, synthetic construct
  source 1..22: mol_type = other RNA
cctggaaataagtttcatggac

SEQ ID NO: 129983 - RNA, 22 nt, synthetic construct
  source 1..22: mol_type = other RNA
cctggaaattattcaatatgtt

SEQ ID NO: 129984 - RNA, 22 nt, synthetic construct
  source 1..22: mol_type = other RNA
cctggaacaatcaaaccatcct

SEQ ID NO: 129985 - RNA, 22 nt, synthetic construct
  source 1..22: mol_type = other RNA
cctggaacaggccctttgttag

SEQ ID NO: 129986 - RNA, 22 nt, synthetic construct
  source 1..22: mol_type = other RNA
cctggaagttcaaggttataat

SEQ ID NO: 129987 - RNA, 22 nt, synthetic construct
  source 1..22: mol_type = other RNA
cctggaatagtagcttcaatga

SEQ ID NO: 129988 - RNA, 22 nt, synthetic construct
  source 1..22: mol_type = other RNA
cctggaatcctctaccaaaaaa

SEQ ID NO: 129989 - RNA, 22 nt, synthetic construct
  source 1..22: mol_type = other RNA
cctggaatgggttggaggagaa

SEQ ID NO: 129990 - RNA, 22 nt, synthetic construct
  source 1..22: mol_type = other RNA
cctggacaacagtgtgagaccg

SEQ ID NO: 129991 - RNA, 22 nt, synthetic construct
  source 1..22: mol_type = other RNA
cctggacacacacagtcctgtg

SEQ ID NO: 129992 - RNA, 22 nt, synthetic construct
  source 1..22: mol_type = other RNA
cctggacaggatcccggaacag

SEQ ID NO: 129993 - RNA, 22 nt, synthetic construct
  source 1..22: mol_type = other RNA
cctggacccgggaggcagatgt

SEQ ID NO: 129994 - RNA, 22 nt, synthetic construct
  source 1..22: mol_type = other RNA
cctggactgtgatgactgtaag

SEQ ID NO: 129995 - RNA, 22 nt, synthetic construct
  source 1..22: mol_type = other RNA
cctggagaaagcccagccgcgg

SEQ ID NO: 129996 - RNA, 22 nt, synthetic construct
  source 1..22: mol_type = other RNA
cctggagaggcaaaggccgctc

SEQ ID NO: 129997 - RNA, 22 nt, synthetic construct
  source 1..22: mol_type = other RNA
cctggagcctgaggacactagc

SEQ ID NO: 129998 - RNA, 22 nt, synthetic construct
  source 1..22: mol_type = other RNA
cctggagggctcccagtgccca

SEQ ID NO: 129999 - RNA, 22 nt, synthetic construct
  source 1..22: mol_type = other RNA
cctggagttaattccacaacca

SEQ ID NO: 130000 - RNA, 22 nt, synthetic construct
  source 1..22: mol_type = other RNA
cctggatcaagtgggatttatc

SEQ ID NO: 130001 - RNA, 22 nt, synthetic construct
  source 1..22: mol_type = other RNA
cctggatcccccagcccctggt

SEQ ID NO: 130002 - RNA, 22 nt, synthetic construct
  source 1..22: mol_type = other RNA
cctggatgaatgcagtggcttc

SEQ ID NO: 130003 - RNA, 22 nt, synthetic construct
  source 1..22: mol_type = other RNA
cctggattgctagtgtcctcag

SEQ ID NO: 130004 - RNA, 22 nt, synthetic construct
  source 1..22: mol_type = other RNA
cctggatttgggaaggatggcc

SEQ ID NO: 130005 - RNA, 22 nt, synthetic construct
  source 1..22: mol_type = other RNA
cctggcaacaaaggcgaagccc

SEQ ID NO: 130006 - RNA, 22 nt, synthetic construct
  source 1..22: mol_type = other RNA
cctggcaatactctcagaaatt

SEQ ID NO: 130007 - RNA, 22 nt, synthetic construct
  source 1..22: mol_type = other RNA
cctggcagatcaattgaccaaa

SEQ ID NO: 130008 - RNA, 22 nt, synthetic construct
  source 1..22: mol_type = other RNA
cctggcagtctaggaaaagact

SEQ ID NO: 130009 - RNA, 22 nt, synthetic construct
  source 1..22: mol_type = other RNA
cctggcattgtcccgggggagg

SEQ ID NO: 130010 - RNA, 22 nt, synthetic construct
  source 1..22: mol_type = other RNA
cctggccaacatcgtaaaacct

SEQ ID NO: 130011 - RNA, 22 nt, synthetic construct
  source 1..22: mol_type = other RNA
cctggccacatgcttccaaaag

SEQ ID NO: 130012 - RNA, 22 nt, synthetic construct
  source 1..22: mol_type = other RNA
cctggcccctttcaagattgtt

SEQ ID NO: 130013 - RNA, 22 nt, synthetic construct
  source 1..22: mol_type = other RNA
cctggccgggatttacttctat

SEQ ID NO: 130014 - RNA, 22 nt, synthetic construct
  source 1..22: mol_type = other RNA
cctggctctagcccagcttccg

SEQ ID NO: 130015 - RNA, 22 nt, synthetic construct
  source 1..22: mol_type = other RNA
cctggcttgtgacatcaagggt

SEQ ID NO: 130016 - RNA, 22 nt, synthetic construct
  source 1..22: mol_type = other RNA
cctggctttagatggtaaaaca

SEQ ID NO: 130017 - RNA, 22 nt, synthetic construct
  source 1..22: mol_type = other RNA
cctgggaaaaggatttgtttgt

SEQ ID NO: 130018 - RNA, 22 nt, synthetic construct
  source 1..22: mol_type = other RNA
cctgggaaagcctggctttaga

SEQ ID NO: 130019 - RNA, 22 nt, synthetic construct
  source 1..22: mol_type = other RNA
cctgggacagagcgagactccg

SEQ ID NO: 130020 - RNA, 22 nt, synthetic construct
  source 1..22: mol_type = other RNA
cctgggagaaagaccaagagtg

SEQ ID NO: 130021 - RNA, 22 nt, synthetic construct
  source 1..22: mol_type = other RNA
cctgggatgcaagaatggttta

SEQ ID NO: 130022 - RNA, 22 nt, synthetic construct
  source 1..22: mol_type = other RNA
cctgggcacacgccactgcagg

SEQ ID NO: 130023 - RNA, 22 nt, synthetic construct
  source 1..22: mol_type = other RNA
cctgggcgacaagagcagaact

SEQ ID NO: 130024 - RNA, 22 nt, synthetic construct
  source 1..22: mol_type = other RNA
cctgggcgacagagtgaaactc

SEQ ID NO: 130025 - RNA, 22 nt, synthetic construct
  source 1..22: mol_type = other RNA
cctgggctcatctaagcctacc

SEQ ID NO: 130026 - RNA, 22 nt, synthetic construct
  source 1..22: mol_type = other RNA
cctggggaataagattttaggt

SEQ ID NO: 130027 - RNA, 22 nt, synthetic construct
  source 1..22: mol_type = other RNA
cctggggcctcagcatgtcttc

SEQ ID NO: 130028 - RNA, 22 nt, synthetic construct
  source 1..22: mol_type = other RNA
cctgggggagactgtgcaatgt

SEQ ID NO: 130029 - RNA, 22 nt, synthetic construct
  source 1..22: mol_type = other RNA
cctggggtttccttacctttat

SEQ ID NO: 130030 - RNA, 22 nt, synthetic construct
  source 1..22: mol_type = other RNA
cctgggtaattaaacatttttt

SEQ ID NO: 130031 - RNA, 22 nt, synthetic construct
  source 1..22: mol_type = other RNA
cctgggtatacagcaaaagaat

SEQ ID NO: 130032 - RNA, 22 nt, synthetic construct
  source 1..22: mol_type = other RNA
cctgggttcaggtgcctcctgc

SEQ ID NO: 130033 - RNA, 22 nt, synthetic construct
  source 1..22: mol_type = other RNA
cctgggttctcccttctattcc

SEQ ID NO: 130034 - RNA, 22 nt, synthetic construct
  source 1..22: mol_type = other RNA
cctggtaataatgaaagctccc

SEQ ID NO: 130035 - RNA, 22 nt, synthetic construct
  source 1..22: mol_type = other RNA
cctggtaatgaatagaaaatcc

SEQ ID NO: 130036 - RNA, 22 nt, synthetic construct
  source 1..22: mol_type = other RNA
cctggtactctatgatatatac

SEQ ID NO: 130037 - RNA, 22 nt, synthetic construct
  source 1..22: mol_type = other RNA
cctggtatgagtgtttccctta

SEQ ID NO: 130038 - RNA, 22 nt, synthetic construct
  source 1..22: mol_type = other RNA
cctggtcaacagggtaagattc

SEQ ID NO: 130039 - RNA, 22 nt, synthetic construct
  source 1..22: mol_type = other RNA
cctggtcctgagggctttgtga

SEQ ID NO: 130040 - RNA, 22 nt, synthetic construct
  source 1..22: mol_type = other RNA
cctggtccttaaatttctaagg

SEQ ID NO: 130041 - RNA, 22 nt, synthetic construct
  source 1..22: mol_type = other RNA
cctggtcgagctgggtgatgtt

SEQ ID NO: 130042 - RNA, 22 nt, synthetic construct
  source 1..22: mol_type = other RNA
cctggtctcccagcatgaagcc

SEQ ID NO: 130043 - RNA, 22 nt, synthetic construct
  source 1..22: mol_type = other RNA
cctggtgatctatgaatttgcc

SEQ ID NO: 130044 - RNA, 22 nt, synthetic construct
  source 1..22: mol_type = other RNA
cctggtgattaaagttatttct

SEQ ID NO: 130045 - RNA, 22 nt, synthetic construct
  source 1..22: mol_type = other RNA
cctggtgctttctatctctcag

SEQ ID NO: 130046 - RNA, 22 nt, synthetic construct
  source 1..22: mol_type = other RNA
cctggtgggttcatgccattct

SEQ ID NO: 130047 - RNA, 22 nt, synthetic construct
  source 1..22: mol_type = other RNA
cctggttagggagactttcact

SEQ ID NO: 130048 - RNA, 22 nt, synthetic construct
  source 1..22: mol_type = other RNA
cctggttcaagctatgctcctg

SEQ ID NO: 130049 - RNA, 22 nt, synthetic construct
  source 1..22: mol_type = other RNA
cctggttttgatcatcgcatta

SEQ ID NO: 130050 - RNA, 22 nt, synthetic construct
  source 1..22: mol_type = other RNA
cctgtaaacctggaatcctcta

SEQ ID NO: 130051 - RNA, 22 nt, synthetic construct
  source 1..22: mol_type = other RNA
cctgtaattacatacttcaaag

SEQ ID NO: 130052 - RNA, 22 nt, synthetic construct
  source 1..22: mol_type = other RNA
cctgtaatttttctctttttgt

SEQ ID NO: 130053 - RNA, 22 nt, synthetic construct
  source 1..22: mol_type = other RNA
cctgtacccattagacactaac

SEQ ID NO: 130054 - RNA, 22 nt, synthetic construct
  source 1..22: mol_type = other RNA
cctgtagaaaatagggacggcc

SEQ ID NO: 130055 - RNA, 22 nt, synthetic construct
  source 1..22: mol_type = other RNA
cctgtagagatttttatcaaaa

SEQ ID NO: 130056 - RNA, 22 nt, synthetic construct
  source 1..22: mol_type = other RNA
cctgtagattgggcttttcata

SEQ ID NO: 130057 - RNA, 22 nt, synthetic construct
  source 1..22: mol_type = other RNA
cctgtagcagacactgggttct

SEQ ID NO: 130058 - RNA, 22 nt, synthetic construct
  source 1..22: mol_type = other RNA
cctgtagttttggtgtcatttt

SEQ ID NO: 130059 - RNA, 22 nt, synthetic construct
  source 1..22: mol_type = other RNA
cctgtataaataaaatgtctgg

SEQ ID NO: 130060 - RNA, 22 nt, synthetic construct
  source 1..22: mol_type = other RNA
cctgtatatctccttttaagag

SEQ ID NO: 130061 - RNA, 22 nt, synthetic construct
  source 1..22: mol_type = other RNA
cctgtatgccgctggtgaaaaa

SEQ ID NO: 130062 - RNA, 22 nt, synthetic construct
  source 1..22: mol_type = other RNA
cctgtcagaaacaccaacacaa

SEQ ID NO: 130063 - RNA, 22 nt, synthetic construct
  source 1..22: mol_type = other RNA
cctgtcagtgtggttcatattt

SEQ ID NO: 130064 - RNA, 22 nt, synthetic construct
  source 1..22: mol_type = other RNA
cctgtcagtttctgatttatct

SEQ ID NO: 130065 - RNA, 22 nt, synthetic construct
  source 1..22: mol_type = other RNA
cctgtcatgtcaaatttttcac

SEQ ID NO: 130066 - RNA, 22 nt, synthetic construct
  source 1..22: mol_type = other RNA
cctgtccaacatggcaaaaccc

SEQ ID NO: 130067 - RNA, 22 nt, synthetic construct
  source 1..22: mol_type = other RNA
cctgtccaagtatttctcatct

SEQ ID NO: 130068 - RNA, 22 nt, synthetic construct
  source 1..22: mol_type = other RNA
cctgtccaggcgcctgcattgc

SEQ ID NO: 130069 - RNA, 22 nt, synthetic construct
  source 1..22: mol_type = other RNA
cctgtccttgtgttttatttgg

SEQ ID NO: 130070 - RNA, 22 nt, synthetic construct
  source 1..22: mol_type = other RNA
cctgtctcagagtatatatgct

SEQ ID NO: 130071 - RNA, 22 nt, synthetic construct
  source 1..22: mol_type = other RNA
cctgtctctaaaaaataccaaa

SEQ ID NO: 130072 - RNA, 22 nt, synthetic construct
  source 1..22: mol_type = other RNA
cctgtctgggaagttatgtagc

SEQ ID NO: 130073 - RNA, 22 nt, synthetic construct
  source 1..22: mol_type = other RNA
cctgtctgtgatgtagaggcag

SEQ ID NO: 130074 - RNA, 22 nt, synthetic construct
  source 1..22: mol_type = other RNA
cctgtcttggacccatgcccat

SEQ ID NO: 130075 - RNA, 22 nt, synthetic construct
  source 1..22: mol_type = other RNA
cctgtctttcccattaccaaaa

SEQ ID NO: 130076 - RNA, 22 nt, synthetic construct
  source 1..22: mol_type = other RNA
cctgtctttctgtctgcttttt

SEQ ID NO: 130077 - RNA, 22 nt, synthetic construct
  source 1..22: mol_type = other RNA
cctgtgaaaatcattttggcaa

SEQ ID NO: 130078 - RNA, 22 nt, synthetic construct
  source 1..22: mol_type = other RNA
cctgtgacagtatgtcagactc

SEQ ID NO: 130079 - RNA, 22 nt, synthetic construct
  source 1..22: mol_type = other RNA
cctgtgatttatgtggcattta

SEQ ID NO: 130080 - RNA, 22 nt, synthetic construct
  source 1..22: mol_type = other RNA
cctgtgatttccagtgtttggt

SEQ ID NO: 130081 - RNA, 22 nt, synthetic construct
  source 1..22: mol_type = other RNA
cctgtgccaagtccgtgcatgc

SEQ ID NO: 130082 - RNA, 22 nt, synthetic construct
  source 1..22: mol_type = other RNA
cctgtgcgtgaatctgttcctg

SEQ ID NO: 130083 - RNA, 22 nt, synthetic construct
  source 1..22: mol_type = other RNA
cctgtgcttgtctctctctttc

SEQ ID NO: 130084 - RNA, 22 nt, synthetic construct
  source 1..22: mol_type = other RNA
cctgtgcttttctcgtgcatgt

SEQ ID NO: 130085 - RNA, 22 nt, synthetic construct
  source 1..22: mol_type = other RNA
cctgtggaggcagtaccattcc

SEQ ID NO: 130086 - RNA, 22 nt, synthetic construct
  source 1..22: mol_type = other RNA
cctgtggtccctgctactcagg

SEQ ID NO: 130087 - RNA, 22 nt, synthetic construct
  source 1..22: mol_type = other RNA
cctgtggtctcttcgagggggc

SEQ ID NO: 130088 - RNA, 22 nt, synthetic construct
  source 1..22: mol_type = other RNA
cctgtgtatgtgtagtcagtga

SEQ ID NO: 130089 - RNA, 22 nt, synthetic construct
  source 1..22: mol_type = other RNA
cctgtgtcagtgacagttctgt

SEQ ID NO: 130090 - RNA, 22 nt, synthetic construct
  source 1..22: mol_type = other RNA
cctgtgtgcatgctcccatttg

SEQ ID NO: 130091 - RNA, 22 nt, synthetic construct
  source 1..22: mol_type = other RNA
cctgtgtttctgctattctctt

SEQ ID NO: 130092 - RNA, 22 nt, synthetic construct
  source 1..22: mol_type = other RNA
cctgttacatggttctgtgcta

SEQ ID NO: 130093 - RNA, 22 nt, synthetic construct
  source 1..22: mol_type = other RNA
cctgttagtcccctagtggatg

SEQ ID NO: 130094 - RNA, 22 nt, synthetic construct
  source 1..22: mol_type = other RNA
cctgttcatttgagaatttcag

SEQ ID NO: 130095 - RNA, 22 nt, synthetic construct
  source 1..22: mol_type = other RNA
cctgttccaggcctcgctcttg

SEQ ID NO: 130096 - RNA, 22 nt, synthetic construct
  source 1..22: mol_type = other RNA
cctgttccgattttacttacta

SEQ ID NO: 130097 - RNA, 22 nt, synthetic construct
  source 1..22: mol_type = other RNA
cctgttccgggatcctgtccag

SEQ ID NO: 130098 - RNA, 22 nt, synthetic construct
  source 1..22: mol_type = other RNA
cctgttctttggagctgtattt

SEQ ID NO: 130099 - RNA, 22 nt, synthetic construct
  source 1..22: mol_type = other RNA
cctgttctttgttagtttattc

SEQ ID NO: 130100 - RNA, 22 nt, synthetic construct
  source 1..22: mol_type = other RNA
cctgttcttttgtaatctaagg

SEQ ID NO: 130101 - RNA, 22 nt, synthetic construct
  source 1..22: mol_type = other RNA
cctgttgaatagcaactgtttt

SEQ ID NO: 130102 - RNA, 22 nt, synthetic construct
  source 1..22: mol_type = other RNA
cctgttgattgttgccatcatt

SEQ ID NO: 130103 - RNA, 22 nt, synthetic construct
  source 1..22: mol_type = other RNA
cctgttgctttaacctctggta

SEQ ID NO: 130104 - RNA, 22 nt, synthetic construct
  source 1..22: mol_type = other RNA
cctgttggcctggacacacaca

SEQ ID NO: 130105 - RNA, 22 nt, synthetic construct
  source 1..22: mol_type = other RNA
cctgttgggaggtttttgatta

SEQ ID NO: 130106 - RNA, 22 nt, synthetic construct
  source 1..22: mol_type = other RNA
cctgttgggctattaagtattg

SEQ ID NO: 130107 - RNA, 22 nt, synthetic construct
  source 1..22: mol_type = other RNA
cctgttgtgaggattcgattaa

SEQ ID NO: 130108 - RNA, 22 nt, synthetic construct
  source 1..22: mol_type = other RNA
cctgtttaaaaagaaaaagctc

SEQ ID NO: 130109 - RNA, 22 nt, synthetic construct
  source 1..22: mol_type = other RNA
cctgtttcccttaatgttgaca

SEQ ID NO: 130110 - RNA, 22 nt, synthetic construct
  source 1..22: mol_type = other RNA
cctgtttctctacatctggatc

SEQ ID NO: 130111 - RNA, 22 nt, synthetic construct
  source 1..22: mol_type = other RNA
cctgtttgagaagtcttttcct

SEQ ID NO: 130112 - RNA, 22 nt, synthetic construct
  source 1..22: mol_type = other RNA
cctgttttagtggctcacagtg

SEQ ID NO: 130113 - RNA, 22 nt, synthetic construct
  source 1..22: mol_type = other RNA
ccttaaaaaaggtttttgaaca

SEQ ID NO: 130114 - RNA, 22 nt, synthetic construct
  source 1..22: mol_type = other RNA
ccttaaaagagtgaaatgattt

SEQ ID NO: 130115 - RNA, 22 nt, synthetic construct
  source 1..22: mol_type = other RNA
ccttaaaaggaactaatttcat

SEQ ID NO: 130116 - RNA, 22 nt, synthetic construct
  source 1..22: mol_type = other RNA
ccttaaaagtgctgcagtatgc

SEQ ID NO: 130117 - RNA, 22 nt, synthetic construct
  source 1..22: mol_type = other RNA
ccttaaaccatatacaaaactg

SEQ ID NO: 130118 - RNA, 22 nt, synthetic construct
  source 1..22: mol_type = other RNA
ccttaaagccacactcttggtc

SEQ ID NO: 130119 - RNA, 22 nt, synthetic construct
  source 1..22: mol_type = other RNA
ccttaaattccaaaagtgaata

SEQ ID NO: 130120 - RNA, 22 nt, synthetic construct
  source 1..22: mol_type = other RNA
ccttaaatttctaaggttctgc

SEQ ID NO: 130121 - RNA, 22 nt, synthetic construct
  source 1..22: mol_type = other RNA
ccttaacctttttcttttcaca

SEQ ID NO: 130122 - RNA, 22 nt, synthetic construct
  source 1..22: mol_type = other RNA
ccttaacttcacctctacacaa

SEQ ID NO: 130123 - RNA, 22 nt, synthetic construct
  source 1..22: mol_type = other RNA
ccttaagcacagactgtgcctt

SEQ ID NO: 130124 - RNA, 22 nt, synthetic construct
  source 1..22: mol_type = other RNA
ccttaagccatttcaggttttc

SEQ ID NO: 130125 - RNA, 22 nt, synthetic construct
  source 1..22: mol_type = other RNA
ccttaatctcctgagtagcagg

SEQ ID NO: 130126 - RNA, 22 nt, synthetic construct
  source 1..22: mol_type = other RNA
ccttaatgccaccgaattgtac

SEQ ID NO: 130127 - RNA, 22 nt, synthetic construct
  source 1..22: mol_type = other RNA
ccttaatgttgacatcttgcat

SEQ ID NO: 130128 - RNA, 22 nt, synthetic construct
  source 1..22: mol_type = other RNA
ccttaatgtttagtagaattct

SEQ ID NO: 130129 - RNA, 22 nt, synthetic construct
  source 1..22: mol_type = other RNA
ccttacactcaaaagccatagt

SEQ ID NO: 130130 - RNA, 22 nt, synthetic construct
  source 1..22: mol_type = other RNA
ccttacattgtaatcctgtttc

SEQ ID NO: 130131 - RNA, 22 nt, synthetic construct
  source 1..22: mol_type = other RNA
ccttaccactataatccagatg

SEQ ID NO: 130132 - RNA, 22 nt, synthetic construct
  source 1..22: mol_type = other RNA
ccttaccactgaagtgttgaga

SEQ ID NO: 130133 - RNA, 22 nt, synthetic construct
  source 1..22: mol_type = other RNA
ccttaccagtgcttgcagcctt

SEQ ID NO: 130134 - RNA, 22 nt, synthetic construct
  source 1..22: mol_type = other RNA
ccttaccttaaaccatatacaa

SEQ ID NO: 130135 - RNA, 22 nt, synthetic construct
  source 1..22: mol_type = other RNA
ccttacctttatctttggatat

SEQ ID NO: 130136 - RNA, 22 nt, synthetic construct
  source 1..22: mol_type = other RNA
ccttacgcgtggatgtgtgcac

SEQ ID NO: 130137 - RNA, 22 nt, synthetic construct
  source 1..22: mol_type = other RNA
ccttactaaattttgaggcttt

SEQ ID NO: 130138 - RNA, 22 nt, synthetic construct
  source 1..22: mol_type = other RNA
ccttactaccaccactaatgtc

SEQ ID NO: 130139 - RNA, 22 nt, synthetic construct
  source 1..22: mol_type = other RNA
ccttacttccagctcacgttac

SEQ ID NO: 130140 - RNA, 22 nt, synthetic construct
  source 1..22: mol_type = other RNA
ccttagaaatttaaggaccagg

SEQ ID NO: 130141 - RNA, 22 nt, synthetic construct
  source 1..22: mol_type = other RNA
ccttagattacaaaagaacagg

SEQ ID NO: 130142 - RNA, 22 nt, synthetic construct
  source 1..22: mol_type = other RNA
ccttagcccaagctaccattta

SEQ ID NO: 130143 - RNA, 22 nt, synthetic construct
  source 1..22: mol_type = other RNA
ccttagcccacttgttgatggg

SEQ ID NO: 130144 - RNA, 22 nt, synthetic construct
  source 1..22: mol_type = other RNA
ccttagctctcatgtcagagac

SEQ ID NO: 130145 - RNA, 22 nt, synthetic construct
  source 1..22: mol_type = other RNA
ccttagtggttgacccataaac

SEQ ID NO: 130146 - RNA, 22 nt, synthetic construct
  source 1..22: mol_type = other RNA
ccttagttttcacttttgtgca

SEQ ID NO: 130147 - RNA, 22 nt, synthetic construct
  source 1..22: mol_type = other RNA
ccttataaaatgagggtaaaat

SEQ ID NO: 130148 - RNA, 22 nt, synthetic construct
  source 1..22: mol_type = other RNA
ccttatagatgacgaaagtgaa

SEQ ID NO: 130149 - RNA, 22 nt, synthetic construct
  source 1..22: mol_type = other RNA
ccttatagtattacctcccatg

SEQ ID NO: 130150 - RNA, 22 nt, synthetic construct
  source 1..22: mol_type = other RNA
ccttatatgggatatctaacat

SEQ ID NO: 130151 - RNA, 22 nt, synthetic construct
  source 1..22: mol_type = other RNA
ccttatcaggaaagtgccagcc

SEQ ID NO: 130152 - RNA, 22 nt, synthetic construct
  source 1..22: mol_type = other RNA
ccttatccattcatctctcgat

SEQ ID NO: 130153 - RNA, 22 nt, synthetic construct
  source 1..22: mol_type = other RNA
ccttatccgataaagggtctgg

SEQ ID NO: 130154 - RNA, 22 nt, synthetic construct
  source 1..22: mol_type = other RNA
ccttatcctcttctgaagaggc

SEQ ID NO: 130155 - RNA, 22 nt, synthetic construct
  source 1..22: mol_type = other RNA
ccttatggatatctggcctgca

SEQ ID NO: 130156 - RNA, 22 nt, synthetic construct
  source 1..22: mol_type = other RNA
ccttatgtccagcccccagttt

SEQ ID NO: 130157 - RNA, 22 nt, synthetic construct
  source 1..22: mol_type = other RNA
ccttatgtgaaagtagaggact

SEQ ID NO: 130158 - RNA, 22 nt, synthetic construct
  source 1..22: mol_type = other RNA
ccttatgtgtgtataacccgtt

SEQ ID NO: 130159 - RNA, 22 nt, synthetic construct
  source 1..22: mol_type = other RNA
ccttattcaaataattgctgca

SEQ ID NO: 130160 - RNA, 22 nt, synthetic construct
  source 1..22: mol_type = other RNA
ccttattgagaagcagaaaatc

SEQ ID NO: 130161 - RNA, 22 nt, synthetic construct
  source 1..22: mol_type = other RNA
ccttatttaatgtgctgtccat

SEQ ID NO: 130162 - RNA, 22 nt, synthetic construct
  source 1..22: mol_type = other RNA
ccttatttggaaatatggtcac

SEQ ID NO: 130163 - RNA, 22 nt, synthetic construct
  source 1..22: mol_type = other RNA
ccttcaagttgctttttcttct

SEQ ID NO: 130164 - RNA, 22 nt, synthetic construct
  source 1..22: mol_type = other RNA
ccttcaatgtttggtagatttc

SEQ ID NO: 130165 - RNA, 22 nt, synthetic construct
  source 1..22: mol_type = other RNA
ccttcacaaagccctcaggacc

SEQ ID NO: 130166 - RNA, 22 nt, synthetic construct
  source 1..22: mol_type = other RNA
ccttcaccaaagatttactaaa

SEQ ID NO: 130167 - RNA, 22 nt, synthetic construct
  source 1..22: mol_type = other RNA
ccttcagaactcttctccaagg

SEQ ID NO: 130168 - RNA, 22 nt, synthetic construct
  source 1..22: mol_type = other RNA
ccttcagaagccctgcagccag

SEQ ID NO: 130169 - RNA, 22 nt, synthetic construct
  source 1..22: mol_type = other RNA
ccttcagaaggagtccagtcct

SEQ ID NO: 130170 - RNA, 22 nt, synthetic construct
  source 1..22: mol_type = other RNA
ccttcagcctgtgtcagtgaca

SEQ ID NO: 130171 - RNA, 22 nt, synthetic construct
  source 1..22: mol_type = other RNA
ccttcagctatggtgttatttg

SEQ ID NO: 130172 - RNA, 22 nt, synthetic construct
  source 1..22: mol_type = other RNA
ccttcagtatgaatgcacgtga

SEQ ID NO: 130173 - RNA, 22 nt, synthetic construct
  source 1..22: mol_type = other RNA
ccttcagtcagttctctgcccc

SEQ ID NO: 130174 - RNA, 22 nt, synthetic construct
  source 1..22: mol_type = other RNA
ccttcagtgtagtcagacacac

SEQ ID NO: 130175 - RNA, 22 nt, synthetic construct
  source 1..22: mol_type = other RNA
ccttcatactattttctatagt

SEQ ID NO: 130176 - RNA, 22 nt, synthetic construct
  source 1..22: mol_type = other RNA
ccttcatcatttgtattatttc

SEQ ID NO: 130177 - RNA, 22 nt, synthetic construct
  source 1..22: mol_type = other RNA
ccttcatgtcccctgtccaagt

SEQ ID NO: 130178 - RNA, 22 nt, synthetic construct
  source 1..22: mol_type = other RNA
ccttccaaagtatgcatagcag

SEQ ID NO: 130179 - RNA, 22 nt, synthetic construct
  source 1..22: mol_type = other RNA
ccttccacctgctctttatctc

SEQ ID NO: 130180 - RNA, 22 nt, synthetic construct
  source 1..22: mol_type = other RNA
ccttccacggaatgcccctttg

SEQ ID NO: 130181 - RNA, 22 nt, synthetic construct
  source 1..22: mol_type = other RNA
ccttccagagacaaagcataaa

SEQ ID NO: 130182 - RNA, 22 nt, synthetic construct
  source 1..22: mol_type = other RNA
ccttccagatgttttacacatg

SEQ ID NO: 130183 - RNA, 22 nt, synthetic construct
  source 1..22: mol_type = other RNA
ccttccagcgtgtgcatgaccc

SEQ ID NO: 130184 - RNA, 22 nt, synthetic construct
  source 1..22: mol_type = other RNA
ccttccagtatgatgccactca

SEQ ID NO: 130185 - RNA, 22 nt, synthetic construct
  source 1..22: mol_type = other RNA
ccttccagtttatatgcctaga

SEQ ID NO: 130186 - RNA, 22 nt, synthetic construct
  source 1..22: mol_type = other RNA
ccttcccaaagacatcctgatt

SEQ ID NO: 130187 - RNA, 22 nt, synthetic construct
  source 1..22: mol_type = other RNA
ccttcccaaatccaggatggca

SEQ ID NO: 130188 - RNA, 22 nt, synthetic construct
  source 1..22: mol_type = other RNA
ccttccccacctttcctgcccc

SEQ ID NO: 130189 - RNA, 22 nt, synthetic construct
  source 1..22: mol_type = other RNA
ccttcccctgctgttcccaagc

SEQ ID NO: 130190 - RNA, 22 nt, synthetic construct
  source 1..22: mol_type = other RNA
ccttcccctggtcgagctgggt

SEQ ID NO: 130191 - RNA, 22 nt, synthetic construct
  source 1..22: mol_type = other RNA
ccttcccctttctttggttttg

SEQ ID NO: 130192 - RNA, 22 nt, synthetic construct
  source 1..22: mol_type = other RNA
ccttccctactcactgaaaccc

SEQ ID NO: 130193 - RNA, 22 nt, synthetic construct
  source 1..22: mol_type = other RNA
ccttccctgaacaatgattttc

SEQ ID NO: 130194 - RNA, 22 nt, synthetic construct
  source 1..22: mol_type = other RNA
ccttccgacctgtagattgggc

SEQ ID NO: 130195 - RNA, 22 nt, synthetic construct
  source 1..22: mol_type = other RNA
ccttcctacacatatctttagg

SEQ ID NO: 130196 - RNA, 22 nt, synthetic construct
  source 1..22: mol_type = other RNA
ccttcctaccctgccttccttg

SEQ ID NO: 130197 - RNA, 22 nt, synthetic construct
  source 1..22: mol_type = other RNA
ccttcctcttcctcatccctca

SEQ ID NO: 130198 - RNA, 22 nt, synthetic construct
  source 1..22: mol_type = other RNA
ccttcctgacctctgcagttag

SEQ ID NO: 130199 - RNA, 22 nt, synthetic construct
  source 1..22: mol_type = other RNA
ccttcctgttctttgttagttt

SEQ ID NO: 130200 - RNA, 22 nt, synthetic construct
  source 1..22: mol_type = other RNA
ccttccttcatgtcccctgtcc

SEQ ID NO: 130201 - RNA, 22 nt, synthetic construct
  source 1..22: mol_type = other RNA
ccttccttgctcaggagtaact

SEQ ID NO: 130202 - RNA, 22 nt, synthetic construct
  source 1..22: mol_type = other RNA
ccttccttgcttgtcttgaata

SEQ ID NO: 130203 - RNA, 22 nt, synthetic construct
  source 1..22: mol_type = other RNA
ccttccttgggcacactcccca

SEQ ID NO: 130204 - RNA, 22 nt, synthetic construct
  source 1..22: mol_type = other RNA
ccttccttgtgtcttaaattca

SEQ ID NO: 130205 - RNA, 22 nt, synthetic construct
  source 1..22: mol_type = other RNA
ccttcctttgatgacttacaga

SEQ ID NO: 130206 - RNA, 22 nt, synthetic construct
  source 1..22: mol_type = other RNA
ccttcgaggcatctagttacca

SEQ ID NO: 130207 - RNA, 22 nt, synthetic construct
  source 1..22: mol_type = other RNA
ccttcgcagggtgaaacttgaa

SEQ ID NO: 130208 - RNA, 22 nt, synthetic construct
  source 1..22: mol_type = other RNA
ccttcgcgcgcggcagggatgc

SEQ ID NO: 130209 - RNA, 22 nt, synthetic construct
  source 1..22: mol_type = other RNA
ccttcgcgggcaccttccctac

SEQ ID NO: 130210 - RNA, 22 nt, synthetic construct
  source 1..22: mol_type = other RNA
ccttctaaaatcatcacagtat

SEQ ID NO: 130211 - RNA, 22 nt, synthetic construct
  source 1..22: mol_type = other RNA
ccttctaatcagtaacttaaat

SEQ ID NO: 130212 - RNA, 22 nt, synthetic construct
  source 1..22: mol_type = other RNA
ccttctacatccccccacccct

SEQ ID NO: 130213 - RNA, 22 nt, synthetic construct
  source 1..22: mol_type = other RNA
ccttctacttatcttttctagt

SEQ ID NO: 130214 - RNA, 22 nt, synthetic construct
  source 1..22: mol_type = other RNA
ccttctattccattgttctctt

SEQ ID NO: 130215 - RNA, 22 nt, synthetic construct
  source 1..22: mol_type = other RNA
ccttctcagaaggacaccagtc

SEQ ID NO: 130216 - RNA, 22 nt, synthetic construct
  source 1..22: mol_type = other RNA
ccttctcatagtcttccaaaat

SEQ ID NO: 130217 - RNA, 22 nt, synthetic construct
  source 1..22: mol_type = other RNA
ccttctcctccaacccattcca

SEQ ID NO: 130218 - RNA, 22 nt, synthetic construct
  source 1..22: mol_type = other RNA
ccttctcgaagtggtgcttgaa

SEQ ID NO: 130219 - RNA, 22 nt, synthetic construct
  source 1..22: mol_type = other RNA
ccttctcgtgtgagctctagcc

SEQ ID NO: 130220 - RNA, 22 nt, synthetic construct
  source 1..22: mol_type = other RNA
ccttctctactctgcctcagtt

SEQ ID NO: 130221 - RNA, 22 nt, synthetic construct
  source 1..22: mol_type = other RNA
ccttctctcttccaaataatcc

SEQ ID NO: 130222 - RNA, 22 nt, synthetic construct
  source 1..22: mol_type = other RNA
ccttctcttatactagtagaaa

SEQ ID NO: 130223 - RNA, 22 nt, synthetic construct
  source 1..22: mol_type = other RNA
ccttctgaaggcactaacaaag

SEQ ID NO: 130224 - RNA, 22 nt, synthetic construct
  source 1..22: mol_type = other RNA
ccttctgagaaggcgaaatgtg

SEQ ID NO: 130225 - RNA, 22 nt, synthetic construct
  source 1..22: mol_type = other RNA
ccttctgaggagctgagaccac

SEQ ID NO: 130226 - RNA, 22 nt, synthetic construct
  source 1..22: mol_type = other RNA
ccttctgcaggctgaactgctg

SEQ ID NO: 130227 - RNA, 22 nt, synthetic construct
  source 1..22: mol_type = other RNA
ccttctgccttgacctcccaaa

SEQ ID NO: 130228 - RNA, 22 nt, synthetic construct
  source 1..22: mol_type = other RNA
ccttctgctcactttgggatta

SEQ ID NO: 130229 - RNA, 22 nt, synthetic construct
  source 1..22: mol_type = other RNA
ccttctgctcggctctgtcacc

SEQ ID NO: 130230 - RNA, 22 nt, synthetic construct
  source 1..22: mol_type = other RNA
ccttctgctgggcccactctcc

SEQ ID NO: 130231 - RNA, 22 nt, synthetic construct
  source 1..22: mol_type = other RNA
ccttctggaagatttctactgg

SEQ ID NO: 130232 - RNA, 22 nt, synthetic construct
  source 1..22: mol_type = other RNA
ccttctggggttcaaaccacct

SEQ ID NO: 130233 - RNA, 22 nt, synthetic construct
  source 1..22: mol_type = other RNA
ccttctgttaatagataggtca

SEQ ID NO: 130234 - RNA, 22 nt, synthetic construct
  source 1..22: mol_type = other RNA
ccttcttaaatgtgaattagat

SEQ ID NO: 130235 - RNA, 22 nt, synthetic construct
  source 1..22: mol_type = other RNA
ccttcttaagacatttgggaat

SEQ ID NO: 130236 - RNA, 22 nt, synthetic construct
  source 1..22: mol_type = other RNA
ccttcttatttccttccagttt

SEQ ID NO: 130237 - RNA, 22 nt, synthetic construct
  source 1..22: mol_type = other RNA
ccttcttcacacattaactatg

SEQ ID NO: 130238 - RNA, 22 nt, synthetic construct
  source 1..22: mol_type = other RNA
ccttcttgagagtctcttaaga

SEQ ID NO: 130239 - RNA, 22 nt, synthetic construct
  source 1..22: mol_type = other RNA
ccttcttggagtaaacctgcaa

SEQ ID NO: 130240 - RNA, 22 nt, synthetic construct
  source 1..22: mol_type = other RNA
ccttctttctttcaaatgtgac

SEQ ID NO: 130241 - RNA, 22 nt, synthetic construct
  source 1..22: mol_type = other RNA
ccttctttgggggaagcaggaa

SEQ ID NO: 130242 - RNA, 22 nt, synthetic construct
  source 1..22: mol_type = other RNA
ccttgaaaatgcccttatttaa

SEQ ID NO: 130243 - RNA, 22 nt, synthetic construct
  source 1..22: mol_type = other RNA
ccttgaaaatttccagcatttt

SEQ ID NO: 130244 - RNA, 22 nt, synthetic construct
  source 1..22: mol_type = other RNA
ccttgaaagatcatttagtaag

SEQ ID NO: 130245 - RNA, 22 nt, synthetic construct
  source 1..22: mol_type = other RNA
ccttgaaaggatactgagaaca

SEQ ID NO: 130246 - RNA, 22 nt, synthetic construct
  source 1..22: mol_type = other RNA
ccttgaacatgaacgagaacaa

SEQ ID NO: 130247 - RNA, 22 nt, synthetic construct
  source 1..22: mol_type = other RNA
ccttgaactgggacttctagcc

SEQ ID NO: 130248 - RNA, 22 nt, synthetic construct
  source 1..22: mol_type = other RNA
ccttgaagtacttcagcgcttg

SEQ ID NO: 130249 - RNA, 22 nt, synthetic construct
  source 1..22: mol_type = other RNA
ccttgacaataaatggtgcagg

SEQ ID NO: 130250 - RNA, 22 nt, synthetic construct
  source 1..22: mol_type = other RNA
ccttgacctcccaaaggactgg

SEQ ID NO: 130251 - RNA, 22 nt, synthetic construct
  source 1..22: mol_type = other RNA
ccttgacgaagtcacattctag

SEQ ID NO: 130252 - RNA, 22 nt, synthetic construct
  source 1..22: mol_type = other RNA
ccttgaggtgagacagaccctg

SEQ ID NO: 130253 - RNA, 22 nt, synthetic construct
  source 1..22: mol_type = other RNA
ccttgaggtgattcagagtgct

SEQ ID NO: 130254 - RNA, 22 nt, synthetic construct
  source 1..22: mol_type = other RNA
ccttgagtatttttgagctttt

SEQ ID NO: 130255 - RNA, 22 nt, synthetic construct
  source 1..22: mol_type = other RNA
ccttgatcagcttcctacccaa

SEQ ID NO: 130256 - RNA, 22 nt, synthetic construct
  source 1..22: mol_type = other RNA
ccttgatccattacatcaacat

SEQ ID NO: 130257 - RNA, 22 nt, synthetic construct
  source 1..22: mol_type = other RNA
ccttgatgtcacaagccagggt

SEQ ID NO: 130258 - RNA, 22 nt, synthetic construct
  source 1..22: mol_type = other RNA
ccttgatttatggcctaagatg

SEQ ID NO: 130259 - RNA, 22 nt, synthetic construct
  source 1..22: mol_type = other RNA
ccttgattttgataaaaatctc

SEQ ID NO: 130260 - RNA, 22 nt, synthetic construct
  source 1..22: mol_type = other RNA
ccttgcaagccacattagccac

SEQ ID NO: 130261 - RNA, 22 nt, synthetic construct
  source 1..22: mol_type = other RNA
ccttgcacattagaatcatccg

SEQ ID NO: 130262 - RNA, 22 nt, synthetic construct
  source 1..22: mol_type = other RNA
ccttgcaccaactccacattgt

SEQ ID NO: 130263 - RNA, 22 nt, synthetic construct
  source 1..22: mol_type = other RNA
ccttgccaacagttactttcct

SEQ ID NO: 130264 - RNA, 22 nt, synthetic construct
  source 1..22: mol_type = other RNA
ccttgccaaggcttgctttggc

SEQ ID NO: 130265 - RNA, 22 nt, synthetic construct
  source 1..22: mol_type = other RNA
ccttgccattctcccagttgtc

SEQ ID NO: 130266 - RNA, 22 nt, synthetic construct
  source 1..22: mol_type = other RNA
ccttgcctgacagcaaataaac

SEQ ID NO: 130267 - RNA, 22 nt, synthetic construct
  source 1..22: mol_type = other RNA
ccttgctatgtaatctcatgga

SEQ ID NO: 130268 - RNA, 22 nt, synthetic construct
  source 1..22: mol_type = other RNA
ccttgctcaggagtaactgctc

SEQ ID NO: 130269 - RNA, 22 nt, synthetic construct
  source 1..22: mol_type = other RNA
ccttgctcattcatctgcagtg

SEQ ID NO: 130270 - RNA, 22 nt, synthetic construct
  source 1..22: mol_type = other RNA
ccttgctgaagaataactgtcc

SEQ ID NO: 130271 - RNA, 22 nt, synthetic construct
  source 1..22: mol_type = other RNA
ccttgctgcttctacccactat

SEQ ID NO: 130272 - RNA, 22 nt, synthetic construct
  source 1..22: mol_type = other RNA
ccttgctgttgtaatgttactt

SEQ ID NO: 130273 - RNA, 22 nt, synthetic construct
  source 1..22: mol_type = other RNA
ccttgcttgtcttgaatagcat

SEQ ID NO: 130274 - RNA, 22 nt, synthetic construct
  source 1..22: mol_type = other RNA
ccttggagaagagttctgaagg

SEQ ID NO: 130275 - RNA, 22 nt, synthetic construct
  source 1..22: mol_type = other RNA
ccttggagagaaaccttggtgt

SEQ ID NO: 130276 - RNA, 22 nt, synthetic construct
  source 1..22: mol_type = other RNA
ccttggaggagccctgctgtgg

SEQ ID NO: 130277 - RNA, 22 nt, synthetic construct
  source 1..22: mol_type = other RNA
ccttggattgctaaactgttcc

SEQ ID NO: 130278 - RNA, 22 nt, synthetic construct
  source 1..22: mol_type = other RNA
ccttggcaaggggaatggtact

SEQ ID NO: 130279 - RNA, 22 nt, synthetic construct
  source 1..22: mol_type = other RNA
ccttggcctccccaagtgctgt

SEQ ID NO: 130280 - RNA, 22 nt, synthetic construct
  source 1..22: mol_type = other RNA
ccttggccttctgaggagctga

SEQ ID NO: 130281 - RNA, 22 nt, synthetic construct
  source 1..22: mol_type = other RNA
ccttggctagactaagaaaaac

SEQ ID NO: 130282 - RNA, 22 nt, synthetic construct
  source 1..22: mol_type = other RNA
ccttgggagaaaatttttacag

SEQ ID NO: 130283 - RNA, 22 nt, synthetic construct
  source 1..22: mol_type = other RNA
ccttgggaggctgaggctgggg

SEQ ID NO: 130284 - RNA, 22 nt, synthetic construct
  source 1..22: mol_type = other RNA
ccttgggatgcagcaaaagcac

SEQ ID NO: 130285 - RNA, 22 nt, synthetic construct
  source 1..22: mol_type = other RNA
ccttgggcacactccccagtgg

SEQ ID NO: 130286 - RNA, 22 nt, synthetic construct
  source 1..22: mol_type = other RNA
ccttggtaaaatcactaattca

SEQ ID NO: 130287 - RNA, 22 nt, synthetic construct
  source 1..22: mol_type = other RNA
ccttggtaaacagcagtcttaa

SEQ ID NO: 130288 - RNA, 22 nt, synthetic construct
  source 1..22: mol_type = other RNA
ccttggtaagagtgagaccctg

SEQ ID NO: 130289 - RNA, 22 nt, synthetic construct
  source 1..22: mol_type = other RNA
ccttggtgtgcttctgatagga

SEQ ID NO: 130290 - RNA, 22 nt, synthetic construct
  source 1..22: mol_type = other RNA
ccttgtaatcaagtatctccct

SEQ ID NO: 130291 - RNA, 22 nt, synthetic construct
  source 1..22: mol_type = other RNA
ccttgtactgtgtggcttctca

SEQ ID NO: 130292 - RNA, 22 nt, synthetic construct
  source 1..22: mol_type = other RNA
ccttgtatccagtaatcttgct

SEQ ID NO: 130293 - RNA, 22 nt, synthetic construct
  source 1..22: mol_type = other RNA
ccttgtatggagactagtacac

SEQ ID NO: 130294 - RNA, 22 nt, synthetic construct
  source 1..22: mol_type = other RNA
ccttgtcctaaaattccttcct

SEQ ID NO: 130295 - RNA, 22 nt, synthetic construct
  source 1..22: mol_type = other RNA
ccttgtgatctatgcatactgc

SEQ ID NO: 130296 - RNA, 22 nt, synthetic construct
  source 1..22: mol_type = other RNA
ccttgtgcacctcgggttcaag

SEQ ID NO: 130297 - RNA, 22 nt, synthetic construct
  source 1..22: mol_type = other RNA
ccttgtgcatgtgcaggaaact

SEQ ID NO: 130298 - RNA, 22 nt, synthetic construct
  source 1..22: mol_type = other RNA
ccttgtggtcttaagagactct

SEQ ID NO: 130299 - RNA, 22 nt, synthetic construct
  source 1..22: mol_type = other RNA
ccttgtgtcttaaattcaaagt

SEQ ID NO: 130300 - RNA, 22 nt, synthetic construct
  source 1..22: mol_type = other RNA
ccttgtgttttatttggctgtt

SEQ ID NO: 130301 - RNA, 22 nt, synthetic construct
  source 1..22: mol_type = other RNA
ccttgttggacagctgggagaa

SEQ ID NO: 130302 - RNA, 22 nt, synthetic construct
  source 1..22: mol_type = other RNA
cctttaaaatgatagcattatc

SEQ ID NO: 130303 - RNA, 22 nt, synthetic construct
  source 1..22: mol_type = other RNA
cctttaacgtatctgggaaaaa

SEQ ID NO: 130304 - RNA, 22 nt, synthetic construct
  source 1..22: mol_type = other RNA
cctttaagttctccaagttatt

SEQ ID NO: 130305 - RNA, 22 nt, synthetic construct
  source 1..22: mol_type = other RNA
cctttaatcacctcaagtgatg

SEQ ID NO: 130306 - RNA, 22 nt, synthetic construct
  source 1..22: mol_type = other RNA
cctttaatttagcgttcatcca

SEQ ID NO: 130307 - RNA, 22 nt, synthetic construct
  source 1..22: mol_type = other RNA
cctttaatttgggtttgagttt

SEQ ID NO: 130308 - RNA, 22 nt, synthetic construct
  source 1..22: mol_type = other RNA
cctttacccctgagaacttcag

SEQ ID NO: 130309 - RNA, 22 nt, synthetic construct
  source 1..22: mol_type = other RNA
cctttactcagattcaccaatt

SEQ ID NO: 130310 - RNA, 22 nt, synthetic construct
  source 1..22: mol_type = other RNA
cctttagtgttctgtgtttatg

SEQ ID NO: 130311 - RNA, 22 nt, synthetic construct
  source 1..22: mol_type = other RNA
cctttatcggataaggaagagt

SEQ ID NO: 130312 - RNA, 22 nt, synthetic construct
  source 1..22: mol_type = other RNA
cctttatctttggatatcccca

SEQ ID NO: 130313 - RNA, 22 nt, synthetic construct
  source 1..22: mol_type = other RNA
cctttattaactagaattgact

SEQ ID NO: 130314 - RNA, 22 nt, synthetic construct
  source 1..22: mol_type = other RNA
cctttattcaaagatcatttca

SEQ ID NO: 130315 - RNA, 22 nt, synthetic construct
  source 1..22: mol_type = other RNA
cctttattttttcttcccatct

SEQ ID NO: 130316 - RNA, 22 nt, synthetic construct
  source 1..22: mol_type = other RNA
cctttcaaagagacctgattct

SEQ ID NO: 130317 - RNA, 22 nt, synthetic construct
  source 1..22: mol_type = other RNA
cctttcaagattgtttaattct

SEQ ID NO: 130318 - RNA, 22 nt, synthetic construct
  source 1..22: mol_type = other RNA
cctttcaaggtatctccccaaa

SEQ ID NO: 130319 - RNA, 22 nt, synthetic construct
  source 1..22: mol_type = other RNA
cctttcactttgatcatacaca

SEQ ID NO: 130320 - RNA, 22 nt, synthetic construct
  source 1..22: mol_type = other RNA
cctttcagcatagcagaacctt

SEQ ID NO: 130321 - RNA, 22 nt, synthetic construct
  source 1..22: mol_type = other RNA
cctttcagtcggttcttcaccg

SEQ ID NO: 130322 - RNA, 22 nt, synthetic construct
  source 1..22: mol_type = other RNA
cctttcatttggcctctgcggc

SEQ ID NO: 130323 - RNA, 22 nt, synthetic construct
  source 1..22: mol_type = other RNA
cctttccaaattcaaagcaagt

SEQ ID NO: 130324 - RNA, 22 nt, synthetic construct
  source 1..22: mol_type = other RNA
cctttccagaggttcttttaaa

SEQ ID NO: 130325 - RNA, 22 nt, synthetic construct
  source 1..22: mol_type = other RNA
cctttcccttctgctcggctct

SEQ ID NO: 130326 - RNA, 22 nt, synthetic construct
  source 1..22: mol_type = other RNA
cctttcctgcccctccactcca

SEQ ID NO: 130327 - RNA, 22 nt, synthetic construct
  source 1..22: mol_type = other RNA
cctttccttccttgctcaggag

SEQ ID NO: 130328 - RNA, 22 nt, synthetic construct
  source 1..22: mol_type = other RNA
cctttccttgtcctaaaattcc

SEQ ID NO: 130329 - RNA, 22 nt, synthetic construct
  source 1..22: mol_type = other RNA
cctttcgctaatctcaatcagg

SEQ ID NO: 130330 - RNA, 22 nt, synthetic construct
  source 1..22: mol_type = other RNA
cctttcgctatcagtagtttgc

SEQ ID NO: 130331 - RNA, 22 nt, synthetic construct
  source 1..22: mol_type = other RNA
cctttcgcttttggagctataa

SEQ ID NO: 130332 - RNA, 22 nt, synthetic construct
  source 1..22: mol_type = other RNA
cctttctagaatgcatccctcc

SEQ ID NO: 130333 - RNA, 22 nt, synthetic construct
  source 1..22: mol_type = other RNA
cctttctaggcatctatttccc

SEQ ID NO: 130334 - RNA, 22 nt, synthetic construct
  source 1..22: mol_type = other RNA
cctttctatacttcatctttcc

SEQ ID NO: 130335 - RNA, 22 nt, synthetic construct
  source 1..22: mol_type = other RNA
cctttctcaaagcccaccagca

SEQ ID NO: 130336 - RNA, 22 nt, synthetic construct
  source 1..22: mol_type = other RNA
cctttctcgcagcggggatgct

SEQ ID NO: 130337 - RNA, 22 nt, synthetic construct
  source 1..22: mol_type = other RNA
cctttctgtttgtttgttttga

SEQ ID NO: 130338 - RNA, 22 nt, synthetic construct
  source 1..22: mol_type = other RNA
cctttcttaccctcacagtcac

SEQ ID NO: 130339 - RNA, 22 nt, synthetic construct
  source 1..22: mol_type = other RNA
cctttcttaggaagctatggag

SEQ ID NO: 130340 - RNA, 22 nt, synthetic construct
  source 1..22: mol_type = other RNA
cctttcttaggtttctcatttt

SEQ ID NO: 130341 - RNA, 22 nt, synthetic construct
  source 1..22: mol_type = other RNA
cctttcttggtctgcagactct

SEQ ID NO: 130342 - RNA, 22 nt, synthetic construct
  source 1..22: mol_type = other RNA
cctttcttgttagtaggaaaac

SEQ ID NO: 130343 - RNA, 22 nt, synthetic construct
  source 1..22: mol_type = other RNA
cctttctttggttttgactcag

SEQ ID NO: 130344 - RNA, 22 nt, synthetic construct
  source 1..22: mol_type = other RNA
cctttgaagtatgtaattacag

SEQ ID NO: 130345 - RNA, 22 nt, synthetic construct
  source 1..22: mol_type = other RNA
cctttgagcagagtcctgaggg

SEQ ID NO: 130346 - RNA, 22 nt, synthetic construct
  source 1..22: mol_type = other RNA
cctttgaggtaagaacttgtct

SEQ ID NO: 130347 - RNA, 22 nt, synthetic construct
  source 1..22: mol_type = other RNA
cctttgatgacttacagatatc

SEQ ID NO: 130348 - RNA, 22 nt, synthetic construct
  source 1..22: mol_type = other RNA
cctttgatgcacaaaagtttaa

SEQ ID NO: 130349 - RNA, 22 nt, synthetic construct
  source 1..22: mol_type = other RNA
cctttgcacacaccaaatcatg

SEQ ID NO: 130350 - RNA, 22 nt, synthetic construct
  source 1..22: mol_type = other RNA
cctttgcctaagtctcaggata

SEQ ID NO: 130351 - RNA, 22 nt, synthetic construct
  source 1..22: mol_type = other RNA
cctttgcctcctgggttcaggt

SEQ ID NO: 130352 - RNA, 22 nt, synthetic construct
  source 1..22: mol_type = other RNA
cctttgcctctccagggaggaa

SEQ ID NO: 130353 - RNA, 22 nt, synthetic construct
  source 1..22: mol_type = other RNA
cctttgcctttcactttgatca

SEQ ID NO: 130354 - RNA, 22 nt, synthetic construct
  source 1..22: mol_type = other RNA
cctttgcgtctgtgattatcag

SEQ ID NO: 130355 - RNA, 22 nt, synthetic construct
  source 1..22: mol_type = other RNA
cctttgcttcccacttcgaaag

SEQ ID NO: 130356 - RNA, 22 nt, synthetic construct
  source 1..22: mol_type = other RNA
cctttggctactgtaaacaatg

SEQ ID NO: 130357 - RNA, 22 nt, synthetic construct
  source 1..22: mol_type = other RNA
cctttgggaggtcaaggcagaa

SEQ ID NO: 130358 - RNA, 22 nt, synthetic construct
  source 1..22: mol_type = other RNA
cctttgtattcatccagtttaa

SEQ ID NO: 130359 - RNA, 22 nt, synthetic construct
  source 1..22: mol_type = other RNA
cctttgtccactgtcagtggga

SEQ ID NO: 130360 - RNA, 22 nt, synthetic construct
  source 1..22: mol_type = other RNA
cctttgtgcaggtctgggtttt

SEQ ID NO: 130361 - RNA, 22 nt, synthetic construct
  source 1..22: mol_type = other RNA
cctttgtgtcaagtacaactaa

SEQ ID NO: 130362 - RNA, 22 nt, synthetic construct
  source 1..22: mol_type = other RNA
cctttgttagtgccttcagaag

SEQ ID NO: 130363 - RNA, 22 nt, synthetic construct
  source 1..22: mol_type = other RNA
cctttgttatctgaacgtcttt

SEQ ID NO: 130364 - RNA, 22 nt, synthetic construct
  source 1..22: mol_type = other RNA
cctttgttcatcatcttttgcc

SEQ ID NO: 130365 - RNA, 22 nt, synthetic construct
  source 1..22: mol_type = other RNA
cctttgttgaaaacgaggaaaa

SEQ ID NO: 130366 - RNA, 22 nt, synthetic construct
  source 1..22: mol_type = other RNA
cctttgttgccaggtggacgcg

SEQ ID NO: 130367 - RNA, 22 nt, synthetic construct
  source 1..22: mol_type = other RNA
ccttttaagagtgaagaaacct

SEQ ID NO: 130368 - RNA, 22 nt, synthetic construct
  source 1..22: mol_type = other RNA
ccttttaagggaaacactcata

SEQ ID NO: 130369 - RNA, 22 nt, synthetic construct
  source 1..22: mol_type = other RNA
ccttttacaccctaggtagggt

SEQ ID NO: 130370 - RNA, 22 nt, synthetic construct
  source 1..22: mol_type = other RNA
ccttttaggtgccccactccac

SEQ ID NO: 130371 - RNA, 22 nt, synthetic construct
  source 1..22: mol_type = other RNA
ccttttatgtgcagtctaacca

SEQ ID NO: 130372 - RNA, 22 nt, synthetic construct
  source 1..22: mol_type = other RNA
ccttttcactcttagtgatgtc

SEQ ID NO: 130373 - RNA, 22 nt, synthetic construct
  source 1..22: mol_type = other RNA
ccttttcccaggagctagaaca

SEQ ID NO: 130374 - RNA, 22 nt, synthetic construct
  source 1..22: mol_type = other RNA
ccttttcctgttccgggatcct

SEQ ID NO: 130375 - RNA, 22 nt, synthetic construct
  source 1..22: mol_type = other RNA
ccttttcgagactgagtaatat

SEQ ID NO: 130376 - RNA, 22 nt, synthetic construct
  source 1..22: mol_type = other RNA
ccttttctgatttgctggctca

SEQ ID NO: 130377 - RNA, 22 nt, synthetic construct
  source 1..22: mol_type = other RNA
ccttttgagtttggtgtattta

SEQ ID NO: 130378 - RNA, 22 nt, synthetic construct
  source 1..22: mol_type = other RNA
ccttttggatgcagatttcttt

SEQ ID NO: 130379 - RNA, 22 nt, synthetic construct
  source 1..22: mol_type = other RNA
ccttttgtagaccctgttagtc

SEQ ID NO: 130380 - RNA, 22 nt, synthetic construct
  source 1..22: mol_type = other RNA
ccttttgtagagggaatttgtt

SEQ ID NO: 130381 - RNA, 22 nt, synthetic construct
  source 1..22: mol_type = other RNA
ccttttgtagctaatatctttg

SEQ ID NO: 130382 - RNA, 22 nt, synthetic construct
  source 1..22: mol_type = other RNA
ccttttgtcaagctatcagaat

SEQ ID NO: 130383 - RNA, 22 nt, synthetic construct
  source 1..22: mol_type = other RNA
cctttttaggtagggataagaa

SEQ ID NO: 130384 - RNA, 22 nt, synthetic construct
  source 1..22: mol_type = other RNA
cctttttatcacccttataaaa

SEQ ID NO: 130385 - RNA, 22 nt, synthetic construct
  source 1..22: mol_type = other RNA
cctttttcaaataatagctatc

SEQ ID NO: 130386 - RNA, 22 nt, synthetic construct
  source 1..22: mol_type = other RNA
cctttttgggatctgtcatgtt

SEQ ID NO: 130387 - RNA, 22 nt, synthetic construct
  source 1..22: mol_type = other RNA
ccttttttaaggaaaagtcagt

SEQ ID NO: 130388 - RNA, 22 nt, synthetic construct
  source 1..22: mol_type = other RNA
ccttttttactgacttttcctt

SEQ ID NO: 130389 - RNA, 22 nt, synthetic construct
  source 1..22: mol_type = other RNA
ccttttttatgtgctttctcaa

SEQ ID NO: 130390 - RNA, 22 nt, synthetic construct
  source 1..22: mol_type = other RNA
ccttttttggtattttttagag

SEQ ID NO: 130391 - RNA, 22 nt, synthetic construct
  source 1..22: mol_type = other RNA
cgaaaacctgaaatggcttaag

SEQ ID NO: 130392 - RNA, 22 nt, synthetic construct
  source 1..22: mol_type = other RNA
cgaaaaggaatggaattctgat

SEQ ID NO: 130393 - RNA, 22 nt, synthetic construct
  source 1..22: mol_type = other RNA
cgaaaatatccctggggtttcc

SEQ ID NO: 130394 - RNA, 22 nt, synthetic construct
  source 1..22: mol_type = other RNA
cgaaaatgggccaaagacttca

SEQ ID NO: 130395 - RNA, 22 nt, synthetic construct
  source 1..22: mol_type = other RNA
cgaaacacactcgtgtatgatt

SEQ ID NO: 130396 - RNA, 22 nt, synthetic construct
  source 1..22: mol_type = other RNA
cgaaagaactgaaagcagggac

SEQ ID NO: 130397 - RNA, 22 nt, synthetic construct
  source 1..22: mol_type = other RNA
cgaaagcctttattttttcttc

SEQ ID NO: 130398 - RNA, 22 nt, synthetic construct
  source 1..22: mol_type = other RNA
cgaaagcggtcaacgcacccag

SEQ ID NO: 130399 - RNA, 22 nt, synthetic construct
  source 1..22: mol_type = other RNA
cgaaagggattctggccaaatc

SEQ ID NO: 130400 - RNA, 22 nt, synthetic construct
  source 1..22: mol_type = other RNA
cgaaaggtacgacgctcttgtt

SEQ ID NO: 130401 - RNA, 22 nt, synthetic construct
  source 1..22: mol_type = other RNA
cgaaagtgaagcccagagaggc

SEQ ID NO: 130402 - RNA, 22 nt, synthetic construct
  source 1..22: mol_type = other RNA
cgaaagtgctctaccctttcca

SEQ ID NO: 130403 - RNA, 22 nt, synthetic construct
  source 1..22: mol_type = other RNA
cgaaagttcagatagaattaaa

SEQ ID NO: 130404 - RNA, 22 nt, synthetic construct
  source 1..22: mol_type = other RNA
cgaaataatcattgttaggtgc

SEQ ID NO: 130405 - RNA, 22 nt, synthetic construct
  source 1..22: mol_type = other RNA
cgaaatagtagttgctcagaaa

SEQ ID NO: 130406 - RNA, 22 nt, synthetic construct
  source 1..22: mol_type = other RNA
cgaaatatctccctcacagtcc

SEQ ID NO: 130407 - RNA, 22 nt, synthetic construct
  source 1..22: mol_type = other RNA
cgaaatgcacttagcgctgatg

SEQ ID NO: 130408 - RNA, 22 nt, synthetic construct
  source 1..22: mol_type = other RNA
cgaaatgtgaacagacagacat

SEQ ID NO: 130409 - RNA, 22 nt, synthetic construct
  source 1..22: mol_type = other RNA
cgaaccaattaccataaagtct

SEQ ID NO: 130410 - RNA, 22 nt, synthetic construct
  source 1..22: mol_type = other RNA
cgaactaaggaaagctcaggac

SEQ ID NO: 130411 - RNA, 22 nt, synthetic construct
  source 1..22: mol_type = other RNA
cgaactcctgacctcaagcgat

SEQ ID NO: 130412 - RNA, 22 nt, synthetic construct
  source 1..22: mol_type = other RNA
cgaactctcgacctcgtgatct

SEQ ID NO: 130413 - RNA, 22 nt, synthetic construct
  source 1..22: mol_type = other RNA
cgaagagaccacaggctctctt

SEQ ID NO: 130414 - RNA, 22 nt, synthetic construct
  source 1..22: mol_type = other RNA
cgaagaggacgatttttccaac

SEQ ID NO: 130415 - RNA, 22 nt, synthetic construct
  source 1..22: mol_type = other RNA
cgaagagggagaagaaataaac

SEQ ID NO: 130416 - RNA, 22 nt, synthetic construct
  source 1..22: mol_type = other RNA
cgaagcaaaacatatgtcagat

SEQ ID NO: 130417 - RNA, 22 nt, synthetic construct
  source 1..22: mol_type = other RNA
cgaagcacaaccactgatggaa

SEQ ID NO: 130418 - RNA, 22 nt, synthetic construct
  source 1..22: mol_type = other RNA
cgaagcccgccgctcgcaggtg

SEQ ID NO: 130419 - RNA, 22 nt, synthetic construct
  source 1..22: mol_type = other RNA
cgaagccttcccctgctgttcc

SEQ ID NO: 130420 - RNA, 22 nt, synthetic construct
  source 1..22: mol_type = other RNA
cgaagcggcagggccgggggtt

SEQ ID NO: 130421 - RNA, 22 nt, synthetic construct
  source 1..22: mol_type = other RNA
cgaagctacagtaatcaaacag

SEQ ID NO: 130422 - RNA, 22 nt, synthetic construct
  source 1..22: mol_type = other RNA
cgaagcttaatttagatgagag

SEQ ID NO: 130423 - RNA, 22 nt, synthetic construct
  source 1..22: mol_type = other RNA
cgaagcttattaaaatgaacct

SEQ ID NO: 130424 - RNA, 22 nt, synthetic construct
  source 1..22: mol_type = other RNA
cgaaggcaatgtaacacagttc

SEQ ID NO: 130425 - RNA, 22 nt, synthetic construct
  source 1..22: mol_type = other RNA
cgaaggcctgcttcattccgcg

SEQ ID NO: 130426 - RNA, 22 nt, synthetic construct
  source 1..22: mol_type = other RNA
cgaaggcgtgtaaactgttgga

SEQ ID NO: 130427 - RNA, 22 nt, synthetic construct
  source 1..22: mol_type = other RNA
cgaagtcacattctagtgatgg

SEQ ID NO: 130428 - RNA, 22 nt, synthetic construct
  source 1..22: mol_type = other RNA
cgaagtgggaagcaaaggattc

SEQ ID NO: 130429 - RNA, 22 nt, synthetic construct
  source 1..22: mol_type = other RNA
cgaagtggtgcttgaactgctg

SEQ ID NO: 130430 - RNA, 22 nt, synthetic construct
  source 1..22: mol_type = other RNA
cgaatcatctaggcatataaac

SEQ ID NO: 130431 - RNA, 22 nt, synthetic construct
  source 1..22: mol_type = other RNA
cgaatcctcacaacaggcctga

SEQ ID NO: 130432 - RNA, 22 nt, synthetic construct
  source 1..22: mol_type = other RNA
cgaatcctttgcttcccacttc

SEQ ID NO: 130433 - RNA, 22 nt, synthetic construct
  source 1..22: mol_type = other RNA
cgaatgaaaacacaacatacca

SEQ ID NO: 130434 - RNA, 22 nt, synthetic construct
  source 1..22: mol_type = other RNA
cgaatgaactcctatagttaag

SEQ ID NO: 130435 - RNA, 22 nt, synthetic construct
  source 1..22: mol_type = other RNA
cgaatgcatgggaggtaatact

SEQ ID NO: 130436 - RNA, 22 nt, synthetic construct
  source 1..22: mol_type = other RNA
cgaatgtggtggtatgcactgt

SEQ ID NO: 130437 - RNA, 22 nt, synthetic construct
  source 1..22: mol_type = other RNA
cgaattagattgttttgttgct

SEQ ID NO: 130438 - RNA, 22 nt, synthetic construct
  source 1..22: mol_type = other RNA
cgaattatgctaacatgaacta

SEQ ID NO: 130439 - RNA, 22 nt, synthetic construct
  source 1..22: mol_type = other RNA
cgaattctttaaaactgctgag

SEQ ID NO: 130440 - RNA, 22 nt, synthetic construct
  source 1..22: mol_type = other RNA
cgaatttacttttaaactgtac

SEQ ID NO: 130441 - RNA, 22 nt, synthetic construct
  source 1..22: mol_type = other RNA
cgacaagagcagaactccacct

SEQ ID NO: 130442 - RNA, 22 nt, synthetic construct
  source 1..22: mol_type = other RNA
cgacaatctctggggttagggc

SEQ ID NO: 130443 - RNA, 22 nt, synthetic construct
  source 1..22: mol_type = other RNA
cgacacacaatccaagtttcta

SEQ ID NO: 130444 - RNA, 22 nt, synthetic construct
  source 1..22: mol_type = other RNA
cgacaccagaactacacattcc

SEQ ID NO: 130445 - RNA, 22 nt, synthetic construct
  source 1..22: mol_type = other RNA
cgacagagtgaaactctggctc

SEQ ID NO: 130446 - RNA, 22 nt, synthetic construct
  source 1..22: mol_type = other RNA
cgacagcagataagatccaagt

SEQ ID NO: 130447 - RNA, 22 nt, synthetic construct
  source 1..22: mol_type = other RNA
cgacagcaggaaaagctaccct

SEQ ID NO: 130448 - RNA, 22 nt, synthetic construct
  source 1..22: mol_type = other RNA
cgacagctacggaggatgaggg

SEQ ID NO: 130449 - RNA, 22 nt, synthetic construct
  source 1..22: mol_type = other RNA
cgacagtcccttgcctgacagc

SEQ ID NO: 130450 - RNA, 22 nt, synthetic construct
  source 1..22: mol_type = other RNA
cgacatatcagggatcacagat

SEQ ID NO: 130451 - RNA, 22 nt, synthetic construct
  source 1..22: mol_type = other RNA
cgaccaagttactagaagcact

SEQ ID NO: 130452 - RNA, 22 nt, synthetic construct
  source 1..22: mol_type = other RNA
cgaccaggggaaggagtctgcc

SEQ ID NO: 130453 - RNA, 22 nt, synthetic construct
  source 1..22: mol_type = other RNA
cgacccactagtgaagtcccat

SEQ ID NO: 130454 - RNA, 22 nt, synthetic construct
  source 1..22: mol_type = other RNA
cgacccccctacctccctcccg

SEQ ID NO: 130455 - RNA, 22 nt, synthetic construct
  source 1..22: mol_type = other RNA
cgaccccctgggctcaagccat

SEQ ID NO: 130456 - RNA, 22 nt, synthetic construct
  source 1..22: mol_type = other RNA
cgaccggacgtggtggctcacg

SEQ ID NO: 130457 - RNA, 22 nt, synthetic construct
  source 1..22: mol_type = other RNA
cgacctccagcgctaagcactg

SEQ ID NO: 130458 - RNA, 22 nt, synthetic construct
  source 1..22: mol_type = other RNA
cgacctcgaagcacaaccactg

SEQ ID NO: 130459 - RNA, 22 nt, synthetic construct
  source 1..22: mol_type = other RNA
cgacctgtagattgggcttttc

SEQ ID NO: 130460 - RNA, 22 nt, synthetic construct
  source 1..22: mol_type = other RNA
cgaccttgctcattcatctgca

SEQ ID NO: 130461 - RNA, 22 nt, synthetic construct
  source 1..22: mol_type = other RNA
cgacgcctttcatttggcctct

SEQ ID NO: 130462 - RNA, 22 nt, synthetic construct
  source 1..22: mol_type = other RNA
cgacgctcttgttcaaaaacct

SEQ ID NO: 130463 - RNA, 22 nt, synthetic construct
  source 1..22: mol_type = other RNA
cgacggctcaggcctgttgtga

SEQ ID NO: 130464 - RNA, 22 nt, synthetic construct
  source 1..22: mol_type = other RNA
cgacgtatgcaacttactctca

SEQ ID NO: 130465 - RNA, 22 nt, synthetic construct
  source 1..22: mol_type = other RNA
cgactcatgcctgtaattctaa

SEQ ID NO: 130466 - RNA, 22 nt, synthetic construct
  source 1..22: mol_type = other RNA
cgactgaaaggaaatgagtgta

SEQ ID NO: 130467 - RNA, 22 nt, synthetic construct
  source 1..22: mol_type = other RNA
cgagaaaaatggggatatccaa

SEQ ID NO: 130468 - RNA, 22 nt, synthetic construct
  source 1..22: mol_type = other RNA
cgagaaaagcacaggcatcggc

SEQ ID NO: 130469 - RNA, 22 nt, synthetic construct
  source 1..22: mol_type = other RNA
cgagaaaggcgaagcggcaggg

SEQ ID NO: 130470 - RNA, 22 nt, synthetic construct
  source 1..22: mol_type = other RNA
cgagaaatcggaactcctgtat

SEQ ID NO: 130471 - RNA, 22 nt, synthetic construct
  source 1..22: mol_type = other RNA
cgagaacaaaacaagaagaaaa

SEQ ID NO: 130472 - RNA, 22 nt, synthetic construct
  source 1..22: mol_type = other RNA
cgagaaggacagcttccaccca

SEQ ID NO: 130473 - RNA, 22 nt, synthetic construct
  source 1..22: mol_type = other RNA
cgagaagggaagtaaagatcaa

SEQ ID NO: 130474 - RNA, 22 nt, synthetic construct
  source 1..22: mol_type = other RNA
cgagacaagttctcctgtgtgc

SEQ ID NO: 130475 - RNA, 22 nt, synthetic construct
  source 1..22: mol_type = other RNA
cgagacctcatctctgcaaaac

SEQ ID NO: 130476 - RNA, 22 nt, synthetic construct
  source 1..22: mol_type = other RNA
cgagactccatctcaagaaaac

SEQ ID NO: 130477 - RNA, 22 nt, synthetic construct
  source 1..22: mol_type = other RNA
cgagactgagtaatattccatt

SEQ ID NO: 130478 - RNA, 22 nt, synthetic construct
  source 1..22: mol_type = other RNA
cgagactgtaatgagctgagat

SEQ ID NO: 130479 - RNA, 22 nt, synthetic construct
  source 1..22: mol_type = other RNA
cgagactgttagggacttatgg

SEQ ID NO: 130480 - RNA, 22 nt, synthetic construct
  source 1..22: mol_type = other RNA
cgagagatgaatggataaggaa

SEQ ID NO: 130481 - RNA, 22 nt, synthetic construct
  source 1..22: mol_type = other RNA
cgagatacttaagtttttaaca

SEQ ID NO: 130482 - RNA, 22 nt, synthetic construct
  source 1..22: mol_type = other RNA
cgagatcacgccactgcattcc

SEQ ID NO: 130483 - RNA, 22 nt, synthetic construct
  source 1..22: mol_type = other RNA
cgagatggcgtgcgcctgtaat

SEQ ID NO: 130484 - RNA, 22 nt, synthetic construct
  source 1..22: mol_type = other RNA
cgagattgcacaattgcactcc

SEQ ID NO: 130485 - RNA, 22 nt, synthetic construct
  source 1..22: mol_type = other RNA
cgagcagaagggaaaggatgac

SEQ ID NO: 130486 - RNA, 22 nt, synthetic construct
  source 1..22: mol_type = other RNA
cgagcggcgggcttcgcctttg

SEQ ID NO: 130487 - RNA, 22 nt, synthetic construct
  source 1..22: mol_type = other RNA
cgagctcctgacctcagatatc

SEQ ID NO: 130488 - RNA, 22 nt, synthetic construct
  source 1..22: mol_type = other RNA
cgagctgggtgatgttcaaccc

SEQ ID NO: 130489 - RNA, 22 nt, synthetic construct
  source 1..22: mol_type = other RNA
cgagcttgatctttacttccct

SEQ ID NO: 130490 - RNA, 22 nt, synthetic construct
  source 1..22: mol_type = other RNA
cgaggaaaagagaacattggtt

SEQ ID NO: 130491 - RNA, 22 nt, synthetic construct
  source 1..22: mol_type = other RNA
cgaggaaacccgctctgggtgc

SEQ ID NO: 130492 - RNA, 22 nt, synthetic construct
  source 1..22: mol_type = other RNA
cgaggacagactgcagttggat

SEQ ID NO: 130493 - RNA, 22 nt, synthetic construct
  source 1..22: mol_type = other RNA
cgaggcagagagagtaactggt

SEQ ID NO: 130494 - RNA, 22 nt, synthetic construct
  source 1..22: mol_type = other RNA
cgaggcaggtggatcaggagat

SEQ ID NO: 130495 - RNA, 22 nt, synthetic construct
  source 1..22: mol_type = other RNA
cgaggcatctagttaccactag

SEQ ID NO: 130496 - RNA, 22 nt, synthetic construct
  source 1..22: mol_type = other RNA
cgaggccagtccctagtgtctc

SEQ ID NO: 130497 - RNA, 22 nt, synthetic construct
  source 1..22: mol_type = other RNA
cgaggcctggaacaggcccttt

SEQ ID NO: 130498 - RNA, 22 nt, synthetic construct
  source 1..22: mol_type = other RNA
cgagggagacggcgagcttgat

SEQ ID NO: 130499 - RNA, 22 nt, synthetic construct
  source 1..22: mol_type = other RNA
cgagggagcgtacggggtccgc

SEQ ID NO: 130500 - RNA, 22 nt, synthetic construct
  source 1..22: mol_type = other RNA
cgagggggctgagtatgggtct

SEQ ID NO: 130501 - RNA, 22 nt, synthetic construct
  source 1..22: mol_type = other RNA
cgagggtagcttttcctgctgt

SEQ ID NO: 130502 - RNA, 22 nt, synthetic construct
  source 1..22: mol_type = other RNA
cgagggttgaacatcacccagc

SEQ ID NO: 130503 - RNA, 22 nt, synthetic construct
  source 1..22: mol_type = other RNA
cgaggtcgagagttcgagacca

SEQ ID NO: 130504 - RNA, 22 nt, synthetic construct
  source 1..22: mol_type = other RNA
cgaggtcgcaccctgagcatcc

SEQ ID NO: 130505 - RNA, 22 nt, synthetic construct
  source 1..22: mol_type = other RNA
cgaggtgcacaagggaagaggc

SEQ ID NO: 130506 - RNA, 22 nt, synthetic construct
  source 1..22: mol_type = other RNA
cgagtaatggatgtttttagag

SEQ ID NO: 130507 - RNA, 22 nt, synthetic construct
  source 1..22: mol_type = other RNA
cgagtaatgggatggctgggcc

SEQ ID NO: 130508 - RNA, 22 nt, synthetic construct
  source 1..22: mol_type = other RNA
cgagtagttgtaactacagaca

SEQ ID NO: 130509 - RNA, 22 nt, synthetic construct
  source 1..22: mol_type = other RNA
cgagtatcatataaattgcaaa

SEQ ID NO: 130510 - RNA, 22 nt, synthetic construct
  source 1..22: mol_type = other RNA
cgagtatctaggagtacagtgc

SEQ ID NO: 130511 - RNA, 22 nt, synthetic construct
  source 1..22: mol_type = other RNA
cgagtattcaagtttcaccctg

SEQ ID NO: 130512 - RNA, 22 nt, synthetic construct
  source 1..22: mol_type = other RNA
cgagtgtgaacgatggtttctg

SEQ ID NO: 130513 - RNA, 22 nt, synthetic construct
  source 1..22: mol_type = other RNA
cgagtgtgtttcgcaaagtaaa

SEQ ID NO: 130514 - RNA, 22 nt, synthetic construct
  source 1..22: mol_type = other RNA
cgagttatgcaagatgtcaaca

SEQ ID NO: 130515 - RNA, 22 nt, synthetic construct
  source 1..22: mol_type = other RNA
cgagttcaggaccagcttgggc

SEQ ID NO: 130516 - RNA, 22 nt, synthetic construct
  source 1..22: mol_type = other RNA
cgagttctgggagttcattaga

SEQ ID NO: 130517 - RNA, 22 nt, synthetic construct
  source 1..22: mol_type = other RNA
cgataaacttcagttttatcaa

SEQ ID NO: 130518 - RNA, 22 nt, synthetic construct
  source 1..22: mol_type = other RNA
cgataaagggtctggtatctac

SEQ ID NO: 130519 - RNA, 22 nt, synthetic construct
  source 1..22: mol_type = other RNA
cgatactttttattttcatggt

SEQ ID NO: 130520 - RNA, 22 nt, synthetic construct
  source 1..22: mol_type = other RNA
cgatagtctcctatattgtcaa

SEQ ID NO: 130521 - RNA, 22 nt, synthetic construct
  source 1..22: mol_type = other RNA
cgatattcctatcagaagcaca

SEQ ID NO: 130522 - RNA, 22 nt, synthetic construct
  source 1..22: mol_type = other RNA
cgatccttactaccaccactaa

SEQ ID NO: 130523 - RNA, 22 nt, synthetic construct
  source 1..22: mol_type = other RNA
cgatgaaattgaccattccacg

SEQ ID NO: 130524 - RNA, 22 nt, synthetic construct
  source 1..22: mol_type = other RNA
cgatgataccttcttgagagtc

SEQ ID NO: 130525 - RNA, 22 nt, synthetic construct
  source 1..22: mol_type = other RNA
cgatgatcaaaaccaggaggtt

SEQ ID NO: 130526 - RNA, 22 nt, synthetic construct
  source 1..22: mol_type = other RNA
cgatgcattccagattgaaatc

SEQ ID NO: 130527 - RNA, 22 nt, synthetic construct
  source 1..22: mol_type = other RNA
cgatgccatgtgttttgttttg

SEQ ID NO: 130528 - RNA, 22 nt, synthetic construct
  source 1..22: mol_type = other RNA
cgatgcctgtgcttttctcgtg

SEQ ID NO: 130529 - RNA, 22 nt, synthetic construct
  source 1..22: mol_type = other RNA
cgatgcttaggtaagaaaaatt

SEQ ID NO: 130530 - RNA, 22 nt, synthetic construct
  source 1..22: mol_type = other RNA
cgatggacatttaggttgtttc

SEQ ID NO: 130531 - RNA, 22 nt, synthetic construct
  source 1..22: mol_type = other RNA
cgatggtttctgacacccgacc

SEQ ID NO: 130532 - RNA, 22 nt, synthetic construct
  source 1..22: mol_type = other RNA
cgattaaaataacacgcagaac

SEQ ID NO: 130533 - RNA, 22 nt, synthetic construct
  source 1..22: mol_type = other RNA
cgattctagtgtctcagcctcc

SEQ ID NO: 130534 - RNA, 22 nt, synthetic construct
  source 1..22: mol_type = other RNA
cgattctgacccagagcctaat

SEQ ID NO: 130535 - RNA, 22 nt, synthetic construct
  source 1..22: mol_type = other RNA
cgattggttggactccaccctg

SEQ ID NO: 130536 - RNA, 22 nt, synthetic construct
  source 1..22: mol_type = other RNA
cgattgtttcagtgtgtccaca

SEQ ID NO: 130537 - RNA, 22 nt, synthetic construct
  source 1..22: mol_type = other RNA
cgatttcagttaacttattgga

SEQ ID NO: 130538 - RNA, 22 nt, synthetic construct
  source 1..22: mol_type = other RNA
cgatttctcggccgggcgcggt

SEQ ID NO: 130539 - RNA, 22 nt, synthetic construct
  source 1..22: mol_type = other RNA
cgatttcttaaaaatgacacca

SEQ ID NO: 130540 - RNA, 22 nt, synthetic construct
  source 1..22: mol_type = other RNA
cgattttacttactagttgtgc

SEQ ID NO: 130541 - RNA, 22 nt, synthetic construct
  source 1..22: mol_type = other RNA
cgatttttccaacagtttacac

SEQ ID NO: 130542 - RNA, 22 nt, synthetic construct
  source 1..22: mol_type = other RNA
cgcaaagcaacatgctaagtgt

SEQ ID NO: 130543 - RNA, 22 nt, synthetic construct
  source 1..22: mol_type = other RNA
cgcaaaggatgtcaacaaaata

SEQ ID NO: 130544 - RNA, 22 nt, synthetic construct
  source 1..22: mol_type = other RNA
cgcaaagtaaaaagcactatcc

SEQ ID NO: 130545 - RNA, 22 nt, synthetic construct
  source 1..22: mol_type = other RNA
cgcaaataatcattcttctaat

SEQ ID NO: 130546 - RNA, 22 nt, synthetic construct
  source 1..22: mol_type = other RNA
cgcaacaattcaacagctacta

SEQ ID NO: 130547 - RNA, 22 nt, synthetic construct
  source 1..22: mol_type = other RNA
cgcaacatctgcctcccgggtc

SEQ ID NO: 130548 - RNA, 22 nt, synthetic construct
  source 1..22: mol_type = other RNA
cgcaagagttccaactgtataa

SEQ ID NO: 130549 - RNA, 22 nt, synthetic construct
  source 1..22: mol_type = other RNA
cgcaatccaaaatcctctgtag

SEQ ID NO: 130550 - RNA, 22 nt, synthetic construct
  source 1..22: mol_type = other RNA
cgcaatctcggcttcactgcaa

SEQ ID NO: 130551 - RNA, 22 nt, synthetic construct
  source 1..22: mol_type = other RNA
cgcaattgcagccagagagtgg

SEQ ID NO: 130552 - RNA, 22 nt, synthetic construct
  source 1..22: mol_type = other RNA
cgcacagggagatacttgatta

SEQ ID NO: 130553 - RNA, 22 nt, synthetic construct
  source 1..22: mol_type = other RNA
cgcacccagagcgggtttcctc

SEQ ID NO: 130554 - RNA, 22 nt, synthetic construct
  source 1..22: mol_type = other RNA
cgcaccctgagcatccccgctg

SEQ ID NO: 130555 - RNA, 22 nt, synthetic construct
  source 1..22: mol_type = other RNA
cgcacctggccgggatttactt

SEQ ID NO: 130556 - RNA, 22 nt, synthetic construct
  source 1..22: mol_type = other RNA
cgcaccttgattttgataaaaa

SEQ ID NO: 130557 - RNA, 22 nt, synthetic construct
  source 1..22: mol_type = other RNA
cgcacgccatctcgcccagcta

SEQ ID NO: 130558 - RNA, 22 nt, synthetic construct
  source 1..22: mol_type = other RNA
cgcactcagcctgttgggaggt

SEQ ID NO: 130559 - RNA, 22 nt, synthetic construct
  source 1..22: mol_type = other RNA
cgcactccacttcccactgcta

SEQ ID NO: 130560 - RNA, 22 nt, synthetic construct
  source 1..22: mol_type = other RNA
cgcagaacagtgtttacacacc

SEQ ID NO: 130561 - RNA, 22 nt, synthetic construct
  source 1..22: mol_type = other RNA
cgcagaaccactgagcacaatg

SEQ ID NO: 130562 - RNA, 22 nt, synthetic construct
  source 1..22: mol_type = other RNA
cgcagaactggggcttgaaccc

SEQ ID NO: 130563 - RNA, 22 nt, synthetic construct
  source 1..22: mol_type = other RNA
cgcagacacaccatgacagagt

SEQ ID NO: 130564 - RNA, 22 nt, synthetic construct
  source 1..22: mol_type = other RNA
cgcagagcaagcacgttagcat

SEQ ID NO: 130565 - RNA, 22 nt, synthetic construct
  source 1..22: mol_type = other RNA
cgcagaggccaaatgaaaggcg

SEQ ID NO: 130566 - RNA, 22 nt, synthetic construct
  source 1..22: mol_type = other RNA
cgcagccatggctcactgcggc

SEQ ID NO: 130567 - RNA, 22 nt, synthetic construct
  source 1..22: mol_type = other RNA
cgcagcggggatgctcagggtg

SEQ ID NO: 130568 - RNA, 22 nt, synthetic construct
  source 1..22: mol_type = other RNA
cgcaggcaaacagcgccactta

SEQ ID NO: 130569 - RNA, 22 nt, synthetic construct
  source 1..22: mol_type = other RNA
cgcagggccattctgctatgaa

SEQ ID NO: 130570 - RNA, 22 nt, synthetic construct
  source 1..22: mol_type = other RNA
cgcagggtgaaacttgaatact

SEQ ID NO: 130571 - RNA, 22 nt, synthetic construct
  source 1..22: mol_type = other RNA
cgcagtgagccatggctgcgcc

SEQ ID NO: 130572 - RNA, 22 nt, synthetic construct
  source 1..22: mol_type = other RNA
cgcagtgcttagcgctggaggt

SEQ ID NO: 130573 - RNA, 22 nt, synthetic construct
  source 1..22: mol_type = other RNA
cgcagtttgttctgctgttgat

SEQ ID NO: 130574 - RNA, 22 nt, synthetic construct
  source 1..22: mol_type = other RNA
cgcataaccaaattatttcagt

SEQ ID NO: 130575 - RNA, 22 nt, synthetic construct
  source 1..22: mol_type = other RNA
cgcatactgtgcagtggatgac

SEQ ID NO: 130576 - RNA, 22 nt, synthetic construct
  source 1..22: mol_type = other RNA
cgcatcattcaaatgatattca

SEQ ID NO: 130577 - RNA, 22 nt, synthetic construct
  source 1..22: mol_type = other RNA
cgcatctggtctatctcattat

SEQ ID NO: 130578 - RNA, 22 nt, synthetic construct
  source 1..22: mol_type = other RNA
cgcatgaaaacagctaggtgag

SEQ ID NO: 130579 - RNA, 22 nt, synthetic construct
  source 1..22: mol_type = other RNA
cgcattacgagttatgcaagat

SEQ ID NO: 130580 - RNA, 22 nt, synthetic construct
  source 1..22: mol_type = other RNA
cgcattgcattgactaccaatt

SEQ ID NO: 130581 - RNA, 22 nt, synthetic construct
  source 1..22: mol_type = other RNA
cgcattgctaattcattgtaca

SEQ ID NO: 130582 - RNA, 22 nt, synthetic construct
  source 1..22: mol_type = other RNA
cgcattgtgatgtctcagatgt

SEQ ID NO: 130583 - RNA, 22 nt, synthetic construct
  source 1..22: mol_type = other RNA
cgcattttttaagtggcgctgt

SEQ ID NO: 130584 - RNA, 22 nt, synthetic construct
  source 1..22: mol_type = other RNA
cgccaattttcatagcagcatt

SEQ ID NO: 130585 - RNA, 22 nt, synthetic construct
  source 1..22: mol_type = other RNA
cgccacctcctccggggaccca

SEQ ID NO: 130586 - RNA, 22 nt, synthetic construct
  source 1..22: mol_type = other RNA
cgccacgtgaagatggagttac

SEQ ID NO: 130587 - RNA, 22 nt, synthetic construct
  source 1..22: mol_type = other RNA
cgccactgcactccagccttgg

SEQ ID NO: 130588 - RNA, 22 nt, synthetic construct
  source 1..22: mol_type = other RNA
cgccactgcaggtgttggtgca

SEQ ID NO: 130589 - RNA, 22 nt, synthetic construct
  source 1..22: mol_type = other RNA
cgccactgcattccgcctgggc

SEQ ID NO: 130590 - RNA, 22 nt, synthetic construct
  source 1..22: mol_type = other RNA
cgccacttaaaaaatgcgcgtc

SEQ ID NO: 130591 - RNA, 22 nt, synthetic construct
  source 1..22: mol_type = other RNA
cgccatacctggtccttaaatt

SEQ ID NO: 130592 - RNA, 22 nt, synthetic construct
  source 1..22: mol_type = other RNA
cgccatcacacccagtatacac

SEQ ID NO: 130593 - RNA, 22 nt, synthetic construct
  source 1..22: mol_type = other RNA
cgcccagcccgtgtgtttagaa

SEQ ID NO: 130594 - RNA, 22 nt, synthetic construct
  source 1..22: mol_type = other RNA
cgcccaggcggaatgcagtggc

SEQ ID NO: 130595 - RNA, 22 nt, synthetic construct
  source 1..22: mol_type = other RNA
cgcccaggctggagctcactgc

SEQ ID NO: 130596 - RNA, 22 nt, synthetic construct
  source 1..22: mol_type = other RNA
cgcccattaggatagctattat

SEQ ID NO: 130597 - RNA, 22 nt, synthetic construct
  source 1..22: mol_type = other RNA
cgcccctggagaaagcccagcc

SEQ ID NO: 130598 - RNA, 22 nt, synthetic construct
  source 1..22: mol_type = other RNA
cgcccggccaaatatccatgtt

SEQ ID NO: 130599 - RNA, 22 nt, synthetic construct
  source 1..22: mol_type = other RNA
cgcccggcccagattccttttt

SEQ ID NO: 130600 - RNA, 22 nt, synthetic construct
  source 1..22: mol_type = other RNA
cgcccggcccatgacatgtgtt

SEQ ID NO: 130601 - RNA, 22 nt, synthetic construct
  source 1..22: mol_type = other RNA
cgcccggcccgttatttttatc

SEQ ID NO: 130602 - RNA, 22 nt, synthetic construct
  source 1..22: mol_type = other RNA
cgcccggccgagaaatcggaac

SEQ ID NO: 130603 - RNA, 22 nt, synthetic construct
  source 1..22: mol_type = other RNA
cgcccggccgatgcctgtgctt

SEQ ID NO: 130604 - RNA, 22 nt, synthetic construct
  source 1..22: mol_type = other RNA
cgcccgtccctgcttggcgcag

SEQ ID NO: 130605 - RNA, 22 nt, synthetic construct
  source 1..22: mol_type = other RNA
cgccctcccccgggacaatgcc

SEQ ID NO: 130606 - RNA, 22 nt, synthetic construct
  source 1..22: mol_type = other RNA
cgccctggcattgtcccggggg

SEQ ID NO: 130607 - RNA, 22 nt, synthetic construct
  source 1..22: mol_type = other RNA
cgccgcagaggccaaatgaaag

SEQ ID NO: 130608 - RNA, 22 nt, synthetic construct
  source 1..22: mol_type = other RNA
cgccgtctccctcggccacagc

SEQ ID NO: 130609 - RNA, 22 nt, synthetic construct
  source 1..22: mol_type = other RNA
cgcctagataagaaaatgtgac

SEQ ID NO: 130610 - RNA, 22 nt, synthetic construct
  source 1..22: mol_type = other RNA
cgcctagctgacttttaaaata

SEQ ID NO: 130611 - RNA, 22 nt, synthetic construct
  source 1..22: mol_type = other RNA
cgcctccctggttcaagctatg

SEQ ID NO: 130612 - RNA, 22 nt, synthetic construct
  source 1..22: mol_type = other RNA
cgcctcctggtgggttcatgcc

SEQ ID NO: 130613 - RNA, 22 nt, synthetic construct
  source 1..22: mol_type = other RNA
cgcctgcattgcatttacttgt

SEQ ID NO: 130614 - RNA, 22 nt, synthetic construct
  source 1..22: mol_type = other RNA
cgcctggacaggatcccggaac

SEQ ID NO: 130615 - RNA, 22 nt, synthetic construct
  source 1..22: mol_type = other RNA
cgcctggtgattaaagttattt

SEQ ID NO: 130616 - RNA, 22 nt, synthetic construct
  source 1..22: mol_type = other RNA
cgccttaaagccacactcttgg

SEQ ID NO: 130617 - RNA, 22 nt, synthetic construct
  source 1..22: mol_type = other RNA
cgccttcctaccctgccttcct

SEQ ID NO: 130618 - RNA, 22 nt, synthetic construct
  source 1..22: mol_type = other RNA
cgccttcgcgggcaccttccct

SEQ ID NO: 130619 - RNA, 22 nt, synthetic construct
  source 1..22: mol_type = other RNA
cgccttctcagaaggacaccag

SEQ ID NO: 130620 - RNA, 22 nt, synthetic construct
  source 1..22: mol_type = other RNA
cgcctttcatttggcctctgcg

SEQ ID NO: 130621 - RNA, 22 nt, synthetic construct
  source 1..22: mol_type = other RNA
cgcctttctcgcagcggggatg

SEQ ID NO: 130622 - RNA, 22 nt, synthetic construct
  source 1..22: mol_type = other RNA
cgcctttgttgccaggtggacg

SEQ ID NO: 130623 - RNA, 22 nt, synthetic construct
  source 1..22: mol_type = other RNA
cgcgaaggcgtgtaaactgttg

SEQ ID NO: 130624 - RNA, 22 nt, synthetic construct
  source 1..22: mol_type = other RNA
cgcgagggagcgtacggggtcc

SEQ ID NO: 130625 - RNA, 22 nt, synthetic construct
  source 1..22: mol_type = other RNA
cgcgcaacaattcaacagctac

SEQ ID NO: 130626 - RNA, 22 nt, synthetic construct
  source 1..22: mol_type = other RNA
cgcgcattttttaagtggcgct

SEQ ID NO: 130627 - RNA, 22 nt, synthetic construct
  source 1..22: mol_type = other RNA
cgcgcccagcccgtgtgtttag

SEQ ID NO: 130628 - RNA, 22 nt, synthetic construct
  source 1..22: mol_type = other RNA
cgcgcccggccaaatatccatg

SEQ ID NO: 130629 - RNA, 22 nt, synthetic construct
  source 1..22: mol_type = other RNA
cgcgcccggcccagattccttt

SEQ ID NO: 130630 - RNA, 22 nt, synthetic construct
  source 1..22: mol_type = other RNA
cgcgcccggccgagaaatcgga

SEQ ID NO: 130631 - RNA, 22 nt, synthetic construct
  source 1..22: mol_type = other RNA
cgcgcctggtgattaaagttat

SEQ ID NO: 130632 - RNA, 22 nt, synthetic construct
  source 1..22: mol_type = other RNA
cgcgcgagggagcgtacggggt

SEQ ID NO: 130633 - RNA, 22 nt, synthetic construct
  source 1..22: mol_type = other RNA
cgcgcggcagggatgctgcgag

SEQ ID NO: 130634 - RNA, 22 nt, synthetic construct
  source 1..22: mol_type = other RNA
cgcggaatgaagcaggccttcg

SEQ ID NO: 130635 - RNA, 22 nt, synthetic construct
  source 1..22: mol_type = other RNA
cgcggaccccgtacgctccctc

SEQ ID NO: 130636 - RNA, 22 nt, synthetic construct
  source 1..22: mol_type = other RNA
cgcggacgcgcattttttaagt

SEQ ID NO: 130637 - RNA, 22 nt, synthetic construct
  source 1..22: mol_type = other RNA
cgcggactccggcgggagagga

SEQ ID NO: 130638 - RNA, 22 nt, synthetic construct
  source 1..22: mol_type = other RNA
cgcggcacttggtaagctgtga

SEQ ID NO: 130639 - RNA, 22 nt, synthetic construct
  source 1..22: mol_type = other RNA
cgcggcagggatgctgcgagcc

SEQ ID NO: 130640 - RNA, 22 nt, synthetic construct
  source 1..22: mol_type = other RNA
cgcggctgggctttctccaggg

SEQ ID NO: 130641 - RNA, 22 nt, synthetic construct
  source 1..22: mol_type = other RNA
cgcgggaggctgaggcaggagc

SEQ ID NO: 130642 - RNA, 22 nt, synthetic construct
  source 1..22: mol_type = other RNA
cgcgggcaccttccctactcac

SEQ ID NO: 130643 - RNA, 22 nt, synthetic construct
  source 1..22: mol_type = other RNA
cgcggggccgcccctggagaaa

SEQ ID NO: 130644 - RNA, 22 nt, synthetic construct
  source 1..22: mol_type = other RNA
cgcgtaagggtacagaactgct

SEQ ID NO: 130645 - RNA, 22 nt, synthetic construct
  source 1..22: mol_type = other RNA
cgcgtcaaaagatgctggtgga

SEQ ID NO: 130646 - RNA, 22 nt, synthetic construct
  source 1..22: mol_type = other RNA
cgcgtccacctggcaacaaagg

SEQ ID NO: 130647 - RNA, 22 nt, synthetic construct
  source 1..22: mol_type = other RNA
cgcgtgcctatggtcctagcta

SEQ ID NO: 130648 - RNA, 22 nt, synthetic construct
  source 1..22: mol_type = other RNA
cgcgtgcctgcaatcgcaggca

SEQ ID NO: 130649 - RNA, 22 nt, synthetic construct
  source 1..22: mol_type = other RNA
cgcgtggatgtgtgcacaacac

SEQ ID NO: 130650 - RNA, 22 nt, synthetic construct
  source 1..22: mol_type = other RNA
cgcgtttattagaactagaact

SEQ ID NO: 130651 - RNA, 22 nt, synthetic construct
  source 1..22: mol_type = other RNA
cgcgttttttgtccaccagaca

SEQ ID NO: 130652 - RNA, 22 nt, synthetic construct
  source 1..22: mol_type = other RNA
cgctaaacattttattaggtgc

SEQ ID NO: 130653 - RNA, 22 nt, synthetic construct
  source 1..22: mol_type = other RNA
cgctaaattaaaggctggaaat

SEQ ID NO: 130654 - RNA, 22 nt, synthetic construct
  source 1..22: mol_type = other RNA
cgctaagcactgcgccaagcag

SEQ ID NO: 130655 - RNA, 22 nt, synthetic construct
  source 1..22: mol_type = other RNA
cgctaagtgcatttcggctctg

SEQ ID NO: 130656 - RNA, 22 nt, synthetic construct
  source 1..22: mol_type = other RNA
cgctaatctcaatcagggcctt

SEQ ID NO: 130657 - RNA, 22 nt, synthetic construct
  source 1..22: mol_type = other RNA
cgctacacaagtattaacgaat

SEQ ID NO: 130658 - RNA, 22 nt, synthetic construct
  source 1..22: mol_type = other RNA
cgctactcagctgtcactctct

SEQ ID NO: 130659 - RNA, 22 nt, synthetic construct
  source 1..22: mol_type = other RNA
cgctatcagtagtttgctagtg

SEQ ID NO: 130660 - RNA, 22 nt, synthetic construct
  source 1..22: mol_type = other RNA
cgctccacgcccattaggatag

SEQ ID NO: 130661 - RNA, 22 nt, synthetic construct
  source 1..22: mol_type = other RNA
cgctccctctgtgtgcatgcat

SEQ ID NO: 130662 - RNA, 22 nt, synthetic construct
  source 1..22: mol_type = other RNA
cgctcctctcccgccggagtcc

SEQ ID NO: 130663 - RNA, 22 nt, synthetic construct
  source 1..22: mol_type = other RNA
cgctctcctgtgccaagtccgt

SEQ ID NO: 130664 - RNA, 22 nt, synthetic construct
  source 1..22: mol_type = other RNA
cgctctgggtgcgttgaccgct

SEQ ID NO: 130665 - RNA, 22 nt, synthetic construct
  source 1..22: mol_type = other RNA
cgctctggttttaaagaaatta

SEQ ID NO: 130666 - RNA, 22 nt, synthetic construct
  source 1..22: mol_type = other RNA
cgctctgtcgcccaggcggaat

SEQ ID NO: 130667 - RNA, 22 nt, synthetic construct
  source 1..22: mol_type = other RNA
cgctctgttgcccagactggag

SEQ ID NO: 130668 - RNA, 22 nt, synthetic construct
  source 1..22: mol_type = other RNA
cgctcttcaagcattgggagct

SEQ ID NO: 130669 - RNA, 22 nt, synthetic construct
  source 1..22: mol_type = other RNA
cgctcttgaccttgtgcatgtg

SEQ ID NO: 130670 - RNA, 22 nt, synthetic construct
  source 1..22: mol_type = other RNA
cgctcttggcttttggcagcgt

SEQ ID NO: 130671 - RNA, 22 nt, synthetic construct
  source 1..22: mol_type = other RNA
cgctcttgttcaaaaacctttt

SEQ ID NO: 130672 - RNA, 22 nt, synthetic construct
  source 1..22: mol_type = other RNA
cgctcttttaaaaattacaact

SEQ ID NO: 130673 - RNA, 22 nt, synthetic construct
  source 1..22: mol_type = other RNA
cgctgaagtacttcaaggttca

SEQ ID NO: 130674 - RNA, 22 nt, synthetic construct
  source 1..22: mol_type = other RNA
cgctgatgacagttactctaaa

SEQ ID NO: 130675 - RNA, 22 nt, synthetic construct
  source 1..22: mol_type = other RNA
cgctgatgtgttgaccttagtg

SEQ ID NO: 130676 - RNA, 22 nt, synthetic construct
  source 1..22: mol_type = other RNA
cgctgcattccagcctggtgac

SEQ ID NO: 130677 - RNA, 22 nt, synthetic construct
  source 1..22: mol_type = other RNA
cgctgccaaaagccaagagcga

SEQ ID NO: 130678 - RNA, 22 nt, synthetic construct
  source 1..22: mol_type = other RNA
cgctgcgagaaaggcgaagcgg

SEQ ID NO: 130679 - RNA, 22 nt, synthetic construct
  source 1..22: mol_type = other RNA
cgctgctccctctgccgcctgg

SEQ ID NO: 130680 - RNA, 22 nt, synthetic construct
  source 1..22: mol_type = other RNA
cgctggaagggagcccaagcac

SEQ ID NO: 130681 - RNA, 22 nt, synthetic construct
  source 1..22: mol_type = other RNA
cgctggaggtcgggctgcctca

SEQ ID NO: 130682 - RNA, 22 nt, synthetic construct
  source 1..22: mol_type = other RNA
cgctggtgaaaaaatggtgcag

SEQ ID NO: 130683 - RNA, 22 nt, synthetic construct
  source 1..22: mol_type = other RNA
cgctgtccatttccagtacttt

SEQ ID NO: 130684 - RNA, 22 nt, synthetic construct
  source 1..22: mol_type = other RNA
cgctgtgaatgtgaggtgagga

SEQ ID NO: 130685 - RNA, 22 nt, synthetic construct
  source 1..22: mol_type = other RNA
cgctgtggctaacaatcaaatt

SEQ ID NO: 130686 - RNA, 22 nt, synthetic construct
  source 1..22: mol_type = other RNA
cgctgtggcttgggtgacctca

SEQ ID NO: 130687 - RNA, 22 nt, synthetic construct
  source 1..22: mol_type = other RNA
cgctgtttgcctgcgtccgtag

SEQ ID NO: 130688 - RNA, 22 nt, synthetic construct
  source 1..22: mol_type = other RNA
cgcttcagttggtgaagagagc

SEQ ID NO: 130689 - RNA, 22 nt, synthetic construct
  source 1..22: mol_type = other RNA
cgcttcgcctttctcgcagcgg

SEQ ID NO: 130690 - RNA, 22 nt, synthetic construct
  source 1..22: mol_type = other RNA
cgcttctatgtgacaaacactt

SEQ ID NO: 130691 - RNA, 22 nt, synthetic construct
  source 1..22: mol_type = other RNA
cgcttgaacaaatatgaatgaa

SEQ ID NO: 130692 - RNA, 22 nt, synthetic construct
  source 1..22: mol_type = other RNA
cgcttgaacctgaaaaacggag

SEQ ID NO: 130693 - RNA, 22 nt, synthetic construct
  source 1..22: mol_type = other RNA
cgctttaagcatcccatatgga

SEQ ID NO: 130694 - RNA, 22 nt, synthetic construct
  source 1..22: mol_type = other RNA
cgctttcgtgagggtttcagtg

SEQ ID NO: 130695 - RNA, 22 nt, synthetic construct
  source 1..22: mol_type = other RNA
cgcttttatgttataatgagat

SEQ ID NO: 130696 - RNA, 22 nt, synthetic construct
  source 1..22: mol_type = other RNA
cgcttttggagctataatttat

SEQ ID NO: 130697 - RNA, 22 nt, synthetic construct
  source 1..22: mol_type = other RNA
cgctttttatggaaacatggta

SEQ ID NO: 130698 - RNA, 22 nt, synthetic construct
  source 1..22: mol_type = other RNA
cggaaaaacattctacagtatt

SEQ ID NO: 130699 - RNA, 22 nt, synthetic construct
  source 1..22: mol_type = other RNA
cggaaaacattattttctttga

SEQ ID NO: 130700 - RNA, 22 nt, synthetic construct
  source 1..22: mol_type = other RNA
cggaaaatgcttaacaagaatc

SEQ ID NO: 130701 - RNA, 22 nt, synthetic construct
  source 1..22: mol_type = other RNA
cggaaactttatacctgttgaa

SEQ ID NO: 130702 - RNA, 22 nt, synthetic construct
  source 1..22: mol_type = other RNA
cggaaatataaaaagcctctgt

SEQ ID NO: 130703 - RNA, 22 nt, synthetic construct
  source 1..22: mol_type = other RNA
cggaaatataacattaccaata

SEQ ID NO: 130704 - RNA, 22 nt, synthetic construct
  source 1..22: mol_type = other RNA
cggaaatgagtgagccacagct

SEQ ID NO: 130705 - RNA, 22 nt, synthetic construct
  source 1..22: mol_type = other RNA
cggaacaggaaaaggacattag

SEQ ID NO: 130706 - RNA, 22 nt, synthetic construct
  source 1..22: mol_type = other RNA
cggaacaggctcaatacctgaa

SEQ ID NO: 130707 - RNA, 22 nt, synthetic construct
  source 1..22: mol_type = other RNA
cggaactcctgtatgccgctgg

SEQ ID NO: 130708 - RNA, 22 nt, synthetic construct
  source 1..22: mol_type = other RNA
cggaacttgagtttgttctgtc

SEQ ID NO: 130709 - RNA, 22 nt, synthetic construct
  source 1..22: mol_type = other RNA
cggaagactcatacttcctgat

SEQ ID NO: 130710 - RNA, 22 nt, synthetic construct
  source 1..22: mol_type = other RNA
cggaagctgggctagagccagg

SEQ ID NO: 130711 - RNA, 22 nt, synthetic construct
  source 1..22: mol_type = other RNA
cggaaggaatgtgcttcctaaa

SEQ ID NO: 130712 - RNA, 22 nt, synthetic construct
  source 1..22: mol_type = other RNA
cggaaggattgcctaacaccag

SEQ ID NO: 130713 - RNA, 22 nt, synthetic construct
  source 1..22: mol_type = other RNA
cggaaggcggaagttgcagtga

SEQ ID NO: 130714 - RNA, 22 nt, synthetic construct
  source 1..22: mol_type = other RNA
cggaagttgcagtgagcccaga

SEQ ID NO: 130715 - RNA, 22 nt, synthetic construct
  source 1..22: mol_type = other RNA
cggaatcttaccctgttgacca

SEQ ID NO: 130716 - RNA, 22 nt, synthetic construct
  source 1..22: mol_type = other RNA
cggaatgaagcaggccttcgag

SEQ ID NO: 130717 - RNA, 22 nt, synthetic construct
  source 1..22: mol_type = other RNA
cggaatgactatagaaatttgt

SEQ ID NO: 130718 - RNA, 22 nt, synthetic construct
  source 1..22: mol_type = other RNA
cggaatgattccacttatatga

SEQ ID NO: 130719 - RNA, 22 nt, synthetic construct
  source 1..22: mol_type = other RNA
cggaatgcccctttgagcagag

SEQ ID NO: 130720 - RNA, 22 nt, synthetic construct
  source 1..22: mol_type = other RNA
cggaatttttatattaaaaccc

SEQ ID NO: 130721 - RNA, 22 nt, synthetic construct
  source 1..22: mol_type = other RNA
cggacatttttccaaagatata

SEQ ID NO: 130722 - RNA, 22 nt, synthetic construct
  source 1..22: mol_type = other RNA
cggaccccgtacgctccctcgc

SEQ ID NO: 130723 - RNA, 22 nt, synthetic construct
  source 1..22: mol_type = other RNA
cggacgcaggcaaacagcgcca

SEQ ID NO: 130724 - RNA, 22 nt, synthetic construct
  source 1..22: mol_type = other RNA
cggacgcgcattttttaagtgg

SEQ ID NO: 130725 - RNA, 22 nt, synthetic construct
  source 1..22: mol_type = other RNA
cggactccggcgggagaggagc

SEQ ID NO: 130726 - RNA, 22 nt, synthetic construct
  source 1..22: mol_type = other RNA
cggacttggcacaggagagcga

SEQ ID NO: 130727 - RNA, 22 nt, synthetic construct
  source 1..22: mol_type = other RNA
cggagaggtgaactattagagc

SEQ ID NO: 130728 - RNA, 22 nt, synthetic construct
  source 1..22: mol_type = other RNA
cggagcgggcagccttggagga

SEQ ID NO: 130729 - RNA, 22 nt, synthetic construct
  source 1..22: mol_type = other RNA
cggaggatgaggggctgagcct

SEQ ID NO: 130730 - RNA, 22 nt, synthetic construct
  source 1..22: mol_type = other RNA
cggaggattgcttgagtgcagg

SEQ ID NO: 130731 - RNA, 22 nt, synthetic construct
  source 1..22: mol_type = other RNA
cggaggttgcggtgacgtgaga

SEQ ID NO: 130732 - RNA, 22 nt, synthetic construct
  source 1..22: mol_type = other RNA
cggagtagctgggattacacac

SEQ ID NO: 130733 - RNA, 22 nt, synthetic construct
  source 1..22: mol_type = other RNA
cggagtccgcggctgggctttc

SEQ ID NO: 130734 - RNA, 22 nt, synthetic construct
  source 1..22: mol_type = other RNA
cggataaggaagagtttatatt

SEQ ID NO: 130735 - RNA, 22 nt, synthetic construct
  source 1..22: mol_type = other RNA
cggatatttactaagaagtgaa

SEQ ID NO: 130736 - RNA, 22 nt, synthetic construct
  source 1..22: mol_type = other RNA
cggatgattctaatgtgcaagg

SEQ ID NO: 130737 - RNA, 22 nt, synthetic construct
  source 1..22: mol_type = other RNA
cggatgccggtaatcacagcta

SEQ ID NO: 130738 - RNA, 22 nt, synthetic construct
  source 1..22: mol_type = other RNA
cggattcctttcaaagagacct

SEQ ID NO: 130739 - RNA, 22 nt, synthetic construct
  source 1..22: mol_type = other RNA
cggattggaaaactaggtattt

SEQ ID NO: 130740 - RNA, 22 nt, synthetic construct
  source 1..22: mol_type = other RNA
cggatttaagagaggaagtgac

SEQ ID NO: 130741 - RNA, 22 nt, synthetic construct
  source 1..22: mol_type = other RNA
cggcacagctctcatgagtcct

SEQ ID NO: 130742 - RNA, 22 nt, synthetic construct
  source 1..22: mol_type = other RNA
cggcacttggtaagctgtgagt

SEQ ID NO: 130743 - RNA, 22 nt, synthetic construct
  source 1..22: mol_type = other RNA
cggcaggcattgtgctcagtgg

SEQ ID NO: 130744 - RNA, 22 nt, synthetic construct
  source 1..22: mol_type = other RNA
cggcagggatgctgcgagcccc

SEQ ID NO: 130745 - RNA, 22 nt, synthetic construct
  source 1..22: mol_type = other RNA
cggcatacaggagttccgattt

SEQ ID NO: 130746 - RNA, 22 nt, synthetic construct
  source 1..22: mol_type = other RNA
cggcatatgtcactgtaagaat

SEQ ID NO: 130747 - RNA, 22 nt, synthetic construct
  source 1..22: mol_type = other RNA
cggcatccgccaccacgcctgg

SEQ ID NO: 130748 - RNA, 22 nt, synthetic construct
  source 1..22: mol_type = other RNA
cggcatgcctctcccaccatct

SEQ ID NO: 130749 - RNA, 22 nt, synthetic construct
  source 1..22: mol_type = other RNA
cggccaaatatccatgttttaa

SEQ ID NO: 130750 - RNA, 22 nt, synthetic construct
  source 1..22: mol_type = other RNA
cggccaaccattactcttctac

SEQ ID NO: 130751 - RNA, 22 nt, synthetic construct
  source 1..22: mol_type = other RNA
cggccaagatctgtttttcaaa

SEQ ID NO: 130752 - RNA, 22 nt, synthetic construct
  source 1..22: mol_type = other RNA
cggccacagcagggctcctcca

SEQ ID NO: 130753 - RNA, 22 nt, synthetic construct
  source 1..22: mol_type = other RNA
cggccagacattttatttatac

SEQ ID NO: 130754 - RNA, 22 nt, synthetic construct
  source 1..22: mol_type = other RNA
cggcccagattccttttttatg

SEQ ID NO: 130755 - RNA, 22 nt, synthetic construct
  source 1..22: mol_type = other RNA
cggcccatgacatgtgttttat

SEQ ID NO: 130756 - RNA, 22 nt, synthetic construct
  source 1..22: mol_type = other RNA
cggcccgttatttttatcataa

SEQ ID NO: 130757 - RNA, 22 nt, synthetic construct
  source 1..22: mol_type = other RNA
cggccctgccgcttcgcctttc

SEQ ID NO: 130758 - RNA, 22 nt, synthetic construct
  source 1..22: mol_type = other RNA
cggccgagaaatcggaactcct

SEQ ID NO: 130759 - RNA, 22 nt, synthetic construct
  source 1..22: mol_type = other RNA
cggccgatgcctgtgcttttct

SEQ ID NO: 130760 - RNA, 22 nt, synthetic construct
  source 1..22: mol_type = other RNA
cggcctcagcctcccgagtagt

SEQ ID NO: 130761 - RNA, 22 nt, synthetic construct
  source 1..22: mol_type = other RNA
cggcctctactgactccctttt

SEQ ID NO: 130762 - RNA, 22 nt, synthetic construct
  source 1..22: mol_type = other RNA
cggcctttgcctctccagggag

SEQ ID NO: 130763 - RNA, 22 nt, synthetic construct
  source 1..22: mol_type = other RNA
cggcgagcttgatctttacttc

SEQ ID NO: 130764 - RNA, 22 nt, synthetic construct
  source 1..22: mol_type = other RNA
cggcgcgtgcctgcaatcgcag

SEQ ID NO: 130765 - RNA, 22 nt, synthetic construct
  source 1..22: mol_type = other RNA
cggcgggcttcgcctttgttgc

SEQ ID NO: 130766 - RNA, 22 nt, synthetic construct
  source 1..22: mol_type = other RNA
cggcgtttcgccatgttggcca

SEQ ID NO: 130767 - RNA, 22 nt, synthetic construct
  source 1..22: mol_type = other RNA
cggctaagatgaggtctcagcc

SEQ ID NO: 130768 - RNA, 22 nt, synthetic construct
  source 1..22: mol_type = other RNA
cggctaattaaacaaacatttt

SEQ ID NO: 130769 - RNA, 22 nt, synthetic construct
  source 1..22: mol_type = other RNA
cggctcaggcctgttgtgagga

SEQ ID NO: 130770 - RNA, 22 nt, synthetic construct
  source 1..22: mol_type = other RNA
cggctctgtcacccttgtaatc

SEQ ID NO: 130771 - RNA, 22 nt, synthetic construct
  source 1..22: mol_type = other RNA
cggctctgtgctgagatggtca

SEQ ID NO: 130772 - RNA, 22 nt, synthetic construct
  source 1..22: mol_type = other RNA
cggctgaggcagcccgacctcc

SEQ ID NO: 130773 - RNA, 22 nt, synthetic construct
  source 1..22: mol_type = other RNA
cggctgattataaccttgaact

SEQ ID NO: 130774 - RNA, 22 nt, synthetic construct
  source 1..22: mol_type = other RNA
cggctggatcgcttgaggtcag

SEQ ID NO: 130775 - RNA, 22 nt, synthetic construct
  source 1..22: mol_type = other RNA
cggctgggctttctccaggggc

SEQ ID NO: 130776 - RNA, 22 nt, synthetic construct
  source 1..22: mol_type = other RNA
cggctgttaggtattattttca

SEQ ID NO: 130777 - RNA, 22 nt, synthetic construct
  source 1..22: mol_type = other RNA
cggcttaacacctttgtattca

SEQ ID NO: 130778 - RNA, 22 nt, synthetic construct
  source 1..22: mol_type = other RNA
cggcttactgcaacctccgttt

SEQ ID NO: 130779 - RNA, 22 nt, synthetic construct
  source 1..22: mol_type = other RNA
cggcttgattagcttcctcagg

SEQ ID NO: 130780 - RNA, 22 nt, synthetic construct
  source 1..22: mol_type = other RNA
cggctttatgagacacacgagt

SEQ ID NO: 130781 - RNA, 22 nt, synthetic construct
  source 1..22: mol_type = other RNA
cggctttgtggagtggaggggc

SEQ ID NO: 130782 - RNA, 22 nt, synthetic construct
  source 1..22: mol_type = other RNA
cgggaaaaaataatatgagaat

SEQ ID NO: 130783 - RNA, 22 nt, synthetic construct
  source 1..22: mol_type = other RNA
cgggaacatgacatgtattttt

SEQ ID NO: 130784 - RNA, 22 nt, synthetic construct
  source 1..22: mol_type = other RNA
cgggacaagagtctgcagacca

SEQ ID NO: 130785 - RNA, 22 nt, synthetic construct
  source 1..22: mol_type = other RNA
cgggacaatgccagggcgctcc

SEQ ID NO: 130786 - RNA, 22 nt, synthetic construct
  source 1..22: mol_type = other RNA
cgggacttggaagtgaagtcaa

SEQ ID NO: 130787 - RNA, 22 nt, synthetic construct
  source 1..22: mol_type = other RNA
cgggagacaaaggttgcagtga

SEQ ID NO: 130788 - RNA, 22 nt, synthetic construct
  source 1..22: mol_type = other RNA
cgggagaggagcgccctggcat

SEQ ID NO: 130789 - RNA, 22 nt, synthetic construct
  source 1..22: mol_type = other RNA
cgggaggagccaagtaaaagca

SEQ ID NO: 130790 - RNA, 22 nt, synthetic construct
  source 1..22: mol_type = other RNA
cgggaggcagatgttgcggtga

SEQ ID NO: 130791 - RNA, 22 nt, synthetic construct
  source 1..22: mol_type = other RNA
cgggagtaacagacctctgaag

SEQ ID NO: 130792 - RNA, 22 nt, synthetic construct
  source 1..22: mol_type = other RNA
cgggatcctgtccaggcgcctg

SEQ ID NO: 130793 - RNA, 22 nt, synthetic construct
  source 1..22: mol_type = other RNA
cgggattatttggaagagagaa

SEQ ID NO: 130794 - RNA, 22 nt, synthetic construct
  source 1..22: mol_type = other RNA
cgggatttacttctatatgtaa

SEQ ID NO: 130795 - RNA, 22 nt, synthetic construct
  source 1..22: mol_type = other RNA
cgggcaccttccctactcactg

SEQ ID NO: 130796 - RNA, 22 nt, synthetic construct
  source 1..22: mol_type = other RNA
cgggcagccttggaggagccct

SEQ ID NO: 130797 - RNA, 22 nt, synthetic construct
  source 1..22: mol_type = other RNA
cgggcccagctcttttgtgtct

SEQ ID NO: 130798 - RNA, 22 nt, synthetic construct
  source 1..22: mol_type = other RNA
cgggcctggttagggagacttt

SEQ ID NO: 130799 - RNA, 22 nt, synthetic construct
  source 1..22: mol_type = other RNA
cgggcgtagtggctcacaccta

SEQ ID NO: 130800 - RNA, 22 nt, synthetic construct
  source 1..22: mol_type = other RNA
cgggcgtgggggctcacatctg

SEQ ID NO: 130801 - RNA, 22 nt, synthetic construct
  source 1..22: mol_type = other RNA
cgggctgggcgcgatggctcac

SEQ ID NO: 130802 - RNA, 22 nt, synthetic construct
  source 1..22: mol_type = other RNA
cgggcttcgcctttgttgccag

SEQ ID NO: 130803 - RNA, 22 nt, synthetic construct
  source 1..22: mol_type = other RNA
cgggcttggtatgcatcttgaa

SEQ ID NO: 130804 - RNA, 22 nt, synthetic construct
  source 1..22: mol_type = other RNA
cggggactgcaacagatctgag

SEQ ID NO: 130805 - RNA, 22 nt, synthetic construct
  source 1..22: mol_type = other RNA
cggggagcttttgaaactgagc

SEQ ID NO: 130806 - RNA, 22 nt, synthetic construct
  source 1..22: mol_type = other RNA
cggggatgctcagggtgcgacc

SEQ ID NO: 130807 - RNA, 22 nt, synthetic construct
  source 1..22: mol_type = other RNA
cggggatggttgcacaatgttg

SEQ ID NO: 130808 - RNA, 22 nt, synthetic construct
  source 1..22: mol_type = other RNA
cggggcagagaactgactgaag

SEQ ID NO: 130809 - RNA, 22 nt, synthetic construct
  source 1..22: mol_type = other RNA
cggggccgcccctggagaaagc

SEQ ID NO: 130810 - RNA, 22 nt, synthetic construct
  source 1..22: mol_type = other RNA
cggggccgcgtccacctggcaa

SEQ ID NO: 130811 - RNA, 22 nt, synthetic construct
  source 1..22: mol_type = other RNA
cggggcctacagtggttccatt

SEQ ID NO: 130812 - RNA, 22 nt, synthetic construct
  source 1..22: mol_type = other RNA
cggggctcgcagcatccctgcc

SEQ ID NO: 130813 - RNA, 22 nt, synthetic construct
  source 1..22: mol_type = other RNA
cggggctgccactacttagccc

SEQ ID NO: 130814 - RNA, 22 nt, synthetic construct
  source 1..22: mol_type = other RNA
cgggggagagcactggtttcag

SEQ ID NO: 130815 - RNA, 22 nt, synthetic construct
  source 1..22: mol_type = other RNA
cggggtttcagcacaatactgt

SEQ ID NO: 130816 - RNA, 22 nt, synthetic construct
  source 1..22: mol_type = other RNA
cgggtaaaaagcctgcttcagc

SEQ ID NO: 130817 - RNA, 22 nt, synthetic construct
  source 1..22: mol_type = other RNA
cgggtacacatcctaatacagt

SEQ ID NO: 130818 - RNA, 22 nt, synthetic construct
  source 1..22: mol_type = other RNA
cgggtccaggcagttctcctgc

SEQ ID NO: 130819 - RNA, 22 nt, synthetic construct
  source 1..22: mol_type = other RNA
cgggtcgcggacgcgcattttt

SEQ ID NO: 130820 - RNA, 22 nt, synthetic construct
  source 1..22: mol_type = other RNA
cgggtggtagggagggggctga

SEQ ID NO: 130821 - RNA, 22 nt, synthetic construct
  source 1..22: mol_type = other RNA
cgggtgtagtggtgtgtgactg

SEQ ID NO: 130822 - RNA, 22 nt, synthetic construct
  source 1..22: mol_type = other RNA
cgggtgtcagaaaccatcgttc

SEQ ID NO: 130823 - RNA, 22 nt, synthetic construct
  source 1..22: mol_type = other RNA
cgggtgtcagaattccatcagt

SEQ ID NO: 130824 - RNA, 22 nt, synthetic construct
  source 1..22: mol_type = other RNA
cgggttatacacacataagggg

SEQ ID NO: 130825 - RNA, 22 nt, synthetic construct
  source 1..22: mol_type = other RNA
cgggttcaagccccagttctgc

SEQ ID NO: 130826 - RNA, 22 nt, synthetic construct
  source 1..22: mol_type = other RNA
cgggtttaagcgattctccttc

SEQ ID NO: 130827 - RNA, 22 nt, synthetic construct
  source 1..22: mol_type = other RNA
cgggtttcctcggtctacggac

SEQ ID NO: 130828 - RNA, 22 nt, synthetic construct
  source 1..22: mol_type = other RNA
cggtaatcacagctactcaggg

SEQ ID NO: 130829 - RNA, 22 nt, synthetic construct
  source 1..22: mol_type = other RNA
cggtatgtacccaatggattat

SEQ ID NO: 130830 - RNA, 22 nt, synthetic construct
  source 1..22: mol_type = other RNA
cggtatgttaataaccctgttt

SEQ ID NO: 130831 - RNA, 22 nt, synthetic construct
  source 1..22: mol_type = other RNA
cggtcaacgcacccagagcggg

SEQ ID NO: 130832 - RNA, 22 nt, synthetic construct
  source 1..22: mol_type = other RNA
cggtcattctggagtgttttct

SEQ ID NO: 130833 - RNA, 22 nt, synthetic construct
  source 1..22: mol_type = other RNA
cggtcgttggatttatctttct

SEQ ID NO: 130834 - RNA, 22 nt, synthetic construct
  source 1..22: mol_type = other RNA
cggtctacggacgcaggcaaac

SEQ ID NO: 130835 - RNA, 22 nt, synthetic construct
  source 1..22: mol_type = other RNA
cggtctcaaaacaaacaaacag

SEQ ID NO: 130836 - RNA, 22 nt, synthetic construct
  source 1..22: mol_type = other RNA
cggtctcacactgttgtccagg

SEQ ID NO: 130837 - RNA, 22 nt, synthetic construct
  source 1..22: mol_type = other RNA
cggtctcagtttttaatttaat

SEQ ID NO: 130838 - RNA, 22 nt, synthetic construct
  source 1..22: mol_type = other RNA
cggtctgtatttctgctttggt

SEQ ID NO: 130839 - RNA, 22 nt, synthetic construct
  source 1..22: mol_type = other RNA
cggtctttcctgatcagcaccc

SEQ ID NO: 130840 - RNA, 22 nt, synthetic construct
  source 1..22: mol_type = other RNA
cggtcttttagccaacaaccat

SEQ ID NO: 130841 - RNA, 22 nt, synthetic construct
  source 1..22: mol_type = other RNA
cggtgaagaaccgactgaaagg

SEQ ID NO: 130842 - RNA, 22 nt, synthetic construct
  source 1..22: mol_type = other RNA
cggtgacgtgagatcatgccac

SEQ ID NO: 130843 - RNA, 22 nt, synthetic construct
  source 1..22: mol_type = other RNA
cggtgccctacatatggcaatt

SEQ ID NO: 130844 - RNA, 22 nt, synthetic construct
  source 1..22: mol_type = other RNA
cggtgccgcgcgagggagcgta

SEQ ID NO: 130845 - RNA, 22 nt, synthetic construct
  source 1..22: mol_type = other RNA
cggtggcattaaggacatccac

SEQ ID NO: 130846 - RNA, 22 nt, synthetic construct
  source 1..22: mol_type = other RNA
cggtggggacagctcaattaag

SEQ ID NO: 130847 - RNA, 22 nt, synthetic construct
  source 1..22: mol_type = other RNA
cggtgtcttattgttttgattt

SEQ ID NO: 130848 - RNA, 22 nt, synthetic construct
  source 1..22: mol_type = other RNA
cggttccctgtagagattttta

SEQ ID NO: 130849 - RNA, 22 nt, synthetic construct
  source 1..22: mol_type = other RNA
cggttctcaggagcctagtcat

SEQ ID NO: 130850 - RNA, 22 nt, synthetic construct
  source 1..22: mol_type = other RNA
cggttcttcaccgtgcaactag

SEQ ID NO: 130851 - RNA, 22 nt, synthetic construct
  source 1..22: mol_type = other RNA
cggttgtatagcagtaaaatga

SEQ ID NO: 130852 - RNA, 22 nt, synthetic construct
  source 1..22: mol_type = other RNA
cggttttctagttagtttgttg

SEQ ID NO: 130853 - RNA, 22 nt, synthetic construct
  source 1..22: mol_type = other RNA
cgtaaaaagccatttatcagca

SEQ ID NO: 130854 - RNA, 22 nt, synthetic construct
  source 1..22: mol_type = other RNA
cgtaaaacctcatctctactaa

SEQ ID NO: 130855 - RNA, 22 nt, synthetic construct
  source 1..22: mol_type = other RNA
cgtaaaagctaatctactttct

SEQ ID NO: 130856 - RNA, 22 nt, synthetic construct
  source 1..22: mol_type = other RNA
cgtaacctaaagttgaggttga

SEQ ID NO: 130857 - RNA, 22 nt, synthetic construct
  source 1..22: mol_type = other RNA
cgtaactccatcttcacgtggc

SEQ ID NO: 130858 - RNA, 22 nt, synthetic construct
  source 1..22: mol_type = other RNA
cgtaacttcttttcttaaaact

SEQ ID NO: 130859 - RNA, 22 nt, synthetic construct
  source 1..22: mol_type = other RNA
cgtaagggtacagaactgctaa

SEQ ID NO: 130860 - RNA, 22 nt, synthetic construct
  source 1..22: mol_type = other RNA
cgtaatgcgatgatcaaaacca

SEQ ID NO: 130861 - RNA, 22 nt, synthetic construct
  source 1..22: mol_type = other RNA
cgtacatgtagatatgggagtc

SEQ ID NO: 130862 - RNA, 22 nt, synthetic construct
  source 1..22: mol_type = other RNA
cgtacctttcgctatcagtagt

SEQ ID NO: 130863 - RNA, 22 nt, synthetic construct
  source 1..22: mol_type = other RNA
cgtacgctccctcgcgcggcac

SEQ ID NO: 130864 - RNA, 22 nt, synthetic construct
  source 1..22: mol_type = other RNA
cgtactaggtatcacagtgagg

SEQ ID NO: 130865 - RNA, 22 nt, synthetic construct
  source 1..22: mol_type = other RNA
cgtactagtcagcacactctta

SEQ ID NO: 130866 - RNA, 22 nt, synthetic construct
  source 1..22: mol_type = other RNA
cgtactgtgattacaattcctt

SEQ ID NO: 130867 - RNA, 22 nt, synthetic construct
  source 1..22: mol_type = other RNA
cgtagaccgaggaaacccgctc

SEQ ID NO: 130868 - RNA, 22 nt, synthetic construct
  source 1..22: mol_type = other RNA
cgtagcaggtttaggaagcaca

SEQ ID NO: 130869 - RNA, 22 nt, synthetic construct
  source 1..22: mol_type = other RNA
cgtagctgtcgctctcctgtgc

SEQ ID NO: 130870 - RNA, 22 nt, synthetic construct
  source 1..22: mol_type = other RNA
cgtagtaagttttgaaatcagg

SEQ ID NO: 130871 - RNA, 22 nt, synthetic construct
  source 1..22: mol_type = other RNA
cgtagtatctcatgcttaggat

SEQ ID NO: 130872 - RNA, 22 nt, synthetic construct
  source 1..22: mol_type = other RNA
cgtagttttttggtagatacca

SEQ ID NO: 130873 - RNA, 22 nt, synthetic construct
  source 1..22: mol_type = other RNA
cgtatatgaaaagcccaatcta

SEQ ID NO: 130874 - RNA, 22 nt, synthetic construct
  source 1..22: mol_type = other RNA
cgtatccagtggttttttgttt

SEQ ID NO: 130875 - RNA, 22 nt, synthetic construct
  source 1..22: mol_type = other RNA
cgtatctgggaaaaaataagaa

SEQ ID NO: 130876 - RNA, 22 nt, synthetic construct
  source 1..22: mol_type = other RNA
cgtatcttttaacagatggtcc

SEQ ID NO: 130877 - RNA, 22 nt, synthetic construct
  source 1..22: mol_type = other RNA
cgtatgaataaactaacaaaga

SEQ ID NO: 130878 - RNA, 22 nt, synthetic construct
  source 1..22: mol_type = other RNA
cgtatgcaacttactctcaaat

SEQ ID NO: 130879 - RNA, 22 nt, synthetic construct
  source 1..22: mol_type = other RNA
cgtatggaagatgggacttcac

SEQ ID NO: 130880 - RNA, 22 nt, synthetic construct
  source 1..22: mol_type = other RNA
cgtatttatattttggtagaga

SEQ ID NO: 130881 - RNA, 22 nt, synthetic construct
  source 1..22: mol_type = other RNA
cgtatttatcatgtcttcttgg

SEQ ID NO: 130882 - RNA, 22 nt, synthetic construct
  source 1..22: mol_type = other RNA
cgtatttttgttattttcatgg

SEQ ID NO: 130883 - RNA, 22 nt, synthetic construct
  source 1..22: mol_type = other RNA
cgtcaaaagatgctggtggagt

SEQ ID NO: 130884 - RNA, 22 nt, synthetic construct
  source 1..22: mol_type = other RNA
cgtcaaggggagaggcctcatg

SEQ ID NO: 130885 - RNA, 22 nt, synthetic construct
  source 1..22: mol_type = other RNA
cgtcaccgcaacctccgcctcc

SEQ ID NO: 130886 - RNA, 22 nt, synthetic construct
  source 1..22: mol_type = other RNA
cgtcagagcagcactgatgtgt

SEQ ID NO: 130887 - RNA, 22 nt, synthetic construct
  source 1..22: mol_type = other RNA
cgtcatctataaggtaatgaca

SEQ ID NO: 130888 - RNA, 22 nt, synthetic construct
  source 1..22: mol_type = other RNA
cgtccaatttctttggctgtta

SEQ ID NO: 130889 - RNA, 22 nt, synthetic construct
  source 1..22: mol_type = other RNA
cgtccacctggcaacaaaggcg

SEQ ID NO: 130890 - RNA, 22 nt, synthetic construct
  source 1..22: mol_type = other RNA
cgtccatcaacagcagaacaaa

SEQ ID NO: 130891 - RNA, 22 nt, synthetic construct
  source 1..22: mol_type = other RNA
cgtcccccatcccctttacccc

SEQ ID NO: 130892 - RNA, 22 nt, synthetic construct
  source 1..22: mol_type = other RNA
cgtccctaaacactgtagttca

SEQ ID NO: 130893 - RNA, 22 nt, synthetic construct
  source 1..22: mol_type = other RNA
cgtccctattttctacaggtat

SEQ ID NO: 130894 - RNA, 22 nt, synthetic construct
  source 1..22: mol_type = other RNA
cgtccctgcttggcgcagtgct

SEQ ID NO: 130895 - RNA, 22 nt, synthetic construct
  source 1..22: mol_type = other RNA
cgtccggtcgttggatttatct

SEQ ID NO: 130896 - RNA, 22 nt, synthetic construct
  source 1..22: mol_type = other RNA
cgtccgtagaccgaggaaaccc

SEQ ID NO: 130897 - RNA, 22 nt, synthetic construct
  source 1..22: mol_type = other RNA
cgtcctcactgtgatacctagt

SEQ ID NO: 130898 - RNA, 22 nt, synthetic construct
  source 1..22: mol_type = other RNA
cgtcctcttcgggtgtcagaat

SEQ ID NO: 130899 - RNA, 22 nt, synthetic construct
  source 1..22: mol_type = other RNA
cgtcggtatgttaataaccctg

SEQ ID NO: 130900 - RNA, 22 nt, synthetic construct
  source 1..22: mol_type = other RNA
cgtcgtacctttcgctatcagt

SEQ ID NO: 130901 - RNA, 22 nt, synthetic construct
  source 1..22: mol_type = other RNA
cgtcgtcccccatcccctttac

SEQ ID NO: 130902 - RNA, 22 nt, synthetic construct
  source 1..22: mol_type = other RNA
cgtctagccacttcctattaga

SEQ ID NO: 130903 - RNA, 22 nt, synthetic construct
  source 1..22: mol_type = other RNA
cgtctcaagattgtgtgatttc

SEQ ID NO: 130904 - RNA, 22 nt, synthetic construct
  source 1..22: mol_type = other RNA
cgtctccctcggccacagcagg

SEQ ID NO: 130905 - RNA, 22 nt, synthetic construct
  source 1..22: mol_type = other RNA
cgtctctgcaaaaaatgtttgt

SEQ ID NO: 130906 - RNA, 22 nt, synthetic construct
  source 1..22: mol_type = other RNA
cgtctgtgattatcagggatat

SEQ ID NO: 130907 - RNA, 22 nt, synthetic construct
  source 1..22: mol_type = other RNA
cgtctgtggtctcagctcctca

SEQ ID NO: 130908 - RNA, 22 nt, synthetic construct
  source 1..22: mol_type = other RNA
cgtcttgtcaataatttggatg

SEQ ID NO: 130909 - RNA, 22 nt, synthetic construct
  source 1..22: mol_type = other RNA
cgtgaagatggagttacgctgc

SEQ ID NO: 130910 - RNA, 22 nt, synthetic construct
  source 1..22: mol_type = other RNA
cgtgaagctacagactaatatg

SEQ ID NO: 130911 - RNA, 22 nt, synthetic construct
  source 1..22: mol_type = other RNA
cgtgaatctgttcctgggttct

SEQ ID NO: 130912 - RNA, 22 nt, synthetic construct
  source 1..22: mol_type = other RNA
cgtgaatttggtattcttatcc

SEQ ID NO: 130913 - RNA, 22 nt, synthetic construct
  source 1..22: mol_type = other RNA
cgtgacagaacaaataacacca

SEQ ID NO: 130914 - RNA, 22 nt, synthetic construct
  source 1..22: mol_type = other RNA
cgtgagactattatgagcagtt

SEQ ID NO: 130915 - RNA, 22 nt, synthetic construct
  source 1..22: mol_type = other RNA
cgtgagatcatgccactccact

SEQ ID NO: 130916 - RNA, 22 nt, synthetic construct
  source 1..22: mol_type = other RNA
cgtgagccaccacgtccggtcg

SEQ ID NO: 130917 - RNA, 22 nt, synthetic construct
  source 1..22: mol_type = other RNA
cgtgagccaccactcccggccg

SEQ ID NO: 130918 - RNA, 22 nt, synthetic construct
  source 1..22: mol_type = other RNA
cgtgagccaccgcgcctggtga

SEQ ID NO: 130919 - RNA, 22 nt, synthetic construct
  source 1..22: mol_type = other RNA
cgtgagccacctcatccggtct

SEQ ID NO: 130920 - RNA, 22 nt, synthetic construct
  source 1..22: mol_type = other RNA
cgtgagccatcgcgcccagccc

SEQ ID NO: 130921 - RNA, 22 nt, synthetic construct
  source 1..22: mol_type = other RNA
cgtgagcctccacacctggccc

SEQ ID NO: 130922 - RNA, 22 nt, synthetic construct
  source 1..22: mol_type = other RNA
cgtgagctggaagtaaggattt

SEQ ID NO: 130923 - RNA, 22 nt, synthetic construct
  source 1..22: mol_type = other RNA
cgtgagggtttcagtgagtagg

SEQ ID NO: 130924 - RNA, 22 nt, synthetic construct
  source 1..22: mol_type = other RNA
cgtgatagtcttccaattgcag

SEQ ID NO: 130925 - RNA, 22 nt, synthetic construct
  source 1..22: mol_type = other RNA
cgtgcaaactaccaagactgaa

SEQ ID NO: 130926 - RNA, 22 nt, synthetic construct
  source 1..22: mol_type = other RNA
cgtgcaactagagaaagcatca

SEQ ID NO: 130927 - RNA, 22 nt, synthetic construct
  source 1..22: mol_type = other RNA
cgtgcacacccagttatctctg

SEQ ID NO: 130928 - RNA, 22 nt, synthetic construct
  source 1..22: mol_type = other RNA
cgtgcaccttacattgtaatcc

SEQ ID NO: 130929 - RNA, 22 nt, synthetic construct
  source 1..22: mol_type = other RNA
cgtgcagagcaggggtgggggg

SEQ ID NO: 130930 - RNA, 22 nt, synthetic construct
  source 1..22: mol_type = other RNA
cgtgcaggtttgttacacaggt

SEQ ID NO: 130931 - RNA, 22 nt, synthetic construct
  source 1..22: mol_type = other RNA
cgtgcatgcctctgttacagct

SEQ ID NO: 130932 - RNA, 22 nt, synthetic construct
  source 1..22: mol_type = other RNA
cgtgcatgtctgcaggagcctt

SEQ ID NO: 130933 - RNA, 22 nt, synthetic construct
  source 1..22: mol_type = other RNA
cgtgcattcatactgaaggcat

SEQ ID NO: 130934 - RNA, 22 nt, synthetic construct
  source 1..22: mol_type = other RNA
cgtgcccggccagacattttat

SEQ ID NO: 130935 - RNA, 22 nt, synthetic construct
  source 1..22: mol_type = other RNA
cgtgccgggcttggtatgcatc

SEQ ID NO: 130936 - RNA, 22 nt, synthetic construct
  source 1..22: mol_type = other RNA
cgtgcttgctctgcggcaggca

SEQ ID NO: 130937 - RNA, 22 nt, synthetic construct
  source 1..22: mol_type = other RNA
cgtgctttccttattgagaagc

SEQ ID NO: 130938 - RNA, 22 nt, synthetic construct
  source 1..22: mol_type = other RNA
cgtggaaatacttgaacattct

SEQ ID NO: 130939 - RNA, 22 nt, synthetic construct
  source 1..22: mol_type = other RNA
cgtggaaggccttctcctccaa

SEQ ID NO: 130940 - RNA, 22 nt, synthetic construct
  source 1..22: mol_type = other RNA
cgtggaatggtcaatttcatcg

SEQ ID NO: 130941 - RNA, 22 nt, synthetic construct
  source 1..22: mol_type = other RNA
cgtggagcggtgtcttattgtt

SEQ ID NO: 130942 - RNA, 22 nt, synthetic construct
  source 1..22: mol_type = other RNA
cgtggagtgcaatggggcaatc

SEQ ID NO: 130943 - RNA, 22 nt, synthetic construct
  source 1..22: mol_type = other RNA
cgtggatgtgtgcacaacacat

SEQ ID NO: 130944 - RNA, 22 nt, synthetic construct
  source 1..22: mol_type = other RNA
cgtggcctcaagcagtcctgcc

SEQ ID NO: 130945 - RNA, 22 nt, synthetic construct
  source 1..22: mol_type = other RNA
cgtggcgctccctctgtgtgca

SEQ ID NO: 130946 - RNA, 22 nt, synthetic construct
  source 1..22: mol_type = other RNA
cgtggctgtcaaaaatgtgtct

SEQ ID NO: 130947 - RNA, 22 nt, synthetic construct
  source 1..22: mol_type = other RNA
cgtgggcaacacaatgagaccc

SEQ ID NO: 130948 - RNA, 22 nt, synthetic construct
  source 1..22: mol_type = other RNA
cgtgggggctcacatctgtaat

SEQ ID NO: 130949 - RNA, 22 nt, synthetic construct
  source 1..22: mol_type = other RNA
cgtggtggcggatgccggtaat

SEQ ID NO: 130950 - RNA, 22 nt, synthetic construct
  source 1..22: mol_type = other RNA
cgtggttatagccataagagtc

SEQ ID NO: 130951 - RNA, 22 nt, synthetic construct
  source 1..22: mol_type = other RNA
cgtggttcacacctgtagtccc

SEQ ID NO: 130952 - RNA, 22 nt, synthetic construct
  source 1..22: mol_type = other RNA
cgtggtttattcatataatgga

SEQ ID NO: 130953 - RNA, 22 nt, synthetic construct
  source 1..22: mol_type = other RNA
cgtgtaaactgttggaaaaatc

SEQ ID NO: 130954 - RNA, 22 nt, synthetic construct
  source 1..22: mol_type = other RNA
cgtgtacataaaataaaaacct

SEQ ID NO: 130955 - RNA, 22 nt, synthetic construct
  source 1..22: mol_type = other RNA
cgtgtactgaaaccagtgctct

SEQ ID NO: 130956 - RNA, 22 nt, synthetic construct
  source 1..22: mol_type = other RNA
cgtgtatactgggtgtgatggc

SEQ ID NO: 130957 - RNA, 22 nt, synthetic construct
  source 1..22: mol_type = other RNA
cgtgtatgatttctaggcccta

SEQ ID NO: 130958 - RNA, 22 nt, synthetic construct
  source 1..22: mol_type = other RNA
cgtgtattgagtgtagctgtgg

SEQ ID NO: 130959 - RNA, 22 nt, synthetic construct
  source 1..22: mol_type = other RNA
cgtgtgaaaccaagcaagtaaa

SEQ ID NO: 130960 - RNA, 22 nt, synthetic construct
  source 1..22: mol_type = other RNA
cgtgtgacaaaaagtaggggta

SEQ ID NO: 130961 - RNA, 22 nt, synthetic construct
  source 1..22: mol_type = other RNA
cgtgtgagctctagccttgtac

SEQ ID NO: 130962 - RNA, 22 nt, synthetic construct
  source 1..22: mol_type = other RNA
cgtgtgcatgaccctgctatgc

SEQ ID NO: 130963 - RNA, 22 nt, synthetic construct
  source 1..22: mol_type = other RNA
cgtgtgcccaggctgacttaga

SEQ ID NO: 130964 - RNA, 22 nt, synthetic construct
  source 1..22: mol_type = other RNA
cgtgtgtctcataaagccggat

SEQ ID NO: 130965 - RNA, 22 nt, synthetic construct
  source 1..22: mol_type = other RNA
cgtgtgtggagtggggcaccta

SEQ ID NO: 130966 - RNA, 22 nt, synthetic construct
  source 1..22: mol_type = other RNA
cgtgtgtgtaagcacacatgaa

SEQ ID NO: 130967 - RNA, 22 nt, synthetic construct
  source 1..22: mol_type = other RNA
cgtgtgtttagaataatacact

SEQ ID NO: 130968 - RNA, 22 nt, synthetic construct
  source 1..22: mol_type = other RNA
cgtgtgttttgttgttgttgtt

SEQ ID NO: 130969 - RNA, 22 nt, synthetic construct
  source 1..22: mol_type = other RNA
cgtgttattttaatcgaatcct

SEQ ID NO: 130970 - RNA, 22 nt, synthetic construct
  source 1..22: mol_type = other RNA
cgttaaaggaaaagagatctag

SEQ ID NO: 130971 - RNA, 22 nt, synthetic construct
  source 1..22: mol_type = other RNA
cgttaactatttctctttaaag

SEQ ID NO: 130972 - RNA, 22 nt, synthetic construct
  source 1..22: mol_type = other RNA
cgttaactgtattgcaaactaa

SEQ ID NO: 130973 - RNA, 22 nt, synthetic construct
  source 1..22: mol_type = other RNA
cgttaatacttgtgtagcggga

SEQ ID NO: 130974 - RNA, 22 nt, synthetic construct
  source 1..22: mol_type = other RNA
cgttacaaaatatgtaatgacc

SEQ ID NO: 130975 - RNA, 22 nt, synthetic construct
  source 1..22: mol_type = other RNA
cgttaccctctggaatgcccat

SEQ ID NO: 130976 - RNA, 22 nt, synthetic construct
  source 1..22: mol_type = other RNA
cgttagcatcaccatcatcatc

SEQ ID NO: 130977 - RNA, 22 nt, synthetic construct
  source 1..22: mol_type = other RNA
cgttatatcctcagggtaggaa

SEQ ID NO: 130978 - RNA, 22 nt, synthetic construct
  source 1..22: mol_type = other RNA
cgttcaaaacatcatctaattt

SEQ ID NO: 130979 - RNA, 22 nt, synthetic construct
  source 1..22: mol_type = other RNA
cgttcacactcgcactccactt

SEQ ID NO: 130980 - RNA, 22 nt, synthetic construct
  source 1..22: mol_type = other RNA
cgttcagataacaaagggttct

SEQ ID NO: 130981 - RNA, 22 nt, synthetic construct
  source 1..22: mol_type = other RNA
cgttcagtttagtaaatctttg

SEQ ID NO: 130982 - RNA, 22 nt, synthetic construct
  source 1..22: mol_type = other RNA
cgttcatccaaattattgacaa

SEQ ID NO: 130983 - RNA, 22 nt, synthetic construct
  source 1..22: mol_type = other RNA
cgttcatgttcaaggtgttcct

SEQ ID NO: 130984 - RNA, 22 nt, synthetic construct
  source 1..22: mol_type = other RNA
cgttccagcagggtaaagtcaa

SEQ ID NO: 130985 - RNA, 22 nt, synthetic construct
  source 1..22: mol_type = other RNA
cgttccatcagagaggcttttt

SEQ ID NO: 130986 - RNA, 22 nt, synthetic construct
  source 1..22: mol_type = other RNA
cgttgaagtctttggcccattt

SEQ ID NO: 130987 - RNA, 22 nt, synthetic construct
  source 1..22: mol_type = other RNA
cgttgaccgctttcgtgagggt

SEQ ID NO: 130988 - RNA, 22 nt, synthetic construct
  source 1..22: mol_type = other RNA
cgttgagccatcatgcctgggt

SEQ ID NO: 130989 - RNA, 22 nt, synthetic construct
  source 1..22: mol_type = other RNA
cgttgagtacctctgggatgct

SEQ ID NO: 130990 - RNA, 22 nt, synthetic construct
  source 1..22: mol_type = other RNA
cgttgctgcatagtactccatt

SEQ ID NO: 130991 - RNA, 22 nt, synthetic construct
  source 1..22: mol_type = other RNA
cgttggagacagcctaaaccat

SEQ ID NO: 130992 - RNA, 22 nt, synthetic construct
  source 1..22: mol_type = other RNA
cgttggatttatctttctagat

SEQ ID NO: 130993 - RNA, 22 nt, synthetic construct
  source 1..22: mol_type = other RNA
cgttgtgaaatataatgttatg

SEQ ID NO: 130994 - RNA, 22 nt, synthetic construct
  source 1..22: mol_type = other RNA
cgttgttcagttgaaaagtatg

SEQ ID NO: 130995 - RNA, 22 nt, synthetic construct
  source 1..22: mol_type = other RNA
cgtttatctacagaggattttg

SEQ ID NO: 130996 - RNA, 22 nt, synthetic construct
  source 1..22: mol_type = other RNA
cgtttatgcatttattagtagt

SEQ ID NO: 130997 - RNA, 22 nt, synthetic construct
  source 1..22: mol_type = other RNA
cgtttattagaactagaactgt

SEQ ID NO: 130998 - RNA, 22 nt, synthetic construct
  source 1..22: mol_type = other RNA
cgtttatttcttctccctcttc

SEQ ID NO: 130999 - RNA, 22 nt, synthetic construct
  source 1..22: mol_type = other RNA
cgtttcaatattaagagtctca

SEQ ID NO: 131000 - RNA, 22 nt, synthetic construct
  source 1..22: mol_type = other RNA
cgtttcagattgcttgagagag

SEQ ID NO: 131001 - RNA, 22 nt, synthetic construct
  source 1..22: mol_type = other RNA
cgtttgaggcttttcatagtca

SEQ ID NO: 131002 - RNA, 22 nt, synthetic construct
  source 1..22: mol_type = other RNA
cgtttgagttgtttccactttg

SEQ ID NO: 131003 - RNA, 22 nt, synthetic construct
  source 1..22: mol_type = other RNA
cgtttgatctggtcacaaacac

SEQ ID NO: 131004 - RNA, 22 nt, synthetic construct
  source 1..22: mol_type = other RNA
cgtttgctttggagtgagagga

SEQ ID NO: 131005 - RNA, 22 nt, synthetic construct
  source 1..22: mol_type = other RNA
cgtttggtgactgaattcccac

SEQ ID NO: 131006 - RNA, 22 nt, synthetic construct
  source 1..22: mol_type = other RNA
cgtttgttagatctgggataat

SEQ ID NO: 131007 - RNA, 22 nt, synthetic construct
  source 1..22: mol_type = other RNA
cgttttcaacaaaggttgaaaa

SEQ ID NO: 131008 - RNA, 22 nt, synthetic construct
  source 1..22: mol_type = other RNA
cgttttgcaagatgcataagtt

SEQ ID NO: 131009 - RNA, 22 nt, synthetic construct
  source 1..22: mol_type = other RNA
cgtttttagaaatttacccatt

SEQ ID NO: 131010 - RNA, 22 nt, synthetic construct
  source 1..22: mol_type = other RNA
cgtttttcaggttcaagcgact

SEQ ID NO: 131011 - RNA, 22 nt, synthetic construct
  source 1..22: mol_type = other RNA
cgttttttccttcatttaacat

SEQ ID NO: 131012 - RNA, 22 nt, synthetic construct
  source 1..22: mol_type = other RNA
cgttttttgtccaccagacaaa

SEQ ID NO: 131013 - RNA, 22 nt, synthetic construct
  source 1..22: mol_type = other RNA
ctaaaaaataccaaaaaaggtg

SEQ ID NO: 131014 - RNA, 22 nt, synthetic construct
  source 1..22: mol_type = other RNA
ctaaaaacatccattactcgtg

SEQ ID NO: 131015 - RNA, 22 nt, synthetic construct
  source 1..22: mol_type = other RNA
ctaaaaacgtgcaaactaccaa

SEQ ID NO: 131016 - RNA, 22 nt, synthetic construct
  source 1..22: mol_type = other RNA
ctaaaaagaaaaagttgggctt

SEQ ID NO: 131017 - RNA, 22 nt, synthetic construct
  source 1..22: mol_type = other RNA
ctaaaaagggagtcagtagagg

SEQ ID NO: 131018 - RNA, 22 nt, synthetic construct
  source 1..22: mol_type = other RNA
ctaaaaatcagattaagcatag

SEQ ID NO: 131019 - RNA, 22 nt, synthetic construct
  source 1..22: mol_type = other RNA
ctaaaacactggaagtaattgg

SEQ ID NO: 131020 - RNA, 22 nt, synthetic construct
  source 1..22: mol_type = other RNA
ctaaaacaggaagttgagaaag

SEQ ID NO: 131021 - RNA, 22 nt, synthetic construct
  source 1..22: mol_type = other RNA
ctaaaacatacatgagaaatgt

SEQ ID NO: 131022 - RNA, 22 nt, synthetic construct
  source 1..22: mol_type = other RNA
ctaaaacatggtccacagaggc

SEQ ID NO: 131023 - RNA, 22 nt, synthetic construct
  source 1..22: mol_type = other RNA
ctaaaactccccatgcaggaga

SEQ ID NO: 131024 - RNA, 22 nt, synthetic construct
  source 1..22: mol_type = other RNA
ctaaaagaccgcaagagttcca

SEQ ID NO: 131025 - RNA, 22 nt, synthetic construct
  source 1..22: mol_type = other RNA
ctaaaaggttgcttaattgagc

SEQ ID NO: 131026 - RNA, 22 nt, synthetic construct
  source 1..22: mol_type = other RNA
ctaaaataggcctaggtgtgat

SEQ ID NO: 131027 - RNA, 22 nt, synthetic construct
  source 1..22: mol_type = other RNA
ctaaaatcatcacagtatgcac

SEQ ID NO: 131028 - RNA, 22 nt, synthetic construct
  source 1..22: mol_type = other RNA
ctaaaatcttattccccaggga

SEQ ID NO: 131029 - RNA, 22 nt, synthetic construct
  source 1..22: mol_type = other RNA
ctaaaatggaagactttatggt

SEQ ID NO: 131030 - RNA, 22 nt, synthetic construct
  source 1..22: mol_type = other RNA
ctaaaatgttcagatagaaaag

SEQ ID NO: 131031 - RNA, 22 nt, synthetic construct
  source 1..22: mol_type = other RNA
ctaaaattccttcctttgatga

SEQ ID NO: 131032 - RNA, 22 nt, synthetic construct
  source 1..22: mol_type = other RNA
ctaaacaaatcagatttcaggt

SEQ ID NO: 131033 - RNA, 22 nt, synthetic construct
  source 1..22: mol_type = other RNA
ctaaacacacgggctgggcgcg

SEQ ID NO: 131034 - RNA, 22 nt, synthetic construct
  source 1..22: mol_type = other RNA
ctaaacactgtagttcagtttt

SEQ ID NO: 131035 - RNA, 22 nt, synthetic construct
  source 1..22: mol_type = other RNA
ctaaacacttagcatgttgctt

SEQ ID NO: 131036 - RNA, 22 nt, synthetic construct
  source 1..22: mol_type = other RNA
ctaaacagtacagtagtaaaac

SEQ ID NO: 131037 - RNA, 22 nt, synthetic construct
  source 1..22: mol_type = other RNA
ctaaacattttattaggtgcac

SEQ ID NO: 131038 - RNA, 22 nt, synthetic construct
  source 1..22: mol_type = other RNA
ctaaaccattttcaatcttgga

SEQ ID NO: 131039 - RNA, 22 nt, synthetic construct
  source 1..22: mol_type = other RNA
ctaaacctgaggtctttaaaag

SEQ ID NO: 131040 - RNA, 22 nt, synthetic construct
  source 1..22: mol_type = other RNA
ctaaacctgctacgaatgaact

SEQ ID NO: 131041 - RNA, 22 nt, synthetic construct
  source 1..22: mol_type = other RNA
ctaaacctgtgatttccagtgt

SEQ ID NO: 131042 - RNA, 22 nt, synthetic construct
  source 1..22: mol_type = other RNA
ctaaaccttaaaagagtgaaat

SEQ ID NO: 131043 - RNA, 22 nt, synthetic construct
  source 1..22: mol_type = other RNA
ctaaacgtttggtgactgaatt

SEQ ID NO: 131044 - RNA, 22 nt, synthetic construct
  source 1..22: mol_type = other RNA
ctaaactagtatcaacctgcag

SEQ ID NO: 131045 - RNA, 22 nt, synthetic construct
  source 1..22: mol_type = other RNA
ctaaactagttcaaccattgta

SEQ ID NO: 131046 - RNA, 22 nt, synthetic construct
  source 1..22: mol_type = other RNA
ctaaactgaacgaagtgaaaaa

SEQ ID NO: 131047 - RNA, 22 nt, synthetic construct
  source 1..22: mol_type = other RNA
ctaaactggttttcctgatgga

SEQ ID NO: 131048 - RNA, 22 nt, synthetic construct
  source 1..22: mol_type = other RNA
ctaaactgttccccaagccaaa

SEQ ID NO: 131049 - RNA, 22 nt, synthetic construct
  source 1..22: mol_type = other RNA
ctaaactttgagtagcacccta

SEQ ID NO: 131050 - RNA, 22 nt, synthetic construct
  source 1..22: mol_type = other RNA
ctaaagagaatcttaaaatacc

SEQ ID NO: 131051 - RNA, 22 nt, synthetic construct
  source 1..22: mol_type = other RNA
ctaaagagagtgacagctgagt

SEQ ID NO: 131052 - RNA, 22 nt, synthetic construct
  source 1..22: mol_type = other RNA
ctaaagatatgtgtaggaagga

SEQ ID NO: 131053 - RNA, 22 nt, synthetic construct
  source 1..22: mol_type = other RNA
ctaaagatttgccaatcaataa

SEQ ID NO: 131054 - RNA, 22 nt, synthetic construct
  source 1..22: mol_type = other RNA
ctaaagccaatcttcccaatcc

SEQ ID NO: 131055 - RNA, 22 nt, synthetic construct
  source 1..22: mol_type = other RNA
ctaaagccaggctttcccaggg

SEQ ID NO: 131056 - RNA, 22 nt, synthetic construct
  source 1..22: mol_type = other RNA
ctaaaggggatttcatgaacaa

SEQ ID NO: 131057 - RNA, 22 nt, synthetic construct
  source 1..22: mol_type = other RNA
ctaaagtccacagatctttttg

SEQ ID NO: 131058 - RNA, 22 nt, synthetic construct
  source 1..22: mol_type = other RNA
ctaaagtctatgctcttggttt

SEQ ID NO: 131059 - RNA, 22 nt, synthetic construct
  source 1..22: mol_type = other RNA
ctaaagttagaagtatcccaga

SEQ ID NO: 131060 - RNA, 22 nt, synthetic construct
  source 1..22: mol_type = other RNA
ctaaagttgaggttgaagacct

SEQ ID NO: 131061 - RNA, 22 nt, synthetic construct
  source 1..22: mol_type = other RNA
ctaaataaaacacatgtcatgg

SEQ ID NO: 131062 - RNA, 22 nt, synthetic construct
  source 1..22: mol_type = other RNA
ctaaataaatctaagtctcaac

SEQ ID NO: 131063 - RNA, 22 nt, synthetic construct
  source 1..22: mol_type = other RNA
ctaaatacacatgttgagtctt

SEQ ID NO: 131064 - RNA, 22 nt, synthetic construct
  source 1..22: mol_type = other RNA
ctaaatacaccaaactcaaaag

SEQ ID NO: 131065 - RNA, 22 nt, synthetic construct
  source 1..22: mol_type = other RNA
ctaaataggtattcatgctgtg

SEQ ID NO: 131066 - RNA, 22 nt, synthetic construct
  source 1..22: mol_type = other RNA
ctaaatcaacagtgtactagtc

SEQ ID NO: 131067 - RNA, 22 nt, synthetic construct
  source 1..22: mol_type = other RNA
ctaaatcaggatgtctttggga

SEQ ID NO: 131068 - RNA, 22 nt, synthetic construct
  source 1..22: mol_type = other RNA
ctaaatgatctttcaaggggcc

SEQ ID NO: 131069 - RNA, 22 nt, synthetic construct
  source 1..22: mol_type = other RNA
ctaaatgctcacatttagtttc

SEQ ID NO: 131070 - RNA, 22 nt, synthetic construct
  source 1..22: mol_type = other RNA
ctaaatggtgtgaagttgggct

SEQ ID NO: 131071 - RNA, 22 nt, synthetic construct
  source 1..22: mol_type = other RNA
ctaaatgtagatcaagtatttc

SEQ ID NO: 131072 - RNA, 22 nt, synthetic construct
  source 1..22: mol_type = other RNA
ctaaatgtccatcgagagatga

SEQ ID NO: 131073 - RNA, 22 nt, synthetic construct
  source 1..22: mol_type = other RNA
ctaaatgtgagcatttagcccc

SEQ ID NO: 131074 - RNA, 22 nt, synthetic construct
  source 1..22: mol_type = other RNA
ctaaattaaaggctggaaataa

SEQ ID NO: 131075 - RNA, 22 nt, synthetic construct
  source 1..22: mol_type = other RNA
ctaaattaagcttcgacagtcc

SEQ ID NO: 131076 - RNA, 22 nt, synthetic construct
  source 1..22: mol_type = other RNA
ctaaattgaacagcctaaagtc

SEQ ID NO: 131077 - RNA, 22 nt, synthetic construct
  source 1..22: mol_type = other RNA
ctaaattttaagtgcacaatgc

SEQ ID NO: 131078 - RNA, 22 nt, synthetic construct
  source 1..22: mol_type = other RNA
ctaaattttgaggcttttggat

SEQ ID NO: 131079 - RNA, 22 nt, synthetic construct
  source 1..22: mol_type = other RNA
ctaacaaaaatacttaagagca

SEQ ID NO: 131080 - RNA, 22 nt, synthetic construct
  source 1..22: mol_type = other RNA
ctaacaaaactaggctgtccca

SEQ ID NO: 131081 - RNA, 22 nt, synthetic construct
  source 1..22: mol_type = other RNA
ctaacaaaagatacacaagatc

SEQ ID NO: 131082 - RNA, 22 nt, synthetic construct
  source 1..22: mol_type = other RNA
ctaacaaacgcattgtgatgtc

SEQ ID NO: 131083 - RNA, 22 nt, synthetic construct
  source 1..22: mol_type = other RNA
ctaacaaagaacaggaagggag

SEQ ID NO: 131084 - RNA, 22 nt, synthetic construct
  source 1..22: mol_type = other RNA
ctaacaaagggcctgttccagg

SEQ ID NO: 131085 - RNA, 22 nt, synthetic construct
  source 1..22: mol_type = other RNA
ctaacaagaaagggtagctttg

SEQ ID NO: 131086 - RNA, 22 nt, synthetic construct
  source 1..22: mol_type = other RNA
ctaacaagaagctgttttggta

SEQ ID NO: 131087 - RNA, 22 nt, synthetic construct
  source 1..22: mol_type = other RNA
ctaacaatcaaatttaacacac

SEQ ID NO: 131088 - RNA, 22 nt, synthetic construct
  source 1..22: mol_type = other RNA
ctaacaccagtaagattctgtc

SEQ ID NO: 131089 - RNA, 22 nt, synthetic construct
  source 1..22: mol_type = other RNA
ctaacaccttgaactgggactt

SEQ ID NO: 131090 - RNA, 22 nt, synthetic construct
  source 1..22: mol_type = other RNA
ctaacagccaaagaaattggac

SEQ ID NO: 131091 - RNA, 22 nt, synthetic construct
  source 1..22: mol_type = other RNA
ctaacagccggcatatgtcact

SEQ ID NO: 131092 - RNA, 22 nt, synthetic construct
  source 1..22: mol_type = other RNA
ctaacagggtctacaaaaggtt

SEQ ID NO: 131093 - RNA, 22 nt, synthetic construct
  source 1..22: mol_type = other RNA
ctaacagtctcgtgaatttggt

SEQ ID NO: 131094 - RNA, 22 nt, synthetic construct
  source 1..22: mol_type = other RNA
ctaacataatcaaattcacaga

SEQ ID NO: 131095 - RNA, 22 nt, synthetic construct
  source 1..22: mol_type = other RNA
ctaacatgaactactcaaagaa

SEQ ID NO: 131096 - RNA, 22 nt, synthetic construct
  source 1..22: mol_type = other RNA
ctaacatgtcttggtgtgctct

SEQ ID NO: 131097 - RNA, 22 nt, synthetic construct
  source 1..22: mol_type = other RNA
ctaacattatcttctacctttt

SEQ ID NO: 131098 - RNA, 22 nt, synthetic construct
  source 1..22: mol_type = other RNA
ctaaccaacattgagtttcaat

SEQ ID NO: 131099 - RNA, 22 nt, synthetic construct
  source 1..22: mol_type = other RNA
ctaaccactgttatctgggaac

SEQ ID NO: 131100 - RNA, 22 nt, synthetic construct
  source 1..22: mol_type = other RNA
ctaaccaggcccggggcagaga

SEQ ID NO: 131101 - RNA, 22 nt, synthetic construct
  source 1..22: mol_type = other RNA
ctaaccattaacagctcagaag

SEQ ID NO: 131102 - RNA, 22 nt, synthetic construct
  source 1..22: mol_type = other RNA
ctaaccccagagattgtcgttg

SEQ ID NO: 131103 - RNA, 22 nt, synthetic construct
  source 1..22: mol_type = other RNA
ctaaccctcaaatgccatagag

SEQ ID NO: 131104 - RNA, 22 nt, synthetic construct
  source 1..22: mol_type = other RNA
ctaaccctcaatccccatctgg

SEQ ID NO: 131105 - RNA, 22 nt, synthetic construct
  source 1..22: mol_type = other RNA
ctaaccctcctcctctacaagt

SEQ ID NO: 131106 - RNA, 22 nt, synthetic construct
  source 1..22: mol_type = other RNA
ctaacgatccttactaccacca

SEQ ID NO: 131107 - RNA, 22 nt, synthetic construct
  source 1..22: mol_type = other RNA
ctaacgtgcttgctctgcggca

SEQ ID NO: 131108 - RNA, 22 nt, synthetic construct
  source 1..22: mol_type = other RNA
ctaactagaaaaccgacagcag

SEQ ID NO: 131109 - RNA, 22 nt, synthetic construct
  source 1..22: mol_type = other RNA
ctaactcaagagttacttctgg

SEQ ID NO: 131110 - RNA, 22 nt, synthetic construct
  source 1..22: mol_type = other RNA
ctaactgcagaggtcaggaagg

SEQ ID NO: 131111 - RNA, 22 nt, synthetic construct
  source 1..22: mol_type = other RNA
ctaactggtctcctttctatac

SEQ ID NO: 131112 - RNA, 22 nt, synthetic construct
  source 1..22: mol_type = other RNA
ctaactttaaattttgagacct

SEQ ID NO: 131113 - RNA, 22 nt, synthetic construct
  source 1..22: mol_type = other RNA
ctaactttagaacatataatcc

SEQ ID NO: 131114 - RNA, 22 nt, synthetic construct
  source 1..22: mol_type = other RNA
ctaactttctattcccctggat

SEQ ID NO: 131115 - RNA, 22 nt, synthetic construct
  source 1..22: mol_type = other RNA
ctaacttttaacccacagataa

SEQ ID NO: 131116 - RNA, 22 nt, synthetic construct
  source 1..22: mol_type = other RNA
ctaagaaaaacagaagacacaa

SEQ ID NO: 131117 - RNA, 22 nt, synthetic construct
  source 1..22: mol_type = other RNA
ctaagaaacagtaattagttac

SEQ ID NO: 131118 - RNA, 22 nt, synthetic construct
  source 1..22: mol_type = other RNA
ctaagaaagggtgtgtgaatgg

SEQ ID NO: 131119 - RNA, 22 nt, synthetic construct
  source 1..22: mol_type = other RNA
ctaagaaaggtctagtgtgcat

SEQ ID NO: 131120 - RNA, 22 nt, synthetic construct
  source 1..22: mol_type = other RNA
ctaagaagatggttggaagttt

SEQ ID NO: 131121 - RNA, 22 nt, synthetic construct
  source 1..22: mol_type = other RNA
ctaagaagtgaaactgctggat

SEQ ID NO: 131122 - RNA, 22 nt, synthetic construct
  source 1..22: mol_type = other RNA
ctaagacactagctattgtctt

SEQ ID NO: 131123 - RNA, 22 nt, synthetic construct
  source 1..22: mol_type = other RNA
ctaagaccccagtagaaatctt

SEQ ID NO: 131124 - RNA, 22 nt, synthetic construct
  source 1..22: mol_type = other RNA
ctaagactataaaactcttagc

SEQ ID NO: 131125 - RNA, 22 nt, synthetic construct
  source 1..22: mol_type = other RNA
ctaagagataactaatgagaat

SEQ ID NO: 131126 - RNA, 22 nt, synthetic construct
  source 1..22: mol_type = other RNA
ctaagagccaaagacattgtct

SEQ ID NO: 131127 - RNA, 22 nt, synthetic construct
  source 1..22: mol_type = other RNA
ctaagagtgaaaaggcaaacca

SEQ ID NO: 131128 - RNA, 22 nt, synthetic construct
  source 1..22: mol_type = other RNA
ctaagagttttatagtcttagc

SEQ ID NO: 131129 - RNA, 22 nt, synthetic construct
  source 1..22: mol_type = other RNA
ctaagatgaggtctcagccttt

SEQ ID NO: 131130 - RNA, 22 nt, synthetic construct
  source 1..22: mol_type = other RNA
ctaagatgctattcaagacaag

SEQ ID NO: 131131 - RNA, 22 nt, synthetic construct
  source 1..22: mol_type = other RNA
ctaagatggaaagtggactatg

SEQ ID NO: 131132 - RNA, 22 nt, synthetic construct
  source 1..22: mol_type = other RNA
ctaagcaagttacatgcttagc

SEQ ID NO: 131133 - RNA, 22 nt, synthetic construct
  source 1..22: mol_type = other RNA
ctaagcaccaacagatcctcac

SEQ ID NO: 131134 - RNA, 22 nt, synthetic construct
  source 1..22: mol_type = other RNA
ctaagcactgcgccaagcaggg

SEQ ID NO: 131135 - RNA, 22 nt, synthetic construct
  source 1..22: mol_type = other RNA
ctaagcagaaatgacaagtaaa

SEQ ID NO: 131136 - RNA, 22 nt, synthetic construct
  source 1..22: mol_type = other RNA
ctaagcatcgtgaagtctttat

SEQ ID NO: 131137 - RNA, 22 nt, synthetic construct
  source 1..22: mol_type = other RNA
ctaagcatgagatactacgcct

SEQ ID NO: 131138 - RNA, 22 nt, synthetic construct
  source 1..22: mol_type = other RNA
ctaagcatgtaacttgcttagg

SEQ ID NO: 131139 - RNA, 22 nt, synthetic construct
  source 1..22: mol_type = other RNA
ctaagccatctaattcacattt

SEQ ID NO: 131140 - RNA, 22 nt, synthetic construct
  source 1..22: mol_type = other RNA
ctaagccatgtttctcctgcat

SEQ ID NO: 131141 - RNA, 22 nt, synthetic construct
  source 1..22: mol_type = other RNA
ctaagcctacctcccttcacaa

SEQ ID NO: 131142 - RNA, 22 nt, synthetic construct
  source 1..22: mol_type = other RNA
ctaagcctactgctctgtcctg

SEQ ID NO: 131143 - RNA, 22 nt, synthetic construct
  source 1..22: mol_type = other RNA
ctaagcctatgtaagacaatgt

SEQ ID NO: 131144 - RNA, 22 nt, synthetic construct
  source 1..22: mol_type = other RNA
ctaagctaagagttttatagtc

SEQ ID NO: 131145 - RNA, 22 nt, synthetic construct
  source 1..22: mol_type = other RNA
ctaagcttaagagctaagacta

SEQ ID NO: 131146 - RNA, 22 nt, synthetic construct
  source 1..22: mol_type = other RNA
ctaagcttgggtaggaagctga

SEQ ID NO: 131147 - RNA, 22 nt, synthetic construct
  source 1..22: mol_type = other RNA
ctaaggaaagctcaggaccaga

SEQ ID NO: 131148 - RNA, 22 nt, synthetic construct
  source 1..22: mol_type = other RNA
ctaaggattatggctagaaact

SEQ ID NO: 131149 - RNA, 22 nt, synthetic construct
  source 1..22: mol_type = other RNA
ctaagggaagttttttcaaaat

SEQ ID NO: 131150 - RNA, 22 nt, synthetic construct
  source 1..22: mol_type = other RNA
ctaaggtcaacacatcagcgct

SEQ ID NO: 131151 - RNA, 22 nt, synthetic construct
  source 1..22: mol_type = other RNA
ctaaggtcaagagagattaaat

SEQ ID NO: 131152 - RNA, 22 nt, synthetic construct
  source 1..22: mol_type = other RNA
ctaaggtggagtggtggataga

SEQ ID NO: 131153 - RNA, 22 nt, synthetic construct
  source 1..22: mol_type = other RNA
ctaaggttctgctatgctgaaa

SEQ ID NO: 131154 - RNA, 22 nt, synthetic construct
  source 1..22: mol_type = other RNA
ctaagtaaaataaacaagtcac

SEQ ID NO: 131155 - RNA, 22 nt, synthetic construct
  source 1..22: mol_type = other RNA
ctaagtaatgctggccagtgag

SEQ ID NO: 131156 - RNA, 22 nt, synthetic construct
  source 1..22: mol_type = other RNA
ctaagtagtggcagccccgctt

SEQ ID NO: 131157 - RNA, 22 nt, synthetic construct
  source 1..22: mol_type = other RNA
ctaagtatgcagaaaccagttg

SEQ ID NO: 131158 - RNA, 22 nt, synthetic construct
  source 1..22: mol_type = other RNA
ctaagtcagaattcactgtgac

SEQ ID NO: 131159 - RNA, 22 nt, synthetic construct
  source 1..22: mol_type = other RNA
ctaagtcagcctgggcacacgc

SEQ ID NO: 131160 - RNA, 22 nt, synthetic construct
  source 1..22: mol_type = other RNA
ctaagtctcaacctactttaaa

SEQ ID NO: 131161 - RNA, 22 nt, synthetic construct
  source 1..22: mol_type = other RNA
ctaagtcttcttctaagctaag

SEQ ID NO: 131162 - RNA, 22 nt, synthetic construct
  source 1..22: mol_type = other RNA
ctaagtgcatttcggctctgtg

SEQ ID NO: 131163 - RNA, 22 nt, synthetic construct
  source 1..22: mol_type = other RNA
ctaagtggtattctatcatcaa

SEQ ID NO: 131164 - RNA, 22 nt, synthetic construct
  source 1..22: mol_type = other RNA
ctaagtgtgaagattaagcaca

SEQ ID NO: 131165 - RNA, 22 nt, synthetic construct
  source 1..22: mol_type = other RNA
ctaagtgtttaggatataagag

SEQ ID NO: 131166 - RNA, 22 nt, synthetic construct
  source 1..22: mol_type = other RNA
ctaagttgagaaactatccaac

SEQ ID NO: 131167 - RNA, 22 nt, synthetic construct
  source 1..22: mol_type = other RNA
ctaagtttgccaaagattcttg

SEQ ID NO: 131168 - RNA, 22 nt, synthetic construct
  source 1..22: mol_type = other RNA
ctaagttttgggggaagagagc

SEQ ID NO: 131169 - RNA, 22 nt, synthetic construct
  source 1..22: mol_type = other RNA
ctaataaaaacatatgcaggac

SEQ ID NO: 131170 - RNA, 22 nt, synthetic construct
  source 1..22: mol_type = other RNA
ctaataaaaagcctctctgatg

SEQ ID NO: 131171 - RNA, 22 nt, synthetic construct
  source 1..22: mol_type = other RNA
ctaataaaagctggagttattt

SEQ ID NO: 131172 - RNA, 22 nt, synthetic construct
  source 1..22: mol_type = other RNA
ctaataaaatagcaggattctt

SEQ ID NO: 131173 - RNA, 22 nt, synthetic construct
  source 1..22: mol_type = other RNA
ctaataaaatgtttagcggaat

SEQ ID NO: 131174 - RNA, 22 nt, synthetic construct
  source 1..22: mol_type = other RNA
ctaataaacgcggaatgaagca

SEQ ID NO: 131175 - RNA, 22 nt, synthetic construct
  source 1..22: mol_type = other RNA
ctaataaatgcataaacgacag

SEQ ID NO: 131176 - RNA, 22 nt, synthetic construct
  source 1..22: mol_type = other RNA
ctaataacagcctaagcaaatg

SEQ ID NO: 131177 - RNA, 22 nt, synthetic construct
  source 1..22: mol_type = other RNA
ctaataagtgagtttgacctgt

SEQ ID NO: 131178 - RNA, 22 nt, synthetic construct
  source 1..22: mol_type = other RNA
ctaataattgcttttgctgagg

SEQ ID NO: 131179 - RNA, 22 nt, synthetic construct
  source 1..22: mol_type = other RNA
ctaataatttatcagatcccaa

SEQ ID NO: 131180 - RNA, 22 nt, synthetic construct
  source 1..22: mol_type = other RNA
ctaatacagtaaagccccattg

SEQ ID NO: 131181 - RNA, 22 nt, synthetic construct
  source 1..22: mol_type = other RNA
ctaatagccagtgcagcaagca

SEQ ID NO: 131182 - RNA, 22 nt, synthetic construct
  source 1..22: mol_type = other RNA
ctaatagctagtgatgttgagt

SEQ ID NO: 131183 - RNA, 22 nt, synthetic construct
  source 1..22: mol_type = other RNA
ctaataggaagtggctagacgg

SEQ ID NO: 131184 - RNA, 22 nt, synthetic construct
  source 1..22: mol_type = other RNA
ctaatagttcacctctccgggt

SEQ ID NO: 131185 - RNA, 22 nt, synthetic construct
  source 1..22: mol_type = other RNA
ctaatatctttggggagatacc

SEQ ID NO: 131186 - RNA, 22 nt, synthetic construct
  source 1..22: mol_type = other RNA
ctaatatgagttcctgcttccc

SEQ ID NO: 131187 - RNA, 22 nt, synthetic construct
  source 1..22: mol_type = other RNA
ctaatatgctgtagtgattcac

SEQ ID NO: 131188 - RNA, 22 nt, synthetic construct
  source 1..22: mol_type = other RNA
ctaatatggttcctagaaaatt

SEQ ID NO: 131189 - RNA, 22 nt, synthetic construct
  source 1..22: mol_type = other RNA
ctaatcaaacataccccaaccc

SEQ ID NO: 131190 - RNA, 22 nt, synthetic construct
  source 1..22: mol_type = other RNA
ctaatcaagccgcaaataatca

SEQ ID NO: 131191 - RNA, 22 nt, synthetic construct
  source 1..22: mol_type = other RNA
ctaatcaggttgggcttatcag

SEQ ID NO: 131192 - RNA, 22 nt, synthetic construct
  source 1..22: mol_type = other RNA
ctaatcccaaagtgagcagaag

SEQ ID NO: 131193 - RNA, 22 nt, synthetic construct
  source 1..22: mol_type = other RNA
ctaatccttctcatagtcttcc

SEQ ID NO: 131194 - RNA, 22 nt, synthetic construct
  source 1..22: mol_type = other RNA
ctaatcctttgcacacaccaaa

SEQ ID NO: 131195 - RNA, 22 nt, synthetic construct
  source 1..22: mol_type = other RNA
ctaatctaacatgttacaaatg

SEQ ID NO: 131196 - RNA, 22 nt, synthetic construct
  source 1..22: mol_type = other RNA
ctaatctactttctaatccttt

SEQ ID NO: 131197 - RNA, 22 nt, synthetic construct
  source 1..22: mol_type = other RNA
ctaatctcaatcagggccttcc

SEQ ID NO: 131198 - RNA, 22 nt, synthetic construct
  source 1..22: mol_type = other RNA
ctaatctctaggcttaaaattc

SEQ ID NO: 131199 - RNA, 22 nt, synthetic construct
  source 1..22: mol_type = other RNA
ctaatgaactcccagaactcga

SEQ ID NO: 131200 - RNA, 22 nt, synthetic construct
  source 1..22: mol_type = other RNA
ctaatgagaatttcagaaagag

SEQ ID NO: 131201 - RNA, 22 nt, synthetic construct
  source 1..22: mol_type = other RNA
ctaatgcaagagttaaaactca

SEQ ID NO: 131202 - RNA, 22 nt, synthetic construct
  source 1..22: mol_type = other RNA
ctaatgcccattaaaaccatga

SEQ ID NO: 131203 - RNA, 22 nt, synthetic construct
  source 1..22: mol_type = other RNA
ctaatgcctcaaattagtcata

SEQ ID NO: 131204 - RNA, 22 nt, synthetic construct
  source 1..22: mol_type = other RNA
ctaatgggcgtggagcggtgtc

SEQ ID NO: 131205 - RNA, 22 nt, synthetic construct
  source 1..22: mol_type = other RNA
ctaatggggaaatagatgccta

SEQ ID NO: 131206 - RNA, 22 nt, synthetic construct
  source 1..22: mol_type = other RNA
ctaatgggtacagggtttctgt

SEQ ID NO: 131207 - RNA, 22 nt, synthetic construct
  source 1..22: mol_type = other RNA
ctaatggtccttgctgaagaat

SEQ ID NO: 131208 - RNA, 22 nt, synthetic construct
  source 1..22: mol_type = other RNA
ctaatgtaaacagcatactgtg

SEQ ID NO: 131209 - RNA, 22 nt, synthetic construct
  source 1..22: mol_type = other RNA
ctaatgtcacattttcttatct

SEQ ID NO: 131210 - RNA, 22 nt, synthetic construct
  source 1..22: mol_type = other RNA
ctaatgtccttttcctgttccg

SEQ ID NO: 131211 - RNA, 22 nt, synthetic construct
  source 1..22: mol_type = other RNA
ctaatgtgcaaggagagaaaaa

SEQ ID NO: 131212 - RNA, 22 nt, synthetic construct
  source 1..22: mol_type = other RNA
ctaatgtggcttgcaaggccca

SEQ ID NO: 131213 - RNA, 22 nt, synthetic construct
  source 1..22: mol_type = other RNA
ctaatgtgtaagaaatgccaca

SEQ ID NO: 131214 - RNA, 22 nt, synthetic construct
  source 1..22: mol_type = other RNA
ctaatgtgtgttccagacaaaa

SEQ ID NO: 131215 - RNA, 22 nt, synthetic construct
  source 1..22: mol_type = other RNA
ctaattactgtttcttagctat

SEQ ID NO: 131216 - RNA, 22 nt, synthetic construct
  source 1..22: mol_type = other RNA
ctaattagaaactggtgaactg

SEQ ID NO: 131217 - RNA, 22 nt, synthetic construct
  source 1..22: mol_type = other RNA
ctaattcacatttaagaaggga

SEQ ID NO: 131218 - RNA, 22 nt, synthetic construct
  source 1..22: mol_type = other RNA
ctaattcattgtacatgaagtc

SEQ ID NO: 131219 - RNA, 22 nt, synthetic construct
  source 1..22: mol_type = other RNA
ctaattcgaaaatgggccaaag

SEQ ID NO: 131220 - RNA, 22 nt, synthetic construct
  source 1..22: mol_type = other RNA
ctaattctgacaactgggagaa

SEQ ID NO: 131221 - RNA, 22 nt, synthetic construct
  source 1..22: mol_type = other RNA
ctaattgtacacctcaaactag

SEQ ID NO: 131222 - RNA, 22 nt, synthetic construct
  source 1..22: mol_type = other RNA
ctaattgtttgttgggtttaac

SEQ ID NO: 131223 - RNA, 22 nt, synthetic construct
  source 1..22: mol_type = other RNA
ctaatttcagagagacctgaag

SEQ ID NO: 131224 - RNA, 22 nt, synthetic construct
  source 1..22: mol_type = other RNA
ctaatttcatacaagttgtgat

SEQ ID NO: 131225 - RNA, 22 nt, synthetic construct
  source 1..22: mol_type = other RNA
ctaatttccaagaaccctttgt

SEQ ID NO: 131226 - RNA, 22 nt, synthetic construct
  source 1..22: mol_type = other RNA
ctaatttcccatttgatttctt

SEQ ID NO: 131227 - RNA, 22 nt, synthetic construct
  source 1..22: mol_type = other RNA
ctaatttctttaaaaccagagc

SEQ ID NO: 131228 - RNA, 22 nt, synthetic construct
  source 1..22: mol_type = other RNA
ctaatttgaggcattagtgaat

SEQ ID NO: 131229 - RNA, 22 nt, synthetic construct
  source 1..22: mol_type = other RNA
ctaatttgtgaaccttgaagta

SEQ ID NO: 131230 - RNA, 22 nt, synthetic construct
  source 1..22: mol_type = other RNA
ctacaaaacagggttattaaca

SEQ ID NO: 131231 - RNA, 22 nt, synthetic construct
  source 1..22: mol_type = other RNA
ctacaaaagatcatttcaaacc

SEQ ID NO: 131232 - RNA, 22 nt, synthetic construct
  source 1..22: mol_type = other RNA
ctacaaaaggaggaactaattg

SEQ ID NO: 131233 - RNA, 22 nt, synthetic construct
  source 1..22: mol_type = other RNA
ctacaaaagggaaaacaattac

SEQ ID NO: 131234 - RNA, 22 nt, synthetic construct
  source 1..22: mol_type = other RNA
ctacaaaaggtttccagtggcc

SEQ ID NO: 131235 - RNA, 22 nt, synthetic construct
  source 1..22: mol_type = other RNA
ctacaaaccttcttatttcctt

SEQ ID NO: 131236 - RNA, 22 nt, synthetic construct
  source 1..22: mol_type = other RNA
ctacaaactccaaacctttaag

SEQ ID NO: 131237 - RNA, 22 nt, synthetic construct
  source 1..22: mol_type = other RNA
ctacaagagttcccctatactg

SEQ ID NO: 131238 - RNA, 22 nt, synthetic construct
  source 1..22: mol_type = other RNA
ctacaagttttaacttaagaac

SEQ ID NO: 131239 - RNA, 22 nt, synthetic construct
  source 1..22: mol_type = other RNA
ctacaatggttgaactagttta

SEQ ID NO: 131240 - RNA, 22 nt, synthetic construct
  source 1..22: mol_type = other RNA
ctacaattactgtacaaagatt

SEQ ID NO: 131241 - RNA, 22 nt, synthetic construct
  source 1..22: mol_type = other RNA
ctacacaaaaatccagataaat

SEQ ID NO: 131242 - RNA, 22 nt, synthetic construct
  source 1..22: mol_type = other RNA
ctacacaacatgttttatttct

SEQ ID NO: 131243 - RNA, 22 nt, synthetic construct
  source 1..22: mol_type = other RNA
ctacacaagtattaacgaattc

SEQ ID NO: 131244 - RNA, 22 nt, synthetic construct
  source 1..22: mol_type = other RNA
ctacacagacatgaacaatcct

SEQ ID NO: 131245 - RNA, 22 nt, synthetic construct
  source 1..22: mol_type = other RNA
ctacacatacacagggaaaact

SEQ ID NO: 131246 - RNA, 22 nt, synthetic construct
  source 1..22: mol_type = other RNA
ctacacatatctttaggtgttt

SEQ ID NO: 131247 - RNA, 22 nt, synthetic construct
  source 1..22: mol_type = other RNA
ctacacatcagtgctgctctga

SEQ ID NO: 131248 - RNA, 22 nt, synthetic construct
  source 1..22: mol_type = other RNA
ctacacattccagaccagcagt

SEQ ID NO: 131249 - RNA, 22 nt, synthetic construct
  source 1..22: mol_type = other RNA
ctacacccagttcaccagtttc

SEQ ID NO: 131250 - RNA, 22 nt, synthetic construct
  source 1..22: mol_type = other RNA
ctacacccatccacccacttgt

SEQ ID NO: 131251 - RNA, 22 nt, synthetic construct
  source 1..22: mol_type = other RNA
ctacacccggctaattaaacaa

SEQ ID NO: 131252 - RNA, 22 nt, synthetic construct
  source 1..22: mol_type = other RNA
ctacaccctgggaaagcctggc

SEQ ID NO: 131253 - RNA, 22 nt, synthetic construct
  source 1..22: mol_type = other RNA
ctacactcaatacacgtggctg

SEQ ID NO: 131254 - RNA, 22 nt, synthetic construct
  source 1..22: mol_type = other RNA
ctacactgaagggaattttact

SEQ ID NO: 131255 - RNA, 22 nt, synthetic construct
  source 1..22: mol_type = other RNA
ctacagaaaacccttcatcatt

SEQ ID NO: 131256 - RNA, 22 nt, synthetic construct
  source 1..22: mol_type = other RNA
ctacagaatgttcaagtatttc

SEQ ID NO: 131257 - RNA, 22 nt, synthetic construct
  source 1..22: mol_type = other RNA
ctacagacatgccacaccacat

SEQ ID NO: 131258 - RNA, 22 nt, synthetic construct
  source 1..22: mol_type = other RNA
ctacagactaatatgagttcct

SEQ ID NO: 131259 - RNA, 22 nt, synthetic construct
  source 1..22: mol_type = other RNA
ctacagactcaataaccacatg

SEQ ID NO: 131260 - RNA, 22 nt, synthetic construct
  source 1..22: mol_type = other RNA
ctacagaggattttggattgcg

SEQ ID NO: 131261 - RNA, 22 nt, synthetic construct
  source 1..22: mol_type = other RNA
ctacagattcaatgcaatactt

SEQ ID NO: 131262 - RNA, 22 nt, synthetic construct
  source 1..22: mol_type = other RNA
ctacagcatattagctgtctgg

SEQ ID NO: 131263 - RNA, 22 nt, synthetic construct
  source 1..22: mol_type = other RNA
ctacaggcaacaaaagaaaaaa

SEQ ID NO: 131264 - RNA, 22 nt, synthetic construct
  source 1..22: mol_type = other RNA
ctacagggaaccgtaacttctt

SEQ ID NO: 131265 - RNA, 22 nt, synthetic construct
  source 1..22: mol_type = other RNA
ctacaggggcattccctgtctg

SEQ ID NO: 131266 - RNA, 22 nt, synthetic construct
  source 1..22: mol_type = other RNA
ctacaggtcggaaggaatgtgc

SEQ ID NO: 131267 - RNA, 22 nt, synthetic construct
  source 1..22: mol_type = other RNA
ctacaggtgtgaaccacgcatc

SEQ ID NO: 131268 - RNA, 22 nt, synthetic construct
  source 1..22: mol_type = other RNA
ctacagtaatcaaacagtgtga

SEQ ID NO: 131269 - RNA, 22 nt, synthetic construct
  source 1..22: mol_type = other RNA
ctacagtattacacagaaagcc

SEQ ID NO: 131270 - RNA, 22 nt, synthetic construct
  source 1..22: mol_type = other RNA
ctacagtcacacaccactacac

SEQ ID NO: 131271 - RNA, 22 nt, synthetic construct
  source 1..22: mol_type = other RNA
ctacagtggttccatttgtttt

SEQ ID NO: 131272 - RNA, 22 nt, synthetic construct
  source 1..22: mol_type = other RNA
ctacagtgtttagggacgaatg

SEQ ID NO: 131273 - RNA, 22 nt, synthetic construct
  source 1..22: mol_type = other RNA
ctacagttaacaatactgcatt

SEQ ID NO: 131274 - RNA, 22 nt, synthetic construct
  source 1..22: mol_type = other RNA
ctacataacttcccagacaggg

SEQ ID NO: 131275 - RNA, 22 nt, synthetic construct
  source 1..22: mol_type = other RNA
ctacatactgcactctcaaaat

SEQ ID NO: 131276 - RNA, 22 nt, synthetic construct
  source 1..22: mol_type = other RNA
ctacatagtccactttccatct

SEQ ID NO: 131277 - RNA, 22 nt, synthetic construct
  source 1..22: mol_type = other RNA
ctacatatggcaattccataaa

SEQ ID NO: 131278 - RNA, 22 nt, synthetic construct
  source 1..22: mol_type = other RNA
ctacatcacagacagggaatgg

SEQ ID NO: 131279 - RNA, 22 nt, synthetic construct
  source 1..22: mol_type = other RNA
ctacatccccccacccctgctc

SEQ ID NO: 131280 - RNA, 22 nt, synthetic construct
  source 1..22: mol_type = other RNA
ctacatctggatcctgtctcag

SEQ ID NO: 131281 - RNA, 22 nt, synthetic construct
  source 1..22: mol_type = other RNA
ctacatgtaaaaactgtttggc

SEQ ID NO: 131282 - RNA, 22 nt, synthetic construct
  source 1..22: mol_type = other RNA
ctacatgtacgccaattttcat

SEQ ID NO: 131283 - RNA, 22 nt, synthetic construct
  source 1..22: mol_type = other RNA
ctacattaatctcatccacaat

SEQ ID NO: 131284 - RNA, 22 nt, synthetic construct
  source 1..22: mol_type = other RNA
ctacattgccttcaagttgctt

SEQ ID NO: 131285 - RNA, 22 nt, synthetic construct
  source 1..22: mol_type = other RNA
ctaccaaaaaactacgagtatc

SEQ ID NO: 131286 - RNA, 22 nt, synthetic construct
  source 1..22: mol_type = other RNA
ctaccaaaatataaatacgtgt

SEQ ID NO: 131287 - RNA, 22 nt, synthetic construct
  source 1..22: mol_type = other RNA
ctaccaaacattgaaggcagaa

SEQ ID NO: 131288 - RNA, 22 nt, synthetic construct
  source 1..22: mol_type = other RNA
ctaccaattctccctgaaattg

SEQ ID NO: 131289 - RNA, 22 nt, synthetic construct
  source 1..22: mol_type = other RNA
ctaccaccactaatgtcacatt

SEQ ID NO: 131290 - RNA, 22 nt, synthetic construct
  source 1..22: mol_type = other RNA
ctaccacccgtccaatttcttt

SEQ ID NO: 131291 - RNA, 22 nt, synthetic construct
  source 1..22: mol_type = other RNA
ctaccactgaggtcaagaaata

SEQ ID NO: 131292 - RNA, 22 nt, synthetic construct
  source 1..22: mol_type = other RNA
ctaccatcagagtgaacaggca

SEQ ID NO: 131293 - RNA, 22 nt, synthetic construct
  source 1..22: mol_type = other RNA
ctaccatctctccaacagaaga

SEQ ID NO: 131294 - RNA, 22 nt, synthetic construct
  source 1..22: mol_type = other RNA
ctaccatgttgttcttttcaaa

SEQ ID NO: 131295 - RNA, 22 nt, synthetic construct
  source 1..22: mol_type = other RNA
ctaccatttattcctctcttgg

SEQ ID NO: 131296 - RNA, 22 nt, synthetic construct
  source 1..22: mol_type = other RNA
ctacccaagcttaggtcagatt

SEQ ID NO: 131297 - RNA, 22 nt, synthetic construct
  source 1..22: mol_type = other RNA
ctacccactattgaaagccctt

SEQ ID NO: 131298 - RNA, 22 nt, synthetic construct
  source 1..22: mol_type = other RNA
ctacccagcactctgaatcacc

SEQ ID NO: 131299 - RNA, 22 nt, synthetic construct
  source 1..22: mol_type = other RNA
ctaccctcgagtaaaaagaatg

SEQ ID NO: 131300 - RNA, 22 nt, synthetic construct
  source 1..22: mol_type = other RNA
ctaccctgaggatataacgata

SEQ ID NO: 131301 - RNA, 22 nt, synthetic construct
  source 1..22: mol_type = other RNA
ctaccctgccttccttgggcac

SEQ ID NO: 131302 - RNA, 22 nt, synthetic construct
  source 1..22: mol_type = other RNA
ctaccctttccaaattcaaagc

SEQ ID NO: 131303 - RNA, 22 nt, synthetic construct
  source 1..22: mol_type = other RNA
ctaccctttcttgttagtagga

SEQ ID NO: 131304 - RNA, 22 nt, synthetic construct
  source 1..22: mol_type = other RNA
ctacctaaaaagggagtcagta

SEQ ID NO: 131305 - RNA, 22 nt, synthetic construct
  source 1..22: mol_type = other RNA
ctacctagaaaaacaccaaaaa

SEQ ID NO: 131306 - RNA, 22 nt, synthetic construct
  source 1..22: mol_type = other RNA
ctacctagggtgtaaaaggcta

SEQ ID NO: 131307 - RNA, 22 nt, synthetic construct
  source 1..22: mol_type = other RNA
ctacctatagaattcttcttct

SEQ ID NO: 131308 - RNA, 22 nt, synthetic construct
  source 1..22: mol_type = other RNA
ctacctcaaattgtgtgttctc

SEQ ID NO: 131309 - RNA, 22 nt, synthetic construct
  source 1..22: mol_type = other RNA
ctacctcccttcacaaagccct

SEQ ID NO: 131310 - RNA, 22 nt, synthetic construct
  source 1..22: mol_type = other RNA
ctacctgacttcaaactatact

SEQ ID NO: 131311 - RNA, 22 nt, synthetic construct
  source 1..22: mol_type = other RNA
ctacctggagcctgaggacact

SEQ ID NO: 131312 - RNA, 22 nt, synthetic construct
  source 1..22: mol_type = other RNA
ctacctggcagtctaggaaaag

SEQ ID NO: 131313 - RNA, 22 nt, synthetic construct
  source 1..22: mol_type = other RNA
ctacctgtctttcccattacca

SEQ ID NO: 131314 - RNA, 22 nt, synthetic construct
  source 1..22: mol_type = other RNA
ctacctgtgtaacaaacctgca

SEQ ID NO: 131315 - RNA, 22 nt, synthetic construct
  source 1..22: mol_type = other RNA
ctacctgttgattgttgccatc

SEQ ID NO: 131316 - RNA, 22 nt, synthetic construct
  source 1..22: mol_type = other RNA
ctaccttccaaagtatgcatag

SEQ ID NO: 131317 - RNA, 22 nt, synthetic construct
  source 1..22: mol_type = other RNA
ctaccttgaaaatgcccttatt

SEQ ID NO: 131318 - RNA, 22 nt, synthetic construct
  source 1..22: mol_type = other RNA
ctacctttggctactgtaaaca

SEQ ID NO: 131319 - RNA, 22 nt, synthetic construct
  source 1..22: mol_type = other RNA
ctaccttttgttattaaaatgg

SEQ ID NO: 131320 - RNA, 22 nt, synthetic construct
  source 1..22: mol_type = other RNA
ctacgaagctacagtaatcaaa

SEQ ID NO: 131321 - RNA, 22 nt, synthetic construct
  source 1..22: mol_type = other RNA
ctacgaatgaactcctatagtt

SEQ ID NO: 131322 - RNA, 22 nt, synthetic construct
  source 1..22: mol_type = other RNA
ctacgagtatcatataaattgc

SEQ ID NO: 131323 - RNA, 22 nt, synthetic construct
  source 1..22: mol_type = other RNA
ctacgcccggcccatgacatgt

SEQ ID NO: 131324 - RNA, 22 nt, synthetic construct
  source 1..22: mol_type = other RNA
ctacgcctagctgacttttaaa

SEQ ID NO: 131325 - RNA, 22 nt, synthetic construct
  source 1..22: mol_type = other RNA
ctacgcgggaggctgaggcagg

SEQ ID NO: 131326 - RNA, 22 nt, synthetic construct
  source 1..22: mol_type = other RNA
ctacggacgcaggcaaacagcg

SEQ ID NO: 131327 - RNA, 22 nt, synthetic construct
  source 1..22: mol_type = other RNA
ctacggaggatgaggggctgag

SEQ ID NO: 131328 - RNA, 22 nt, synthetic construct
  source 1..22: mol_type = other RNA
ctactaaacaaatcagatttca

SEQ ID NO: 131329 - RNA, 22 nt, synthetic construct
  source 1..22: mol_type = other RNA
ctactaaacattaaggaagaat

SEQ ID NO: 131330 - RNA, 22 nt, synthetic construct
  source 1..22: mol_type = other RNA
ctactaacaagaaagggtagct

SEQ ID NO: 131331 - RNA, 22 nt, synthetic construct
  source 1..22: mol_type = other RNA
ctactaataaatgcataaacga

SEQ ID NO: 131332 - RNA, 22 nt, synthetic construct
  source 1..22: mol_type = other RNA
ctactagcaagctaataattta

SEQ ID NO: 131333 - RNA, 22 nt, synthetic construct
  source 1..22: mol_type = other RNA
ctactagccagtgattggatat

SEQ ID NO: 131334 - RNA, 22 nt, synthetic construct
  source 1..22: mol_type = other RNA
ctactagtataagagaaggaag

SEQ ID NO: 131335 - RNA, 22 nt, synthetic construct
  source 1..22: mol_type = other RNA
ctactagtatttattaaacctg

SEQ ID NO: 131336 - RNA, 22 nt, synthetic construct
  source 1..22: mol_type = other RNA
ctactatgaatatactggaaaa

SEQ ID NO: 131337 - RNA, 22 nt, synthetic construct
  source 1..22: mol_type = other RNA
ctactattccaggatcaaatct

SEQ ID NO: 131338 - RNA, 22 nt, synthetic construct
  source 1..22: mol_type = other RNA
ctactatttcgcaaagcaacat

SEQ ID NO: 131339 - RNA, 22 nt, synthetic construct
  source 1..22: mol_type = other RNA
ctactcactgaaaccctcacga

SEQ ID NO: 131340 - RNA, 22 nt, synthetic construct
  source 1..22: mol_type = other RNA
ctactcactgtactactgacct

SEQ ID NO: 131341 - RNA, 22 nt, synthetic construct
  source 1..22: mol_type = other RNA
ctactcagctgtcactctcttt

SEQ ID NO: 131342 - RNA, 22 nt, synthetic construct
  source 1..22: mol_type = other RNA
ctactcaggagattaaggctgg

SEQ ID NO: 131343 - RNA, 22 nt, synthetic construct
  source 1..22: mol_type = other RNA
ctactcaggaggctgaggcagg

SEQ ID NO: 131344 - RNA, 22 nt, synthetic construct
  source 1..22: mol_type = other RNA
ctactcagggggctgaggcagg

SEQ ID NO: 131345 - RNA, 22 nt, synthetic construct
  source 1..22: mol_type = other RNA
ctactctgcctcagttgacatc

SEQ ID NO: 131346 - RNA, 22 nt, synthetic construct
  source 1..22: mol_type = other RNA
ctactcttttgtttttgggggg

SEQ ID NO: 131347 - RNA, 22 nt, synthetic construct
  source 1..22: mol_type = other RNA
ctactgacctgggagaaagacc

SEQ ID NO: 131348 - RNA, 22 nt, synthetic construct
  source 1..22: mol_type = other RNA
ctactgactccctttttaggta

SEQ ID NO: 131349 - RNA, 22 nt, synthetic construct
  source 1..22: mol_type = other RNA
ctactgatagcgaaaggtacga

SEQ ID NO: 131350 - RNA, 22 nt, synthetic construct
  source 1..22: mol_type = other RNA
ctactgcaaatatccaatcact

SEQ ID NO: 131351 - RNA, 22 nt, synthetic construct
  source 1..22: mol_type = other RNA
ctactgcatgctaggggctgtt

SEQ ID NO: 131352 - RNA, 22 nt, synthetic construct
  source 1..22: mol_type = other RNA
ctactgcattttttgccaaatt

SEQ ID NO: 131353 - RNA, 22 nt, synthetic construct
  source 1..22: mol_type = other RNA
ctactgctctgtcctgtcagtg

SEQ ID NO: 131354 - RNA, 22 nt, synthetic construct
  source 1..22: mol_type = other RNA
ctactggggtcttagttctgct

SEQ ID NO: 131355 - RNA, 22 nt, synthetic construct
  source 1..22: mol_type = other RNA
ctactgtaaacaatgctgctat

SEQ ID NO: 131356 - RNA, 22 nt, synthetic construct
  source 1..22: mol_type = other RNA
ctactgtactgtttagcatcta

SEQ ID NO: 131357 - RNA, 22 nt, synthetic construct
  source 1..22: mol_type = other RNA
ctactgtgaattcactaatgcc

SEQ ID NO: 131358 - RNA, 22 nt, synthetic construct
  source 1..22: mol_type = other RNA
ctacttagcccctgctgccaga

SEQ ID NO: 131359 - RNA, 22 nt, synthetic construct
  source 1..22: mol_type = other RNA
ctacttatcttttctagtttct

SEQ ID NO: 131360 - RNA, 22 nt, synthetic construct
  source 1..22: mol_type = other RNA
ctacttcgtgtgtggagtgggg

SEQ ID NO: 131361 - RNA, 22 nt, synthetic construct
  source 1..22: mol_type = other RNA
ctacttgtcaggtgggcactgg

SEQ ID NO: 131362 - RNA, 22 nt, synthetic construct
  source 1..22: mol_type = other RNA
ctactttaaatcagggccttta

SEQ ID NO: 131363 - RNA, 22 nt, synthetic construct
  source 1..22: mol_type = other RNA
ctactttcacataaggtatatt

SEQ ID NO: 131364 - RNA, 22 nt, synthetic construct
  source 1..22: mol_type = other RNA
ctactttctaatcctttgcaca

SEQ ID NO: 131365 - RNA, 22 nt, synthetic construct
  source 1..22: mol_type = other RNA
ctactttcttcaaccatacttt

SEQ ID NO: 131366 - RNA, 22 nt, synthetic construct
  source 1..22: mol_type = other RNA
ctactttttgtcacacggaaaa

SEQ ID NO: 131367 - RNA, 22 nt, synthetic construct
  source 1..22: mol_type = other RNA
ctagaaaaacaccaaaaaagca

SEQ ID NO: 131368 - RNA, 22 nt, synthetic construct
  source 1..22: mol_type = other RNA
ctagaaaaagaataagctaatc

SEQ ID NO: 131369 - RNA, 22 nt, synthetic construct
  source 1..22: mol_type = other RNA
ctagaaaaccgacagcagataa

SEQ ID NO: 131370 - RNA, 22 nt, synthetic construct
  source 1..22: mol_type = other RNA
ctagaaaagataagtagaaggt

SEQ ID NO: 131371 - RNA, 22 nt, synthetic construct
  source 1..22: mol_type = other RNA
ctagaaaatcatacattttcca

SEQ ID NO: 131372 - RNA, 22 nt, synthetic construct
  source 1..22: mol_type = other RNA
ctagaaacttcttctgttggag

SEQ ID NO: 131373 - RNA, 22 nt, synthetic construct
  source 1..22: mol_type = other RNA
ctagaaacttggattgtgtgtc

SEQ ID NO: 131374 - RNA, 22 nt, synthetic construct
  source 1..22: mol_type = other RNA
ctagaaagataaatccaacgac

SEQ ID NO: 131375 - RNA, 22 nt, synthetic construct
  source 1..22: mol_type = other RNA
ctagaaaggaattgtaatcaca

SEQ ID NO: 131376 - RNA, 22 nt, synthetic construct
  source 1..22: mol_type = other RNA
ctagaaaggagggactgaaacc

SEQ ID NO: 131377 - RNA, 22 nt, synthetic construct
  source 1..22: mol_type = other RNA
ctagaaatcatacacgagtgtg

SEQ ID NO: 131378 - RNA, 22 nt, synthetic construct
  source 1..22: mol_type = other RNA
ctagaacagaataaaaagtgac

SEQ ID NO: 131379 - RNA, 22 nt, synthetic construct
  source 1..22: mol_type = other RNA
ctagaactagaatactccacca

SEQ ID NO: 131380 - RNA, 22 nt, synthetic construct
  source 1..22: mol_type = other RNA
ctagaactgtgttacattgcct

SEQ ID NO: 131381 - RNA, 22 nt, synthetic construct
  source 1..22: mol_type = other RNA
ctagaacttatgcatcttgcaa

SEQ ID NO: 131382 - RNA, 22 nt, synthetic construct
  source 1..22: mol_type = other RNA
ctagaagaaatgggtaaatttc

SEQ ID NO: 131383 - RNA, 22 nt, synthetic construct
  source 1..22: mol_type = other RNA
ctagaagaaatgttaacaattg

SEQ ID NO: 131384 - RNA, 22 nt, synthetic construct
  source 1..22: mol_type = other RNA
ctagaagacctcaaattctgag

SEQ ID NO: 131385 - RNA, 22 nt, synthetic construct
  source 1..22: mol_type = other RNA
ctagaagcactttttaccaagt

SEQ ID NO: 131386 - RNA, 22 nt, synthetic construct
  source 1..22: mol_type = other RNA
ctagaagcatctgatacacttc

SEQ ID NO: 131387 - RNA, 22 nt, synthetic construct
  source 1..22: mol_type = other RNA
ctagaagtcccagttcaaggtg

SEQ ID NO: 131388 - RNA, 22 nt, synthetic construct
  source 1..22: mol_type = other RNA
ctagaatactccaccagcatct

SEQ ID NO: 131389 - RNA, 22 nt, synthetic construct
  source 1..22: mol_type = other RNA
ctagaatgcatccctcctctgg

SEQ ID NO: 131390 - RNA, 22 nt, synthetic construct
  source 1..22: mol_type = other RNA
ctagaatgtgacttcgtcaagg

SEQ ID NO: 131391 - RNA, 22 nt, synthetic construct
  source 1..22: mol_type = other RNA
ctagaattgactttaccctgct

SEQ ID NO: 131392 - RNA, 22 nt, synthetic construct
  source 1..22: mol_type = other RNA
ctagacacatttttgacagcca

SEQ ID NO: 131393 - RNA, 22 nt, synthetic construct
  source 1..22: mol_type = other RNA
ctagacctcaaattaatcagtc

SEQ ID NO: 131394 - RNA, 22 nt, synthetic construct
  source 1..22: mol_type = other RNA
ctagacctttcttaggtttctc

SEQ ID NO: 131395 - RNA, 22 nt, synthetic construct
  source 1..22: mol_type = other RNA
ctagacggaaaaacattctaca

SEQ ID NO: 131396 - RNA, 22 nt, synthetic construct
  source 1..22: mol_type = other RNA
ctagactaagaaaaacagaaga

SEQ ID NO: 131397 - RNA, 22 nt, synthetic construct
  source 1..22: mol_type = other RNA
ctagactgccaggtagggaggg

SEQ ID NO: 131398 - RNA, 22 nt, synthetic construct
  source 1..22: mol_type = other RNA
ctagactgcctgaggtctcaaa

SEQ ID NO: 131399 - RNA, 22 nt, synthetic construct
  source 1..22: mol_type = other RNA
ctagagaaagcatcagagcttt

SEQ ID NO: 131400 - RNA, 22 nt, synthetic construct
  source 1..22: mol_type = other RNA
ctagagatgggaaagtattccc

SEQ ID NO: 131401 - RNA, 22 nt, synthetic construct
  source 1..22: mol_type = other RNA
ctagagattaggcagaaccacc

SEQ ID NO: 131402 - RNA, 22 nt, synthetic construct
  source 1..22: mol_type = other RNA
ctagagatttgctgtataacat

SEQ ID NO: 131403 - RNA, 22 nt, synthetic construct
  source 1..22: mol_type = other RNA
ctagagccaggaagtcagcaac

SEQ ID NO: 131404 - RNA, 22 nt, synthetic construct
  source 1..22: mol_type = other RNA
ctagagctcacacgagaaggac

SEQ ID NO: 131405 - RNA, 22 nt, synthetic construct
  source 1..22: mol_type = other RNA
ctagagctgctgtaacaaagat

SEQ ID NO: 131406 - RNA, 22 nt, synthetic construct
  source 1..22: mol_type = other RNA
ctagagcttcaacctcctgggc

SEQ ID NO: 131407 - RNA, 22 nt, synthetic construct
  source 1..22: mol_type = other RNA
ctagagggtaagaccaaaatgg

SEQ ID NO: 131408 - RNA, 22 nt, synthetic construct
  source 1..22: mol_type = other RNA
ctagagtattacctatgaatag

SEQ ID NO: 131409 - RNA, 22 nt, synthetic construct
  source 1..22: mol_type = other RNA
ctagataagaaaatgtgacatt

SEQ ID NO: 131410 - RNA, 22 nt, synthetic construct
  source 1..22: mol_type = other RNA
ctagatcaagcccttccttgct

SEQ ID NO: 131411 - RNA, 22 nt, synthetic construct
  source 1..22: mol_type = other RNA
ctagatctcttttcctttaacg

SEQ ID NO: 131412 - RNA, 22 nt, synthetic construct
  source 1..22: mol_type = other RNA
ctagatgattcgcattgctaat

SEQ ID NO: 131413 - RNA, 22 nt, synthetic construct
  source 1..22: mol_type = other RNA
ctagatgcctcgaaggcctgct

SEQ ID NO: 131414 - RNA, 22 nt, synthetic construct
  source 1..22: mol_type = other RNA
ctagatgctaaacagtacagta

SEQ ID NO: 131415 - RNA, 22 nt, synthetic construct
  source 1..22: mol_type = other RNA
ctagattaccttgaagtttaat

SEQ ID NO: 131416 - RNA, 22 nt, synthetic construct
  source 1..22: mol_type = other RNA
ctagattcatatgctttgagct

SEQ ID NO: 131417 - RNA, 22 nt, synthetic construct
  source 1..22: mol_type = other RNA
ctagattccctctggccttcta

SEQ ID NO: 131418 - RNA, 22 nt, synthetic construct
  source 1..22: mol_type = other RNA
ctagattgaccttctacttatc

SEQ ID NO: 131419 - RNA, 22 nt, synthetic construct
  source 1..22: mol_type = other RNA
ctagatttcaatctggaatgca

SEQ ID NO: 131420 - RNA, 22 nt, synthetic construct
  source 1..22: mol_type = other RNA
ctagcaaacaaacacactgggt

SEQ ID NO: 131421 - RNA, 22 nt, synthetic construct
  source 1..22: mol_type = other RNA
ctagcaaactactgatagcgaa

SEQ ID NO: 131422 - RNA, 22 nt, synthetic construct
  source 1..22: mol_type = other RNA
ctagcaaactgaatcagacaac

SEQ ID NO: 131423 - RNA, 22 nt, synthetic construct
  source 1..22: mol_type = other RNA
ctagcaagctaataatttatca

SEQ ID NO: 131424 - RNA, 22 nt, synthetic construct
  source 1..22: mol_type = other RNA
ctagcaatccaggatcttactg

SEQ ID NO: 131425 - RNA, 22 nt, synthetic construct
  source 1..22: mol_type = other RNA
ctagcacagaaccatgtaacag

SEQ ID NO: 131426 - RNA, 22 nt, synthetic construct
  source 1..22: mol_type = other RNA
ctagcacagaggcaacagtcat

SEQ ID NO: 131427 - RNA, 22 nt, synthetic construct
  source 1..22: mol_type = other RNA
ctagcatgcagtagctcatcat

SEQ ID NO: 131428 - RNA, 22 nt, synthetic construct
  source 1..22: mol_type = other RNA
ctagccaaagcaagccttggca

SEQ ID NO: 131429 - RNA, 22 nt, synthetic construct
  source 1..22: mol_type = other RNA
ctagccaagggtttgtcaattt

SEQ ID NO: 131430 - RNA, 22 nt, synthetic construct
  source 1..22: mol_type = other RNA
ctagccactgggtcttataggt

SEQ ID NO: 131431 - RNA, 22 nt, synthetic construct
  source 1..22: mol_type = other RNA
ctagccacttcctattagaaga

SEQ ID NO: 131432 - RNA, 22 nt, synthetic construct
  source 1..22: mol_type = other RNA
ctagccagtgattggatatttg

SEQ ID NO: 131433 - RNA, 22 nt, synthetic construct
  source 1..22: mol_type = other RNA
ctagccataatccttagattac

SEQ ID NO: 131434 - RNA, 22 nt, synthetic construct
  source 1..22: mol_type = other RNA
ctagcccagcacttccattttg

SEQ ID NO: 131435 - RNA, 22 nt, synthetic construct
  source 1..22: mol_type = other RNA
ctagcccagcttccgggacttg

SEQ ID NO: 131436 - RNA, 22 nt, synthetic construct
  source 1..22: mol_type = other RNA
ctagccccaaatacctctgaat

SEQ ID NO: 131437 - RNA, 22 nt, synthetic construct
  source 1..22: mol_type = other RNA
ctagcctccagaaaaccagaaa

SEQ ID NO: 131438 - RNA, 22 nt, synthetic construct
  source 1..22: mol_type = other RNA
ctagcctctctgggcttcactt

SEQ ID NO: 131439 - RNA, 22 nt, synthetic construct
  source 1..22: mol_type = other RNA
ctagccttcttggagtaaacct

SEQ ID NO: 131440 - RNA, 22 nt, synthetic construct
  source 1..22: mol_type = other RNA
ctagccttgtactgtgtggctt

SEQ ID NO: 131441 - RNA, 22 nt, synthetic construct
  source 1..22: mol_type = other RNA
ctagctacttgggaggctgaga

SEQ ID NO: 131442 - RNA, 22 nt, synthetic construct
  source 1..22: mol_type = other RNA
ctagctattagagaaatgcaaa

SEQ ID NO: 131443 - RNA, 22 nt, synthetic construct
  source 1..22: mol_type = other RNA
ctagctattgtcttttctatct

SEQ ID NO: 131444 - RNA, 22 nt, synthetic construct
  source 1..22: mol_type = other RNA
ctagctccccattccctgtctg

SEQ ID NO: 131445 - RNA, 22 nt, synthetic construct
  source 1..22: mol_type = other RNA
ctagctcctgggaaaaggattt

SEQ ID NO: 131446 - RNA, 22 nt, synthetic construct
  source 1..22: mol_type = other RNA
ctagctgacccactggtttcag

SEQ ID NO: 131447 - RNA, 22 nt, synthetic construct
  source 1..22: mol_type = other RNA
ctagctgacttttaaaatatgt

SEQ ID NO: 131448 - RNA, 22 nt, synthetic construct
  source 1..22: mol_type = other RNA
ctagctgttttcatgcgacata

SEQ ID NO: 131449 - RNA, 22 nt, synthetic construct
  source 1..22: mol_type = other RNA
ctagctttcagcactgctattg

SEQ ID NO: 131450 - RNA, 22 nt, synthetic construct
  source 1..22: mol_type = other RNA
ctaggaaaagacttgaggttta

SEQ ID NO: 131451 - RNA, 22 nt, synthetic construct
  source 1..22: mol_type = other RNA
ctaggaaacactgctcagaagc

SEQ ID NO: 131452 - RNA, 22 nt, synthetic construct
  source 1..22: mol_type = other RNA
ctaggaaccatattagagtgaa

SEQ ID NO: 131453 - RNA, 22 nt, synthetic construct
  source 1..22: mol_type = other RNA
ctaggaccataggcacgcgccc

SEQ ID NO: 131454 - RNA, 22 nt, synthetic construct
  source 1..22: mol_type = other RNA
ctaggaggtctaagagataact

SEQ ID NO: 131455 - RNA, 22 nt, synthetic construct
  source 1..22: mol_type = other RNA
ctaggagtacagtgcataccac

SEQ ID NO: 131456 - RNA, 22 nt, synthetic construct
  source 1..22: mol_type = other RNA
ctaggatttcagtaaatgaaat

SEQ ID NO: 131457 - RNA, 22 nt, synthetic construct
  source 1..22: mol_type = other RNA
ctaggcaagagagcaagactca

SEQ ID NO: 131458 - RNA, 22 nt, synthetic construct
  source 1..22: mol_type = other RNA
ctaggcatataaactggaagga

SEQ ID NO: 131459 - RNA, 22 nt, synthetic construct
  source 1..22: mol_type = other RNA
ctaggcatataataagcagaat

SEQ ID NO: 131460 - RNA, 22 nt, synthetic construct
  source 1..22: mol_type = other RNA
ctaggcatctatttccccatta

SEQ ID NO: 131461 - RNA, 22 nt, synthetic construct
  source 1..22: mol_type = other RNA
ctaggccctaaccccagagatt

SEQ ID NO: 131462 - RNA, 22 nt, synthetic construct
  source 1..22: mol_type = other RNA
ctaggcctattttaggctctgt

SEQ ID NO: 131463 - RNA, 22 nt, synthetic construct
  source 1..22: mol_type = other RNA
ctaggcgaaatatctccctcac

SEQ ID NO: 131464 - RNA, 22 nt, synthetic construct
  source 1..22: mol_type = other RNA
ctaggcgtagtatctcatgctt

SEQ ID NO: 131465 - RNA, 22 nt, synthetic construct
  source 1..22: mol_type = other RNA
ctaggctaatgtgtgttccaga

SEQ ID NO: 131466 - RNA, 22 nt, synthetic construct
  source 1..22: mol_type = other RNA
ctaggctcctgagaaccggaac

SEQ ID NO: 131467 - RNA, 22 nt, synthetic construct
  source 1..22: mol_type = other RNA
ctaggctggagtgcaattgtgc

SEQ ID NO: 131468 - RNA, 22 nt, synthetic construct
  source 1..22: mol_type = other RNA
ctaggctgtcccaaatgcacca

SEQ ID NO: 131469 - RNA, 22 nt, synthetic construct
  source 1..22: mol_type = other RNA
ctaggcttaaaattcttccagc

SEQ ID NO: 131470 - RNA, 22 nt, synthetic construct
  source 1..22: mol_type = other RNA
ctagggaagcagttgatgcaat

SEQ ID NO: 131471 - RNA, 22 nt, synthetic construct
  source 1..22: mol_type = other RNA
ctagggactggcctcggccaac

SEQ ID NO: 131472 - RNA, 22 nt, synthetic construct
  source 1..22: mol_type = other RNA
ctaggggactaacagggtctac

SEQ ID NO: 131473 - RNA, 22 nt, synthetic construct
  source 1..22: mol_type = other RNA
ctaggggctgttcccagataac

SEQ ID NO: 131474 - RNA, 22 nt, synthetic construct
  source 1..22: mol_type = other RNA
ctagggtgtaaaaggctaattt

SEQ ID NO: 131475 - RNA, 22 nt, synthetic construct
  source 1..22: mol_type = other RNA
ctaggtagggttggggtatgtt

SEQ ID NO: 131476 - RNA, 22 nt, synthetic construct
  source 1..22: mol_type = other RNA
ctaggtagtttctttgaactta

SEQ ID NO: 131477 - RNA, 22 nt, synthetic construct
  source 1..22: mol_type = other RNA
ctaggtatcacagtgaggacgc

SEQ ID NO: 131478 - RNA, 22 nt, synthetic construct
  source 1..22: mol_type = other RNA
ctaggtatttgaaaaatgtcaa

SEQ ID NO: 131479 - RNA, 22 nt, synthetic construct
  source 1..22: mol_type = other RNA
ctaggtgacctgccagagttgg

SEQ ID NO: 131480 - RNA, 22 nt, synthetic construct
  source 1..22: mol_type = other RNA
ctaggtgagtgagatgggaaga

SEQ ID NO: 131481 - RNA, 22 nt, synthetic construct
  source 1..22: mol_type = other RNA
ctaggtgtgataactgatatga

SEQ ID NO: 131482 - RNA, 22 nt, synthetic construct
  source 1..22: mol_type = other RNA
ctaggttatctgttttcttact

SEQ ID NO: 131483 - RNA, 22 nt, synthetic construct
  source 1..22: mol_type = other RNA
ctagtaacttggtcgaaaacct

SEQ ID NO: 131484 - RNA, 22 nt, synthetic construct
  source 1..22: mol_type = other RNA
ctagtaagtaaaatcggaacag

SEQ ID NO: 131485 - RNA, 22 nt, synthetic construct
  source 1..22: mol_type = other RNA
ctagtacactgttgatttagaa

SEQ ID NO: 131486 - RNA, 22 nt, synthetic construct
  source 1..22: mol_type = other RNA
ctagtacgtaacctaaagttga

SEQ ID NO: 131487 - RNA, 22 nt, synthetic construct
  source 1..22: mol_type = other RNA
ctagtacgtgcagagcaggggt

SEQ ID NO: 131488 - RNA, 22 nt, synthetic construct
  source 1..22: mol_type = other RNA
ctagtagaaagcaggttcattt

SEQ ID NO: 131489 - RNA, 22 nt, synthetic construct
  source 1..22: mol_type = other RNA
ctagtagcagaatccccaaata

SEQ ID NO: 131490 - RNA, 22 nt, synthetic construct
  source 1..22: mol_type = other RNA
ctagtaggatgaattacaaatg

SEQ ID NO: 131491 - RNA, 22 nt, synthetic construct
  source 1..22: mol_type = other RNA
ctagtaggcaacatccctatgc

SEQ ID NO: 131492 - RNA, 22 nt, synthetic construct
  source 1..22: mol_type = other RNA
ctagtataagagaaggaagcac

SEQ ID NO: 131493 - RNA, 22 nt, synthetic construct
  source 1..22: mol_type = other RNA
ctagtatcaacctgcaggtatt

SEQ ID NO: 131494 - RNA, 22 nt, synthetic construct
  source 1..22: mol_type = other RNA
ctagtattttgttgacatcctt

SEQ ID NO: 131495 - RNA, 22 nt, synthetic construct
  source 1..22: mol_type = other RNA
ctagtcacatttgctttactac

SEQ ID NO: 131496 - RNA, 22 nt, synthetic construct
  source 1..22: mol_type = other RNA
ctagtcaccctacagactcaat

SEQ ID NO: 131497 - RNA, 22 nt, synthetic construct
  source 1..22: mol_type = other RNA
ctagtcagcacactcttaataa

SEQ ID NO: 131498 - RNA, 22 nt, synthetic construct
  source 1..22: mol_type = other RNA
ctagtcagtatatttactgctt

SEQ ID NO: 131499 - RNA, 22 nt, synthetic construct
  source 1..22: mol_type = other RNA
ctagtcatccactgcacagtat

SEQ ID NO: 131500 - RNA, 22 nt, synthetic construct
  source 1..22: mol_type = other RNA
ctagtccatgaagaaaacactc

SEQ ID NO: 131501 - RNA, 22 nt, synthetic construct
  source 1..22: mol_type = other RNA
ctagtctccatacaaggagacc

SEQ ID NO: 131502 - RNA, 22 nt, synthetic construct
  source 1..22: mol_type = other RNA
ctagtgaagtcaatttcagatc

SEQ ID NO: 131503 - RNA, 22 nt, synthetic construct
  source 1..22: mol_type = other RNA
ctagtgaagtcccatcttccat

SEQ ID NO: 131504 - RNA, 22 nt, synthetic construct
  source 1..22: mol_type = other RNA
ctagtgaatgagaccaaatgca

SEQ ID NO: 131505 - RNA, 22 nt, synthetic construct
  source 1..22: mol_type = other RNA
ctagtgatgggagatggacact

SEQ ID NO: 131506 - RNA, 22 nt, synthetic construct
  source 1..22: mol_type = other RNA
ctagtgatgttgagtatctttt

SEQ ID NO: 131507 - RNA, 22 nt, synthetic construct
  source 1..22: mol_type = other RNA
ctagtggaagaatcaggtctct

SEQ ID NO: 131508 - RNA, 22 nt, synthetic construct
  source 1..22: mol_type = other RNA
ctagtggatgctggggacccct

SEQ ID NO: 131509 - RNA, 22 nt, synthetic construct
  source 1..22: mol_type = other RNA
ctagtggctcatacttgcttta

SEQ ID NO: 131510 - RNA, 22 nt, synthetic construct
  source 1..22: mol_type = other RNA
ctagtgggatcaaaccatgttc

SEQ ID NO: 131511 - RNA, 22 nt, synthetic construct
  source 1..22: mol_type = other RNA
ctagtgggtcgggtgtcagaaa

SEQ ID NO: 131512 - RNA, 22 nt, synthetic construct
  source 1..22: mol_type = other RNA
ctagtggtaactagatgcctcg

SEQ ID NO: 131513 - RNA, 22 nt, synthetic construct
  source 1..22: mol_type = other RNA
ctagtggtgcttaattcaaaca

SEQ ID NO: 131514 - RNA, 22 nt, synthetic construct
  source 1..22: mol_type = other RNA
ctagtgtcctcaggctccaggt

SEQ ID NO: 131515 - RNA, 22 nt, synthetic construct
  source 1..22: mol_type = other RNA
ctagtgtctcagcctcccaagt

SEQ ID NO: 131516 - RNA, 22 nt, synthetic construct
  source 1..22: mol_type = other RNA
ctagtgtctccataccccctgg

SEQ ID NO: 131517 - RNA, 22 nt, synthetic construct
  source 1..22: mol_type = other RNA
ctagtgtcttagtctgacttct

SEQ ID NO: 131518 - RNA, 22 nt, synthetic construct
  source 1..22: mol_type = other RNA
ctagtgtgaatgaggagtgaat

SEQ ID NO: 131519 - RNA, 22 nt, synthetic construct
  source 1..22: mol_type = other RNA
ctagtgtgcatgtgttgtgcac

SEQ ID NO: 131520 - RNA, 22 nt, synthetic construct
  source 1..22: mol_type = other RNA
ctagtgtgtctgactacactga

SEQ ID NO: 131521 - RNA, 22 nt, synthetic construct
  source 1..22: mol_type = other RNA
ctagtgtgttgactgacataac

SEQ ID NO: 131522 - RNA, 22 nt, synthetic construct
  source 1..22: mol_type = other RNA
ctagttaataaaggtgctaatt

SEQ ID NO: 131523 - RNA, 22 nt, synthetic construct
  source 1..22: mol_type = other RNA
ctagttaccactagcaaactac

SEQ ID NO: 131524 - RNA, 22 nt, synthetic construct
  source 1..22: mol_type = other RNA
ctagttagtttgttgacccaat

SEQ ID NO: 131525 - RNA, 22 nt, synthetic construct
  source 1..22: mol_type = other RNA
ctagttctaataaacgcggaat

SEQ ID NO: 131526 - RNA, 22 nt, synthetic construct
  source 1..22: mol_type = other RNA
ctagttctagctctgtcttttt

SEQ ID NO: 131527 - RNA, 22 nt, synthetic construct
  source 1..22: mol_type = other RNA
ctagttgcacggtgaagaaccg

SEQ ID NO: 131528 - RNA, 22 nt, synthetic construct
  source 1..22: mol_type = other RNA
ctagttgtgctacctcaaattg

SEQ ID NO: 131529 - RNA, 22 nt, synthetic construct
  source 1..22: mol_type = other RNA
ctagtttagtgcagtatcttga

SEQ ID NO: 131530 - RNA, 22 nt, synthetic construct
  source 1..22: mol_type = other RNA
ctagtttctttttgttttctcc

SEQ ID NO: 131531 - RNA, 22 nt, synthetic construct
  source 1..22: mol_type = other RNA
ctagtttgaggtgtacaattag

SEQ ID NO: 131532 - RNA, 22 nt, synthetic construct
  source 1..22: mol_type = other RNA
ctagttttccaatccgggaaca

SEQ ID NO: 131533 - RNA, 22 nt, synthetic construct
  source 1..22: mol_type = other RNA
ctagttttccagtatattcata

SEQ ID NO: 131534 - RNA, 22 nt, synthetic construct
  source 1..22: mol_type = other RNA
ctataaaactcttagcttagaa

SEQ ID NO: 131535 - RNA, 22 nt, synthetic construct
  source 1..22: mol_type = other RNA
ctataaaatgctggaaattttc

SEQ ID NO: 131536 - RNA, 22 nt, synthetic construct
  source 1..22: mol_type = other RNA
ctataaacttccctctcagtgg

SEQ ID NO: 131537 - RNA, 22 nt, synthetic construct
  source 1..22: mol_type = other RNA
ctataaagaacatgattgggtc

SEQ ID NO: 131538 - RNA, 22 nt, synthetic construct
  source 1..22: mol_type = other RNA
ctataaatcagtaagaaaacag

SEQ ID NO: 131539 - RNA, 22 nt, synthetic construct
  source 1..22: mol_type = other RNA
ctataacagatggaactctatt

SEQ ID NO: 131540 - RNA, 22 nt, synthetic construct
  source 1..22: mol_type = other RNA
ctataaccacgagtaatggatg

SEQ ID NO: 131541 - RNA, 22 nt, synthetic construct
  source 1..22: mol_type = other RNA
ctataagacccagtggctagtg

SEQ ID NO: 131542 - RNA, 22 nt, synthetic construct
  source 1..22: mol_type = other RNA
ctataagccaatatccctgata

SEQ ID NO: 131543 - RNA, 22 nt, synthetic construct
  source 1..22: mol_type = other RNA
ctataaggaaatacaaaaagtg

SEQ ID NO: 131544 - RNA, 22 nt, synthetic construct
  source 1..22: mol_type = other RNA
ctataatccagatggacaaatt

SEQ ID NO: 131545 - RNA, 22 nt, synthetic construct
  source 1..22: mol_type = other RNA
ctataattcaattttcatgggt

SEQ ID NO: 131546 - RNA, 22 nt, synthetic construct
  source 1..22: mol_type = other RNA
ctataattctgccttcaatgtt

SEQ ID NO: 131547 - RNA, 22 nt, synthetic construct
  source 1..22: mol_type = other RNA
ctatacaaccggaaaatgctta

SEQ ID NO: 131548 - RNA, 22 nt, synthetic construct
  source 1..22: mol_type = other RNA
ctatacacgttacaaaatatgt

SEQ ID NO: 131549 - RNA, 22 nt, synthetic construct
  source 1..22: mol_type = other RNA
ctatactgtaaccctgtttccc

SEQ ID NO: 131550 - RNA, 22 nt, synthetic construct
  source 1..22: mol_type = other RNA
ctatacttcaatgctacagtaa

SEQ ID NO: 131551 - RNA, 22 nt, synthetic construct
  source 1..22: mol_type = other RNA
ctatacttcatctttcctgatc

SEQ ID NO: 131552 - RNA, 22 nt, synthetic construct
  source 1..22: mol_type = other RNA
ctatagaaaatagtatgaaggt

SEQ ID NO: 131553 - RNA, 22 nt, synthetic construct
  source 1..22: mol_type = other RNA
ctatagaattcttcttctgtta

SEQ ID NO: 131554 - RNA, 22 nt, synthetic construct
  source 1..22: mol_type = other RNA
ctatagacagcatccccagaaa

SEQ ID NO: 131555 - RNA, 22 nt, synthetic construct
  source 1..22: mol_type = other RNA
ctatagacccaaagcaaaagca

SEQ ID NO: 131556 - RNA, 22 nt, synthetic construct
  source 1..22: mol_type = other RNA
ctatagctgagaagtaacatta

SEQ ID NO: 131557 - RNA, 22 nt, synthetic construct
  source 1..22: mol_type = other RNA
ctatagcttctgagctgttaat

SEQ ID NO: 131558 - RNA, 22 nt, synthetic construct
  source 1..22: mol_type = other RNA
ctataggagttcattcgtagca

SEQ ID NO: 131559 - RNA, 22 nt, synthetic construct
  source 1..22: mol_type = other RNA
ctataggcaatgagtctgacat

SEQ ID NO: 131560 - RNA, 22 nt, synthetic construct
  source 1..22: mol_type = other RNA
ctataggtagtacatattcatt

SEQ ID NO: 131561 - RNA, 22 nt, synthetic construct
  source 1..22: mol_type = other RNA
ctatagtcattccgctaaacat

SEQ ID NO: 131562 - RNA, 22 nt, synthetic construct
  source 1..22: mol_type = other RNA
ctatagtggctgcaccattttt

SEQ ID NO: 131563 - RNA, 22 nt, synthetic construct
  source 1..22: mol_type = other RNA
ctatagttaagtctgaaagctt

SEQ ID NO: 131564 - RNA, 22 nt, synthetic construct
  source 1..22: mol_type = other RNA
ctatagtttaattgggggaaaa

SEQ ID NO: 131565 - RNA, 22 nt, synthetic construct
  source 1..22: mol_type = other RNA
ctatatcccaaattggcattta

SEQ ID NO: 131566 - RNA, 22 nt, synthetic construct
  source 1..22: mol_type = other RNA
ctatatgatccagcagtttcac

SEQ ID NO: 131567 - RNA, 22 nt, synthetic construct
  source 1..22: mol_type = other RNA
ctatattgtcaatggggaactt

SEQ ID NO: 131568 - RNA, 22 nt, synthetic construct
  source 1..22: mol_type = other RNA
ctatatttttccacataaagtc

SEQ ID NO: 131569 - RNA, 22 nt, synthetic construct
  source 1..22: mol_type = other RNA
ctatcaaaacacttctgtgatc

SEQ ID NO: 131570 - RNA, 22 nt, synthetic construct
  source 1..22: mol_type = other RNA
ctatcaatctcacacctgggta

SEQ ID NO: 131571 - RNA, 22 nt, synthetic construct
  source 1..22: mol_type = other RNA
ctatcacgattctgacccagag

SEQ ID NO: 131572 - RNA, 22 nt, synthetic construct
  source 1..22: mol_type = other RNA
ctatcagaagcacaccaaggtt

SEQ ID NO: 131573 - RNA, 22 nt, synthetic construct
  source 1..22: mol_type = other RNA
ctatcagagcatgtcccctgga

SEQ ID NO: 131574 - RNA, 22 nt, synthetic construct
  source 1..22: mol_type = other RNA
ctatcaggccttccacctgctc

SEQ ID NO: 131575 - RNA, 22 nt, synthetic construct
  source 1..22: mol_type = other RNA
ctatcagggctgaaaaacacct

SEQ ID NO: 131576 - RNA, 22 nt, synthetic construct
  source 1..22: mol_type = other RNA
ctatcagtagtttgctagtggt

SEQ ID NO: 131577 - RNA, 22 nt, synthetic construct
  source 1..22: mol_type = other RNA
ctatcatcaagacagagctccc

SEQ ID NO: 131578 - RNA, 22 nt, synthetic construct
  source 1..22: mol_type = other RNA
ctatcattgcaccactgcactc

SEQ ID NO: 131579 - RNA, 22 nt, synthetic construct
  source 1..22: mol_type = other RNA
ctatcattttaaagggataatg

SEQ ID NO: 131580 - RNA, 22 nt, synthetic construct
  source 1..22: mol_type = other RNA
ctatccaacatgccagctttgg

SEQ ID NO: 131581 - RNA, 22 nt, synthetic construct
  source 1..22: mol_type = other RNA
ctatccacatttggttttacta

SEQ ID NO: 131582 - RNA, 22 nt, synthetic construct
  source 1..22: mol_type = other RNA
ctatccaccactccaccttagc

SEQ ID NO: 131583 - RNA, 22 nt, synthetic construct
  source 1..22: mol_type = other RNA
ctatccagaagagaatggctgg

SEQ ID NO: 131584 - RNA, 22 nt, synthetic construct
  source 1..22: mol_type = other RNA
ctatccagtctctgcaacattt

SEQ ID NO: 131585 - RNA, 22 nt, synthetic construct
  source 1..22: mol_type = other RNA
ctatccagtgacacctgagggg

SEQ ID NO: 131586 - RNA, 22 nt, synthetic construct
  source 1..22: mol_type = other RNA
ctatcctaatgggcgtggagcg

SEQ ID NO: 131587 - RNA, 22 nt, synthetic construct
  source 1..22: mol_type = other RNA
ctatcctatgtggggaatgctc

SEQ ID NO: 131588 - RNA, 22 nt, synthetic construct
  source 1..22: mol_type = other RNA
ctatcgttatatcctcagggta

SEQ ID NO: 131589 - RNA, 22 nt, synthetic construct
  source 1..22: mol_type = other RNA
ctatctaagcctactgctctgt

SEQ ID NO: 131590 - RNA, 22 nt, synthetic construct
  source 1..22: mol_type = other RNA
ctatctaataaaatagcaggat

SEQ ID NO: 131591 - RNA, 22 nt, synthetic construct
  source 1..22: mol_type = other RNA
ctatctattaacagaagggtat

SEQ ID NO: 131592 - RNA, 22 nt, synthetic construct
  source 1..22: mol_type = other RNA
ctatctctcagatctgagtttg

SEQ ID NO: 131593 - RNA, 22 nt, synthetic construct
  source 1..22: mol_type = other RNA
ctatctcttcctcctctggaca

SEQ ID NO: 131594 - RNA, 22 nt, synthetic construct
  source 1..22: mol_type = other RNA
ctatctgaacattttagctggg

SEQ ID NO: 131595 - RNA, 22 nt, synthetic construct
  source 1..22: mol_type = other RNA
ctatctgaactttcgaagtggg

SEQ ID NO: 131596 - RNA, 22 nt, synthetic construct
  source 1..22: mol_type = other RNA
ctatcttccctaaagagaatct

SEQ ID NO: 131597 - RNA, 22 nt, synthetic construct
  source 1..22: mol_type = other RNA
ctatctttactttcagctcaaa

SEQ ID NO: 131598 - RNA, 22 nt, synthetic construct
  source 1..22: mol_type = other RNA
ctatctttgggaaaatctctga

SEQ ID NO: 131599 - RNA, 22 nt, synthetic construct
  source 1..22: mol_type = other RNA
ctatgaaaagcctcaaacgaac

SEQ ID NO: 131600 - RNA, 22 nt, synthetic construct
  source 1..22: mol_type = other RNA
ctatgaaaattggcgtacatgt

SEQ ID NO: 131601 - RNA, 22 nt, synthetic construct
  source 1..22: mol_type = other RNA
ctatgaaaatttagcttctgaa

SEQ ID NO: 131602 - RNA, 22 nt, synthetic construct
  source 1..22: mol_type = other RNA
ctatgaaatcttgaagatggca

SEQ ID NO: 131603 - RNA, 22 nt, synthetic construct
  source 1..22: mol_type = other RNA
ctatgaaatgtggtttttggtt

SEQ ID NO: 131604 - RNA, 22 nt, synthetic construct
  source 1..22: mol_type = other RNA
ctatgaataggtgtgtgttcct

SEQ ID NO: 131605 - RNA, 22 nt, synthetic construct
  source 1..22: mol_type = other RNA
ctatgaatatactggaaaacta

SEQ ID NO: 131606 - RNA, 22 nt, synthetic construct
  source 1..22: mol_type = other RNA
ctatgaatttgcctattctggg

SEQ ID NO: 131607 - RNA, 22 nt, synthetic construct
  source 1..22: mol_type = other RNA
ctatgactaatttgaggcatta

SEQ ID NO: 131608 - RNA, 22 nt, synthetic construct
  source 1..22: mol_type = other RNA
ctatgagaaggattagtgttaa

SEQ ID NO: 131609 - RNA, 22 nt, synthetic construct
  source 1..22: mol_type = other RNA
ctatgcaataactcaaaatgtt

SEQ ID NO: 131610 - RNA, 22 nt, synthetic construct
  source 1..22: mol_type = other RNA
ctatgcagaaatctaccaaaca

SEQ ID NO: 131611 - RNA, 22 nt, synthetic construct
  source 1..22: mol_type = other RNA
ctatgcagcaacggaaatgagt

SEQ ID NO: 131612 - RNA, 22 nt, synthetic construct
  source 1..22: mol_type = other RNA
ctatgcatactgcagcactttt

SEQ ID NO: 131613 - RNA, 22 nt, synthetic construct
  source 1..22: mol_type = other RNA
ctatgcatactttggaaggtag

SEQ ID NO: 131614 - RNA, 22 nt, synthetic construct
  source 1..22: mol_type = other RNA
ctatgccttcagtatgaatgca

SEQ ID NO: 131615 - RNA, 22 nt, synthetic construct
  source 1..22: mol_type = other RNA
ctatgctcctgcctcagcctcc

SEQ ID NO: 131616 - RNA, 22 nt, synthetic construct
  source 1..22: mol_type = other RNA
ctatgctcttggtttcttcaag

SEQ ID NO: 131617 - RNA, 22 nt, synthetic construct
  source 1..22: mol_type = other RNA
ctatgctgaaaggcatgaaatt

SEQ ID NO: 131618 - RNA, 22 nt, synthetic construct
  source 1..22: mol_type = other RNA
ctatgcttaatctgatttttag

SEQ ID NO: 131619 - RNA, 22 nt, synthetic construct
  source 1..22: mol_type = other RNA
ctatggacatgaggaaagcagg

SEQ ID NO: 131620 - RNA, 22 nt, synthetic construct
  source 1..22: mol_type = other RNA
ctatggagcactgtgagccact

SEQ ID NO: 131621 - RNA, 22 nt, synthetic construct
  source 1..22: mol_type = other RNA
ctatggcaggcaccttcagaag

SEQ ID NO: 131622 - RNA, 22 nt, synthetic construct
  source 1..22: mol_type = other RNA
ctatggcatttgagggttagaa

SEQ ID NO: 131623 - RNA, 22 nt, synthetic construct
  source 1..22: mol_type = other RNA
ctatggcttttgagtgtaaggt

SEQ ID NO: 131624 - RNA, 22 nt, synthetic construct
  source 1..22: mol_type = other RNA
ctatggtgttatttgttctgtc

SEQ ID NO: 131625 - RNA, 22 nt, synthetic construct
  source 1..22: mol_type = other RNA
ctatgtaagacaatgtctttgg

SEQ ID NO: 131626 - RNA, 22 nt, synthetic construct
  source 1..22: mol_type = other RNA
ctatgtaatctcatggaagtta

SEQ ID NO: 131627 - RNA, 22 nt, synthetic construct
  source 1..22: mol_type = other RNA
ctatgtaggcacattcaagcag

SEQ ID NO: 131628 - RNA, 22 nt, synthetic construct
  source 1..22: mol_type = other RNA
ctatgtatgtggctcacattgt

SEQ ID NO: 131629 - RNA, 22 nt, synthetic construct
  source 1..22: mol_type = other RNA
ctatgtcccctggggcctcagc

SEQ ID NO: 131630 - RNA, 22 nt, synthetic construct
  source 1..22: mol_type = other RNA
ctatgtgacaaacacttttcaa

SEQ ID NO: 131631 - RNA, 22 nt, synthetic construct
  source 1..22: mol_type = other RNA
ctatgtgacagaatgcatcttt

SEQ ID NO: 131632 - RNA, 22 nt, synthetic construct
  source 1..22: mol_type = other RNA
ctatgtggggaatgctcataat

SEQ ID NO: 131633 - RNA, 22 nt, synthetic construct
  source 1..22: mol_type = other RNA
ctatgtgttgataaatatgtgt

SEQ ID NO: 131634 - RNA, 22 nt, synthetic construct
  source 1..22: mol_type = other RNA
ctattaaatcatgatgtttggc

SEQ ID NO: 131635 - RNA, 22 nt, synthetic construct
  source 1..22: mol_type = other RNA
ctattaacagaagggtatatac

SEQ ID NO: 131636 - RNA, 22 nt, synthetic construct
  source 1..22: mol_type = other RNA
ctattaaccatatggtttacaa

SEQ ID NO: 131637 - RNA, 22 nt, synthetic construct
  source 1..22: mol_type = other RNA
ctattaactttgaaatcagaac

SEQ ID NO: 131638 - RNA, 22 nt, synthetic construct
  source 1..22: mol_type = other RNA
ctattaagtattgcattgaatc

SEQ ID NO: 131639 - RNA, 22 nt, synthetic construct
  source 1..22: mol_type = other RNA
ctattagagaaatgcaaatcaa

SEQ ID NO: 131640 - RNA, 22 nt, synthetic construct
  source 1..22: mol_type = other RNA
ctattagttaaccttctggggt

SEQ ID NO: 131641 - RNA, 22 nt, synthetic construct
  source 1..22: mol_type = other RNA
ctattataattttttgagacgg

SEQ ID NO: 131642 - RNA, 22 nt, synthetic construct
  source 1..22: mol_type = other RNA
ctattatgagcagttgtatgcc

SEQ ID NO: 131643 - RNA, 22 nt, synthetic construct
  source 1..22: mol_type = other RNA
ctattcaacaggtataaagttt

SEQ ID NO: 131644 - RNA, 22 nt, synthetic construct
  source 1..22: mol_type = other RNA
ctattcaacctataagacccag

SEQ ID NO: 131645 - RNA, 22 nt, synthetic construct
  source 1..22: mol_type = other RNA
ctattcaagacaagcaaggaag

SEQ ID NO: 131646 - RNA, 22 nt, synthetic construct
  source 1..22: mol_type = other RNA
ctattcacactgctcctgcctt

SEQ ID NO: 131647 - RNA, 22 nt, synthetic construct
  source 1..22: mol_type = other RNA
ctattcataggtaatactctag

SEQ ID NO: 131648 - RNA, 22 nt, synthetic construct
  source 1..22: mol_type = other RNA
ctattcattaccaggctggaag

SEQ ID NO: 131649 - RNA, 22 nt, synthetic construct
  source 1..22: mol_type = other RNA
ctattccaaatgtctgtcttta

SEQ ID NO: 131650 - RNA, 22 nt, synthetic construct
  source 1..22: mol_type = other RNA
ctattccagagaattcagagtg

SEQ ID NO: 131651 - RNA, 22 nt, synthetic construct
  source 1..22: mol_type = other RNA
ctattccaggatcaaatctggc

SEQ ID NO: 131652 - RNA, 22 nt, synthetic construct
  source 1..22: mol_type = other RNA
ctattccataagatctgtcttt

SEQ ID NO: 131653 - RNA, 22 nt, synthetic construct
  source 1..22: mol_type = other RNA
ctattccattgttctctttgtt

SEQ ID NO: 131654 - RNA, 22 nt, synthetic construct
  source 1..22: mol_type = other RNA
ctattcccctggatcccccagc

SEQ ID NO: 131655 - RNA, 22 nt, synthetic construct
  source 1..22: mol_type = other RNA
ctattccctacattgccttcaa

SEQ ID NO: 131656 - RNA, 22 nt, synthetic construct
  source 1..22: mol_type = other RNA
ctattctctttctgaaattctc

SEQ ID NO: 131657 - RNA, 22 nt, synthetic construct
  source 1..22: mol_type = other RNA
ctattctggggctcaagtaagt

SEQ ID NO: 131658 - RNA, 22 nt, synthetic construct
  source 1..22: mol_type = other RNA
ctattgaaagcccttgagtatt

SEQ ID NO: 131659 - RNA, 22 nt, synthetic construct
  source 1..22: mol_type = other RNA
ctattgagagtgaaaacacaaa

SEQ ID NO: 131660 - RNA, 22 nt, synthetic construct
  source 1..22: mol_type = other RNA
ctattgataaatctaaagccaa

SEQ ID NO: 131661 - RNA, 22 nt, synthetic construct
  source 1..22: mol_type = other RNA
ctattgtatgaacattttgagt

SEQ ID NO: 131662 - RNA, 22 nt, synthetic construct
  source 1..22: mol_type = other RNA
ctattgtcagtaattctgcagt

SEQ ID NO: 131663 - RNA, 22 nt, synthetic construct
  source 1..22: mol_type = other RNA
ctattgtcttttctatctgaac

SEQ ID NO: 131664 - RNA, 22 nt, synthetic construct
  source 1..22: mol_type = other RNA
ctattgttgaattgttggagtt

SEQ ID NO: 131665 - RNA, 22 nt, synthetic construct
  source 1..22: mol_type = other RNA
ctattgttttgcaagattaatc

SEQ ID NO: 131666 - RNA, 22 nt, synthetic construct
  source 1..22: mol_type = other RNA
ctatttagagggatgaatgttg

SEQ ID NO: 131667 - RNA, 22 nt, synthetic construct
  source 1..22: mol_type = other RNA
ctatttatgttgcacaaaagtg

SEQ ID NO: 131668 - RNA, 22 nt, synthetic construct
  source 1..22: mol_type = other RNA
ctatttccccattagagtaagc

SEQ ID NO: 131669 - RNA, 22 nt, synthetic construct
  source 1..22: mol_type = other RNA
ctatttcgcaaagcaacatgct

SEQ ID NO: 131670 - RNA, 22 nt, synthetic construct
  source 1..22: mol_type = other RNA
ctatttctctttaaagctgaac

SEQ ID NO: 131671 - RNA, 22 nt, synthetic construct
  source 1..22: mol_type = other RNA
ctatttctttccattcaatcct

SEQ ID NO: 131672 - RNA, 22 nt, synthetic construct
  source 1..22: mol_type = other RNA
ctatttgtatcttcacaaacaa

SEQ ID NO: 131673 - RNA, 22 nt, synthetic construct
  source 1..22: mol_type = other RNA
ctattttaggctctgtggtttc

SEQ ID NO: 131674 - RNA, 22 nt, synthetic construct
  source 1..22: mol_type = other RNA
ctattttataatgggcaatcag

SEQ ID NO: 131675 - RNA, 22 nt, synthetic construct
  source 1..22: mol_type = other RNA
ctattttcataacaaagctctg

SEQ ID NO: 131676 - RNA, 22 nt, synthetic construct
  source 1..22: mol_type = other RNA
ctattttcctaaaactccccat

SEQ ID NO: 131677 - RNA, 22 nt, synthetic construct
  source 1..22: mol_type = other RNA
ctattttctatagtggctgcac

SEQ ID NO: 131678 - RNA, 22 nt, synthetic construct
  source 1..22: mol_type = other RNA
ctattttgttattagggtaatg

SEQ ID NO: 131679 - RNA, 22 nt, synthetic construct
  source 1..22: mol_type = other RNA
ctatttttctgcaattggaaga

SEQ ID NO: 131680 - RNA, 22 nt, synthetic construct
  source 1..22: mol_type = other RNA
ctatttttgtctggtggacaaa

SEQ ID NO: 131681 - RNA, 22 nt, synthetic construct
  source 1..22: mol_type = other RNA
ctcaaaaatactcaagggcttt

SEQ ID NO: 131682 - RNA, 22 nt, synthetic construct
  source 1..22: mol_type = other RNA
ctcaaaaatttaagcacagaat

SEQ ID NO: 131683 - RNA, 22 nt, synthetic construct
  source 1..22: mol_type = other RNA
ctcaaaacaaacaaacagaaag

SEQ ID NO: 131684 - RNA, 22 nt, synthetic construct
  source 1..22: mol_type = other RNA
ctcaaaactgaagtttatcagt

SEQ ID NO: 131685 - RNA, 22 nt, synthetic construct
  source 1..22: mol_type = other RNA
ctcaaaagatgcagaaaaagca

SEQ ID NO: 131686 - RNA, 22 nt, synthetic construct
  source 1..22: mol_type = other RNA
ctcaaaagccatagtgtaaact

SEQ ID NO: 131687 - RNA, 22 nt, synthetic construct
  source 1..22: mol_type = other RNA
ctcaaaaggacatattttatga

SEQ ID NO: 131688 - RNA, 22 nt, synthetic construct
  source 1..22: mol_type = other RNA
ctcaaaagtgaatcactacagc

SEQ ID NO: 131689 - RNA, 22 nt, synthetic construct
  source 1..22: mol_type = other RNA
ctcaaaatcaacattgcctcca

SEQ ID NO: 131690 - RNA, 22 nt, synthetic construct
  source 1..22: mol_type = other RNA
ctcaaaatggatcaaagaccta

SEQ ID NO: 131691 - RNA, 22 nt, synthetic construct
  source 1..22: mol_type = other RNA
ctcaaaatgttcatacaatagt

SEQ ID NO: 131692 - RNA, 22 nt, synthetic construct
  source 1..22: mol_type = other RNA
ctcaaaatttagtaagggtaaa

SEQ ID NO: 131693 - RNA, 22 nt, synthetic construct
  source 1..22: mol_type = other RNA
ctcaaacagcctaattgtacac

SEQ ID NO: 131694 - RNA, 22 nt, synthetic construct
  source 1..22: mol_type = other RNA
ctcaaacagcttgacattctta

SEQ ID NO: 131695 - RNA, 22 nt, synthetic construct
  source 1..22: mol_type = other RNA
ctcaaacaggatacaaaaagca

SEQ ID NO: 131696 - RNA, 22 nt, synthetic construct
  source 1..22: mol_type = other RNA
ctcaaacccaaattaaaggatg

SEQ ID NO: 131697 - RNA, 22 nt, synthetic construct
  source 1..22: mol_type = other RNA
ctcaaacgaaccaattaccata

SEQ ID NO: 131698 - RNA, 22 nt, synthetic construct
  source 1..22: mol_type = other RNA
ctcaaacgtccatcaacagcag

SEQ ID NO: 131699 - RNA, 22 nt, synthetic construct
  source 1..22: mol_type = other RNA
ctcaaactagaaaaagaataag

SEQ ID NO: 131700 - RNA, 22 nt, synthetic construct
  source 1..22: mol_type = other RNA
ctcaaactatgcttaatctgat

SEQ ID NO: 131701 - RNA, 22 nt, synthetic construct
  source 1..22: mol_type = other RNA
ctcaaactccaagtctcatgca

SEQ ID NO: 131702 - RNA, 22 nt, synthetic construct
  source 1..22: mol_type = other RNA
ctcaaactgtgtgcttggagtc

SEQ ID NO: 131703 - RNA, 22 nt, synthetic construct
  source 1..22: mol_type = other RNA
ctcaaagaaaataatgttttcc

SEQ ID NO: 131704 - RNA, 22 nt, synthetic construct
  source 1..22: mol_type = other RNA
ctcaaagcatatgaatctagaa

SEQ ID NO: 131705 - RNA, 22 nt, synthetic construct
  source 1..22: mol_type = other RNA
ctcaaagcccaccagcataaga

SEQ ID NO: 131706 - RNA, 22 nt, synthetic construct
  source 1..22: mol_type = other RNA
ctcaaaggagagaagagggggc

SEQ ID NO: 131707 - RNA, 22 nt, synthetic construct
  source 1..22: mol_type = other RNA
ctcaaaggggcattccgtggaa

SEQ ID NO: 131708 - RNA, 22 nt, synthetic construct
  source 1..22: mol_type = other RNA
ctcaaagtggaaacaactcaaa

SEQ ID NO: 131709 - RNA, 22 nt, synthetic construct
  source 1..22: mol_type = other RNA
ctcaaatccaaattcacagcat

SEQ ID NO: 131710 - RNA, 22 nt, synthetic construct
  source 1..22: mol_type = other RNA
ctcaaatgaacaggttcttcat

SEQ ID NO: 131711 - RNA, 22 nt, synthetic construct
  source 1..22: mol_type = other RNA
ctcaaatgccatagagctttaa

SEQ ID NO: 131712 - RNA, 22 nt, synthetic construct
  source 1..22: mol_type = other RNA
ctcaaatgtctcattgtggatg

SEQ ID NO: 131713 - RNA, 22 nt, synthetic construct
  source 1..22: mol_type = other RNA
ctcaaattaatcagtctgtaag

SEQ ID NO: 131714 - RNA, 22 nt, synthetic construct
  source 1..22: mol_type = other RNA
ctcaaattagtcatagcagtgg

SEQ ID NO: 131715 - RNA, 22 nt, synthetic construct
  source 1..22: mol_type = other RNA
ctcaaattctgagggaaattat

SEQ ID NO: 131716 - RNA, 22 nt, synthetic construct
  source 1..22: mol_type = other RNA
ctcaaattgtgtgttctctttt

SEQ ID NO: 131717 - RNA, 22 nt, synthetic construct
  source 1..22: mol_type = other RNA
ctcaacaagagaggacagttgg

SEQ ID NO: 131718 - RNA, 22 nt, synthetic construct
  source 1..22: mol_type = other RNA
ctcaacactgtgttcttttcct

SEQ ID NO: 131719 - RNA, 22 nt, synthetic construct
  source 1..22: mol_type = other RNA
ctcaacacttcagtggtaagga

SEQ ID NO: 131720 - RNA, 22 nt, synthetic construct
  source 1..22: mol_type = other RNA
ctcaacagcacttttgtactac

SEQ ID NO: 131721 - RNA, 22 nt, synthetic construct
  source 1..22: mol_type = other RNA
ctcaacatcactagctattaga

SEQ ID NO: 131722 - RNA, 22 nt, synthetic construct
  source 1..22: mol_type = other RNA
ctcaacatgtgtatttagggag

SEQ ID NO: 131723 - RNA, 22 nt, synthetic construct
  source 1..22: mol_type = other RNA
ctcaacattcattcatgacaag

SEQ ID NO: 131724 - RNA, 22 nt, synthetic construct
  source 1..22: mol_type = other RNA
ctcaacctactttaaatcaggg

SEQ ID NO: 131725 - RNA, 22 nt, synthetic construct
  source 1..22: mol_type = other RNA
ctcaacctttgcctcctgggtt

SEQ ID NO: 131726 - RNA, 22 nt, synthetic construct
  source 1..22: mol_type = other RNA
ctcaacgacaatctctggggtt

SEQ ID NO: 131727 - RNA, 22 nt, synthetic construct
  source 1..22: mol_type = other RNA
ctcaacgcctgtgatcccagct

SEQ ID NO: 131728 - RNA, 22 nt, synthetic construct
  source 1..22: mol_type = other RNA
ctcaactgcctctacatcacag

SEQ ID NO: 131729 - RNA, 22 nt, synthetic construct
  source 1..22: mol_type = other RNA
ctcaactggcccctccatggaa

SEQ ID NO: 131730 - RNA, 22 nt, synthetic construct
  source 1..22: mol_type = other RNA
ctcaacttagccttggtaaaat

SEQ ID NO: 131731 - RNA, 22 nt, synthetic construct
  source 1..22: mol_type = other RNA
ctcaacttcctgttttagtggc

SEQ ID NO: 131732 - RNA, 22 nt, synthetic construct
  source 1..22: mol_type = other RNA
ctcaactttaggttacgtacta

SEQ ID NO: 131733 - RNA, 22 nt, synthetic construct
  source 1..22: mol_type = other RNA
ctcaagaaggtatcatcggaaa

SEQ ID NO: 131734 - RNA, 22 nt, synthetic construct
  source 1..22: mol_type = other RNA
ctcaagagttacttctggaaag

SEQ ID NO: 131735 - RNA, 22 nt, synthetic construct
  source 1..22: mol_type = other RNA
ctcaagattgtgtgatttcata

SEQ ID NO: 131736 - RNA, 22 nt, synthetic construct
  source 1..22: mol_type = other RNA
ctcaagcaatctgaaacgacct

SEQ ID NO: 131737 - RNA, 22 nt, synthetic construct
  source 1..22: mol_type = other RNA
ctcaagcagtcctgccttggcc

SEQ ID NO: 131738 - RNA, 22 nt, synthetic construct
  source 1..22: mol_type = other RNA
ctcaagccatcctccagcctta

SEQ ID NO: 131739 - RNA, 22 nt, synthetic construct
  source 1..22: mol_type = other RNA
ctcaagcctgataagctcccag

SEQ ID NO: 131740 - RNA, 22 nt, synthetic construct
  source 1..22: mol_type = other RNA
ctcaaggcagaacacactgctc

SEQ ID NO: 131741 - RNA, 22 nt, synthetic construct
  source 1..22: mol_type = other RNA
ctcaaggccaactgtcctctct

SEQ ID NO: 131742 - RNA, 22 nt, synthetic construct
  source 1..22: mol_type = other RNA
ctcaagggctttcaatagtggg

SEQ ID NO: 131743 - RNA, 22 nt, synthetic construct
  source 1..22: mol_type = other RNA
ctcaagtaagtgaaatcataaa

SEQ ID NO: 131744 - RNA, 22 nt, synthetic construct
  source 1..22: mol_type = other RNA
ctcaagtaattgttttcccttt

SEQ ID NO: 131745 - RNA, 22 nt, synthetic construct
  source 1..22: mol_type = other RNA
ctcaagtcttttcctagactgc

SEQ ID NO: 131746 - RNA, 22 nt, synthetic construct
  source 1..22: mol_type = other RNA
ctcaagtgatgcaactcctggg

SEQ ID NO: 131747 - RNA, 22 nt, synthetic construct
  source 1..22: mol_type = other RNA
ctcaagttccggttctcaggag

SEQ ID NO: 131748 - RNA, 22 nt, synthetic construct
  source 1..22: mol_type = other RNA
ctcaagttttctatttcttcat

SEQ ID NO: 131749 - RNA, 22 nt, synthetic construct
  source 1..22: mol_type = other RNA
ctcaataaccacatgtggcttg

SEQ ID NO: 131750 - RNA, 22 nt, synthetic construct
  source 1..22: mol_type = other RNA
ctcaataaggaaagcacgtttg

SEQ ID NO: 131751 - RNA, 22 nt, synthetic construct
  source 1..22: mol_type = other RNA
ctcaatacacgtggctgtcaaa

SEQ ID NO: 131752 - RNA, 22 nt, synthetic construct
  source 1..22: mol_type = other RNA
ctcaatacctgaaaagtgtatt

SEQ ID NO: 131753 - RNA, 22 nt, synthetic construct
  source 1..22: mol_type = other RNA
ctcaatagtgtcctttgatgca

SEQ ID NO: 131754 - RNA, 22 nt, synthetic construct
  source 1..22: mol_type = other RNA
ctcaatcagggccttcccaaag

SEQ ID NO: 131755 - RNA, 22 nt, synthetic construct
  source 1..22: mol_type = other RNA
ctcaatcagtggccagtgacca

SEQ ID NO: 131756 - RNA, 22 nt, synthetic construct
  source 1..22: mol_type = other RNA
ctcaatcatgtcaagaatgaag

SEQ ID NO: 131757 - RNA, 22 nt, synthetic construct
  source 1..22: mol_type = other RNA
ctcaatccccatctgggatact

SEQ ID NO: 131758 - RNA, 22 nt, synthetic construct
  source 1..22: mol_type = other RNA
ctcaatcccttccccacctttc

SEQ ID NO: 131759 - RNA, 22 nt, synthetic construct
  source 1..22: mol_type = other RNA
ctcaatctcctgatccacctgc

SEQ ID NO: 131760 - RNA, 22 nt, synthetic construct
  source 1..22: mol_type = other RNA
ctcaatcttcttatttgttact

SEQ ID NO: 131761 - RNA, 22 nt, synthetic construct
  source 1..22: mol_type = other RNA
ctcaatggttaagactgctgtt

SEQ ID NO: 131762 - RNA, 22 nt, synthetic construct
  source 1..22: mol_type = other RNA
ctcaatgttggttagtgttgtt

SEQ ID NO: 131763 - RNA, 22 nt, synthetic construct
  source 1..22: mol_type = other RNA
ctcaattaagcaaccttttagg

SEQ ID NO: 131764 - RNA, 22 nt, synthetic construct
  source 1..22: mol_type = other RNA
ctcaattaatgcccaatcaaat

SEQ ID NO: 131765 - RNA, 22 nt, synthetic construct
  source 1..22: mol_type = other RNA
ctcaattcagaagctaaatttt

SEQ ID NO: 131766 - RNA, 22 nt, synthetic construct
  source 1..22: mol_type = other RNA
ctcacaaaaagtgtgaccacat

SEQ ID NO: 131767 - RNA, 22 nt, synthetic construct
  source 1..22: mol_type = other RNA
ctcacaacaggcctgagccgtc

SEQ ID NO: 131768 - RNA, 22 nt, synthetic construct
  source 1..22: mol_type = other RNA
ctcacacctgggtatacagcaa

SEQ ID NO: 131769 - RNA, 22 nt, synthetic construct
  source 1..22: mol_type = other RNA
ctcacacgagaaggacagcttc

SEQ ID NO: 131770 - RNA, 22 nt, synthetic construct
  source 1..22: mol_type = other RNA
ctcacactgttgtccaggccag

SEQ ID NO: 131771 - RNA, 22 nt, synthetic construct
  source 1..22: mol_type = other RNA
ctcacacttactaaatgatctt

SEQ ID NO: 131772 - RNA, 22 nt, synthetic construct
  source 1..22: mol_type = other RNA
ctcacagcttaccaagtgccgc

SEQ ID NO: 131773 - RNA, 22 nt, synthetic construct
  source 1..22: mol_type = other RNA
ctcacagtcacaaagctttaaa

SEQ ID NO: 131774 - RNA, 22 nt, synthetic construct
  source 1..22: mol_type = other RNA
ctcacagtccactcacctgtca

SEQ ID NO: 131775 - RNA, 22 nt, synthetic construct
  source 1..22: mol_type = other RNA
ctcacagtgctccatagcttcc

SEQ ID NO: 131776 - RNA, 22 nt, synthetic construct
  source 1..22: mol_type = other RNA
ctcacatcagttaccaccaaga

SEQ ID NO: 131777 - RNA, 22 nt, synthetic construct
  source 1..22: mol_type = other RNA
ctcacatgtttggtcaattgat

SEQ ID NO: 131778 - RNA, 22 nt, synthetic construct
  source 1..22: mol_type = other RNA
ctcacattcacagcgtgcacct

SEQ ID NO: 131779 - RNA, 22 nt, synthetic construct
  source 1..22: mol_type = other RNA
ctcacattgtatttctgttaga

SEQ ID NO: 131780 - RNA, 22 nt, synthetic construct
  source 1..22: mol_type = other RNA
ctcacatttagtttcatctatg

SEQ ID NO: 131781 - RNA, 22 nt, synthetic construct
  source 1..22: mol_type = other RNA
ctcaccaacatccacagctttc

SEQ ID NO: 131782 - RNA, 22 nt, synthetic construct
  source 1..22: mol_type = other RNA
ctcaccctcaggactctgctca

SEQ ID NO: 131783 - RNA, 22 nt, synthetic construct
  source 1..22: mol_type = other RNA
ctcaccgcaacatctgcctccc

SEQ ID NO: 131784 - RNA, 22 nt, synthetic construct
  source 1..22: mol_type = other RNA
ctcacctagctgttttcatgcg

SEQ ID NO: 131785 - RNA, 22 nt, synthetic construct
  source 1..22: mol_type = other RNA
ctcacctcaaggccaactgtcc

SEQ ID NO: 131786 - RNA, 22 nt, synthetic construct
  source 1..22: mol_type = other RNA
ctcacctcacattcacagcgtg

SEQ ID NO: 131787 - RNA, 22 nt, synthetic construct
  source 1..22: mol_type = other RNA
ctcacctctggactcagggtca

SEQ ID NO: 131788 - RNA, 22 nt, synthetic construct
  source 1..22: mol_type = other RNA
ctcacctgtcatgtcaaatttt

SEQ ID NO: 131789 - RNA, 22 nt, synthetic construct
  source 1..22: mol_type = other RNA
ctcaccttctgctgggcccact

SEQ ID NO: 131790 - RNA, 22 nt, synthetic construct
  source 1..22: mol_type = other RNA
ctcacgaaagcggtcaacgcac

SEQ ID NO: 131791 - RNA, 22 nt, synthetic construct
  source 1..22: mol_type = other RNA
ctcacgatactttttattttca

SEQ ID NO: 131792 - RNA, 22 nt, synthetic construct
  source 1..22: mol_type = other RNA
ctcacgtcaccgcaacctccgc

SEQ ID NO: 131793 - RNA, 22 nt, synthetic construct
  source 1..22: mol_type = other RNA
ctcacgttaccctctggaatgc

SEQ ID NO: 131794 - RNA, 22 nt, synthetic construct
  source 1..22: mol_type = other RNA
ctcactaagtcagaattcactg

SEQ ID NO: 131795 - RNA, 22 nt, synthetic construct
  source 1..22: mol_type = other RNA
ctcactagagcttcaacctcct

SEQ ID NO: 131796 - RNA, 22 nt, synthetic construct
  source 1..22: mol_type = other RNA
ctcactcacctagctgttttca

SEQ ID NO: 131797 - RNA, 22 nt, synthetic construct
  source 1..22: mol_type = other RNA
ctcactcatttccgttgctgca

SEQ ID NO: 131798 - RNA, 22 nt, synthetic construct
  source 1..22: mol_type = other RNA
ctcactccaaagcaaacgtgca

SEQ ID NO: 131799 - RNA, 22 nt, synthetic construct
  source 1..22: mol_type = other RNA
ctcactcttaccaaggctggag

SEQ ID NO: 131800 - RNA, 22 nt, synthetic construct
  source 1..22: mol_type = other RNA
ctcactgaaaccctcacgaaag

SEQ ID NO: 131801 - RNA, 22 nt, synthetic construct
  source 1..22: mol_type = other RNA
ctcactgcaagctccgcctcct

SEQ ID NO: 131802 - RNA, 22 nt, synthetic construct
  source 1..22: mol_type = other RNA
ctcactggccagcattacttag

SEQ ID NO: 131803 - RNA, 22 nt, synthetic construct
  source 1..22: mol_type = other RNA
ctcactggcctgagctctcagt

SEQ ID NO: 131804 - RNA, 22 nt, synthetic construct
  source 1..22: mol_type = other RNA
ctcactgtactactgacctggg

SEQ ID NO: 131805 - RNA, 22 nt, synthetic construct
  source 1..22: mol_type = other RNA
ctcactgtctccatgtcctcac

SEQ ID NO: 131806 - RNA, 22 nt, synthetic construct
  source 1..22: mol_type = other RNA
ctcactgtgatacctagtacgt

SEQ ID NO: 131807 - RNA, 22 nt, synthetic construct
  source 1..22: mol_type = other RNA
ctcacttattagcaaagaggca

SEQ ID NO: 131808 - RNA, 22 nt, synthetic construct
  source 1..22: mol_type = other RNA
ctcactttgggattagcttatt

SEQ ID NO: 131809 - RNA, 22 nt, synthetic construct
  source 1..22: mol_type = other RNA
ctcactttgttgctcaggctgg

SEQ ID NO: 131810 - RNA, 22 nt, synthetic construct
  source 1..22: mol_type = other RNA
ctcagaaaattttcttttgtgg

SEQ ID NO: 131811 - RNA, 22 nt, synthetic construct
  source 1..22: mol_type = other RNA
ctcagaaacaacaacaacaaaa

SEQ ID NO: 131812 - RNA, 22 nt, synthetic construct
  source 1..22: mol_type = other RNA
ctcagaaattataagcttcctc

SEQ ID NO: 131813 - RNA, 22 nt, synthetic construct
  source 1..22: mol_type = other RNA
ctcagaagctatagctgagaag

SEQ ID NO: 131814 - RNA, 22 nt, synthetic construct
  source 1..22: mol_type = other RNA
ctcagaagctttcagacttaac

SEQ ID NO: 131815 - RNA, 22 nt, synthetic construct
  source 1..22: mol_type = other RNA
ctcagaagtactactcattaaa

SEQ ID NO: 131816 - RNA, 22 nt, synthetic construct
  source 1..22: mol_type = other RNA
ctcagaatttgaggtcttctag

SEQ ID NO: 131817 - RNA, 22 nt, synthetic construct
  source 1..22: mol_type = other RNA
ctcagagggaaactgtttttgc

SEQ ID NO: 131818 - RNA, 22 nt, synthetic construct
  source 1..22: mol_type = other RNA
ctcagagtatatatgctcccta

SEQ ID NO: 131819 - RNA, 22 nt, synthetic construct
  source 1..22: mol_type = other RNA
ctcagatatcaatctggatata

SEQ ID NO: 131820 - RNA, 22 nt, synthetic construct
  source 1..22: mol_type = other RNA
ctcagatatccacctgcctcag

SEQ ID NO: 131821 - RNA, 22 nt, synthetic construct
  source 1..22: mol_type = other RNA
ctcagatctgagagatagaaag

SEQ ID NO: 131822 - RNA, 22 nt, synthetic construct
  source 1..22: mol_type = other RNA
ctcagatctgagtttgctctgc

SEQ ID NO: 131823 - RNA, 22 nt, synthetic construct
  source 1..22: mol_type = other RNA
ctcagatctgttgcagtccccg

SEQ ID NO: 131824 - RNA, 22 nt, synthetic construct
  source 1..22: mol_type = other RNA
ctcagatgatcctcccgccttg

SEQ ID NO: 131825 - RNA, 22 nt, synthetic construct
  source 1..22: mol_type = other RNA
ctcagatgtctccattttgcca

SEQ ID NO: 131826 - RNA, 22 nt, synthetic construct
  source 1..22: mol_type = other RNA
ctcagattcaccaattgttaac

SEQ ID NO: 131827 - RNA, 22 nt, synthetic construct
  source 1..22: mol_type = other RNA
ctcagcaaaagcaattattagt

SEQ ID NO: 131828 - RNA, 22 nt, synthetic construct
  source 1..22: mol_type = other RNA
ctcagcacagagccgaaatgca

SEQ ID NO: 131829 - RNA, 22 nt, synthetic construct
  source 1..22: mol_type = other RNA
ctcagcagttttaaagaattcg

SEQ ID NO: 131830 - RNA, 22 nt, synthetic construct
  source 1..22: mol_type = other RNA
ctcagcataattggttaaactt

SEQ ID NO: 131831 - RNA, 22 nt, synthetic construct
  source 1..22: mol_type = other RNA
ctcagcatgtcttcagaggccc

SEQ ID NO: 131832 - RNA, 22 nt, synthetic construct
  source 1..22: mol_type = other RNA
ctcagccccctccctaccaccc

SEQ ID NO: 131833 - RNA, 22 nt, synthetic construct
  source 1..22: mol_type = other RNA
ctcagccccctcgaagagacca

SEQ ID NO: 131834 - RNA, 22 nt, synthetic construct
  source 1..22: mol_type = other RNA
ctcagccccctgagtagctgtg

SEQ ID NO: 131835 - RNA, 22 nt, synthetic construct
  source 1..22: mol_type = other RNA
ctcagcccctcatcctccgtag

SEQ ID NO: 131836 - RNA, 22 nt, synthetic construct
  source 1..22: mol_type = other RNA
ctcagccgccgcagaggccaaa

SEQ ID NO: 131837 - RNA, 22 nt, synthetic construct
  source 1..22: mol_type = other RNA
ctcagcctcccgagtagttgta

SEQ ID NO: 131838 - RNA, 22 nt, synthetic construct
  source 1..22: mol_type = other RNA
ctcagcctgttgggaggttttt

SEQ ID NO: 131839 - RNA, 22 nt, synthetic construct
  source 1..22: mol_type = other RNA
ctcagccttttctgatttgctg

SEQ ID NO: 131840 - RNA, 22 nt, synthetic construct
  source 1..22: mol_type = other RNA
ctcagctatagcttctgagctg

SEQ ID NO: 131841 - RNA, 22 nt, synthetic construct
  source 1..22: mol_type = other RNA
ctcagctcattacagtctcgac

SEQ ID NO: 131842 - RNA, 22 nt, synthetic construct
  source 1..22: mol_type = other RNA
ctcagctcctcagaaggccaag

SEQ ID NO: 131843 - RNA, 22 nt, synthetic construct
  source 1..22: mol_type = other RNA
ctcagctgtcactctctttagg

SEQ ID NO: 131844 - RNA, 22 nt, synthetic construct
  source 1..22: mol_type = other RNA
ctcaggaccagatgacttcact

SEQ ID NO: 131845 - RNA, 22 nt, synthetic construct
  source 1..22: mol_type = other RNA
ctcaggaccaggcagtcctctc

SEQ ID NO: 131846 - RNA, 22 nt, synthetic construct
  source 1..22: mol_type = other RNA
ctcaggactctgctcaaagggg

SEQ ID NO: 131847 - RNA, 22 nt, synthetic construct
  source 1..22: mol_type = other RNA
ctcaggagattaaggctggagg

SEQ ID NO: 131848 - RNA, 22 nt, synthetic construct
  source 1..22: mol_type = other RNA
ctcaggagcctagtcatccact

SEQ ID NO: 131849 - RNA, 22 nt, synthetic construct
  source 1..22: mol_type = other RNA
ctcaggaggctgaggcaggagg

SEQ ID NO: 131850 - RNA, 22 nt, synthetic construct
  source 1..22: mol_type = other RNA
ctcaggagtaactgctcctctg

SEQ ID NO: 131851 - RNA, 22 nt, synthetic construct
  source 1..22: mol_type = other RNA
ctcaggcagtctagtccatgaa

SEQ ID NO: 131852 - RNA, 22 nt, synthetic construct
  source 1..22: mol_type = other RNA
ctcaggccagtgagtgatgaaa

SEQ ID NO: 131853 - RNA, 22 nt, synthetic construct
  source 1..22: mol_type = other RNA
ctcaggcctgttgtgaggattc

SEQ ID NO: 131854 - RNA, 22 nt, synthetic construct
  source 1..22: mol_type = other RNA
ctcaggctccaggtagaatgaa

SEQ ID NO: 131855 - RNA, 22 nt, synthetic construct
  source 1..22: mol_type = other RNA
ctcagggcctgcttttggaagc

SEQ ID NO: 131856 - RNA, 22 nt, synthetic construct
  source 1..22: mol_type = other RNA
ctcaggggtaaaggggatgggg

SEQ ID NO: 131857 - RNA, 22 nt, synthetic construct
  source 1..22: mol_type = other RNA
ctcagggtaggaaaagacttct

SEQ ID NO: 131858 - RNA, 22 nt, synthetic construct
  source 1..22: mol_type = other RNA
ctcagggtcacttcctctctta

SEQ ID NO: 131859 - RNA, 22 nt, synthetic construct
  source 1..22: mol_type = other RNA
ctcagggtgcgacctcgaagca

SEQ ID NO: 131860 - RNA, 22 nt, synthetic construct
  source 1..22: mol_type = other RNA
ctcaggtgtcactggatagaag

SEQ ID NO: 131861 - RNA, 22 nt, synthetic construct
  source 1..22: mol_type = other RNA
ctcaggtttagaatatatttac

SEQ ID NO: 131862 - RNA, 22 nt, synthetic construct
  source 1..22: mol_type = other RNA
ctcagtacttccctctttctca

SEQ ID NO: 131863 - RNA, 22 nt, synthetic construct
  source 1..22: mol_type = other RNA
ctcagtatcctttcaaggtatc

SEQ ID NO: 131864 - RNA, 22 nt, synthetic construct
  source 1..22: mol_type = other RNA
ctcagtcataatttgtgtcctt

SEQ ID NO: 131865 - RNA, 22 nt, synthetic construct
  source 1..22: mol_type = other RNA
ctcagtcccaaatgggagcatg

SEQ ID NO: 131866 - RNA, 22 nt, synthetic construct
  source 1..22: mol_type = other RNA
ctcagtccctcaccttctgctg

SEQ ID NO: 131867 - RNA, 22 nt, synthetic construct
  source 1..22: mol_type = other RNA
ctcagtctcgaaaaggaatgga

SEQ ID NO: 131868 - RNA, 22 nt, synthetic construct
  source 1..22: mol_type = other RNA
ctcagtctgtttgccatcttca

SEQ ID NO: 131869 - RNA, 22 nt, synthetic construct
  source 1..22: mol_type = other RNA
ctcagtggccctgttggcctgg

SEQ ID NO: 131870 - RNA, 22 nt, synthetic construct
  source 1..22: mol_type = other RNA
ctcagtgggttcaattatgtgg

SEQ ID NO: 131871 - RNA, 22 nt, synthetic construct
  source 1..22: mol_type = other RNA
ctcagtggtagttacacaagtg

SEQ ID NO: 131872 - RNA, 22 nt, synthetic construct
  source 1..22: mol_type = other RNA
ctcagtggtgcttttgctgcat

SEQ ID NO: 131873 - RNA, 22 nt, synthetic construct
  source 1..22: mol_type = other RNA
ctcagtggttctgcgtgttatt

SEQ ID NO: 131874 - RNA, 22 nt, synthetic construct
  source 1..22: mol_type = other RNA
ctcagtgtgtttttgtaaatga

SEQ ID NO: 131875 - RNA, 22 nt, synthetic construct
  source 1..22: mol_type = other RNA
ctcagttaaacccaacaaacaa

SEQ ID NO: 131876 - RNA, 22 nt, synthetic construct
  source 1..22: mol_type = other RNA
ctcagttgacatcctttaattt

SEQ ID NO: 131877 - RNA, 22 nt, synthetic construct
  source 1..22: mol_type = other RNA
ctcagttgcagcatgctcactg

SEQ ID NO: 131878 - RNA, 22 nt, synthetic construct
  source 1..22: mol_type = other RNA
ctcagtttcaaaagctccccgg

SEQ ID NO: 131879 - RNA, 22 nt, synthetic construct
  source 1..22: mol_type = other RNA
ctcataaagccggattcctttc

SEQ ID NO: 131880 - RNA, 22 nt, synthetic construct
  source 1..22: mol_type = other RNA
ctcataagaactcctggtctcc

SEQ ID NO: 131881 - RNA, 22 nt, synthetic construct
  source 1..22: mol_type = other RNA
ctcataatagtctcacgatact

SEQ ID NO: 131882 - RNA, 22 nt, synthetic construct
  source 1..22: mol_type = other RNA
ctcataccaggttttggtaatg

SEQ ID NO: 131883 - RNA, 22 nt, synthetic construct
  source 1..22: mol_type = other RNA
ctcatacttgctttattacttc

SEQ ID NO: 131884 - RNA, 22 nt, synthetic construct
  source 1..22: mol_type = other RNA
ctcatactttgtcaggcatgct

SEQ ID NO: 131885 - RNA, 22 nt, synthetic construct
  source 1..22: mol_type = other RNA
ctcatagtcttccaaaatattg

SEQ ID NO: 131886 - RNA, 22 nt, synthetic construct
  source 1..22: mol_type = other RNA
ctcatatcagttatcacaccta

SEQ ID NO: 131887 - RNA, 22 nt, synthetic construct
  source 1..22: mol_type = other RNA
ctcatattagtctgtagcttca

SEQ ID NO: 131888 - RNA, 22 nt, synthetic construct
  source 1..22: mol_type = other RNA
ctcatattattttttcccgcta

SEQ ID NO: 131889 - RNA, 22 nt, synthetic construct
  source 1..22: mol_type = other RNA
ctcatcatttatacccaagtaa

SEQ ID NO: 131890 - RNA, 22 nt, synthetic construct
  source 1..22: mol_type = other RNA
ctcatccacaatgagacatttg

SEQ ID NO: 131891 - RNA, 22 nt, synthetic construct
  source 1..22: mol_type = other RNA
ctcatccctcatatcagttatc

SEQ ID NO: 131892 - RNA, 22 nt, synthetic construct
  source 1..22: mol_type = other RNA
ctcatccggtctcagtttttaa

SEQ ID NO: 131893 - RNA, 22 nt, synthetic construct
  source 1..22: mol_type = other RNA
ctcatcctccgtagctgtcgct

SEQ ID NO: 131894 - RNA, 22 nt, synthetic construct
  source 1..22: mol_type = other RNA
ctcatctaaattaagcttcgac

SEQ ID NO: 131895 - RNA, 22 nt, synthetic construct
  source 1..22: mol_type = other RNA
ctcatctaagcctacctccctt

SEQ ID NO: 131896 - RNA, 22 nt, synthetic construct
  source 1..22: mol_type = other RNA
ctcatctctgcaaaacatttaa

SEQ ID NO: 131897 - RNA, 22 nt, synthetic construct
  source 1..22: mol_type = other RNA
ctcatctgtcaaaaagagaaca

SEQ ID NO: 131898 - RNA, 22 nt, synthetic construct
  source 1..22: mol_type = other RNA
ctcatctgtcactttcctattc

SEQ ID NO: 131899 - RNA, 22 nt, synthetic construct
  source 1..22: mol_type = other RNA
ctcatcttagccgggaggagcc

SEQ ID NO: 131900 - RNA, 22 nt, synthetic construct
  source 1..22: mol_type = other RNA
ctcatgagagctgtgccgaggc

SEQ ID NO: 131901 - RNA, 22 nt, synthetic construct
  source 1..22: mol_type = other RNA
ctcatgagtcctgaaaattcct

SEQ ID NO: 131902 - RNA, 22 nt, synthetic construct
  source 1..22: mol_type = other RNA
ctcatgcaattccccagcctca

SEQ ID NO: 131903 - RNA, 22 nt, synthetic construct
  source 1..22: mol_type = other RNA
ctcatgcatccacattttgtga

SEQ ID NO: 131904 - RNA, 22 nt, synthetic construct
  source 1..22: mol_type = other RNA
ctcatgcttaggatcccagtcc

SEQ ID NO: 131905 - RNA, 22 nt, synthetic construct
  source 1..22: mol_type = other RNA
ctcatgcttgctccagagaagt

SEQ ID NO: 131906 - RNA, 22 nt, synthetic construct
  source 1..22: mol_type = other RNA
ctcatggaagttatttaatctc

SEQ ID NO: 131907 - RNA, 22 nt, synthetic construct
  source 1..22: mol_type = other RNA
ctcatgtaactaattactgttt

SEQ ID NO: 131908 - RNA, 22 nt, synthetic construct
  source 1..22: mol_type = other RNA
ctcatgtatgttttagccttaa

SEQ ID NO: 131909 - RNA, 22 nt, synthetic construct
  source 1..22: mol_type = other RNA
ctcatgtattttcctaaccact

SEQ ID NO: 131910 - RNA, 22 nt, synthetic construct
  source 1..22: mol_type = other RNA
ctcatgtcagagacacatactg

SEQ ID NO: 131911 - RNA, 22 nt, synthetic construct
  source 1..22: mol_type = other RNA
ctcatgtccatagttaatgtgt

SEQ ID NO: 131912 - RNA, 22 nt, synthetic construct
  source 1..22: mol_type = other RNA
ctcatgtctacctgtctttccc

SEQ ID NO: 131913 - RNA, 22 nt, synthetic construct
  source 1..22: mol_type = other RNA
ctcatgttgggtaaaaataatc

SEQ ID NO: 131914 - RNA, 22 nt, synthetic construct
  source 1..22: mol_type = other RNA
ctcattaaaaatcaacccatga

SEQ ID NO: 131915 - RNA, 22 nt, synthetic construct
  source 1..22: mol_type = other RNA
ctcattacagtctcgaccccct

SEQ ID NO: 131916 - RNA, 22 nt, synthetic construct
  source 1..22: mol_type = other RNA
ctcattagttatctcttagacc

SEQ ID NO: 131917 - RNA, 22 nt, synthetic construct
  source 1..22: mol_type = other RNA
ctcattataacataaaagcgta

SEQ ID NO: 131918 - RNA, 22 nt, synthetic construct
  source 1..22: mol_type = other RNA
ctcattatcccagacagatata

SEQ ID NO: 131919 - RNA, 22 nt, synthetic construct
  source 1..22: mol_type = other RNA
ctcattatggttgttggctaaa

SEQ ID NO: 131920 - RNA, 22 nt, synthetic construct
  source 1..22: mol_type = other RNA
ctcattcacactagtcacccta

SEQ ID NO: 131921 - RNA, 22 nt, synthetic construct
  source 1..22: mol_type = other RNA
ctcattcactagacacattttt

SEQ ID NO: 131922 - RNA, 22 nt, synthetic construct
  source 1..22: mol_type = other RNA
ctcattcatctgcagtgtccat

SEQ ID NO: 131923 - RNA, 22 nt, synthetic construct
  source 1..22: mol_type = other RNA
ctcattccaatccttccttcat

SEQ ID NO: 131924 - RNA, 22 nt, synthetic construct
  source 1..22: mol_type = other RNA
ctcattcttctctaatgtaaac

SEQ ID NO: 131925 - RNA, 22 nt, synthetic construct
  source 1..22: mol_type = other RNA
ctcattgaagctactattccag

SEQ ID NO: 131926 - RNA, 22 nt, synthetic construct
  source 1..22: mol_type = other RNA
ctcattgcctatagacagcatc

SEQ ID NO: 131927 - RNA, 22 nt, synthetic construct
  source 1..22: mol_type = other RNA
ctcattgtggatgagattaatg

SEQ ID NO: 131928 - RNA, 22 nt, synthetic construct
  source 1..22: mol_type = other RNA
ctcattgtgttgcccacgctgg

SEQ ID NO: 131929 - RNA, 22 nt, synthetic construct
  source 1..22: mol_type = other RNA
ctcatttaaacgtcagagcagc

SEQ ID NO: 131930 - RNA, 22 nt, synthetic construct
  source 1..22: mol_type = other RNA
ctcatttccgttgctgcatagt

SEQ ID NO: 131931 - RNA, 22 nt, synthetic construct
  source 1..22: mol_type = other RNA
ctcatttcctttcagtcggttc

SEQ ID NO: 131932 - RNA, 22 nt, synthetic construct
  source 1..22: mol_type = other RNA
ctcatttctgcttgaatgtgcc

SEQ ID NO: 131933 - RNA, 22 nt, synthetic construct
  source 1..22: mol_type = other RNA
ctcatttgaactttccagaagt

SEQ ID NO: 131934 - RNA, 22 nt, synthetic construct
  source 1..22: mol_type = other RNA
ctcatttgcagagcaaactcag

SEQ ID NO: 131935 - RNA, 22 nt, synthetic construct
  source 1..22: mol_type = other RNA
ctcattttataagggtgataaa

SEQ ID NO: 131936 - RNA, 22 nt, synthetic construct
  source 1..22: mol_type = other RNA
ctcattttgaaaaacagatctt

SEQ ID NO: 131937 - RNA, 22 nt, synthetic construct
  source 1..22: mol_type = other RNA
ctcatttttcaggggggccact

SEQ ID NO: 131938 - RNA, 22 nt, synthetic construct
  source 1..22: mol_type = other RNA
ctccaaaagcgaaaggcaaaaa

SEQ ID NO: 131939 - RNA, 22 nt, synthetic construct
  source 1..22: mol_type = other RNA
ctccaaacctttaagttctcca

SEQ ID NO: 131940 - RNA, 22 nt, synthetic construct
  source 1..22: mol_type = other RNA
ctccaaagaacaggagttacca

SEQ ID NO: 131941 - RNA, 22 nt, synthetic construct
  source 1..22: mol_type = other RNA
ctccaaagcaaaccagacattt

SEQ ID NO: 131942 - RNA, 22 nt, synthetic construct
  source 1..22: mol_type = other RNA
ctccaaagcaaacgtgcacacc

SEQ ID NO: 131943 - RNA, 22 nt, synthetic construct
  source 1..22: mol_type = other RNA
ctccaacaattcaacaatagca

SEQ ID NO: 131944 - RNA, 22 nt, synthetic construct
  source 1..22: mol_type = other RNA
ctccaacagaagaagtttctag

SEQ ID NO: 131945 - RNA, 22 nt, synthetic construct
  source 1..22: mol_type = other RNA
ctccaacccattccaggtttta

SEQ ID NO: 131946 - RNA, 22 nt, synthetic construct
  source 1..22: mol_type = other RNA
ctccaacgctttttatggaaac

SEQ ID NO: 131947 - RNA, 22 nt, synthetic construct
  source 1..22: mol_type = other RNA
ctccaactcaaaaaagaaaaac

SEQ ID NO: 131948 - RNA, 22 nt, synthetic construct
  source 1..22: mol_type = other RNA
ctccaagaaggctagcacagag

SEQ ID NO: 131949 - RNA, 22 nt, synthetic construct
  source 1..22: mol_type = other RNA
ctccaagcacacagtttgagaa

SEQ ID NO: 131950 - RNA, 22 nt, synthetic construct
  source 1..22: mol_type = other RNA
ctccaaggaaagtgtgcttggg

SEQ ID NO: 131951 - RNA, 22 nt, synthetic construct
  source 1..22: mol_type = other RNA
ctccaaggctgcccgctccggc

SEQ ID NO: 131952 - RNA, 22 nt, synthetic construct
  source 1..22: mol_type = other RNA
ctccaaggtacaattacacatc

SEQ ID NO: 131953 - RNA, 22 nt, synthetic construct
  source 1..22: mol_type = other RNA
ctccaagtctcatgcaattccc

SEQ ID NO: 131954 - RNA, 22 nt, synthetic construct
  source 1..22: mol_type = other RNA
ctccaagtgtaaaaagacatta

SEQ ID NO: 131955 - RNA, 22 nt, synthetic construct
  source 1..22: mol_type = other RNA
ctccaatcctcagccccctccc

SEQ ID NO: 131956 - RNA, 22 nt, synthetic construct
  source 1..22: mol_type = other RNA
ctccacacacgaagtagttttt

SEQ ID NO: 131957 - RNA, 22 nt, synthetic construct
  source 1..22: mol_type = other RNA
ctccacacctggcccctttcaa

SEQ ID NO: 131958 - RNA, 22 nt, synthetic construct
  source 1..22: mol_type = other RNA
ctccacagagttcagcttacag

SEQ ID NO: 131959 - RNA, 22 nt, synthetic construct
  source 1..22: mol_type = other RNA
ctccacaggctttgacttctca

SEQ ID NO: 131960 - RNA, 22 nt, synthetic construct
  source 1..22: mol_type = other RNA
ctccacatccttgccaacagtt

SEQ ID NO: 131961 - RNA, 22 nt, synthetic construct
  source 1..22: mol_type = other RNA
ctccacattgtcttaattatta

SEQ ID NO: 131962 - RNA, 22 nt, synthetic construct
  source 1..22: mol_type = other RNA
ctccacatttctacacaacatg

SEQ ID NO: 131963 - RNA, 22 nt, synthetic construct
  source 1..22: mol_type = other RNA
ctccaccagcatcttttgacgc

SEQ ID NO: 131964 - RNA, 22 nt, synthetic construct
  source 1..22: mol_type = other RNA
ctccaccctgccccttatcctc

SEQ ID NO: 131965 - RNA, 22 nt, synthetic construct
  source 1..22: mol_type = other RNA
ctccacctcagaaacaaacaaa

SEQ ID NO: 131966 - RNA, 22 nt, synthetic construct
  source 1..22: mol_type = other RNA
ctccaccttagcccaagctacc

SEQ ID NO: 131967 - RNA, 22 nt, synthetic construct
  source 1..22: mol_type = other RNA
ctccacgcccattaggatagct

SEQ ID NO: 131968 - RNA, 22 nt, synthetic construct
  source 1..22: mol_type = other RNA
ctccacgtgggtgacagagcaa

SEQ ID NO: 131969 - RNA, 22 nt, synthetic construct
  source 1..22: mol_type = other RNA
ctccactccagcctgagcaaca

SEQ ID NO: 131970 - RNA, 22 nt, synthetic construct
  source 1..22: mol_type = other RNA
ctccacttcccactgctatgac

SEQ ID NO: 131971 - RNA, 22 nt, synthetic construct
  source 1..22: mol_type = other RNA
ctccacttgggtggaagctgtc

SEQ ID NO: 131972 - RNA, 22 nt, synthetic construct
  source 1..22: mol_type = other RNA
ctccactttcatgatttggtgt

SEQ ID NO: 131973 - RNA, 22 nt, synthetic construct
  source 1..22: mol_type = other RNA
ctccagaaaaccagaaaagtga

SEQ ID NO: 131974 - RNA, 22 nt, synthetic construct
  source 1..22: mol_type = other RNA
ctccagaatgaccgagatactt

SEQ ID NO: 131975 - RNA, 22 nt, synthetic construct
  source 1..22: mol_type = other RNA
ctccagactgggcaacagagac

SEQ ID NO: 131976 - RNA, 22 nt, synthetic construct
  source 1..22: mol_type = other RNA
ctccagagaagttttccaggaa

SEQ ID NO: 131977 - RNA, 22 nt, synthetic construct
  source 1..22: mol_type = other RNA
ctccagcatccctccagtccag

SEQ ID NO: 131978 - RNA, 22 nt, synthetic construct
  source 1..22: mol_type = other RNA
ctccagcctggtcaacagggta

SEQ ID NO: 131979 - RNA, 22 nt, synthetic construct
  source 1..22: mol_type = other RNA
ctccagccttaatctcctgagt

SEQ ID NO: 131980 - RNA, 22 nt, synthetic construct
  source 1..22: mol_type = other RNA
ctccagccttggtaagagtgag

SEQ ID NO: 131981 - RNA, 22 nt, synthetic construct
  source 1..22: mol_type = other RNA
ctccagcgctaagcactgcgcc

SEQ ID NO: 131982 - RNA, 22 nt, synthetic construct
  source 1..22: mol_type = other RNA
ctccagcttttattagagcttt

SEQ ID NO: 131983 - RNA, 22 nt, synthetic construct
  source 1..22: mol_type = other RNA
ctccaggatccagtctctaccc

SEQ ID NO: 131984 - RNA, 22 nt, synthetic construct
  source 1..22: mol_type = other RNA
ctccagggaggaatccttcagt

SEQ ID NO: 131985 - RNA, 22 nt, synthetic construct
  source 1..22: mol_type = other RNA
ctccaggggacatgctctgata

SEQ ID NO: 131986 - RNA, 22 nt, synthetic construct
  source 1..22: mol_type = other RNA
ctccaggtagaatgaaaatttt

SEQ ID NO: 131987 - RNA, 22 nt, synthetic construct
  source 1..22: mol_type = other RNA
ctccaggttcatccatgttgtt

SEQ ID NO: 131988 - RNA, 22 nt, synthetic construct
  source 1..22: mol_type = other RNA
ctccagtatgacctcctcccac

SEQ ID NO: 131989 - RNA, 22 nt, synthetic construct
  source 1..22: mol_type = other RNA
ctccagtccagcaccacccttg

SEQ ID NO: 131990 - RNA, 22 nt, synthetic construct
  source 1..22: mol_type = other RNA
ctccagtcccactgacagtgga

SEQ ID NO: 131991 - RNA, 22 nt, synthetic construct
  source 1..22: mol_type = other RNA
ctccagtgaagtcatctggtcc

SEQ ID NO: 131992 - RNA, 22 nt, synthetic construct
  source 1..22: mol_type = other RNA
ctccagtgtcctgaatgatttc

SEQ ID NO: 131993 - RNA, 22 nt, synthetic construct
  source 1..22: mol_type = other RNA
ctccagtttgggtgacagagag

SEQ ID NO: 131994 - RNA, 22 nt, synthetic construct
  source 1..22: mol_type = other RNA
ctccataagtccctaacagtct

SEQ ID NO: 131995 - RNA, 22 nt, synthetic construct
  source 1..22: mol_type = other RNA
ctccatacaaggagacctacta

SEQ ID NO: 131996 - RNA, 22 nt, synthetic construct
  source 1..22: mol_type = other RNA
ctccataccccctggaaataag

SEQ ID NO: 131997 - RNA, 22 nt, synthetic construct
  source 1..22: mol_type = other RNA
ctccatagcttcctaagaaagg

SEQ ID NO: 131998 - RNA, 22 nt, synthetic construct
  source 1..22: mol_type = other RNA
ctccatatgggatgcttaaagc

SEQ ID NO: 131999 - RNA, 22 nt, synthetic construct
  source 1..22: mol_type = other RNA
ctccatcactgactggctgtgc

SEQ ID NO: 132000 - RNA, 22 nt, synthetic construct
  source 1..22: mol_type = other RNA
ctccatctcaagaaaacaagaa

SEQ ID NO: 132001 - RNA, 22 nt, synthetic construct
  source 1..22: mol_type = other RNA
ctccatcttcacgtggcgctcc

SEQ ID NO: 132002 - RNA, 22 nt, synthetic construct
  source 1..22: mol_type = other RNA
ctccatggaaactacaattact

SEQ ID NO: 132003 - RNA, 22 nt, synthetic construct
  source 1..22: mol_type = other RNA
ctccatgtcctcacctcacatt

SEQ ID NO: 132004 - RNA, 22 nt, synthetic construct
  source 1..22: mol_type = other RNA
ctccattatatgaataaaccac

SEQ ID NO: 132005 - RNA, 22 nt, synthetic construct
  source 1..22: mol_type = other RNA
ctccatttccctgcttcatctg

SEQ ID NO: 132006 - RNA, 22 nt, synthetic construct
  source 1..22: mol_type = other RNA
ctccatttgtggcatctttgtt

SEQ ID NO: 132007 - RNA, 22 nt, synthetic construct
  source 1..22: mol_type = other RNA
ctccattttgccagctaacttt

SEQ ID NO: 132008 - RNA, 22 nt, synthetic construct
  source 1..22: mol_type = other RNA
ctccattttggtcttaccctct

SEQ ID NO: 132009 - RNA, 22 nt, synthetic construct
  source 1..22: mol_type = other RNA
ctcccaaaggactgggatccta

SEQ ID NO: 132010 - RNA, 22 nt, synthetic construct
  source 1..22: mol_type = other RNA
ctcccaacaggctgagtgcggt

SEQ ID NO: 132011 - RNA, 22 nt, synthetic construct
  source 1..22: mol_type = other RNA
ctcccaaggttgcctgttcact

SEQ ID NO: 132012 - RNA, 22 nt, synthetic construct
  source 1..22: mol_type = other RNA
ctcccaatgcttgaagagcgct

SEQ ID NO: 132013 - RNA, 22 nt, synthetic construct
  source 1..22: mol_type = other RNA
ctcccaccatctctctgcctca

SEQ ID NO: 132014 - RNA, 22 nt, synthetic construct
  source 1..22: mol_type = other RNA
ctcccacctcagccccacaagt

SEQ ID NO: 132015 - RNA, 22 nt, synthetic construct
  source 1..22: mol_type = other RNA
ctcccacttacatcagcagtga

SEQ ID NO: 132016 - RNA, 22 nt, synthetic construct
  source 1..22: mol_type = other RNA
ctcccagaactcgaagccttcc

SEQ ID NO: 132017 - RNA, 22 nt, synthetic construct
  source 1..22: mol_type = other RNA
ctcccagcatgaagccctctaa

SEQ ID NO: 132018 - RNA, 22 nt, synthetic construct
  source 1..22: mol_type = other RNA
ctcccagccaaacagtttttac

SEQ ID NO: 132019 - RNA, 22 nt, synthetic construct
  source 1..22: mol_type = other RNA
ctcccagcctcaaacaatcctc

SEQ ID NO: 132020 - RNA, 22 nt, synthetic construct
  source 1..22: mol_type = other RNA
ctcccagctgtccaacaagggt

SEQ ID NO: 132021 - RNA, 22 nt, synthetic construct
  source 1..22: mol_type = other RNA
ctcccaggtcagtagtacagtg

SEQ ID NO: 132022 - RNA, 22 nt, synthetic construct
  source 1..22: mol_type = other RNA
ctcccagtgcccacctgacaag

SEQ ID NO: 132023 - RNA, 22 nt, synthetic construct
  source 1..22: mol_type = other RNA
ctcccagttgtcagaattagaa

SEQ ID NO: 132024 - RNA, 22 nt, synthetic construct
  source 1..22: mol_type = other RNA
ctcccataccacctgtcagaaa

SEQ ID NO: 132025 - RNA, 22 nt, synthetic construct
  source 1..22: mol_type = other RNA
ctcccatatctacatgtacgcc

SEQ ID NO: 132026 - RNA, 22 nt, synthetic construct
  source 1..22: mol_type = other RNA
ctcccatcactagaatgtgact

SEQ ID NO: 132027 - RNA, 22 nt, synthetic construct
  source 1..22: mol_type = other RNA
ctcccatgattcaaaatgtgat

SEQ ID NO: 132028 - RNA, 22 nt, synthetic construct
  source 1..22: mol_type = other RNA
ctcccatgcattcgtccctaaa

SEQ ID NO: 132029 - RNA, 22 nt, synthetic construct
  source 1..22: mol_type = other RNA
ctcccatttgggactgagacag

SEQ ID NO: 132030 - RNA, 22 nt, synthetic construct
  source 1..22: mol_type = other RNA
ctccccaaagatattagctaca

SEQ ID NO: 132031 - RNA, 22 nt, synthetic construct
  source 1..22: mol_type = other RNA
ctccccaagtaaacctcaagtc

SEQ ID NO: 132032 - RNA, 22 nt, synthetic construct
  source 1..22: mol_type = other RNA
ctccccagtggttgtggaatta

SEQ ID NO: 132033 - RNA, 22 nt, synthetic construct
  source 1..22: mol_type = other RNA
ctccccatgcaggagaaacatg

SEQ ID NO: 132034 - RNA, 22 nt, synthetic construct
  source 1..22: mol_type = other RNA
ctccccattccctgtctgtgat

SEQ ID NO: 132035 - RNA, 22 nt, synthetic construct
  source 1..22: mol_type = other RNA
ctcccccaggtggttctgccta

SEQ ID NO: 132036 - RNA, 22 nt, synthetic construct
  source 1..22: mol_type = other RNA
ctcccccgaatcctttgcttcc

SEQ ID NO: 132037 - RNA, 22 nt, synthetic construct
  source 1..22: mol_type = other RNA
ctcccccgcccgtccctgcttg

SEQ ID NO: 132038 - RNA, 22 nt, synthetic construct
  source 1..22: mol_type = other RNA
ctcccccgggacaatgccaggg

SEQ ID NO: 132039 - RNA, 22 nt, synthetic construct
  source 1..22: mol_type = other RNA
ctcccccggggctcgcagcatc

SEQ ID NO: 132040 - RNA, 22 nt, synthetic construct
  source 1..22: mol_type = other RNA
ctccccggatgattctaatgtg

SEQ ID NO: 132041 - RNA, 22 nt, synthetic construct
  source 1..22: mol_type = other RNA
ctccccttgacgaagtcacatt

SEQ ID NO: 132042 - RNA, 22 nt, synthetic construct
  source 1..22: mol_type = other RNA
ctcccgagtagttgtaactaca

SEQ ID NO: 132043 - RNA, 22 nt, synthetic construct
  source 1..22: mol_type = other RNA
ctcccgagtatctaggagtaca

SEQ ID NO: 132044 - RNA, 22 nt, synthetic construct
  source 1..22: mol_type = other RNA
ctcccgatttcagttaacttat

SEQ ID NO: 132045 - RNA, 22 nt, synthetic construct
  source 1..22: mol_type = other RNA
ctcccggctaagatgaggtctc

SEQ ID NO: 132046 - RNA, 22 nt, synthetic construct
  source 1..22: mol_type = other RNA
ctcccgggtccaggcagttctc

SEQ ID NO: 132047 - RNA, 22 nt, synthetic construct
  source 1..22: mol_type = other RNA
ctcccgggtttaagcgattctc

SEQ ID NO: 132048 - RNA, 22 nt, synthetic construct
  source 1..22: mol_type = other RNA
ctccctaaatacacatgttgag

SEQ ID NO: 132049 - RNA, 22 nt, synthetic construct
  source 1..22: mol_type = other RNA
ctccctaaccaggcccggggca

SEQ ID NO: 132050 - RNA, 22 nt, synthetic construct
  source 1..22: mol_type = other RNA
ctccctaccacccgtccaattt

SEQ ID NO: 132051 - RNA, 22 nt, synthetic construct
  source 1..22: mol_type = other RNA
ctccctacctggcagtctagga

SEQ ID NO: 132052 - RNA, 22 nt, synthetic construct
  source 1..22: mol_type = other RNA
ctccctcacagtccactcacct

SEQ ID NO: 132053 - RNA, 22 nt, synthetic construct
  source 1..22: mol_type = other RNA
ctccctcactaagtcagaattc

SEQ ID NO: 132054 - RNA, 22 nt, synthetic construct
  source 1..22: mol_type = other RNA
ctccctccccccacggtctccc

SEQ ID NO: 132055 - RNA, 22 nt, synthetic construct
  source 1..22: mol_type = other RNA
ctccctccccctccccctccct

SEQ ID NO: 132056 - RNA, 22 nt, synthetic construct
  source 1..22: mol_type = other RNA
ctccctcggccacagcagggct

SEQ ID NO: 132057 - RNA, 22 nt, synthetic construct
  source 1..22: mol_type = other RNA
ctccctctatggcaggcacctt

SEQ ID NO: 132058 - RNA, 22 nt, synthetic construct
  source 1..22: mol_type = other RNA
ctccctctgtgtgcatgcatgt

SEQ ID NO: 132059 - RNA, 22 nt, synthetic construct
  source 1..22: mol_type = other RNA
ctccctcttcgctcttttaaaa

SEQ ID NO: 132060 - RNA, 22 nt, synthetic construct
  source 1..22: mol_type = other RNA
ctccctgaaattgtcagaaaag

SEQ ID NO: 132061 - RNA, 22 nt, synthetic construct
  source 1..22: mol_type = other RNA
ctccctgccctgtgaaaatcat

SEQ ID NO: 132062 - RNA, 22 nt, synthetic construct
  source 1..22: mol_type = other RNA
ctccctgctttaaaacactggc

SEQ ID NO: 132063 - RNA, 22 nt, synthetic construct
  source 1..22: mol_type = other RNA
ctccctggagaggcaaaggccg

SEQ ID NO: 132064 - RNA, 22 nt, synthetic construct
  source 1..22: mol_type = other RNA
ctccctggttcaagctatgctc

SEQ ID NO: 132065 - RNA, 22 nt, synthetic construct
  source 1..22: mol_type = other RNA
ctccctgtctttctgtctgctt

SEQ ID NO: 132066 - RNA, 22 nt, synthetic construct
  source 1..22: mol_type = other RNA
ctccctgtgcgtgaatctgttc

SEQ ID NO: 132067 - RNA, 22 nt, synthetic construct
  source 1..22: mol_type = other RNA
ctcccttcacaaagccctcagg

SEQ ID NO: 132068 - RNA, 22 nt, synthetic construct
  source 1..22: mol_type = other RNA
ctcccttcagcctgtgtcagtg

SEQ ID NO: 132069 - RNA, 22 nt, synthetic construct
  source 1..22: mol_type = other RNA
ctcccttccagcgtgtgcatga

SEQ ID NO: 132070 - RNA, 22 nt, synthetic construct
  source 1..22: mol_type = other RNA
ctcccttcctgttctttgttag

SEQ ID NO: 132071 - RNA, 22 nt, synthetic construct
  source 1..22: mol_type = other RNA
ctcccttctattccattgttct

SEQ ID NO: 132072 - RNA, 22 nt, synthetic construct
  source 1..22: mol_type = other RNA
ctccctttttaggtagggataa

SEQ ID NO: 132073 - RNA, 22 nt, synthetic construct
  source 1..22: mol_type = other RNA
ctccgcctccctggttcaagct

SEQ ID NO: 132074 - RNA, 22 nt, synthetic construct
  source 1..22: mol_type = other RNA
ctccgcctcctggtgggttcat

SEQ ID NO: 132075 - RNA, 22 nt, synthetic construct
  source 1..22: mol_type = other RNA
ctccggagtagctgggattaca

SEQ ID NO: 132076 - RNA, 22 nt, synthetic construct
  source 1..22: mol_type = other RNA
ctccgggcctcccacctgcgag

SEQ ID NO: 132077 - RNA, 22 nt, synthetic construct
  source 1..22: mol_type = other RNA
ctccgggtaaaaagcctgcttc

SEQ ID NO: 132078 - RNA, 22 nt, synthetic construct
  source 1..22: mol_type = other RNA
ctccgtagctgtcgctctcctg

SEQ ID NO: 132079 - RNA, 22 nt, synthetic construct
  source 1..22: mol_type = other RNA
ctccgtttttcaggttcaagcg

SEQ ID NO: 132080 - RNA, 22 nt, synthetic construct
  source 1..22: mol_type = other RNA
ctcctaaaacatggtccacaga

SEQ ID NO: 132081 - RNA, 22 nt, synthetic construct
  source 1..22: mol_type = other RNA
ctcctaagtcttcttctaagct

SEQ ID NO: 132082 - RNA, 22 nt, synthetic construct
  source 1..22: mol_type = other RNA
ctcctaagttttgggggaagag

SEQ ID NO: 132083 - RNA, 22 nt, synthetic construct
  source 1..22: mol_type = other RNA
ctcctaccttccaaagtatgca

SEQ ID NO: 132084 - RNA, 22 nt, synthetic construct
  source 1..22: mol_type = other RNA
ctcctagatactcgggaggctg

SEQ ID NO: 132085 - RNA, 22 nt, synthetic construct
  source 1..22: mol_type = other RNA
ctcctagattgaccttctactt

SEQ ID NO: 132086 - RNA, 22 nt, synthetic construct
  source 1..22: mol_type = other RNA
ctcctatagttaagtctgaaag

SEQ ID NO: 132087 - RNA, 22 nt, synthetic construct
  source 1..22: mol_type = other RNA
ctcctatattgtcaatggggaa

SEQ ID NO: 132088 - RNA, 22 nt, synthetic construct
  source 1..22: mol_type = other RNA
ctcctcagaaggccaaggcagg

SEQ ID NO: 132089 - RNA, 22 nt, synthetic construct
  source 1..22: mol_type = other RNA
ctcctcattcacactagtcacc

SEQ ID NO: 132090 - RNA, 22 nt, synthetic construct
  source 1..22: mol_type = other RNA
ctcctccaacccattccaggtt

SEQ ID NO: 132091 - RNA, 22 nt, synthetic construct
  source 1..22: mol_type = other RNA
ctcctccaaggctgcccgctcc

SEQ ID NO: 132092 - RNA, 22 nt, synthetic construct
  source 1..22: mol_type = other RNA
ctcctcccacttacatcagcag

SEQ ID NO: 132093 - RNA, 22 nt, synthetic construct
  source 1..22: mol_type = other RNA
ctcctcccggctaagatgaggt

SEQ ID NO: 132094 - RNA, 22 nt, synthetic construct
  source 1..22: mol_type = other RNA
ctcctccggggacccagtgccc

SEQ ID NO: 132095 - RNA, 22 nt, synthetic construct
  source 1..22: mol_type = other RNA
ctcctcctcctggccacatgct

SEQ ID NO: 132096 - RNA, 22 nt, synthetic construct
  source 1..22: mol_type = other RNA
ctcctcctctacaagttttaac

SEQ ID NO: 132097 - RNA, 22 nt, synthetic construct
  source 1..22: mol_type = other RNA
ctcctcctggccacatgcttcc

SEQ ID NO: 132098 - RNA, 22 nt, synthetic construct
  source 1..22: mol_type = other RNA
ctcctctacaagttttaactta

SEQ ID NO: 132099 - RNA, 22 nt, synthetic construct
  source 1..22: mol_type = other RNA
ctcctctcccgccggagtccgc

SEQ ID NO: 132100 - RNA, 22 nt, synthetic construct
  source 1..22: mol_type = other RNA
ctcctctgactttatggtatca

SEQ ID NO: 132101 - RNA, 22 nt, synthetic construct
  source 1..22: mol_type = other RNA
ctcctctggacattatcctatc

SEQ ID NO: 132102 - RNA, 22 nt, synthetic construct
  source 1..22: mol_type = other RNA
ctcctctggccctccatttccc

SEQ ID NO: 132103 - RNA, 22 nt, synthetic construct
  source 1..22: mol_type = other RNA
ctcctctttcatatctgatttt

SEQ ID NO: 132104 - RNA, 22 nt, synthetic construct
  source 1..22: mol_type = other RNA
ctcctgaacaaaatttttgcaa

SEQ ID NO: 132105 - RNA, 22 nt, synthetic construct
  source 1..22: mol_type = other RNA
ctcctgacctcaagcgatccag

SEQ ID NO: 132106 - RNA, 22 nt, synthetic construct
  source 1..22: mol_type = other RNA
ctcctgacctcagatatccacc

SEQ ID NO: 132107 - RNA, 22 nt, synthetic construct
  source 1..22: mol_type = other RNA
ctcctgagaaccggaacttgag

SEQ ID NO: 132108 - RNA, 22 nt, synthetic construct
  source 1..22: mol_type = other RNA
ctcctgagcaaggaaggaaagg

SEQ ID NO: 132109 - RNA, 22 nt, synthetic construct
  source 1..22: mol_type = other RNA
ctcctgcactcaagcaatcctc

SEQ ID NO: 132110 - RNA, 22 nt, synthetic construct
  source 1..22: mol_type = other RNA
ctcctgcagacatgcacgagaa

SEQ ID NO: 132111 - RNA, 22 nt, synthetic construct
  source 1..22: mol_type = other RNA
ctcctgcatggggagttttagg

SEQ ID NO: 132112 - RNA, 22 nt, synthetic construct
  source 1..22: mol_type = other RNA
ctcctgccttcctgacctctgc

SEQ ID NO: 132113 - RNA, 22 nt, synthetic construct
  source 1..22: mol_type = other RNA
ctcctgccttggccttctgagg

SEQ ID NO: 132114 - RNA, 22 nt, synthetic construct
  source 1..22: mol_type = other RNA
ctcctgcctttgttcatcatct

SEQ ID NO: 132115 - RNA, 22 nt, synthetic construct
  source 1..22: mol_type = other RNA
ctcctggccacatgcttccaaa

SEQ ID NO: 132116 - RNA, 22 nt, synthetic construct
  source 1..22: mol_type = other RNA
ctcctgggaaaaggatttgttt

SEQ ID NO: 132117 - RNA, 22 nt, synthetic construct
  source 1..22: mol_type = other RNA
ctcctgggctcatctaagccta

SEQ ID NO: 132118 - RNA, 22 nt, synthetic construct
  source 1..22: mol_type = other RNA
ctcctgggttcaggtgcctcct

SEQ ID NO: 132119 - RNA, 22 nt, synthetic construct
  source 1..22: mol_type = other RNA
ctcctggtctcccagcatgaag

SEQ ID NO: 132120 - RNA, 22 nt, synthetic construct
  source 1..22: mol_type = other RNA
ctcctggtgggttcatgccatt

SEQ ID NO: 132121 - RNA, 22 nt, synthetic construct
  source 1..22: mol_type = other RNA
ctcctggttttgatcatcgcat

SEQ ID NO: 132122 - RNA, 22 nt, synthetic construct
  source 1..22: mol_type = other RNA
ctcctgtatgccgctggtgaaa

SEQ ID NO: 132123 - RNA, 22 nt, synthetic construct
  source 1..22: mol_type = other RNA
ctcctgtgccaagtccgtgcat

SEQ ID NO: 132124 - RNA, 22 nt, synthetic construct
  source 1..22: mol_type = other RNA
ctcctgtgtgcatgctcccatt

SEQ ID NO: 132125 - RNA, 22 nt, synthetic construct
  source 1..22: mol_type = other RNA
ctcctgttctttggagctgtat

SEQ ID NO: 132126 - RNA, 22 nt, synthetic construct
  source 1..22: mol_type = other RNA
ctccttaatccagtctatcatt

SEQ ID NO: 132127 - RNA, 22 nt, synthetic construct
  source 1..22: mol_type = other RNA
ctccttaccactataatccaga

SEQ ID NO: 132128 - RNA, 22 nt, synthetic construct
  source 1..22: mol_type = other RNA
ctccttcccctggtcgagctgg

SEQ ID NO: 132129 - RNA, 22 nt, synthetic construct
  source 1..22: mol_type = other RNA
ctccttctgaaggcactaacaa

SEQ ID NO: 132130 - RNA, 22 nt, synthetic construct
  source 1..22: mol_type = other RNA
ctccttctgcaggctgaactgc

SEQ ID NO: 132131 - RNA, 22 nt, synthetic construct
  source 1..22: mol_type = other RNA
ctccttctgctcactttgggat

SEQ ID NO: 132132 - RNA, 22 nt, synthetic construct
  source 1..22: mol_type = other RNA
ctccttctggaagatttctact

SEQ ID NO: 132133 - RNA, 22 nt, synthetic construct
  source 1..22: mol_type = other RNA
ctccttgcacattagaatcatc

SEQ ID NO: 132134 - RNA, 22 nt, synthetic construct
  source 1..22: mol_type = other RNA
ctccttgtatggagactagtac

SEQ ID NO: 132135 - RNA, 22 nt, synthetic construct
  source 1..22: mol_type = other RNA
ctcctttccttccttgctcagg

SEQ ID NO: 132136 - RNA, 22 nt, synthetic construct
  source 1..22: mol_type = other RNA
ctcctttctagaatgcatccct

SEQ ID NO: 132137 - RNA, 22 nt, synthetic construct
  source 1..22: mol_type = other RNA
ctcctttctatacttcatcttt

SEQ ID NO: 132138 - RNA, 22 nt, synthetic construct
  source 1..22: mol_type = other RNA
ctcctttcttaccctcacagtc

SEQ ID NO: 132139 - RNA, 22 nt, synthetic construct
  source 1..22: mol_type = other RNA
ctcctttgaggtaagaacttgt

SEQ ID NO: 132140 - RNA, 22 nt, synthetic construct
  source 1..22: mol_type = other RNA
ctccttttaagagtgaagaaac

SEQ ID NO: 132141 - RNA, 22 nt, synthetic construct
  source 1..22: mol_type = other RNA
ctccttttgtagagggaatttg

SEQ ID NO: 132142 - RNA, 22 nt, synthetic construct
  source 1..22: mol_type = other RNA
ctcctttttatcacccttataa

SEQ ID NO: 132143 - RNA, 22 nt, synthetic construct
  source 1..22: mol_type = other RNA
ctcgaaaaggaatggaattctg

SEQ ID NO: 132144 - RNA, 22 nt, synthetic construct
  source 1..22: mol_type = other RNA
ctcgaactctcgacctcgtgat

SEQ ID NO: 132145 - RNA, 22 nt, synthetic construct
  source 1..22: mol_type = other RNA
ctcgaagagaccacaggctctc

SEQ ID NO: 132146 - RNA, 22 nt, synthetic construct
  source 1..22: mol_type = other RNA
ctcgaagcacaaccactgatgg

SEQ ID NO: 132147 - RNA, 22 nt, synthetic construct
  source 1..22: mol_type = other RNA
ctcgaagccttcccctgctgtt

SEQ ID NO: 132148 - RNA, 22 nt, synthetic construct
  source 1..22: mol_type = other RNA
ctcgaaggcctgcttcattccg

SEQ ID NO: 132149 - RNA, 22 nt, synthetic construct
  source 1..22: mol_type = other RNA
ctcgaagtggtgcttgaactgc

SEQ ID NO: 132150 - RNA, 22 nt, synthetic construct
  source 1..22: mol_type = other RNA
ctcgacacacaatccaagtttc

SEQ ID NO: 132151 - RNA, 22 nt, synthetic construct
  source 1..22: mol_type = other RNA
ctcgaccaggggaaggagtctg

SEQ ID NO: 132152 - RNA, 22 nt, synthetic construct
  source 1..22: mol_type = other RNA
ctcgaccccctgggctcaagcc

SEQ ID NO: 132153 - RNA, 22 nt, synthetic construct
  source 1..22: mol_type = other RNA
ctcgagctcctgacctcagata

SEQ ID NO: 132154 - RNA, 22 nt, synthetic construct
  source 1..22: mol_type = other RNA
ctcgagggtagcttttcctgct

SEQ ID NO: 132155 - RNA, 22 nt, synthetic construct
  source 1..22: mol_type = other RNA
ctcgagtaaaaagaatgaataa

SEQ ID NO: 132156 - RNA, 22 nt, synthetic construct
  source 1..22: mol_type = other RNA
ctcgatggacatttaggttgtt

SEQ ID NO: 132157 - RNA, 22 nt, synthetic construct
  source 1..22: mol_type = other RNA
ctcgcactccacttcccactgc

SEQ ID NO: 132158 - RNA, 22 nt, synthetic construct
  source 1..22: mol_type = other RNA
ctcgcagcatccctgccgcgcg

SEQ ID NO: 132159 - RNA, 22 nt, synthetic construct
  source 1..22: mol_type = other RNA
ctcgcagcggggatgctcaggg

SEQ ID NO: 132160 - RNA, 22 nt, synthetic construct
  source 1..22: mol_type = other RNA
ctcgcaggtgggaggcccggag

SEQ ID NO: 132161 - RNA, 22 nt, synthetic construct
  source 1..22: mol_type = other RNA
ctcgccgtctccctcggccaca

SEQ ID NO: 132162 - RNA, 22 nt, synthetic construct
  source 1..22: mol_type = other RNA
ctcgctctgtcgcccaggcgga

SEQ ID NO: 132163 - RNA, 22 nt, synthetic construct
  source 1..22: mol_type = other RNA
ctcgctcttggcttttggcagc

SEQ ID NO: 132164 - RNA, 22 nt, synthetic construct
  source 1..22: mol_type = other RNA
ctcggaaggcggaagttgcagt

SEQ ID NO: 132165 - RNA, 22 nt, synthetic construct
  source 1..22: mol_type = other RNA
ctcggatttaagagaggaagtg

SEQ ID NO: 132166 - RNA, 22 nt, synthetic construct
  source 1..22: mol_type = other RNA
ctcggcacagctctcatgagtc

SEQ ID NO: 132167 - RNA, 22 nt, synthetic construct
  source 1..22: mol_type = other RNA
ctcggccaaccattactcttct

SEQ ID NO: 132168 - RNA, 22 nt, synthetic construct
  source 1..22: mol_type = other RNA
ctcggccacagcagggctcctc

SEQ ID NO: 132169 - RNA, 22 nt, synthetic construct
  source 1..22: mol_type = other RNA
ctcggccgacccagcccccaac

SEQ ID NO: 132170 - RNA, 22 nt, synthetic construct
  source 1..22: mol_type = other RNA
ctcggcctctactgactccctt

SEQ ID NO: 132171 - RNA, 22 nt, synthetic construct
  source 1..22: mol_type = other RNA
ctcggctccgggcctcccacct

SEQ ID NO: 132172 - RNA, 22 nt, synthetic construct
  source 1..22: mol_type = other RNA
ctcggctctgtcacccttgtaa

SEQ ID NO: 132173 - RNA, 22 nt, synthetic construct
  source 1..22: mol_type = other RNA
ctcggcttactgcaacctccgt

SEQ ID NO: 132174 - RNA, 22 nt, synthetic construct
  source 1..22: mol_type = other RNA
ctcgggttcaagccccagttct

SEQ ID NO: 132175 - RNA, 22 nt, synthetic construct
  source 1..22: mol_type = other RNA
ctcggtatgtacccaatggatt

SEQ ID NO: 132176 - RNA, 22 nt, synthetic construct
  source 1..22: mol_type = other RNA
ctcggtcattctggagtgtttt

SEQ ID NO: 132177 - RNA, 22 nt, synthetic construct
  source 1..22: mol_type = other RNA
ctcggtctacggacgcaggcaa

SEQ ID NO: 132178 - RNA, 22 nt, synthetic construct
  source 1..22: mol_type = other RNA
ctcggtctcaaaacaaacaaac

SEQ ID NO: 132179 - RNA, 22 nt, synthetic construct
  source 1..22: mol_type = other RNA
ctcgtaaaagctaatctacttt

SEQ ID NO: 132180 - RNA, 22 nt, synthetic construct
  source 1..22: mol_type = other RNA
ctcgtaatgcgatgatcaaaac

SEQ ID NO: 132181 - RNA, 22 nt, synthetic construct
  source 1..22: mol_type = other RNA
ctcgtagttttttggtagatac

SEQ ID NO: 132182 - RNA, 22 nt, synthetic construct
  source 1..22: mol_type = other RNA
ctcgtgaatttggtattcttat

SEQ ID NO: 132183 - RNA, 22 nt, synthetic construct
  source 1..22: mol_type = other RNA
ctcgtgcatgtctgcaggagcc

SEQ ID NO: 132184 - RNA, 22 nt, synthetic construct
  source 1..22: mol_type = other RNA
ctcgtggcctcaagcagtcctg

SEQ ID NO: 132185 - RNA, 22 nt, synthetic construct
  source 1..22: mol_type = other RNA
ctcgtggttatagccataagag

SEQ ID NO: 132186 - RNA, 22 nt, synthetic construct
  source 1..22: mol_type = other RNA
ctcgtgtatgatttctaggccc

SEQ ID NO: 132187 - RNA, 22 nt, synthetic construct
  source 1..22: mol_type = other RNA
ctcgtgtgagctctagccttgt

SEQ ID NO: 132188 - RNA, 22 nt, synthetic construct
  source 1..22: mol_type = other RNA
ctcgtgtgtctcataaagccgg

SEQ ID NO: 132189 - RNA, 22 nt, synthetic construct
  source 1..22: mol_type = other RNA
ctcgttcatgttcaaggtgttc

SEQ ID NO: 132190 - RNA, 22 nt, synthetic construct
  source 1..22: mol_type = other RNA
ctcgttttcaacaaaggttgaa

SEQ ID NO: 132191 - RNA, 22 nt, synthetic construct
  source 1..22: mol_type = other RNA
ctctaaaaaataccaaaaaagg

SEQ ID NO: 132192 - RNA, 22 nt, synthetic construct
  source 1..22: mol_type = other RNA
ctctaaaaacatccattactcg

SEQ ID NO: 132193 - RNA, 22 nt, synthetic construct
  source 1..22: mol_type = other RNA
ctctaaaagaataaaattcacc

SEQ ID NO: 132194 - RNA, 22 nt, synthetic construct
  source 1..22: mol_type = other RNA
ctctaaactagttcaaccattg

SEQ ID NO: 132195 - RNA, 22 nt, synthetic construct
  source 1..22: mol_type = other RNA
ctctaaagtctatgctcttggt

SEQ ID NO: 132196 - RNA, 22 nt, synthetic construct
  source 1..22: mol_type = other RNA
ctctaaataggtattcatgctg

SEQ ID NO: 132197 - RNA, 22 nt, synthetic construct
  source 1..22: mol_type = other RNA
ctctaacaaaactaggctgtcc

SEQ ID NO: 132198 - RNA, 22 nt, synthetic construct
  source 1..22: mol_type = other RNA
ctctaagtcagcctgggcacac

SEQ ID NO: 132199 - RNA, 22 nt, synthetic construct
  source 1..22: mol_type = other RNA
ctctaataaaagctggagttat

SEQ ID NO: 132200 - RNA, 22 nt, synthetic construct
  source 1..22: mol_type = other RNA
ctctaataacagcctaagcaaa

SEQ ID NO: 132201 - RNA, 22 nt, synthetic construct
  source 1..22: mol_type = other RNA
ctctaatagctagtgatgttga

SEQ ID NO: 132202 - RNA, 22 nt, synthetic construct
  source 1..22: mol_type = other RNA
ctctaatagttcacctctccgg

SEQ ID NO: 132203 - RNA, 22 nt, synthetic construct
  source 1..22: mol_type = other RNA
ctctaatatggttcctagaaaa

SEQ ID NO: 132204 - RNA, 22 nt, synthetic construct
  source 1..22: mol_type = other RNA
ctctaatcaggttgggcttatc

SEQ ID NO: 132205 - RNA, 22 nt, synthetic construct
  source 1..22: mol_type = other RNA
ctctaatgcaagagttaaaact

SEQ ID NO: 132206 - RNA, 22 nt, synthetic construct
  source 1..22: mol_type = other RNA
ctctaatggggaaatagatgcc

SEQ ID NO: 132207 - RNA, 22 nt, synthetic construct
  source 1..22: mol_type = other RNA
ctctaatgtaaacagcatactg

SEQ ID NO: 132208 - RNA, 22 nt, synthetic construct
  source 1..22: mol_type = other RNA
ctctacaaaaggaggaactaat

SEQ ID NO: 132209 - RNA, 22 nt, synthetic construct
  source 1..22: mol_type = other RNA
ctctacaaaccttcttatttcc

SEQ ID NO: 132210 - RNA, 22 nt, synthetic construct
  source 1..22: mol_type = other RNA
ctctacaagttttaacttaaga

SEQ ID NO: 132211 - RNA, 22 nt, synthetic construct
  source 1..22: mol_type = other RNA
ctctacacaaaaatccagataa

SEQ ID NO: 132212 - RNA, 22 nt, synthetic construct
  source 1..22: mol_type = other RNA
ctctacagggaaccgtaacttc

SEQ ID NO: 132213 - RNA, 22 nt, synthetic construct
  source 1..22: mol_type = other RNA
ctctacagttaacaatactgca

SEQ ID NO: 132214 - RNA, 22 nt, synthetic construct
  source 1..22: mol_type = other RNA
ctctacatcacagacagggaat

SEQ ID NO: 132215 - RNA, 22 nt, synthetic construct
  source 1..22: mol_type = other RNA
ctctacatctggatcctgtctc

SEQ ID NO: 132216 - RNA, 22 nt, synthetic construct
  source 1..22: mol_type = other RNA
ctctaccaaaatataaatacgt

SEQ ID NO: 132217 - RNA, 22 nt, synthetic construct
  source 1..22: mol_type = other RNA
ctctacccagcactctgaatca

SEQ ID NO: 132218 - RNA, 22 nt, synthetic construct
  source 1..22: mol_type = other RNA
ctctaccctttccaaattcaaa

SEQ ID NO: 132219 - RNA, 22 nt, synthetic construct
  source 1..22: mol_type = other RNA
ctctactctgcctcagttgaca

SEQ ID NO: 132220 - RNA, 22 nt, synthetic construct
  source 1..22: mol_type = other RNA
ctctactgactccctttttagg

SEQ ID NO: 132221 - RNA, 22 nt, synthetic construct
  source 1..22: mol_type = other RNA
ctctactttcacataaggtata

SEQ ID NO: 132222 - RNA, 22 nt, synthetic construct
  source 1..22: mol_type = other RNA
ctctagaacttatgcatcttgc

SEQ ID NO: 132223 - RNA, 22 nt, synthetic construct
  source 1..22: mol_type = other RNA
ctctagcaaacaaacacactgg

SEQ ID NO: 132224 - RNA, 22 nt, synthetic construct
  source 1..22: mol_type = other RNA
ctctagcccagcttccgggact

SEQ ID NO: 132225 - RNA, 22 nt, synthetic construct
  source 1..22: mol_type = other RNA
ctctagccttgtactgtgtggc

SEQ ID NO: 132226 - RNA, 22 nt, synthetic construct
  source 1..22: mol_type = other RNA
ctctagctccccattccctgtc

SEQ ID NO: 132227 - RNA, 22 nt, synthetic construct
  source 1..22: mol_type = other RNA
ctctaggcttaaaattcttcca

SEQ ID NO: 132228 - RNA, 22 nt, synthetic construct
  source 1..22: mol_type = other RNA
ctctagtggtgcttaattcaaa

SEQ ID NO: 132229 - RNA, 22 nt, synthetic construct
  source 1..22: mol_type = other RNA
ctctagttgcacggtgaagaac

SEQ ID NO: 132230 - RNA, 22 nt, synthetic construct
  source 1..22: mol_type = other RNA
ctctagttttccagtatattca

SEQ ID NO: 132231 - RNA, 22 nt, synthetic construct
  source 1..22: mol_type = other RNA
ctctataattctgccttcaatg

SEQ ID NO: 132232 - RNA, 22 nt, synthetic construct
  source 1..22: mol_type = other RNA
ctctatccaccactccacctta

SEQ ID NO: 132233 - RNA, 22 nt, synthetic construct
  source 1..22: mol_type = other RNA
ctctatgcagaaatctaccaaa

SEQ ID NO: 132234 - RNA, 22 nt, synthetic construct
  source 1..22: mol_type = other RNA
ctctatggcaggcaccttcaga

SEQ ID NO: 132235 - RNA, 22 nt, synthetic construct
  source 1..22: mol_type = other RNA
ctctatggcatttgagggttag

SEQ ID NO: 132236 - RNA, 22 nt, synthetic construct
  source 1..22: mol_type = other RNA
ctctattaaatcatgatgtttg

SEQ ID NO: 132237 - RNA, 22 nt, synthetic construct
  source 1..22: mol_type = other RNA
ctctattccaaatgtctgtctt

SEQ ID NO: 132238 - RNA, 22 nt, synthetic construct
  source 1..22: mol_type = other RNA
ctctattttcctaaaactcccc

SEQ ID NO: 132239 - RNA, 22 nt, synthetic construct
  source 1..22: mol_type = other RNA
ctctatttttgtctggtggaca

SEQ ID NO: 132240 - RNA, 22 nt, synthetic construct
  source 1..22: mol_type = other RNA
ctctcaaataatttggcaaaaa

SEQ ID NO: 132241 - RNA, 22 nt, synthetic construct
  source 1..22: mol_type = other RNA
ctctcaacacttcagtggtaag

SEQ ID NO: 132242 - RNA, 22 nt, synthetic construct
  source 1..22: mol_type = other RNA
ctctcaactggcccctccatgg

SEQ ID NO: 132243 - RNA, 22 nt, synthetic construct
  source 1..22: mol_type = other RNA
ctctcaagaaggtatcatcgga

SEQ ID NO: 132244 - RNA, 22 nt, synthetic construct
  source 1..22: mol_type = other RNA
ctctcaagcaatctgaaacgac

SEQ ID NO: 132245 - RNA, 22 nt, synthetic construct
  source 1..22: mol_type = other RNA
ctctcaagtaattgttttccct

SEQ ID NO: 132246 - RNA, 22 nt, synthetic construct
  source 1..22: mol_type = other RNA
ctctcaatagtgtcctttgatg

SEQ ID NO: 132247 - RNA, 22 nt, synthetic construct
  source 1..22: mol_type = other RNA
ctctcaattaatgcccaatcaa

SEQ ID NO: 132248 - RNA, 22 nt, synthetic construct
  source 1..22: mol_type = other RNA
ctctcactccaaagcaaacgtg

SEQ ID NO: 132249 - RNA, 22 nt, synthetic construct
  source 1..22: mol_type = other RNA
ctctcagaaattataagcttcc

SEQ ID NO: 132250 - RNA, 22 nt, synthetic construct
  source 1..22: mol_type = other RNA
ctctcagagggaaactgttttt

SEQ ID NO: 132251 - RNA, 22 nt, synthetic construct
  source 1..22: mol_type = other RNA
ctctcagatctgagtttgctct

SEQ ID NO: 132252 - RNA, 22 nt, synthetic construct
  source 1..22: mol_type = other RNA
ctctcagtggccctgttggcct

SEQ ID NO: 132253 - RNA, 22 nt, synthetic construct
  source 1..22: mol_type = other RNA
ctctcagtggtgcttttgctgc

SEQ ID NO: 132254 - RNA, 22 nt, synthetic construct
  source 1..22: mol_type = other RNA
ctctcatctaaattaagcttcg

SEQ ID NO: 132255 - RNA, 22 nt, synthetic construct
  source 1..22: mol_type = other RNA
ctctcatgagtcctgaaaattc

SEQ ID NO: 132256 - RNA, 22 nt, synthetic construct
  source 1..22: mol_type = other RNA
ctctcatgtcagagacacatac

SEQ ID NO: 132257 - RNA, 22 nt, synthetic construct
  source 1..22: mol_type = other RNA
ctctcatgttgggtaaaaataa

SEQ ID NO: 132258 - RNA, 22 nt, synthetic construct
  source 1..22: mol_type = other RNA
ctctccaacagaagaagtttct

SEQ ID NO: 132259 - RNA, 22 nt, synthetic construct
  source 1..22: mol_type = other RNA
ctctccaaggtacaattacaca

SEQ ID NO: 132260 - RNA, 22 nt, synthetic construct
  source 1..22: mol_type = other RNA
ctctccagggaggaatccttca

SEQ ID NO: 132261 - RNA, 22 nt, synthetic construct
  source 1..22: mol_type = other RNA
ctctcccaccatctctctgcct

SEQ ID NO: 132262 - RNA, 22 nt, synthetic construct
  source 1..22: mol_type = other RNA
ctctccccaagtaaacctcaag

SEQ ID NO: 132263 - RNA, 22 nt, synthetic construct
  source 1..22: mol_type = other RNA
ctctcccccgaatcctttgctt

SEQ ID NO: 132264 - RNA, 22 nt, synthetic construct
  source 1..22: mol_type = other RNA
ctctccccttgacgaagtcaca

SEQ ID NO: 132265 - RNA, 22 nt, synthetic construct
  source 1..22: mol_type = other RNA
ctctccctgccctgtgaaaatc

SEQ ID NO: 132266 - RNA, 22 nt, synthetic construct
  source 1..22: mol_type = other RNA
ctctccctgtctttctgtctgc

SEQ ID NO: 132267 - RNA, 22 nt, synthetic construct
  source 1..22: mol_type = other RNA
ctctcccttcctgttctttgtt

SEQ ID NO: 132268 - RNA, 22 nt, synthetic construct
  source 1..22: mol_type = other RNA
ctctccgggtaaaaagcctgct

SEQ ID NO: 132269 - RNA, 22 nt, synthetic construct
  source 1..22: mol_type = other RNA
ctctcctgtgccaagtccgtgc

SEQ ID NO: 132270 - RNA, 22 nt, synthetic construct
  source 1..22: mol_type = other RNA
ctctccttgcacattagaatca

SEQ ID NO: 132271 - RNA, 22 nt, synthetic construct
  source 1..22: mol_type = other RNA
ctctcctttgaggtaagaactt

SEQ ID NO: 132272 - RNA, 22 nt, synthetic construct
  source 1..22: mol_type = other RNA
ctctcgatggacatttaggttg

SEQ ID NO: 132273 - RNA, 22 nt, synthetic construct
  source 1..22: mol_type = other RNA
ctctctaaaaacatccattact

SEQ ID NO: 132274 - RNA, 22 nt, synthetic construct
  source 1..22: mol_type = other RNA
ctctctatccaccactccacct

SEQ ID NO: 132275 - RNA, 22 nt, synthetic construct
  source 1..22: mol_type = other RNA
ctctctattccaaatgtctgtc

SEQ ID NO: 132276 - RNA, 22 nt, synthetic construct
  source 1..22: mol_type = other RNA
ctctctcaactggcccctccat

SEQ ID NO: 132277 - RNA, 22 nt, synthetic construct
  source 1..22: mol_type = other RNA
ctctctcaagcaatctgaaacg

SEQ ID NO: 132278 - RNA, 22 nt, synthetic construct
  source 1..22: mol_type = other RNA
ctctctccctgccctgtgaaaa

SEQ ID NO: 132279 - RNA, 22 nt, synthetic construct
  source 1..22: mol_type = other RNA
ctctctccctgtctttctgtct

SEQ ID NO: 132280 - RNA, 22 nt, synthetic construct
  source 1..22: mol_type = other RNA
ctctctctccctgtctttctgt

SEQ ID NO: 132281 - RNA, 22 nt, synthetic construct
  source 1..22: mol_type = other RNA
ctctctctctccctgtctttct

SEQ ID NO: 132282 - RNA, 22 nt, synthetic construct
  source 1..22: mol_type = other RNA
ctctctctgcctcggcacagct

SEQ ID NO: 132283 - RNA, 22 nt, synthetic construct
  source 1..22: mol_type = other RNA
ctctctctgcttcactaacttt

SEQ ID NO: 132284 - RNA, 22 nt, synthetic construct
  source 1..22: mol_type = other RNA
ctctctctttctggggatgctg

SEQ ID NO: 132285 - RNA, 22 nt, synthetic construct
  source 1..22: mol_type = other RNA
ctctctgaaattagctaagtat

SEQ ID NO: 132286 - RNA, 22 nt, synthetic construct
  source 1..22: mol_type = other RNA
ctctctgatggaacggcttaac

SEQ ID NO: 132287 - RNA, 22 nt, synthetic construct
  source 1..22: mol_type = other RNA
ctctctgcctcaaaatcaacat

SEQ ID NO: 132288 - RNA, 22 nt, synthetic construct
  source 1..22: mol_type = other RNA
ctctctgcctcggcacagctct

SEQ ID NO: 132289 - RNA, 22 nt, synthetic construct
  source 1..22: mol_type = other RNA
ctctctgcttcactaactttaa

SEQ ID NO: 132290 - RNA, 22 nt, synthetic construct
  source 1..22: mol_type = other RNA
ctctctggctgcaattgcgcag

SEQ ID NO: 132291 - RNA, 22 nt, synthetic construct
  source 1..22: mol_type = other RNA
ctctctgggcttcactttcgtc

SEQ ID NO: 132292 - RNA, 22 nt, synthetic construct
  source 1..22: mol_type = other RNA
ctctcttaaatccgagacaagt

SEQ ID NO: 132293 - RNA, 22 nt, synthetic construct
  source 1..22: mol_type = other RNA
ctctcttcaccaactgaagcgg

SEQ ID NO: 132294 - RNA, 22 nt, synthetic construct
  source 1..22: mol_type = other RNA
ctctcttccaaataatcccgca

SEQ ID NO: 132295 - RNA, 22 nt, synthetic construct
  source 1..22: mol_type = other RNA
ctctcttcccccaaaacttagg

SEQ ID NO: 132296 - RNA, 22 nt, synthetic construct
  source 1..22: mol_type = other RNA
ctctcttgaccttagttttcac

SEQ ID NO: 132297 - RNA, 22 nt, synthetic construct
  source 1..22: mol_type = other RNA
ctctcttgcccaagctggtcct

SEQ ID NO: 132298 - RNA, 22 nt, synthetic construct
  source 1..22: mol_type = other RNA
ctctcttgcctaggctggagtg

SEQ ID NO: 132299 - RNA, 22 nt, synthetic construct
  source 1..22: mol_type = other RNA
ctctcttggaatgtgcacctcc

SEQ ID NO: 132300 - RNA, 22 nt, synthetic construct
  source 1..22: mol_type = other RNA
ctctcttgttgaggatgactgt

SEQ ID NO: 132301 - RNA, 22 nt, synthetic construct
  source 1..22: mol_type = other RNA
ctctctttaattatgagcattc

SEQ ID NO: 132302 - RNA, 22 nt, synthetic construct
  source 1..22: mol_type = other RNA
ctctctttaggaagcttccttg

SEQ ID NO: 132303 - RNA, 22 nt, synthetic construct
  source 1..22: mol_type = other RNA
ctctctttctggggatgctgtc

SEQ ID NO: 132304 - RNA, 22 nt, synthetic construct
  source 1..22: mol_type = other RNA
ctctgaaattagctaagtatgc

SEQ ID NO: 132305 - RNA, 22 nt, synthetic construct
  source 1..22: mol_type = other RNA
ctctgaagacatgctgaggccc

SEQ ID NO: 132306 - RNA, 22 nt, synthetic construct
  source 1..22: mol_type = other RNA
ctctgaagagtctatctttggg

SEQ ID NO: 132307 - RNA, 22 nt, synthetic construct
  source 1..22: mol_type = other RNA
ctctgaatcacctcaaggcaga

SEQ ID NO: 132308 - RNA, 22 nt, synthetic construct
  source 1..22: mol_type = other RNA
ctctgaatgtgaccttatttgg

SEQ ID NO: 132309 - RNA, 22 nt, synthetic construct
  source 1..22: mol_type = other RNA
ctctgaattctctggaatagaa

SEQ ID NO: 132310 - RNA, 22 nt, synthetic construct
  source 1..22: mol_type = other RNA
ctctgacatgagagctaaggga

SEQ ID NO: 132311 - RNA, 22 nt, synthetic construct
  source 1..22: mol_type = other RNA
ctctgacattggttattcatgt

SEQ ID NO: 132312 - RNA, 22 nt, synthetic construct
  source 1..22: mol_type = other RNA
ctctgaccattgtgtggacaca

SEQ ID NO: 132313 - RNA, 22 nt, synthetic construct
  source 1..22: mol_type = other RNA
ctctgacgtttaaatgagttaa

SEQ ID NO: 132314 - RNA, 22 nt, synthetic construct
  source 1..22: mol_type = other RNA
ctctgacttcattcttgacatg

SEQ ID NO: 132315 - RNA, 22 nt, synthetic construct
  source 1..22: mol_type = other RNA
ctctgactttatggtatcactt

SEQ ID NO: 132316 - RNA, 22 nt, synthetic construct
  source 1..22: mol_type = other RNA
ctctgagacaggatccagatgt

SEQ ID NO: 132317 - RNA, 22 nt, synthetic construct
  source 1..22: mol_type = other RNA
ctctgagagaagtcagactaag

SEQ ID NO: 132318 - RNA, 22 nt, synthetic construct
  source 1..22: mol_type = other RNA
ctctgataggataatgtccaga

SEQ ID NO: 132319 - RNA, 22 nt, synthetic construct
  source 1..22: mol_type = other RNA
ctctgatgctttctctagttgc

SEQ ID NO: 132320 - RNA, 22 nt, synthetic construct
  source 1..22: mol_type = other RNA
ctctgatggaacggcttaacac

SEQ ID NO: 132321 - RNA, 22 nt, synthetic construct
  source 1..22: mol_type = other RNA
ctctgcaaaaaatgtttgttta

SEQ ID NO: 132322 - RNA, 22 nt, synthetic construct
  source 1..22: mol_type = other RNA
ctctgcaaatgaggttgctttt

SEQ ID NO: 132323 - RNA, 22 nt, synthetic construct
  source 1..22: mol_type = other RNA
ctctgcaacatttgttgcatcc

SEQ ID NO: 132324 - RNA, 22 nt, synthetic construct
  source 1..22: mol_type = other RNA
ctctgcaattttaaatgtacaa

SEQ ID NO: 132325 - RNA, 22 nt, synthetic construct
  source 1..22: mol_type = other RNA
ctctgcacgtactagtcagcac

SEQ ID NO: 132326 - RNA, 22 nt, synthetic construct
  source 1..22: mol_type = other RNA
ctctgcagagactgtgcttcca

SEQ ID NO: 132327 - RNA, 22 nt, synthetic construct
  source 1..22: mol_type = other RNA
ctctgcagagcaggctccactt

SEQ ID NO: 132328 - RNA, 22 nt, synthetic construct
  source 1..22: mol_type = other RNA
ctctgcagttagcatgcctgac

SEQ ID NO: 132329 - RNA, 22 nt, synthetic construct
  source 1..22: mol_type = other RNA
ctctgccccgggcctggttagg

SEQ ID NO: 132330 - RNA, 22 nt, synthetic construct
  source 1..22: mol_type = other RNA
ctctgccctcattgaagctact

SEQ ID NO: 132331 - RNA, 22 nt, synthetic construct
  source 1..22: mol_type = other RNA
ctctgcctcaaaatcaacattg

SEQ ID NO: 132332 - RNA, 22 nt, synthetic construct
  source 1..22: mol_type = other RNA
ctctgcctcagttgacatcctt

SEQ ID NO: 132333 - RNA, 22 nt, synthetic construct
  source 1..22: mol_type = other RNA
ctctgcctcggcacagctctca

SEQ ID NO: 132334 - RNA, 22 nt, synthetic construct
  source 1..22: mol_type = other RNA
ctctgcggcaggcattgtgctc

SEQ ID NO: 132335 - RNA, 22 nt, synthetic construct
  source 1..22: mol_type = other RNA
ctctgcggcggctgaggcagcc

SEQ ID NO: 132336 - RNA, 22 nt, synthetic construct
  source 1..22: mol_type = other RNA
ctctgctcaaaggggcattccg

SEQ ID NO: 132337 - RNA, 22 nt, synthetic construct
  source 1..22: mol_type = other RNA
ctctgctcaccgcaacatctgc

SEQ ID NO: 132338 - RNA, 22 nt, synthetic construct
  source 1..22: mol_type = other RNA
ctctgctcactgcaacctttgt

SEQ ID NO: 132339 - RNA, 22 nt, synthetic construct
  source 1..22: mol_type = other RNA
ctctgctctcaagtaattgttt

SEQ ID NO: 132340 - RNA, 22 nt, synthetic construct
  source 1..22: mol_type = other RNA
ctctgctgctgaaaaagatact

SEQ ID NO: 132341 - RNA, 22 nt, synthetic construct
  source 1..22: mol_type = other RNA
ctctgcttcactaactttaaat

SEQ ID NO: 132342 - RNA, 22 nt, synthetic construct
  source 1..22: mol_type = other RNA
ctctgctttttcttggtggtaa

SEQ ID NO: 132343 - RNA, 22 nt, synthetic construct
  source 1..22: mol_type = other RNA
ctctggaaaggacttgatctaa

SEQ ID NO: 132344 - RNA, 22 nt, synthetic construct
  source 1..22: mol_type = other RNA
ctctggaaggctaagcatgtaa

SEQ ID NO: 132345 - RNA, 22 nt, synthetic construct
  source 1..22: mol_type = other RNA
ctctggaatagaagagcagtgt

SEQ ID NO: 132346 - RNA, 22 nt, synthetic construct
  source 1..22: mol_type = other RNA
ctctggaatgcccatcctctat

SEQ ID NO: 132347 - RNA, 22 nt, synthetic construct
  source 1..22: mol_type = other RNA
ctctggacattatcctatcaga

SEQ ID NO: 132348 - RNA, 22 nt, synthetic construct
  source 1..22: mol_type = other RNA
ctctggactcagggtcacttcc

SEQ ID NO: 132349 - RNA, 22 nt, synthetic construct
  source 1..22: mol_type = other RNA
ctctggagcaagcatgagtatc

SEQ ID NO: 132350 - RNA, 22 nt, synthetic construct
  source 1..22: mol_type = other RNA
ctctggcaggtcacctagcctc

SEQ ID NO: 132351 - RNA, 22 nt, synthetic construct
  source 1..22: mol_type = other RNA
ctctggccctccatttccctgc

SEQ ID NO: 132352 - RNA, 22 nt, synthetic construct
  source 1..22: mol_type = other RNA
ctctggcctggacaacagtgtg

SEQ ID NO: 132353 - RNA, 22 nt, synthetic construct
  source 1..22: mol_type = other RNA
ctctggccttctatatttttac

SEQ ID NO: 132354 - RNA, 22 nt, synthetic construct
  source 1..22: mol_type = other RNA
ctctggctcagaaacaacaaca

SEQ ID NO: 132355 - RNA, 22 nt, synthetic construct
  source 1..22: mol_type = other RNA
ctctggctgacctggtactcta

SEQ ID NO: 132356 - RNA, 22 nt, synthetic construct
  source 1..22: mol_type = other RNA
ctctggctgcaattgcgcagaa

SEQ ID NO: 132357 - RNA, 22 nt, synthetic construct
  source 1..22: mol_type = other RNA
ctctgggatgctcagtttcaaa

SEQ ID NO: 132358 - RNA, 22 nt, synthetic construct
  source 1..22: mol_type = other RNA
ctctgggctcactgcaacttcc

SEQ ID NO: 132359 - RNA, 22 nt, synthetic construct
  source 1..22: mol_type = other RNA
ctctgggcttcactttcgtcat

SEQ ID NO: 132360 - RNA, 22 nt, synthetic construct
  source 1..22: mol_type = other RNA
ctctggggttagggcctagaaa

SEQ ID NO: 132361 - RNA, 22 nt, synthetic construct
  source 1..22: mol_type = other RNA
ctctgggtcagaatcgtgatag

SEQ ID NO: 132362 - RNA, 22 nt, synthetic construct
  source 1..22: mol_type = other RNA
ctctgggtgcgttgaccgcttt

SEQ ID NO: 132363 - RNA, 22 nt, synthetic construct
  source 1..22: mol_type = other RNA
ctctggtattctgaactttcaa

SEQ ID NO: 132364 - RNA, 22 nt, synthetic construct
  source 1..22: mol_type = other RNA
ctctggtattttaagattctct

SEQ ID NO: 132365 - RNA, 22 nt, synthetic construct
  source 1..22: mol_type = other RNA
ctctggttttaaagaaattaga

SEQ ID NO: 132366 - RNA, 22 nt, synthetic construct
  source 1..22: mol_type = other RNA
ctctgtagataaacgttaacta

SEQ ID NO: 132367 - RNA, 22 nt, synthetic construct
  source 1..22: mol_type = other RNA
ctctgtcaccaggctggaatgc

SEQ ID NO: 132368 - RNA, 22 nt, synthetic construct
  source 1..22: mol_type = other RNA
ctctgtcacccacgtggagtgc

SEQ ID NO: 132369 - RNA, 22 nt, synthetic construct
  source 1..22: mol_type = other RNA
ctctgtcacccttgtaatcaag

SEQ ID NO: 132370 - RNA, 22 nt, synthetic construct
  source 1..22: mol_type = other RNA
ctctgtcatggtgtgtctgcgc

SEQ ID NO: 132371 - RNA, 22 nt, synthetic construct
  source 1..22: mol_type = other RNA
ctctgtcctgtcagtgtggttc

SEQ ID NO: 132372 - RNA, 22 nt, synthetic construct
  source 1..22: mol_type = other RNA
ctctgtcgcccaggcggaatgc

SEQ ID NO: 132373 - RNA, 22 nt, synthetic construct
  source 1..22: mol_type = other RNA
ctctgtctctgttgcccagtct

SEQ ID NO: 132374 - RNA, 22 nt, synthetic construct
  source 1..22: mol_type = other RNA
ctctgtcttgatgatagaatac

SEQ ID NO: 132375 - RNA, 22 nt, synthetic construct
  source 1..22: mol_type = other RNA
ctctgtgctagccttcttggag

SEQ ID NO: 132376 - RNA, 22 nt, synthetic construct
  source 1..22: mol_type = other RNA
ctctgtgctgagatggtcagta

SEQ ID NO: 132377 - RNA, 22 nt, synthetic construct
  source 1..22: mol_type = other RNA
ctctgtgcttgtgcttttaata

SEQ ID NO: 132378 - RNA, 22 nt, synthetic construct
  source 1..22: mol_type = other RNA
ctctgtggaccatgttttagga

SEQ ID NO: 132379 - RNA, 22 nt, synthetic construct
  source 1..22: mol_type = other RNA
ctctgtggagtcctgtcagttt

SEQ ID NO: 132380 - RNA, 22 nt, synthetic construct
  source 1..22: mol_type = other RNA
ctctgtggtttcttgaatctct

SEQ ID NO: 132381 - RNA, 22 nt, synthetic construct
  source 1..22: mol_type = other RNA
ctctgtgtgcatgcatgtctgt

SEQ ID NO: 132382 - RNA, 22 nt, synthetic construct
  source 1..22: mol_type = other RNA
ctctgtgtggtttgccttttca

SEQ ID NO: 132383 - RNA, 22 nt, synthetic construct
  source 1..22: mol_type = other RNA
ctctgttacagctcttctcagt

SEQ ID NO: 132384 - RNA, 22 nt, synthetic construct
  source 1..22: mol_type = other RNA
ctctgttctgttccatcggtct

SEQ ID NO: 132385 - RNA, 22 nt, synthetic construct
  source 1..22: mol_type = other RNA
ctctgttgcccagactggagtt

SEQ ID NO: 132386 - RNA, 22 nt, synthetic construct
  source 1..22: mol_type = other RNA
ctctgtttccttaccagtgctt

SEQ ID NO: 132387 - RNA, 22 nt, synthetic construct
  source 1..22: mol_type = other RNA
ctcttaaaaggagatatacagg

SEQ ID NO: 132388 - RNA, 22 nt, synthetic construct
  source 1..22: mol_type = other RNA
ctcttaaagtttcaaactgtgg

SEQ ID NO: 132389 - RNA, 22 nt, synthetic construct
  source 1..22: mol_type = other RNA
ctcttaaatccgagacaagttc

SEQ ID NO: 132390 - RNA, 22 nt, synthetic construct
  source 1..22: mol_type = other RNA
ctcttaagaccacaaggattaa

SEQ ID NO: 132391 - RNA, 22 nt, synthetic construct
  source 1..22: mol_type = other RNA
ctcttaagcttaggtctttgat

SEQ ID NO: 132392 - RNA, 22 nt, synthetic construct
  source 1..22: mol_type = other RNA
ctcttaataactgcctaagtaa

SEQ ID NO: 132393 - RNA, 22 nt, synthetic construct
  source 1..22: mol_type = other RNA
ctcttaatattgaaacgatgca

SEQ ID NO: 132394 - RNA, 22 nt, synthetic construct
  source 1..22: mol_type = other RNA
ctcttacacctgtttaaaaaga

SEQ ID NO: 132395 - RNA, 22 nt, synthetic construct
  source 1..22: mol_type = other RNA
ctcttaccaaggctggagtgca

SEQ ID NO: 132396 - RNA, 22 nt, synthetic construct
  source 1..22: mol_type = other RNA
ctcttagacctcctagattgac

SEQ ID NO: 132397 - RNA, 22 nt, synthetic construct
  source 1..22: mol_type = other RNA
ctcttagcttagaagaagactt

SEQ ID NO: 132398 - RNA, 22 nt, synthetic construct
  source 1..22: mol_type = other RNA
ctcttagtgatgtcttttgaag

SEQ ID NO: 132399 - RNA, 22 nt, synthetic construct
  source 1..22: mol_type = other RNA
ctcttatactagtagaaagcag

SEQ ID NO: 132400 - RNA, 22 nt, synthetic construct
  source 1..22: mol_type = other RNA
ctcttatatcctaaacacttag

SEQ ID NO: 132401 - RNA, 22 nt, synthetic construct
  source 1..22: mol_type = other RNA
ctcttatggctataaccacgag

SEQ ID NO: 132402 - RNA, 22 nt, synthetic construct
  source 1..22: mol_type = other RNA
ctcttcaagcattgggagcttt

SEQ ID NO: 132403 - RNA, 22 nt, synthetic construct
  source 1..22: mol_type = other RNA
ctcttcaatattttggaagact

SEQ ID NO: 132404 - RNA, 22 nt, synthetic construct
  source 1..22: mol_type = other RNA
ctcttcaccaactgaagcgggg

SEQ ID NO: 132405 - RNA, 22 nt, synthetic construct
  source 1..22: mol_type = other RNA
ctcttcagaagaggataagggg

SEQ ID NO: 132406 - RNA, 22 nt, synthetic construct
  source 1..22: mol_type = other RNA
ctcttcagaggtctgttactcc

SEQ ID NO: 132407 - RNA, 22 nt, synthetic construct
  source 1..22: mol_type = other RNA
ctcttccaaataatcccgcacc

SEQ ID NO: 132408 - RNA, 22 nt, synthetic construct
  source 1..22: mol_type = other RNA
ctcttcccccaaaacttaggag

SEQ ID NO: 132409 - RNA, 22 nt, synthetic construct
  source 1..22: mol_type = other RNA
ctcttcccttaacctttttctt

SEQ ID NO: 132410 - RNA, 22 nt, synthetic construct
  source 1..22: mol_type = other RNA
ctcttcccttgtgcacctcggg

SEQ ID NO: 132411 - RNA, 22 nt, synthetic construct
  source 1..22: mol_type = other RNA
ctcttcctcatccctcatatca

SEQ ID NO: 132412 - RNA, 22 nt, synthetic construct
  source 1..22: mol_type = other RNA
ctcttcctcctctggacattat

SEQ ID NO: 132413 - RNA, 22 nt, synthetic construct
  source 1..22: mol_type = other RNA
ctcttcctgtatatctcctttt

SEQ ID NO: 132414 - RNA, 22 nt, synthetic construct
  source 1..22: mol_type = other RNA
ctcttcctgttgctttaacctc

SEQ ID NO: 132415 - RNA, 22 nt, synthetic construct
  source 1..22: mol_type = other RNA
ctcttccttatccgataaaggg

SEQ ID NO: 132416 - RNA, 22 nt, synthetic construct
  source 1..22: mol_type = other RNA
ctcttcgagggggctgagtatg

SEQ ID NO: 132417 - RNA, 22 nt, synthetic construct
  source 1..22: mol_type = other RNA
ctcttcgctcttttaaaaatta

SEQ ID NO: 132418 - RNA, 22 nt, synthetic construct
  source 1..22: mol_type = other RNA
ctcttcgggtgtcagaattcca

SEQ ID NO: 132419 - RNA, 22 nt, synthetic construct
  source 1..22: mol_type = other RNA
ctcttctactcactgtactact

SEQ ID NO: 132420 - RNA, 22 nt, synthetic construct
  source 1..22: mol_type = other RNA
ctcttctattccagagaattca

SEQ ID NO: 132421 - RNA, 22 nt, synthetic construct
  source 1..22: mol_type = other RNA
ctcttctcagttgcagcatgct

SEQ ID NO: 132422 - RNA, 22 nt, synthetic construct
  source 1..22: mol_type = other RNA
ctcttctccaaggaaagtgtgc

SEQ ID NO: 132423 - RNA, 22 nt, synthetic construct
  source 1..22: mol_type = other RNA
ctcttctctcctttgaggtaag

SEQ ID NO: 132424 - RNA, 22 nt, synthetic construct
  source 1..22: mol_type = other RNA
ctcttctgaagaggctttctgt

SEQ ID NO: 132425 - RNA, 22 nt, synthetic construct
  source 1..22: mol_type = other RNA
ctcttctgatcacagaagtgtt

SEQ ID NO: 132426 - RNA, 22 nt, synthetic construct
  source 1..22: mol_type = other RNA
ctcttctgcaagttgctatcca

SEQ ID NO: 132427 - RNA, 22 nt, synthetic construct
  source 1..22: mol_type = other RNA
ctcttctggatagcattatccc

SEQ ID NO: 132428 - RNA, 22 nt, synthetic construct
  source 1..22: mol_type = other RNA
ctcttgaagtcagttacagcat

SEQ ID NO: 132429 - RNA, 22 nt, synthetic construct
  source 1..22: mol_type = other RNA
ctcttgaccttagttttcactt

SEQ ID NO: 132430 - RNA, 22 nt, synthetic construct
  source 1..22: mol_type = other RNA
ctcttgaccttgtgcatgtgca

SEQ ID NO: 132431 - RNA, 22 nt, synthetic construct
  source 1..22: mol_type = other RNA
ctcttgagttaggaatttacat

SEQ ID NO: 132432 - RNA, 22 nt, synthetic construct
  source 1..22: mol_type = other RNA
ctcttgcattagagccccaaga

SEQ ID NO: 132433 - RNA, 22 nt, synthetic construct
  source 1..22: mol_type = other RNA
ctcttgcccaagctggtcctga

SEQ ID NO: 132434 - RNA, 22 nt, synthetic construct
  source 1..22: mol_type = other RNA
ctcttgcctaggctggagtgca

SEQ ID NO: 132435 - RNA, 22 nt, synthetic construct
  source 1..22: mol_type = other RNA
ctcttgcggtcttttagccaac

SEQ ID NO: 132436 - RNA, 22 nt, synthetic construct
  source 1..22: mol_type = other RNA
ctcttggaatgtgcacctccag

SEQ ID NO: 132437 - RNA, 22 nt, synthetic construct
  source 1..22: mol_type = other RNA
ctcttggccattttcttttaaa

SEQ ID NO: 132438 - RNA, 22 nt, synthetic construct
  source 1..22: mol_type = other RNA
ctcttggcttttggcagcgtaa

SEQ ID NO: 132439 - RNA, 22 nt, synthetic construct
  source 1..22: mol_type = other RNA
ctcttggtctttctcccaggtc

SEQ ID NO: 132440 - RNA, 22 nt, synthetic construct
  source 1..22: mol_type = other RNA
ctcttggtttcttcaagatact

SEQ ID NO: 132441 - RNA, 22 nt, synthetic construct
  source 1..22: mol_type = other RNA
ctcttgtagtatttttgcaact

SEQ ID NO: 132442 - RNA, 22 nt, synthetic construct
  source 1..22: mol_type = other RNA
ctcttgtcccggcatgcctctc

SEQ ID NO: 132443 - RNA, 22 nt, synthetic construct
  source 1..22: mol_type = other RNA
ctcttgttcaaaaacctttttt

SEQ ID NO: 132444 - RNA, 22 nt, synthetic construct
  source 1..22: mol_type = other RNA
ctcttgttgaggatgactgtcc

SEQ ID NO: 132445 - RNA, 22 nt, synthetic construct
  source 1..22: mol_type = other RNA
ctctttaaagctgaactccttt

SEQ ID NO: 132446 - RNA, 22 nt, synthetic construct
  source 1..22: mol_type = other RNA
ctctttaattatgagcattccc

SEQ ID NO: 132447 - RNA, 22 nt, synthetic construct
  source 1..22: mol_type = other RNA
ctctttaggaagcttccttgat

SEQ ID NO: 132448 - RNA, 22 nt, synthetic construct
  source 1..22: mol_type = other RNA
ctctttagggaagatagtactg

SEQ ID NO: 132449 - RNA, 22 nt, synthetic construct
  source 1..22: mol_type = other RNA
ctctttatctccacatttctac

SEQ ID NO: 132450 - RNA, 22 nt, synthetic construct
  source 1..22: mol_type = other RNA
ctctttcagccatcccagctac

SEQ ID NO: 132451 - RNA, 22 nt, synthetic construct
  source 1..22: mol_type = other RNA
ctctttcatatctgattttgtg

SEQ ID NO: 132452 - RNA, 22 nt, synthetic construct
  source 1..22: mol_type = other RNA
ctctttccactctctggctgca

SEQ ID NO: 132453 - RNA, 22 nt, synthetic construct
  source 1..22: mol_type = other RNA
ctctttctcaacttcctgtttt

SEQ ID NO: 132454 - RNA, 22 nt, synthetic construct
  source 1..22: mol_type = other RNA
ctctttctgaaattctcattag

SEQ ID NO: 132455 - RNA, 22 nt, synthetic construct
  source 1..22: mol_type = other RNA
ctctttctggggatgctgtcta

SEQ ID NO: 132456 - RNA, 22 nt, synthetic construct
  source 1..22: mol_type = other RNA
ctctttgaaaggaatccggctt

SEQ ID NO: 132457 - RNA, 22 nt, synthetic construct
  source 1..22: mol_type = other RNA
ctctttgctaataagtgagttt

SEQ ID NO: 132458 - RNA, 22 nt, synthetic construct
  source 1..22: mol_type = other RNA
ctctttgggaggctgaggcgga

SEQ ID NO: 132459 - RNA, 22 nt, synthetic construct
  source 1..22: mol_type = other RNA
ctctttgtttatccttgcacca

SEQ ID NO: 132460 - RNA, 22 nt, synthetic construct
  source 1..22: mol_type = other RNA
ctcttttaaaaattacaactgg

SEQ ID NO: 132461 - RNA, 22 nt, synthetic construct
  source 1..22: mol_type = other RNA
ctcttttaaacccatttcatgc

SEQ ID NO: 132462 - RNA, 22 nt, synthetic construct
  source 1..22: mol_type = other RNA
ctcttttaaggtttagaaaaca

SEQ ID NO: 132463 - RNA, 22 nt, synthetic construct
  source 1..22: mol_type = other RNA
ctcttttcatcactcactggcc

SEQ ID NO: 132464 - RNA, 22 nt, synthetic construct
  source 1..22: mol_type = other RNA
ctcttttcctcgttttcaacaa

SEQ ID NO: 132465 - RNA, 22 nt, synthetic construct
  source 1..22: mol_type = other RNA
ctcttttcctttaacgtatctg

SEQ ID NO: 132466 - RNA, 22 nt, synthetic construct
  source 1..22: mol_type = other RNA
ctctttttgacagatgagactc

SEQ ID NO: 132467 - RNA, 22 nt, synthetic construct
  source 1..22: mol_type = other RNA
ctctttttgtaatatacttgtc

SEQ ID NO: 132468 - RNA, 22 nt, synthetic construct
  source 1..22: mol_type = other RNA
ctgaaaaacacctcagttaaac

SEQ ID NO: 132469 - RNA, 22 nt, synthetic construct
  source 1..22: mol_type = other RNA
ctgaaaaacggaggttgcagta

SEQ ID NO: 132470 - RNA, 22 nt, synthetic construct
  source 1..22: mol_type = other RNA
ctgaaaaagatactcttaaagt

SEQ ID NO: 132471 - RNA, 22 nt, synthetic construct
  source 1..22: mol_type = other RNA
ctgaaaaatgagaaacctaaga

SEQ ID NO: 132472 - RNA, 22 nt, synthetic construct
  source 1..22: mol_type = other RNA
ctgaaaaatggttttatggtaa

SEQ ID NO: 132473 - RNA, 22 nt, synthetic construct
  source 1..22: mol_type = other RNA
ctgaaaattccttcccctttct

SEQ ID NO: 132474 - RNA, 22 nt, synthetic construct
  source 1..22: mol_type = other RNA
ctgaaacaatcgcaatccaaaa

SEQ ID NO: 132475 - RNA, 22 nt, synthetic construct
  source 1..22: mol_type = other RNA
ctgaaaccagtgctctcccccg

SEQ ID NO: 132476 - RNA, 22 nt, synthetic construct
  source 1..22: mol_type = other RNA
ctgaaaccagtgggtcagctag

SEQ ID NO: 132477 - RNA, 22 nt, synthetic construct
  source 1..22: mol_type = other RNA
ctgaaaccccgcatactgtgca

SEQ ID NO: 132478 - RNA, 22 nt, synthetic construct
  source 1..22: mol_type = other RNA
ctgaaaccctcacgaaagcggt

SEQ ID NO: 132479 - RNA, 22 nt, synthetic construct
  source 1..22: mol_type = other RNA
ctgaaacgaccttgctcattca

SEQ ID NO: 132480 - RNA, 22 nt, synthetic construct
  source 1..22: mol_type = other RNA
ctgaaagacagacctctattaa

SEQ ID NO: 132481 - RNA, 22 nt, synthetic construct
  source 1..22: mol_type = other RNA
ctgaaagagaaagaagtaattt

SEQ ID NO: 132482 - RNA, 22 nt, synthetic construct
  source 1..22: mol_type = other RNA
ctgaaagcagggactcccatat

SEQ ID NO: 132483 - RNA, 22 nt, synthetic construct
  source 1..22: mol_type = other RNA
ctgaaagctagaagacctcaaa

SEQ ID NO: 132484 - RNA, 22 nt, synthetic construct
  source 1..22: mol_type = other RNA
ctgaaagcttctgagcagtgtt

SEQ ID NO: 132485 - RNA, 22 nt, synthetic construct
  source 1..22: mol_type = other RNA
ctgaaaggaaatgagtgtatgc

SEQ ID NO: 132486 - RNA, 22 nt, synthetic construct
  source 1..22: mol_type = other RNA
ctgaaaggcatgaaattcttgg

SEQ ID NO: 132487 - RNA, 22 nt, synthetic construct
  source 1..22: mol_type = other RNA
ctgaaagtaaagatagcccctt

SEQ ID NO: 132488 - RNA, 22 nt, synthetic construct
  source 1..22: mol_type = other RNA
ctgaaataatttggttatgcga

SEQ ID NO: 132489 - RNA, 22 nt, synthetic construct
  source 1..22: mol_type = other RNA
ctgaaatcctagccccaaatac

SEQ ID NO: 132490 - RNA, 22 nt, synthetic construct
  source 1..22: mol_type = other RNA
ctgaaatcgggagtaacagacc

SEQ ID NO: 132491 - RNA, 22 nt, synthetic construct
  source 1..22: mol_type = other RNA
ctgaaatctgatttgtttagta

SEQ ID NO: 132492 - RNA, 22 nt, synthetic construct
  source 1..22: mol_type = other RNA
ctgaaatgaaccaaacttggtt

SEQ ID NO: 132493 - RNA, 22 nt, synthetic construct
  source 1..22: mol_type = other RNA
ctgaaatgctgtaactgacttc

SEQ ID NO: 132494 - RNA, 22 nt, synthetic construct
  source 1..22: mol_type = other RNA
ctgaaatggcttaaggaaataa

SEQ ID NO: 132495 - RNA, 22 nt, synthetic construct
  source 1..22: mol_type = other RNA
ctgaaattagctaagtatgcag

SEQ ID NO: 132496 - RNA, 22 nt, synthetic construct
  source 1..22: mol_type = other RNA
ctgaaattctcaaatgaacagg

SEQ ID NO: 132497 - RNA, 22 nt, synthetic construct
  source 1..22: mol_type = other RNA
ctgaaattctcattagttatct

SEQ ID NO: 132498 - RNA, 22 nt, synthetic construct
  source 1..22: mol_type = other RNA
ctgaaattgacttcactagatc

SEQ ID NO: 132499 - RNA, 22 nt, synthetic construct
  source 1..22: mol_type = other RNA
ctgaaattgtcagaaaagatca

SEQ ID NO: 132500 - RNA, 22 nt, synthetic construct
  source 1..22: mol_type = other RNA
ctgaacaaaatttttgcaaacc

SEQ ID NO: 132501 - RNA, 22 nt, synthetic construct
  source 1..22: mol_type = other RNA
ctgaacaacgctgtggctaaca

SEQ ID NO: 132502 - RNA, 22 nt, synthetic construct
  source 1..22: mol_type = other RNA
ctgaacaatattccattttatg

SEQ ID NO: 132503 - RNA, 22 nt, synthetic construct
  source 1..22: mol_type = other RNA
ctgaacatgtatgtttctcatt

SEQ ID NO: 132504 - RNA, 22 nt, synthetic construct
  source 1..22: mol_type = other RNA
ctgaacatttatacagttggaa

SEQ ID NO: 132505 - RNA, 22 nt, synthetic construct
  source 1..22: mol_type = other RNA
ctgaacattttagctggggcag

SEQ ID NO: 132506 - RNA, 22 nt, synthetic construct
  source 1..22: mol_type = other RNA
ctgaacccaggaggcaaaggtt

SEQ ID NO: 132507 - RNA, 22 nt, synthetic construct
  source 1..22: mol_type = other RNA
ctgaacgtctttaaatttcaaa

SEQ ID NO: 132508 - RNA, 22 nt, synthetic construct
  source 1..22: mol_type = other RNA
ctgaactacagtgtttagggac

SEQ ID NO: 132509 - RNA, 22 nt, synthetic construct
  source 1..22: mol_type = other RNA
ctgaactcaaaagtgaatcact

SEQ ID NO: 132510 - RNA, 22 nt, synthetic construct
  source 1..22: mol_type = other RNA
ctgaactcaaaatggatcaaag

SEQ ID NO: 132511 - RNA, 22 nt, synthetic construct
  source 1..22: mol_type = other RNA
ctgaactcctttcttaccctca

SEQ ID NO: 132512 - RNA, 22 nt, synthetic construct
  source 1..22: mol_type = other RNA
ctgaactcgtggcctcaagcag

SEQ ID NO: 132513 - RNA, 22 nt, synthetic construct
  source 1..22: mol_type = other RNA
ctgaactctgtggagtcctgtc

SEQ ID NO: 132514 - RNA, 22 nt, synthetic construct
  source 1..22: mol_type = other RNA
ctgaactgctgacagattaaat

SEQ ID NO: 132515 - RNA, 22 nt, synthetic construct
  source 1..22: mol_type = other RNA
ctgaacttgtcacaaaatgtgg

SEQ ID NO: 132516 - RNA, 22 nt, synthetic construct
  source 1..22: mol_type = other RNA
ctgaactttcaacctaacatgt

SEQ ID NO: 132517 - RNA, 22 nt, synthetic construct
  source 1..22: mol_type = other RNA
ctgaactttcgaagtgggaagc

SEQ ID NO: 132518 - RNA, 22 nt, synthetic construct
  source 1..22: mol_type = other RNA
ctgaagaaattatctgtgggtt

SEQ ID NO: 132519 - RNA, 22 nt, synthetic construct
  source 1..22: mol_type = other RNA
ctgaagaataactgtcctgaat

SEQ ID NO: 132520 - RNA, 22 nt, synthetic construct
  source 1..22: mol_type = other RNA
ctgaagacatgctgaggcccca

SEQ ID NO: 132521 - RNA, 22 nt, synthetic construct
  source 1..22: mol_type = other RNA
ctgaagactggatttgattggg

SEQ ID NO: 132522 - RNA, 22 nt, synthetic construct
  source 1..22: mol_type = other RNA
ctgaagaggctttctgtgtaat

SEQ ID NO: 132523 - RNA, 22 nt, synthetic construct
  source 1..22: mol_type = other RNA
ctgaagagtctatctttgggaa

SEQ ID NO: 132524 - RNA, 22 nt, synthetic construct
  source 1..22: mol_type = other RNA
ctgaagcaggctttttacccgg

SEQ ID NO: 132525 - RNA, 22 nt, synthetic construct
  source 1..22: mol_type = other RNA
ctgaagccagtccttgtgatct

SEQ ID NO: 132526 - RNA, 22 nt, synthetic construct
  source 1..22: mol_type = other RNA
ctgaagcggggctgccactact

SEQ ID NO: 132527 - RNA, 22 nt, synthetic construct
  source 1..22: mol_type = other RNA
ctgaaggattcctccctggaga

SEQ ID NO: 132528 - RNA, 22 nt, synthetic construct
  source 1..22: mol_type = other RNA
ctgaaggcactaacaaagggcc

SEQ ID NO: 132529 - RNA, 22 nt, synthetic construct
  source 1..22: mol_type = other RNA
ctgaaggcactgtatggttctt

SEQ ID NO: 132530 - RNA, 22 nt, synthetic construct
  source 1..22: mol_type = other RNA
ctgaaggcatagggccttctac

SEQ ID NO: 132531 - RNA, 22 nt, synthetic construct
  source 1..22: mol_type = other RNA
ctgaaggctcagcccctcatcc

SEQ ID NO: 132532 - RNA, 22 nt, synthetic construct
  source 1..22: mol_type = other RNA
ctgaagggaattttactgatct

SEQ ID NO: 132533 - RNA, 22 nt, synthetic construct
  source 1..22: mol_type = other RNA
ctgaagggaggaaaaaacagtt

SEQ ID NO: 132534 - RNA, 22 nt, synthetic construct
  source 1..22: mol_type = other RNA
ctgaaggtgcctgccatagagg

SEQ ID NO: 132535 - RNA, 22 nt, synthetic construct
  source 1..22: mol_type = other RNA
ctgaagtaataaagcaagtatg

SEQ ID NO: 132536 - RNA, 22 nt, synthetic construct
  source 1..22: mol_type = other RNA
ctgaagtacttcaaggttcaca

SEQ ID NO: 132537 - RNA, 22 nt, synthetic construct
  source 1..22: mol_type = other RNA
ctgaagtcctttcttggtctgc

SEQ ID NO: 132538 - RNA, 22 nt, synthetic construct
  source 1..22: mol_type = other RNA
ctgaagtctttggtgatcctaa

SEQ ID NO: 132539 - RNA, 22 nt, synthetic construct
  source 1..22: mol_type = other RNA
ctgaagtgttgagaggctttaa

SEQ ID NO: 132540 - RNA, 22 nt, synthetic construct
  source 1..22: mol_type = other RNA
ctgaagttctcaggggtaaagg

SEQ ID NO: 132541 - RNA, 22 nt, synthetic construct
  source 1..22: mol_type = other RNA
ctgaagtttatcagtctccaat

SEQ ID NO: 132542 - RNA, 22 nt, synthetic construct
  source 1..22: mol_type = other RNA
ctgaagtttatcgtatttatca

SEQ ID NO: 132543 - RNA, 22 nt, synthetic construct
  source 1..22: mol_type = other RNA
ctgaatacccctccctacctgg

SEQ ID NO: 132544 - RNA, 22 nt, synthetic construct
  source 1..22: mol_type = other RNA
ctgaatactattcctattgttt

SEQ ID NO: 132545 - RNA, 22 nt, synthetic construct
  source 1..22: mol_type = other RNA
ctgaatcacctcaaggcagaac

SEQ ID NO: 132546 - RNA, 22 nt, synthetic construct
  source 1..22: mol_type = other RNA
ctgaatcagacaacacattaat

SEQ ID NO: 132547 - RNA, 22 nt, synthetic construct
  source 1..22: mol_type = other RNA
ctgaatcatgaagaaatagaaa

SEQ ID NO: 132548 - RNA, 22 nt, synthetic construct
  source 1..22: mol_type = other RNA
ctgaatgactgttgcctctgtg

SEQ ID NO: 132549 - RNA, 22 nt, synthetic construct
  source 1..22: mol_type = other RNA
ctgaatgatttccctgcataca

SEQ ID NO: 132550 - RNA, 22 nt, synthetic construct
  source 1..22: mol_type = other RNA
ctgaatgtgaccttatttggaa

SEQ ID NO: 132551 - RNA, 22 nt, synthetic construct
  source 1..22: mol_type = other RNA
ctgaattaatctcttacacctg

SEQ ID NO: 132552 - RNA, 22 nt, synthetic construct
  source 1..22: mol_type = other RNA
ctgaattcccacaaaatatgaa

SEQ ID NO: 132553 - RNA, 22 nt, synthetic construct
  source 1..22: mol_type = other RNA
ctgaattctaacattatcttct

SEQ ID NO: 132554 - RNA, 22 nt, synthetic construct
  source 1..22: mol_type = other RNA
ctgaattctaatgaactcccag

SEQ ID NO: 132555 - RNA, 22 nt, synthetic construct
  source 1..22: mol_type = other RNA
ctgaattctctggaatagaaga

SEQ ID NO: 132556 - RNA, 22 nt, synthetic construct
  source 1..22: mol_type = other RNA
ctgaattgagatgtactggaag

SEQ ID NO: 132557 - RNA, 22 nt, synthetic construct
  source 1..22: mol_type = other RNA
ctgacaaagtatgagaaatgtc

SEQ ID NO: 132558 - RNA, 22 nt, synthetic construct
  source 1..22: mol_type = other RNA
ctgacaactgggagaatggcaa

SEQ ID NO: 132559 - RNA, 22 nt, synthetic construct
  source 1..22: mol_type = other RNA
ctgacaagtagtacaaaagtgc

SEQ ID NO: 132560 - RNA, 22 nt, synthetic construct
  source 1..22: mol_type = other RNA
ctgacaatagccaagacatgga

SEQ ID NO: 132561 - RNA, 22 nt, synthetic construct
  source 1..22: mol_type = other RNA
ctgacaatttcagggagaattg

SEQ ID NO: 132562 - RNA, 22 nt, synthetic construct
  source 1..22: mol_type = other RNA
ctgacaatttgccaaaatgatt

SEQ ID NO: 132563 - RNA, 22 nt, synthetic construct
  source 1..22: mol_type = other RNA
ctgacacaggctgaagggagga

SEQ ID NO: 132564 - RNA, 22 nt, synthetic construct
  source 1..22: mol_type = other RNA
ctgacacccgaagaggacgatt

SEQ ID NO: 132565 - RNA, 22 nt, synthetic construct
  source 1..22: mol_type = other RNA
ctgacacccgacccactagtga

SEQ ID NO: 132566 - RNA, 22 nt, synthetic construct
  source 1..22: mol_type = other RNA
ctgacagattaaataccacctg

SEQ ID NO: 132567 - RNA, 22 nt, synthetic construct
  source 1..22: mol_type = other RNA
ctgacagcaaataaacaaaatc

SEQ ID NO: 132568 - RNA, 22 nt, synthetic construct
  source 1..22: mol_type = other RNA
ctgacaggacagagcagtaggc

SEQ ID NO: 132569 - RNA, 22 nt, synthetic construct
  source 1..22: mol_type = other RNA
ctgacaggactccacagagttc

SEQ ID NO: 132570 - RNA, 22 nt, synthetic construct
  source 1..22: mol_type = other RNA
ctgacaggtggtatgggagatg

SEQ ID NO: 132571 - RNA, 22 nt, synthetic construct
  source 1..22: mol_type = other RNA
ctgacagtggacaaaggttcca

SEQ ID NO: 132572 - RNA, 22 nt, synthetic construct
  source 1..22: mol_type = other RNA
ctgacataactgtaaagtaatc

SEQ ID NO: 132573 - RNA, 22 nt, synthetic construct
  source 1..22: mol_type = other RNA
ctgacatactgtcacaggcttt

SEQ ID NO: 132574 - RNA, 22 nt, synthetic construct
  source 1..22: mol_type = other RNA
ctgacatatgttttgcttcgaa

SEQ ID NO: 132575 - RNA, 22 nt, synthetic construct
  source 1..22: mol_type = other RNA
ctgacatgagagctaagggaag

SEQ ID NO: 132576 - RNA, 22 nt, synthetic construct
  source 1..22: mol_type = other RNA
ctgacatgtgtaaaacatctgg

SEQ ID NO: 132577 - RNA, 22 nt, synthetic construct
  source 1..22: mol_type = other RNA
ctgacattggttattcatgttt

SEQ ID NO: 132578 - RNA, 22 nt, synthetic construct
  source 1..22: mol_type = other RNA
ctgaccaactatttcactaaat

SEQ ID NO: 132579 - RNA, 22 nt, synthetic construct
  source 1..22: mol_type = other RNA
ctgaccatctcagcacagagcc

SEQ ID NO: 132580 - RNA, 22 nt, synthetic construct
  source 1..22: mol_type = other RNA
ctgaccattgtgtggacacact

SEQ ID NO: 132581 - RNA, 22 nt, synthetic construct
  source 1..22: mol_type = other RNA
ctgacccactggtttcagtccc

SEQ ID NO: 132582 - RNA, 22 nt, synthetic construct
  source 1..22: mol_type = other RNA
ctgacccagagcctaatgtgta

SEQ ID NO: 132583 - RNA, 22 nt, synthetic construct
  source 1..22: mol_type = other RNA
ctgaccctttattcaaagatca

SEQ ID NO: 132584 - RNA, 22 nt, synthetic construct
  source 1..22: mol_type = other RNA
ctgacctaaagttttaagaaaa

SEQ ID NO: 132585 - RNA, 22 nt, synthetic construct
  source 1..22: mol_type = other RNA
ctgacctaagcttgggtaggaa

SEQ ID NO: 132586 - RNA, 22 nt, synthetic construct
  source 1..22: mol_type = other RNA
ctgacctcaagcgatccagccg

SEQ ID NO: 132587 - RNA, 22 nt, synthetic construct
  source 1..22: mol_type = other RNA
ctgacctctgcagttagcatgc

SEQ ID NO: 132588 - RNA, 22 nt, synthetic construct
  source 1..22: mol_type = other RNA
ctgacctgggagaaagaccaag

SEQ ID NO: 132589 - RNA, 22 nt, synthetic construct
  source 1..22: mol_type = other RNA
ctgacctggtactctatgatat

SEQ ID NO: 132590 - RNA, 22 nt, synthetic construct
  source 1..22: mol_type = other RNA
ctgacgtttaaatgagttaata

SEQ ID NO: 132591 - RNA, 22 nt, synthetic construct
  source 1..22: mol_type = other RNA
ctgactacacatacacagggaa

SEQ ID NO: 132592 - RNA, 22 nt, synthetic construct
  source 1..22: mol_type = other RNA
ctgactacactgaagggaattt

SEQ ID NO: 132593 - RNA, 22 nt, synthetic construct
  source 1..22: mol_type = other RNA
ctgactagtacgtgcagagcag

SEQ ID NO: 132594 - RNA, 22 nt, synthetic construct
  source 1..22: mol_type = other RNA
ctgactagtggctcatacttgc

SEQ ID NO: 132595 - RNA, 22 nt, synthetic construct
  source 1..22: mol_type = other RNA
ctgactcaatcttcttatttgt

SEQ ID NO: 132596 - RNA, 22 nt, synthetic construct
  source 1..22: mol_type = other RNA
ctgactccctttttaggtaggg

SEQ ID NO: 132597 - RNA, 22 nt, synthetic construct
  source 1..22: mol_type = other RNA
ctgactctaaagtctatgctct

SEQ ID NO: 132598 - RNA, 22 nt, synthetic construct
  source 1..22: mol_type = other RNA
ctgactctgtgcttgtgctttt

SEQ ID NO: 132599 - RNA, 22 nt, synthetic construct
  source 1..22: mol_type = other RNA
ctgactgaaggattcctccctg

SEQ ID NO: 132600 - RNA, 22 nt, synthetic construct
  source 1..22: mol_type = other RNA
ctgactggctgtgccaactctg

SEQ ID NO: 132601 - RNA, 22 nt, synthetic construct
  source 1..22: mol_type = other RNA
ctgacttacagaccttattcaa

SEQ ID NO: 132602 - RNA, 22 nt, synthetic construct
  source 1..22: mol_type = other RNA
ctgacttagagggcttcatgct

SEQ ID NO: 132603 - RNA, 22 nt, synthetic construct
  source 1..22: mol_type = other RNA
ctgacttagtgagggaggccat

SEQ ID NO: 132604 - RNA, 22 nt, synthetic construct
  source 1..22: mol_type = other RNA
ctgacttcaaactatacttcaa

SEQ ID NO: 132605 - RNA, 22 nt, synthetic construct
  source 1..22: mol_type = other RNA
ctgacttcaagaggttaaaacc

SEQ ID NO: 132606 - RNA, 22 nt, synthetic construct
  source 1..22: mol_type = other RNA
ctgacttcattcttgacatgat

SEQ ID NO: 132607 - RNA, 22 nt, synthetic construct
  source 1..22: mol_type = other RNA
ctgacttcctggctctagccca

SEQ ID NO: 132608 - RNA, 22 nt, synthetic construct
  source 1..22: mol_type = other RNA
ctgacttctctcagagggaaac

SEQ ID NO: 132609 - RNA, 22 nt, synthetic construct
  source 1..22: mol_type = other RNA
ctgactttatggtatcactttt

SEQ ID NO: 132610 - RNA, 22 nt, synthetic construct
  source 1..22: mol_type = other RNA
ctgactttcatttgtaattcat

SEQ ID NO: 132611 - RNA, 22 nt, synthetic construct
  source 1..22: mol_type = other RNA
ctgacttttaaaatatgtggaa

SEQ ID NO: 132612 - RNA, 22 nt, synthetic construct
  source 1..22: mol_type = other RNA
ctgacttttccttaaaaaaggt

SEQ ID NO: 132613 - RNA, 22 nt, synthetic construct
  source 1..22: mol_type = other RNA
ctgagaaccggaacttgagttt

SEQ ID NO: 132614 - RNA, 22 nt, synthetic construct
  source 1..22: mol_type = other RNA
ctgagaacttcagtatatattt

SEQ ID NO: 132615 - RNA, 22 nt, synthetic construct
  source 1..22: mol_type = other RNA
ctgagaagactaagcagaaatg

SEQ ID NO: 132616 - RNA, 22 nt, synthetic construct
  source 1..22: mol_type = other RNA
ctgagaagagctgtaacagagg

SEQ ID NO: 132617 - RNA, 22 nt, synthetic construct
  source 1..22: mol_type = other RNA
ctgagaaggcgaaatgtgaaca

SEQ ID NO: 132618 - RNA, 22 nt, synthetic construct
  source 1..22: mol_type = other RNA
ctgagaagtaacattacaacag

SEQ ID NO: 132619 - RNA, 22 nt, synthetic construct
  source 1..22: mol_type = other RNA
ctgagaagtcaaagcctgtgga

SEQ ID NO: 132620 - RNA, 22 nt, synthetic construct
  source 1..22: mol_type = other RNA
ctgagacaggatccagatgtag

SEQ ID NO: 132621 - RNA, 22 nt, synthetic construct
  source 1..22: mol_type = other RNA
ctgagacagtattgtgctgaaa

SEQ ID NO: 132622 - RNA, 22 nt, synthetic construct
  source 1..22: mol_type = other RNA
ctgagacatcacaatgcgtttg

SEQ ID NO: 132623 - RNA, 22 nt, synthetic construct
  source 1..22: mol_type = other RNA
ctgagaccacagacgtgcagca

SEQ ID NO: 132624 - RNA, 22 nt, synthetic construct
  source 1..22: mol_type = other RNA
ctgagaccggatgaggtggctc

SEQ ID NO: 132625 - RNA, 22 nt, synthetic construct
  source 1..22: mol_type = other RNA
ctgagacctcatcttagccggg

SEQ ID NO: 132626 - RNA, 22 nt, synthetic construct
  source 1..22: mol_type = other RNA
ctgagacttaggcaaaggaaaa

SEQ ID NO: 132627 - RNA, 22 nt, synthetic construct
  source 1..22: mol_type = other RNA
ctgagagaagtcagactaagac

SEQ ID NO: 132628 - RNA, 22 nt, synthetic construct
  source 1..22: mol_type = other RNA
ctgagagatagaaagcaccagg

SEQ ID NO: 132629 - RNA, 22 nt, synthetic construct
  source 1..22: mol_type = other RNA
ctgagagctcaggccagtgagt

SEQ ID NO: 132630 - RNA, 22 nt, synthetic construct
  source 1..22: mol_type = other RNA
ctgagagggaagtttatagcag

SEQ ID NO: 132631 - RNA, 22 nt, synthetic construct
  source 1..22: mol_type = other RNA
ctgagagtattgccaggtttgt

SEQ ID NO: 132632 - RNA, 22 nt, synthetic construct
  source 1..22: mol_type = other RNA
ctgagatacttaagtttttaac

SEQ ID NO: 132633 - RNA, 22 nt, synthetic construct
  source 1..22: mol_type = other RNA
ctgagatggtcagtactatctt

SEQ ID NO: 132634 - RNA, 22 nt, synthetic construct
  source 1..22: mol_type = other RNA
ctgagattacagatgtgagccc

SEQ ID NO: 132635 - RNA, 22 nt, synthetic construct
  source 1..22: mol_type = other RNA
ctgagattgccccattgcactc

SEQ ID NO: 132636 - RNA, 22 nt, synthetic construct
  source 1..22: mol_type = other RNA
ctgagattgtgccagtgaactc

SEQ ID NO: 132637 - RNA, 22 nt, synthetic construct
  source 1..22: mol_type = other RNA
ctgagcaactactatttcgcaa

SEQ ID NO: 132638 - RNA, 22 nt, synthetic construct
  source 1..22: mol_type = other RNA
ctgagcaaggaaggaaaggaga

SEQ ID NO: 132639 - RNA, 22 nt, synthetic construct
  source 1..22: mol_type = other RNA
ctgagcacaatgcctgccgcag

SEQ ID NO: 132640 - RNA, 22 nt, synthetic construct
  source 1..22: mol_type = other RNA
ctgagcagtgaaagtctcccta

SEQ ID NO: 132641 - RNA, 22 nt, synthetic construct
  source 1..22: mol_type = other RNA
ctgagcagtgtttcctagattc

SEQ ID NO: 132642 - RNA, 22 nt, synthetic construct
  source 1..22: mol_type = other RNA
ctgagcatcccagaggtactca

SEQ ID NO: 132643 - RNA, 22 nt, synthetic construct
  source 1..22: mol_type = other RNA
ctgagcatccccgctgcgagaa

SEQ ID NO: 132644 - RNA, 22 nt, synthetic construct
  source 1..22: mol_type = other RNA
ctgagcatttatataagttcaa

SEQ ID NO: 132645 - RNA, 22 nt, synthetic construct
  source 1..22: mol_type = other RNA
ctgagccagagtttcactctgt

SEQ ID NO: 132646 - RNA, 22 nt, synthetic construct
  source 1..22: mol_type = other RNA
ctgagccagcaaatcagaaaag

SEQ ID NO: 132647 - RNA, 22 nt, synthetic construct
  source 1..22: mol_type = other RNA
ctgagccgtcggtatgttaata

SEQ ID NO: 132648 - RNA, 22 nt, synthetic construct
  source 1..22: mol_type = other RNA
ctgagccttcagaactcttctc

SEQ ID NO: 132649 - RNA, 22 nt, synthetic construct
  source 1..22: mol_type = other RNA
ctgagctctcagtggccctgtt

SEQ ID NO: 132650 - RNA, 22 nt, synthetic construct
  source 1..22: mol_type = other RNA
ctgagctgttaatggttagact

SEQ ID NO: 132651 - RNA, 22 nt, synthetic construct
  source 1..22: mol_type = other RNA
ctgagctttccttagttcgaag

SEQ ID NO: 132652 - RNA, 22 nt, synthetic construct
  source 1..22: mol_type = other RNA
ctgaggaagctaatcaagccgc

SEQ ID NO: 132653 - RNA, 22 nt, synthetic construct
  source 1..22: mol_type = other RNA
ctgaggaaggagaatcgcttaa

SEQ ID NO: 132654 - RNA, 22 nt, synthetic construct
  source 1..22: mol_type = other RNA
ctgaggacactagcaatccagg

SEQ ID NO: 132655 - RNA, 22 nt, synthetic construct
  source 1..22: mol_type = other RNA
ctgaggagctgagaccacagac

SEQ ID NO: 132656 - RNA, 22 nt, synthetic construct
  source 1..22: mol_type = other RNA
ctgaggatataacgatagtctc

SEQ ID NO: 132657 - RNA, 22 nt, synthetic construct
  source 1..22: mol_type = other RNA
ctgaggattggagactgataaa

SEQ ID NO: 132658 - RNA, 22 nt, synthetic construct
  source 1..22: mol_type = other RNA
ctgaggcagagtagagaaggct

SEQ ID NO: 132659 - RNA, 22 nt, synthetic construct
  source 1..22: mol_type = other RNA
ctgaggcagcccgacctccagc

SEQ ID NO: 132660 - RNA, 22 nt, synthetic construct
  source 1..22: mol_type = other RNA
ctgaggcaggagaactgcctgg

SEQ ID NO: 132661 - RNA, 22 nt, synthetic construct
  source 1..22: mol_type = other RNA
ctgaggcaggagcatagcttga

SEQ ID NO: 132662 - RNA, 22 nt, synthetic construct
  source 1..22: mol_type = other RNA
ctgaggcaggaggcacctgaac

SEQ ID NO: 132663 - RNA, 22 nt, synthetic construct
  source 1..22: mol_type = other RNA
ctgaggcaggtggatatctgag

SEQ ID NO: 132664 - RNA, 22 nt, synthetic construct
  source 1..22: mol_type = other RNA
ctgaggccccaggggacataga

SEQ ID NO: 132665 - RNA, 22 nt, synthetic construct
  source 1..22: mol_type = other RNA
ctgaggccggaggattgcttga

SEQ ID NO: 132666 - RNA, 22 nt, synthetic construct
  source 1..22: mol_type = other RNA
ctgaggcctcctgccttcctga

SEQ ID NO: 132667 - RNA, 22 nt, synthetic construct
  source 1..22: mol_type = other RNA
ctgaggcggaaggattgcctaa

SEQ ID NO: 132668 - RNA, 22 nt, synthetic construct
  source 1..22: mol_type = other RNA
ctgaggcggctggatcgcttga

SEQ ID NO: 132669 - RNA, 22 nt, synthetic construct
  source 1..22: mol_type = other RNA
ctgaggctggggaattgcatga

SEQ ID NO: 132670 - RNA, 22 nt, synthetic construct
  source 1..22: mol_type = other RNA
ctgagggaaattatttccagcc

SEQ ID NO: 132671 - RNA, 22 nt, synthetic construct
  source 1..22: mol_type = other RNA
ctgagggaatttttcttaccta

SEQ ID NO: 132672 - RNA, 22 nt, synthetic construct
  source 1..22: mol_type = other RNA
ctgagggctttgtgaagggagg

SEQ ID NO: 132673 - RNA, 22 nt, synthetic construct
  source 1..22: mol_type = other RNA
ctgaggggtcttatgctggtgg

SEQ ID NO: 132674 - RNA, 22 nt, synthetic construct
  source 1..22: mol_type = other RNA
ctgagggtgagaccaccacact

SEQ ID NO: 132675 - RNA, 22 nt, synthetic construct
  source 1..22: mol_type = other RNA
ctgaggtcaagaaataaaacat

SEQ ID NO: 132676 - RNA, 22 nt, synthetic construct
  source 1..22: mol_type = other RNA
ctgaggtctcaaaatttaaagt

SEQ ID NO: 132677 - RNA, 22 nt, synthetic construct
  source 1..22: mol_type = other RNA
ctgaggtctttaaaagaaagct

SEQ ID NO: 132678 - RNA, 22 nt, synthetic construct
  source 1..22: mol_type = other RNA
ctgaggtggagttctgctcttg

SEQ ID NO: 132679 - RNA, 22 nt, synthetic construct
  source 1..22: mol_type = other RNA
ctgaggtgtttttcagccctga

SEQ ID NO: 132680 - RNA, 22 nt, synthetic construct
  source 1..22: mol_type = other RNA
ctgagtaaagggtaagaaaatt

SEQ ID NO: 132681 - RNA, 22 nt, synthetic construct
  source 1..22: mol_type = other RNA
ctgagtagcgctttaagcatcc

SEQ ID NO: 132682 - RNA, 22 nt, synthetic construct
  source 1..22: mol_type = other RNA
ctgagtagctgtgattaccggc

SEQ ID NO: 132683 - RNA, 22 nt, synthetic construct
  source 1..22: mol_type = other RNA
ctgagtatattctgtgaattgt

SEQ ID NO: 132684 - RNA, 22 nt, synthetic construct
  source 1..22: mol_type = other RNA
ctgagtatgggtctccattttg

SEQ ID NO: 132685 - RNA, 22 nt, synthetic construct
  source 1..22: mol_type = other RNA
ctgagtcaaaaccaaagaaagg

SEQ ID NO: 132686 - RNA, 22 nt, synthetic construct
  source 1..22: mol_type = other RNA
ctgagtccagaggtgagctttt

SEQ ID NO: 132687 - RNA, 22 nt, synthetic construct
  source 1..22: mol_type = other RNA
ctgagtcttctactgtgaattc

SEQ ID NO: 132688 - RNA, 22 nt, synthetic construct
  source 1..22: mol_type = other RNA
ctgagtgaatggggtaattttg

SEQ ID NO: 132689 - RNA, 22 nt, synthetic construct
  source 1..22: mol_type = other RNA
ctgagtgttacttgaaatcatt

SEQ ID NO: 132690 - RNA, 22 nt, synthetic construct
  source 1..22: mol_type = other RNA
ctgagtgttgtgtgcacctaat

SEQ ID NO: 132691 - RNA, 22 nt, synthetic construct
  source 1..22: mol_type = other RNA
ctgagtttgctctgcaaatgag

SEQ ID NO: 132692 - RNA, 22 nt, synthetic construct
  source 1..22: mol_type = other RNA
ctgataaacttcagttttgagt

SEQ ID NO: 132693 - RNA, 22 nt, synthetic construct
  source 1..22: mol_type = other RNA
ctgataaatggctttttacgat

SEQ ID NO: 132694 - RNA, 22 nt, synthetic construct
  source 1..22: mol_type = other RNA
ctgataaattattagcttgcta

SEQ ID NO: 132695 - RNA, 22 nt, synthetic construct
  source 1..22: mol_type = other RNA
ctgataagcccaacctgattag

SEQ ID NO: 132696 - RNA, 22 nt, synthetic construct
  source 1..22: mol_type = other RNA
ctgataagctcccagccaaaca

SEQ ID NO: 132697 - RNA, 22 nt, synthetic construct
  source 1..22: mol_type = other RNA
ctgataaggggctatctttact

SEQ ID NO: 132698 - RNA, 22 nt, synthetic construct
  source 1..22: mol_type = other RNA
ctgataatcacagacgcaaagg

SEQ ID NO: 132699 - RNA, 22 nt, synthetic construct
  source 1..22: mol_type = other RNA
ctgatacacttctatccagtga

SEQ ID NO: 132700 - RNA, 22 nt, synthetic construct
  source 1..22: mol_type = other RNA
ctgatagatattggcaacattt

SEQ ID NO: 132701 - RNA, 22 nt, synthetic construct
  source 1..22: mol_type = other RNA
ctgatagcgaaaggtacgacgc

SEQ ID NO: 132702 - RNA, 22 nt, synthetic construct
  source 1..22: mol_type = other RNA
ctgatagctgtggaagcacagt

SEQ ID NO: 132703 - RNA, 22 nt, synthetic construct
  source 1..22: mol_type = other RNA
ctgatagcttgacaaaaggccc

SEQ ID NO: 132704 - RNA, 22 nt, synthetic construct
  source 1..22: mol_type = other RNA
ctgataggaatatcgtcttttt

SEQ ID NO: 132705 - RNA, 22 nt, synthetic construct
  source 1..22: mol_type = other RNA
ctgataggataatgtccagagg

SEQ ID NO: 132706 - RNA, 22 nt, synthetic construct
  source 1..22: mol_type = other RNA
ctgatatcctgtaaacctggaa

SEQ ID NO: 132707 - RNA, 22 nt, synthetic construct
  source 1..22: mol_type = other RNA
ctgatatgagggatgaggaaga

SEQ ID NO: 132708 - RNA, 22 nt, synthetic construct
  source 1..22: mol_type = other RNA
ctgatatgtcgcatgaaaacag

SEQ ID NO: 132709 - RNA, 22 nt, synthetic construct
  source 1..22: mol_type = other RNA
ctgatcaaggaagcttcctaaa

SEQ ID NO: 132710 - RNA, 22 nt, synthetic construct
  source 1..22: mol_type = other RNA
ctgatcaagttgcttggcacag

SEQ ID NO: 132711 - RNA, 22 nt, synthetic construct
  source 1..22: mol_type = other RNA
ctgatcacaccctcctaccttc

SEQ ID NO: 132712 - RNA, 22 nt, synthetic construct
  source 1..22: mol_type = other RNA
ctgatcacagaagtgttttgat

SEQ ID NO: 132713 - RNA, 22 nt, synthetic construct
  source 1..22: mol_type = other RNA
ctgatcagcaccctcaaatgtc

SEQ ID NO: 132714 - RNA, 22 nt, synthetic construct
  source 1..22: mol_type = other RNA
ctgatcaggaaagaccggggac

SEQ ID NO: 132715 - RNA, 22 nt, synthetic construct
  source 1..22: mol_type = other RNA
ctgatctgctcaagttttctat

SEQ ID NO: 132716 - RNA, 22 nt, synthetic construct
  source 1..22: mol_type = other RNA
ctgatcttttctgacaatttca

SEQ ID NO: 132717 - RNA, 22 nt, synthetic construct
  source 1..22: mol_type = other RNA
ctgatgaactacacagacatga

SEQ ID NO: 132718 - RNA, 22 nt, synthetic construct
  source 1..22: mol_type = other RNA
ctgatgaagaacctgttcattt

SEQ ID NO: 132719 - RNA, 22 nt, synthetic construct
  source 1..22: mol_type = other RNA
ctgatgacagttactctaaaag

SEQ ID NO: 132720 - RNA, 22 nt, synthetic construct
  source 1..22: mol_type = other RNA
ctgatgatgatggtgatgctaa

SEQ ID NO: 132721 - RNA, 22 nt, synthetic construct
  source 1..22: mol_type = other RNA
ctgatgcacaagccttgaaaat

SEQ ID NO: 132722 - RNA, 22 nt, synthetic construct
  source 1..22: mol_type = other RNA
ctgatgctttctctagttgcac

SEQ ID NO: 132723 - RNA, 22 nt, synthetic construct
  source 1..22: mol_type = other RNA
ctgatggaacggcttaacacct

SEQ ID NO: 132724 - RNA, 22 nt, synthetic construct
  source 1..22: mol_type = other RNA
ctgatggaattctgacacccga

SEQ ID NO: 132725 - RNA, 22 nt, synthetic construct
  source 1..22: mol_type = other RNA
ctgatggacattctgcttcctt

SEQ ID NO: 132726 - RNA, 22 nt, synthetic construct
  source 1..22: mol_type = other RNA
ctgatgtaagtgggaggaggtc

SEQ ID NO: 132727 - RNA, 22 nt, synthetic construct
  source 1..22: mol_type = other RNA
ctgatgtgaggatctgttggtg

SEQ ID NO: 132728 - RNA, 22 nt, synthetic construct
  source 1..22: mol_type = other RNA
ctgatgtgtagttattattgtc

SEQ ID NO: 132729 - RNA, 22 nt, synthetic construct
  source 1..22: mol_type = other RNA
ctgatgtgtatgttacacttcc

SEQ ID NO: 132730 - RNA, 22 nt, synthetic construct
  source 1..22: mol_type = other RNA
ctgatgtgtgtctctgctctca

SEQ ID NO: 132731 - RNA, 22 nt, synthetic construct
  source 1..22: mol_type = other RNA
ctgatgtgttgaccttagtggt

SEQ ID NO: 132732 - RNA, 22 nt, synthetic construct
  source 1..22: mol_type = other RNA
ctgattaatttgaggtctaggc

SEQ ID NO: 132733 - RNA, 22 nt, synthetic construct
  source 1..22: mol_type = other RNA
ctgattagaaggattgttcatg

SEQ ID NO: 132734 - RNA, 22 nt, synthetic construct
  source 1..22: mol_type = other RNA
ctgattagaggctgcaccctcc

SEQ ID NO: 132735 - RNA, 22 nt, synthetic construct
  source 1..22: mol_type = other RNA
ctgattataaccttgaacttcc

SEQ ID NO: 132736 - RNA, 22 nt, synthetic construct
  source 1..22: mol_type = other RNA
ctgattcagtggttggaaaact

SEQ ID NO: 132737 - RNA, 22 nt, synthetic construct
  source 1..22: mol_type = other RNA
ctgattcttccactagtgggat

SEQ ID NO: 132738 - RNA, 22 nt, synthetic construct
  source 1..22: mol_type = other RNA
ctgattgagattagcgaaaggg

SEQ ID NO: 132739 - RNA, 22 nt, synthetic construct
  source 1..22: mol_type = other RNA
ctgattgagtatctggtgctgg

SEQ ID NO: 132740 - RNA, 22 nt, synthetic construct
  source 1..22: mol_type = other RNA
ctgattgcccattataaaatag

SEQ ID NO: 132741 - RNA, 22 nt, synthetic construct
  source 1..22: mol_type = other RNA
ctgatttaaagtaggttgagac

SEQ ID NO: 132742 - RNA, 22 nt, synthetic construct
  source 1..22: mol_type = other RNA
ctgatttaggccactctcatct

SEQ ID NO: 132743 - RNA, 22 nt, synthetic construct
  source 1..22: mol_type = other RNA
ctgatttatagtgtttccttcc

SEQ ID NO: 132744 - RNA, 22 nt, synthetic construct
  source 1..22: mol_type = other RNA
ctgatttcaaagttaatagcct

SEQ ID NO: 132745 - RNA, 22 nt, synthetic construct
  source 1..22: mol_type = other RNA
ctgatttgctggctcagtctgt

SEQ ID NO: 132746 - RNA, 22 nt, synthetic construct
  source 1..22: mol_type = other RNA
ctgatttgtttagtagctgtct

SEQ ID NO: 132747 - RNA, 22 nt, synthetic construct
  source 1..22: mol_type = other RNA
ctgattttaatctgtcctgaat

SEQ ID NO: 132748 - RNA, 22 nt, synthetic construct
  source 1..22: mol_type = other RNA
ctgattttctgcttctcaataa

SEQ ID NO: 132749 - RNA, 22 nt, synthetic construct
  source 1..22: mol_type = other RNA
ctgattttgtgtcttctgtttt

SEQ ID NO: 132750 - RNA, 22 nt, synthetic construct
  source 1..22: mol_type = other RNA
ctgatttttagtgactggctta

SEQ ID NO: 132751 - RNA, 22 nt, synthetic construct
  source 1..22: mol_type = other RNA
ctgcaaaactttcttcaaaatt

SEQ ID NO: 132752 - RNA, 22 nt, synthetic construct
  source 1..22: mol_type = other RNA
ctgcaaatatccaatcactggc

SEQ ID NO: 132753 - RNA, 22 nt, synthetic construct
  source 1..22: mol_type = other RNA
ctgcaaatgaggttgcttttac

SEQ ID NO: 132754 - RNA, 22 nt, synthetic construct
  source 1..22: mol_type = other RNA
ctgcaacagatctgagaagact

SEQ ID NO: 132755 - RNA, 22 nt, synthetic construct
  source 1..22: mol_type = other RNA
ctgcaacatttgttgcatcccc

SEQ ID NO: 132756 - RNA, 22 nt, synthetic construct
  source 1..22: mol_type = other RNA
ctgcaacctccgtttttcaggt

SEQ ID NO: 132757 - RNA, 22 nt, synthetic construct
  source 1..22: mol_type = other RNA
ctgcaactatcaaaacacttct

SEQ ID NO: 132758 - RNA, 22 nt, synthetic construct
  source 1..22: mol_type = other RNA
ctgcaactgagaagagctgtaa

SEQ ID NO: 132759 - RNA, 22 nt, synthetic construct
  source 1..22: mol_type = other RNA
ctgcaagcactggtaaggaaac

SEQ ID NO: 132760 - RNA, 22 nt, synthetic construct
  source 1..22: mol_type = other RNA
ctgcaagcagatctgctgtaag

SEQ ID NO: 132761 - RNA, 22 nt, synthetic construct
  source 1..22: mol_type = other RNA
ctgcaagctccgcctcctggtg

SEQ ID NO: 132762 - RNA, 22 nt, synthetic construct
  source 1..22: mol_type = other RNA
ctgcaagttgctatccagtctc

SEQ ID NO: 132763 - RNA, 22 nt, synthetic construct
  source 1..22: mol_type = other RNA
ctgcaatcacagcacttgggga

SEQ ID NO: 132764 - RNA, 22 nt, synthetic construct
  source 1..22: mol_type = other RNA
ctgcaattgcgcagaactgggg

SEQ ID NO: 132765 - RNA, 22 nt, synthetic construct
  source 1..22: mol_type = other RNA
ctgcaattggaagactatcacg

SEQ ID NO: 132766 - RNA, 22 nt, synthetic construct
  source 1..22: mol_type = other RNA
ctgcaattttaaatgtacaaca

SEQ ID NO: 132767 - RNA, 22 nt, synthetic construct
  source 1..22: mol_type = other RNA
ctgcacaaaggattgggaagat

SEQ ID NO: 132768 - RNA, 22 nt, synthetic construct
  source 1..22: mol_type = other RNA
ctgcacagtatgcggggtttca

SEQ ID NO: 132769 - RNA, 22 nt, synthetic construct
  source 1..22: mol_type = other RNA
ctgcacataaaaggatatgggc

SEQ ID NO: 132770 - RNA, 22 nt, synthetic construct
  source 1..22: mol_type = other RNA
ctgcacatgcacaaggtcaaga

SEQ ID NO: 132771 - RNA, 22 nt, synthetic construct
  source 1..22: mol_type = other RNA
ctgcaccatttattgtcaaggt

SEQ ID NO: 132772 - RNA, 22 nt, synthetic construct
  source 1..22: mol_type = other RNA
ctgcaccattttttcaccagcg

SEQ ID NO: 132773 - RNA, 22 nt, synthetic construct
  source 1..22: mol_type = other RNA
ctgcaccctcctcctcctggcc

SEQ ID NO: 132774 - RNA, 22 nt, synthetic construct
  source 1..22: mol_type = other RNA
ctgcacgtactagtcagcacac

SEQ ID NO: 132775 - RNA, 22 nt, synthetic construct
  source 1..22: mol_type = other RNA
ctgcacgtctgtggtctcagct

SEQ ID NO: 132776 - RNA, 22 nt, synthetic construct
  source 1..22: mol_type = other RNA
ctgcactaaactagtatcaacc

SEQ ID NO: 132777 - RNA, 22 nt, synthetic construct
  source 1..22: mol_type = other RNA
ctgcactcaagcaatcctccgg

SEQ ID NO: 132778 - RNA, 22 nt, synthetic construct
  source 1..22: mol_type = other RNA
ctgcactccagccttggtaaga

SEQ ID NO: 132779 - RNA, 22 nt, synthetic construct
  source 1..22: mol_type = other RNA
ctgcactctcaaaattaaattc

SEQ ID NO: 132780 - RNA, 22 nt, synthetic construct
  source 1..22: mol_type = other RNA
ctgcactctggcctggacaaca

SEQ ID NO: 132781 - RNA, 22 nt, synthetic construct
  source 1..22: mol_type = other RNA
ctgcactggctattagttaacc

SEQ ID NO: 132782 - RNA, 22 nt, synthetic construct
  source 1..22: mol_type = other RNA
ctgcagaaggagaaaccattta

SEQ ID NO: 132783 - RNA, 22 nt, synthetic construct
  source 1..22: mol_type = other RNA
ctgcagaatgacagaaaatatc

SEQ ID NO: 132784 - RNA, 22 nt, synthetic construct
  source 1..22: mol_type = other RNA
ctgcagaattactgacaatagc

SEQ ID NO: 132785 - RNA, 22 nt, synthetic construct
  source 1..22: mol_type = other RNA
ctgcagacatgcacgagaaaag

SEQ ID NO: 132786 - RNA, 22 nt, synthetic construct
  source 1..22: mol_type = other RNA
ctgcagaccaagaaaggacttc

SEQ ID NO: 132787 - RNA, 22 nt, synthetic construct
  source 1..22: mol_type = other RNA
ctgcagactcttgtcccggcat

SEQ ID NO: 132788 - RNA, 22 nt, synthetic construct
  source 1..22: mol_type = other RNA
ctgcagactgcaggtcttcaac

SEQ ID NO: 132789 - RNA, 22 nt, synthetic construct
  source 1..22: mol_type = other RNA
ctgcagagactgtgcttccaca

SEQ ID NO: 132790 - RNA, 22 nt, synthetic construct
  source 1..22: mol_type = other RNA
ctgcagagcaggctccacttgg

SEQ ID NO: 132791 - RNA, 22 nt, synthetic construct
  source 1..22: mol_type = other RNA
ctgcagaggtcaggaaggcagg

SEQ ID NO: 132792 - RNA, 22 nt, synthetic construct
  source 1..22: mol_type = other RNA
ctgcagatgaatgagcaaggtc

SEQ ID NO: 132793 - RNA, 22 nt, synthetic construct
  source 1..22: mol_type = other RNA
ctgcagcaattatttgaataag

SEQ ID NO: 132794 - RNA, 22 nt, synthetic construct
  source 1..22: mol_type = other RNA
ctgcagccagatttgatcctgg

SEQ ID NO: 132795 - RNA, 22 nt, synthetic construct
  source 1..22: mol_type = other RNA
ctgcaggagccttgctgttgta

SEQ ID NO: 132796 - RNA, 22 nt, synthetic construct
  source 1..22: mol_type = other RNA
ctgcaggcagaatgtgacctgt

SEQ ID NO: 132797 - RNA, 22 nt, synthetic construct
  source 1..22: mol_type = other RNA
ctgcaggctgaactgctgacag

SEQ ID NO: 132798 - RNA, 22 nt, synthetic construct
  source 1..22: mol_type = other RNA
ctgcagggcttctgaaggtgcc

SEQ ID NO: 132799 - RNA, 22 nt, synthetic construct
  source 1..22: mol_type = other RNA
ctgcaggtatttctaaatcaac

SEQ ID NO: 132800 - RNA, 22 nt, synthetic construct
  source 1..22: mol_type = other RNA
ctgcaggtcttcaacctcaact

SEQ ID NO: 132801 - RNA, 22 nt, synthetic construct
  source 1..22: mol_type = other RNA
ctgcaggtgttggtgcatttgg

SEQ ID NO: 132802 - RNA, 22 nt, synthetic construct
  source 1..22: mol_type = other RNA
ctgcaggttgatactagtttag

SEQ ID NO: 132803 - RNA, 22 nt, synthetic construct
  source 1..22: mol_type = other RNA
ctgcagtatgcatagatcacaa

SEQ ID NO: 132804 - RNA, 22 nt, synthetic construct
  source 1..22: mol_type = other RNA
ctgcagtctcaaactcctgcac

SEQ ID NO: 132805 - RNA, 22 nt, synthetic construct
  source 1..22: mol_type = other RNA
ctgcagtctgcaggcagaatgt

SEQ ID NO: 132806 - RNA, 22 nt, synthetic construct
  source 1..22: mol_type = other RNA
ctgcagtctgtcctcgtaaaag

SEQ ID NO: 132807 - RNA, 22 nt, synthetic construct
  source 1..22: mol_type = other RNA
ctgcagtgaacatgggaatgca

SEQ ID NO: 132808 - RNA, 22 nt, synthetic construct
  source 1..22: mol_type = other RNA
ctgcagtggcgtgtgcccaggc

SEQ ID NO: 132809 - RNA, 22 nt, synthetic construct
  source 1..22: mol_type = other RNA
ctgcagtgtccatctcccatca

SEQ ID NO: 132810 - RNA, 22 nt, synthetic construct
  source 1..22: mol_type = other RNA
ctgcagttagcatgcctgacaa

SEQ ID NO: 132811 - RNA, 22 nt, synthetic construct
  source 1..22: mol_type = other RNA
ctgcagttggattatatgttct

SEQ ID NO: 132812 - RNA, 22 nt, synthetic construct
  source 1..22: mol_type = other RNA
ctgcagtttgtgttttcactct

SEQ ID NO: 132813 - RNA, 22 nt, synthetic construct
  source 1..22: mol_type = other RNA
ctgcagtttttccactaatgtc

SEQ ID NO: 132814 - RNA, 22 nt, synthetic construct
  source 1..22: mol_type = other RNA
ctgcatacactcatttcctttc

SEQ ID NO: 132815 - RNA, 22 nt, synthetic construct
  source 1..22: mol_type = other RNA
ctgcatacttagctaatttcag

SEQ ID NO: 132816 - RNA, 22 nt, synthetic construct
  source 1..22: mol_type = other RNA
ctgcatagagatcttgtgtatc

SEQ ID NO: 132817 - RNA, 22 nt, synthetic construct
  source 1..22: mol_type = other RNA
ctgcatagtactccattatatg

SEQ ID NO: 132818 - RNA, 22 nt, synthetic construct
  source 1..22: mol_type = other RNA
ctgcatatgtttttattagcag

SEQ ID NO: 132819 - RNA, 22 nt, synthetic construct
  source 1..22: mol_type = other RNA
ctgcatattgaagccagcacct

SEQ ID NO: 132820 - RNA, 22 nt, synthetic construct
  source 1..22: mol_type = other RNA
ctgcatcatggtgggccttgca

SEQ ID NO: 132821 - RNA, 22 nt, synthetic construct
  source 1..22: mol_type = other RNA
ctgcatccaaaagggaaatatg

SEQ ID NO: 132822 - RNA, 22 nt, synthetic construct
  source 1..22: mol_type = other RNA
ctgcatcccaagggttttggta

SEQ ID NO: 132823 - RNA, 22 nt, synthetic construct
  source 1..22: mol_type = other RNA
ctgcatcttcttttacttgctt

SEQ ID NO: 132824 - RNA, 22 nt, synthetic construct
  source 1..22: mol_type = other RNA
ctgcatcttttgagggtatcat

SEQ ID NO: 132825 - RNA, 22 nt, synthetic construct
  source 1..22: mol_type = other RNA
ctgcatgattccccttatatgg

SEQ ID NO: 132826 - RNA, 22 nt, synthetic construct
  source 1..22: mol_type = other RNA
ctgcatgctaggggctgttccc

SEQ ID NO: 132827 - RNA, 22 nt, synthetic construct
  source 1..22: mol_type = other RNA
ctgcatggggagttttaggaaa

SEQ ID NO: 132828 - RNA, 22 nt, synthetic construct
  source 1..22: mol_type = other RNA
ctgcatggtgtaaaatacaaca

SEQ ID NO: 132829 - RNA, 22 nt, synthetic construct
  source 1..22: mol_type = other RNA
ctgcattcatccaggcaaaaga

SEQ ID NO: 132830 - RNA, 22 nt, synthetic construct
  source 1..22: mol_type = other RNA
ctgcattccgcctgggcgacag

SEQ ID NO: 132831 - RNA, 22 nt, synthetic construct
  source 1..22: mol_type = other RNA
ctgcattgcatttacttgtcat

SEQ ID NO: 132832 - RNA, 22 nt, synthetic construct
  source 1..22: mol_type = other RNA
ctgcattgtgcacttaaaattt

SEQ ID NO: 132833 - RNA, 22 nt, synthetic construct
  source 1..22: mol_type = other RNA
ctgcatttggtttgcaaaaatt

SEQ ID NO: 132834 - RNA, 22 nt, synthetic construct
  source 1..22: mol_type = other RNA
ctgcattttttgccaaattatt

SEQ ID NO: 132835 - RNA, 22 nt, synthetic construct
  source 1..22: mol_type = other RNA
ctgccaaaagccaagagcgagg

SEQ ID NO: 132836 - RNA, 22 nt, synthetic construct
  source 1..22: mol_type = other RNA
ctgccaaaccctacacccatcc

SEQ ID NO: 132837 - RNA, 22 nt, synthetic construct
  source 1..22: mol_type = other RNA
ctgccaagtcagcacttctgat

SEQ ID NO: 132838 - RNA, 22 nt, synthetic construct
  source 1..22: mol_type = other RNA
ctgccacactccagcatccctc

SEQ ID NO: 132839 - RNA, 22 nt, synthetic construct
  source 1..22: mol_type = other RNA
ctgccacattcaacaacatgga

SEQ ID NO: 132840 - RNA, 22 nt, synthetic construct
  source 1..22: mol_type = other RNA
ctgccactacttagcccctgct

SEQ ID NO: 132841 - RNA, 22 nt, synthetic construct
  source 1..22: mol_type = other RNA
ctgccagagttggcacagccag

SEQ ID NO: 132842 - RNA, 22 nt, synthetic construct
  source 1..22: mol_type = other RNA
ctgccagatgttctaatttctt

SEQ ID NO: 132843 - RNA, 22 nt, synthetic construct
  source 1..22: mol_type = other RNA
ctgccagcaccagatactcaat

SEQ ID NO: 132844 - RNA, 22 nt, synthetic construct
  source 1..22: mol_type = other RNA
ctgccaggacaattgaatgggg

SEQ ID NO: 132845 - RNA, 22 nt, synthetic construct
  source 1..22: mol_type = other RNA
ctgccaggtagggaggggtatt

SEQ ID NO: 132846 - RNA, 22 nt, synthetic construct
  source 1..22: mol_type = other RNA
ctgccatagagggagcatcttc

SEQ ID NO: 132847 - RNA, 22 nt, synthetic construct
  source 1..22: mol_type = other RNA
ctgccatggtgttaaatattta

SEQ ID NO: 132848 - RNA, 22 nt, synthetic construct
  source 1..22: mol_type = other RNA
ctgcccatcctatctaagccta

SEQ ID NO: 132849 - RNA, 22 nt, synthetic construct
  source 1..22: mol_type = other RNA
ctgccccagctaaaatgttcag

SEQ ID NO: 132850 - RNA, 22 nt, synthetic construct
  source 1..22: mol_type = other RNA
ctgccccgggcctggttaggga

SEQ ID NO: 132851 - RNA, 22 nt, synthetic construct
  source 1..22: mol_type = other RNA
ctgcccctccactccacaaagc

SEQ ID NO: 132852 - RNA, 22 nt, synthetic construct
  source 1..22: mol_type = other RNA
ctgccccttatcctcttctgaa

SEQ ID NO: 132853 - RNA, 22 nt, synthetic construct
  source 1..22: mol_type = other RNA
ctgccctcattgaagctactat

SEQ ID NO: 132854 - RNA, 22 nt, synthetic construct
  source 1..22: mol_type = other RNA
ctgccctgtgaaaatcattttg

SEQ ID NO: 132855 - RNA, 22 nt, synthetic construct
  source 1..22: mol_type = other RNA
ctgccgcagagcaagcacgtta

SEQ ID NO: 132856 - RNA, 22 nt, synthetic construct
  source 1..22: mol_type = other RNA
ctgccgcttcgcctttctcgca

SEQ ID NO: 132857 - RNA, 22 nt, synthetic construct
  source 1..22: mol_type = other RNA
ctgcctaagtaatgctggccag

SEQ ID NO: 132858 - RNA, 22 nt, synthetic construct
  source 1..22: mol_type = other RNA
ctgcctaatctctaggcttaaa

SEQ ID NO: 132859 - RNA, 22 nt, synthetic construct
  source 1..22: mol_type = other RNA
ctgcctcaaaatcaacattgcc

SEQ ID NO: 132860 - RNA, 22 nt, synthetic construct
  source 1..22: mol_type = other RNA
ctgcctcagccgccgcagaggc

SEQ ID NO: 132861 - RNA, 22 nt, synthetic construct
  source 1..22: mol_type = other RNA
ctgcctcagcctcccgagtatc

SEQ ID NO: 132862 - RNA, 22 nt, synthetic construct
  source 1..22: mol_type = other RNA
ctgcctcagttgacatccttta

SEQ ID NO: 132863 - RNA, 22 nt, synthetic construct
  source 1..22: mol_type = other RNA
ctgcctccacaggctttgactt

SEQ ID NO: 132864 - RNA, 22 nt, synthetic construct
  source 1..22: mol_type = other RNA
ctgcctcccgggtccaggcagt

SEQ ID NO: 132865 - RNA, 22 nt, synthetic construct
  source 1..22: mol_type = other RNA
ctgcctcggcacagctctcatg

SEQ ID NO: 132866 - RNA, 22 nt, synthetic construct
  source 1..22: mol_type = other RNA
ctgcctctacatcacagacagg

SEQ ID NO: 132867 - RNA, 22 nt, synthetic construct
  source 1..22: mol_type = other RNA
ctgcctcttcctgttgctttaa

SEQ ID NO: 132868 - RNA, 22 nt, synthetic construct
  source 1..22: mol_type = other RNA
ctgcctgaggtctcaaaattta

SEQ ID NO: 132869 - RNA, 22 nt, synthetic construct
  source 1..22: mol_type = other RNA
ctgcctgcagactgcaggtctt

SEQ ID NO: 132870 - RNA, 22 nt, synthetic construct
  source 1..22: mol_type = other RNA
ctgcctggacccgggaggcaga

SEQ ID NO: 132871 - RNA, 22 nt, synthetic construct
  source 1..22: mol_type = other RNA
ctgcctggtcctgagggctttg

SEQ ID NO: 132872 - RNA, 22 nt, synthetic construct
  source 1..22: mol_type = other RNA
ctgccttcaatgtttggtagat

SEQ ID NO: 132873 - RNA, 22 nt, synthetic construct
  source 1..22: mol_type = other RNA
ctgccttcctgacctctgcagt

SEQ ID NO: 132874 - RNA, 22 nt, synthetic construct
  source 1..22: mol_type = other RNA
ctgccttccttgggcacactcc

SEQ ID NO: 132875 - RNA, 22 nt, synthetic construct
  source 1..22: mol_type = other RNA
ctgccttgacctcccaaaggac

SEQ ID NO: 132876 - RNA, 22 nt, synthetic construct
  source 1..22: mol_type = other RNA
ctgccttgaggtgattcagagt

SEQ ID NO: 132877 - RNA, 22 nt, synthetic construct
  source 1..22: mol_type = other RNA
ctgccttggccttctgaggagc

SEQ ID NO: 132878 - RNA, 22 nt, synthetic construct
  source 1..22: mol_type = other RNA
ctgcctttgttcatcatctttt

SEQ ID NO: 132879 - RNA, 22 nt, synthetic construct
  source 1..22: mol_type = other RNA
ctgcgaaggcaatgtaacacag

SEQ ID NO: 132880 - RNA, 22 nt, synthetic construct
  source 1..22: mol_type = other RNA
ctgcgagaaaggcgaagcggca

SEQ ID NO: 132881 - RNA, 22 nt, synthetic construct
  source 1..22: mol_type = other RNA
ctgcgagcggcgggcttcgcct

SEQ ID NO: 132882 - RNA, 22 nt, synthetic construct
  source 1..22: mol_type = other RNA
ctgcgattggttggactccacc

SEQ ID NO: 132883 - RNA, 22 nt, synthetic construct
  source 1..22: mol_type = other RNA
ctgcgcaattgcagccagagag

SEQ ID NO: 132884 - RNA, 22 nt, synthetic construct
  source 1..22: mol_type = other RNA
ctgcgccaagcagggacgggcg

SEQ ID NO: 132885 - RNA, 22 nt, synthetic construct
  source 1..22: mol_type = other RNA
ctgcgccttaaagccacactct

SEQ ID NO: 132886 - RNA, 22 nt, synthetic construct
  source 1..22: mol_type = other RNA
ctgcggcaggcattgtgctcag

SEQ ID NO: 132887 - RNA, 22 nt, synthetic construct
  source 1..22: mol_type = other RNA
ctgcgggcccagctcttttgtg

SEQ ID NO: 132888 - RNA, 22 nt, synthetic construct
  source 1..22: mol_type = other RNA
ctgcgtccgtagaccgaggaaa

SEQ ID NO: 132889 - RNA, 22 nt, synthetic construct
  source 1..22: mol_type = other RNA
ctgcgtggtttattcatataat

SEQ ID NO: 132890 - RNA, 22 nt, synthetic construct
  source 1..22: mol_type = other RNA
ctgcgtgttattttaatcgaat

SEQ ID NO: 132891 - RNA, 22 nt, synthetic construct
  source 1..22: mol_type = other RNA
ctgctaacaccttgaactggga

SEQ ID NO: 132892 - RNA, 22 nt, synthetic construct
  source 1..22: mol_type = other RNA
ctgctaataaaaacatatgcag

SEQ ID NO: 132893 - RNA, 22 nt, synthetic construct
  source 1..22: mol_type = other RNA
ctgctaatggtccttgctgaag

SEQ ID NO: 132894 - RNA, 22 nt, synthetic construct
  source 1..22: mol_type = other RNA
ctgctacaggggcattccctgt

SEQ ID NO: 132895 - RNA, 22 nt, synthetic construct
  source 1..22: mol_type = other RNA
ctgctacgaatgaactcctata

SEQ ID NO: 132896 - RNA, 22 nt, synthetic construct
  source 1..22: mol_type = other RNA
ctgctactagcaagctaataat

SEQ ID NO: 132897 - RNA, 22 nt, synthetic construct
  source 1..22: mol_type = other RNA
ctgctactcaggagattaaggc

SEQ ID NO: 132898 - RNA, 22 nt, synthetic construct
  source 1..22: mol_type = other RNA
ctgctacttgtggggctgaggt

SEQ ID NO: 132899 - RNA, 22 nt, synthetic construct
  source 1..22: mol_type = other RNA
ctgctataaacttccctctcag

SEQ ID NO: 132900 - RNA, 22 nt, synthetic construct
  source 1..22: mol_type = other RNA
ctgctatacaaccggaaaatgc

SEQ ID NO: 132901 - RNA, 22 nt, synthetic construct
  source 1..22: mol_type = other RNA
ctgctatgaaaattggcgtaca

SEQ ID NO: 132902 - RNA, 22 nt, synthetic construct
  source 1..22: mol_type = other RNA
ctgctatgaaatgtggtttttg

SEQ ID NO: 132903 - RNA, 22 nt, synthetic construct
  source 1..22: mol_type = other RNA
ctgctatgactaatttgaggca

SEQ ID NO: 132904 - RNA, 22 nt, synthetic construct
  source 1..22: mol_type = other RNA
ctgctatgcatactttggaagg

SEQ ID NO: 132905 - RNA, 22 nt, synthetic construct
  source 1..22: mol_type = other RNA
ctgctatgctgaaaggcatgaa

SEQ ID NO: 132906 - RNA, 22 nt, synthetic construct
  source 1..22: mol_type = other RNA
ctgctattctctttctgaaatt

SEQ ID NO: 132907 - RNA, 22 nt, synthetic construct
  source 1..22: mol_type = other RNA
ctgctattgataaatctaaagc

SEQ ID NO: 132908 - RNA, 22 nt, synthetic construct
  source 1..22: mol_type = other RNA
ctgctattttattagatagtgg

SEQ ID NO: 132909 - RNA, 22 nt, synthetic construct
  source 1..22: mol_type = other RNA
ctgctcaaaggggcattccgtg

SEQ ID NO: 132910 - RNA, 22 nt, synthetic construct
  source 1..22: mol_type = other RNA
ctgctcaccgcaacatctgcct

SEQ ID NO: 132911 - RNA, 22 nt, synthetic construct
  source 1..22: mol_type = other RNA
ctgctcactgcaacctttgtct

SEQ ID NO: 132912 - RNA, 22 nt, synthetic construct
  source 1..22: mol_type = other RNA
ctgctcactttgggattagctt

SEQ ID NO: 132913 - RNA, 22 nt, synthetic construct
  source 1..22: mol_type = other RNA
ctgctcagaagctttcagactt

SEQ ID NO: 132914 - RNA, 22 nt, synthetic construct
  source 1..22: mol_type = other RNA
ctgctcagtccctcaccttctg

SEQ ID NO: 132915 - RNA, 22 nt, synthetic construct
  source 1..22: mol_type = other RNA
ctgctcataatagtctcacgat

SEQ ID NO: 132916 - RNA, 22 nt, synthetic construct
  source 1..22: mol_type = other RNA
ctgctccagtatgacctcctcc

SEQ ID NO: 132917 - RNA, 22 nt, synthetic construct
  source 1..22: mol_type = other RNA
ctgctccctctgccgcctgggg

SEQ ID NO: 132918 - RNA, 22 nt, synthetic construct
  source 1..22: mol_type = other RNA
ctgctcctctgactttatggta

SEQ ID NO: 132919 - RNA, 22 nt, synthetic construct
  source 1..22: mol_type = other RNA
ctgctcctgcctttgttcatca

SEQ ID NO: 132920 - RNA, 22 nt, synthetic construct
  source 1..22: mol_type = other RNA
ctgctcggctctgtcacccttg

SEQ ID NO: 132921 - RNA, 22 nt, synthetic construct
  source 1..22: mol_type = other RNA
ctgctctcaagtaattgttttc

SEQ ID NO: 132922 - RNA, 22 nt, synthetic construct
  source 1..22: mol_type = other RNA
ctgctctgacgtttaaatgagt

SEQ ID NO: 132923 - RNA, 22 nt, synthetic construct
  source 1..22: mol_type = other RNA
ctgctctgcacgtactagtcag

SEQ ID NO: 132924 - RNA, 22 nt, synthetic construct
  source 1..22: mol_type = other RNA
ctgctctgcagagactgtgctt

SEQ ID NO: 132925 - RNA, 22 nt, synthetic construct
  source 1..22: mol_type = other RNA
ctgctctgtcctgtcagtgtgg

SEQ ID NO: 132926 - RNA, 22 nt, synthetic construct
  source 1..22: mol_type = other RNA
ctgctcttctattccagagaat

SEQ ID NO: 132927 - RNA, 22 nt, synthetic construct
  source 1..22: mol_type = other RNA
ctgctctttatctccacatttc

SEQ ID NO: 132928 - RNA, 22 nt, synthetic construct
  source 1..22: mol_type = other RNA
ctgctgaaaaagatactcttaa

SEQ ID NO: 132929 - RNA, 22 nt, synthetic construct
  source 1..22: mol_type = other RNA
ctgctgacagattaaataccac

SEQ ID NO: 132930 - RNA, 22 nt, synthetic construct
  source 1..22: mol_type = other RNA
ctgctgagtcttctactgtgaa

SEQ ID NO: 132931 - RNA, 22 nt, synthetic construct
  source 1..22: mol_type = other RNA
ctgctgatgtaagtgggaggag

SEQ ID NO: 132932 - RNA, 22 nt, synthetic construct
  source 1..22: mol_type = other RNA
ctgctgccagatgttctaattt

SEQ ID NO: 132933 - RNA, 22 nt, synthetic construct
  source 1..22: mol_type = other RNA
ctgctgctgaaaaagatactct

SEQ ID NO: 132934 - RNA, 22 nt, synthetic construct
  source 1..22: mol_type = other RNA
ctgctggaacgaatattcattt

SEQ ID NO: 132935 - RNA, 22 nt, synthetic construct
  source 1..22: mol_type = other RNA
ctgctggatcatatagtaattc

SEQ ID NO: 132936 - RNA, 22 nt, synthetic construct
  source 1..22: mol_type = other RNA
ctgctgggcccactctccccaa

SEQ ID NO: 132937 - RNA, 22 nt, synthetic construct
  source 1..22: mol_type = other RNA
ctgctgggctattgttttgcaa

SEQ ID NO: 132938 - RNA, 22 nt, synthetic construct
  source 1..22: mol_type = other RNA
ctgctggtctggaatgtgtagt

SEQ ID NO: 132939 - RNA, 22 nt, synthetic construct
  source 1..22: mol_type = other RNA
ctgctgtaacaaagatgccaca

SEQ ID NO: 132940 - RNA, 22 nt, synthetic construct
  source 1..22: mol_type = other RNA
ctgctgtaagctggtaatacag

SEQ ID NO: 132941 - RNA, 22 nt, synthetic construct
  source 1..22: mol_type = other RNA
ctgctgtcggttttctagttag

SEQ ID NO: 132942 - RNA, 22 nt, synthetic construct
  source 1..22: mol_type = other RNA
ctgctgtcgtttatgcatttat

SEQ ID NO: 132943 - RNA, 22 nt, synthetic construct
  source 1..22: mol_type = other RNA
ctgctgtggccgagggagacgg

SEQ ID NO: 132944 - RNA, 22 nt, synthetic construct
  source 1..22: mol_type = other RNA
ctgctgttcccaagcaagtgtg

SEQ ID NO: 132945 - RNA, 22 nt, synthetic construct
  source 1..22: mol_type = other RNA
ctgctgttgatggacgtttgag

SEQ ID NO: 132946 - RNA, 22 nt, synthetic construct
  source 1..22: mol_type = other RNA
ctgctgtttaccaagggtgtgt

SEQ ID NO: 132947 - RNA, 22 nt, synthetic construct
  source 1..22: mol_type = other RNA
ctgcttaaagcctctcaacact

SEQ ID NO: 132948 - RNA, 22 nt, synthetic construct
  source 1..22: mol_type = other RNA
ctgcttagtcttctcagatctg

SEQ ID NO: 132949 - RNA, 22 nt, synthetic construct
  source 1..22: mol_type = other RNA
ctgcttattatatgcctagatt

SEQ ID NO: 132950 - RNA, 22 nt, synthetic construct
  source 1..22: mol_type = other RNA
ctgcttcactaactttaaattt

SEQ ID NO: 132951 - RNA, 22 nt, synthetic construct
  source 1..22: mol_type = other RNA
ctgcttcagcctaagcaagtta

SEQ ID NO: 132952 - RNA, 22 nt, synthetic construct
  source 1..22: mol_type = other RNA
ctgcttcatctggaccagttac

SEQ ID NO: 132953 - RNA, 22 nt, synthetic construct
  source 1..22: mol_type = other RNA
ctgcttcattccgcgtttatta

SEQ ID NO: 132954 - RNA, 22 nt, synthetic construct
  source 1..22: mol_type = other RNA
ctgcttccacatttctaatttc

SEQ ID NO: 132955 - RNA, 22 nt, synthetic construct
  source 1..22: mol_type = other RNA
ctgcttcccccaaagaaggaaa

SEQ ID NO: 132956 - RNA, 22 nt, synthetic construct
  source 1..22: mol_type = other RNA
ctgcttccctagcccagcactt

SEQ ID NO: 132957 - RNA, 22 nt, synthetic construct
  source 1..22: mol_type = other RNA
ctgcttccttgctatgtaatct

SEQ ID NO: 132958 - RNA, 22 nt, synthetic construct
  source 1..22: mol_type = other RNA
ctgcttctacccactattgaaa

SEQ ID NO: 132959 - RNA, 22 nt, synthetic construct
  source 1..22: mol_type = other RNA
ctgcttctcaataaggaaagca

SEQ ID NO: 132960 - RNA, 22 nt, synthetic construct
  source 1..22: mol_type = other RNA
ctgcttgaatgtgcctacatag

SEQ ID NO: 132961 - RNA, 22 nt, synthetic construct
  source 1..22: mol_type = other RNA
ctgcttgaggccacgagttcag

SEQ ID NO: 132962 - RNA, 22 nt, synthetic construct
  source 1..22: mol_type = other RNA
ctgcttgcagacaataattctt

SEQ ID NO: 132963 - RNA, 22 nt, synthetic construct
  source 1..22: mol_type = other RNA
ctgcttgctgcactggctatta

SEQ ID NO: 132964 - RNA, 22 nt, synthetic construct
  source 1..22: mol_type = other RNA
ctgcttggcgcagtgcttagcg

SEQ ID NO: 132965 - RNA, 22 nt, synthetic construct
  source 1..22: mol_type = other RNA
ctgctttaaaacactggcaaaa

SEQ ID NO: 132966 - RNA, 22 nt, synthetic construct
  source 1..22: mol_type = other RNA
ctgctttcagttctttcggata

SEQ ID NO: 132967 - RNA, 22 nt, synthetic construct
  source 1..22: mol_type = other RNA
ctgctttcctcatgtccatagt

SEQ ID NO: 132968 - RNA, 22 nt, synthetic construct
  source 1..22: mol_type = other RNA
ctgctttctactagtataagag

SEQ ID NO: 132969 - RNA, 22 nt, synthetic construct
  source 1..22: mol_type = other RNA
ctgctttcttggggctctaatg

SEQ ID NO: 132970 - RNA, 22 nt, synthetic construct
  source 1..22: mol_type = other RNA
ctgcttttggaagcatgtggcc

SEQ ID NO: 132971 - RNA, 22 nt, synthetic construct
  source 1..22: mol_type = other RNA
ctgctttttcttggtggtaact

SEQ ID NO: 132972 - RNA, 22 nt, synthetic construct
  source 1..22: mol_type = other RNA
ctggaaaaagaccataatatat

SEQ ID NO: 132973 - RNA, 22 nt, synthetic construct
  source 1..22: mol_type = other RNA
ctggaaaactagagatgggaaa

SEQ ID NO: 132974 - RNA, 22 nt, synthetic construct
  source 1..22: mol_type = other RNA
ctggaaaacttctctggagcaa

SEQ ID NO: 132975 - RNA, 22 nt, synthetic construct
  source 1..22: mol_type = other RNA
ctggaaaagtgttgactaccat

SEQ ID NO: 132976 - RNA, 22 nt, synthetic construct
  source 1..22: mol_type = other RNA
ctggaaaccttttgtagaccct

SEQ ID NO: 132977 - RNA, 22 nt, synthetic construct
  source 1..22: mol_type = other RNA
ctggaaactcaaacccaaatta

SEQ ID NO: 132978 - RNA, 22 nt, synthetic construct
  source 1..22: mol_type = other RNA
ctggaaaggacttgatctaaaa

SEQ ID NO: 132979 - RNA, 22 nt, synthetic construct
  source 1..22: mol_type = other RNA
ctggaaagttcaaatgaggctt

SEQ ID NO: 132980 - RNA, 22 nt, synthetic construct
  source 1..22: mol_type = other RNA
ctggaaataagtttcatggact

SEQ ID NO: 132981 - RNA, 22 nt, synthetic construct
  source 1..22: mol_type = other RNA
ctggaaataatttccctcagaa

SEQ ID NO: 132982 - RNA, 22 nt, synthetic construct
  source 1..22: mol_type = other RNA
ctggaaatcacaggtttaggtt

SEQ ID NO: 132983 - RNA, 22 nt, synthetic construct
  source 1..22: mol_type = other RNA
ctggaaatggacagcggggatg

SEQ ID NO: 132984 - RNA, 22 nt, synthetic construct
  source 1..22: mol_type = other RNA
ctggaaattttcaagggtgttt

SEQ ID NO: 132985 - RNA, 22 nt, synthetic construct
  source 1..22: mol_type = other RNA
ctggaacaatcaaaccatcctt

SEQ ID NO: 132986 - RNA, 22 nt, synthetic construct
  source 1..22: mol_type = other RNA
ctggaacacacattagcctaga

SEQ ID NO: 132987 - RNA, 22 nt, synthetic construct
  source 1..22: mol_type = other RNA
ctggaacaggccctttgttagt

SEQ ID NO: 132988 - RNA, 22 nt, synthetic construct
  source 1..22: mol_type = other RNA
ctggaacgaatattcatttatt

SEQ ID NO: 132989 - RNA, 22 nt, synthetic construct
  source 1..22: mol_type = other RNA
ctggaactcatttctgcttgaa

SEQ ID NO: 132990 - RNA, 22 nt, synthetic construct
  source 1..22: mol_type = other RNA
ctggaagaattttaagcctaga

SEQ ID NO: 132991 - RNA, 22 nt, synthetic construct
  source 1..22: mol_type = other RNA
ctggaagatttctactggggtc

SEQ ID NO: 132992 - RNA, 22 nt, synthetic construct
  source 1..22: mol_type = other RNA
ctggaaggaaacactataaatc

SEQ ID NO: 132993 - RNA, 22 nt, synthetic construct
  source 1..22: mol_type = other RNA
ctggaaggaaataagaaggttt

SEQ ID NO: 132994 - RNA, 22 nt, synthetic construct
  source 1..22: mol_type = other RNA
ctggaaggactcacagcttacc

SEQ ID NO: 132995 - RNA, 22 nt, synthetic construct
  source 1..22: mol_type = other RNA
ctggaaggctaagcatgtaact

SEQ ID NO: 132996 - RNA, 22 nt, synthetic construct
  source 1..22: mol_type = other RNA
ctggaagggagcccaagcacac

SEQ ID NO: 132997 - RNA, 22 nt, synthetic construct
  source 1..22: mol_type = other RNA
ctggaagtaaggattttctatt

SEQ ID NO: 132998 - RNA, 22 nt, synthetic construct
  source 1..22: mol_type = other RNA
ctggaagtaattgggatctgat

SEQ ID NO: 132999 - RNA, 22 nt, synthetic construct
  source 1..22: mol_type = other RNA
ctggaagtgtaacatacacatc

SEQ ID NO: 133000 - RNA, 22 nt, synthetic construct
  source 1..22: mol_type = other RNA
ctggaagttcaaggttataatc

SEQ ID NO: 133001 - RNA, 22 nt, synthetic construct
  source 1..22: mol_type = other RNA
ctggaagttggcccaacatgct

SEQ ID NO: 133002 - RNA, 22 nt, synthetic construct
  source 1..22: mol_type = other RNA
ctggaagtttcctgcacatgca

SEQ ID NO: 133003 - RNA, 22 nt, synthetic construct
  source 1..22: mol_type = other RNA
ctggaatagaagagcagtgtgt

SEQ ID NO: 133004 - RNA, 22 nt, synthetic construct
  source 1..22: mol_type = other RNA
ctggaatagtagcttcaatgag

SEQ ID NO: 133005 - RNA, 22 nt, synthetic construct
  source 1..22: mol_type = other RNA
ctggaatcaatccagacagcta

SEQ ID NO: 133006 - RNA, 22 nt, synthetic construct
  source 1..22: mol_type = other RNA
ctggaatgcatcgtttcaatat

SEQ ID NO: 133007 - RNA, 22 nt, synthetic construct
  source 1..22: mol_type = other RNA
ctggaatgcccatcctctattt

SEQ ID NO: 133008 - RNA, 22 nt, synthetic construct
  source 1..22: mol_type = other RNA
ctggaatgggttggaggagaag

SEQ ID NO: 133009 - RNA, 22 nt, synthetic construct
  source 1..22: mol_type = other RNA
ctggaatggtgaagaatgtgaa

SEQ ID NO: 133010 - RNA, 22 nt, synthetic construct
  source 1..22: mol_type = other RNA
ctggaatgtgtagttctggtgt

SEQ ID NO: 133011 - RNA, 22 nt, synthetic construct
  source 1..22: mol_type = other RNA
ctggaattcatcaaagttaaac

SEQ ID NO: 133012 - RNA, 22 nt, synthetic construct
  source 1..22: mol_type = other RNA
ctggacaacagtgtgagaccgt

SEQ ID NO: 133013 - RNA, 22 nt, synthetic construct
  source 1..22: mol_type = other RNA
ctggacacacacagtcctgtgt

SEQ ID NO: 133014 - RNA, 22 nt, synthetic construct
  source 1..22: mol_type = other RNA
ctggacaggatcccggaacagg

SEQ ID NO: 133015 - RNA, 22 nt, synthetic construct
  source 1..22: mol_type = other RNA
ctggacataagggtctgtttta

SEQ ID NO: 133016 - RNA, 22 nt, synthetic construct
  source 1..22: mol_type = other RNA
ctggacattatcctatcagagc

SEQ ID NO: 133017 - RNA, 22 nt, synthetic construct
  source 1..22: mol_type = other RNA
ctggaccacaatcttaccccca

SEQ ID NO: 133018 - RNA, 22 nt, synthetic construct
  source 1..22: mol_type = other RNA
ctggaccagttactctctctgc

SEQ ID NO: 133019 - RNA, 22 nt, synthetic construct
  source 1..22: mol_type = other RNA
ctggacccgggaggcagatgtt

SEQ ID NO: 133020 - RNA, 22 nt, synthetic construct
  source 1..22: mol_type = other RNA
ctggacccttaccttaaaccat

SEQ ID NO: 133021 - RNA, 22 nt, synthetic construct
  source 1..22: mol_type = other RNA
ctggactcagggtcacttcctc

SEQ ID NO: 133022 - RNA, 22 nt, synthetic construct
  source 1..22: mol_type = other RNA
ctggactcattccaatccttcc

SEQ ID NO: 133023 - RNA, 22 nt, synthetic construct
  source 1..22: mol_type = other RNA
ctggactccttctgaaggcact

SEQ ID NO: 133024 - RNA, 22 nt, synthetic construct
  source 1..22: mol_type = other RNA
ctggactgaaaagatacagaaa

SEQ ID NO: 133025 - RNA, 22 nt, synthetic construct
  source 1..22: mol_type = other RNA
ctggactggagggatgctggag

SEQ ID NO: 133026 - RNA, 22 nt, synthetic construct
  source 1..22: mol_type = other RNA
ctggactgtgatgactgtaagc

SEQ ID NO: 133027 - RNA, 22 nt, synthetic construct
  source 1..22: mol_type = other RNA
ctggagaaagcccagccgcgga

SEQ ID NO: 133028 - RNA, 22 nt, synthetic construct
  source 1..22: mol_type = other RNA
ctggagaacagtaaagtcactg

SEQ ID NO: 133029 - RNA, 22 nt, synthetic construct
  source 1..22: mol_type = other RNA
ctggagaattctactaaacatt

SEQ ID NO: 133030 - RNA, 22 nt, synthetic construct
  source 1..22: mol_type = other RNA
ctggagaggcaaaggccgctct

SEQ ID NO: 133031 - RNA, 22 nt, synthetic construct
  source 1..22: mol_type = other RNA
ctggagcaagcatgagtatctg

SEQ ID NO: 133032 - RNA, 22 nt, synthetic construct
  source 1..22: mol_type = other RNA
ctggagcagggtgggcccttaa

SEQ ID NO: 133033 - RNA, 22 nt, synthetic construct
  source 1..22: mol_type = other RNA
ctggagcctgaggacactagca

SEQ ID NO: 133034 - RNA, 22 nt, synthetic construct
  source 1..22: mol_type = other RNA
ctggagctcactgcagcctcaa

SEQ ID NO: 133035 - RNA, 22 nt, synthetic construct
  source 1..22: mol_type = other RNA
ctggaggatggcttgagcccag

SEQ ID NO: 133036 - RNA, 22 nt, synthetic construct
  source 1..22: mol_type = other RNA
ctggaggctagaagtcccagtt

SEQ ID NO: 133037 - RNA, 22 nt, synthetic construct
  source 1..22: mol_type = other RNA
ctggagggatgctggagtgtgg

SEQ ID NO: 133038 - RNA, 22 nt, synthetic construct
  source 1..22: mol_type = other RNA
ctggagggctcccagtgcccac

SEQ ID NO: 133039 - RNA, 22 nt, synthetic construct
  source 1..22: mol_type = other RNA
ctggaggtcgggctgcctcagc

SEQ ID NO: 133040 - RNA, 22 nt, synthetic construct
  source 1..22: mol_type = other RNA
ctggaggtgcacattccaagag

SEQ ID NO: 133041 - RNA, 22 nt, synthetic construct
  source 1..22: mol_type = other RNA
ctggagtgcaatggtgggatct

SEQ ID NO: 133042 - RNA, 22 nt, synthetic construct
  source 1..22: mol_type = other RNA
ctggagtggagtggcatgatct

SEQ ID NO: 133043 - RNA, 22 nt, synthetic construct
  source 1..22: mol_type = other RNA
ctggagtgtggcaggggctgca

SEQ ID NO: 133044 - RNA, 22 nt, synthetic construct
  source 1..22: mol_type = other RNA
ctggagtgttttcttcatggac

SEQ ID NO: 133045 - RNA, 22 nt, synthetic construct
  source 1..22: mol_type = other RNA
ctggagttaattccacaaccac

SEQ ID NO: 133046 - RNA, 22 nt, synthetic construct
  source 1..22: mol_type = other RNA
ctggagttcagtggtgcaatca

SEQ ID NO: 133047 - RNA, 22 nt, synthetic construct
  source 1..22: mol_type = other RNA
ctggatacaaggtcaatctgaa

SEQ ID NO: 133048 - RNA, 22 nt, synthetic construct
  source 1..22: mol_type = other RNA
ctggatacggaaatataacatt

SEQ ID NO: 133049 - RNA, 22 nt, synthetic construct
  source 1..22: mol_type = other RNA
ctggatagaagtgtatcagatg

SEQ ID NO: 133050 - RNA, 22 nt, synthetic construct
  source 1..22: mol_type = other RNA
ctggatagcaacttgcagaaga

SEQ ID NO: 133051 - RNA, 22 nt, synthetic construct
  source 1..22: mol_type = other RNA
ctggatagcattatccctttaa

SEQ ID NO: 133052 - RNA, 22 nt, synthetic construct
  source 1..22: mol_type = other RNA
ctggatcaagtgggatttatcc

SEQ ID NO: 133053 - RNA, 22 nt, synthetic construct
  source 1..22: mol_type = other RNA
ctggatcatatagtaattctgt

SEQ ID NO: 133054 - RNA, 22 nt, synthetic construct
  source 1..22: mol_type = other RNA
ctggatcccccagcccctggtg

SEQ ID NO: 133055 - RNA, 22 nt, synthetic construct
  source 1..22: mol_type = other RNA
ctggatcctggagggctcccag

SEQ ID NO: 133056 - RNA, 22 nt, synthetic construct
  source 1..22: mol_type = other RNA
ctggatcctgtctcagagtata

SEQ ID NO: 133057 - RNA, 22 nt, synthetic construct
  source 1..22: mol_type = other RNA
ctggatgaagctggaaagcatc

SEQ ID NO: 133058 - RNA, 22 nt, synthetic construct
  source 1..22: mol_type = other RNA
ctggatgaatacaaaggtgtta

SEQ ID NO: 133059 - RNA, 22 nt, synthetic construct
  source 1..22: mol_type = other RNA
ctggatgaatgcagtggcttcc

SEQ ID NO: 133060 - RNA, 22 nt, synthetic construct
  source 1..22: mol_type = other RNA
ctggatgtggtgtggcatgtct

SEQ ID NO: 133061 - RNA, 22 nt, synthetic construct
  source 1..22: mol_type = other RNA
ctggatgtgtatgatcaaagtg

SEQ ID NO: 133062 - RNA, 22 nt, synthetic construct
  source 1..22: mol_type = other RNA
ctggatgttaattagatatgtg

SEQ ID NO: 133063 - RNA, 22 nt, synthetic construct
  source 1..22: mol_type = other RNA
ctggattaaggagatggcacat

SEQ ID NO: 133064 - RNA, 22 nt, synthetic construct
  source 1..22: mol_type = other RNA
ctggattatagtggtaaggagc

SEQ ID NO: 133065 - RNA, 22 nt, synthetic construct
  source 1..22: mol_type = other RNA
ctggattgattccagtttctct

SEQ ID NO: 133066 - RNA, 22 nt, synthetic construct
  source 1..22: mol_type = other RNA
ctggattgctagtgtcctcagg

SEQ ID NO: 133067 - RNA, 22 nt, synthetic construct
  source 1..22: mol_type = other RNA
ctggatttgattgggcattaat

SEQ ID NO: 133068 - RNA, 22 nt, synthetic construct
  source 1..22: mol_type = other RNA
ctggatttgggaaggatggcca

SEQ ID NO: 133069 - RNA, 22 nt, synthetic construct
  source 1..22: mol_type = other RNA
ctggatttttgtgtagaggtga

SEQ ID NO: 133070 - RNA, 22 nt, synthetic construct
  source 1..22: mol_type = other RNA
ctggcaaaaatcatcatatata

SEQ ID NO: 133071 - RNA, 22 nt, synthetic construct
  source 1..22: mol_type = other RNA
ctggcaaaatggagacatctga

SEQ ID NO: 133072 - RNA, 22 nt, synthetic construct
  source 1..22: mol_type = other RNA
ctggcaacaaaggcgaagcccg

SEQ ID NO: 133073 - RNA, 22 nt, synthetic construct
  source 1..22: mol_type = other RNA
ctggcaatactctcagaaatta

SEQ ID NO: 133074 - RNA, 22 nt, synthetic construct
  source 1..22: mol_type = other RNA
ctggcaatcaaatggccttctt

SEQ ID NO: 133075 - RNA, 22 nt, synthetic construct
  source 1..22: mol_type = other RNA
ctggcacagcactgttaactga

SEQ ID NO: 133076 - RNA, 22 nt, synthetic construct
  source 1..22: mol_type = other RNA
ctggcactttcctgataagggg

SEQ ID NO: 133077 - RNA, 22 nt, synthetic construct
  source 1..22: mol_type = other RNA
ctggcagatcaattgaccaaac

SEQ ID NO: 133078 - RNA, 22 nt, synthetic construct
  source 1..22: mol_type = other RNA
ctggcagcaggggctaagtagt

SEQ ID NO: 133079 - RNA, 22 nt, synthetic construct
  source 1..22: mol_type = other RNA
ctggcagccttctctcttccaa

SEQ ID NO: 133080 - RNA, 22 nt, synthetic construct
  source 1..22: mol_type = other RNA
ctggcaggtcacctagcctctc

SEQ ID NO: 133081 - RNA, 22 nt, synthetic construct
  source 1..22: mol_type = other RNA
ctggcagtctaggaaaagactt

SEQ ID NO: 133082 - RNA, 22 nt, synthetic construct
  source 1..22: mol_type = other RNA
ctggcatgttggatagtttctc

SEQ ID NO: 133083 - RNA, 22 nt, synthetic construct
  source 1..22: mol_type = other RNA
ctggcattgtcccgggggaggg

SEQ ID NO: 133084 - RNA, 22 nt, synthetic construct
  source 1..22: mol_type = other RNA
ctggccaaatccctgatcaagt

SEQ ID NO: 133085 - RNA, 22 nt, synthetic construct
  source 1..22: mol_type = other RNA
ctggccaacatcgtaaaacctc

SEQ ID NO: 133086 - RNA, 22 nt, synthetic construct
  source 1..22: mol_type = other RNA
ctggccacatgcttccaaaagc

SEQ ID NO: 133087 - RNA, 22 nt, synthetic construct
  source 1..22: mol_type = other RNA
ctggccactgattgagtatctg

SEQ ID NO: 133088 - RNA, 22 nt, synthetic construct
  source 1..22: mol_type = other RNA
ctggccagcattacttaggcag

SEQ ID NO: 133089 - RNA, 22 nt, synthetic construct
  source 1..22: mol_type = other RNA
ctggccagtgagttcaaatgtt

SEQ ID NO: 133090 - RNA, 22 nt, synthetic construct
  source 1..22: mol_type = other RNA
ctggccatccttcccaaatcca

SEQ ID NO: 133091 - RNA, 22 nt, synthetic construct
  source 1..22: mol_type = other RNA
ctggccatgttttatttcttga

SEQ ID NO: 133092 - RNA, 22 nt, synthetic construct
  source 1..22: mol_type = other RNA
ctggcccctccatggaaactac

SEQ ID NO: 133093 - RNA, 22 nt, synthetic construct
  source 1..22: mol_type = other RNA
ctggcccctttcaagattgttt

SEQ ID NO: 133094 - RNA, 22 nt, synthetic construct
  source 1..22: mol_type = other RNA
ctggccctccatttccctgctt

SEQ ID NO: 133095 - RNA, 22 nt, synthetic construct
  source 1..22: mol_type = other RNA
ctggccgggatttacttctata

SEQ ID NO: 133096 - RNA, 22 nt, synthetic construct
  source 1..22: mol_type = other RNA
ctggcctcggccaaccattact

SEQ ID NO: 133097 - RNA, 22 nt, synthetic construct
  source 1..22: mol_type = other RNA
ctggcctgagctctcagtggcc

SEQ ID NO: 133098 - RNA, 22 nt, synthetic construct
  source 1..22: mol_type = other RNA
ctggcctgcaccatttattgtc

SEQ ID NO: 133099 - RNA, 22 nt, synthetic construct
  source 1..22: mol_type = other RNA
ctggcctggacaacagtgtgag

SEQ ID NO: 133100 - RNA, 22 nt, synthetic construct
  source 1..22: mol_type = other RNA
ctggccttctatatttttacat

SEQ ID NO: 133101 - RNA, 22 nt, synthetic construct
  source 1..22: mol_type = other RNA
ctggctagtaggcaacatccct

SEQ ID NO: 133102 - RNA, 22 nt, synthetic construct
  source 1..22: mol_type = other RNA
ctggctattagttaaccttctg

SEQ ID NO: 133103 - RNA, 22 nt, synthetic construct
  source 1..22: mol_type = other RNA
ctggctcagaaacaacaacaac

SEQ ID NO: 133104 - RNA, 22 nt, synthetic construct
  source 1..22: mol_type = other RNA
ctggctcagtctgtttgccatc

SEQ ID NO: 133105 - RNA, 22 nt, synthetic construct
  source 1..22: mol_type = other RNA
ctggctctagcccagcttccgg

SEQ ID NO: 133106 - RNA, 22 nt, synthetic construct
  source 1..22: mol_type = other RNA
ctggctctttccactctctggc

SEQ ID NO: 133107 - RNA, 22 nt, synthetic construct
  source 1..22: mol_type = other RNA
ctggctgacctggtactctatg

SEQ ID NO: 133108 - RNA, 22 nt, synthetic construct
  source 1..22: mol_type = other RNA
ctggctgcaattgcgcagaact

SEQ ID NO: 133109 - RNA, 22 nt, synthetic construct
  source 1..22: mol_type = other RNA
ctggctgcagggcttctgaagg

SEQ ID NO: 133110 - RNA, 22 nt, synthetic construct
  source 1..22: mol_type = other RNA
ctggctgtgccaactctggcag

SEQ ID NO: 133111 - RNA, 22 nt, synthetic construct
  source 1..22: mol_type = other RNA
ctggcttaatgcatataaaaac

SEQ ID NO: 133112 - RNA, 22 nt, synthetic construct
  source 1..22: mol_type = other RNA
ctggcttcaatatgcagtatgt

SEQ ID NO: 133113 - RNA, 22 nt, synthetic construct
  source 1..22: mol_type = other RNA
ctggcttcagtgccaacacatg

SEQ ID NO: 133114 - RNA, 22 nt, synthetic construct
  source 1..22: mol_type = other RNA
ctggcttcatgggtggaaatta

SEQ ID NO: 133115 - RNA, 22 nt, synthetic construct
  source 1..22: mol_type = other RNA
ctggcttgtgacatcaagggtg

SEQ ID NO: 133116 - RNA, 22 nt, synthetic construct
  source 1..22: mol_type = other RNA
ctggctttagatggtaaaacaa

SEQ ID NO: 133117 - RNA, 22 nt, synthetic construct
  source 1..22: mol_type = other RNA
ctgggaaaaaataagaaaacaa

SEQ ID NO: 133118 - RNA, 22 nt, synthetic construct
  source 1..22: mol_type = other RNA
ctgggaaaaggatttgtttgtg

SEQ ID NO: 133119 - RNA, 22 nt, synthetic construct
  source 1..22: mol_type = other RNA
ctgggaaagcctggctttagat

SEQ ID NO: 133120 - RNA, 22 nt, synthetic construct
  source 1..22: mol_type = other RNA
ctgggaacagcccctagcatgc

SEQ ID NO: 133121 - RNA, 22 nt, synthetic construct
  source 1..22: mol_type = other RNA
ctgggaagttatgtagctggga

SEQ ID NO: 133122 - RNA, 22 nt, synthetic construct
  source 1..22: mol_type = other RNA
ctgggacagagcgagactccgt

SEQ ID NO: 133123 - RNA, 22 nt, synthetic construct
  source 1..22: mol_type = other RNA
ctgggactacaggtgtgaacca

SEQ ID NO: 133124 - RNA, 22 nt, synthetic construct
  source 1..22: mol_type = other RNA
ctgggacttctagcctccagaa

SEQ ID NO: 133125 - RNA, 22 nt, synthetic construct
  source 1..22: mol_type = other RNA
ctgggagaaagaccaagagtgt

SEQ ID NO: 133126 - RNA, 22 nt, synthetic construct
  source 1..22: mol_type = other RNA
ctgggagaaagctaatttggaa

SEQ ID NO: 133127 - RNA, 22 nt, synthetic construct
  source 1..22: mol_type = other RNA
ctgggagaatggcaaggctaac

SEQ ID NO: 133128 - RNA, 22 nt, synthetic construct
  source 1..22: mol_type = other RNA
ctgggagaccaggagttcttat

SEQ ID NO: 133129 - RNA, 22 nt, synthetic construct
  source 1..22: mol_type = other RNA
ctgggagccctccaggatccag

SEQ ID NO: 133130 - RNA, 22 nt, synthetic construct
  source 1..22: mol_type = other RNA
ctgggagcttatcaggcttgag

SEQ ID NO: 133131 - RNA, 22 nt, synthetic construct
  source 1..22: mol_type = other RNA
ctgggaggttgaggctgcagtg

SEQ ID NO: 133132 - RNA, 22 nt, synthetic construct
  source 1..22: mol_type = other RNA
ctgggagtacaagaccagcctg

SEQ ID NO: 133133 - RNA, 22 nt, synthetic construct
  source 1..22: mol_type = other RNA
ctgggagttcattagaattcag

SEQ ID NO: 133134 - RNA, 22 nt, synthetic construct
  source 1..22: mol_type = other RNA
ctgggataatgagtttaattct

SEQ ID NO: 133135 - RNA, 22 nt, synthetic construct
  source 1..22: mol_type = other RNA
ctgggataatgctatcatttta

SEQ ID NO: 133136 - RNA, 22 nt, synthetic construct
  source 1..22: mol_type = other RNA
ctgggatacttctaactttaga

SEQ ID NO: 133137 - RNA, 22 nt, synthetic construct
  source 1..22: mol_type = other RNA
ctgggatcacaggcgttgagcc

SEQ ID NO: 133138 - RNA, 22 nt, synthetic construct
  source 1..22: mol_type = other RNA
ctgggatcctaagcatgagata

SEQ ID NO: 133139 - RNA, 22 nt, synthetic construct
  source 1..22: mol_type = other RNA
ctgggatgcaagaatggtttaa

SEQ ID NO: 133140 - RNA, 22 nt, synthetic construct
  source 1..22: mol_type = other RNA
ctgggatgctcagtttcaaaag

SEQ ID NO: 133141 - RNA, 22 nt, synthetic construct
  source 1..22: mol_type = other RNA
ctgggatggctgaaagagaaag

SEQ ID NO: 133142 - RNA, 22 nt, synthetic construct
  source 1..22: mol_type = other RNA
ctgggattacacacacctacca

SEQ ID NO: 133143 - RNA, 22 nt, synthetic construct
  source 1..22: mol_type = other RNA
ctgggattacaggcgcacgcca

SEQ ID NO: 133144 - RNA, 22 nt, synthetic construct
  source 1..22: mol_type = other RNA
ctgggcaacagagacagagaat

SEQ ID NO: 133145 - RNA, 22 nt, synthetic construct
  source 1..22: mol_type = other RNA
ctgggcacacgccactgcaggt

SEQ ID NO: 133146 - RNA, 22 nt, synthetic construct
  source 1..22: mol_type = other RNA
ctgggcccactctccccaagta

SEQ ID NO: 133147 - RNA, 22 nt, synthetic construct
  source 1..22: mol_type = other RNA
ctgggcccgcagtggctcatgc

SEQ ID NO: 133148 - RNA, 22 nt, synthetic construct
  source 1..22: mol_type = other RNA
ctgggcgacaagagcagaactc

SEQ ID NO: 133149 - RNA, 22 nt, synthetic construct
  source 1..22: mol_type = other RNA
ctgggcgacagagtgaaactct

SEQ ID NO: 133150 - RNA, 22 nt, synthetic construct
  source 1..22: mol_type = other RNA
ctgggcgagatggcgtgcgcct

SEQ ID NO: 133151 - RNA, 22 nt, synthetic construct
  source 1..22: mol_type = other RNA
ctgggctagagccaggaagtca

SEQ ID NO: 133152 - RNA, 22 nt, synthetic construct
  source 1..22: mol_type = other RNA
ctgggctagggaagcagttgat

SEQ ID NO: 133153 - RNA, 22 nt, synthetic construct
  source 1..22: mol_type = other RNA
ctgggctattgttttgcaagat

SEQ ID NO: 133154 - RNA, 22 nt, synthetic construct
  source 1..22: mol_type = other RNA
ctgggctcaagccatcctccag

SEQ ID NO: 133155 - RNA, 22 nt, synthetic construct
  source 1..22: mol_type = other RNA
ctgggctcactgcaacttccgc

SEQ ID NO: 133156 - RNA, 22 nt, synthetic construct
  source 1..22: mol_type = other RNA
ctgggctcatctaagcctacct

SEQ ID NO: 133157 - RNA, 22 nt, synthetic construct
  source 1..22: mol_type = other RNA
ctgggctctctattccaaatgt

SEQ ID NO: 133158 - RNA, 22 nt, synthetic construct
  source 1..22: mol_type = other RNA
ctgggcttcactttcgtcatct

SEQ ID NO: 133159 - RNA, 22 nt, synthetic construct
  source 1..22: mol_type = other RNA
ctgggctttctccaggggcggc

SEQ ID NO: 133160 - RNA, 22 nt, synthetic construct
  source 1..22: mol_type = other RNA
ctggggaataagattttaggtc

SEQ ID NO: 133161 - RNA, 22 nt, synthetic construct
  source 1..22: mol_type = other RNA
ctggggaattgcatgagacttg

SEQ ID NO: 133162 - RNA, 22 nt, synthetic construct
  source 1..22: mol_type = other RNA
ctggggacccctccctgcttta

SEQ ID NO: 133163 - RNA, 22 nt, synthetic construct
  source 1..22: mol_type = other RNA
ctggggagtgtgcccaaggaag

SEQ ID NO: 133164 - RNA, 22 nt, synthetic construct
  source 1..22: mol_type = other RNA
ctggggatgctgtctataggca

SEQ ID NO: 133165 - RNA, 22 nt, synthetic construct
  source 1..22: mol_type = other RNA
ctggggcagcaaagcaagaaaa

SEQ ID NO: 133166 - RNA, 22 nt, synthetic construct
  source 1..22: mol_type = other RNA
ctggggcctcagcatgtcttca

SEQ ID NO: 133167 - RNA, 22 nt, synthetic construct
  source 1..22: mol_type = other RNA
ctggggctcaagtaagtgaaat

SEQ ID NO: 133168 - RNA, 22 nt, synthetic construct
  source 1..22: mol_type = other RNA
ctggggcttgaacccgaggtgc

SEQ ID NO: 133169 - RNA, 22 nt, synthetic construct
  source 1..22: mol_type = other RNA
ctgggggagactgtgcaatgtg

SEQ ID NO: 133170 - RNA, 22 nt, synthetic construct
  source 1..22: mol_type = other RNA
ctgggggatccaggggaataga

SEQ ID NO: 133171 - RNA, 22 nt, synthetic construct
  source 1..22: mol_type = other RNA
ctgggggctggacataagggtc

SEQ ID NO: 133172 - RNA, 22 nt, synthetic construct
  source 1..22: mol_type = other RNA
ctggggtcttagttctgcttcc

SEQ ID NO: 133173 - RNA, 22 nt, synthetic construct
  source 1..22: mol_type = other RNA
ctggggttagggcctagaaatc

SEQ ID NO: 133174 - RNA, 22 nt, synthetic construct
  source 1..22: mol_type = other RNA
ctggggttcaaaccacctaact

SEQ ID NO: 133175 - RNA, 22 nt, synthetic construct
  source 1..22: mol_type = other RNA
ctggggtttccttacctttatc

SEQ ID NO: 133176 - RNA, 22 nt, synthetic construct
  source 1..22: mol_type = other RNA
ctggggtttttatggttttaag

SEQ ID NO: 133177 - RNA, 22 nt, synthetic construct
  source 1..22: mol_type = other RNA
ctgggtaaacaagactcaacat

SEQ ID NO: 133178 - RNA, 22 nt, synthetic construct
  source 1..22: mol_type = other RNA
ctgggtagagactggatcctgg

SEQ ID NO: 133179 - RNA, 22 nt, synthetic construct
  source 1..22: mol_type = other RNA
ctgggtatacagcaaaagaatt

SEQ ID NO: 133180 - RNA, 22 nt, synthetic construct
  source 1..22: mol_type = other RNA
ctgggtcagaatcgtgatagtc

SEQ ID NO: 133181 - RNA, 22 nt, synthetic construct
  source 1..22: mol_type = other RNA
ctgggtccccggaggaggtggc

SEQ ID NO: 133182 - RNA, 22 nt, synthetic construct
  source 1..22: mol_type = other RNA
ctgggtcttataggttgaatag

SEQ ID NO: 133183 - RNA, 22 nt, synthetic construct
  source 1..22: mol_type = other RNA
ctgggtgatatctgtaagtcat

SEQ ID NO: 133184 - RNA, 22 nt, synthetic construct
  source 1..22: mol_type = other RNA
ctgggtgatgttcaaccctcgg

SEQ ID NO: 133185 - RNA, 22 nt, synthetic construct
  source 1..22: mol_type = other RNA
ctgggtgcgttgaccgctttcg

SEQ ID NO: 133186 - RNA, 22 nt, synthetic construct
  source 1..22: mol_type = other RNA
ctgggtgtagggggaaaactcc

SEQ ID NO: 133187 - RNA, 22 nt, synthetic construct
  source 1..22: mol_type = other RNA
ctgggtgtgcacgtttgctttg

SEQ ID NO: 133188 - RNA, 22 nt, synthetic construct
  source 1..22: mol_type = other RNA
ctgggttcaggtgcctcctgcc

SEQ ID NO: 133189 - RNA, 22 nt, synthetic construct
  source 1..22: mol_type = other RNA
ctgggttctcaccaacatccac

SEQ ID NO: 133190 - RNA, 22 nt, synthetic construct
  source 1..22: mol_type = other RNA
ctgggttctcccttctattcca

SEQ ID NO: 133191 - RNA, 22 nt, synthetic construct
  source 1..22: mol_type = other RNA
ctggtaaggaaacagagttttc

SEQ ID NO: 133192 - RNA, 22 nt, synthetic construct
  source 1..22: mol_type = other RNA
ctggtaataatgaaagctccca

SEQ ID NO: 133193 - RNA, 22 nt, synthetic construct
  source 1..22: mol_type = other RNA
ctggtaatacagtctgatttac

SEQ ID NO: 133194 - RNA, 22 nt, synthetic construct
  source 1..22: mol_type = other RNA
ctggtaatgaatagaaaatcct

SEQ ID NO: 133195 - RNA, 22 nt, synthetic construct
  source 1..22: mol_type = other RNA
ctggtaccaaagcagaaataca

SEQ ID NO: 133196 - RNA, 22 nt, synthetic construct
  source 1..22: mol_type = other RNA
ctggtactctatgatatatact

SEQ ID NO: 133197 - RNA, 22 nt, synthetic construct
  source 1..22: mol_type = other RNA
ctggtatctaccaaaaaactac

SEQ ID NO: 133198 - RNA, 22 nt, synthetic construct
  source 1..22: mol_type = other RNA
ctggtatgagtgtttcccttaa

SEQ ID NO: 133199 - RNA, 22 nt, synthetic construct
  source 1..22: mol_type = other RNA
ctggtattctgaactttcaacc

SEQ ID NO: 133200 - RNA, 22 nt, synthetic construct
  source 1..22: mol_type = other RNA
ctggtattttaagattctcttt

SEQ ID NO: 133201 - RNA, 22 nt, synthetic construct
  source 1..22: mol_type = other RNA
ctggtcaacagggtaagattcc

SEQ ID NO: 133202 - RNA, 22 nt, synthetic construct
  source 1..22: mol_type = other RNA
ctggtcacaaacacaaaacaaa

SEQ ID NO: 133203 - RNA, 22 nt, synthetic construct
  source 1..22: mol_type = other RNA
ctggtcactggccactgattga

SEQ ID NO: 133204 - RNA, 22 nt, synthetic construct
  source 1..22: mol_type = other RNA
ctggtccagatgaagcagggaa

SEQ ID NO: 133205 - RNA, 22 nt, synthetic construct
  source 1..22: mol_type = other RNA
ctggtcctgaactcgtggcctc

SEQ ID NO: 133206 - RNA, 22 nt, synthetic construct
  source 1..22: mol_type = other RNA
ctggtcctgagctttccttagt

SEQ ID NO: 133207 - RNA, 22 nt, synthetic construct
  source 1..22: mol_type = other RNA
ctggtcctgagggctttgtgaa

SEQ ID NO: 133208 - RNA, 22 nt, synthetic construct
  source 1..22: mol_type = other RNA
ctggtccttaaatttctaaggt

SEQ ID NO: 133209 - RNA, 22 nt, synthetic construct
  source 1..22: mol_type = other RNA
ctggtcgagctgggtgatgttc

SEQ ID NO: 133210 - RNA, 22 nt, synthetic construct
  source 1..22: mol_type = other RNA
ctggtctatctcattataacat

SEQ ID NO: 133211 - RNA, 22 nt, synthetic construct
  source 1..22: mol_type = other RNA
ctggtctcaaactccaagtctc

SEQ ID NO: 133212 - RNA, 22 nt, synthetic construct
  source 1..22: mol_type = other RNA
ctggtctcccagcatgaagccc

SEQ ID NO: 133213 - RNA, 22 nt, synthetic construct
  source 1..22: mol_type = other RNA
ctggtctcctttctatacttca

SEQ ID NO: 133214 - RNA, 22 nt, synthetic construct
  source 1..22: mol_type = other RNA
ctggtctcgagctcctgacctc

SEQ ID NO: 133215 - RNA, 22 nt, synthetic construct
  source 1..22: mol_type = other RNA
ctggtctggaatgtgtagttct

SEQ ID NO: 133216 - RNA, 22 nt, synthetic construct
  source 1..22: mol_type = other RNA
ctggtcttgtactcccagcctc

SEQ ID NO: 133217 - RNA, 22 nt, synthetic construct
  source 1..22: mol_type = other RNA
ctggtgaaaaaatggtgcagcc

SEQ ID NO: 133218 - RNA, 22 nt, synthetic construct
  source 1..22: mol_type = other RNA
ctggtgaactgggtgtaggggg

SEQ ID NO: 133219 - RNA, 22 nt, synthetic construct
  source 1..22: mol_type = other RNA
ctggtgatctatgaatttgcct

SEQ ID NO: 133220 - RNA, 22 nt, synthetic construct
  source 1..22: mol_type = other RNA
ctggtgattaaagttatttcta

SEQ ID NO: 133221 - RNA, 22 nt, synthetic construct
  source 1..22: mol_type = other RNA
ctggtgctggcagccttctctc

SEQ ID NO: 133222 - RNA, 22 nt, synthetic construct
  source 1..22: mol_type = other RNA
ctggtgctttctatctctcaga

SEQ ID NO: 133223 - RNA, 22 nt, synthetic construct
  source 1..22: mol_type = other RNA
ctggtgcttttttggtgttttt

SEQ ID NO: 133224 - RNA, 22 nt, synthetic construct
  source 1..22: mol_type = other RNA
ctggtggacaaaaaacgcggca

SEQ ID NO: 133225 - RNA, 22 nt, synthetic construct
  source 1..22: mol_type = other RNA
ctggtggagtattctagttcta

SEQ ID NO: 133226 - RNA, 22 nt, synthetic construct
  source 1..22: mol_type = other RNA
ctggtgggctttgagaaaggtt

SEQ ID NO: 133227 - RNA, 22 nt, synthetic construct
  source 1..22: mol_type = other RNA
ctggtgggttcatgccattctc

SEQ ID NO: 133228 - RNA, 22 nt, synthetic construct
  source 1..22: mol_type = other RNA
ctggtgtccttctgagaaggcg

SEQ ID NO: 133229 - RNA, 22 nt, synthetic construct
  source 1..22: mol_type = other RNA
ctggtgtcgtttatttcttctc

SEQ ID NO: 133230 - RNA, 22 nt, synthetic construct
  source 1..22: mol_type = other RNA
ctggtgttaggcaatccttccg

SEQ ID NO: 133231 - RNA, 22 nt, synthetic construct
  source 1..22: mol_type = other RNA
ctggtgttgcttgctctacaaa

SEQ ID NO: 133232 - RNA, 22 nt, synthetic construct
  source 1..22: mol_type = other RNA
ctggttagggagactttcactg

SEQ ID NO: 133233 - RNA, 22 nt, synthetic construct
  source 1..22: mol_type = other RNA
ctggttcaagctatgctcctgc

SEQ ID NO: 133234 - RNA, 22 nt, synthetic construct
  source 1..22: mol_type = other RNA
ctggttccaaacttctgacctt

SEQ ID NO: 133235 - RNA, 22 nt, synthetic construct
  source 1..22: mol_type = other RNA
ctggtttcagtacacgaaaata

SEQ ID NO: 133236 - RNA, 22 nt, synthetic construct
  source 1..22: mol_type = other RNA
ctggtttcagtccctcctttct

SEQ ID NO: 133237 - RNA, 22 nt, synthetic construct
  source 1..22: mol_type = other RNA
ctggtttctgcatacttagcta

SEQ ID NO: 133238 - RNA, 22 nt, synthetic construct
  source 1..22: mol_type = other RNA
ctggtttgctttggagtcacag

SEQ ID NO: 133239 - RNA, 22 nt, synthetic construct
  source 1..22: mol_type = other RNA
ctggttttaaagaaattagaac

SEQ ID NO: 133240 - RNA, 22 nt, synthetic construct
  source 1..22: mol_type = other RNA
ctggttttcctgatggacattc

SEQ ID NO: 133241 - RNA, 22 nt, synthetic construct
  source 1..22: mol_type = other RNA
ctggttttctggaggctagaag

SEQ ID NO: 133242 - RNA, 22 nt, synthetic construct
  source 1..22: mol_type = other RNA
ctggttttgatcatcgcattac

SEQ ID NO: 133243 - RNA, 22 nt, synthetic construct
  source 1..22: mol_type = other RNA
ctgtaaaaattttctcccaagg

SEQ ID NO: 133244 - RNA, 22 nt, synthetic construct
  source 1..22: mol_type = other RNA
ctgtaaacaatgctgctatgaa

SEQ ID NO: 133245 - RNA, 22 nt, synthetic construct
  source 1..22: mol_type = other RNA
ctgtaaacatgaacaagttaca

SEQ ID NO: 133246 - RNA, 22 nt, synthetic construct
  source 1..22: mol_type = other RNA
ctgtaaacctggaatcctctac

SEQ ID NO: 133247 - RNA, 22 nt, synthetic construct
  source 1..22: mol_type = other RNA
ctgtaaagtaatcaagtgaaat

SEQ ID NO: 133248 - RNA, 22 nt, synthetic construct
  source 1..22: mol_type = other RNA
ctgtaacaaagatgccacaaat

SEQ ID NO: 133249 - RNA, 22 nt, synthetic construct
  source 1..22: mol_type = other RNA
ctgtaacagaggcatgcacgga

SEQ ID NO: 133250 - RNA, 22 nt, synthetic construct
  source 1..22: mol_type = other RNA
ctgtaaccctgtttcccttaat

SEQ ID NO: 133251 - RNA, 22 nt, synthetic construct
  source 1..22: mol_type = other RNA
ctgtaacctccacctcccagat

SEQ ID NO: 133252 - RNA, 22 nt, synthetic construct
  source 1..22: mol_type = other RNA
ctgtaactgacttcaagaggtt

SEQ ID NO: 133253 - RNA, 22 nt, synthetic construct
  source 1..22: mol_type = other RNA
ctgtaagcacctgtataaataa

SEQ ID NO: 133254 - RNA, 22 nt, synthetic construct
  source 1..22: mol_type = other RNA
ctgtaagctgaactctgtggag

SEQ ID NO: 133255 - RNA, 22 nt, synthetic construct
  source 1..22: mol_type = other RNA
ctgtaagctggtaatacagtct

SEQ ID NO: 133256 - RNA, 22 nt, synthetic construct
  source 1..22: mol_type = other RNA
ctgtaagtcagttaacagtgct

SEQ ID NO: 133257 - RNA, 22 nt, synthetic construct
  source 1..22: mol_type = other RNA
ctgtaagtcatcaaaggaagga

SEQ ID NO: 133258 - RNA, 22 nt, synthetic construct
  source 1..22: mol_type = other RNA
ctgtaagttcctggactgtgat

SEQ ID NO: 133259 - RNA, 22 nt, synthetic construct
  source 1..22: mol_type = other RNA
ctgtaatattaaccaagaacaa

SEQ ID NO: 133260 - RNA, 22 nt, synthetic construct
  source 1..22: mol_type = other RNA
ctgtaatattgtatataccctt

SEQ ID NO: 133261 - RNA, 22 nt, synthetic construct
  source 1..22: mol_type = other RNA
ctgtaatgagctgagattgccc

SEQ ID NO: 133262 - RNA, 22 nt, synthetic construct
  source 1..22: mol_type = other RNA
ctgtaatgtttgtacttctacc

SEQ ID NO: 133263 - RNA, 22 nt, synthetic construct
  source 1..22: mol_type = other RNA
ctgtaattacatacttcaaagg

SEQ ID NO: 133264 - RNA, 22 nt, synthetic construct
  source 1..22: mol_type = other RNA
ctgtacaaagatttacccctac

SEQ ID NO: 133265 - RNA, 22 nt, synthetic construct
  source 1..22: mol_type = other RNA
ctgtacccattagacactaact

SEQ ID NO: 133266 - RNA, 22 nt, synthetic construct
  source 1..22: mol_type = other RNA
ctgtacccttacgcgtggatgt

SEQ ID NO: 133267 - RNA, 22 nt, synthetic construct
  source 1..22: mol_type = other RNA
ctgtactaagcctatgtaagac

SEQ ID NO: 133268 - RNA, 22 nt, synthetic construct
  source 1..22: mol_type = other RNA
ctgtactactgacctgggagaa

SEQ ID NO: 133269 - RNA, 22 nt, synthetic construct
  source 1..22: mol_type = other RNA
ctgtactgtttagcatctagca

SEQ ID NO: 133270 - RNA, 22 nt, synthetic construct
  source 1..22: mol_type = other RNA
ctgtagaaaatagggacggcct

SEQ ID NO: 133271 - RNA, 22 nt, synthetic construct
  source 1..22: mol_type = other RNA
ctgtagaatatccaagcacaaa

SEQ ID NO: 133272 - RNA, 22 nt, synthetic construct
  source 1..22: mol_type = other RNA
ctgtagaatgtttttccgtcta

SEQ ID NO: 133273 - RNA, 22 nt, synthetic construct
  source 1..22: mol_type = other RNA
ctgtagagaaaatgttatacag

SEQ ID NO: 133274 - RNA, 22 nt, synthetic construct
  source 1..22: mol_type = other RNA
ctgtagataaacgttaactatt

SEQ ID NO: 133275 - RNA, 22 nt, synthetic construct
  source 1..22: mol_type = other RNA
ctgtagattgggcttttcatat

SEQ ID NO: 133276 - RNA, 22 nt, synthetic construct
  source 1..22: mol_type = other RNA
ctgtagattgttttaggtagtc

SEQ ID NO: 133277 - RNA, 22 nt, synthetic construct
  source 1..22: mol_type = other RNA
ctgtagcagacactgggttctc

SEQ ID NO: 133278 - RNA, 22 nt, synthetic construct
  source 1..22: mol_type = other RNA
ctgtagcattgaagtatagttt

SEQ ID NO: 133279 - RNA, 22 nt, synthetic construct
  source 1..22: mol_type = other RNA
ctgtagcttcacgtgcattcat

SEQ ID NO: 133280 - RNA, 22 nt, synthetic construct
  source 1..22: mol_type = other RNA
ctgtaggccccgatgccatgtg

SEQ ID NO: 133281 - RNA, 22 nt, synthetic construct
  source 1..22: mol_type = other RNA
ctgtagggtgactagtgtgaat

SEQ ID NO: 133282 - RNA, 22 nt, synthetic construct
  source 1..22: mol_type = other RNA
ctgtagtgattcacttttgagt

SEQ ID NO: 133283 - RNA, 22 nt, synthetic construct
  source 1..22: mol_type = other RNA
ctgtagttacaactactcggga

SEQ ID NO: 133284 - RNA, 22 nt, synthetic construct
  source 1..22: mol_type = other RNA
ctgtagttcagtttttctttct

SEQ ID NO: 133285 - RNA, 22 nt, synthetic construct
  source 1..22: mol_type = other RNA
ctgtagttttggtgtcattttt

SEQ ID NO: 133286 - RNA, 22 nt, synthetic construct
  source 1..22: mol_type = other RNA
ctgtataaataaaatgtctggc

SEQ ID NO: 133287 - RNA, 22 nt, synthetic construct
  source 1..22: mol_type = other RNA
ctgtataaatgttcagtttatg

SEQ ID NO: 133288 - RNA, 22 nt, synthetic construct
  source 1..22: mol_type = other RNA
ctgtataacattttctctacag

SEQ ID NO: 133289 - RNA, 22 nt, synthetic construct
  source 1..22: mol_type = other RNA
ctgtatacccaggtgtgagatt

SEQ ID NO: 133290 - RNA, 22 nt, synthetic construct
  source 1..22: mol_type = other RNA
ctgtatatctccttttaagagt

SEQ ID NO: 133291 - RNA, 22 nt, synthetic construct
  source 1..22: mol_type = other RNA
ctgtatatgaaaagcttccccc

SEQ ID NO: 133292 - RNA, 22 nt, synthetic construct
  source 1..22: mol_type = other RNA
ctgtatcttttcagtccagata

SEQ ID NO: 133293 - RNA, 22 nt, synthetic construct
  source 1..22: mol_type = other RNA
ctgtatgagaagactggaaaag

SEQ ID NO: 133294 - RNA, 22 nt, synthetic construct
  source 1..22: mol_type = other RNA
ctgtatgccgctggtgaaaaaa

SEQ ID NO: 133295 - RNA, 22 nt, synthetic construct
  source 1..22: mol_type = other RNA
ctgtatggttcttaagatgata

SEQ ID NO: 133296 - RNA, 22 nt, synthetic construct
  source 1..22: mol_type = other RNA
ctgtattaccagcttacagcag

SEQ ID NO: 133297 - RNA, 22 nt, synthetic construct
  source 1..22: mol_type = other RNA
ctgtattaggatgtgtacccgt

SEQ ID NO: 133298 - RNA, 22 nt, synthetic construct
  source 1..22: mol_type = other RNA
ctgtattgcaaactaagtggta

SEQ ID NO: 133299 - RNA, 22 nt, synthetic construct
  source 1..22: mol_type = other RNA
ctgtattgtaggaaagcctgtg

SEQ ID NO: 133300 - RNA, 22 nt, synthetic construct
  source 1..22: mol_type = other RNA
ctgtatttctgctttggtacca

SEQ ID NO: 133301 - RNA, 22 nt, synthetic construct
  source 1..22: mol_type = other RNA
ctgtatttttgctcacacttac

SEQ ID NO: 133302 - RNA, 22 nt, synthetic construct
  source 1..22: mol_type = other RNA
ctgtcaaaaagagaacacacaa

SEQ ID NO: 133303 - RNA, 22 nt, synthetic construct
  source 1..22: mol_type = other RNA
ctgtcaaaaatgtgtctagtga

SEQ ID NO: 133304 - RNA, 22 nt, synthetic construct
  source 1..22: mol_type = other RNA
ctgtcacaattcacagaatata

SEQ ID NO: 133305 - RNA, 22 nt, synthetic construct
  source 1..22: mol_type = other RNA
ctgtcacaggctttcctacaat

SEQ ID NO: 133306 - RNA, 22 nt, synthetic construct
  source 1..22: mol_type = other RNA
ctgtcacatagacctgaatgac

SEQ ID NO: 133307 - RNA, 22 nt, synthetic construct
  source 1..22: mol_type = other RNA
ctgtcacatttgaaagaaagaa

SEQ ID NO: 133308 - RNA, 22 nt, synthetic construct
  source 1..22: mol_type = other RNA
ctgtcaccaggctggaatgcag

SEQ ID NO: 133309 - RNA, 22 nt, synthetic construct
  source 1..22: mol_type = other RNA
ctgtcacccacgtggagtgcaa

SEQ ID NO: 133310 - RNA, 22 nt, synthetic construct
  source 1..22: mol_type = other RNA
ctgtcacccttgtaatcaagta

SEQ ID NO: 133311 - RNA, 22 nt, synthetic construct
  source 1..22: mol_type = other RNA
ctgtcacggtgccctacatatg

SEQ ID NO: 133312 - RNA, 22 nt, synthetic construct
  source 1..22: mol_type = other RNA
ctgtcactctctttaggaagct

SEQ ID NO: 133313 - RNA, 22 nt, synthetic construct
  source 1..22: mol_type = other RNA
ctgtcactgacacaggctgaag

SEQ ID NO: 133314 - RNA, 22 nt, synthetic construct
  source 1..22: mol_type = other RNA
ctgtcactttcctattcacact

SEQ ID NO: 133315 - RNA, 22 nt, synthetic construct
  source 1..22: mol_type = other RNA
ctgtcagaaacaccaacacaaa

SEQ ID NO: 133316 - RNA, 22 nt, synthetic construct
  source 1..22: mol_type = other RNA
ctgtcagcagttcagcctgcag

SEQ ID NO: 133317 - RNA, 22 nt, synthetic construct
  source 1..22: mol_type = other RNA
ctgtcaggcaagggactgtcga

SEQ ID NO: 133318 - RNA, 22 nt, synthetic construct
  source 1..22: mol_type = other RNA
ctgtcagtgggactggagaaca

SEQ ID NO: 133319 - RNA, 22 nt, synthetic construct
  source 1..22: mol_type = other RNA
ctgtcagtgtggttcatatttc

SEQ ID NO: 133320 - RNA, 22 nt, synthetic construct
  source 1..22: mol_type = other RNA
ctgtcagtttctgatttatctt

SEQ ID NO: 133321 - RNA, 22 nt, synthetic construct
  source 1..22: mol_type = other RNA
ctgtcatcagcgtcctcactgt

SEQ ID NO: 133322 - RNA, 22 nt, synthetic construct
  source 1..22: mol_type = other RNA
ctgtcatctgaatcaataagaa

SEQ ID NO: 133323 - RNA, 22 nt, synthetic construct
  source 1..22: mol_type = other RNA
ctgtcatggtgtgtctgcgcct

SEQ ID NO: 133324 - RNA, 22 nt, synthetic construct
  source 1..22: mol_type = other RNA
ctgtcatgtcaaatttttcaca

SEQ ID NO: 133325 - RNA, 22 nt, synthetic construct
  source 1..22: mol_type = other RNA
ctgtcatgtttgaattttccat

SEQ ID NO: 133326 - RNA, 22 nt, synthetic construct
  source 1..22: mol_type = other RNA
ctgtcattctgcagtttgtgtt

SEQ ID NO: 133327 - RNA, 22 nt, synthetic construct
  source 1..22: mol_type = other RNA
ctgtccaaacagtgaccacagt

SEQ ID NO: 133328 - RNA, 22 nt, synthetic construct
  source 1..22: mol_type = other RNA
ctgtccaacaagggttggtgct

SEQ ID NO: 133329 - RNA, 22 nt, synthetic construct
  source 1..22: mol_type = other RNA
ctgtccaacatggcaaaacccc

SEQ ID NO: 133330 - RNA, 22 nt, synthetic construct
  source 1..22: mol_type = other RNA
ctgtccaagtatttctcatctg

SEQ ID NO: 133331 - RNA, 22 nt, synthetic construct
  source 1..22: mol_type = other RNA
ctgtccaggcgcctgcattgca

SEQ ID NO: 133332 - RNA, 22 nt, synthetic construct
  source 1..22: mol_type = other RNA
ctgtccatttccagtacttttt

SEQ ID NO: 133333 - RNA, 22 nt, synthetic construct
  source 1..22: mol_type = other RNA
ctgtccatttccttaagcacag

SEQ ID NO: 133334 - RNA, 22 nt, synthetic construct
  source 1..22: mol_type = other RNA
ctgtcccaaatgcaccaacacc

SEQ ID NO: 133335 - RNA, 22 nt, synthetic construct
  source 1..22: mol_type = other RNA
ctgtccccaccgccttcctacc

SEQ ID NO: 133336 - RNA, 22 nt, synthetic construct
  source 1..22: mol_type = other RNA
ctgtcctcgtaaaagctaatct

SEQ ID NO: 133337 - RNA, 22 nt, synthetic construct
  source 1..22: mol_type = other RNA
ctgtcctctcttgttgaggatg

SEQ ID NO: 133338 - RNA, 22 nt, synthetic construct
  source 1..22: mol_type = other RNA
ctgtcctgaatactattcctat

SEQ ID NO: 133339 - RNA, 22 nt, synthetic construct
  source 1..22: mol_type = other RNA
ctgtcctgaattctaacattat

SEQ ID NO: 133340 - RNA, 22 nt, synthetic construct
  source 1..22: mol_type = other RNA
ctgtcctgaattctaatgaact

SEQ ID NO: 133341 - RNA, 22 nt, synthetic construct
  source 1..22: mol_type = other RNA
ctgtcctgtcagtgtggttcat

SEQ ID NO: 133342 - RNA, 22 nt, synthetic construct
  source 1..22: mol_type = other RNA
ctgtccttctcgtgtgagctct

SEQ ID NO: 133343 - RNA, 22 nt, synthetic construct
  source 1..22: mol_type = other RNA
ctgtccttggattgctaaactg

SEQ ID NO: 133344 - RNA, 22 nt, synthetic construct
  source 1..22: mol_type = other RNA
ctgtccttgtgttttatttggc

SEQ ID NO: 133345 - RNA, 22 nt, synthetic construct
  source 1..22: mol_type = other RNA
ctgtcgaagcttaatttagatg

SEQ ID NO: 133346 - RNA, 22 nt, synthetic construct
  source 1..22: mol_type = other RNA
ctgtcgcccaggcggaatgcag

SEQ ID NO: 133347 - RNA, 22 nt, synthetic construct
  source 1..22: mol_type = other RNA
ctgtcgctctcctgtgccaagt

SEQ ID NO: 133348 - RNA, 22 nt, synthetic construct
  source 1..22: mol_type = other RNA
ctgtcggttttctagttagttt

SEQ ID NO: 133349 - RNA, 22 nt, synthetic construct
  source 1..22: mol_type = other RNA
ctgtcgtttatgcatttattag

SEQ ID NO: 133350 - RNA, 22 nt, synthetic construct
  source 1..22: mol_type = other RNA
ctgtctataggcaatgagtctg

SEQ ID NO: 133351 - RNA, 22 nt, synthetic construct
  source 1..22: mol_type = other RNA
ctgtctcacctcaaggccaact

SEQ ID NO: 133352 - RNA, 22 nt, synthetic construct
  source 1..22: mol_type = other RNA
ctgtctcagagtatatatgctc

SEQ ID NO: 133353 - RNA, 22 nt, synthetic construct
  source 1..22: mol_type = other RNA
ctgtctcagtcccaaatgggag

SEQ ID NO: 133354 - RNA, 22 nt, synthetic construct
  source 1..22: mol_type = other RNA
ctgtctccaacgctttttatgg

SEQ ID NO: 133355 - RNA, 22 nt, synthetic construct
  source 1..22: mol_type = other RNA
ctgtctccatgtcctcacctca

SEQ ID NO: 133356 - RNA, 22 nt, synthetic construct
  source 1..22: mol_type = other RNA
ctgtctctaaaaaataccaaaa

SEQ ID NO: 133357 - RNA, 22 nt, synthetic construct
  source 1..22: mol_type = other RNA
ctgtctggattgattccagttt

SEQ ID NO: 133358 - RNA, 22 nt, synthetic construct
  source 1..22: mol_type = other RNA
ctgtctgggaagttatgtagct

SEQ ID NO: 133359 - RNA, 22 nt, synthetic construct
  source 1..22: mol_type = other RNA
ctgtctgggataatgagtttaa

SEQ ID NO: 133360 - RNA, 22 nt, synthetic construct
  source 1..22: mol_type = other RNA
ctgtctgtgaaaataataccta

SEQ ID NO: 133361 - RNA, 22 nt, synthetic construct
  source 1..22: mol_type = other RNA
ctgtctgtgatgtagaggcagt

SEQ ID NO: 133362 - RNA, 22 nt, synthetic construct
  source 1..22: mol_type = other RNA
ctgtctgttcacatttcgcctt

SEQ ID NO: 133363 - RNA, 22 nt, synthetic construct
  source 1..22: mol_type = other RNA
ctgtcttgatgatagaatacca

SEQ ID NO: 133364 - RNA, 22 nt, synthetic construct
  source 1..22: mol_type = other RNA
ctgtcttggacccatgcccatg

SEQ ID NO: 133365 - RNA, 22 nt, synthetic construct
  source 1..22: mol_type = other RNA
ctgtcttgtgcatcctttatac

SEQ ID NO: 133366 - RNA, 22 nt, synthetic construct
  source 1..22: mol_type = other RNA
ctgtctttcagtatgtgtctct

SEQ ID NO: 133367 - RNA, 22 nt, synthetic construct
  source 1..22: mol_type = other RNA
ctgtctttcccattaccaaaac

SEQ ID NO: 133368 - RNA, 22 nt, synthetic construct
  source 1..22: mol_type = other RNA
ctgtctttctgtctgctttttt

SEQ ID NO: 133369 - RNA, 22 nt, synthetic construct
  source 1..22: mol_type = other RNA
ctgtctttggcccatatccttt

SEQ ID NO: 133370 - RNA, 22 nt, synthetic construct
  source 1..22: mol_type = other RNA
ctgtgaaaaaacaaaacaaaac

SEQ ID NO: 133371 - RNA, 22 nt, synthetic construct
  source 1..22: mol_type = other RNA
ctgtgaaaataatacctaacag

SEQ ID NO: 133372 - RNA, 22 nt, synthetic construct
  source 1..22: mol_type = other RNA
ctgtgaaaatcattttggcaaa

SEQ ID NO: 133373 - RNA, 22 nt, synthetic construct
  source 1..22: mol_type = other RNA
ctgtgaatgtgaggtgaggaca

SEQ ID NO: 133374 - RNA, 22 nt, synthetic construct
  source 1..22: mol_type = other RNA
ctgtgaattcactaatgcctca

SEQ ID NO: 133375 - RNA, 22 nt, synthetic construct
  source 1..22: mol_type = other RNA
ctgtgaattgtgacagttctat

SEQ ID NO: 133376 - RNA, 22 nt, synthetic construct
  source 1..22: mol_type = other RNA
ctgtgaatttgattatgttaga

SEQ ID NO: 133377 - RNA, 22 nt, synthetic construct
  source 1..22: mol_type = other RNA
ctgtgaatttggatttgagtaa

SEQ ID NO: 133378 - RNA, 22 nt, synthetic construct
  source 1..22: mol_type = other RNA
ctgtgacagtatgtcagactca

SEQ ID NO: 133379 - RNA, 22 nt, synthetic construct
  source 1..22: mol_type = other RNA
ctgtgactccaaagcaaaccag

SEQ ID NO: 133380 - RNA, 22 nt, synthetic construct
  source 1..22: mol_type = other RNA
ctgtgagccactaaaacaggaa

SEQ ID NO: 133381 - RNA, 22 nt, synthetic construct
  source 1..22: mol_type = other RNA
ctgtgagggagatatttcgcct

SEQ ID NO: 133382 - RNA, 22 nt, synthetic construct
  source 1..22: mol_type = other RNA
ctgtgagggtaagaaaggagtt

SEQ ID NO: 133383 - RNA, 22 nt, synthetic construct
  source 1..22: mol_type = other RNA
ctgtgagtccttccagtatgat

SEQ ID NO: 133384 - RNA, 22 nt, synthetic construct
  source 1..22: mol_type = other RNA
ctgtgatacctagtacgtaacc

SEQ ID NO: 133385 - RNA, 22 nt, synthetic construct
  source 1..22: mol_type = other RNA
ctgtgatcagaagagcactatg

SEQ ID NO: 133386 - RNA, 22 nt, synthetic construct
  source 1..22: mol_type = other RNA
ctgtgatccctgatatgtcgca

SEQ ID NO: 133387 - RNA, 22 nt, synthetic construct
  source 1..22: mol_type = other RNA
ctgtgatgactgtaagctgaac

SEQ ID NO: 133388 - RNA, 22 nt, synthetic construct
  source 1..22: mol_type = other RNA
ctgtgatgattttagaaggtaa

SEQ ID NO: 133389 - RNA, 22 nt, synthetic construct
  source 1..22: mol_type = other RNA
ctgtgatgtagaggcagttgag

SEQ ID NO: 133390 - RNA, 22 nt, synthetic construct
  source 1..22: mol_type = other RNA
ctgtgattacaattcctttcta

SEQ ID NO: 133391 - RNA, 22 nt, synthetic construct
  source 1..22: mol_type = other RNA
ctgtgattaccggcatccgcca

SEQ ID NO: 133392 - RNA, 22 nt, synthetic construct
  source 1..22: mol_type = other RNA
ctgtgattatcagggatattgg

SEQ ID NO: 133393 - RNA, 22 nt, synthetic construct
  source 1..22: mol_type = other RNA
ctgtgattgcaggtgtgggcca

SEQ ID NO: 133394 - RNA, 22 nt, synthetic construct
  source 1..22: mol_type = other RNA
ctgtgatttatgtggcatttaa

SEQ ID NO: 133395 - RNA, 22 nt, synthetic construct
  source 1..22: mol_type = other RNA
ctgtgatttccagtgtttggtt

SEQ ID NO: 133396 - RNA, 22 nt, synthetic construct
  source 1..22: mol_type = other RNA
ctgtgcagtggatgactaggct

SEQ ID NO: 133397 - RNA, 22 nt, synthetic construct
  source 1..22: mol_type = other RNA
ctgtgccaactctggcaggtca

SEQ ID NO: 133398 - RNA, 22 nt, synthetic construct
  source 1..22: mol_type = other RNA
ctgtgccaagcaacttgatcag

SEQ ID NO: 133399 - RNA, 22 nt, synthetic construct
  source 1..22: mol_type = other RNA
ctgtgccaagtccgtgcatgcc

SEQ ID NO: 133400 - RNA, 22 nt, synthetic construct
  source 1..22: mol_type = other RNA
ctgtgccagtgcaaacctcctg

SEQ ID NO: 133401 - RNA, 22 nt, synthetic construct
  source 1..22: mol_type = other RNA
ctgtgccgaggcagagagagta

SEQ ID NO: 133402 - RNA, 22 nt, synthetic construct
  source 1..22: mol_type = other RNA
ctgtgccttgatccattacatc

SEQ ID NO: 133403 - RNA, 22 nt, synthetic construct
  source 1..22: mol_type = other RNA
ctgtgcgtgaatctgttcctgg

SEQ ID NO: 133404 - RNA, 22 nt, synthetic construct
  source 1..22: mol_type = other RNA
ctgtgctagatgctaaacagta

SEQ ID NO: 133405 - RNA, 22 nt, synthetic construct
  source 1..22: mol_type = other RNA
ctgtgctagccttcttggagta

SEQ ID NO: 133406 - RNA, 22 nt, synthetic construct
  source 1..22: mol_type = other RNA
ctgtgctctgtatttaatcttt

SEQ ID NO: 133407 - RNA, 22 nt, synthetic construct
  source 1..22: mol_type = other RNA
ctgtgctgagatggtcagtact

SEQ ID NO: 133408 - RNA, 22 nt, synthetic construct
  source 1..22: mol_type = other RNA
ctgtgcttaaatttttgagaaa

SEQ ID NO: 133409 - RNA, 22 nt, synthetic construct
  source 1..22: mol_type = other RNA
ctgtgcttaaggaaatggacag

SEQ ID NO: 133410 - RNA, 22 nt, synthetic construct
  source 1..22: mol_type = other RNA
ctgtgcttccacagctatcagg

SEQ ID NO: 133411 - RNA, 22 nt, synthetic construct
  source 1..22: mol_type = other RNA
ctgtgcttgtctctctctttct

SEQ ID NO: 133412 - RNA, 22 nt, synthetic construct
  source 1..22: mol_type = other RNA
ctgtgcttgtgcttttaatact

SEQ ID NO: 133413 - RNA, 22 nt, synthetic construct
  source 1..22: mol_type = other RNA
ctgtgcttttctcgtgcatgtc

SEQ ID NO: 133414 - RNA, 22 nt, synthetic construct
  source 1..22: mol_type = other RNA
ctgtggaagcacagtctctgca

SEQ ID NO: 133415 - RNA, 22 nt, synthetic construct
  source 1..22: mol_type = other RNA
ctgtggaccatgttttaggagt

SEQ ID NO: 133416 - RNA, 22 nt, synthetic construct
  source 1..22: mol_type = other RNA
ctgtggactttaggctgttcaa

SEQ ID NO: 133417 - RNA, 22 nt, synthetic construct
  source 1..22: mol_type = other RNA
ctgtggaggcagtaccattccc

SEQ ID NO: 133418 - RNA, 22 nt, synthetic construct
  source 1..22: mol_type = other RNA
ctgtggagtcctgtcagtttct

SEQ ID NO: 133419 - RNA, 22 nt, synthetic construct
  source 1..22: mol_type = other RNA
ctgtggatgttggtgagaaccc

SEQ ID NO: 133420 - RNA, 22 nt, synthetic construct
  source 1..22: mol_type = other RNA
ctgtggccgagggagacggcga

SEQ ID NO: 133421 - RNA, 22 nt, synthetic construct
  source 1..22: mol_type = other RNA
ctgtggctaacaatcaaattta

SEQ ID NO: 133422 - RNA, 22 nt, synthetic construct
  source 1..22: mol_type = other RNA
ctgtggctcactcatttccgtt

SEQ ID NO: 133423 - RNA, 22 nt, synthetic construct
  source 1..22: mol_type = other RNA
ctgtggcttgggtgacctcatg

SEQ ID NO: 133424 - RNA, 22 nt, synthetic construct
  source 1..22: mol_type = other RNA
ctgtgggttaaaagttagctgg

SEQ ID NO: 133425 - RNA, 22 nt, synthetic construct
  source 1..22: mol_type = other RNA
ctgtggtcactgtttggacagt

SEQ ID NO: 133426 - RNA, 22 nt, synthetic construct
  source 1..22: mol_type = other RNA
ctgtggtccctgctactcagga

SEQ ID NO: 133427 - RNA, 22 nt, synthetic construct
  source 1..22: mol_type = other RNA
ctgtggtctcagctcctcagaa

SEQ ID NO: 133428 - RNA, 22 nt, synthetic construct
  source 1..22: mol_type = other RNA
ctgtggtctcttcgagggggct

SEQ ID NO: 133429 - RNA, 22 nt, synthetic construct
  source 1..22: mol_type = other RNA
ctgtggtttcttgaatctctct

SEQ ID NO: 133430 - RNA, 22 nt, synthetic construct
  source 1..22: mol_type = other RNA
ctgtgtaatactgtagaatgtt

SEQ ID NO: 133431 - RNA, 22 nt, synthetic construct
  source 1..22: mol_type = other RNA
ctgtgtagttcatcagcataaa

SEQ ID NO: 133432 - RNA, 22 nt, synthetic construct
  source 1..22: mol_type = other RNA
ctgtgtatgtgtagtcagtgaa

SEQ ID NO: 133433 - RNA, 22 nt, synthetic construct
  source 1..22: mol_type = other RNA
ctgtgtcagtgacagttctgtg

SEQ ID NO: 133434 - RNA, 22 nt, synthetic construct
  source 1..22: mol_type = other RNA
ctgtgtgcatgcatgtctgtct

SEQ ID NO: 133435 - RNA, 22 nt, synthetic construct
  source 1..22: mol_type = other RNA
ctgtgtgcatgctcccatttgg

SEQ ID NO: 133436 - RNA, 22 nt, synthetic construct
  source 1..22: mol_type = other RNA
ctgtgtgcttggagtcacttga

SEQ ID NO: 133437 - RNA, 22 nt, synthetic construct
  source 1..22: mol_type = other RNA
ctgtgtggcttctcaaactgtg

SEQ ID NO: 133438 - RNA, 22 nt, synthetic construct
  source 1..22: mol_type = other RNA
ctgtgtggtttgccttttcact

SEQ ID NO: 133439 - RNA, 22 nt, synthetic construct
  source 1..22: mol_type = other RNA
ctgtgtgtgtccaggccaacag

SEQ ID NO: 133440 - RNA, 22 nt, synthetic construct
  source 1..22: mol_type = other RNA
ctgtgttacattgccttcgcag

SEQ ID NO: 133441 - RNA, 22 nt, synthetic construct
  source 1..22: mol_type = other RNA
ctgtgttcttttccttcttaag

SEQ ID NO: 133442 - RNA, 22 nt, synthetic construct
  source 1..22: mol_type = other RNA
ctgtgtttatgaatgatgccat

SEQ ID NO: 133443 - RNA, 22 nt, synthetic construct
  source 1..22: mol_type = other RNA
ctgtgtttctgctattctcttt

SEQ ID NO: 133444 - RNA, 22 nt, synthetic construct
  source 1..22: mol_type = other RNA
ctgttaaaagatacgaaaatcc

SEQ ID NO: 133445 - RNA, 22 nt, synthetic construct
  source 1..22: mol_type = other RNA
ctgttaactgacttacagacct

SEQ ID NO: 133446 - RNA, 22 nt, synthetic construct
  source 1..22: mol_type = other RNA
ctgttaatagataggtcatgta

SEQ ID NO: 133447 - RNA, 22 nt, synthetic construct
  source 1..22: mol_type = other RNA
ctgttaatgggcacttgggatg

SEQ ID NO: 133448 - RNA, 22 nt, synthetic construct
  source 1..22: mol_type = other RNA
ctgttaatggttagactgcaca

SEQ ID NO: 133449 - RNA, 22 nt, synthetic construct
  source 1..22: mol_type = other RNA
ctgttaatgtgatatgccacat

SEQ ID NO: 133450 - RNA, 22 nt, synthetic construct
  source 1..22: mol_type = other RNA
ctgttacagctcttctcagttg

SEQ ID NO: 133451 - RNA, 22 nt, synthetic construct
  source 1..22: mol_type = other RNA
ctgttacatggttctgtgctag

SEQ ID NO: 133452 - RNA, 22 nt, synthetic construct
  source 1..22: mol_type = other RNA
ctgttaccatttgaccttcctt

SEQ ID NO: 133453 - RNA, 22 nt, synthetic construct
  source 1..22: mol_type = other RNA
ctgttactcccgatttcagtta

SEQ ID NO: 133454 - RNA, 22 nt, synthetic construct
  source 1..22: mol_type = other RNA
ctgttacttgactattttaccc

SEQ ID NO: 133455 - RNA, 22 nt, synthetic construct
  source 1..22: mol_type = other RNA
ctgttagatggtgctgatttaa

SEQ ID NO: 133456 - RNA, 22 nt, synthetic construct
  source 1..22: mol_type = other RNA
ctgttagccttgccattctccc

SEQ ID NO: 133457 - RNA, 22 nt, synthetic construct
  source 1..22: mol_type = other RNA
ctgttagggacttatggagata

SEQ ID NO: 133458 - RNA, 22 nt, synthetic construct
  source 1..22: mol_type = other RNA
ctgttaggtattattttcacag

SEQ ID NO: 133459 - RNA, 22 nt, synthetic construct
  source 1..22: mol_type = other RNA
ctgttagtcccctagtggatgc

SEQ ID NO: 133460 - RNA, 22 nt, synthetic construct
  source 1..22: mol_type = other RNA
ctgttatctgggaacagcccct

SEQ ID NO: 133461 - RNA, 22 nt, synthetic construct
  source 1..22: mol_type = other RNA
ctgttatgacaagactacctaa

SEQ ID NO: 133462 - RNA, 22 nt, synthetic construct
  source 1..22: mol_type = other RNA
ctgttattagagttgtaacaca

SEQ ID NO: 133463 - RNA, 22 nt, synthetic construct
  source 1..22: mol_type = other RNA
ctgttcaatttagaaaatgctt

SEQ ID NO: 133464 - RNA, 22 nt, synthetic construct
  source 1..22: mol_type = other RNA
ctgttcacatttcgccttctca

SEQ ID NO: 133465 - RNA, 22 nt, synthetic construct
  source 1..22: mol_type = other RNA
ctgttcatttgagaatttcagg

SEQ ID NO: 133466 - RNA, 22 nt, synthetic construct
  source 1..22: mol_type = other RNA
ctgttccaggcctcgctcttgg

SEQ ID NO: 133467 - RNA, 22 nt, synthetic construct
  source 1..22: mol_type = other RNA
ctgttccatcggtctgtatttc

SEQ ID NO: 133468 - RNA, 22 nt, synthetic construct
  source 1..22: mol_type = other RNA
ctgttcccaagcaagtgtggtg

SEQ ID NO: 133469 - RNA, 22 nt, synthetic construct
  source 1..22: mol_type = other RNA
ctgttcccagataacagtggtt

SEQ ID NO: 133470 - RNA, 22 nt, synthetic construct
  source 1..22: mol_type = other RNA
ctgttccccaagccaaattaat

SEQ ID NO: 133471 - RNA, 22 nt, synthetic construct
  source 1..22: mol_type = other RNA
ctgttccgattttacttactag

SEQ ID NO: 133472 - RNA, 22 nt, synthetic construct
  source 1..22: mol_type = other RNA
ctgttccgggatcctgtccagg

SEQ ID NO: 133473 - RNA, 22 nt, synthetic construct
  source 1..22: mol_type = other RNA
ctgttcctgggttctcccttct

SEQ ID NO: 133474 - RNA, 22 nt, synthetic construct
  source 1..22: mol_type = other RNA
ctgttctagctcctgggaaaag

SEQ ID NO: 133475 - RNA, 22 nt, synthetic construct
  source 1..22: mol_type = other RNA
ctgttctcagtatcctttcaag

SEQ ID NO: 133476 - RNA, 22 nt, synthetic construct
  source 1..22: mol_type = other RNA
ctgttctccagtcccactgaca

SEQ ID NO: 133477 - RNA, 22 nt, synthetic construct
  source 1..22: mol_type = other RNA
ctgttctctgtgtggtttgcct

SEQ ID NO: 133478 - RNA, 22 nt, synthetic construct
  source 1..22: mol_type = other RNA
ctgttctgttccatcggtctgt

SEQ ID NO: 133479 - RNA, 22 nt, synthetic construct
  source 1..22: mol_type = other RNA
ctgttctttggagctgtatttt

SEQ ID NO: 133480 - RNA, 22 nt, synthetic construct
  source 1..22: mol_type = other RNA
ctgttctttgttagtttattca

SEQ ID NO: 133481 - RNA, 22 nt, synthetic construct
  source 1..22: mol_type = other RNA
ctgttcttttgtaatctaagga

SEQ ID NO: 133482 - RNA, 22 nt, synthetic construct
  source 1..22: mol_type = other RNA
ctgttgaatagcaactgttttt

SEQ ID NO: 133483 - RNA, 22 nt, synthetic construct
  source 1..22: mol_type = other RNA
ctgttgaattgttgcgcgtcaa

SEQ ID NO: 133484 - RNA, 22 nt, synthetic construct
  source 1..22: mol_type = other RNA
ctgttgaggctgggccctgtgg

SEQ ID NO: 133485 - RNA, 22 nt, synthetic construct
  source 1..22: mol_type = other RNA
ctgttgatggacgtttgagttg

SEQ ID NO: 133486 - RNA, 22 nt, synthetic construct
  source 1..22: mol_type = other RNA
ctgttgattgttgccatcattt

SEQ ID NO: 133487 - RNA, 22 nt, synthetic construct
  source 1..22: mol_type = other RNA
ctgttgatttagaaatacctgc

SEQ ID NO: 133488 - RNA, 22 nt, synthetic construct
  source 1..22: mol_type = other RNA
ctgttgcaaattattttcctcc

SEQ ID NO: 133489 - RNA, 22 nt, synthetic construct
  source 1..22: mol_type = other RNA
ctgttgcagtccccggtctttc

SEQ ID NO: 133490 - RNA, 22 nt, synthetic construct
  source 1..22: mol_type = other RNA
ctgttgcccagactggagttca

SEQ ID NO: 133491 - RNA, 22 nt, synthetic construct
  source 1..22: mol_type = other RNA
ctgttgcctctgtgctagcctt

SEQ ID NO: 133492 - RNA, 22 nt, synthetic construct
  source 1..22: mol_type = other RNA
ctgttgcttaagtcactccatt

SEQ ID NO: 133493 - RNA, 22 nt, synthetic construct
  source 1..22: mol_type = other RNA
ctgttgctttaacctctggtat

SEQ ID NO: 133494 - RNA, 22 nt, synthetic construct
  source 1..22: mol_type = other RNA
ctgttggaaaaatcgtcctctt

SEQ ID NO: 133495 - RNA, 22 nt, synthetic construct
  source 1..22: mol_type = other RNA
ctgttggagagatggtagtcaa

SEQ ID NO: 133496 - RNA, 22 nt, synthetic construct
  source 1..22: mol_type = other RNA
ctgttggcctggacacacacag

SEQ ID NO: 133497 - RNA, 22 nt, synthetic construct
  source 1..22: mol_type = other RNA
ctgttgggaggtttttgattac

SEQ ID NO: 133498 - RNA, 22 nt, synthetic construct
  source 1..22: mol_type = other RNA
ctgttgggctattaagtattgc

SEQ ID NO: 133499 - RNA, 22 nt, synthetic construct
  source 1..22: mol_type = other RNA
ctgttggtgcttagctgcctct

SEQ ID NO: 133500 - RNA, 22 nt, synthetic construct
  source 1..22: mol_type = other RNA
ctgttgtaatgttacttctcag

SEQ ID NO: 133501 - RNA, 22 nt, synthetic construct
  source 1..22: mol_type = other RNA
ctgttgtattttacaccatgca

SEQ ID NO: 133502 - RNA, 22 nt, synthetic construct
  source 1..22: mol_type = other RNA
ctgttgtgaggattcgattaaa

SEQ ID NO: 133503 - RNA, 22 nt, synthetic construct
  source 1..22: mol_type = other RNA
ctgtttaaaaagaaaaagctca

SEQ ID NO: 133504 - RNA, 22 nt, synthetic construct
  source 1..22: mol_type = other RNA
ctgtttacattagagaagaatg

SEQ ID NO: 133505 - RNA, 22 nt, synthetic construct
  source 1..22: mol_type = other RNA
ctgtttaccaagggtgtgttta

SEQ ID NO: 133506 - RNA, 22 nt, synthetic construct
  source 1..22: mol_type = other RNA
ctgtttacccttactaaatttt

SEQ ID NO: 133507 - RNA, 22 nt, synthetic construct
  source 1..22: mol_type = other RNA
ctgtttagcatctagcacagaa

SEQ ID NO: 133508 - RNA, 22 nt, synthetic construct
  source 1..22: mol_type = other RNA
ctgtttcccttaatgttgacat

SEQ ID NO: 133509 - RNA, 22 nt, synthetic construct
  source 1..22: mol_type = other RNA
ctgtttcctaatctaacatgtt

SEQ ID NO: 133510 - RNA, 22 nt, synthetic construct
  source 1..22: mol_type = other RNA
ctgtttccttaccagtgcttgc

SEQ ID NO: 133511 - RNA, 22 nt, synthetic construct
  source 1..22: mol_type = other RNA
ctgtttctctacatctggatcc

SEQ ID NO: 133512 - RNA, 22 nt, synthetic construct
  source 1..22: mol_type = other RNA
ctgtttctgtgaaaaaacaaaa

SEQ ID NO: 133513 - RNA, 22 nt, synthetic construct
  source 1..22: mol_type = other RNA
ctgtttcttagctatattcact

SEQ ID NO: 133514 - RNA, 22 nt, synthetic construct
  source 1..22: mol_type = other RNA
ctgtttgagaagtcttttccta

SEQ ID NO: 133515 - RNA, 22 nt, synthetic construct
  source 1..22: mol_type = other RNA
ctgtttgagatctttcttattt

SEQ ID NO: 133516 - RNA, 22 nt, synthetic construct
  source 1..22: mol_type = other RNA
ctgtttgagctgaaagtaaaga

SEQ ID NO: 133517 - RNA, 22 nt, synthetic construct
  source 1..22: mol_type = other RNA
ctgtttgattactgtagcttcg

SEQ ID NO: 133518 - RNA, 22 nt, synthetic construct
  source 1..22: mol_type = other RNA
ctgtttgccatcttcaagattt

SEQ ID NO: 133519 - RNA, 22 nt, synthetic construct
  source 1..22: mol_type = other RNA
ctgtttgcctgcgtccgtagac

SEQ ID NO: 133520 - RNA, 22 nt, synthetic construct
  source 1..22: mol_type = other RNA
ctgtttggatgaaaaagtactg

SEQ ID NO: 133521 - RNA, 22 nt, synthetic construct
  source 1..22: mol_type = other RNA
ctgtttggctgggagcttatca

SEQ ID NO: 133522 - RNA, 22 nt, synthetic construct
  source 1..22: mol_type = other RNA
ctgtttgtttgttttgagaccg

SEQ ID NO: 133523 - RNA, 22 nt, synthetic construct
  source 1..22: mol_type = other RNA
ctgttttacatgtttaactatc

SEQ ID NO: 133524 - RNA, 22 nt, synthetic construct
  source 1..22: mol_type = other RNA
ctgttttagtggctcacagtgc

SEQ ID NO: 133525 - RNA, 22 nt, synthetic construct
  source 1..22: mol_type = other RNA
ctgttttcatgcgacatatcag

SEQ ID NO: 133526 - RNA, 22 nt, synthetic construct
  source 1..22: mol_type = other RNA
ctgttttcatttattctgttgc

SEQ ID NO: 133527 - RNA, 22 nt, synthetic construct
  source 1..22: mol_type = other RNA
ctgttttccacagtgactttac

SEQ ID NO: 133528 - RNA, 22 nt, synthetic construct
  source 1..22: mol_type = other RNA
ctgttttcttactgatttatag

SEQ ID NO: 133529 - RNA, 22 nt, synthetic construct
  source 1..22: mol_type = other RNA
ctgttttgcttactgtagcatt

SEQ ID NO: 133530 - RNA, 22 nt, synthetic construct
  source 1..22: mol_type = other RNA
ctgttttggtaaaatgtggcaa

SEQ ID NO: 133531 - RNA, 22 nt, synthetic construct
  source 1..22: mol_type = other RNA
ctgtttttcaaaatgagatctt

SEQ ID NO: 133532 - RNA, 22 nt, synthetic construct
  source 1..22: mol_type = other RNA
ctgtttttcttagtctagccaa

SEQ ID NO: 133533 - RNA, 22 nt, synthetic construct
  source 1..22: mol_type = other RNA
ctgtttttgaaaagaacaacat

SEQ ID NO: 133534 - RNA, 22 nt, synthetic construct
  source 1..22: mol_type = other RNA
ctgttttttcctcccttcagcc

SEQ ID NO: 133535 - RNA, 22 nt, synthetic construct
  source 1..22: mol_type = other RNA
cttaaaaaatgcgcgtccgcga

SEQ ID NO: 133536 - RNA, 22 nt, synthetic construct
  source 1..22: mol_type = other RNA
cttaaaaatgacaccaaaacta

SEQ ID NO: 133537 - RNA, 22 nt, synthetic construct
  source 1..22: mol_type = other RNA
cttaaaactttaggtcagaata

SEQ ID NO: 133538 - RNA, 22 nt, synthetic construct
  source 1..22: mol_type = other RNA
cttaaaagagtgaaatgatttc

SEQ ID NO: 133539 - RNA, 22 nt, synthetic construct
  source 1..22: mol_type = other RNA
cttaaaaggagatatacaggaa

SEQ ID NO: 133540 - RNA, 22 nt, synthetic construct
  source 1..22: mol_type = other RNA
cttaaaagtgctgcagtatgca

SEQ ID NO: 133541 - RNA, 22 nt, synthetic construct
  source 1..22: mol_type = other RNA
cttaaaataccagaggttaaag

SEQ ID NO: 133542 - RNA, 22 nt, synthetic construct
  source 1..22: mol_type = other RNA
cttaaaattcttccagcctggt

SEQ ID NO: 133543 - RNA, 22 nt, synthetic construct
  source 1..22: mol_type = other RNA
cttaaaccatatacaaaactga

SEQ ID NO: 133544 - RNA, 22 nt, synthetic construct
  source 1..22: mol_type = other RNA
cttaaactgccaaaccctacac

SEQ ID NO: 133545 - RNA, 22 nt, synthetic construct
  source 1..22: mol_type = other RNA
cttaaagccacactcttggtct

SEQ ID NO: 133546 - RNA, 22 nt, synthetic construct
  source 1..22: mol_type = other RNA
cttaaagcctctcaacacttca

SEQ ID NO: 133547 - RNA, 22 nt, synthetic construct
  source 1..22: mol_type = other RNA
cttaaagcgctactcagctgtc

SEQ ID NO: 133548 - RNA, 22 nt, synthetic construct
  source 1..22: mol_type = other RNA
cttaaaggtttggagtttgtag

SEQ ID NO: 133549 - RNA, 22 nt, synthetic construct
  source 1..22: mol_type = other RNA
cttaaagttggtcctgcatatg

SEQ ID NO: 133550 - RNA, 22 nt, synthetic construct
  source 1..22: mol_type = other RNA
cttaaagtttcaaactgtggtc

SEQ ID NO: 133551 - RNA, 22 nt, synthetic construct
  source 1..22: mol_type = other RNA
cttaaatccgagacaagttctc

SEQ ID NO: 133552 - RNA, 22 nt, synthetic construct
  source 1..22: mol_type = other RNA
cttaaatgtgaattagatggct

SEQ ID NO: 133553 - RNA, 22 nt, synthetic construct
  source 1..22: mol_type = other RNA
cttaaatttctaaggttctgct

SEQ ID NO: 133554 - RNA, 22 nt, synthetic construct
  source 1..22: mol_type = other RNA
cttaaatttttgagaaattgcc

SEQ ID NO: 133555 - RNA, 22 nt, synthetic construct
  source 1..22: mol_type = other RNA
cttaacaagaatcctgctattt

SEQ ID NO: 133556 - RNA, 22 nt, synthetic construct
  source 1..22: mol_type = other RNA
cttaacacctttgtattcatcc

SEQ ID NO: 133557 - RNA, 22 nt, synthetic construct
  source 1..22: mol_type = other RNA
cttaacatttctcatgtatgtt

SEQ ID NO: 133558 - RNA, 22 nt, synthetic construct
  source 1..22: mol_type = other RNA
cttaacatttgaactcactggc

SEQ ID NO: 133559 - RNA, 22 nt, synthetic construct
  source 1..22: mol_type = other RNA
cttaaccattgagccaaagaag

SEQ ID NO: 133560 - RNA, 22 nt, synthetic construct
  source 1..22: mol_type = other RNA
cttaacctttttcttttcacat

SEQ ID NO: 133561 - RNA, 22 nt, synthetic construct
  source 1..22: mol_type = other RNA
cttaactataggagttcattcg

SEQ ID NO: 133562 - RNA, 22 nt, synthetic construct
  source 1..22: mol_type = other RNA
cttaacttcacctctacacaaa

SEQ ID NO: 133563 - RNA, 22 nt, synthetic construct
  source 1..22: mol_type = other RNA
cttaagaaccatacagtgcctt

SEQ ID NO: 133564 - RNA, 22 nt, synthetic construct
  source 1..22: mol_type = other RNA
cttaagaaggaaaagaacacag

SEQ ID NO: 133565 - RNA, 22 nt, synthetic construct
  source 1..22: mol_type = other RNA
cttaagacatttgggaatgtgg

SEQ ID NO: 133566 - RNA, 22 nt, synthetic construct
  source 1..22: mol_type = other RNA
cttaagaccacaaggattaatc

SEQ ID NO: 133567 - RNA, 22 nt, synthetic construct
  source 1..22: mol_type = other RNA
cttaagagactctcaagaaggt

SEQ ID NO: 133568 - RNA, 22 nt, synthetic construct
  source 1..22: mol_type = other RNA
cttaagagcatgttgggccaac

SEQ ID NO: 133569 - RNA, 22 nt, synthetic construct
  source 1..22: mol_type = other RNA
cttaagagctaagactataaaa

SEQ ID NO: 133570 - RNA, 22 nt, synthetic construct
  source 1..22: mol_type = other RNA
cttaagcaacagaaatttattg

SEQ ID NO: 133571 - RNA, 22 nt, synthetic construct
  source 1..22: mol_type = other RNA
cttaagcacagactgtgccttg

SEQ ID NO: 133572 - RNA, 22 nt, synthetic construct
  source 1..22: mol_type = other RNA
cttaagccatttcaggttttcg

SEQ ID NO: 133573 - RNA, 22 nt, synthetic construct
  source 1..22: mol_type = other RNA
cttaagcttaggtctttgatcc

SEQ ID NO: 133574 - RNA, 22 nt, synthetic construct
  source 1..22: mol_type = other RNA
cttaaggaaatggacagcacat

SEQ ID NO: 133575 - RNA, 22 nt, synthetic construct
  source 1..22: mol_type = other RNA
cttaagtatctcagtcataatt

SEQ ID NO: 133576 - RNA, 22 nt, synthetic construct
  source 1..22: mol_type = other RNA
cttaagtatctcggtcattctg

SEQ ID NO: 133577 - RNA, 22 nt, synthetic construct
  source 1..22: mol_type = other RNA
cttaagtcactccatttgtggc

SEQ ID NO: 133578 - RNA, 22 nt, synthetic construct
  source 1..22: mol_type = other RNA
cttaagttaaaacttgtagagg

SEQ ID NO: 133579 - RNA, 22 nt, synthetic construct
  source 1..22: mol_type = other RNA
cttaataacctcaaagtggaaa

SEQ ID NO: 133580 - RNA, 22 nt, synthetic construct
  source 1..22: mol_type = other RNA
cttaataactgcctaagtaatg

SEQ ID NO: 133581 - RNA, 22 nt, synthetic construct
  source 1..22: mol_type = other RNA
cttaatagcccaacagggtttt

SEQ ID NO: 133582 - RNA, 22 nt, synthetic construct
  source 1..22: mol_type = other RNA
cttaatattgaaacgatgcatt

SEQ ID NO: 133583 - RNA, 22 nt, synthetic construct
  source 1..22: mol_type = other RNA
cttaatctcctgagtagcaggg

SEQ ID NO: 133584 - RNA, 22 nt, synthetic construct
  source 1..22: mol_type = other RNA
cttaatctgatttttagtgact

SEQ ID NO: 133585 - RNA, 22 nt, synthetic construct
  source 1..22: mol_type = other RNA
cttaatcttcacacttagttca

SEQ ID NO: 133586 - RNA, 22 nt, synthetic construct
  source 1..22: mol_type = other RNA
cttaatgttgacatcttgcata

SEQ ID NO: 133587 - RNA, 22 nt, synthetic construct
  source 1..22: mol_type = other RNA
cttaatgtttagtagaattctc

SEQ ID NO: 133588 - RNA, 22 nt, synthetic construct
  source 1..22: mol_type = other RNA
cttaattctaattagaaactgg

SEQ ID NO: 133589 - RNA, 22 nt, synthetic construct
  source 1..22: mol_type = other RNA
cttaattgagctgtccccaccg

SEQ ID NO: 133590 - RNA, 22 nt, synthetic construct
  source 1..22: mol_type = other RNA
cttaatttacccacaaaagaaa

SEQ ID NO: 133591 - RNA, 22 nt, synthetic construct
  source 1..22: mol_type = other RNA
cttaatttagatgagagtggcc

SEQ ID NO: 133592 - RNA, 22 nt, synthetic construct
  source 1..22: mol_type = other RNA
cttacaatgaatatgtactacc

SEQ ID NO: 133593 - RNA, 22 nt, synthetic construct
  source 1..22: mol_type = other RNA
cttacacacacgtttatattcc

SEQ ID NO: 133594 - RNA, 22 nt, synthetic construct
  source 1..22: mol_type = other RNA
cttacacattaggctctgggtc

SEQ ID NO: 133595 - RNA, 22 nt, synthetic construct
  source 1..22: mol_type = other RNA
cttacacctgtttaaaaagaaa

SEQ ID NO: 133596 - RNA, 22 nt, synthetic construct
  source 1..22: mol_type = other RNA
cttacactcaaaagccatagtg

SEQ ID NO: 133597 - RNA, 22 nt, synthetic construct
  source 1..22: mol_type = other RNA
cttacagaccttattcaaataa

SEQ ID NO: 133598 - RNA, 22 nt, synthetic construct
  source 1..22: mol_type = other RNA
cttacagactgattaatttgag

SEQ ID NO: 133599 - RNA, 22 nt, synthetic construct
  source 1..22: mol_type = other RNA
cttacagatatcacccagacca

SEQ ID NO: 133600 - RNA, 22 nt, synthetic construct
  source 1..22: mol_type = other RNA
cttacagcagatctgcttgcag

SEQ ID NO: 133601 - RNA, 22 nt, synthetic construct
  source 1..22: mol_type = other RNA
cttacagtaagatcctggattg

SEQ ID NO: 133602 - RNA, 22 nt, synthetic construct
  source 1..22: mol_type = other RNA
cttacagtcatcacagtccagg

SEQ ID NO: 133603 - RNA, 22 nt, synthetic construct
  source 1..22: mol_type = other RNA
cttacagtgacatatgccggct

SEQ ID NO: 133604 - RNA, 22 nt, synthetic construct
  source 1..22: mol_type = other RNA
cttacataggcttagtacagcc

SEQ ID NO: 133605 - RNA, 22 nt, synthetic construct
  source 1..22: mol_type = other RNA
cttacatcagcagtgaccatat

SEQ ID NO: 133606 - RNA, 22 nt, synthetic construct
  source 1..22: mol_type = other RNA
cttacattgtaatcctgtttct

SEQ ID NO: 133607 - RNA, 22 nt, synthetic construct
  source 1..22: mol_type = other RNA
cttaccaaggctggagtgcagt

SEQ ID NO: 133608 - RNA, 22 nt, synthetic construct
  source 1..22: mol_type = other RNA
cttaccaagtgccgcgtttttt

SEQ ID NO: 133609 - RNA, 22 nt, synthetic construct
  source 1..22: mol_type = other RNA
cttaccactataatccagatgg

SEQ ID NO: 133610 - RNA, 22 nt, synthetic construct
  source 1..22: mol_type = other RNA
cttaccactgaagtgttgagag

SEQ ID NO: 133611 - RNA, 22 nt, synthetic construct
  source 1..22: mol_type = other RNA
cttaccagtgcttgcagccttc

SEQ ID NO: 133612 - RNA, 22 nt, synthetic construct
  source 1..22: mol_type = other RNA
cttacccccatcacactggtca

SEQ ID NO: 133613 - RNA, 22 nt, synthetic construct
  source 1..22: mol_type = other RNA
cttaccctcacagtcacaaagc

SEQ ID NO: 133614 - RNA, 22 nt, synthetic construct
  source 1..22: mol_type = other RNA
cttaccctctagctccccattc

SEQ ID NO: 133615 - RNA, 22 nt, synthetic construct
  source 1..22: mol_type = other RNA
cttaccctttactcagattcac

SEQ ID NO: 133616 - RNA, 22 nt, synthetic construct
  source 1..22: mol_type = other RNA
cttacctaagcatcgtgaagtc

SEQ ID NO: 133617 - RNA, 22 nt, synthetic construct
  source 1..22: mol_type = other RNA
cttacctcaaaggagagaagag

SEQ ID NO: 133618 - RNA, 22 nt, synthetic construct
  source 1..22: mol_type = other RNA
cttaccttaaaccatatacaaa

SEQ ID NO: 133619 - RNA, 22 nt, synthetic construct
  source 1..22: mol_type = other RNA
cttaccttctaaaatcatcaca

SEQ ID NO: 133620 - RNA, 22 nt, synthetic construct
  source 1..22: mol_type = other RNA
cttacctttatctttggatatc

SEQ ID NO: 133621 - RNA, 22 nt, synthetic construct
  source 1..22: mol_type = other RNA
cttacgcgtggatgtgtgcaca

SEQ ID NO: 133622 - RNA, 22 nt, synthetic construct
  source 1..22: mol_type = other RNA
cttactaaaaagaaaaagttgg

SEQ ID NO: 133623 - RNA, 22 nt, synthetic construct
  source 1..22: mol_type = other RNA
cttactaaatgatctttcaagg

SEQ ID NO: 133624 - RNA, 22 nt, synthetic construct
  source 1..22: mol_type = other RNA
cttactaaattttgaggctttt

SEQ ID NO: 133625 - RNA, 22 nt, synthetic construct
  source 1..22: mol_type = other RNA
cttactaccaccactaatgtca

SEQ ID NO: 133626 - RNA, 22 nt, synthetic construct
  source 1..22: mol_type = other RNA
cttactacgaagctacagtaat

SEQ ID NO: 133627 - RNA, 22 nt, synthetic construct
  source 1..22: mol_type = other RNA
cttactagttgtgctacctcaa

SEQ ID NO: 133628 - RNA, 22 nt, synthetic construct
  source 1..22: mol_type = other RNA
cttactctaatggggaaataga

SEQ ID NO: 133629 - RNA, 22 nt, synthetic construct
  source 1..22: mol_type = other RNA
cttactctcaaataatttggca

SEQ ID NO: 133630 - RNA, 22 nt, synthetic construct
  source 1..22: mol_type = other RNA
cttactgatttatagtgtttcc

SEQ ID NO: 133631 - RNA, 22 nt, synthetic construct
  source 1..22: mol_type = other RNA
cttactgcaacctccgtttttc

SEQ ID NO: 133632 - RNA, 22 nt, synthetic construct
  source 1..22: mol_type = other RNA
cttactggtgttaggcaatcct

SEQ ID NO: 133633 - RNA, 22 nt, synthetic construct
  source 1..22: mol_type = other RNA
cttactgtaagttcctggactg

SEQ ID NO: 133634 - RNA, 22 nt, synthetic construct
  source 1..22: mol_type = other RNA
cttactgtagcattgaagtata

SEQ ID NO: 133635 - RNA, 22 nt, synthetic construct
  source 1..22: mol_type = other RNA
cttacttccagctcacgttacc

SEQ ID NO: 133636 - RNA, 22 nt, synthetic construct
  source 1..22: mol_type = other RNA
cttacttgagccccagaatagg

SEQ ID NO: 133637 - RNA, 22 nt, synthetic construct
  source 1..22: mol_type = other RNA
cttagaaataactttaatcacc

SEQ ID NO: 133638 - RNA, 22 nt, synthetic construct
  source 1..22: mol_type = other RNA
cttagaaatgaagatggcctcc

SEQ ID NO: 133639 - RNA, 22 nt, synthetic construct
  source 1..22: mol_type = other RNA
cttagaaatttaaggaccaggt

SEQ ID NO: 133640 - RNA, 22 nt, synthetic construct
  source 1..22: mol_type = other RNA
cttagaagaagacttaggagaa

SEQ ID NO: 133641 - RNA, 22 nt, synthetic construct
  source 1..22: mol_type = other RNA
cttagaatataaactcttcctt

SEQ ID NO: 133642 - RNA, 22 nt, synthetic construct
  source 1..22: mol_type = other RNA
cttagacctcctagattgacct

SEQ ID NO: 133643 - RNA, 22 nt, synthetic construct
  source 1..22: mol_type = other RNA
cttagagggcttcatgctggga

SEQ ID NO: 133644 - RNA, 22 nt, synthetic construct
  source 1..22: mol_type = other RNA
cttagataggatgggcagactc

SEQ ID NO: 133645 - RNA, 22 nt, synthetic construct
  source 1..22: mol_type = other RNA
cttagatgagcccaggagttgc

SEQ ID NO: 133646 - RNA, 22 nt, synthetic construct
  source 1..22: mol_type = other RNA
cttagattacaaaagaacagga

SEQ ID NO: 133647 - RNA, 22 nt, synthetic construct
  source 1..22: mol_type = other RNA
cttagcatgttgctttgcgaaa

SEQ ID NO: 133648 - RNA, 22 nt, synthetic construct
  source 1..22: mol_type = other RNA
cttagcccaagctaccatttat

SEQ ID NO: 133649 - RNA, 22 nt, synthetic construct
  source 1..22: mol_type = other RNA
cttagcccacttgttgatgggg

SEQ ID NO: 133650 - RNA, 22 nt, synthetic construct
  source 1..22: mol_type = other RNA
cttagcccctgctgccagatgt

SEQ ID NO: 133651 - RNA, 22 nt, synthetic construct
  source 1..22: mol_type = other RNA
cttagccgggaggagccaagta

SEQ ID NO: 133652 - RNA, 22 nt, synthetic construct
  source 1..22: mol_type = other RNA
cttagccttccagagacaaagc

SEQ ID NO: 133653 - RNA, 22 nt, synthetic construct
  source 1..22: mol_type = other RNA
cttagccttggtaaaatcacta

SEQ ID NO: 133654 - RNA, 22 nt, synthetic construct
  source 1..22: mol_type = other RNA
cttagcgctgatgtgttgacct

SEQ ID NO: 133655 - RNA, 22 nt, synthetic construct
  source 1..22: mol_type = other RNA
cttagcgctggaggtcgggctg

SEQ ID NO: 133656 - RNA, 22 nt, synthetic construct
  source 1..22: mol_type = other RNA
cttagctaatttcagagagacc

SEQ ID NO: 133657 - RNA, 22 nt, synthetic construct
  source 1..22: mol_type = other RNA
cttagctatattcacttttgga

SEQ ID NO: 133658 - RNA, 22 nt, synthetic construct
  source 1..22: mol_type = other RNA
cttagctctcatgtcagagaca

SEQ ID NO: 133659 - RNA, 22 nt, synthetic construct
  source 1..22: mol_type = other RNA
cttagctcttaagcttaggtct

SEQ ID NO: 133660 - RNA, 22 nt, synthetic construct
  source 1..22: mol_type = other RNA
cttagctcttcccttaaccttt

SEQ ID NO: 133661 - RNA, 22 nt, synthetic construct
  source 1..22: mol_type = other RNA
cttagctgcctcttcctgttgc

SEQ ID NO: 133662 - RNA, 22 nt, synthetic construct
  source 1..22: mol_type = other RNA
cttagcttagaagaagacttag

SEQ ID NO: 133663 - RNA, 22 nt, synthetic construct
  source 1..22: mol_type = other RNA
cttaggaagctatggagcactg

SEQ ID NO: 133664 - RNA, 22 nt, synthetic construct
  source 1..22: mol_type = other RNA
cttaggagaaaagcttcataac

SEQ ID NO: 133665 - RNA, 22 nt, synthetic construct
  source 1..22: mol_type = other RNA
cttaggaggctattaactttga

SEQ ID NO: 133666 - RNA, 22 nt, synthetic construct
  source 1..22: mol_type = other RNA
cttaggatcaccaaagacttca

SEQ ID NO: 133667 - RNA, 22 nt, synthetic construct
  source 1..22: mol_type = other RNA
cttaggatcccagtcctttggg

SEQ ID NO: 133668 - RNA, 22 nt, synthetic construct
  source 1..22: mol_type = other RNA
cttaggcaaaggaaaaatctaa

SEQ ID NO: 133669 - RNA, 22 nt, synthetic construct
  source 1..22: mol_type = other RNA
cttaggcagttattaagagtgt

SEQ ID NO: 133670 - RNA, 22 nt, synthetic construct
  source 1..22: mol_type = other RNA
cttaggccataaatcaaggtac

SEQ ID NO: 133671 - RNA, 22 nt, synthetic construct
  source 1..22: mol_type = other RNA
cttaggctgaagcaggcttttt

SEQ ID NO: 133672 - RNA, 22 nt, synthetic construct
  source 1..22: mol_type = other RNA
cttaggctgttattagagttgt

SEQ ID NO: 133673 - RNA, 22 nt, synthetic construct
  source 1..22: mol_type = other RNA
cttaggtaagaaaaattccctc

SEQ ID NO: 133674 - RNA, 22 nt, synthetic construct
  source 1..22: mol_type = other RNA
cttaggtttctcatttttcagg

SEQ ID NO: 133675 - RNA, 22 nt, synthetic construct
  source 1..22: mol_type = other RNA
cttagtaaatatccgaaagaac

SEQ ID NO: 133676 - RNA, 22 nt, synthetic construct
  source 1..22: mol_type = other RNA
cttagtacagccatcaacctaa

SEQ ID NO: 133677 - RNA, 22 nt, synthetic construct
  source 1..22: mol_type = other RNA
cttagtctgacttctctcagag

SEQ ID NO: 133678 - RNA, 22 nt, synthetic construct
  source 1..22: mol_type = other RNA
cttagtcttctcagatctgttg

SEQ ID NO: 133679 - RNA, 22 nt, synthetic construct
  source 1..22: mol_type = other RNA
cttagtgagggaggccatcttc

SEQ ID NO: 133680 - RNA, 22 nt, synthetic construct
  source 1..22: mol_type = other RNA
cttagtgatgtcttttgaagaa

SEQ ID NO: 133681 - RNA, 22 nt, synthetic construct
  source 1..22: mol_type = other RNA
cttagtggttgacccataaact

SEQ ID NO: 133682 - RNA, 22 nt, synthetic construct
  source 1..22: mol_type = other RNA
cttagtgttcccttcttaaatg

SEQ ID NO: 133683 - RNA, 22 nt, synthetic construct
  source 1..22: mol_type = other RNA
cttagttcaagatgcataccaa

SEQ ID NO: 133684 - RNA, 22 nt, synthetic construct
  source 1..22: mol_type = other RNA
cttagttccattattccataaa

SEQ ID NO: 133685 - RNA, 22 nt, synthetic construct
  source 1..22: mol_type = other RNA
cttagttctgcttccacatttc

SEQ ID NO: 133686 - RNA, 22 nt, synthetic construct
  source 1..22: mol_type = other RNA
cttagtttgcaatacagttaac

SEQ ID NO: 133687 - RNA, 22 nt, synthetic construct
  source 1..22: mol_type = other RNA
cttagttttcacttttgtgcaa

SEQ ID NO: 133688 - RNA, 22 nt, synthetic construct
  source 1..22: mol_type = other RNA
cttataacaagaaaatctgaca

SEQ ID NO: 133689 - RNA, 22 nt, synthetic construct
  source 1..22: mol_type = other RNA
cttataatttctgagagtattg

SEQ ID NO: 133690 - RNA, 22 nt, synthetic construct
  source 1..22: mol_type = other RNA
cttatactagtagaaagcaggt

SEQ ID NO: 133691 - RNA, 22 nt, synthetic construct
  source 1..22: mol_type = other RNA
cttatagatgacgaaagtgaag

SEQ ID NO: 133692 - RNA, 22 nt, synthetic construct
  source 1..22: mol_type = other RNA
cttataggttgaatagggcctc

SEQ ID NO: 133693 - RNA, 22 nt, synthetic construct
  source 1..22: mol_type = other RNA
cttatagtattacctcccatgc

SEQ ID NO: 133694 - RNA, 22 nt, synthetic construct
  source 1..22: mol_type = other RNA
cttatataaatgctcagtgggt

SEQ ID NO: 133695 - RNA, 22 nt, synthetic construct
  source 1..22: mol_type = other RNA
cttatatcctaaacacttagca

SEQ ID NO: 133696 - RNA, 22 nt, synthetic construct
  source 1..22: mol_type = other RNA
cttatatgggatatctaacata

SEQ ID NO: 133697 - RNA, 22 nt, synthetic construct
  source 1..22: mol_type = other RNA
cttatattaattctgaggcctc

SEQ ID NO: 133698 - RNA, 22 nt, synthetic construct
  source 1..22: mol_type = other RNA
cttatcagatggtgatacctct

SEQ ID NO: 133699 - RNA, 22 nt, synthetic construct
  source 1..22: mol_type = other RNA
cttatcaggaaagtgccagcca

SEQ ID NO: 133700 - RNA, 22 nt, synthetic construct
  source 1..22: mol_type = other RNA
cttatcaggcttgagtctgtgc

SEQ ID NO: 133701 - RNA, 22 nt, synthetic construct
  source 1..22: mol_type = other RNA
cttatccattcatctctcgatg

SEQ ID NO: 133702 - RNA, 22 nt, synthetic construct
  source 1..22: mol_type = other RNA
cttatccctacctaaaaaggga

SEQ ID NO: 133703 - RNA, 22 nt, synthetic construct
  source 1..22: mol_type = other RNA
cttatccgataaagggtctggt

SEQ ID NO: 133704 - RNA, 22 nt, synthetic construct
  source 1..22: mol_type = other RNA
cttatcctcttctgaagaggct

SEQ ID NO: 133705 - RNA, 22 nt, synthetic construct
  source 1..22: mol_type = other RNA
cttatctaggcgaaatatctcc

SEQ ID NO: 133706 - RNA, 22 nt, synthetic construct
  source 1..22: mol_type = other RNA
cttatctgctgtcggttttcta

SEQ ID NO: 133707 - RNA, 22 nt, synthetic construct
  source 1..22: mol_type = other RNA
cttatcttttcaaaaacccaac

SEQ ID NO: 133708 - RNA, 22 nt, synthetic construct
  source 1..22: mol_type = other RNA
cttatgaggttattcaaaacaa

SEQ ID NO: 133709 - RNA, 22 nt, synthetic construct
  source 1..22: mol_type = other RNA
cttatgatcttgggaatacttt

SEQ ID NO: 133710 - RNA, 22 nt, synthetic construct
  source 1..22: mol_type = other RNA
cttatgcaagatggcaagtttc

SEQ ID NO: 133711 - RNA, 22 nt, synthetic construct
  source 1..22: mol_type = other RNA
cttatgcatcttgcaaaacgga

SEQ ID NO: 133712 - RNA, 22 nt, synthetic construct
  source 1..22: mol_type = other RNA
cttatgctggtgggctttgaga

SEQ ID NO: 133713 - RNA, 22 nt, synthetic construct
  source 1..22: mol_type = other RNA
cttatggagataaattacccaa

SEQ ID NO: 133714 - RNA, 22 nt, synthetic construct
  source 1..22: mol_type = other RNA
cttatggatatctggcctgcac

SEQ ID NO: 133715 - RNA, 22 nt, synthetic construct
  source 1..22: mol_type = other RNA
cttatggctataaccacgagta

SEQ ID NO: 133716 - RNA, 22 nt, synthetic construct
  source 1..22: mol_type = other RNA
cttatgtccagcccccagtttt

SEQ ID NO: 133717 - RNA, 22 nt, synthetic construct
  source 1..22: mol_type = other RNA
cttatgtcttgtggctgacatg

SEQ ID NO: 133718 - RNA, 22 nt, synthetic construct
  source 1..22: mol_type = other RNA
cttatgtgaaagtagaggactg

SEQ ID NO: 133719 - RNA, 22 nt, synthetic construct
  source 1..22: mol_type = other RNA
cttatgtgtgtataacccgttt

SEQ ID NO: 133720 - RNA, 22 nt, synthetic construct
  source 1..22: mol_type = other RNA
cttattaaaatgaacctgcttt

SEQ ID NO: 133721 - RNA, 22 nt, synthetic construct
  source 1..22: mol_type = other RNA
cttattaatgtgttgtctgatt

SEQ ID NO: 133722 - RNA, 22 nt, synthetic construct
  source 1..22: mol_type = other RNA
cttattagcaaagaggcaaaac

SEQ ID NO: 133723 - RNA, 22 nt, synthetic construct
  source 1..22: mol_type = other RNA
cttattatatgcctagatttca

SEQ ID NO: 133724 - RNA, 22 nt, synthetic construct
  source 1..22: mol_type = other RNA
cttattcaaataattgctgcag

SEQ ID NO: 133725 - RNA, 22 nt, synthetic construct
  source 1..22: mol_type = other RNA
cttattccccagggaaacctta

SEQ ID NO: 133726 - RNA, 22 nt, synthetic construct
  source 1..22: mol_type = other RNA
cttattctttttctagtttgag

SEQ ID NO: 133727 - RNA, 22 nt, synthetic construct
  source 1..22: mol_type = other RNA
cttattgagaagcagaaaatca

SEQ ID NO: 133728 - RNA, 22 nt, synthetic construct
  source 1..22: mol_type = other RNA
cttattgattcagatgacagaa

SEQ ID NO: 133729 - RNA, 22 nt, synthetic construct
  source 1..22: mol_type = other RNA
cttattggaaaactctgtttcc

SEQ ID NO: 133730 - RNA, 22 nt, synthetic construct
  source 1..22: mol_type = other RNA
cttattggttatctgtactttt

SEQ ID NO: 133731 - RNA, 22 nt, synthetic construct
  source 1..22: mol_type = other RNA
cttatttaatgtgctgtccatt

SEQ ID NO: 133732 - RNA, 22 nt, synthetic construct
  source 1..22: mol_type = other RNA
cttatttccagggggtatggag

SEQ ID NO: 133733 - RNA, 22 nt, synthetic construct
  source 1..22: mol_type = other RNA
cttatttccttccagtttatat

SEQ ID NO: 133734 - RNA, 22 nt, synthetic construct
  source 1..22: mol_type = other RNA
cttatttggaaatatggtcact

SEQ ID NO: 133735 - RNA, 22 nt, synthetic construct
  source 1..22: mol_type = other RNA
cttatttgttactgatctgctc

SEQ ID NO: 133736 - RNA, 22 nt, synthetic construct
  source 1..22: mol_type = other RNA
cttattttttcccagatacgtt

SEQ ID NO: 133737 - RNA, 22 nt, synthetic construct
  source 1..22: mol_type = other RNA
cttcaaaagacatcactaagag

SEQ ID NO: 133738 - RNA, 22 nt, synthetic construct
  source 1..22: mol_type = other RNA
cttcaaaatctgatgtgtatgt

SEQ ID NO: 133739 - RNA, 22 nt, synthetic construct
  source 1..22: mol_type = other RNA
cttcaaaccactatctaataaa

SEQ ID NO: 133740 - RNA, 22 nt, synthetic construct
  source 1..22: mol_type = other RNA
cttcaaagagaacaaaatacct

SEQ ID NO: 133741 - RNA, 22 nt, synthetic construct
  source 1..22: mol_type = other RNA
cttcaaagggtcactattaacc

SEQ ID NO: 133742 - RNA, 22 nt, synthetic construct
  source 1..22: mol_type = other RNA
cttcaaagttatgtttatgaca

SEQ ID NO: 133743 - RNA, 22 nt, synthetic construct
  source 1..22: mol_type = other RNA
cttcaaccatacttttcaactg

SEQ ID NO: 133744 - RNA, 22 nt, synthetic construct
  source 1..22: mol_type = other RNA
cttcaacctcaactttaggtta

SEQ ID NO: 133745 - RNA, 22 nt, synthetic construct
  source 1..22: mol_type = other RNA
cttcaacctcctgggctcaaat

SEQ ID NO: 133746 - RNA, 22 nt, synthetic construct
  source 1..22: mol_type = other RNA
cttcaacggacatttttccaaa

SEQ ID NO: 133747 - RNA, 22 nt, synthetic construct
  source 1..22: mol_type = other RNA
cttcaagaggttaaaaccacaa

SEQ ID NO: 133748 - RNA, 22 nt, synthetic construct
  source 1..22: mol_type = other RNA
cttcaagatactgcactaaact

SEQ ID NO: 133749 - RNA, 22 nt, synthetic construct
  source 1..22: mol_type = other RNA
cttcaagatttcataggcatct

SEQ ID NO: 133750 - RNA, 22 nt, synthetic construct
  source 1..22: mol_type = other RNA
cttcaagcattgggagctttca

SEQ ID NO: 133751 - RNA, 22 nt, synthetic construct
  source 1..22: mol_type = other RNA
cttcaaggtaatctagtttatc

SEQ ID NO: 133752 - RNA, 22 nt, synthetic construct
  source 1..22: mol_type = other RNA
cttcaaggttcacaaattagaa

SEQ ID NO: 133753 - RNA, 22 nt, synthetic construct
  source 1..22: mol_type = other RNA
cttcaagttgctttttcttctt

SEQ ID NO: 133754 - RNA, 22 nt, synthetic construct
  source 1..22: mol_type = other RNA
cttcaatatgcagtatgtgcca

SEQ ID NO: 133755 - RNA, 22 nt, synthetic construct
  source 1..22: mol_type = other RNA
cttcaatattttggaagactat

SEQ ID NO: 133756 - RNA, 22 nt, synthetic construct
  source 1..22: mol_type = other RNA
cttcaatgagggcagagataac

SEQ ID NO: 133757 - RNA, 22 nt, synthetic construct
  source 1..22: mol_type = other RNA
cttcaatgctacagtaagcaaa

SEQ ID NO: 133758 - RNA, 22 nt, synthetic construct
  source 1..22: mol_type = other RNA
cttcaatgtttggtagatttct

SEQ ID NO: 133759 - RNA, 22 nt, synthetic construct
  source 1..22: mol_type = other RNA
cttcacaaacaaatccttttcc

SEQ ID NO: 133760 - RNA, 22 nt, synthetic construct
  source 1..22: mol_type = other RNA
cttcacaaagccctcaggacca

SEQ ID NO: 133761 - RNA, 22 nt, synthetic construct
  source 1..22: mol_type = other RNA
cttcacacattaactatggaca

SEQ ID NO: 133762 - RNA, 22 nt, synthetic construct
  source 1..22: mol_type = other RNA
cttcacaccatttagatcatct

SEQ ID NO: 133763 - RNA, 22 nt, synthetic construct
  source 1..22: mol_type = other RNA
cttcacacttagttcaagatgc

SEQ ID NO: 133764 - RNA, 22 nt, synthetic construct
  source 1..22: mol_type = other RNA
cttcaccaaagatttactaaac

SEQ ID NO: 133765 - RNA, 22 nt, synthetic construct
  source 1..22: mol_type = other RNA
cttcaccaactgaagcggggct

SEQ ID NO: 133766 - RNA, 22 nt, synthetic construct
  source 1..22: mol_type = other RNA
cttcaccattccagccattctc

SEQ ID NO: 133767 - RNA, 22 nt, synthetic construct
  source 1..22: mol_type = other RNA
cttcaccgtgcaactagagaaa

SEQ ID NO: 133768 - RNA, 22 nt, synthetic construct
  source 1..22: mol_type = other RNA
cttcacctctacacaaaaatcc

SEQ ID NO: 133769 - RNA, 22 nt, synthetic construct
  source 1..22: mol_type = other RNA
cttcacgatgcttaggtaagaa

SEQ ID NO: 133770 - RNA, 22 nt, synthetic construct
  source 1..22: mol_type = other RNA
cttcacgtgcattcatactgaa

SEQ ID NO: 133771 - RNA, 22 nt, synthetic construct
  source 1..22: mol_type = other RNA
cttcacgtggcgctccctctgt

SEQ ID NO: 133772 - RNA, 22 nt, synthetic construct
  source 1..22: mol_type = other RNA
cttcactagatctcttttcctt

SEQ ID NO: 133773 - RNA, 22 nt, synthetic construct
  source 1..22: mol_type = other RNA
cttcactagtgggtcgggtgtc

SEQ ID NO: 133774 - RNA, 22 nt, synthetic construct
  source 1..22: mol_type = other RNA
cttcactcttaaaaggagatat

SEQ ID NO: 133775 - RNA, 22 nt, synthetic construct
  source 1..22: mol_type = other RNA
cttcactcttctgcaagttgct

SEQ ID NO: 133776 - RNA, 22 nt, synthetic construct
  source 1..22: mol_type = other RNA
cttcactgactacacatacaca

SEQ ID NO: 133777 - RNA, 22 nt, synthetic construct
  source 1..22: mol_type = other RNA
cttcactggagaattctactaa

SEQ ID NO: 133778 - RNA, 22 nt, synthetic construct
  source 1..22: mol_type = other RNA
cttcacttccaagtcccggaag

SEQ ID NO: 133779 - RNA, 22 nt, synthetic construct
  source 1..22: mol_type = other RNA
cttcacttctctgctgctgaaa

SEQ ID NO: 133780 - RNA, 22 nt, synthetic construct
  source 1..22: mol_type = other RNA
cttcactttcgtcatctataag

SEQ ID NO: 133781 - RNA, 22 nt, synthetic construct
  source 1..22: mol_type = other RNA
cttcagaactcttctccaagga

SEQ ID NO: 133782 - RNA, 22 nt, synthetic construct
  source 1..22: mol_type = other RNA
cttcagaagaaattacttcttt

SEQ ID NO: 133783 - RNA, 22 nt, synthetic construct
  source 1..22: mol_type = other RNA
cttcagaagaggataaggggca

SEQ ID NO: 133784 - RNA, 22 nt, synthetic construct
  source 1..22: mol_type = other RNA
cttcagaagccctgcagccaga

SEQ ID NO: 133785 - RNA, 22 nt, synthetic construct
  source 1..22: mol_type = other RNA
cttcagaaggagtccagtcctg

SEQ ID NO: 133786 - RNA, 22 nt, synthetic construct
  source 1..22: mol_type = other RNA
cttcagaggccctggtgctttc

SEQ ID NO: 133787 - RNA, 22 nt, synthetic construct
  source 1..22: mol_type = other RNA
cttcagaggtctgttactcccg

SEQ ID NO: 133788 - RNA, 22 nt, synthetic construct
  source 1..22: mol_type = other RNA
cttcagcaaggaccattagcag

SEQ ID NO: 133789 - RNA, 22 nt, synthetic construct
  source 1..22: mol_type = other RNA
cttcagcctaagcaagttacat

SEQ ID NO: 133790 - RNA, 22 nt, synthetic construct
  source 1..22: mol_type = other RNA
cttcagcctgtgtcagtgacag

SEQ ID NO: 133791 - RNA, 22 nt, synthetic construct
  source 1..22: mol_type = other RNA
cttcagcgcttgaacaaatatg

SEQ ID NO: 133792 - RNA, 22 nt, synthetic construct
  source 1..22: mol_type = other RNA
cttcagctatggtgttatttgt

SEQ ID NO: 133793 - RNA, 22 nt, synthetic construct
  source 1..22: mol_type = other RNA
cttcaggaacaccttgaacatg

SEQ ID NO: 133794 - RNA, 22 nt, synthetic construct
  source 1..22: mol_type = other RNA
cttcaggtctctctgaaattag

SEQ ID NO: 133795 - RNA, 22 nt, synthetic construct
  source 1..22: mol_type = other RNA
cttcagtatgaatgcacgtgaa

SEQ ID NO: 133796 - RNA, 22 nt, synthetic construct
  source 1..22: mol_type = other RNA
cttcagtcagttctctgccccg

SEQ ID NO: 133797 - RNA, 22 nt, synthetic construct
  source 1..22: mol_type = other RNA
cttcagtccttaccactgaagt

SEQ ID NO: 133798 - RNA, 22 nt, synthetic construct
  source 1..22: mol_type = other RNA
cttcagtgccaacacatggggc

SEQ ID NO: 133799 - RNA, 22 nt, synthetic construct
  source 1..22: mol_type = other RNA
cttcagtggtaaggactgaagt

SEQ ID NO: 133800 - RNA, 22 nt, synthetic construct
  source 1..22: mol_type = other RNA
cttcagtgtagtcagacacact

SEQ ID NO: 133801 - RNA, 22 nt, synthetic construct
  source 1..22: mol_type = other RNA
cttcagttggtgaagagagcct

SEQ ID NO: 133802 - RNA, 22 nt, synthetic construct
  source 1..22: mol_type = other RNA
cttcagttttatcaattagttc

SEQ ID NO: 133803 - RNA, 22 nt, synthetic construct
  source 1..22: mol_type = other RNA
cttcagttttgagtggcatcat

SEQ ID NO: 133804 - RNA, 22 nt, synthetic construct
  source 1..22: mol_type = other RNA
cttcatactattttctatagtg

SEQ ID NO: 133805 - RNA, 22 nt, synthetic construct
  source 1..22: mol_type = other RNA
cttcatagatgttatgccccct

SEQ ID NO: 133806 - RNA, 22 nt, synthetic construct
  source 1..22: mol_type = other RNA
cttcatataagtggaatcattc

SEQ ID NO: 133807 - RNA, 22 nt, synthetic construct
  source 1..22: mol_type = other RNA
cttcatattttgtgggaattca

SEQ ID NO: 133808 - RNA, 22 nt, synthetic construct
  source 1..22: mol_type = other RNA
cttcatcagtccctgtgttttt

SEQ ID NO: 133809 - RNA, 22 nt, synthetic construct
  source 1..22: mol_type = other RNA
cttcatctggaccagttactct

SEQ ID NO: 133810 - RNA, 22 nt, synthetic construct
  source 1..22: mol_type = other RNA
cttcatctttcctgatcacacc

SEQ ID NO: 133811 - RNA, 22 nt, synthetic construct
  source 1..22: mol_type = other RNA
cttcatgattcagtcttggtag

SEQ ID NO: 133812 - RNA, 22 nt, synthetic construct
  source 1..22: mol_type = other RNA
cttcatgctgggagaccaggag

SEQ ID NO: 133813 - RNA, 22 nt, synthetic construct
  source 1..22: mol_type = other RNA
cttcatggactagactgcctga

SEQ ID NO: 133814 - RNA, 22 nt, synthetic construct
  source 1..22: mol_type = other RNA
cttcatgggtggaaattaaaca

SEQ ID NO: 133815 - RNA, 22 nt, synthetic construct
  source 1..22: mol_type = other RNA
cttcatgtacaatgaattagca

SEQ ID NO: 133816 - RNA, 22 nt, synthetic construct
  source 1..22: mol_type = other RNA
cttcatgtcccctgtccaagta

SEQ ID NO: 133817 - RNA, 22 nt, synthetic construct
  source 1..22: mol_type = other RNA
cttcattccgcgtttattagaa

SEQ ID NO: 133818 - RNA, 22 nt, synthetic construct
  source 1..22: mol_type = other RNA
cttcattcttgacatgattgag

SEQ ID NO: 133819 - RNA, 22 nt, synthetic construct
  source 1..22: mol_type = other RNA
cttcatttaattctatctgaac

SEQ ID NO: 133820 - RNA, 22 nt, synthetic construct
  source 1..22: mol_type = other RNA
cttcatttctaagccatgtttc

SEQ ID NO: 133821 - RNA, 22 nt, synthetic construct
  source 1..22: mol_type = other RNA
cttccaaaagcaggccctgaga

SEQ ID NO: 133822 - RNA, 22 nt, synthetic construct
  source 1..22: mol_type = other RNA
cttccaaaatattgaagaggga

SEQ ID NO: 133823 - RNA, 22 nt, synthetic construct
  source 1..22: mol_type = other RNA
cttccaaagtatgcatagcagg

SEQ ID NO: 133824 - RNA, 22 nt, synthetic construct
  source 1..22: mol_type = other RNA
cttccaaataatcccgcacctt

SEQ ID NO: 133825 - RNA, 22 nt, synthetic construct
  source 1..22: mol_type = other RNA
cttccaaccatcttcttagtgt

SEQ ID NO: 133826 - RNA, 22 nt, synthetic construct
  source 1..22: mol_type = other RNA
cttccaagtcccggaagctggg

SEQ ID NO: 133827 - RNA, 22 nt, synthetic construct
  source 1..22: mol_type = other RNA
cttccaattgcagaaaaataga

SEQ ID NO: 133828 - RNA, 22 nt, synthetic construct
  source 1..22: mol_type = other RNA
cttccacagctatcaggccttc

SEQ ID NO: 133829 - RNA, 22 nt, synthetic construct
  source 1..22: mol_type = other RNA
cttccacatttctaatttccaa

SEQ ID NO: 133830 - RNA, 22 nt, synthetic construct
  source 1..22: mol_type = other RNA
cttccacccaagtggagcctgc

SEQ ID NO: 133831 - RNA, 22 nt, synthetic construct
  source 1..22: mol_type = other RNA
cttccacctgctctttatctcc

SEQ ID NO: 133832 - RNA, 22 nt, synthetic construct
  source 1..22: mol_type = other RNA
cttccacggaatgcccctttga

SEQ ID NO: 133833 - RNA, 22 nt, synthetic construct
  source 1..22: mol_type = other RNA
cttccactagtgggatcaaacc

SEQ ID NO: 133834 - RNA, 22 nt, synthetic construct
  source 1..22: mol_type = other RNA
cttccagaaacttccaaccatc

SEQ ID NO: 133835 - RNA, 22 nt, synthetic construct
  source 1..22: mol_type = other RNA
cttccagaaggagaaaacaaaa

SEQ ID NO: 133836 - RNA, 22 nt, synthetic construct
  source 1..22: mol_type = other RNA
cttccagagacaaagcataaaa

SEQ ID NO: 133837 - RNA, 22 nt, synthetic construct
  source 1..22: mol_type = other RNA
cttccagatgttttacacatgt

SEQ ID NO: 133838 - RNA, 22 nt, synthetic construct
  source 1..22: mol_type = other RNA
cttccagcaagactttatgtgg

SEQ ID NO: 133839 - RNA, 22 nt, synthetic construct
  source 1..22: mol_type = other RNA
cttccagcctggtaatgaatag

SEQ ID NO: 133840 - RNA, 22 nt, synthetic construct
  source 1..22: mol_type = other RNA
cttccagcgtgtgcatgaccct

SEQ ID NO: 133841 - RNA, 22 nt, synthetic construct
  source 1..22: mol_type = other RNA
cttccagctcacgttaccctct

SEQ ID NO: 133842 - RNA, 22 nt, synthetic construct
  source 1..22: mol_type = other RNA
cttccagtacatctcaattcag

SEQ ID NO: 133843 - RNA, 22 nt, synthetic construct
  source 1..22: mol_type = other RNA
cttccagtatgatgccactcaa

SEQ ID NO: 133844 - RNA, 22 nt, synthetic construct
  source 1..22: mol_type = other RNA
cttccagtgttttaggggggaa

SEQ ID NO: 133845 - RNA, 22 nt, synthetic construct
  source 1..22: mol_type = other RNA
cttccagtttatatgcctagat

SEQ ID NO: 133846 - RNA, 22 nt, synthetic construct
  source 1..22: mol_type = other RNA
cttccatacgaaagcctttatt

SEQ ID NO: 133847 - RNA, 22 nt, synthetic construct
  source 1..22: mol_type = other RNA
cttccatgagattacatagcaa

SEQ ID NO: 133848 - RNA, 22 nt, synthetic construct
  source 1..22: mol_type = other RNA
cttccattttagatcaagtcct

SEQ ID NO: 133849 - RNA, 22 nt, synthetic construct
  source 1..22: mol_type = other RNA
cttccattttgcttaataattc

SEQ ID NO: 133850 - RNA, 22 nt, synthetic construct
  source 1..22: mol_type = other RNA
cttcccaaagacatcctgattt

SEQ ID NO: 133851 - RNA, 22 nt, synthetic construct
  source 1..22: mol_type = other RNA
cttcccaaatccaggatggcat

SEQ ID NO: 133852 - RNA, 22 nt, synthetic construct
  source 1..22: mol_type = other RNA
cttcccaatcctttgtgcaggt

SEQ ID NO: 133853 - RNA, 22 nt, synthetic construct
  source 1..22: mol_type = other RNA
cttcccactgctatgactaatt

SEQ ID NO: 133854 - RNA, 22 nt, synthetic construct
  source 1..22: mol_type = other RNA
cttcccacttcgaaagttcaga

SEQ ID NO: 133855 - RNA, 22 nt, synthetic construct
  source 1..22: mol_type = other RNA
cttcccagacagggaatgcccc

SEQ ID NO: 133856 - RNA, 22 nt, synthetic construct
  source 1..22: mol_type = other RNA
cttcccatctcactcacctagc

SEQ ID NO: 133857 - RNA, 22 nt, synthetic construct
  source 1..22: mol_type = other RNA
cttcccatgaacatggtttgat

SEQ ID NO: 133858 - RNA, 22 nt, synthetic construct
  source 1..22: mol_type = other RNA
cttccccacctttcctgcccct

SEQ ID NO: 133859 - RNA, 22 nt, synthetic construct
  source 1..22: mol_type = other RNA
cttcccccaaaacttaggaggc

SEQ ID NO: 133860 - RNA, 22 nt, synthetic construct
  source 1..22: mol_type = other RNA
cttcccccaaagaaggaaaaaa

SEQ ID NO: 133861 - RNA, 22 nt, synthetic construct
  source 1..22: mol_type = other RNA
cttcccccctctctctttctgg

SEQ ID NO: 133862 - RNA, 22 nt, synthetic construct
  source 1..22: mol_type = other RNA
cttcccctgctgttcccaagca

SEQ ID NO: 133863 - RNA, 22 nt, synthetic construct
  source 1..22: mol_type = other RNA
cttcccctggtcgagctgggtg

SEQ ID NO: 133864 - RNA, 22 nt, synthetic construct
  source 1..22: mol_type = other RNA
cttcccctttctttggttttga

SEQ ID NO: 133865 - RNA, 22 nt, synthetic construct
  source 1..22: mol_type = other RNA
cttccctaaagagaatcttaaa

SEQ ID NO: 133866 - RNA, 22 nt, synthetic construct
  source 1..22: mol_type = other RNA
cttccctactcactgaaaccct

SEQ ID NO: 133867 - RNA, 22 nt, synthetic construct
  source 1..22: mol_type = other RNA
cttccctagcccagcacttcca

SEQ ID NO: 133868 - RNA, 22 nt, synthetic construct
  source 1..22: mol_type = other RNA
cttccctctcagtggtgctttt

SEQ ID NO: 133869 - RNA, 22 nt, synthetic construct
  source 1..22: mol_type = other RNA
cttccctctttctcaacttcct

SEQ ID NO: 133870 - RNA, 22 nt, synthetic construct
  source 1..22: mol_type = other RNA
cttccctgaacaatgattttct

SEQ ID NO: 133871 - RNA, 22 nt, synthetic construct
  source 1..22: mol_type = other RNA
cttcccttaacctttttctttt

SEQ ID NO: 133872 - RNA, 22 nt, synthetic construct
  source 1..22: mol_type = other RNA
cttcccttagctctcatgtcag

SEQ ID NO: 133873 - RNA, 22 nt, synthetic construct
  source 1..22: mol_type = other RNA
cttcccttctcgaagtggtgct

SEQ ID NO: 133874 - RNA, 22 nt, synthetic construct
  source 1..22: mol_type = other RNA
cttcccttgtgcacctcgggtt

SEQ ID NO: 133875 - RNA, 22 nt, synthetic construct
  source 1..22: mol_type = other RNA
cttccgacctgtagattgggct

SEQ ID NO: 133876 - RNA, 22 nt, synthetic construct
  source 1..22: mol_type = other RNA
cttccgggacttggaagtgaag

SEQ ID NO: 133877 - RNA, 22 nt, synthetic construct
  source 1..22: mol_type = other RNA
cttccgtctcaagattgtgtga

SEQ ID NO: 133878 - RNA, 22 nt, synthetic construct
  source 1..22: mol_type = other RNA
cttcctaaacctgctacgaatg

SEQ ID NO: 133879 - RNA, 22 nt, synthetic construct
  source 1..22: mol_type = other RNA
cttcctaaagagagtgacagct

SEQ ID NO: 133880 - RNA, 22 nt, synthetic construct
  source 1..22: mol_type = other RNA
cttcctaactggtctcctttct

SEQ ID NO: 133881 - RNA, 22 nt, synthetic construct
  source 1..22: mol_type = other RNA
cttcctaagaaagggtgtgtga

SEQ ID NO: 133882 - RNA, 22 nt, synthetic construct
  source 1..22: mol_type = other RNA
cttcctacacatatctttaggt

SEQ ID NO: 133883 - RNA, 22 nt, synthetic construct
  source 1..22: mol_type = other RNA
cttcctacccaagcttaggtca

SEQ ID NO: 133884 - RNA, 22 nt, synthetic construct
  source 1..22: mol_type = other RNA
cttcctaccctgccttccttgg

SEQ ID NO: 133885 - RNA, 22 nt, synthetic construct
  source 1..22: mol_type = other RNA
cttcctattagaagaatgatta

SEQ ID NO: 133886 - RNA, 22 nt, synthetic construct
  source 1..22: mol_type = other RNA
cttcctattttataatgggcaa

SEQ ID NO: 133887 - RNA, 22 nt, synthetic construct
  source 1..22: mol_type = other RNA
cttcctcaggatctacattaaa

SEQ ID NO: 133888 - RNA, 22 nt, synthetic construct
  source 1..22: mol_type = other RNA
cttcctcatccctcatatcagt

SEQ ID NO: 133889 - RNA, 22 nt, synthetic construct
  source 1..22: mol_type = other RNA
cttcctcctctggacattatcc

SEQ ID NO: 133890 - RNA, 22 nt, synthetic construct
  source 1..22: mol_type = other RNA
cttcctctcttaaatccgagac

SEQ ID NO: 133891 - RNA, 22 nt, synthetic construct
  source 1..22: mol_type = other RNA
cttcctctggctgacctggtac

SEQ ID NO: 133892 - RNA, 22 nt, synthetic construct
  source 1..22: mol_type = other RNA
cttcctcttcctcatccctcat

SEQ ID NO: 133893 - RNA, 22 nt, synthetic construct
  source 1..22: mol_type = other RNA
cttcctgacctctgcagttagc

SEQ ID NO: 133894 - RNA, 22 nt, synthetic construct
  source 1..22: mol_type = other RNA
cttcctggctctagcccagctt

SEQ ID NO: 133895 - RNA, 22 nt, synthetic construct
  source 1..22: mol_type = other RNA
cttcctgtatatctccttttaa

SEQ ID NO: 133896 - RNA, 22 nt, synthetic construct
  source 1..22: mol_type = other RNA
cttcctgtcttggacccatgcc

SEQ ID NO: 133897 - RNA, 22 nt, synthetic construct
  source 1..22: mol_type = other RNA
cttcctgttctttgttagttta

SEQ ID NO: 133898 - RNA, 22 nt, synthetic construct
  source 1..22: mol_type = other RNA
cttcctgttgctttaacctctg

SEQ ID NO: 133899 - RNA, 22 nt, synthetic construct
  source 1..22: mol_type = other RNA
cttcctgttttagtggctcaca

SEQ ID NO: 133900 - RNA, 22 nt, synthetic construct
  source 1..22: mol_type = other RNA
cttccttaatgtttagtagaat

SEQ ID NO: 133901 - RNA, 22 nt, synthetic construct
  source 1..22: mol_type = other RNA
cttccttatccgataaagggtc

SEQ ID NO: 133902 - RNA, 22 nt, synthetic construct
  source 1..22: mol_type = other RNA
cttccttcatgtcccctgtcca

SEQ ID NO: 133903 - RNA, 22 nt, synthetic construct
  source 1..22: mol_type = other RNA
cttccttctcttatactagtag

SEQ ID NO: 133904 - RNA, 22 nt, synthetic construct
  source 1..22: mol_type = other RNA
cttccttgatcagcttcctacc

SEQ ID NO: 133905 - RNA, 22 nt, synthetic construct
  source 1..22: mol_type = other RNA
cttccttgctatgtaatctcat

SEQ ID NO: 133906 - RNA, 22 nt, synthetic construct
  source 1..22: mol_type = other RNA
cttccttgctcaggagtaactg

SEQ ID NO: 133907 - RNA, 22 nt, synthetic construct
  source 1..22: mol_type = other RNA
cttccttgcttgtcttgaatag

SEQ ID NO: 133908 - RNA, 22 nt, synthetic construct
  source 1..22: mol_type = other RNA
cttccttgggcacactccccag

SEQ ID NO: 133909 - RNA, 22 nt, synthetic construct
  source 1..22: mol_type = other RNA
cttccttgtgtcttaaattcaa

SEQ ID NO: 133910 - RNA, 22 nt, synthetic construct
  source 1..22: mol_type = other RNA
cttcctttgatgacttacagat

SEQ ID NO: 133911 - RNA, 22 nt, synthetic construct
  source 1..22: mol_type = other RNA
cttcgaaagttcagatagaatt

SEQ ID NO: 133912 - RNA, 22 nt, synthetic construct
  source 1..22: mol_type = other RNA
cttcgaactaaggaaagctcag

SEQ ID NO: 133913 - RNA, 22 nt, synthetic construct
  source 1..22: mol_type = other RNA
cttcgaagcaaaacatatgtca

SEQ ID NO: 133914 - RNA, 22 nt, synthetic construct
  source 1..22: mol_type = other RNA
cttcgaagcttattaaaatgaa

SEQ ID NO: 133915 - RNA, 22 nt, synthetic construct
  source 1..22: mol_type = other RNA
cttcgacagtcccttgcctgac

SEQ ID NO: 133916 - RNA, 22 nt, synthetic construct
  source 1..22: mol_type = other RNA
cttcgagaagggaagtaaagat

SEQ ID NO: 133917 - RNA, 22 nt, synthetic construct
  source 1..22: mol_type = other RNA
cttcgaggcatctagttaccac

SEQ ID NO: 133918 - RNA, 22 nt, synthetic construct
  source 1..22: mol_type = other RNA
cttcgagggggctgagtatggg

SEQ ID NO: 133919 - RNA, 22 nt, synthetic construct
  source 1..22: mol_type = other RNA
cttcgaggtcgcaccctgagca

SEQ ID NO: 133920 - RNA, 22 nt, synthetic construct
  source 1..22: mol_type = other RNA
cttcgagttctgggagttcatt

SEQ ID NO: 133921 - RNA, 22 nt, synthetic construct
  source 1..22: mol_type = other RNA
cttcgcagggtgaaacttgaat

SEQ ID NO: 133922 - RNA, 22 nt, synthetic construct
  source 1..22: mol_type = other RNA
cttcgcctttctcgcagcgggg

SEQ ID NO: 133923 - RNA, 22 nt, synthetic construct
  source 1..22: mol_type = other RNA
cttcgcctttgttgccaggtgg

SEQ ID NO: 133924 - RNA, 22 nt, synthetic construct
  source 1..22: mol_type = other RNA
cttcgcgcgcggcagggatgct

SEQ ID NO: 133925 - RNA, 22 nt, synthetic construct
  source 1..22: mol_type = other RNA
cttcgcgggcaccttccctact

SEQ ID NO: 133926 - RNA, 22 nt, synthetic construct
  source 1..22: mol_type = other RNA
cttcgctcttttaaaaattaca

SEQ ID NO: 133927 - RNA, 22 nt, synthetic construct
  source 1..22: mol_type = other RNA
cttcgggtgtcagaattccatc

SEQ ID NO: 133928 - RNA, 22 nt, synthetic construct
  source 1..22: mol_type = other RNA
cttcgtcaaggggagaggcctc

SEQ ID NO: 133929 - RNA, 22 nt, synthetic construct
  source 1..22: mol_type = other RNA
cttcgtgtgtggagtggggcac

SEQ ID NO: 133930 - RNA, 22 nt, synthetic construct
  source 1..22: mol_type = other RNA
cttcgttcagtttagtaaatct

SEQ ID NO: 133931 - RNA, 22 nt, synthetic construct
  source 1..22: mol_type = other RNA
cttctaaaatcatcacagtatg

SEQ ID NO: 133932 - RNA, 22 nt, synthetic construct
  source 1..22: mol_type = other RNA
cttctaaccctcaaatgccata

SEQ ID NO: 133933 - RNA, 22 nt, synthetic construct
  source 1..22: mol_type = other RNA
cttctaagctaagagttttata

SEQ ID NO: 133934 - RNA, 22 nt, synthetic construct
  source 1..22: mol_type = other RNA
cttctaataggaagtggctaga

SEQ ID NO: 133935 - RNA, 22 nt, synthetic construct
  source 1..22: mol_type = other RNA
cttctaatgcccattaaaacca

SEQ ID NO: 133936 - RNA, 22 nt, synthetic construct
  source 1..22: mol_type = other RNA
cttctacaatggttgaactagt

SEQ ID NO: 133937 - RNA, 22 nt, synthetic construct
  source 1..22: mol_type = other RNA
cttctacagaatgttcaagtat

SEQ ID NO: 133938 - RNA, 22 nt, synthetic construct
  source 1..22: mol_type = other RNA
cttctacatccccccacccctg

SEQ ID NO: 133939 - RNA, 22 nt, synthetic construct
  source 1..22: mol_type = other RNA
cttctacccactattgaaagcc

SEQ ID NO: 133940 - RNA, 22 nt, synthetic construct
  source 1..22: mol_type = other RNA
cttctaccttgaaaatgccctt

SEQ ID NO: 133941 - RNA, 22 nt, synthetic construct
  source 1..22: mol_type = other RNA
cttctactcactgtactactga

SEQ ID NO: 133942 - RNA, 22 nt, synthetic construct
  source 1..22: mol_type = other RNA
cttctactgtgaattcactaat

SEQ ID NO: 133943 - RNA, 22 nt, synthetic construct
  source 1..22: mol_type = other RNA
cttctacttatcttttctagtt

SEQ ID NO: 133944 - RNA, 22 nt, synthetic construct
  source 1..22: mol_type = other RNA
cttctagccaaagcaagccttg

SEQ ID NO: 133945 - RNA, 22 nt, synthetic construct
  source 1..22: mol_type = other RNA
cttctagcctccagaaaaccag

SEQ ID NO: 133946 - RNA, 22 nt, synthetic construct
  source 1..22: mol_type = other RNA
cttctagctttcagcactgcta

SEQ ID NO: 133947 - RNA, 22 nt, synthetic construct
  source 1..22: mol_type = other RNA
cttctagtaacttggtcgaaaa

SEQ ID NO: 133948 - RNA, 22 nt, synthetic construct
  source 1..22: mol_type = other RNA
cttctagtcacatttgctttac

SEQ ID NO: 133949 - RNA, 22 nt, synthetic construct
  source 1..22: mol_type = other RNA
cttctatccagtgacacctgag

SEQ ID NO: 133950 - RNA, 22 nt, synthetic construct
  source 1..22: mol_type = other RNA
cttctatgtgacaaacactttt

SEQ ID NO: 133951 - RNA, 22 nt, synthetic construct
  source 1..22: mol_type = other RNA
cttctattccagagaattcaga

SEQ ID NO: 133952 - RNA, 22 nt, synthetic construct
  source 1..22: mol_type = other RNA
cttctattccattgttctcttt

SEQ ID NO: 133953 - RNA, 22 nt, synthetic construct
  source 1..22: mol_type = other RNA
cttctcaaacaggatacaaaaa

SEQ ID NO: 133954 - RNA, 22 nt, synthetic construct
  source 1..22: mol_type = other RNA
cttctcaaactgtgtgcttgga

SEQ ID NO: 133955 - RNA, 22 nt, synthetic construct
  source 1..22: mol_type = other RNA
cttctcaataaggaaagcacgt

SEQ ID NO: 133956 - RNA, 22 nt, synthetic construct
  source 1..22: mol_type = other RNA
cttctcagaaggacaccagtca

SEQ ID NO: 133957 - RNA, 22 nt, synthetic construct
  source 1..22: mol_type = other RNA
cttctcagatctgttgcagtcc

SEQ ID NO: 133958 - RNA, 22 nt, synthetic construct
  source 1..22: mol_type = other RNA
cttctcagctatagcttctgag

SEQ ID NO: 133959 - RNA, 22 nt, synthetic construct
  source 1..22: mol_type = other RNA
cttctcagggcctgcttttgga

SEQ ID NO: 133960 - RNA, 22 nt, synthetic construct
  source 1..22: mol_type = other RNA
cttctcagttgcagcatgctca

SEQ ID NO: 133961 - RNA, 22 nt, synthetic construct
  source 1..22: mol_type = other RNA
cttctcatagtcttccaaaata

SEQ ID NO: 133962 - RNA, 22 nt, synthetic construct
  source 1..22: mol_type = other RNA
cttctccaaggaaagtgtgctt

SEQ ID NO: 133963 - RNA, 22 nt, synthetic construct
  source 1..22: mol_type = other RNA
cttctccctcttcgctctttta

SEQ ID NO: 133964 - RNA, 22 nt, synthetic construct
  source 1..22: mol_type = other RNA
cttctcctccaacccattccag

SEQ ID NO: 133965 - RNA, 22 nt, synthetic construct
  source 1..22: mol_type = other RNA
cttctcgaagtggtgcttgaac

SEQ ID NO: 133966 - RNA, 22 nt, synthetic construct
  source 1..22: mol_type = other RNA
cttctcgtgtgagctctagcct

SEQ ID NO: 133967 - RNA, 22 nt, synthetic construct
  source 1..22: mol_type = other RNA
cttctctaatgtaaacagcata

SEQ ID NO: 133968 - RNA, 22 nt, synthetic construct
  source 1..22: mol_type = other RNA
cttctctactctgcctcagttg

SEQ ID NO: 133969 - RNA, 22 nt, synthetic construct
  source 1..22: mol_type = other RNA
cttctctcagagggaaactgtt

SEQ ID NO: 133970 - RNA, 22 nt, synthetic construct
  source 1..22: mol_type = other RNA
cttctctcctttgaggtaagaa

SEQ ID NO: 133971 - RNA, 22 nt, synthetic construct
  source 1..22: mol_type = other RNA
cttctctctctgcttcactaac

SEQ ID NO: 133972 - RNA, 22 nt, synthetic construct
  source 1..22: mol_type = other RNA
cttctctcttccaaataatccc

SEQ ID NO: 133973 - RNA, 22 nt, synthetic construct
  source 1..22: mol_type = other RNA
cttctctgctgctgaaaaagat

SEQ ID NO: 133974 - RNA, 22 nt, synthetic construct
  source 1..22: mol_type = other RNA
cttctctggagcaagcatgagt

SEQ ID NO: 133975 - RNA, 22 nt, synthetic construct
  source 1..22: mol_type = other RNA
cttctcttatactagtagaaag

SEQ ID NO: 133976 - RNA, 22 nt, synthetic construct
  source 1..22: mol_type = other RNA
cttctgaagaaattatctgtgg

SEQ ID NO: 133977 - RNA, 22 nt, synthetic construct
  source 1..22: mol_type = other RNA
cttctgaagaggctttctgtgt

SEQ ID NO: 133978 - RNA, 22 nt, synthetic construct
  source 1..22: mol_type = other RNA
cttctgaaggcactaacaaagg

SEQ ID NO: 133979 - RNA, 22 nt, synthetic construct
  source 1..22: mol_type = other RNA
cttctgaaggtgcctgccatag

SEQ ID NO: 133980 - RNA, 22 nt, synthetic construct
  source 1..22: mol_type = other RNA
cttctgaattgagatgtactgg

SEQ ID NO: 133981 - RNA, 22 nt, synthetic construct
  source 1..22: mol_type = other RNA
cttctgagaaggcgaaatgtga

SEQ ID NO: 133982 - RNA, 22 nt, synthetic construct
  source 1..22: mol_type = other RNA
cttctgagcagtgtttcctaga

SEQ ID NO: 133983 - RNA, 22 nt, synthetic construct
  source 1..22: mol_type = other RNA
cttctgagctgttaatggttag

SEQ ID NO: 133984 - RNA, 22 nt, synthetic construct
  source 1..22: mol_type = other RNA
cttctgaggagctgagaccaca

SEQ ID NO: 133985 - RNA, 22 nt, synthetic construct
  source 1..22: mol_type = other RNA
cttctgagtgttacttgaaatc

SEQ ID NO: 133986 - RNA, 22 nt, synthetic construct
  source 1..22: mol_type = other RNA
cttctgataggaatatcgtctt

SEQ ID NO: 133987 - RNA, 22 nt, synthetic construct
  source 1..22: mol_type = other RNA
cttctgatatcctgtaaacctg

SEQ ID NO: 133988 - RNA, 22 nt, synthetic construct
  source 1..22: mol_type = other RNA
cttctgatcacagaagtgtttt

SEQ ID NO: 133989 - RNA, 22 nt, synthetic construct
  source 1..22: mol_type = other RNA
cttctgcaagttgctatccagt

SEQ ID NO: 133990 - RNA, 22 nt, synthetic construct
  source 1..22: mol_type = other RNA
cttctgcaggctgaactgctga

SEQ ID NO: 133991 - RNA, 22 nt, synthetic construct
  source 1..22: mol_type = other RNA
cttctgccttgacctcccaaag

SEQ ID NO: 133992 - RNA, 22 nt, synthetic construct
  source 1..22: mol_type = other RNA
cttctgctcactttgggattag

SEQ ID NO: 133993 - RNA, 22 nt, synthetic construct
  source 1..22: mol_type = other RNA
cttctgctcggctctgtcaccc

SEQ ID NO: 133994 - RNA, 22 nt, synthetic construct
  source 1..22: mol_type = other RNA
cttctgctgggcccactctccc

SEQ ID NO: 133995 - RNA, 22 nt, synthetic construct
  source 1..22: mol_type = other RNA
cttctggaaagttcaaatgagg

SEQ ID NO: 133996 - RNA, 22 nt, synthetic construct
  source 1..22: mol_type = other RNA
cttctggaagatttctactggg

SEQ ID NO: 133997 - RNA, 22 nt, synthetic construct
  source 1..22: mol_type = other RNA
cttctggatagcattatccctt

SEQ ID NO: 133998 - RNA, 22 nt, synthetic construct
  source 1..22: mol_type = other RNA
cttctggatgtgtatgatcaaa

SEQ ID NO: 133999 - RNA, 22 nt, synthetic construct
  source 1..22: mol_type = other RNA
cttctggggttcaaaccaccta

SEQ ID NO: 134000 - RNA, 22 nt, synthetic construct
  source 1..22: mol_type = other RNA
cttctgtaatattaaccaagaa

SEQ ID NO: 134001 - RNA, 22 nt, synthetic construct
  source 1..22: mol_type = other RNA
cttctgtgatcagaagagcact

SEQ ID NO: 134002 - RNA, 22 nt, synthetic construct
  source 1..22: mol_type = other RNA
cttctgttaatagataggtcat

SEQ ID NO: 134003 - RNA, 22 nt, synthetic construct
  source 1..22: mol_type = other RNA
cttctgttggagagatggtagt

SEQ ID NO: 134004 - RNA, 22 nt, synthetic construct
  source 1..22: mol_type = other RNA
cttctgtttttcttagtctagc

SEQ ID NO: 134005 - RNA, 22 nt, synthetic construct
  source 1..22: mol_type = other RNA
cttcttaaatgtgaattagatg

SEQ ID NO: 134006 - RNA, 22 nt, synthetic construct
  source 1..22: mol_type = other RNA
cttcttaagacatttgggaatg

SEQ ID NO: 134007 - RNA, 22 nt, synthetic construct
  source 1..22: mol_type = other RNA
cttcttagtaaatatccgaaag

SEQ ID NO: 134008 - RNA, 22 nt, synthetic construct
  source 1..22: mol_type = other RNA
cttcttagtgttcccttcttaa

SEQ ID NO: 134009 - RNA, 22 nt, synthetic construct
  source 1..22: mol_type = other RNA
cttcttattggttatctgtact

SEQ ID NO: 134010 - RNA, 22 nt, synthetic construct
  source 1..22: mol_type = other RNA
cttcttatttccttccagttta

SEQ ID NO: 134011 - RNA, 22 nt, synthetic construct
  source 1..22: mol_type = other RNA
cttcttatttgttactgatctg

SEQ ID NO: 134012 - RNA, 22 nt, synthetic construct
  source 1..22: mol_type = other RNA
cttcttcaaaagacatcactaa

SEQ ID NO: 134013 - RNA, 22 nt, synthetic construct
  source 1..22: mol_type = other RNA
cttcttcacacattaactatgg

SEQ ID NO: 134014 - RNA, 22 nt, synthetic construct
  source 1..22: mol_type = other RNA
cttcttctaagctaagagtttt

SEQ ID NO: 134015 - RNA, 22 nt, synthetic construct
  source 1..22: mol_type = other RNA
cttcttctgttattttagaaag

SEQ ID NO: 134016 - RNA, 22 nt, synthetic construct
  source 1..22: mol_type = other RNA
cttcttctgttggagagatggt

SEQ ID NO: 134017 - RNA, 22 nt, synthetic construct
  source 1..22: mol_type = other RNA
cttcttgagagtctcttaagac

SEQ ID NO: 134018 - RNA, 22 nt, synthetic construct
  source 1..22: mol_type = other RNA
cttcttggagtaaacctgcaat

SEQ ID NO: 134019 - RNA, 22 nt, synthetic construct
  source 1..22: mol_type = other RNA
cttcttggattttcttcattta

SEQ ID NO: 134020 - RNA, 22 nt, synthetic construct
  source 1..22: mol_type = other RNA
cttcttgttagaattttgcttt

SEQ ID NO: 134021 - RNA, 22 nt, synthetic construct
  source 1..22: mol_type = other RNA
cttcttgttttgttctcgttca

SEQ ID NO: 134022 - RNA, 22 nt, synthetic construct
  source 1..22: mol_type = other RNA
cttctttctctttcagccatcc

SEQ ID NO: 134023 - RNA, 22 nt, synthetic construct
  source 1..22: mol_type = other RNA
cttctttctttcaaatgtgaca

SEQ ID NO: 134024 - RNA, 22 nt, synthetic construct
  source 1..22: mol_type = other RNA
cttctttggctcaatggttaag

SEQ ID NO: 134025 - RNA, 22 nt, synthetic construct
  source 1..22: mol_type = other RNA
cttctttgggggaagcaggaac

SEQ ID NO: 134026 - RNA, 22 nt, synthetic construct
  source 1..22: mol_type = other RNA
cttcttttacttgcttggtttc

SEQ ID NO: 134027 - RNA, 22 nt, synthetic construct
  source 1..22: mol_type = other RNA
cttcttttcttaaaactttagg

SEQ ID NO: 134028 - RNA, 22 nt, synthetic construct
  source 1..22: mol_type = other RNA
cttgaaaatgcccttatttaat

SEQ ID NO: 134029 - RNA, 22 nt, synthetic construct
  source 1..22: mol_type = other RNA
cttgaaaatttccagcatttta

SEQ ID NO: 134030 - RNA, 22 nt, synthetic construct
  source 1..22: mol_type = other RNA
cttgaaacctgccatggtgtta

SEQ ID NO: 134031 - RNA, 22 nt, synthetic construct
  source 1..22: mol_type = other RNA
cttgaaagatcatttagtaagt

SEQ ID NO: 134032 - RNA, 22 nt, synthetic construct
  source 1..22: mol_type = other RNA
cttgaaaggatactgagaacag

SEQ ID NO: 134033 - RNA, 22 nt, synthetic construct
  source 1..22: mol_type = other RNA
cttgaaaggggccaggtgtgga

SEQ ID NO: 134034 - RNA, 22 nt, synthetic construct
  source 1..22: mol_type = other RNA
cttgaaatcatttcactctttt

SEQ ID NO: 134035 - RNA, 22 nt, synthetic construct
  source 1..22: mol_type = other RNA
cttgaacatgaacgagaacaaa

SEQ ID NO: 134036 - RNA, 22 nt, synthetic construct
  source 1..22: mol_type = other RNA
cttgaacattctgtagaagtaa

SEQ ID NO: 134037 - RNA, 22 nt, synthetic construct
  source 1..22: mol_type = other RNA
cttgaacccgaggtgcacaagg

SEQ ID NO: 134038 - RNA, 22 nt, synthetic construct
  source 1..22: mol_type = other RNA
cttgaacctgaaaaacggaggt

SEQ ID NO: 134039 - RNA, 22 nt, synthetic construct
  source 1..22: mol_type = other RNA
cttgaaccttcctcttcctcat

SEQ ID NO: 134040 - RNA, 22 nt, synthetic construct
  source 1..22: mol_type = other RNA
cttgaactaagtgtgaagatta

SEQ ID NO: 134041 - RNA, 22 nt, synthetic construct
  source 1..22: mol_type = other RNA
cttgaactgctggtctggaatg

SEQ ID NO: 134042 - RNA, 22 nt, synthetic construct
  source 1..22: mol_type = other RNA
cttgaactgggacttctagcct

SEQ ID NO: 134043 - RNA, 22 nt, synthetic construct
  source 1..22: mol_type = other RNA
cttgaagaaaccaagagcatag

SEQ ID NO: 134044 - RNA, 22 nt, synthetic construct
  source 1..22: mol_type = other RNA
cttgaagagcgcttctatgtga

SEQ ID NO: 134045 - RNA, 22 nt, synthetic construct
  source 1..22: mol_type = other RNA
cttgaagatggcaaacagactg

SEQ ID NO: 134046 - RNA, 22 nt, synthetic construct
  source 1..22: mol_type = other RNA
cttgaaggcaatgtagggaata

SEQ ID NO: 134047 - RNA, 22 nt, synthetic construct
  source 1..22: mol_type = other RNA
cttgaagtacttcagcgcttga

SEQ ID NO: 134048 - RNA, 22 nt, synthetic construct
  source 1..22: mol_type = other RNA
cttgaagtcagttacagcattt

SEQ ID NO: 134049 - RNA, 22 nt, synthetic construct
  source 1..22: mol_type = other RNA
cttgaatactcgtgtgtctcat

SEQ ID NO: 134050 - RNA, 22 nt, synthetic construct
  source 1..22: mol_type = other RNA
cttgaatagcatcttagctctt

SEQ ID NO: 134051 - RNA, 22 nt, synthetic construct
  source 1..22: mol_type = other RNA
cttgaatctctctatccaccac

SEQ ID NO: 134052 - RNA, 22 nt, synthetic construct
  source 1..22: mol_type = other RNA
cttgaatgtgcctacatagtcc

SEQ ID NO: 134053 - RNA, 22 nt, synthetic construct
  source 1..22: mol_type = other RNA
cttgaattagtgattttaccaa

SEQ ID NO: 134054 - RNA, 22 nt, synthetic construct
  source 1..22: mol_type = other RNA
cttgaattcagatggccccaaa

SEQ ID NO: 134055 - RNA, 22 nt, synthetic construct
  source 1..22: mol_type = other RNA
cttgacaaaaggccccttgaaa

SEQ ID NO: 134056 - RNA, 22 nt, synthetic construct
  source 1..22: mol_type = other RNA
cttgacaataaatggtgcaggc

SEQ ID NO: 134057 - RNA, 22 nt, synthetic construct
  source 1..22: mol_type = other RNA
cttgacacaaaggactggaact

SEQ ID NO: 134058 - RNA, 22 nt, synthetic construct
  source 1..22: mol_type = other RNA
cttgacatgattgaggacttca

SEQ ID NO: 134059 - RNA, 22 nt, synthetic construct
  source 1..22: mol_type = other RNA
cttgacattcttaccttctaaa

SEQ ID NO: 134060 - RNA, 22 nt, synthetic construct
  source 1..22: mol_type = other RNA
cttgacctcagtggtagttaca

SEQ ID NO: 134061 - RNA, 22 nt, synthetic construct
  source 1..22: mol_type = other RNA
cttgacctcccaaaggactggg

SEQ ID NO: 134062 - RNA, 22 nt, synthetic construct
  source 1..22: mol_type = other RNA
cttgaccttagttttcactttt

SEQ ID NO: 134063 - RNA, 22 nt, synthetic construct
  source 1..22: mol_type = other RNA
cttgaccttgtgcatgtgcagg

SEQ ID NO: 134064 - RNA, 22 nt, synthetic construct
  source 1..22: mol_type = other RNA
cttgacgaagtcacattctagt

SEQ ID NO: 134065 - RNA, 22 nt, synthetic construct
  source 1..22: mol_type = other RNA
cttgactattttaccctcattt

SEQ ID NO: 134066 - RNA, 22 nt, synthetic construct
  source 1..22: mol_type = other RNA
cttgacttcacttccaagtccc

SEQ ID NO: 134067 - RNA, 22 nt, synthetic construct
  source 1..22: mol_type = other RNA
cttgagacggaagactcatact

SEQ ID NO: 134068 - RNA, 22 nt, synthetic construct
  source 1..22: mol_type = other RNA
cttgagagagataaaacctgga

SEQ ID NO: 134069 - RNA, 22 nt, synthetic construct
  source 1..22: mol_type = other RNA
cttgagagcagagacacacatc

SEQ ID NO: 134070 - RNA, 22 nt, synthetic construct
  source 1..22: mol_type = other RNA
cttgagagtctcttaagaccac

SEQ ID NO: 134071 - RNA, 22 nt, synthetic construct
  source 1..22: mol_type = other RNA
cttgagcagatcagtaacaaat

SEQ ID NO: 134072 - RNA, 22 nt, synthetic construct
  source 1..22: mol_type = other RNA
cttgagcccagggggtcgagac

SEQ ID NO: 134073 - RNA, 22 nt, synthetic construct
  source 1..22: mol_type = other RNA
cttgagccccagaataggcaaa

SEQ ID NO: 134074 - RNA, 22 nt, synthetic construct
  source 1..22: mol_type = other RNA
cttgagcctggaagttcaaggt

SEQ ID NO: 134075 - RNA, 22 nt, synthetic construct
  source 1..22: mol_type = other RNA
cttgaggtgagacagaccctgg

SEQ ID NO: 134076 - RNA, 22 nt, synthetic construct
  source 1..22: mol_type = other RNA
cttgaggtgattaaaggccctg

SEQ ID NO: 134077 - RNA, 22 nt, synthetic construct
  source 1..22: mol_type = other RNA
cttgaggtgattcagagtgctg

SEQ ID NO: 134078 - RNA, 22 nt, synthetic construct
  source 1..22: mol_type = other RNA
cttgaggtttacttggggagag

SEQ ID NO: 134079 - RNA, 22 nt, synthetic construct
  source 1..22: mol_type = other RNA
cttgagtatttttgagcttttc

SEQ ID NO: 134080 - RNA, 22 nt, synthetic construct
  source 1..22: mol_type = other RNA
cttgagtctgtgctctgtattt

SEQ ID NO: 134081 - RNA, 22 nt, synthetic construct
  source 1..22: mol_type = other RNA
cttgagtgcaggagtttgagac

SEQ ID NO: 134082 - RNA, 22 nt, synthetic construct
  source 1..22: mol_type = other RNA
cttgagttaggaatttacattt

SEQ ID NO: 134083 - RNA, 22 nt, synthetic construct
  source 1..22: mol_type = other RNA
cttgagtttgttctgtcacatt

SEQ ID NO: 134084 - RNA, 22 nt, synthetic construct
  source 1..22: mol_type = other RNA
cttgatcagcttcctacccaag

SEQ ID NO: 134085 - RNA, 22 nt, synthetic construct
  source 1..22: mol_type = other RNA
cttgatcagggatttggccaga

SEQ ID NO: 134086 - RNA, 22 nt, synthetic construct
  source 1..22: mol_type = other RNA
cttgatccaggtgtatgatctt

SEQ ID NO: 134087 - RNA, 22 nt, synthetic construct
  source 1..22: mol_type = other RNA
cttgatccattacatcaacata

SEQ ID NO: 134088 - RNA, 22 nt, synthetic construct
  source 1..22: mol_type = other RNA
cttgatctaaaatggaagactt

SEQ ID NO: 134089 - RNA, 22 nt, synthetic construct
  source 1..22: mol_type = other RNA
cttgatctacatttagatttca

SEQ ID NO: 134090 - RNA, 22 nt, synthetic construct
  source 1..22: mol_type = other RNA
cttgatctttacttcccttctc

SEQ ID NO: 134091 - RNA, 22 nt, synthetic construct
  source 1..22: mol_type = other RNA
cttgatgatagaataccactta

SEQ ID NO: 134092 - RNA, 22 nt, synthetic construct
  source 1..22: mol_type = other RNA
cttgatggtttggggcttttga

SEQ ID NO: 134093 - RNA, 22 nt, synthetic construct
  source 1..22: mol_type = other RNA
cttgatgtcacaagccagggtc

SEQ ID NO: 134094 - RNA, 22 nt, synthetic construct
  source 1..22: mol_type = other RNA
cttgattacaagggtgacagag

SEQ ID NO: 134095 - RNA, 22 nt, synthetic construct
  source 1..22: mol_type = other RNA
cttgattactttacagttatgt

SEQ ID NO: 134096 - RNA, 22 nt, synthetic construct
  source 1..22: mol_type = other RNA
cttgattagcttcctcaggatc

SEQ ID NO: 134097 - RNA, 22 nt, synthetic construct
  source 1..22: mol_type = other RNA
cttgatttatggcctaagatgg

SEQ ID NO: 134098 - RNA, 22 nt, synthetic construct
  source 1..22: mol_type = other RNA
cttgcaaaacaatagcccagca

SEQ ID NO: 134099 - RNA, 22 nt, synthetic construct
  source 1..22: mol_type = other RNA
cttgcaaaacggaaactttata

SEQ ID NO: 134100 - RNA, 22 nt, synthetic construct
  source 1..22: mol_type = other RNA
cttgcaagccacattagccact

SEQ ID NO: 134101 - RNA, 22 nt, synthetic construct
  source 1..22: mol_type = other RNA
cttgcaaggcccaccatgatgc

SEQ ID NO: 134102 - RNA, 22 nt, synthetic construct
  source 1..22: mol_type = other RNA
cttgcacataatataaaaagac

SEQ ID NO: 134103 - RNA, 22 nt, synthetic construct
  source 1..22: mol_type = other RNA
cttgcacattagaatcatccgg

SEQ ID NO: 134104 - RNA, 22 nt, synthetic construct
  source 1..22: mol_type = other RNA
cttgcaccaactccacattgtc

SEQ ID NO: 134105 - RNA, 22 nt, synthetic construct
  source 1..22: mol_type = other RNA
cttgcagaagagtgaagctgga

SEQ ID NO: 134106 - RNA, 22 nt, synthetic construct
  source 1..22: mol_type = other RNA
cttgcagacaataattcttcct

SEQ ID NO: 134107 - RNA, 22 nt, synthetic construct
  source 1..22: mol_type = other RNA
cttgcagccttccctgaacaat

SEQ ID NO: 134108 - RNA, 22 nt, synthetic construct
  source 1..22: mol_type = other RNA
cttgcataactcgtaatgcgat

SEQ ID NO: 134109 - RNA, 22 nt, synthetic construct
  source 1..22: mol_type = other RNA
cttgcattagagccccaagaaa

SEQ ID NO: 134110 - RNA, 22 nt, synthetic construct
  source 1..22: mol_type = other RNA
cttgccaacagttactttcctt

SEQ ID NO: 134111 - RNA, 22 nt, synthetic construct
  source 1..22: mol_type = other RNA
cttgccaaggcttgctttggct

SEQ ID NO: 134112 - RNA, 22 nt, synthetic construct
  source 1..22: mol_type = other RNA
cttgccatcttgcataagtttt

SEQ ID NO: 134113 - RNA, 22 nt, synthetic construct
  source 1..22: mol_type = other RNA
cttgccattctcccagttgtca

SEQ ID NO: 134114 - RNA, 22 nt, synthetic construct
  source 1..22: mol_type = other RNA
cttgcccaagctggtcctgaac

SEQ ID NO: 134115 - RNA, 22 nt, synthetic construct
  source 1..22: mol_type = other RNA
cttgcctaggctggagtgcaat

SEQ ID NO: 134116 - RNA, 22 nt, synthetic construct
  source 1..22: mol_type = other RNA
cttgcctgacagcaaataaaca

SEQ ID NO: 134117 - RNA, 22 nt, synthetic construct
  source 1..22: mol_type = other RNA
cttgcggtcttttagccaacaa

SEQ ID NO: 134118 - RNA, 22 nt, synthetic construct
  source 1..22: mol_type = other RNA
cttgctaaacatgtatactaat

SEQ ID NO: 134119 - RNA, 22 nt, synthetic construct
  source 1..22: mol_type = other RNA
cttgctagtagcagaatcccca

SEQ ID NO: 134120 - RNA, 22 nt, synthetic construct
  source 1..22: mol_type = other RNA
cttgctatgtaatctcatggaa

SEQ ID NO: 134121 - RNA, 22 nt, synthetic construct
  source 1..22: mol_type = other RNA
cttgctcaggagtaactgctcc

SEQ ID NO: 134122 - RNA, 22 nt, synthetic construct
  source 1..22: mol_type = other RNA
cttgctcattcatctgcagtgt

SEQ ID NO: 134123 - RNA, 22 nt, synthetic construct
  source 1..22: mol_type = other RNA
cttgctccagagaagttttcca

SEQ ID NO: 134124 - RNA, 22 nt, synthetic construct
  source 1..22: mol_type = other RNA
cttgctctacaaaccttcttat

SEQ ID NO: 134125 - RNA, 22 nt, synthetic construct
  source 1..22: mol_type = other RNA
cttgctctcttgcccaagctgg

SEQ ID NO: 134126 - RNA, 22 nt, synthetic construct
  source 1..22: mol_type = other RNA
cttgctctgcggcaggcattgt

SEQ ID NO: 134127 - RNA, 22 nt, synthetic construct
  source 1..22: mol_type = other RNA
cttgctctgtcacccacgtgga

SEQ ID NO: 134128 - RNA, 22 nt, synthetic construct
  source 1..22: mol_type = other RNA
cttgctgaagaataactgtcct

SEQ ID NO: 134129 - RNA, 22 nt, synthetic construct
  source 1..22: mol_type = other RNA
cttgctgcactggctattagtt

SEQ ID NO: 134130 - RNA, 22 nt, synthetic construct
  source 1..22: mol_type = other RNA
cttgctgcttctacccactatt

SEQ ID NO: 134131 - RNA, 22 nt, synthetic construct
  source 1..22: mol_type = other RNA
cttgctggaagttggcccaaca

SEQ ID NO: 134132 - RNA, 22 nt, synthetic construct
  source 1..22: mol_type = other RNA
cttgctgttgtaatgttacttc

SEQ ID NO: 134133 - RNA, 22 nt, synthetic construct
  source 1..22: mol_type = other RNA
cttgcttaggctgaagcaggct

SEQ ID NO: 134134 - RNA, 22 nt, synthetic construct
  source 1..22: mol_type = other RNA
cttgcttgggaacagcagggga

SEQ ID NO: 134135 - RNA, 22 nt, synthetic construct
  source 1..22: mol_type = other RNA
cttgcttggtttcacacgcatt

SEQ ID NO: 134136 - RNA, 22 nt, synthetic construct
  source 1..22: mol_type = other RNA
cttgcttgtcttgaatagcatc

SEQ ID NO: 134137 - RNA, 22 nt, synthetic construct
  source 1..22: mol_type = other RNA
cttgctttattacttcagtttt

SEQ ID NO: 134138 - RNA, 22 nt, synthetic construct
  source 1..22: mol_type = other RNA
cttgctttgaatttggaaaggg

SEQ ID NO: 134139 - RNA, 22 nt, synthetic construct
  source 1..22: mol_type = other RNA
cttgctttgctgccccagctaa

SEQ ID NO: 134140 - RNA, 22 nt, synthetic construct
  source 1..22: mol_type = other RNA
cttgctttggctagaagcatct

SEQ ID NO: 134141 - RNA, 22 nt, synthetic construct
  source 1..22: mol_type = other RNA
cttggaaaacaaattgcatcaa

SEQ ID NO: 134142 - RNA, 22 nt, synthetic construct
  source 1..22: mol_type = other RNA
cttggaaatgatacctcattta

SEQ ID NO: 134143 - RNA, 22 nt, synthetic construct
  source 1..22: mol_type = other RNA
cttggaaattagaaatgtggaa

SEQ ID NO: 134144 - RNA, 22 nt, synthetic construct
  source 1..22: mol_type = other RNA
cttggaagtgaagtcaagatga

SEQ ID NO: 134145 - RNA, 22 nt, synthetic construct
  source 1..22: mol_type = other RNA
cttggaatgtgcacctccagtg

SEQ ID NO: 134146 - RNA, 22 nt, synthetic construct
  source 1..22: mol_type = other RNA
cttggacaggggacatgaagga

SEQ ID NO: 134147 - RNA, 22 nt, synthetic construct
  source 1..22: mol_type = other RNA
cttggacccatgcccatgtgca

SEQ ID NO: 134148 - RNA, 22 nt, synthetic construct
  source 1..22: mol_type = other RNA
cttggagaacttaaaggtttgg

SEQ ID NO: 134149 - RNA, 22 nt, synthetic construct
  source 1..22: mol_type = other RNA
cttggagaagagttctgaaggc

SEQ ID NO: 134150 - RNA, 22 nt, synthetic construct
  source 1..22: mol_type = other RNA
cttggagagaaaccttggtgtg

SEQ ID NO: 134151 - RNA, 22 nt, synthetic construct
  source 1..22: mol_type = other RNA
cttggaggagccctgctgtggc

SEQ ID NO: 134152 - RNA, 22 nt, synthetic construct
  source 1..22: mol_type = other RNA
cttggagtaaacctgcaatttt

SEQ ID NO: 134153 - RNA, 22 nt, synthetic construct
  source 1..22: mol_type = other RNA
cttggagtcacttgacaaaaat

SEQ ID NO: 134154 - RNA, 22 nt, synthetic construct
  source 1..22: mol_type = other RNA
cttggagttttccccctacacc

SEQ ID NO: 134155 - RNA, 22 nt, synthetic construct
  source 1..22: mol_type = other RNA
cttggatattctacagaaaacc

SEQ ID NO: 134156 - RNA, 22 nt, synthetic construct
  source 1..22: mol_type = other RNA
cttggatcttatctgctgtcgg

SEQ ID NO: 134157 - RNA, 22 nt, synthetic construct
  source 1..22: mol_type = other RNA
cttggattgctaaactgttccc

SEQ ID NO: 134158 - RNA, 22 nt, synthetic construct
  source 1..22: mol_type = other RNA
cttggattgtgtgtcgagaaaa

SEQ ID NO: 134159 - RNA, 22 nt, synthetic construct
  source 1..22: mol_type = other RNA
cttggcaaggggaatggtactg

SEQ ID NO: 134160 - RNA, 22 nt, synthetic construct
  source 1..22: mol_type = other RNA
cttggcacagaattattgattg

SEQ ID NO: 134161 - RNA, 22 nt, synthetic construct
  source 1..22: mol_type = other RNA
cttggcacaggagagcgacagc

SEQ ID NO: 134162 - RNA, 22 nt, synthetic construct
  source 1..22: mol_type = other RNA
cttggccaacatggcgaaacgc

SEQ ID NO: 134163 - RNA, 22 nt, synthetic construct
  source 1..22: mol_type = other RNA
cttggccattttcttttaaatg

SEQ ID NO: 134164 - RNA, 22 nt, synthetic construct
  source 1..22: mol_type = other RNA
cttggccgaatgtggtggtatg

SEQ ID NO: 134165 - RNA, 22 nt, synthetic construct
  source 1..22: mol_type = other RNA
cttggcctccccaagtgctgtg

SEQ ID NO: 134166 - RNA, 22 nt, synthetic construct
  source 1..22: mol_type = other RNA
cttggccttctgaggagctgag

SEQ ID NO: 134167 - RNA, 22 nt, synthetic construct
  source 1..22: mol_type = other RNA
cttggcgcagtgcttagcgctg

SEQ ID NO: 134168 - RNA, 22 nt, synthetic construct
  source 1..22: mol_type = other RNA
cttggctagactaagaaaaaca

SEQ ID NO: 134169 - RNA, 22 nt, synthetic construct
  source 1..22: mol_type = other RNA
cttggctattgtcagtaattct

SEQ ID NO: 134170 - RNA, 22 nt, synthetic construct
  source 1..22: mol_type = other RNA
cttggctcctcccggctaagat

SEQ ID NO: 134171 - RNA, 22 nt, synthetic construct
  source 1..22: mol_type = other RNA
cttggcttttggcagcgtaact

SEQ ID NO: 134172 - RNA, 22 nt, synthetic construct
  source 1..22: mol_type = other RNA
cttgggaacagcaggggaaggc

SEQ ID NO: 134173 - RNA, 22 nt, synthetic construct
  source 1..22: mol_type = other RNA
cttgggaatactttcccatctc

SEQ ID NO: 134174 - RNA, 22 nt, synthetic construct
  source 1..22: mol_type = other RNA
cttgggagaaaatttttacagt

SEQ ID NO: 134175 - RNA, 22 nt, synthetic construct
  source 1..22: mol_type = other RNA
cttgggaggctgaggctgggga

SEQ ID NO: 134176 - RNA, 22 nt, synthetic construct
  source 1..22: mol_type = other RNA
cttgggatgcagcaaaagcacc

SEQ ID NO: 134177 - RNA, 22 nt, synthetic construct
  source 1..22: mol_type = other RNA
cttgggatgtttctacctttgg

SEQ ID NO: 134178 - RNA, 22 nt, synthetic construct
  source 1..22: mol_type = other RNA
cttgggcaagagagcaagtccc

SEQ ID NO: 134179 - RNA, 22 nt, synthetic construct
  source 1..22: mol_type = other RNA
cttgggcacactccccagtggt

SEQ ID NO: 134180 - RNA, 22 nt, synthetic construct
  source 1..22: mol_type = other RNA
cttgggctaaggtggagtggtg

SEQ ID NO: 134181 - RNA, 22 nt, synthetic construct
  source 1..22: mol_type = other RNA
cttgggctcccttccagcgtgt

SEQ ID NO: 134182 - RNA, 22 nt, synthetic construct
  source 1..22: mol_type = other RNA
cttggggaacagtttagcaatc

SEQ ID NO: 134183 - RNA, 22 nt, synthetic construct
  source 1..22: mol_type = other RNA
cttggggagagtgggcccagca

SEQ ID NO: 134184 - RNA, 22 nt, synthetic construct
  source 1..22: mol_type = other RNA
cttggggaggccaaggcaggac

SEQ ID NO: 134185 - RNA, 22 nt, synthetic construct
  source 1..22: mol_type = other RNA
cttggggctctaatgcaagagt

SEQ ID NO: 134186 - RNA, 22 nt, synthetic construct
  source 1..22: mol_type = other RNA
cttgggtaggaagctgatcaag

SEQ ID NO: 134187 - RNA, 22 nt, synthetic construct
  source 1..22: mol_type = other RNA
cttgggtataaatgatgagcta

SEQ ID NO: 134188 - RNA, 22 nt, synthetic construct
  source 1..22: mol_type = other RNA
cttgggtgaataacccatatct

SEQ ID NO: 134189 - RNA, 22 nt, synthetic construct
  source 1..22: mol_type = other RNA
cttgggtgacctcatgtaacta

SEQ ID NO: 134190 - RNA, 22 nt, synthetic construct
  source 1..22: mol_type = other RNA
cttgggtggaagctgtccttct

SEQ ID NO: 134191 - RNA, 22 nt, synthetic construct
  source 1..22: mol_type = other RNA
cttggtaaaaagtgcttctagt

SEQ ID NO: 134192 - RNA, 22 nt, synthetic construct
  source 1..22: mol_type = other RNA
cttggtaaaatcactaattcaa

SEQ ID NO: 134193 - RNA, 22 nt, synthetic construct
  source 1..22: mol_type = other RNA
cttggtaaacagcagtcttaac

SEQ ID NO: 134194 - RNA, 22 nt, synthetic construct
  source 1..22: mol_type = other RNA
cttggtaagagtgagaccctgt

SEQ ID NO: 134195 - RNA, 22 nt, synthetic construct
  source 1..22: mol_type = other RNA
cttggtaagctgtgagtccttc

SEQ ID NO: 134196 - RNA, 22 nt, synthetic construct
  source 1..22: mol_type = other RNA
cttggtagtttgcacgttttta

SEQ ID NO: 134197 - RNA, 22 nt, synthetic construct
  source 1..22: mol_type = other RNA
cttggtatgcatcttgaactaa

SEQ ID NO: 134198 - RNA, 22 nt, synthetic construct
  source 1..22: mol_type = other RNA
cttggtcgaaaacctgaaatgg

SEQ ID NO: 134199 - RNA, 22 nt, synthetic construct
  source 1..22: mol_type = other RNA
cttggtctgcagactcttgtcc

SEQ ID NO: 134200 - RNA, 22 nt, synthetic construct
  source 1..22: mol_type = other RNA
cttggtctgggtgatatctgta

SEQ ID NO: 134201 - RNA, 22 nt, synthetic construct
  source 1..22: mol_type = other RNA
cttggtctttctcccaggtcag

SEQ ID NO: 134202 - RNA, 22 nt, synthetic construct
  source 1..22: mol_type = other RNA
cttggtcttttgattttttaac

SEQ ID NO: 134203 - RNA, 22 nt, synthetic construct
  source 1..22: mol_type = other RNA
cttggtggcccacacctgcaat

SEQ ID NO: 134204 - RNA, 22 nt, synthetic construct
  source 1..22: mol_type = other RNA
cttggtggtaactgatgtgagg

SEQ ID NO: 134205 - RNA, 22 nt, synthetic construct
  source 1..22: mol_type = other RNA
cttggtgtgctcttttcatcac

SEQ ID NO: 134206 - RNA, 22 nt, synthetic construct
  source 1..22: mol_type = other RNA
cttggtgtgcttctgataggaa

SEQ ID NO: 134207 - RNA, 22 nt, synthetic construct
  source 1..22: mol_type = other RNA
cttggtgttgactgaattaatc

SEQ ID NO: 134208 - RNA, 22 nt, synthetic construct
  source 1..22: mol_type = other RNA
cttggttaatattacagaagaa

SEQ ID NO: 134209 - RNA, 22 nt, synthetic construct
  source 1..22: mol_type = other RNA
cttggttggaaaagaaagctgt

SEQ ID NO: 134210 - RNA, 22 nt, synthetic construct
  source 1..22: mol_type = other RNA
cttggtttattttctgcatttg

SEQ ID NO: 134211 - RNA, 22 nt, synthetic construct
  source 1..22: mol_type = other RNA
cttggtttcacacgcattgcat

SEQ ID NO: 134212 - RNA, 22 nt, synthetic construct
  source 1..22: mol_type = other RNA
cttggtttcttcaagatactgc

SEQ ID NO: 134213 - RNA, 22 nt, synthetic construct
  source 1..22: mol_type = other RNA
cttgtaagttggattcccaggt

SEQ ID NO: 134214 - RNA, 22 nt, synthetic construct
  source 1..22: mol_type = other RNA
cttgtaatcaagtatctccctg

SEQ ID NO: 134215 - RNA, 22 nt, synthetic construct
  source 1..22: mol_type = other RNA
cttgtactcccagcctcaaaca

SEQ ID NO: 134216 - RNA, 22 nt, synthetic construct
  source 1..22: mol_type = other RNA
cttgtactgtgtggcttctcaa

SEQ ID NO: 134217 - RNA, 22 nt, synthetic construct
  source 1..22: mol_type = other RNA
cttgtagaggaggagggttaga

SEQ ID NO: 134218 - RNA, 22 nt, synthetic construct
  source 1..22: mol_type = other RNA
cttgtagtatttttgcaacttt

SEQ ID NO: 134219 - RNA, 22 nt, synthetic construct
  source 1..22: mol_type = other RNA
cttgtatccagtaatcttgcta

SEQ ID NO: 134220 - RNA, 22 nt, synthetic construct
  source 1..22: mol_type = other RNA
cttgtatgaaattagttccttt

SEQ ID NO: 134221 - RNA, 22 nt, synthetic construct
  source 1..22: mol_type = other RNA
cttgtatggagactagtacact

SEQ ID NO: 134222 - RNA, 22 nt, synthetic construct
  source 1..22: mol_type = other RNA
cttgtcaagttctgatttcaaa

SEQ ID NO: 134223 - RNA, 22 nt, synthetic construct
  source 1..22: mol_type = other RNA
cttgtcaataatttggatgaac

SEQ ID NO: 134224 - RNA, 22 nt, synthetic construct
  source 1..22: mol_type = other RNA
cttgtcacaaaatgtggatgca

SEQ ID NO: 134225 - RNA, 22 nt, synthetic construct
  source 1..22: mol_type = other RNA
cttgtcaggtgggcactgggag

SEQ ID NO: 134226 - RNA, 22 nt, synthetic construct
  source 1..22: mol_type = other RNA
cttgtcataacagtattgtctt

SEQ ID NO: 134227 - RNA, 22 nt, synthetic construct
  source 1..22: mol_type = other RNA
cttgtcatgaatgaatgttgag

SEQ ID NO: 134228 - RNA, 22 nt, synthetic construct
  source 1..22: mol_type = other RNA
cttgtcatttctgcttagtctt

SEQ ID NO: 134229 - RNA, 22 nt, synthetic construct
  source 1..22: mol_type = other RNA
cttgtcccatggtcaaatcaat

SEQ ID NO: 134230 - RNA, 22 nt, synthetic construct
  source 1..22: mol_type = other RNA
cttgtcccggcatgcctctccc

SEQ ID NO: 134231 - RNA, 22 nt, synthetic construct
  source 1..22: mol_type = other RNA
cttgtcctaaaattccttcctt

SEQ ID NO: 134232 - RNA, 22 nt, synthetic construct
  source 1..22: mol_type = other RNA
cttgtctcaacctttgcctcct

SEQ ID NO: 134233 - RNA, 22 nt, synthetic construct
  source 1..22: mol_type = other RNA
cttgtctcggatttaagagagg

SEQ ID NO: 134234 - RNA, 22 nt, synthetic construct
  source 1..22: mol_type = other RNA
cttgtcttgaatagcatcttag

SEQ ID NO: 134235 - RNA, 22 nt, synthetic construct
  source 1..22: mol_type = other RNA
cttgtctttgtctattccctac

SEQ ID NO: 134236 - RNA, 22 nt, synthetic construct
  source 1..22: mol_type = other RNA
cttgtctttttgtgacttgttt

SEQ ID NO: 134237 - RNA, 22 nt, synthetic construct
  source 1..22: mol_type = other RNA
cttgtgaattgataaaagtcat

SEQ ID NO: 134238 - RNA, 22 nt, synthetic construct
  source 1..22: mol_type = other RNA
cttgtgacatcaagggtggtgc

SEQ ID NO: 134239 - RNA, 22 nt, synthetic construct
  source 1..22: mol_type = other RNA
cttgtgatctatgcatactgca

SEQ ID NO: 134240 - RNA, 22 nt, synthetic construct
  source 1..22: mol_type = other RNA
cttgtgcacctcgggttcaagc

SEQ ID NO: 134241 - RNA, 22 nt, synthetic construct
  source 1..22: mol_type = other RNA
cttgtgcatcagaattccattc

SEQ ID NO: 134242 - RNA, 22 nt, synthetic construct
  source 1..22: mol_type = other RNA
cttgtgcatcctttataccttt

SEQ ID NO: 134243 - RNA, 22 nt, synthetic construct
  source 1..22: mol_type = other RNA
cttgtgcatgtgcaggaaactt

SEQ ID NO: 134244 - RNA, 22 nt, synthetic construct
  source 1..22: mol_type = other RNA
cttgtgcttttaatactttcac

SEQ ID NO: 134245 - RNA, 22 nt, synthetic construct
  source 1..22: mol_type = other RNA
cttgtggctacaccctgggaaa

SEQ ID NO: 134246 - RNA, 22 nt, synthetic construct
  source 1..22: mol_type = other RNA
cttgtggctgacatgtgtaaaa

SEQ ID NO: 134247 - RNA, 22 nt, synthetic construct
  source 1..22: mol_type = other RNA
cttgtgggtattttgttgttgt

SEQ ID NO: 134248 - RNA, 22 nt, synthetic construct
  source 1..22: mol_type = other RNA
cttgtggtcttaagagactctc

SEQ ID NO: 134249 - RNA, 22 nt, synthetic construct
  source 1..22: mol_type = other RNA
cttgtgtaactaccactgaggt

SEQ ID NO: 134250 - RNA, 22 nt, synthetic construct
  source 1..22: mol_type = other RNA
cttgtgtagcgggaaaaaataa

SEQ ID NO: 134251 - RNA, 22 nt, synthetic construct
  source 1..22: mol_type = other RNA
cttgtgtatcttttgttagatt

SEQ ID NO: 134252 - RNA, 22 nt, synthetic construct
  source 1..22: mol_type = other RNA
cttgtgtcttaaattcaaagta

SEQ ID NO: 134253 - RNA, 22 nt, synthetic construct
  source 1..22: mol_type = other RNA
cttgtgttttatttggctgtta

SEQ ID NO: 134254 - RNA, 22 nt, synthetic construct
  source 1..22: mol_type = other RNA
cttgttaagcattttccggttg

SEQ ID NO: 134255 - RNA, 22 nt, synthetic construct
  source 1..22: mol_type = other RNA
cttgttagaattttgcttttgc

SEQ ID NO: 134256 - RNA, 22 nt, synthetic construct
  source 1..22: mol_type = other RNA
cttgttagtaggaaaaccatgt

SEQ ID NO: 134257 - RNA, 22 nt, synthetic construct
  source 1..22: mol_type = other RNA
cttgttataagcaaagatatgg

SEQ ID NO: 134258 - RNA, 22 nt, synthetic construct
  source 1..22: mol_type = other RNA
cttgttcatgtttacagaaata

SEQ ID NO: 134259 - RNA, 22 nt, synthetic construct
  source 1..22: mol_type = other RNA
cttgttgaggatgactgtcctg

SEQ ID NO: 134260 - RNA, 22 nt, synthetic construct
  source 1..22: mol_type = other RNA
cttgttggacagctgggagaaa

SEQ ID NO: 134261 - RNA, 22 nt, synthetic construct
  source 1..22: mol_type = other RNA
cttgtttacccagtgtgtttgt

SEQ ID NO: 134262 - RNA, 22 nt, synthetic construct
  source 1..22: mol_type = other RNA
cttgtttcttttcactctaata

SEQ ID NO: 134263 - RNA, 22 nt, synthetic construct
  source 1..22: mol_type = other RNA
cttgttttcttgagatggagtc

SEQ ID NO: 134264 - RNA, 22 nt, synthetic construct
  source 1..22: mol_type = other RNA
cttgttttgttctcgttcatgt

SEQ ID NO: 134265 - RNA, 22 nt, synthetic construct
  source 1..22: mol_type = other RNA
ctttaaaacactggcaaaaatc

SEQ ID NO: 134266 - RNA, 22 nt, synthetic construct
  source 1..22: mol_type = other RNA
ctttaaaaccagagcggaattt

SEQ ID NO: 134267 - RNA, 22 nt, synthetic construct
  source 1..22: mol_type = other RNA
ctttaaaactgctgagtcttct

SEQ ID NO: 134268 - RNA, 22 nt, synthetic construct
  source 1..22: mol_type = other RNA
ctttaaaagaaagctctcaatt

SEQ ID NO: 134269 - RNA, 22 nt, synthetic construct
  source 1..22: mol_type = other RNA
ctttaaaatgatagcattatcc

SEQ ID NO: 134270 - RNA, 22 nt, synthetic construct
  source 1..22: mol_type = other RNA
ctttaaactggatgaatacaaa

SEQ ID NO: 134271 - RNA, 22 nt, synthetic construct
  source 1..22: mol_type = other RNA
ctttaaagagaaatagttaacg

SEQ ID NO: 134272 - RNA, 22 nt, synthetic construct
  source 1..22: mol_type = other RNA
ctttaaagctctatggcatttg

SEQ ID NO: 134273 - RNA, 22 nt, synthetic construct
  source 1..22: mol_type = other RNA
ctttaaagctgaactcctttct

SEQ ID NO: 134274 - RNA, 22 nt, synthetic construct
  source 1..22: mol_type = other RNA
ctttaaatcagggcctttaatc

SEQ ID NO: 134275 - RNA, 22 nt, synthetic construct
  source 1..22: mol_type = other RNA
ctttaaattttgagacctcagg

SEQ ID NO: 134276 - RNA, 22 nt, synthetic construct
  source 1..22: mol_type = other RNA
ctttaacctctggtattttaag

SEQ ID NO: 134277 - RNA, 22 nt, synthetic construct
  source 1..22: mol_type = other RNA
ctttaacgtatctgggaaaaaa

SEQ ID NO: 134278 - RNA, 22 nt, synthetic construct
  source 1..22: mol_type = other RNA
ctttaagagtatctttttcagc

SEQ ID NO: 134279 - RNA, 22 nt, synthetic construct
  source 1..22: mol_type = other RNA
ctttaagattttttgttgttgg

SEQ ID NO: 134280 - RNA, 22 nt, synthetic construct
  source 1..22: mol_type = other RNA
ctttaagcagaaagttactatt

SEQ ID NO: 134281 - RNA, 22 nt, synthetic construct
  source 1..22: mol_type = other RNA
ctttaagcatcccatatggagg

SEQ ID NO: 134282 - RNA, 22 nt, synthetic construct
  source 1..22: mol_type = other RNA
ctttaaggcgcagacacaccat

SEQ ID NO: 134283 - RNA, 22 nt, synthetic construct
  source 1..22: mol_type = other RNA
ctttaagttctccaagttatta

SEQ ID NO: 134284 - RNA, 22 nt, synthetic construct
  source 1..22: mol_type = other RNA
ctttaatcaccaggcgcggtgg

SEQ ID NO: 134285 - RNA, 22 nt, synthetic construct
  source 1..22: mol_type = other RNA
ctttaatcacctcaagtgatgc

SEQ ID NO: 134286 - RNA, 22 nt, synthetic construct
  source 1..22: mol_type = other RNA
ctttaattatgagcattcccca

SEQ ID NO: 134287 - RNA, 22 nt, synthetic construct
  source 1..22: mol_type = other RNA
ctttaatttagcgttcatccaa

SEQ ID NO: 134288 - RNA, 22 nt, synthetic construct
  source 1..22: mol_type = other RNA
ctttaatttgggtttgagtttc

SEQ ID NO: 134289 - RNA, 22 nt, synthetic construct
  source 1..22: mol_type = other RNA
ctttacagttatgtcagtcaac

SEQ ID NO: 134290 - RNA, 22 nt, synthetic construct
  source 1..22: mol_type = other RNA
ctttacccctgagaacttcagt

SEQ ID NO: 134291 - RNA, 22 nt, synthetic construct
  source 1..22: mol_type = other RNA
ctttaccctgctggaacgaata

SEQ ID NO: 134292 - RNA, 22 nt, synthetic construct
  source 1..22: mol_type = other RNA
ctttactactgcattttttgcc

SEQ ID NO: 134293 - RNA, 22 nt, synthetic construct
  source 1..22: mol_type = other RNA
ctttactcagattcaccaattg

SEQ ID NO: 134294 - RNA, 22 nt, synthetic construct
  source 1..22: mol_type = other RNA
ctttactgtattaggatgtgta

SEQ ID NO: 134295 - RNA, 22 nt, synthetic construct
  source 1..22: mol_type = other RNA
ctttactgttctccagtcccac

SEQ ID NO: 134296 - RNA, 22 nt, synthetic construct
  source 1..22: mol_type = other RNA
ctttacttcccttctcgaagtg

SEQ ID NO: 134297 - RNA, 22 nt, synthetic construct
  source 1..22: mol_type = other RNA
ctttactttcagctcaaacagc

SEQ ID NO: 134298 - RNA, 22 nt, synthetic construct
  source 1..22: mol_type = other RNA
ctttagaacatataatccaact

SEQ ID NO: 134299 - RNA, 22 nt, synthetic construct
  source 1..22: mol_type = other RNA
ctttagacatgggctaaataaa

SEQ ID NO: 134300 - RNA, 22 nt, synthetic construct
  source 1..22: mol_type = other RNA
ctttagagtcagttgtttactt

SEQ ID NO: 134301 - RNA, 22 nt, synthetic construct
  source 1..22: mol_type = other RNA
ctttagatggtaaaacaaattc

SEQ ID NO: 134302 - RNA, 22 nt, synthetic construct
  source 1..22: mol_type = other RNA
ctttagatttatcaatagcagt

SEQ ID NO: 134303 - RNA, 22 nt, synthetic construct
  source 1..22: mol_type = other RNA
ctttaggaagcttccttgatca

SEQ ID NO: 134304 - RNA, 22 nt, synthetic construct
  source 1..22: mol_type = other RNA
ctttaggctgttcaatttagaa

SEQ ID NO: 134305 - RNA, 22 nt, synthetic construct
  source 1..22: mol_type = other RNA
ctttagggaagatagtactgac

SEQ ID NO: 134306 - RNA, 22 nt, synthetic construct
  source 1..22: mol_type = other RNA
ctttaggtcagaatacaaaaat

SEQ ID NO: 134307 - RNA, 22 nt, synthetic construct
  source 1..22: mol_type = other RNA
ctttaggtgttttttccttctt

SEQ ID NO: 134308 - RNA, 22 nt, synthetic construct
  source 1..22: mol_type = other RNA
ctttaggttacgtactaggtat

SEQ ID NO: 134309 - RNA, 22 nt, synthetic construct
  source 1..22: mol_type = other RNA
ctttagtgttctgtgtttatga

SEQ ID NO: 134310 - RNA, 22 nt, synthetic construct
  source 1..22: mol_type = other RNA
ctttagtgttgcttggtgttga

SEQ ID NO: 134311 - RNA, 22 nt, synthetic construct
  source 1..22: mol_type = other RNA
ctttatacctgttgaatagcaa

SEQ ID NO: 134312 - RNA, 22 nt, synthetic construct
  source 1..22: mol_type = other RNA
ctttatagcatttgaaaacatg

SEQ ID NO: 134313 - RNA, 22 nt, synthetic construct
  source 1..22: mol_type = other RNA
ctttatcggataaggaagagtt

SEQ ID NO: 134314 - RNA, 22 nt, synthetic construct
  source 1..22: mol_type = other RNA
ctttatctccacatttctacac

SEQ ID NO: 134315 - RNA, 22 nt, synthetic construct
  source 1..22: mol_type = other RNA
ctttatctttggatatccccat

SEQ ID NO: 134316 - RNA, 22 nt, synthetic construct
  source 1..22: mol_type = other RNA
ctttatgagacacacgagtatt

SEQ ID NO: 134317 - RNA, 22 nt, synthetic construct
  source 1..22: mol_type = other RNA
ctttatgccaatatcacactgt

SEQ ID NO: 134318 - RNA, 22 nt, synthetic construct
  source 1..22: mol_type = other RNA
ctttatggtaattggttcgttt

SEQ ID NO: 134319 - RNA, 22 nt, synthetic construct
  source 1..22: mol_type = other RNA
ctttatggtatcactttttgta

SEQ ID NO: 134320 - RNA, 22 nt, synthetic construct
  source 1..22: mol_type = other RNA
ctttatgtggaaaaatatagga

SEQ ID NO: 134321 - RNA, 22 nt, synthetic construct
  source 1..22: mol_type = other RNA
ctttattcaaagatcatttcac

SEQ ID NO: 134322 - RNA, 22 nt, synthetic construct
  source 1..22: mol_type = other RNA
ctttattttttcttcccatctc

SEQ ID NO: 134323 - RNA, 22 nt, synthetic construct
  source 1..22: mol_type = other RNA
ctttcaaagagacctgattctt

SEQ ID NO: 134324 - RNA, 22 nt, synthetic construct
  source 1..22: mol_type = other RNA
ctttcaaatgtgacagaacaaa

SEQ ID NO: 134325 - RNA, 22 nt, synthetic construct
  source 1..22: mol_type = other RNA
ctttcaacctaacatgtcttgg

SEQ ID NO: 134326 - RNA, 22 nt, synthetic construct
  source 1..22: mol_type = other RNA
ctttcaagattgtttaattctg

SEQ ID NO: 134327 - RNA, 22 nt, synthetic construct
  source 1..22: mol_type = other RNA
ctttcaaggggccttttgtcaa

SEQ ID NO: 134328 - RNA, 22 nt, synthetic construct
  source 1..22: mol_type = other RNA
ctttcaaggtatctccccaaag

SEQ ID NO: 134329 - RNA, 22 nt, synthetic construct
  source 1..22: mol_type = other RNA
ctttcaatagtgggtagaagca

SEQ ID NO: 134330 - RNA, 22 nt, synthetic construct
  source 1..22: mol_type = other RNA
ctttcacactgattttctgctt

SEQ ID NO: 134331 - RNA, 22 nt, synthetic construct
  source 1..22: mol_type = other RNA
ctttcacataaggtatatttct

SEQ ID NO: 134332 - RNA, 22 nt, synthetic construct
  source 1..22: mol_type = other RNA
ctttcactgctcagtccctcac

SEQ ID NO: 134333 - RNA, 22 nt, synthetic construct
  source 1..22: mol_type = other RNA
ctttcactttgatcatacacat

SEQ ID NO: 134334 - RNA, 22 nt, synthetic construct
  source 1..22: mol_type = other RNA
ctttcagacttaactataggag

SEQ ID NO: 134335 - RNA, 22 nt, synthetic construct
  source 1..22: mol_type = other RNA
ctttcagcactgctattgataa

SEQ ID NO: 134336 - RNA, 22 nt, synthetic construct
  source 1..22: mol_type = other RNA
ctttcagcatagcagaacctta

SEQ ID NO: 134337 - RNA, 22 nt, synthetic construct
  source 1..22: mol_type = other RNA
ctttcagccatcccagctacat

SEQ ID NO: 134338 - RNA, 22 nt, synthetic construct
  source 1..22: mol_type = other RNA
ctttcagctcaaacagcttgac

SEQ ID NO: 134339 - RNA, 22 nt, synthetic construct
  source 1..22: mol_type = other RNA
ctttcagtatgtgtctctgaca

SEQ ID NO: 134340 - RNA, 22 nt, synthetic construct
  source 1..22: mol_type = other RNA
ctttcagtcggttcttcaccgt

SEQ ID NO: 134341 - RNA, 22 nt, synthetic construct
  source 1..22: mol_type = other RNA
ctttcagttctttcggatattt

SEQ ID NO: 134342 - RNA, 22 nt, synthetic construct
  source 1..22: mol_type = other RNA
ctttcatatctgattttgtgtc

SEQ ID NO: 134343 - RNA, 22 nt, synthetic construct
  source 1..22: mol_type = other RNA
ctttcatgatttggtgtgtgca

SEQ ID NO: 134344 - RNA, 22 nt, synthetic construct
  source 1..22: mol_type = other RNA
ctttcattattaccaggtttta

SEQ ID NO: 134345 - RNA, 22 nt, synthetic construct
  source 1..22: mol_type = other RNA
ctttcatttggcctctgcggcg

SEQ ID NO: 134346 - RNA, 22 nt, synthetic construct
  source 1..22: mol_type = other RNA
ctttcatttgtaattcatccta

SEQ ID NO: 134347 - RNA, 22 nt, synthetic construct
  source 1..22: mol_type = other RNA
ctttccaaattcaaagcaagtt

SEQ ID NO: 134348 - RNA, 22 nt, synthetic construct
  source 1..22: mol_type = other RNA
ctttccactctctggctgcaat

SEQ ID NO: 134349 - RNA, 22 nt, synthetic construct
  source 1..22: mol_type = other RNA
ctttccagaagtaactcttgag

SEQ ID NO: 134350 - RNA, 22 nt, synthetic construct
  source 1..22: mol_type = other RNA
ctttccagaggttcttttaaat

SEQ ID NO: 134351 - RNA, 22 nt, synthetic construct
  source 1..22: mol_type = other RNA
ctttccatcttaggccataaat

SEQ ID NO: 134352 - RNA, 22 nt, synthetic construct
  source 1..22: mol_type = other RNA
ctttccattcaatccttgtaac

SEQ ID NO: 134353 - RNA, 22 nt, synthetic construct
  source 1..22: mol_type = other RNA
ctttcccagggtgtagccacaa

SEQ ID NO: 134354 - RNA, 22 nt, synthetic construct
  source 1..22: mol_type = other RNA
ctttcccatctctagttttcca

SEQ ID NO: 134355 - RNA, 22 nt, synthetic construct
  source 1..22: mol_type = other RNA
ctttcccattaccaaaacctgg

SEQ ID NO: 134356 - RNA, 22 nt, synthetic construct
  source 1..22: mol_type = other RNA
ctttcccttctgctcggctctg

SEQ ID NO: 134357 - RNA, 22 nt, synthetic construct
  source 1..22: mol_type = other RNA
ctttcctattcacactgctcct

SEQ ID NO: 134358 - RNA, 22 nt, synthetic construct
  source 1..22: mol_type = other RNA
ctttcctcatgtccatagttaa

SEQ ID NO: 134359 - RNA, 22 nt, synthetic construct
  source 1..22: mol_type = other RNA
ctttcctgataaggggctatct

SEQ ID NO: 134360 - RNA, 22 nt, synthetic construct
  source 1..22: mol_type = other RNA
ctttcctgatcacaccctccta

SEQ ID NO: 134361 - RNA, 22 nt, synthetic construct
  source 1..22: mol_type = other RNA
ctttcctgatcagcaccctcaa

SEQ ID NO: 134362 - RNA, 22 nt, synthetic construct
  source 1..22: mol_type = other RNA
ctttcctgcccctccactccac

SEQ ID NO: 134363 - RNA, 22 nt, synthetic construct
  source 1..22: mol_type = other RNA
ctttcctgtgatttatgtggca

SEQ ID NO: 134364 - RNA, 22 nt, synthetic construct
  source 1..22: mol_type = other RNA
ctttccttagttcgaagttttt

SEQ ID NO: 134365 - RNA, 22 nt, synthetic construct
  source 1..22: mol_type = other RNA
ctttccttattgagaagcagaa

SEQ ID NO: 134366 - RNA, 22 nt, synthetic construct
  source 1..22: mol_type = other RNA
ctttccttccttgctcaggagt

SEQ ID NO: 134367 - RNA, 22 nt, synthetic construct
  source 1..22: mol_type = other RNA
ctttccttggagaagagttctg

SEQ ID NO: 134368 - RNA, 22 nt, synthetic construct
  source 1..22: mol_type = other RNA
ctttccttgtcctaaaattcct

SEQ ID NO: 134369 - RNA, 22 nt, synthetic construct
  source 1..22: mol_type = other RNA
ctttcctttttcaaataatagc

SEQ ID NO: 134370 - RNA, 22 nt, synthetic construct
  source 1..22: mol_type = other RNA
ctttcgaagtgggaagcaaagg

SEQ ID NO: 134371 - RNA, 22 nt, synthetic construct
  source 1..22: mol_type = other RNA
ctttcgcatcattcaaatgata

SEQ ID NO: 134372 - RNA, 22 nt, synthetic construct
  source 1..22: mol_type = other RNA
ctttcgctaatctcaatcaggg

SEQ ID NO: 134373 - RNA, 22 nt, synthetic construct
  source 1..22: mol_type = other RNA
ctttcgctatcagtagtttgct

SEQ ID NO: 134374 - RNA, 22 nt, synthetic construct
  source 1..22: mol_type = other RNA
ctttcgcttttggagctataat

SEQ ID NO: 134375 - RNA, 22 nt, synthetic construct
  source 1..22: mol_type = other RNA
ctttcggatatttactaagaag

SEQ ID NO: 134376 - RNA, 22 nt, synthetic construct
  source 1..22: mol_type = other RNA
ctttcgtatggaagatgggact

SEQ ID NO: 134377 - RNA, 22 nt, synthetic construct
  source 1..22: mol_type = other RNA
ctttcgtcatctataaggtaat

SEQ ID NO: 134378 - RNA, 22 nt, synthetic construct
  source 1..22: mol_type = other RNA
ctttcgtgagggtttcagtgag

SEQ ID NO: 134379 - RNA, 22 nt, synthetic construct
  source 1..22: mol_type = other RNA
ctttctaaaataacagaagaag

SEQ ID NO: 134380 - RNA, 22 nt, synthetic construct
  source 1..22: mol_type = other RNA
ctttctaatcctttgcacacac

SEQ ID NO: 134381 - RNA, 22 nt, synthetic construct
  source 1..22: mol_type = other RNA
ctttctaattctgacaactggg

SEQ ID NO: 134382 - RNA, 22 nt, synthetic construct
  source 1..22: mol_type = other RNA
ctttctactagtataagagaag

SEQ ID NO: 134383 - RNA, 22 nt, synthetic construct
  source 1..22: mol_type = other RNA
ctttctagaatgcatccctcct

SEQ ID NO: 134384 - RNA, 22 nt, synthetic construct
  source 1..22: mol_type = other RNA
ctttctagattcatatgctttg

SEQ ID NO: 134385 - RNA, 22 nt, synthetic construct
  source 1..22: mol_type = other RNA
ctttctaggcatctatttcccc

SEQ ID NO: 134386 - RNA, 22 nt, synthetic construct
  source 1..22: mol_type = other RNA
ctttctatacttcatctttcct

SEQ ID NO: 134387 - RNA, 22 nt, synthetic construct
  source 1..22: mol_type = other RNA
ctttctatctctcagatctgag

SEQ ID NO: 134388 - RNA, 22 nt, synthetic construct
  source 1..22: mol_type = other RNA
ctttctattcccctggatcccc

SEQ ID NO: 134389 - RNA, 22 nt, synthetic construct
  source 1..22: mol_type = other RNA
ctttctcaaagcccaccagcat

SEQ ID NO: 134390 - RNA, 22 nt, synthetic construct
  source 1..22: mol_type = other RNA
ctttctcaacactgtgttcttt

SEQ ID NO: 134391 - RNA, 22 nt, synthetic construct
  source 1..22: mol_type = other RNA
ctttctcaacttcctgttttag

SEQ ID NO: 134392 - RNA, 22 nt, synthetic construct
  source 1..22: mol_type = other RNA
ctttctccaggggcggccccgc

SEQ ID NO: 134393 - RNA, 22 nt, synthetic construct
  source 1..22: mol_type = other RNA
ctttctcccagctgtccaacaa

SEQ ID NO: 134394 - RNA, 22 nt, synthetic construct
  source 1..22: mol_type = other RNA
ctttctcccaggtcagtagtac

SEQ ID NO: 134395 - RNA, 22 nt, synthetic construct
  source 1..22: mol_type = other RNA
ctttctcgcagcggggatgctc

SEQ ID NO: 134396 - RNA, 22 nt, synthetic construct
  source 1..22: mol_type = other RNA
ctttctctagttgcacggtgaa

SEQ ID NO: 134397 - RNA, 22 nt, synthetic construct
  source 1..22: mol_type = other RNA
ctttctctttcagccatcccag

SEQ ID NO: 134398 - RNA, 22 nt, synthetic construct
  source 1..22: mol_type = other RNA
ctttctgaaattctcattagtt

SEQ ID NO: 134399 - RNA, 22 nt, synthetic construct
  source 1..22: mol_type = other RNA
ctttctgaactcaaaagtgaat

SEQ ID NO: 134400 - RNA, 22 nt, synthetic construct
  source 1..22: mol_type = other RNA
ctttctgcttaaagcctctcaa

SEQ ID NO: 134401 - RNA, 22 nt, synthetic construct
  source 1..22: mol_type = other RNA
ctttctggggatgctgtctata

SEQ ID NO: 134402 - RNA, 22 nt, synthetic construct
  source 1..22: mol_type = other RNA
ctttctgtgtaatactgtagaa

SEQ ID NO: 134403 - RNA, 22 nt, synthetic construct
  source 1..22: mol_type = other RNA
ctttctgtttgtttgttttgag

SEQ ID NO: 134404 - RNA, 22 nt, synthetic construct
  source 1..22: mol_type = other RNA
ctttcttaccctcacagtcaca

SEQ ID NO: 134405 - RNA, 22 nt, synthetic construct
  source 1..22: mol_type = other RNA
ctttcttaggaagctatggagc

SEQ ID NO: 134406 - RNA, 22 nt, synthetic construct
  source 1..22: mol_type = other RNA
ctttcttaggtttctcattttt

SEQ ID NO: 134407 - RNA, 22 nt, synthetic construct
  source 1..22: mol_type = other RNA
ctttcttcaaccatacttttca

SEQ ID NO: 134408 - RNA, 22 nt, synthetic construct
  source 1..22: mol_type = other RNA
ctttcttggggctctaatgcaa

SEQ ID NO: 134409 - RNA, 22 nt, synthetic construct
  source 1..22: mol_type = other RNA
ctttcttggtctgcagactctt

SEQ ID NO: 134410 - RNA, 22 nt, synthetic construct
  source 1..22: mol_type = other RNA
ctttcttgttagtaggaaaacc

SEQ ID NO: 134411 - RNA, 22 nt, synthetic construct
  source 1..22: mol_type = other RNA
ctttctttcaaatgtgacagaa

SEQ ID NO: 134412 - RNA, 22 nt, synthetic construct
  source 1..22: mol_type = other RNA
ctttctttggttttgactcagt

SEQ ID NO: 134413 - RNA, 22 nt, synthetic construct
  source 1..22: mol_type = other RNA
ctttcttttaaagacctcaggt

SEQ ID NO: 134414 - RNA, 22 nt, synthetic construct
  source 1..22: mol_type = other RNA
ctttcttttccaaccaagccca

SEQ ID NO: 134415 - RNA, 22 nt, synthetic construct
  source 1..22: mol_type = other RNA
ctttgaaaggaatccggcttta

SEQ ID NO: 134416 - RNA, 22 nt, synthetic construct
  source 1..22: mol_type = other RNA
ctttgaaatcagaacttgacaa

SEQ ID NO: 134417 - RNA, 22 nt, synthetic construct
  source 1..22: mol_type = other RNA
ctttgaacttatataaatgctc

SEQ ID NO: 134418 - RNA, 22 nt, synthetic construct
  source 1..22: mol_type = other RNA
ctttgaagtatgtaattacagg

SEQ ID NO: 134419 - RNA, 22 nt, synthetic construct
  source 1..22: mol_type = other RNA
ctttgaataaagggtcagaatt

SEQ ID NO: 134420 - RNA, 22 nt, synthetic construct
  source 1..22: mol_type = other RNA
ctttgaatttaagacacaagga

SEQ ID NO: 134421 - RNA, 22 nt, synthetic construct
  source 1..22: mol_type = other RNA
ctttgaatttggaaagggtaga

SEQ ID NO: 134422 - RNA, 22 nt, synthetic construct
  source 1..22: mol_type = other RNA
ctttgacttctcagggcctgct

SEQ ID NO: 134423 - RNA, 22 nt, synthetic construct
  source 1..22: mol_type = other RNA
ctttgagaaaggtttcttcact

SEQ ID NO: 134424 - RNA, 22 nt, synthetic construct
  source 1..22: mol_type = other RNA
ctttgagcagagtcctgagggt

SEQ ID NO: 134425 - RNA, 22 nt, synthetic construct
  source 1..22: mol_type = other RNA
ctttgagctacaaactccaaac

SEQ ID NO: 134426 - RNA, 22 nt, synthetic construct
  source 1..22: mol_type = other RNA
ctttgaggtaagaacttgtctt

SEQ ID NO: 134427 - RNA, 22 nt, synthetic construct
  source 1..22: mol_type = other RNA
ctttgaggttattaagataatg

SEQ ID NO: 134428 - RNA, 22 nt, synthetic construct
  source 1..22: mol_type = other RNA
ctttgagtagcaccctatttat

SEQ ID NO: 134429 - RNA, 22 nt, synthetic construct
  source 1..22: mol_type = other RNA
ctttgagtagttcatgttagca

SEQ ID NO: 134430 - RNA, 22 nt, synthetic construct
  source 1..22: mol_type = other RNA
ctttgatcatacacatccagaa

SEQ ID NO: 134431 - RNA, 22 nt, synthetic construct
  source 1..22: mol_type = other RNA
ctttgatccattttgagttcag

SEQ ID NO: 134432 - RNA, 22 nt, synthetic construct
  source 1..22: mol_type = other RNA
ctttgatgaattccagtttatc

SEQ ID NO: 134433 - RNA, 22 nt, synthetic construct
  source 1..22: mol_type = other RNA
ctttgatgacttacagatatca

SEQ ID NO: 134434 - RNA, 22 nt, synthetic construct
  source 1..22: mol_type = other RNA
ctttgatgcacaaaagtttaac

SEQ ID NO: 134435 - RNA, 22 nt, synthetic construct
  source 1..22: mol_type = other RNA
ctttgatgcccccacccttttt

SEQ ID NO: 134436 - RNA, 22 nt, synthetic construct
  source 1..22: mol_type = other RNA
ctttgatgttttacattttcca

SEQ ID NO: 134437 - RNA, 22 nt, synthetic construct
  source 1..22: mol_type = other RNA
ctttgcacacaccaaatcatga

SEQ ID NO: 134438 - RNA, 22 nt, synthetic construct
  source 1..22: mol_type = other RNA
ctttgcattcctgaaatgaacc

SEQ ID NO: 134439 - RNA, 22 nt, synthetic construct
  source 1..22: mol_type = other RNA
ctttgcctaagtctcaggatac

SEQ ID NO: 134440 - RNA, 22 nt, synthetic construct
  source 1..22: mol_type = other RNA
ctttgcctcctgggttcaggtg

SEQ ID NO: 134441 - RNA, 22 nt, synthetic construct
  source 1..22: mol_type = other RNA
ctttgcctctccagggaggaat

SEQ ID NO: 134442 - RNA, 22 nt, synthetic construct
  source 1..22: mol_type = other RNA
ctttgcctttcactttgatcat

SEQ ID NO: 134443 - RNA, 22 nt, synthetic construct
  source 1..22: mol_type = other RNA
ctttgcgaaacacactcgtgta

SEQ ID NO: 134444 - RNA, 22 nt, synthetic construct
  source 1..22: mol_type = other RNA
ctttgcgaaatagtagttgctc

SEQ ID NO: 134445 - RNA, 22 nt, synthetic construct
  source 1..22: mol_type = other RNA
ctttgcgtctgtgattatcagg

SEQ ID NO: 134446 - RNA, 22 nt, synthetic construct
  source 1..22: mol_type = other RNA
ctttgctaataagtgagtttga

SEQ ID NO: 134447 - RNA, 22 nt, synthetic construct
  source 1..22: mol_type = other RNA
ctttgctgccccagctaaaatg

SEQ ID NO: 134448 - RNA, 22 nt, synthetic construct
  source 1..22: mol_type = other RNA
ctttgcttataacaagaaaatc

SEQ ID NO: 134449 - RNA, 22 nt, synthetic construct
  source 1..22: mol_type = other RNA
ctttgcttcccacttcgaaagt

SEQ ID NO: 134450 - RNA, 22 nt, synthetic construct
  source 1..22: mol_type = other RNA
ctttggaaaaatgtccgttgaa

SEQ ID NO: 134451 - RNA, 22 nt, synthetic construct
  source 1..22: mol_type = other RNA
ctttggaaggtaggagggtgtg

SEQ ID NO: 134452 - RNA, 22 nt, synthetic construct
  source 1..22: mol_type = other RNA
ctttggagctgtatttttgctc

SEQ ID NO: 134453 - RNA, 22 nt, synthetic construct
  source 1..22: mol_type = other RNA
ctttggagtcacagtgaattct

SEQ ID NO: 134454 - RNA, 22 nt, synthetic construct
  source 1..22: mol_type = other RNA
ctttggagtgagaggactgcct

SEQ ID NO: 134455 - RNA, 22 nt, synthetic construct
  source 1..22: mol_type = other RNA
ctttggatatccccatttttct

SEQ ID NO: 134456 - RNA, 22 nt, synthetic construct
  source 1..22: mol_type = other RNA
ctttggcaaacttagaatataa

SEQ ID NO: 134457 - RNA, 22 nt, synthetic construct
  source 1..22: mol_type = other RNA
ctttggcccatatccttttatg

SEQ ID NO: 134458 - RNA, 22 nt, synthetic construct
  source 1..22: mol_type = other RNA
ctttggcccattttcgaattag

SEQ ID NO: 134459 - RNA, 22 nt, synthetic construct
  source 1..22: mol_type = other RNA
ctttggctactgtaaacaatgc

SEQ ID NO: 134460 - RNA, 22 nt, synthetic construct
  source 1..22: mol_type = other RNA
ctttggctagaagcatctgata

SEQ ID NO: 134461 - RNA, 22 nt, synthetic construct
  source 1..22: mol_type = other RNA
ctttggctcaatggttaagact

SEQ ID NO: 134462 - RNA, 22 nt, synthetic construct
  source 1..22: mol_type = other RNA
ctttggctcttagaaaatatat

SEQ ID NO: 134463 - RNA, 22 nt, synthetic construct
  source 1..22: mol_type = other RNA
ctttggctgaaatgctgtaact

SEQ ID NO: 134464 - RNA, 22 nt, synthetic construct
  source 1..22: mol_type = other RNA
ctttggctgttagccttgccat

SEQ ID NO: 134465 - RNA, 22 nt, synthetic construct
  source 1..22: mol_type = other RNA
ctttgggaaaatctctgacttc

SEQ ID NO: 134466 - RNA, 22 nt, synthetic construct
  source 1..22: mol_type = other RNA
ctttgggaaggccctgattgag

SEQ ID NO: 134467 - RNA, 22 nt, synthetic construct
  source 1..22: mol_type = other RNA
ctttgggattagcttattcttt

SEQ ID NO: 134468 - RNA, 22 nt, synthetic construct
  source 1..22: mol_type = other RNA
ctttggggagataccttgaaag

SEQ ID NO: 134469 - RNA, 22 nt, synthetic construct
  source 1..22: mol_type = other RNA
ctttgggggaagcaggaactca

SEQ ID NO: 134470 - RNA, 22 nt, synthetic construct
  source 1..22: mol_type = other RNA
ctttgggtaatttatctccata

SEQ ID NO: 134471 - RNA, 22 nt, synthetic construct
  source 1..22: mol_type = other RNA
ctttgggtctatagtttaattg

SEQ ID NO: 134472 - RNA, 22 nt, synthetic construct
  source 1..22: mol_type = other RNA
ctttggtgaaggttcatgaaca

SEQ ID NO: 134473 - RNA, 22 nt, synthetic construct
  source 1..22: mol_type = other RNA
ctttggtgatcctaagccatct

SEQ ID NO: 134474 - RNA, 22 nt, synthetic construct
  source 1..22: mol_type = other RNA
ctttggtgctgataaatggctt

SEQ ID NO: 134475 - RNA, 22 nt, synthetic construct
  source 1..22: mol_type = other RNA
ctttggttttgactcagtactt

SEQ ID NO: 134476 - RNA, 22 nt, synthetic construct
  source 1..22: mol_type = other RNA
ctttgtacagtaattgtagttt

SEQ ID NO: 134477 - RNA, 22 nt, synthetic construct
  source 1..22: mol_type = other RNA
ctttgtattcatccagtttaaa

SEQ ID NO: 134478 - RNA, 22 nt, synthetic construct
  source 1..22: mol_type = other RNA
ctttgtcaggcatgctaactgc

SEQ ID NO: 134479 - RNA, 22 nt, synthetic construct
  source 1..22: mol_type = other RNA
ctttgtccactgtcagtgggac

SEQ ID NO: 134480 - RNA, 22 nt, synthetic construct
  source 1..22: mol_type = other RNA
ctttgtctattccctacattgc

SEQ ID NO: 134481 - RNA, 22 nt, synthetic construct
  source 1..22: mol_type = other RNA
ctttgtctctggaaggctaagc

SEQ ID NO: 134482 - RNA, 22 nt, synthetic construct
  source 1..22: mol_type = other RNA
ctttgtgaagggaggtaggctt

SEQ ID NO: 134483 - RNA, 22 nt, synthetic construct
  source 1..22: mol_type = other RNA
ctttgtgactgtgagggtaaga

SEQ ID NO: 134484 - RNA, 22 nt, synthetic construct
  source 1..22: mol_type = other RNA
ctttgtgcaggtctgggttttt

SEQ ID NO: 134485 - RNA, 22 nt, synthetic construct
  source 1..22: mol_type = other RNA
ctttgtggagtggaggggcagg

SEQ ID NO: 134486 - RNA, 22 nt, synthetic construct
  source 1..22: mol_type = other RNA
ctttgtggcctcttcccttgtg

SEQ ID NO: 134487 - RNA, 22 nt, synthetic construct
  source 1..22: mol_type = other RNA
ctttgtgtcaagtacaactaat

SEQ ID NO: 134488 - RNA, 22 nt, synthetic construct
  source 1..22: mol_type = other RNA
ctttgtgttggtgtttctgaca

SEQ ID NO: 134489 - RNA, 22 nt, synthetic construct
  source 1..22: mol_type = other RNA
ctttgttacagcagctctagca

SEQ ID NO: 134490 - RNA, 22 nt, synthetic construct
  source 1..22: mol_type = other RNA
ctttgttagtgccttcagaagg

SEQ ID NO: 134491 - RNA, 22 nt, synthetic construct
  source 1..22: mol_type = other RNA
ctttgttagtttattcatacgt

SEQ ID NO: 134492 - RNA, 22 nt, synthetic construct
  source 1..22: mol_type = other RNA
ctttgttatctgaacgtcttta

SEQ ID NO: 134493 - RNA, 22 nt, synthetic construct
  source 1..22: mol_type = other RNA
ctttgttcatcatcttttgcct

SEQ ID NO: 134494 - RNA, 22 nt, synthetic construct
  source 1..22: mol_type = other RNA
ctttgttgaaaacgaggaaaag

SEQ ID NO: 134495 - RNA, 22 nt, synthetic construct
  source 1..22: mol_type = other RNA
ctttgttgccaggtggacgcgg

SEQ ID NO: 134496 - RNA, 22 nt, synthetic construct
  source 1..22: mol_type = other RNA
ctttgtttatccttgcaccaac

SEQ ID NO: 134497 - RNA, 22 nt, synthetic construct
  source 1..22: mol_type = other RNA
ctttgttttgtttttctctcct

SEQ ID NO: 134498 - RNA, 22 nt, synthetic construct
  source 1..22: mol_type = other RNA
cttttaaacccatttcatgcca

SEQ ID NO: 134499 - RNA, 22 nt, synthetic construct
  source 1..22: mol_type = other RNA
cttttaaagaaaggtctctctc

SEQ ID NO: 134500 - RNA, 22 nt, synthetic construct
  source 1..22: mol_type = other RNA
cttttaaagacctcaggtttag

SEQ ID NO: 134501 - RNA, 22 nt, synthetic construct
  source 1..22: mol_type = other RNA
cttttaaatgccaatttgggat

SEQ ID NO: 134502 - RNA, 22 nt, synthetic construct
  source 1..22: mol_type = other RNA
cttttaacagatggtccttttt

SEQ ID NO: 134503 - RNA, 22 nt, synthetic construct
  source 1..22: mol_type = other RNA
cttttaacccacagataatttc

SEQ ID NO: 134504 - RNA, 22 nt, synthetic construct
  source 1..22: mol_type = other RNA
cttttaacttgctttgaatttg

SEQ ID NO: 134505 - RNA, 22 nt, synthetic construct
  source 1..22: mol_type = other RNA
cttttaagagtgaagaaacctt

SEQ ID NO: 134506 - RNA, 22 nt, synthetic construct
  source 1..22: mol_type = other RNA
cttttaaggcttggaaaacaaa

SEQ ID NO: 134507 - RNA, 22 nt, synthetic construct
  source 1..22: mol_type = other RNA
cttttaagggaaacactcatac

SEQ ID NO: 134508 - RNA, 22 nt, synthetic construct
  source 1..22: mol_type = other RNA
cttttaatactttcacactgat

SEQ ID NO: 134509 - RNA, 22 nt, synthetic construct
  source 1..22: mol_type = other RNA
cttttacaccctaggtagggtt

SEQ ID NO: 134510 - RNA, 22 nt, synthetic construct
  source 1..22: mol_type = other RNA
cttttacgaggacagactgcag

SEQ ID NO: 134511 - RNA, 22 nt, synthetic construct
  source 1..22: mol_type = other RNA
cttttacttgcttggtttcaca

SEQ ID NO: 134512 - RNA, 22 nt, synthetic construct
  source 1..22: mol_type = other RNA
cttttacttggctcctcccggc

SEQ ID NO: 134513 - RNA, 22 nt, synthetic construct
  source 1..22: mol_type = other RNA
cttttagagtaactgtcatcag

SEQ ID NO: 134514 - RNA, 22 nt, synthetic construct
  source 1..22: mol_type = other RNA
cttttagccaacaaccataatg

SEQ ID NO: 134515 - RNA, 22 nt, synthetic construct
  source 1..22: mol_type = other RNA
cttttaggtgccccactccaca

SEQ ID NO: 134516 - RNA, 22 nt, synthetic construct
  source 1..22: mol_type = other RNA
cttttagtaggtctccttgtat

SEQ ID NO: 134517 - RNA, 22 nt, synthetic construct
  source 1..22: mol_type = other RNA
cttttagtttacactatggctt

SEQ ID NO: 134518 - RNA, 22 nt, synthetic construct
  source 1..22: mol_type = other RNA
cttttataactgaacatgtatg

SEQ ID NO: 134519 - RNA, 22 nt, synthetic construct
  source 1..22: mol_type = other RNA
cttttatgtgcagtctaaccat

SEQ ID NO: 134520 - RNA, 22 nt, synthetic construct
  source 1..22: mol_type = other RNA
cttttcaaaaacagcatataca

SEQ ID NO: 134521 - RNA, 22 nt, synthetic construct
  source 1..22: mol_type = other RNA
cttttcaaaaacccaactcttt

SEQ ID NO: 134522 - RNA, 22 nt, synthetic construct
  source 1..22: mol_type = other RNA
cttttcaactgaacaacgctgt

SEQ ID NO: 134523 - RNA, 22 nt, synthetic construct
  source 1..22: mol_type = other RNA
cttttcacataaatttgccaca

SEQ ID NO: 134524 - RNA, 22 nt, synthetic construct
  source 1..22: mol_type = other RNA
cttttcactctaatatggttcc

SEQ ID NO: 134525 - RNA, 22 nt, synthetic construct
  source 1..22: mol_type = other RNA
cttttcactcttagtgatgtct

SEQ ID NO: 134526 - RNA, 22 nt, synthetic construct
  source 1..22: mol_type = other RNA
cttttcaggtattgagcctgtt

SEQ ID NO: 134527 - RNA, 22 nt, synthetic construct
  source 1..22: mol_type = other RNA
cttttcagtccagatattatcc

SEQ ID NO: 134528 - RNA, 22 nt, synthetic construct
  source 1..22: mol_type = other RNA
cttttcatcactcactggcctg

SEQ ID NO: 134529 - RNA, 22 nt, synthetic construct
  source 1..22: mol_type = other RNA
cttttcatgttgaccattttta

SEQ ID NO: 134530 - RNA, 22 nt, synthetic construct
  source 1..22: mol_type = other RNA
cttttccaaccaagcccaactt

SEQ ID NO: 134531 - RNA, 22 nt, synthetic construct
  source 1..22: mol_type = other RNA
cttttccagtcttctcatacag

SEQ ID NO: 134532 - RNA, 22 nt, synthetic construct
  source 1..22: mol_type = other RNA
cttttcccaggagctagaacag

SEQ ID NO: 134533 - RNA, 22 nt, synthetic construct
  source 1..22: mol_type = other RNA
cttttcctaccctgaggatata

SEQ ID NO: 134534 - RNA, 22 nt, synthetic construct
  source 1..22: mol_type = other RNA
cttttcctagactgccaggtag

SEQ ID NO: 134535 - RNA, 22 nt, synthetic construct
  source 1..22: mol_type = other RNA
cttttcctcgttttcaacaaag

SEQ ID NO: 134536 - RNA, 22 nt, synthetic construct
  source 1..22: mol_type = other RNA
cttttcctgctgtcgtttatgc

SEQ ID NO: 134537 - RNA, 22 nt, synthetic construct
  source 1..22: mol_type = other RNA
cttttcctggaaaacttctctg

SEQ ID NO: 134538 - RNA, 22 nt, synthetic construct
  source 1..22: mol_type = other RNA
cttttcctgttccgggatcctg

SEQ ID NO: 134539 - RNA, 22 nt, synthetic construct
  source 1..22: mol_type = other RNA
cttttccttcttaagacatttg

SEQ ID NO: 134540 - RNA, 22 nt, synthetic construct
  source 1..22: mol_type = other RNA
cttttcctttaacgtatctggg

SEQ ID NO: 134541 - RNA, 22 nt, synthetic construct
  source 1..22: mol_type = other RNA
cttttcgagactgagtaatatt

SEQ ID NO: 134542 - RNA, 22 nt, synthetic construct
  source 1..22: mol_type = other RNA
cttttctatctgaacattttag

SEQ ID NO: 134543 - RNA, 22 nt, synthetic construct
  source 1..22: mol_type = other RNA
cttttctcctaagtcttcttct

SEQ ID NO: 134544 - RNA, 22 nt, synthetic construct
  source 1..22: mol_type = other RNA
cttttctcgtgcatgtctgcag

SEQ ID NO: 134545 - RNA, 22 nt, synthetic construct
  source 1..22: mol_type = other RNA
cttttctgacaatttcagggag

SEQ ID NO: 134546 - RNA, 22 nt, synthetic construct
  source 1..22: mol_type = other RNA
cttttctgatttgctggctcag

SEQ ID NO: 134547 - RNA, 22 nt, synthetic construct
  source 1..22: mol_type = other RNA
cttttctggttttctggaggct

SEQ ID NO: 134548 - RNA, 22 nt, synthetic construct
  source 1..22: mol_type = other RNA
cttttcttaaaactttaggtca

SEQ ID NO: 134549 - RNA, 22 nt, synthetic construct
  source 1..22: mol_type = other RNA
cttttgaaactgagcatcccag

SEQ ID NO: 134550 - RNA, 22 nt, synthetic construct
  source 1..22: mol_type = other RNA
cttttgaacactctgcaatttt

SEQ ID NO: 134551 - RNA, 22 nt, synthetic construct
  source 1..22: mol_type = other RNA
cttttgacgcgcaacaattcaa

SEQ ID NO: 134552 - RNA, 22 nt, synthetic construct
  source 1..22: mol_type = other RNA
cttttgagggtatcatattatt

SEQ ID NO: 134553 - RNA, 22 nt, synthetic construct
  source 1..22: mol_type = other RNA
cttttgagtgtaaggtgtttgg

SEQ ID NO: 134554 - RNA, 22 nt, synthetic construct
  source 1..22: mol_type = other RNA
cttttgagttcagaaagattaa

SEQ ID NO: 134555 - RNA, 22 nt, synthetic construct
  source 1..22: mol_type = other RNA
cttttgagtttggtgtatttag

SEQ ID NO: 134556 - RNA, 22 nt, synthetic construct
  source 1..22: mol_type = other RNA
cttttgcctggatgaatgcagt

SEQ ID NO: 134557 - RNA, 22 nt, synthetic construct
  source 1..22: mol_type = other RNA
cttttgctgagggaatttttct

SEQ ID NO: 134558 - RNA, 22 nt, synthetic construct
  source 1..22: mol_type = other RNA
cttttgctgcatcccaagggtt

SEQ ID NO: 134559 - RNA, 22 nt, synthetic construct
  source 1..22: mol_type = other RNA
cttttgctgtatacccaggtgt

SEQ ID NO: 134560 - RNA, 22 nt, synthetic construct
  source 1..22: mol_type = other RNA
cttttgctttgggtctatagtt

SEQ ID NO: 134561 - RNA, 22 nt, synthetic construct
  source 1..22: mol_type = other RNA
cttttggaagcatgtggccagg

SEQ ID NO: 134562 - RNA, 22 nt, synthetic construct
  source 1..22: mol_type = other RNA
cttttggaatttaaggggtaaa

SEQ ID NO: 134563 - RNA, 22 nt, synthetic construct
  source 1..22: mol_type = other RNA
cttttggagctataatttatct

SEQ ID NO: 134564 - RNA, 22 nt, synthetic construct
  source 1..22: mol_type = other RNA
cttttggatgcagatttctttt

SEQ ID NO: 134565 - RNA, 22 nt, synthetic construct
  source 1..22: mol_type = other RNA
cttttggcagcgtaactccatc

SEQ ID NO: 134566 - RNA, 22 nt, synthetic construct
  source 1..22: mol_type = other RNA
cttttgtaatctaaggattatg

SEQ ID NO: 134567 - RNA, 22 nt, synthetic construct
  source 1..22: mol_type = other RNA
cttttgtactacttgtcaggtg

SEQ ID NO: 134568 - RNA, 22 nt, synthetic construct
  source 1..22: mol_type = other RNA
cttttgtagaccctgttagtcc

SEQ ID NO: 134569 - RNA, 22 nt, synthetic construct
  source 1..22: mol_type = other RNA
cttttgtagagggaatttgttt

SEQ ID NO: 134570 - RNA, 22 nt, synthetic construct
  source 1..22: mol_type = other RNA
cttttgtagctaatatctttgg

SEQ ID NO: 134571 - RNA, 22 nt, synthetic construct
  source 1..22: mol_type = other RNA
cttttgtcaagctatcagaatt

SEQ ID NO: 134572 - RNA, 22 nt, synthetic construct
  source 1..22: mol_type = other RNA
cttttgtgcaacataaataggg

SEQ ID NO: 134573 - RNA, 22 nt, synthetic construct
  source 1..22: mol_type = other RNA
cttttgtgcatcaaaggacact

SEQ ID NO: 134574 - RNA, 22 nt, synthetic construct
  source 1..22: mol_type = other RNA
cttttgtgggtaaattaagtaa

SEQ ID NO: 134575 - RNA, 22 nt, synthetic construct
  source 1..22: mol_type = other RNA
cttttgttgcctgtagttttgg

SEQ ID NO: 134576 - RNA, 22 nt, synthetic construct
  source 1..22: mol_type = other RNA
ctttttaaacaggtgtaagaga

SEQ ID NO: 134577 - RNA, 22 nt, synthetic construct
  source 1..22: mol_type = other RNA
ctttttacacttggagttttcc

SEQ ID NO: 134578 - RNA, 22 nt, synthetic construct
  source 1..22: mol_type = other RNA
ctttttaccaagttgaatttct

SEQ ID NO: 134579 - RNA, 22 nt, synthetic construct
  source 1..22: mol_type = other RNA
ctttttacccggagaggtgaac

SEQ ID NO: 134580 - RNA, 22 nt, synthetic construct
  source 1..22: mol_type = other RNA
ctttttacgatgaaattgacca

SEQ ID NO: 134581 - RNA, 22 nt, synthetic construct
  source 1..22: mol_type = other RNA
ctttttactcatgtctacctgt

SEQ ID NO: 134582 - RNA, 22 nt, synthetic construct
  source 1..22: mol_type = other RNA
ctttttactcgagggtagcttt

SEQ ID NO: 134583 - RNA, 22 nt, synthetic construct
  source 1..22: mol_type = other RNA
ctttttactttgcgaaacacac

SEQ ID NO: 134584 - RNA, 22 nt, synthetic construct
  source 1..22: mol_type = other RNA
ctttttaggtagggataagaat

SEQ ID NO: 134585 - RNA, 22 nt, synthetic construct
  source 1..22: mol_type = other RNA
ctttttagtaagaggtatcacc

SEQ ID NO: 134586 - RNA, 22 nt, synthetic construct
  source 1..22: mol_type = other RNA
ctttttatatttccgatgatac

SEQ ID NO: 134587 - RNA, 22 nt, synthetic construct
  source 1..22: mol_type = other RNA
ctttttatggaaacatggtaat

SEQ ID NO: 134588 - RNA, 22 nt, synthetic construct
  source 1..22: mol_type = other RNA
ctttttattctgttctagctcc

SEQ ID NO: 134589 - RNA, 22 nt, synthetic construct
  source 1..22: mol_type = other RNA
ctttttcaaataatagctatcc

SEQ ID NO: 134590 - RNA, 22 nt, synthetic construct
  source 1..22: mol_type = other RNA
ctttttcagcagcagagaagtg

SEQ ID NO: 134591 - RNA, 22 nt, synthetic construct
  source 1..22: mol_type = other RNA
ctttttcatccaaacagaaacc

SEQ ID NO: 134592 - RNA, 22 nt, synthetic construct
  source 1..22: mol_type = other RNA
ctttttccaggaccaatttacc

SEQ ID NO: 134593 - RNA, 22 nt, synthetic construct
  source 1..22: mol_type = other RNA
ctttttctagtttgaggtgtac

SEQ ID NO: 134594 - RNA, 22 nt, synthetic construct
  source 1..22: mol_type = other RNA
ctttttctgcatcttttgaggg

SEQ ID NO: 134595 - RNA, 22 nt, synthetic construct
  source 1..22: mol_type = other RNA
ctttttcttcttgttttgttct

SEQ ID NO: 134596 - RNA, 22 nt, synthetic construct
  source 1..22: mol_type = other RNA
ctttttcttgctttgctgcccc

SEQ ID NO: 134597 - RNA, 22 nt, synthetic construct
  source 1..22: mol_type = other RNA
ctttttcttggtggtaactgat

SEQ ID NO: 134598 - RNA, 22 nt, synthetic construct
  source 1..22: mol_type = other RNA
ctttttctttttaaacaggtgt

SEQ ID NO: 134599 - RNA, 22 nt, synthetic construct
  source 1..22: mol_type = other RNA
ctttttctttttagtaagaggt

SEQ ID NO: 134600 - RNA, 22 nt, synthetic construct
  source 1..22: mol_type = other RNA
ctttttgacagatgagactctt

SEQ ID NO: 134601 - RNA, 22 nt, synthetic construct
  source 1..22: mol_type = other RNA
ctttttgggatctgtcatgttt

SEQ ID NO: 134602 - RNA, 22 nt, synthetic construct
  source 1..22: mol_type = other RNA
ctttttgggcctttctgtttgt

SEQ ID NO: 134603 - RNA, 22 nt, synthetic construct
  source 1..22: mol_type = other RNA
ctttttgtatcctgtttgagaa

SEQ ID NO: 134604 - RNA, 22 nt, synthetic construct
  source 1..22: mol_type = other RNA
ctttttgtcacacggaaaacat

SEQ ID NO: 134605 - RNA, 22 nt, synthetic construct
  source 1..22: mol_type = other RNA
ctttttgtgagttttaactctt

SEQ ID NO: 134606 - RNA, 22 nt, synthetic construct
  source 1..22: mol_type = other RNA
ctttttgttttctccttctgga

SEQ ID NO: 134607 - RNA, 22 nt, synthetic construct
  source 1..22: mol_type = other RNA
cttttttaaggaaaagtcagta

SEQ ID NO: 134608 - RNA, 22 nt, synthetic construct
  source 1..22: mol_type = other RNA
cttttttactgacttttcctta

SEQ ID NO: 134609 - RNA, 22 nt, synthetic construct
  source 1..22: mol_type = other RNA
cttttttatgtgctttctcaac

SEQ ID NO: 134610 - RNA, 22 nt, synthetic construct
  source 1..22: mol_type = other RNA
cttttttgcccactcttatatc

SEQ ID NO: 134611 - RNA, 22 nt, synthetic construct
  source 1..22: mol_type = other RNA
cttttttggtgtttttctaggt

SEQ ID NO: 134612 - RNA, 22 nt, synthetic construct
  source 1..22: mol_type = other RNA
cttttttgtagagacagaatct

SEQ ID NO: 134613 - RNA, 22 nt, synthetic construct
  source 1..22: mol_type = other RNA
gaaaaaacaaaacaaaaccctg

SEQ ID NO: 134614 - RNA, 22 nt, synthetic construct
  source 1..22: mol_type = other RNA
gaaaaaacacctaaagatatgt

SEQ ID NO: 134615 - RNA, 22 nt, synthetic construct
  source 1..22: mol_type = other RNA
gaaaaaacagttgctattcaac

SEQ ID NO: 134616 - RNA, 22 nt, synthetic construct
  source 1..22: mol_type = other RNA
gaaaaaacgggttatacacaca

SEQ ID NO: 134617 - RNA, 22 nt, synthetic construct
  source 1..22: mol_type = other RNA
gaaaaaacttcccttagctctc

SEQ ID NO: 134618 - RNA, 22 nt, synthetic construct
  source 1..22: mol_type = other RNA
gaaaaaataaaggctttcgtat

SEQ ID NO: 134619 - RNA, 22 nt, synthetic construct
  source 1..22: mol_type = other RNA
gaaaaaatggtgcagccactat

SEQ ID NO: 134620 - RNA, 22 nt, synthetic construct
  source 1..22: mol_type = other RNA
gaaaaaattagccttttacacc

SEQ ID NO: 134621 - RNA, 22 nt, synthetic construct
  source 1..22: mol_type = other RNA
gaaaaacaaaacaaagtctttg

SEQ ID NO: 134622 - RNA, 22 nt, synthetic construct
  source 1..22: mol_type = other RNA
gaaaaacaccaaaaaagcacca

SEQ ID NO: 134623 - RNA, 22 nt, synthetic construct
  source 1..22: mol_type = other RNA
gaaaaacacctcagttaaaccc

SEQ ID NO: 134624 - RNA, 22 nt, synthetic construct
  source 1..22: mol_type = other RNA
gaaaaacagaagacacaaaatc

SEQ ID NO: 134625 - RNA, 22 nt, synthetic construct
  source 1..22: mol_type = other RNA
gaaaaacagatcttggccgaat

SEQ ID NO: 134626 - RNA, 22 nt, synthetic construct
  source 1..22: mol_type = other RNA
gaaaaacattctacagtattac

SEQ ID NO: 134627 - RNA, 22 nt, synthetic construct
  source 1..22: mol_type = other RNA
gaaaaacctaaacctgtgattt

SEQ ID NO: 134628 - RNA, 22 nt, synthetic construct
  source 1..22: mol_type = other RNA
gaaaaacggaggttgcagtaag

SEQ ID NO: 134629 - RNA, 22 nt, synthetic construct
  source 1..22: mol_type = other RNA
gaaaaactgaactacagtgttt

SEQ ID NO: 134630 - RNA, 22 nt, synthetic construct
  source 1..22: mol_type = other RNA
gaaaaactgcagcaattatttg

SEQ ID NO: 134631 - RNA, 22 nt, synthetic construct
  source 1..22: mol_type = other RNA
gaaaaagaaaagacaagactaa

SEQ ID NO: 134632 - RNA, 22 nt, synthetic construct
  source 1..22: mol_type = other RNA
gaaaaagaataagctaatccca

SEQ ID NO: 134633 - RNA, 22 nt, synthetic construct
  source 1..22: mol_type = other RNA
gaaaaagcaacttgaaggcaat

SEQ ID NO: 134634 - RNA, 22 nt, synthetic construct
  source 1..22: mol_type = other RNA
gaaaaagcagagaaactggaat

SEQ ID NO: 134635 - RNA, 22 nt, synthetic construct
  source 1..22: mol_type = other RNA
gaaaaagctcacctctggactc

SEQ ID NO: 134636 - RNA, 22 nt, synthetic construct
  source 1..22: mol_type = other RNA
gaaaaaggaaagtaactgttgg

SEQ ID NO: 134637 - RNA, 22 nt, synthetic construct
  source 1..22: mol_type = other RNA
gaaaaaggttaagggaagagct

SEQ ID NO: 134638 - RNA, 22 nt, synthetic construct
  source 1..22: mol_type = other RNA
gaaaaagtactggaaatggaca

SEQ ID NO: 134639 - RNA, 22 nt, synthetic construct
  source 1..22: mol_type = other RNA
gaaaaagttgggcttggttgga

SEQ ID NO: 134640 - RNA, 22 nt, synthetic construct
  source 1..22: mol_type = other RNA
gaaaaatcgtcctcttcgggtg

SEQ ID NO: 134641 - RNA, 22 nt, synthetic construct
  source 1..22: mol_type = other RNA
gaaaaatctaaccctcaatccc

SEQ ID NO: 134642 - RNA, 22 nt, synthetic construct
  source 1..22: mol_type = other RNA
gaaaaatgagaaacctaagaaa

SEQ ID NO: 134643 - RNA, 22 nt, synthetic construct
  source 1..22: mol_type = other RNA
gaaaaatggggatatccaaaga

SEQ ID NO: 134644 - RNA, 22 nt, synthetic construct
  source 1..22: mol_type = other RNA
gaaaaatggttttatggtaact

SEQ ID NO: 134645 - RNA, 22 nt, synthetic construct
  source 1..22: mol_type = other RNA
gaaaaatgtcaattttccccca

SEQ ID NO: 134646 - RNA, 22 nt, synthetic construct
  source 1..22: mol_type = other RNA
gaaaaatgtccgttgaagtctt

SEQ ID NO: 134647 - RNA, 22 nt, synthetic construct
  source 1..22: mol_type = other RNA
gaaaaattacaggtcaaactca

SEQ ID NO: 134648 - RNA, 22 nt, synthetic construct
  source 1..22: mol_type = other RNA
gaaaaattcactcctcattcac

SEQ ID NO: 134649 - RNA, 22 nt, synthetic construct
  source 1..22: mol_type = other RNA
gaaaaattccctcagcaaaagc

SEQ ID NO: 134650 - RNA, 22 nt, synthetic construct
  source 1..22: mol_type = other RNA
gaaaaatttgacatgacaggtg

SEQ ID NO: 134651 - RNA, 22 nt, synthetic construct
  source 1..22: mol_type = other RNA
gaaaacaaattcatgcaactga

SEQ ID NO: 134652 - RNA, 22 nt, synthetic construct
  source 1..22: mol_type = other RNA
gaaaacaaattgcatcaactgc

SEQ ID NO: 134653 - RNA, 22 nt, synthetic construct
  source 1..22: mol_type = other RNA
gaaaacaattacttgagagcag

SEQ ID NO: 134654 - RNA, 22 nt, synthetic construct
  source 1..22: mol_type = other RNA
gaaaacacaaactgcagaatga

SEQ ID NO: 134655 - RNA, 22 nt, synthetic construct
  source 1..22: mol_type = other RNA
gaaaacacaacataccaaaacc

SEQ ID NO: 134656 - RNA, 22 nt, synthetic construct
  source 1..22: mol_type = other RNA
gaaaacacccttgaaaatttcc

SEQ ID NO: 134657 - RNA, 22 nt, synthetic construct
  source 1..22: mol_type = other RNA
gaaaacactccagaatgaccga

SEQ ID NO: 134658 - RNA, 22 nt, synthetic construct
  source 1..22: mol_type = other RNA
gaaaacagataacctagatttt

SEQ ID NO: 134659 - RNA, 22 nt, synthetic construct
  source 1..22: mol_type = other RNA
gaaaacagctaggtgagtgaga

SEQ ID NO: 134660 - RNA, 22 nt, synthetic construct
  source 1..22: mol_type = other RNA
gaaaacagtttggcaatttctc

SEQ ID NO: 134661 - RNA, 22 nt, synthetic construct
  source 1..22: mol_type = other RNA
gaaaacatatccttctacatcc

SEQ ID NO: 134662 - RNA, 22 nt, synthetic construct
  source 1..22: mol_type = other RNA
gaaaacatgttttgttgttgtt

SEQ ID NO: 134663 - RNA, 22 nt, synthetic construct
  source 1..22: mol_type = other RNA
gaaaaccagaaaagtgaaacaa

SEQ ID NO: 134664 - RNA, 22 nt, synthetic construct
  source 1..22: mol_type = other RNA
gaaaaccatgtcatgtatatgc

SEQ ID NO: 134665 - RNA, 22 nt, synthetic construct
  source 1..22: mol_type = other RNA
gaaaacccttcatcatttgtat

SEQ ID NO: 134666 - RNA, 22 nt, synthetic construct
  source 1..22: mol_type = other RNA
gaaaaccgacagcagataagat

SEQ ID NO: 134667 - RNA, 22 nt, synthetic construct
  source 1..22: mol_type = other RNA
gaaaacctgaaatggcttaagg

SEQ ID NO: 134668 - RNA, 22 nt, synthetic construct
  source 1..22: mol_type = other RNA
gaaaacgaggaaaagagaacat

SEQ ID NO: 134669 - RNA, 22 nt, synthetic construct
  source 1..22: mol_type = other RNA
gaaaactaaggtcaagagagat

SEQ ID NO: 134670 - RNA, 22 nt, synthetic construct
  source 1..22: mol_type = other RNA
gaaaactacatgtaaaaactgt

SEQ ID NO: 134671 - RNA, 22 nt, synthetic construct
  source 1..22: mol_type = other RNA
gaaaactagagatgggaaagta

SEQ ID NO: 134672 - RNA, 22 nt, synthetic construct
  source 1..22: mol_type = other RNA
gaaaactcaactgcctctacat

SEQ ID NO: 134673 - RNA, 22 nt, synthetic construct
  source 1..22: mol_type = other RNA
gaaaactccaagtgtaaaaaga

SEQ ID NO: 134674 - RNA, 22 nt, synthetic construct
  source 1..22: mol_type = other RNA
gaaaactctgtttccttaccag

SEQ ID NO: 134675 - RNA, 22 nt, synthetic construct
  source 1..22: mol_type = other RNA
gaaaactggcaatcaaatggcc

SEQ ID NO: 134676 - RNA, 22 nt, synthetic construct
  source 1..22: mol_type = other RNA
gaaaacttctctggagcaagca

SEQ ID NO: 134677 - RNA, 22 nt, synthetic construct
  source 1..22: mol_type = other RNA
gaaaacttgagcagatcagtaa

SEQ ID NO: 134678 - RNA, 22 nt, synthetic construct
  source 1..22: mol_type = other RNA
gaaaagaaaaaggttaagggaa

SEQ ID NO: 134679 - RNA, 22 nt, synthetic construct
  source 1..22: mol_type = other RNA
gaaaagaaaagtttcagtggtt

SEQ ID NO: 134680 - RNA, 22 nt, synthetic construct
  source 1..22: mol_type = other RNA
gaaaagaaagctgtggatgttg

SEQ ID NO: 134681 - RNA, 22 nt, synthetic construct
  source 1..22: mol_type = other RNA
gaaaagaacaacatggtagacc

SEQ ID NO: 134682 - RNA, 22 nt, synthetic construct
  source 1..22: mol_type = other RNA
gaaaagaacacagtgttgagaa

SEQ ID NO: 134683 - RNA, 22 nt, synthetic construct
  source 1..22: mol_type = other RNA
gaaaagaagttacggttccctg

SEQ ID NO: 134684 - RNA, 22 nt, synthetic construct
  source 1..22: mol_type = other RNA
gaaaagacaatagctagtgtct

SEQ ID NO: 134685 - RNA, 22 nt, synthetic construct
  source 1..22: mol_type = other RNA
gaaaagacttctcaaacaggat

SEQ ID NO: 134686 - RNA, 22 nt, synthetic construct
  source 1..22: mol_type = other RNA
gaaaagacttgaggtttacttg

SEQ ID NO: 134687 - RNA, 22 nt, synthetic construct
  source 1..22: mol_type = other RNA
gaaaagagaacattggtttgaa

SEQ ID NO: 134688 - RNA, 22 nt, synthetic construct
  source 1..22: mol_type = other RNA
gaaaagagatctagtgaagtca

SEQ ID NO: 134689 - RNA, 22 nt, synthetic construct
  source 1..22: mol_type = other RNA
gaaaagagcacaccaagacatg

SEQ ID NO: 134690 - RNA, 22 nt, synthetic construct
  source 1..22: mol_type = other RNA
gaaaagataagtagaaggtcaa

SEQ ID NO: 134691 - RNA, 22 nt, synthetic construct
  source 1..22: mol_type = other RNA
gaaaagatactcaacatcacta

SEQ ID NO: 134692 - RNA, 22 nt, synthetic construct
  source 1..22: mol_type = other RNA
gaaaagatcagtaaaattccct

SEQ ID NO: 134693 - RNA, 22 nt, synthetic construct
  source 1..22: mol_type = other RNA
gaaaagcaaatgtcatcttctc

SEQ ID NO: 134694 - RNA, 22 nt, synthetic construct
  source 1..22: mol_type = other RNA
gaaaagcacaggcatcggccgg

SEQ ID NO: 134695 - RNA, 22 nt, synthetic construct
  source 1..22: mol_type = other RNA
gaaaagcccaatctacaggtcg

SEQ ID NO: 134696 - RNA, 22 nt, synthetic construct
  source 1..22: mol_type = other RNA
gaaaagcctcaaacgaaccaat

SEQ ID NO: 134697 - RNA, 22 nt, synthetic construct
  source 1..22: mol_type = other RNA
gaaaagctaccctcgagtaaaa

SEQ ID NO: 134698 - RNA, 22 nt, synthetic construct
  source 1..22: mol_type = other RNA
gaaaagctcaaaaatactcaag

SEQ ID NO: 134699 - RNA, 22 nt, synthetic construct
  source 1..22: mol_type = other RNA
gaaaagcttcccccctctctct

SEQ ID NO: 134700 - RNA, 22 nt, synthetic construct
  source 1..22: mol_type = other RNA
gaaaaggaatggaattctgatg

SEQ ID NO: 134701 - RNA, 22 nt, synthetic construct
  source 1..22: mol_type = other RNA
gaaaaggacattagtggaaaaa

SEQ ID NO: 134702 - RNA, 22 nt, synthetic construct
  source 1..22: mol_type = other RNA
gaaaaggatttgtttgtgaaga

SEQ ID NO: 134703 - RNA, 22 nt, synthetic construct
  source 1..22: mol_type = other RNA
gaaaaggcaaaccacacagaga

SEQ ID NO: 134704 - RNA, 22 nt, synthetic construct
  source 1..22: mol_type = other RNA
gaaaaggctgagacctcatctt

SEQ ID NO: 134705 - RNA, 22 nt, synthetic construct
  source 1..22: mol_type = other RNA
gaaaagtatggttgaagaaagt

SEQ ID NO: 134706 - RNA, 22 nt, synthetic construct
  source 1..22: mol_type = other RNA
gaaaagtcagtaaaaaaggacc

SEQ ID NO: 134707 - RNA, 22 nt, synthetic construct
  source 1..22: mol_type = other RNA
gaaaagtgttgactaccatctc

SEQ ID NO: 134708 - RNA, 22 nt, synthetic construct
  source 1..22: mol_type = other RNA
gaaaagtgtttgtcacatagaa

SEQ ID NO: 134709 - RNA, 22 nt, synthetic construct
  source 1..22: mol_type = other RNA
gaaaagtttcagtggttaatat

SEQ ID NO: 134710 - RNA, 22 nt, synthetic construct
  source 1..22: mol_type = other RNA
gaaaataaaaagtatcgtgaga

SEQ ID NO: 134711 - RNA, 22 nt, synthetic construct
  source 1..22: mol_type = other RNA
gaaaataaaattctgacccttt

SEQ ID NO: 134712 - RNA, 22 nt, synthetic construct
  source 1..22: mol_type = other RNA
gaaaataaaccaagtttggttc

SEQ ID NO: 134713 - RNA, 22 nt, synthetic construct
  source 1..22: mol_type = other RNA
gaaaataatacctaacagccgg

SEQ ID NO: 134714 - RNA, 22 nt, synthetic construct
  source 1..22: mol_type = other RNA
gaaaataatgttttccgtgtga

SEQ ID NO: 134715 - RNA, 22 nt, synthetic construct
  source 1..22: mol_type = other RNA
gaaaatacagttttgaccaaaa

SEQ ID NO: 134716 - RNA, 22 nt, synthetic construct
  source 1..22: mol_type = other RNA
gaaaatacatgaggcctctccc

SEQ ID NO: 134717 - RNA, 22 nt, synthetic construct
  source 1..22: mol_type = other RNA
gaaaatactaacgatccttact

SEQ ID NO: 134718 - RNA, 22 nt, synthetic construct
  source 1..22: mol_type = other RNA
gaaaatagagttccatctgtta

SEQ ID NO: 134719 - RNA, 22 nt, synthetic construct
  source 1..22: mol_type = other RNA
gaaaatagggacggccttcttt

SEQ ID NO: 134720 - RNA, 22 nt, synthetic construct
  source 1..22: mol_type = other RNA
gaaaatagtaactttctgctta

SEQ ID NO: 134721 - RNA, 22 nt, synthetic construct
  source 1..22: mol_type = other RNA
gaaaatagtatgaaggttctta

SEQ ID NO: 134722 - RNA, 22 nt, synthetic construct
  source 1..22: mol_type = other RNA
gaaaatatatactgaagttctc

SEQ ID NO: 134723 - RNA, 22 nt, synthetic construct
  source 1..22: mol_type = other RNA
gaaaatatccctggggtttcct

SEQ ID NO: 134724 - RNA, 22 nt, synthetic construct
  source 1..22: mol_type = other RNA
gaaaatcagtgtgaaagtatta

SEQ ID NO: 134725 - RNA, 22 nt, synthetic construct
  source 1..22: mol_type = other RNA
gaaaatcatacattttccacat

SEQ ID NO: 134726 - RNA, 22 nt, synthetic construct
  source 1..22: mol_type = other RNA
gaaaatcattgttcagggaagg

SEQ ID NO: 134727 - RNA, 22 nt, synthetic construct
  source 1..22: mol_type = other RNA
gaaaatcattttggcaaattgt

SEQ ID NO: 134728 - RNA, 22 nt, synthetic construct
  source 1..22: mol_type = other RNA
gaaaatccaaaagcctcaaaat

SEQ ID NO: 134729 - RNA, 22 nt, synthetic construct
  source 1..22: mol_type = other RNA
gaaaatccaagaagacatgata

SEQ ID NO: 134730 - RNA, 22 nt, synthetic construct
  source 1..22: mol_type = other RNA
gaaaatccttacttccagctca

SEQ ID NO: 134731 - RNA, 22 nt, synthetic construct
  source 1..22: mol_type = other RNA
gaaaatctctgacttcattctt

SEQ ID NO: 134732 - RNA, 22 nt, synthetic construct
  source 1..22: mol_type = other RNA
gaaaatctgacaatttgccaaa

SEQ ID NO: 134733 - RNA, 22 nt, synthetic construct
  source 1..22: mol_type = other RNA
gaaaatgcccttatttaatgtg

SEQ ID NO: 134734 - RNA, 22 nt, synthetic construct
  source 1..22: mol_type = other RNA
gaaaatgcttaacaagaatcct

SEQ ID NO: 134735 - RNA, 22 nt, synthetic construct
  source 1..22: mol_type = other RNA
gaaaatgcttatgtcttgtggc

SEQ ID NO: 134736 - RNA, 22 nt, synthetic construct
  source 1..22: mol_type = other RNA
gaaaatggccaagagttgctga

SEQ ID NO: 134737 - RNA, 22 nt, synthetic construct
  source 1..22: mol_type = other RNA
gaaaatgggccaaagacttcaa

SEQ ID NO: 134738 - RNA, 22 nt, synthetic construct
  source 1..22: mol_type = other RNA
gaaaatggtttaggctgtctcc

SEQ ID NO: 134739 - RNA, 22 nt, synthetic construct
  source 1..22: mol_type = other RNA
gaaaatgtaaaacatcaaagtc

SEQ ID NO: 134740 - RNA, 22 nt, synthetic construct
  source 1..22: mol_type = other RNA
gaaaatgtatgattttctagga

SEQ ID NO: 134741 - RNA, 22 nt, synthetic construct
  source 1..22: mol_type = other RNA
gaaaatgtgacattagtggtgg

SEQ ID NO: 134742 - RNA, 22 nt, synthetic construct
  source 1..22: mol_type = other RNA
gaaaatgttatacagcaaatct

SEQ ID NO: 134743 - RNA, 22 nt, synthetic construct
  source 1..22: mol_type = other RNA
gaaaatgttccctcttcaatat

SEQ ID NO: 134744 - RNA, 22 nt, synthetic construct
  source 1..22: mol_type = other RNA
gaaaattagctgactttcattt

SEQ ID NO: 134745 - RNA, 22 nt, synthetic construct
  source 1..22: mol_type = other RNA
gaaaattagctggatgtggtgt

SEQ ID NO: 134746 - RNA, 22 nt, synthetic construct
  source 1..22: mol_type = other RNA
gaaaattcaaacatgacagatc

SEQ ID NO: 134747 - RNA, 22 nt, synthetic construct
  source 1..22: mol_type = other RNA
gaaaattccttcccctttcttt

SEQ ID NO: 134748 - RNA, 22 nt, synthetic construct
  source 1..22: mol_type = other RNA
gaaaattcttggtcttttgatt

SEQ ID NO: 134749 - RNA, 22 nt, synthetic construct
  source 1..22: mol_type = other RNA
gaaaattggcgtacatgtagat

SEQ ID NO: 134750 - RNA, 22 nt, synthetic construct
  source 1..22: mol_type = other RNA
gaaaattgttcatgaaatcccc

SEQ ID NO: 134751 - RNA, 22 nt, synthetic construct
  source 1..22: mol_type = other RNA
gaaaatttagcttctgaattga

SEQ ID NO: 134752 - RNA, 22 nt, synthetic construct
  source 1..22: mol_type = other RNA
gaaaatttccagcattttatag

SEQ ID NO: 134753 - RNA, 22 nt, synthetic construct
  source 1..22: mol_type = other RNA
gaaaattttctgagcaactact

SEQ ID NO: 134754 - RNA, 22 nt, synthetic construct
  source 1..22: mol_type = other RNA
gaaaattttcttttgtgggtaa

SEQ ID NO: 134755 - RNA, 22 nt, synthetic construct
  source 1..22: mol_type = other RNA
gaaaatttttgtctggaacaca

SEQ ID NO: 134756 - RNA, 22 nt, synthetic construct
  source 1..22: mol_type = other RNA
gaaacaacaacaacaaaatacc

SEQ ID NO: 134757 - RNA, 22 nt, synthetic construct
  source 1..22: mol_type = other RNA
gaaacaacctaaatgtccatcg

SEQ ID NO: 134758 - RNA, 22 nt, synthetic construct
  source 1..22: mol_type = other RNA
gaaacaactcaaacgtccatca

SEQ ID NO: 134759 - RNA, 22 nt, synthetic construct
  source 1..22: mol_type = other RNA
gaaacaataaatttctgttgct

SEQ ID NO: 134760 - RNA, 22 nt, synthetic construct
  source 1..22: mol_type = other RNA
gaaacaatactttagacatggg

SEQ ID NO: 134761 - RNA, 22 nt, synthetic construct
  source 1..22: mol_type = other RNA
gaaacaatcgcaatccaaaatc

SEQ ID NO: 134762 - RNA, 22 nt, synthetic construct
  source 1..22: mol_type = other RNA
gaaacacactcgtgtatgattt

SEQ ID NO: 134763 - RNA, 22 nt, synthetic construct
  source 1..22: mol_type = other RNA
gaaacacaggactgtgtgtgtc

SEQ ID NO: 134764 - RNA, 22 nt, synthetic construct
  source 1..22: mol_type = other RNA
gaaacaccaacacaaagccttc

SEQ ID NO: 134765 - RNA, 22 nt, synthetic construct
  source 1..22: mol_type = other RNA
gaaacactataaatcagtaaga

SEQ ID NO: 134766 - RNA, 22 nt, synthetic construct
  source 1..22: mol_type = other RNA
gaaacactcataccaggttttg

SEQ ID NO: 134767 - RNA, 22 nt, synthetic construct
  source 1..22: mol_type = other RNA
gaaacactgctcagaagctttc

SEQ ID NO: 134768 - RNA, 22 nt, synthetic construct
  source 1..22: mol_type = other RNA
gaaacacttgtgtaactaccac

SEQ ID NO: 134769 - RNA, 22 nt, synthetic construct
  source 1..22: mol_type = other RNA
gaaacagaaaaatccatcttaa

SEQ ID NO: 134770 - RNA, 22 nt, synthetic construct
  source 1..22: mol_type = other RNA
gaaacagagttttccaataagt

SEQ ID NO: 134771 - RNA, 22 nt, synthetic construct
  source 1..22: mol_type = other RNA
gaaacaggattacaatgtaagg

SEQ ID NO: 134772 - RNA, 22 nt, synthetic construct
  source 1..22: mol_type = other RNA
gaaacagggttacagtataggg

SEQ ID NO: 134773 - RNA, 22 nt, synthetic construct
  source 1..22: mol_type = other RNA
gaaacagtaattagttacatga

SEQ ID NO: 134774 - RNA, 22 nt, synthetic construct
  source 1..22: mol_type = other RNA
gaaacatacatgttcagttata

SEQ ID NO: 134775 - RNA, 22 nt, synthetic construct
  source 1..22: mol_type = other RNA
gaaacatcccaagtgcccatta

SEQ ID NO: 134776 - RNA, 22 nt, synthetic construct
  source 1..22: mol_type = other RNA
gaaacatggcttagaaatgaag

SEQ ID NO: 134777 - RNA, 22 nt, synthetic construct
  source 1..22: mol_type = other RNA
gaaacatggtaatttgtccatc

SEQ ID NO: 134778 - RNA, 22 nt, synthetic construct
  source 1..22: mol_type = other RNA
gaaaccaagagcatagacttta

SEQ ID NO: 134779 - RNA, 22 nt, synthetic construct
  source 1..22: mol_type = other RNA
gaaaccaagcaagtaaaagaag

SEQ ID NO: 134780 - RNA, 22 nt, synthetic construct
  source 1..22: mol_type = other RNA
gaaaccacagagcctaaaatag

SEQ ID NO: 134781 - RNA, 22 nt, synthetic construct
  source 1..22: mol_type = other RNA
gaaaccagtgctctcccccgaa

SEQ ID NO: 134782 - RNA, 22 nt, synthetic construct
  source 1..22: mol_type = other RNA
gaaaccagtgggtcagctagtg

SEQ ID NO: 134783 - RNA, 22 nt, synthetic construct
  source 1..22: mol_type = other RNA
gaaaccatcgttcacactcgca

SEQ ID NO: 134784 - RNA, 22 nt, synthetic construct
  source 1..22: mol_type = other RNA
gaaaccatttaccccttaaatt

SEQ ID NO: 134785 - RNA, 22 nt, synthetic construct
  source 1..22: mol_type = other RNA
gaaaccccagggatattttcgt

SEQ ID NO: 134786 - RNA, 22 nt, synthetic construct
  source 1..22: mol_type = other RNA
gaaaccccgcatactgtgcagt

SEQ ID NO: 134787 - RNA, 22 nt, synthetic construct
  source 1..22: mol_type = other RNA
gaaacccgctctgggtgcgttg

SEQ ID NO: 134788 - RNA, 22 nt, synthetic construct
  source 1..22: mol_type = other RNA
gaaaccctcacgaaagcggtca

SEQ ID NO: 134789 - RNA, 22 nt, synthetic construct
  source 1..22: mol_type = other RNA
gaaaccctgtacccattagaca

SEQ ID NO: 134790 - RNA, 22 nt, synthetic construct
  source 1..22: mol_type = other RNA
gaaacctaagaaaggtctagtg

SEQ ID NO: 134791 - RNA, 22 nt, synthetic construct
  source 1..22: mol_type = other RNA
gaaacctgccatggtgttaaat

SEQ ID NO: 134792 - RNA, 22 nt, synthetic construct
  source 1..22: mol_type = other RNA
gaaaccttactgtaatattgta

SEQ ID NO: 134793 - RNA, 22 nt, synthetic construct
  source 1..22: mol_type = other RNA
gaaaccttggtgtgcttctgat

SEQ ID NO: 134794 - RNA, 22 nt, synthetic construct
  source 1..22: mol_type = other RNA
gaaacctttctcaaagcccacc

SEQ ID NO: 134795 - RNA, 22 nt, synthetic construct
  source 1..22: mol_type = other RNA
gaaaccttttgtagaccctgtt

SEQ ID NO: 134796 - RNA, 22 nt, synthetic construct
  source 1..22: mol_type = other RNA
gaaacgaccttgctcattcatc

SEQ ID NO: 134797 - RNA, 22 nt, synthetic construct
  source 1..22: mol_type = other RNA
gaaacgatgcattccagattga

SEQ ID NO: 134798 - RNA, 22 nt, synthetic construct
  source 1..22: mol_type = other RNA
gaaactaaatgtgagcatttag

SEQ ID NO: 134799 - RNA, 22 nt, synthetic construct
  source 1..22: mol_type = other RNA
gaaactacaattactgtacaaa

SEQ ID NO: 134800 - RNA, 22 nt, synthetic construct
  source 1..22: mol_type = other RNA
gaaactacctagaaaaacacca

SEQ ID NO: 134801 - RNA, 22 nt, synthetic construct
  source 1..22: mol_type = other RNA
gaaactagaaaagataagtaga

SEQ ID NO: 134802 - RNA, 22 nt, synthetic construct
  source 1..22: mol_type = other RNA
gaaactatccaacatgccagct

SEQ ID NO: 134803 - RNA, 22 nt, synthetic construct
  source 1..22: mol_type = other RNA
gaaactcaaacccaaattaaag

SEQ ID NO: 134804 - RNA, 22 nt, synthetic construct
  source 1..22: mol_type = other RNA
gaaactcaatgttggttagtgt

SEQ ID NO: 134805 - RNA, 22 nt, synthetic construct
  source 1..22: mol_type = other RNA
gaaactctggctcagaaacaac

SEQ ID NO: 134806 - RNA, 22 nt, synthetic construct
  source 1..22: mol_type = other RNA
gaaactgacaggactccacaga

SEQ ID NO: 134807 - RNA, 22 nt, synthetic construct
  source 1..22: mol_type = other RNA
gaaactgagcatcccagaggta

SEQ ID NO: 134808 - RNA, 22 nt, synthetic construct
  source 1..22: mol_type = other RNA
gaaactggaatcaatccagaca

SEQ ID NO: 134809 - RNA, 22 nt, synthetic construct
  source 1..22: mol_type = other RNA
gaaactggtgaactgggtgtag

SEQ ID NO: 134810 - RNA, 22 nt, synthetic construct
  source 1..22: mol_type = other RNA
gaaacttatttccagggggtat

SEQ ID NO: 134811 - RNA, 22 nt, synthetic construct
  source 1..22: mol_type = other RNA
gaaacttccaaccatcttctta

SEQ ID NO: 134812 - RNA, 22 nt, synthetic construct
  source 1..22: mol_type = other RNA
gaaacttccagaaacttccaac

SEQ ID NO: 134813 - RNA, 22 nt, synthetic construct
  source 1..22: mol_type = other RNA
gaaacttcttctgttggagaga

SEQ ID NO: 134814 - RNA, 22 nt, synthetic construct
  source 1..22: mol_type = other RNA
gaaacttgaatactcgtgtgtc

SEQ ID NO: 134815 - RNA, 22 nt, synthetic construct
  source 1..22: mol_type = other RNA
gaaacttgccatcttgcataag

SEQ ID NO: 134816 - RNA, 22 nt, synthetic construct
  source 1..22: mol_type = other RNA
gaaacttggattgtgtgtcgag

SEQ ID NO: 134817 - RNA, 22 nt, synthetic construct
  source 1..22: mol_type = other RNA
gaaactttgcattcctgaaatg

SEQ ID NO: 134818 - RNA, 22 nt, synthetic construct
  source 1..22: mol_type = other RNA
gaaagaaaaactgaactacagt

SEQ ID NO: 134819 - RNA, 22 nt, synthetic construct
  source 1..22: mol_type = other RNA
gaaagaaaatccaaaagcctca

SEQ ID NO: 134820 - RNA, 22 nt, synthetic construct
  source 1..22: mol_type = other RNA
gaaagaaagaaggccatttgat

SEQ ID NO: 134821 - RNA, 22 nt, synthetic construct
  source 1..22: mol_type = other RNA
gaaagaaatagaactgtcacaa

SEQ ID NO: 134822 - RNA, 22 nt, synthetic construct
  source 1..22: mol_type = other RNA
gaaagaactgaaagcagggact

SEQ ID NO: 134823 - RNA, 22 nt, synthetic construct
  source 1..22: mol_type = other RNA
gaaagaaggccatttgattgcc

SEQ ID NO: 134824 - RNA, 22 nt, synthetic construct
  source 1..22: mol_type = other RNA
gaaagaagtaatttcttctgaa

SEQ ID NO: 134825 - RNA, 22 nt, synthetic construct
  source 1..22: mol_type = other RNA
gaaagacagacctctattaaat

SEQ ID NO: 134826 - RNA, 22 nt, synthetic construct
  source 1..22: mol_type = other RNA
gaaagacaggtagacatgagta

SEQ ID NO: 134827 - RNA, 22 nt, synthetic construct
  source 1..22: mol_type = other RNA
gaaagaccaagagtgtggcttt

SEQ ID NO: 134828 - RNA, 22 nt, synthetic construct
  source 1..22: mol_type = other RNA
gaaagaccggggactgcaacag

SEQ ID NO: 134829 - RNA, 22 nt, synthetic construct
  source 1..22: mol_type = other RNA
gaaagagaaagaagtaatttct

SEQ ID NO: 134830 - RNA, 22 nt, synthetic construct
  source 1..22: mol_type = other RNA
gaaagagaatagcagaaacaca

SEQ ID NO: 134831 - RNA, 22 nt, synthetic construct
  source 1..22: mol_type = other RNA
gaaagagagagacaagcacagg

SEQ ID NO: 134832 - RNA, 22 nt, synthetic construct
  source 1..22: mol_type = other RNA
gaaagagagaggggggaagctt

SEQ ID NO: 134833 - RNA, 22 nt, synthetic construct
  source 1..22: mol_type = other RNA
gaaagagccagcctgatgatga

SEQ ID NO: 134834 - RNA, 22 nt, synthetic construct
  source 1..22: mol_type = other RNA
gaaagaggagacattacaattg

SEQ ID NO: 134835 - RNA, 22 nt, synthetic construct
  source 1..22: mol_type = other RNA
gaaagagggaagtactgagtca

SEQ ID NO: 134836 - RNA, 22 nt, synthetic construct
  source 1..22: mol_type = other RNA
gaaagagttgggtttttgaaaa

SEQ ID NO: 134837 - RNA, 22 nt, synthetic construct
  source 1..22: mol_type = other RNA
gaaagataaatcagaaactgac

SEQ ID NO: 134838 - RNA, 22 nt, synthetic construct
  source 1..22: mol_type = other RNA
gaaagataaatccaacgaccgg

SEQ ID NO: 134839 - RNA, 22 nt, synthetic construct
  source 1..22: mol_type = other RNA
gaaagatcatttagtaagtgtg

SEQ ID NO: 134840 - RNA, 22 nt, synthetic construct
  source 1..22: mol_type = other RNA
gaaagatctcaaacagcctaat

SEQ ID NO: 134841 - RNA, 22 nt, synthetic construct
  source 1..22: mol_type = other RNA
gaaagatgaagtatagaaagga

SEQ ID NO: 134842 - RNA, 22 nt, synthetic construct
  source 1..22: mol_type = other RNA
gaaagatgtcttttaacttgct

SEQ ID NO: 134843 - RNA, 22 nt, synthetic construct
  source 1..22: mol_type = other RNA
gaaagattaatccttgtggtct

SEQ ID NO: 134844 - RNA, 22 nt, synthetic construct
  source 1..22: mol_type = other RNA
gaaagcacataaaaaaggaatc

SEQ ID NO: 134845 - RNA, 22 nt, synthetic construct
  source 1..22: mol_type = other RNA
gaaagcaccagggcctctgaag

SEQ ID NO: 134846 - RNA, 22 nt, synthetic construct
  source 1..22: mol_type = other RNA
gaaagcacgtttgatctggtca

SEQ ID NO: 134847 - RNA, 22 nt, synthetic construct
  source 1..22: mol_type = other RNA
gaaagcagggactcccatatct

SEQ ID NO: 134848 - RNA, 22 nt, synthetic construct
  source 1..22: mol_type = other RNA
gaaagcaggtcatgactttttt

SEQ ID NO: 134849 - RNA, 22 nt, synthetic construct
  source 1..22: mol_type = other RNA
gaaagcaggttcattttaataa

SEQ ID NO: 134850 - RNA, 22 nt, synthetic construct
  source 1..22: mol_type = other RNA
gaaagcaggttgcattaatgct

SEQ ID NO: 134851 - RNA, 22 nt, synthetic construct
  source 1..22: mol_type = other RNA
gaaagcatcagagctttgttat

SEQ ID NO: 134852 - RNA, 22 nt, synthetic construct
  source 1..22: mol_type = other RNA
gaaagcccagccgcggactccg

SEQ ID NO: 134853 - RNA, 22 nt, synthetic construct
  source 1..22: mol_type = other RNA
gaaagcccttgagtatttttga

SEQ ID NO: 134854 - RNA, 22 nt, synthetic construct
  source 1..22: mol_type = other RNA
gaaagcctcttcagaagaggat

SEQ ID NO: 134855 - RNA, 22 nt, synthetic construct
  source 1..22: mol_type = other RNA
gaaagcctggctttagatggta

SEQ ID NO: 134856 - RNA, 22 nt, synthetic construct
  source 1..22: mol_type = other RNA
gaaagcctgtgacagtatgtca

SEQ ID NO: 134857 - RNA, 22 nt, synthetic construct
  source 1..22: mol_type = other RNA
gaaagcctttattttttcttcc

SEQ ID NO: 134858 - RNA, 22 nt, synthetic construct
  source 1..22: mol_type = other RNA
gaaagcggtcaacgcacccaga

SEQ ID NO: 134859 - RNA, 22 nt, synthetic construct
  source 1..22: mol_type = other RNA
gaaagctagaagacctcaaatt

SEQ ID NO: 134860 - RNA, 22 nt, synthetic construct
  source 1..22: mol_type = other RNA
gaaagctcaggaccagatgact

SEQ ID NO: 134861 - RNA, 22 nt, synthetic construct
  source 1..22: mol_type = other RNA
gaaagctcccaatgcttgaaga

SEQ ID NO: 134862 - RNA, 22 nt, synthetic construct
  source 1..22: mol_type = other RNA
gaaagctctcaattaatgccca

SEQ ID NO: 134863 - RNA, 22 nt, synthetic construct
  source 1..22: mol_type = other RNA
gaaagctggactcattccaatc

SEQ ID NO: 134864 - RNA, 22 nt, synthetic construct
  source 1..22: mol_type = other RNA
gaaagctgtggatgttggtgag

SEQ ID NO: 134865 - RNA, 22 nt, synthetic construct
  source 1..22: mol_type = other RNA
gaaagcttctgagcagtgtttc

SEQ ID NO: 134866 - RNA, 22 nt, synthetic construct
  source 1..22: mol_type = other RNA
gaaaggaaatgagtgtatgcag

SEQ ID NO: 134867 - RNA, 22 nt, synthetic construct
  source 1..22: mol_type = other RNA
gaaaggaatccggctttatgag

SEQ ID NO: 134868 - RNA, 22 nt, synthetic construct
  source 1..22: mol_type = other RNA
gaaaggaattgtaatcacagta

SEQ ID NO: 134869 - RNA, 22 nt, synthetic construct
  source 1..22: mol_type = other RNA
gaaaggacttcagtccttacca

SEQ ID NO: 134870 - RNA, 22 nt, synthetic construct
  source 1..22: mol_type = other RNA
gaaaggacttgatctaaaatgg

SEQ ID NO: 134871 - RNA, 22 nt, synthetic construct
  source 1..22: mol_type = other RNA
gaaaggagaccagttaggaagc

SEQ ID NO: 134872 - RNA, 22 nt, synthetic construct
  source 1..22: mol_type = other RNA
gaaaggagatactggccatgtt

SEQ ID NO: 134873 - RNA, 22 nt, synthetic construct
  source 1..22: mol_type = other RNA
gaaaggagggactgaaaccagt

SEQ ID NO: 134874 - RNA, 22 nt, synthetic construct
  source 1..22: mol_type = other RNA
gaaaggagttcagctttaaaga

SEQ ID NO: 134875 - RNA, 22 nt, synthetic construct
  source 1..22: mol_type = other RNA
gaaaggatactgagaacagaat

SEQ ID NO: 134876 - RNA, 22 nt, synthetic construct
  source 1..22: mol_type = other RNA
gaaaggatgaccttgacaataa

SEQ ID NO: 134877 - RNA, 22 nt, synthetic construct
  source 1..22: mol_type = other RNA
gaaaggatggtttgattgttcc

SEQ ID NO: 134878 - RNA, 22 nt, synthetic construct
  source 1..22: mol_type = other RNA
gaaaggcaaaggaaaaaacttt

SEQ ID NO: 134879 - RNA, 22 nt, synthetic construct
  source 1..22: mol_type = other RNA
gaaaggcatgaaattcttgggt

SEQ ID NO: 134880 - RNA, 22 nt, synthetic construct
  source 1..22: mol_type = other RNA
gaaaggcccaaaaagtttttaa

SEQ ID NO: 134881 - RNA, 22 nt, synthetic construct
  source 1..22: mol_type = other RNA
gaaaggcgaagcggcagggccg

SEQ ID NO: 134882 - RNA, 22 nt, synthetic construct
  source 1..22: mol_type = other RNA
gaaaggcgtcggggctgctggg

SEQ ID NO: 134883 - RNA, 22 nt, synthetic construct
  source 1..22: mol_type = other RNA
gaaagggattctggccaaatcc

SEQ ID NO: 134884 - RNA, 22 nt, synthetic construct
  source 1..22: mol_type = other RNA
gaaaggggaaggaattttcagg

SEQ ID NO: 134885 - RNA, 22 nt, synthetic construct
  source 1..22: mol_type = other RNA
gaaaggggccaggtgtggaggc

SEQ ID NO: 134886 - RNA, 22 nt, synthetic construct
  source 1..22: mol_type = other RNA
gaaagggtagagcactttcgta

SEQ ID NO: 134887 - RNA, 22 nt, synthetic construct
  source 1..22: mol_type = other RNA
gaaagggtagctttgatgcccc

SEQ ID NO: 134888 - RNA, 22 nt, synthetic construct
  source 1..22: mol_type = other RNA
gaaagggtgtgtgaatggaaaa

SEQ ID NO: 134889 - RNA, 22 nt, synthetic construct
  source 1..22: mol_type = other RNA
gaaaggtacgacgctcttgttc

SEQ ID NO: 134890 - RNA, 22 nt, synthetic construct
  source 1..22: mol_type = other RNA
gaaaggtctagtgtgcatgtgt

SEQ ID NO: 134891 - RNA, 22 nt, synthetic construct
  source 1..22: mol_type = other RNA
gaaaggtctctctctgtcaccc

SEQ ID NO: 134892 - RNA, 22 nt, synthetic construct
  source 1..22: mol_type = other RNA
gaaaggtttcttcactcttaaa

SEQ ID NO: 134893 - RNA, 22 nt, synthetic construct
  source 1..22: mol_type = other RNA
gaaagtaaagatagccccttat

SEQ ID NO: 134894 - RNA, 22 nt, synthetic construct
  source 1..22: mol_type = other RNA
gaaagtaactgttggcaaggat

SEQ ID NO: 134895 - RNA, 22 nt, synthetic construct
  source 1..22: mol_type = other RNA
gaaagtagaggactgcctattt

SEQ ID NO: 134896 - RNA, 22 nt, synthetic construct
  source 1..22: mol_type = other RNA
gaaagtagattagcttttacga

SEQ ID NO: 134897 - RNA, 22 nt, synthetic construct
  source 1..22: mol_type = other RNA
gaaagtaggaattaaacatttc

SEQ ID NO: 134898 - RNA, 22 nt, synthetic construct
  source 1..22: mol_type = other RNA
gaaagtattaaaagcacaagca

SEQ ID NO: 134899 - RNA, 22 nt, synthetic construct
  source 1..22: mol_type = other RNA
gaaagtattcccaagatcataa

SEQ ID NO: 134900 - RNA, 22 nt, synthetic construct
  source 1..22: mol_type = other RNA
gaaagtcagctaattttctaat

SEQ ID NO: 134901 - RNA, 22 nt, synthetic construct
  source 1..22: mol_type = other RNA
gaaagtctccctaaccaggccc

SEQ ID NO: 134902 - RNA, 22 nt, synthetic construct
  source 1..22: mol_type = other RNA
gaaagtgaagcccagagaggct

SEQ ID NO: 134903 - RNA, 22 nt, synthetic construct
  source 1..22: mol_type = other RNA
gaaagtgacagatgagaaatac

SEQ ID NO: 134904 - RNA, 22 nt, synthetic construct
  source 1..22: mol_type = other RNA
gaaagtgccagccacccttgct

SEQ ID NO: 134905 - RNA, 22 nt, synthetic construct
  source 1..22: mol_type = other RNA
gaaagtgctctaccctttccaa

SEQ ID NO: 134906 - RNA, 22 nt, synthetic construct
  source 1..22: mol_type = other RNA
gaaagtggactatgtaggcaca

SEQ ID NO: 134907 - RNA, 22 nt, synthetic construct
  source 1..22: mol_type = other RNA
gaaagtggagaattactaaaat

SEQ ID NO: 134908 - RNA, 22 nt, synthetic construct
  source 1..22: mol_type = other RNA
gaaagtgtgcttgggctccctt

SEQ ID NO: 134909 - RNA, 22 nt, synthetic construct
  source 1..22: mol_type = other RNA
gaaagttagtgtctaatgggta

SEQ ID NO: 134910 - RNA, 22 nt, synthetic construct
  source 1..22: mol_type = other RNA
gaaagttcaaatgaggctttta

SEQ ID NO: 134911 - RNA, 22 nt, synthetic construct
  source 1..22: mol_type = other RNA
gaaagttcagaataccagagat

SEQ ID NO: 134912 - RNA, 22 nt, synthetic construct
  source 1..22: mol_type = other RNA
gaaagttttgcagttggggact

SEQ ID NO: 134913 - RNA, 22 nt, synthetic construct
  source 1..22: mol_type = other RNA
gaaataaaacatggccagtatc

SEQ ID NO: 134914 - RNA, 22 nt, synthetic construct
  source 1..22: mol_type = other RNA
gaaataaaacatgttgtgtaga

SEQ ID NO: 134915 - RNA, 22 nt, synthetic construct
  source 1..22: mol_type = other RNA
gaaataaaagttacaaggattg

SEQ ID NO: 134916 - RNA, 22 nt, synthetic construct
  source 1..22: mol_type = other RNA
gaaataaacgacaccagaacta

SEQ ID NO: 134917 - RNA, 22 nt, synthetic construct
  source 1..22: mol_type = other RNA
gaaataaatcctcacatgtttg

SEQ ID NO: 134918 - RNA, 22 nt, synthetic construct
  source 1..22: mol_type = other RNA
gaaataactttaatcaccaggc

SEQ ID NO: 134919 - RNA, 22 nt, synthetic construct
  source 1..22: mol_type = other RNA
gaaataagaaggtttgtagagc

SEQ ID NO: 134920 - RNA, 22 nt, synthetic construct
  source 1..22: mol_type = other RNA
gaaataagtttcatggacttcc

SEQ ID NO: 134921 - RNA, 22 nt, synthetic construct
  source 1..22: mol_type = other RNA
gaaataatacaaatgatgaagg

SEQ ID NO: 134922 - RNA, 22 nt, synthetic construct
  source 1..22: mol_type = other RNA
gaaataatcattgttaggtgct

SEQ ID NO: 134923 - RNA, 22 nt, synthetic construct
  source 1..22: mol_type = other RNA
gaaataatttccctcagaattt

SEQ ID NO: 134924 - RNA, 22 nt, synthetic construct
  source 1..22: mol_type = other RNA
gaaataatttggttatgcgaat

SEQ ID NO: 134925 - RNA, 22 nt, synthetic construct
  source 1..22: mol_type = other RNA
gaaatacaaaaagtgataccat

SEQ ID NO: 134926 - RNA, 22 nt, synthetic construct
  source 1..22: mol_type = other RNA
gaaatacaatgtgagccacata

SEQ ID NO: 134927 - RNA, 22 nt, synthetic construct
  source 1..22: mol_type = other RNA
gaaatacagaccgatggaacag

SEQ ID NO: 134928 - RNA, 22 nt, synthetic construct
  source 1..22: mol_type = other RNA
gaaatacctgcaggttgatact

SEQ ID NO: 134929 - RNA, 22 nt, synthetic construct
  source 1..22: mol_type = other RNA
gaaatactcaaactatgcttaa

SEQ ID NO: 134930 - RNA, 22 nt, synthetic construct
  source 1..22: mol_type = other RNA
gaaatacttgaacattctgtag

SEQ ID NO: 134931 - RNA, 22 nt, synthetic construct
  source 1..22: mol_type = other RNA
gaaatacttgatctacatttag

SEQ ID NO: 134932 - RNA, 22 nt, synthetic construct
  source 1..22: mol_type = other RNA
gaaatacttggacaggggacat

SEQ ID NO: 134933 - RNA, 22 nt, synthetic construct
  source 1..22: mol_type = other RNA
gaaatagaaaacttgagcagat

SEQ ID NO: 134934 - RNA, 22 nt, synthetic construct
  source 1..22: mol_type = other RNA
gaaatagaactgtcacaattca

SEQ ID NO: 134935 - RNA, 22 nt, synthetic construct
  source 1..22: mol_type = other RNA
gaaatagactcccaacttataa

SEQ ID NO: 134936 - RNA, 22 nt, synthetic construct
  source 1..22: mol_type = other RNA
gaaatagatgcctagaaaggaa

SEQ ID NO: 134937 - RNA, 22 nt, synthetic construct
  source 1..22: mol_type = other RNA
gaaatagtagttgctcagaaaa

SEQ ID NO: 134938 - RNA, 22 nt, synthetic construct
  source 1..22: mol_type = other RNA
gaaatagttaacgtttatctac

SEQ ID NO: 134939 - RNA, 22 nt, synthetic construct
  source 1..22: mol_type = other RNA
gaaatagttggtcagaaaaatg

SEQ ID NO: 134940 - RNA, 22 nt, synthetic construct
  source 1..22: mol_type = other RNA
gaaatataaaaagcctctgtgg

SEQ ID NO: 134941 - RNA, 22 nt, synthetic construct
  source 1..22: mol_type = other RNA
gaaatataccttatgtgaaagt

SEQ ID NO: 134942 - RNA, 22 nt, synthetic construct
  source 1..22: mol_type = other RNA
gaaatatctccctcacagtcca

SEQ ID NO: 134943 - RNA, 22 nt, synthetic construct
  source 1..22: mol_type = other RNA
gaaatatgaaccacactgacag

SEQ ID NO: 134944 - RNA, 22 nt, synthetic construct
  source 1..22: mol_type = other RNA
gaaatatggtcactgctgatgt

SEQ ID NO: 134945 - RNA, 22 nt, synthetic construct
  source 1..22: mol_type = other RNA
gaaatcaaatgggaaattagat

SEQ ID NO: 134946 - RNA, 22 nt, synthetic construct
  source 1..22: mol_type = other RNA
gaaatcacacaatcttgagacg

SEQ ID NO: 134947 - RNA, 22 nt, synthetic construct
  source 1..22: mol_type = other RNA
gaaatcacaggtttaggttttt

SEQ ID NO: 134948 - RNA, 22 nt, synthetic construct
  source 1..22: mol_type = other RNA
gaaatcagaacttgacaagtat

SEQ ID NO: 134949 - RNA, 22 nt, synthetic construct
  source 1..22: mol_type = other RNA
gaaatcaggaagtatgagtctt

SEQ ID NO: 134950 - RNA, 22 nt, synthetic construct
  source 1..22: mol_type = other RNA
gaaatcatacacgagtgtgttt

SEQ ID NO: 134951 - RNA, 22 nt, synthetic construct
  source 1..22: mol_type = other RNA
gaaatcattcaggacactggag

SEQ ID NO: 134952 - RNA, 22 nt, synthetic construct
  source 1..22: mol_type = other RNA
gaaatcatttcactcttttaag

SEQ ID NO: 134953 - RNA, 22 nt, synthetic construct
  source 1..22: mol_type = other RNA
gaaatcccctttagtgttctgt

SEQ ID NO: 134954 - RNA, 22 nt, synthetic construct
  source 1..22: mol_type = other RNA
gaaatcctagccccaaatacct

SEQ ID NO: 134955 - RNA, 22 nt, synthetic construct
  source 1..22: mol_type = other RNA
gaaatcggaactcctgtatgcc

SEQ ID NO: 134956 - RNA, 22 nt, synthetic construct
  source 1..22: mol_type = other RNA
gaaatcgggagtaacagacctc

SEQ ID NO: 134957 - RNA, 22 nt, synthetic construct
  source 1..22: mol_type = other RNA
gaaatcgttgtgaaatataatg

SEQ ID NO: 134958 - RNA, 22 nt, synthetic construct
  source 1..22: mol_type = other RNA
gaaatctaaatgtagatcaagt

SEQ ID NO: 134959 - RNA, 22 nt, synthetic construct
  source 1..22: mol_type = other RNA
gaaatctaccaaacattgaagg

SEQ ID NO: 134960 - RNA, 22 nt, synthetic construct
  source 1..22: mol_type = other RNA
gaaatctaggcatataataagc

SEQ ID NO: 134961 - RNA, 22 nt, synthetic construct
  source 1..22: mol_type = other RNA
gaaatctgatttgtttagtagc

SEQ ID NO: 134962 - RNA, 22 nt, synthetic construct
  source 1..22: mol_type = other RNA
gaaatctgcatccaaaagggaa

SEQ ID NO: 134963 - RNA, 22 nt, synthetic construct
  source 1..22: mol_type = other RNA
gaaatcttccagaaggagaaaa

SEQ ID NO: 134964 - RNA, 22 nt, synthetic construct
  source 1..22: mol_type = other RNA
gaaatcttgaagatggcaaaca

SEQ ID NO: 134965 - RNA, 22 nt, synthetic construct
  source 1..22: mol_type = other RNA
gaaatgaaatggcccttaactt

SEQ ID NO: 134966 - RNA, 22 nt, synthetic construct
  source 1..22: mol_type = other RNA
gaaatgaaccaaacttggttta

SEQ ID NO: 134967 - RNA, 22 nt, synthetic construct
  source 1..22: mol_type = other RNA
gaaatgaagatggcctccctca

SEQ ID NO: 134968 - RNA, 22 nt, synthetic construct
  source 1..22: mol_type = other RNA
gaaatgaagtattgatttgacc

SEQ ID NO: 134969 - RNA, 22 nt, synthetic construct
  source 1..22: mol_type = other RNA
gaaatgacaagtaaatgcaatg

SEQ ID NO: 134970 - RNA, 22 nt, synthetic construct
  source 1..22: mol_type = other RNA
gaaatgagtgagccacagctac

SEQ ID NO: 134971 - RNA, 22 nt, synthetic construct
  source 1..22: mol_type = other RNA
gaaatgagtgtatgcagggaaa

SEQ ID NO: 134972 - RNA, 22 nt, synthetic construct
  source 1..22: mol_type = other RNA
gaaatgagttccagtcctttgt

SEQ ID NO: 134973 - RNA, 22 nt, synthetic construct
  source 1..22: mol_type = other RNA
gaaatgatacctcatttatact

SEQ ID NO: 134974 - RNA, 22 nt, synthetic construct
  source 1..22: mol_type = other RNA
gaaatgatctttgaataaaggg

SEQ ID NO: 134975 - RNA, 22 nt, synthetic construct
  source 1..22: mol_type = other RNA
gaaatgatttcaagtaacactc

SEQ ID NO: 134976 - RNA, 22 nt, synthetic construct
  source 1..22: mol_type = other RNA
gaaatgcacttagcgctgatgt

SEQ ID NO: 134977 - RNA, 22 nt, synthetic construct
  source 1..22: mol_type = other RNA
gaaatgctgtaactgacttcaa

SEQ ID NO: 134978 - RNA, 22 nt, synthetic construct
  source 1..22: mol_type = other RNA
gaaatggacagcacattaaata

SEQ ID NO: 134979 - RNA, 22 nt, synthetic construct
  source 1..22: mol_type = other RNA
gaaatggacagcggggatggtt

SEQ ID NO: 134980 - RNA, 22 nt, synthetic construct
  source 1..22: mol_type = other RNA
gaaatggagggccagaggaggg

SEQ ID NO: 134981 - RNA, 22 nt, synthetic construct
  source 1..22: mol_type = other RNA
gaaatggcccttaacttcacct

SEQ ID NO: 134982 - RNA, 22 nt, synthetic construct
  source 1..22: mol_type = other RNA
gaaatggcttaaggaaataaat

SEQ ID NO: 134983 - RNA, 22 nt, synthetic construct
  source 1..22: mol_type = other RNA
gaaatgggtttaaaagagtgca

SEQ ID NO: 134984 - RNA, 22 nt, synthetic construct
  source 1..22: mol_type = other RNA
gaaatgtaaattcctaactcaa

SEQ ID NO: 134985 - RNA, 22 nt, synthetic construct
  source 1..22: mol_type = other RNA
gaaatgtctggtttgctttgga

SEQ ID NO: 134986 - RNA, 22 nt, synthetic construct
  source 1..22: mol_type = other RNA
gaaatgtgaacagacagacatg

SEQ ID NO: 134987 - RNA, 22 nt, synthetic construct
  source 1..22: mol_type = other RNA
gaaatgtggaagcagaactaag

SEQ ID NO: 134988 - RNA, 22 nt, synthetic construct
  source 1..22: mol_type = other RNA
gaaatgtggagataaagagcag

SEQ ID NO: 134989 - RNA, 22 nt, synthetic construct
  source 1..22: mol_type = other RNA
gaaatgtggtttttggttcact

SEQ ID NO: 134990 - RNA, 22 nt, synthetic construct
  source 1..22: mol_type = other RNA
gaaatgttaacaattggtgaat

SEQ ID NO: 134991 - RNA, 22 nt, synthetic construct
  source 1..22: mol_type = other RNA
gaaatgtttaattcctactttc

SEQ ID NO: 134992 - RNA, 22 nt, synthetic construct
  source 1..22: mol_type = other RNA
gaaattaaacacacccttggta

SEQ ID NO: 134993 - RNA, 22 nt, synthetic construct
  source 1..22: mol_type = other RNA
gaaattacttctttctctttca

SEQ ID NO: 134994 - RNA, 22 nt, synthetic construct
  source 1..22: mol_type = other RNA
gaaattagaaatgtggaagcag

SEQ ID NO: 134995 - RNA, 22 nt, synthetic construct
  source 1..22: mol_type = other RNA
gaaattagaacatctggcagca

SEQ ID NO: 134996 - RNA, 22 nt, synthetic construct
  source 1..22: mol_type = other RNA
gaaattagatgatgttttgaac

SEQ ID NO: 134997 - RNA, 22 nt, synthetic construct
  source 1..22: mol_type = other RNA
gaaattagctaagtatgcagaa

SEQ ID NO: 134998 - RNA, 22 nt, synthetic construct
  source 1..22: mol_type = other RNA
gaaattagttccttttaaggga

SEQ ID NO: 134999 - RNA, 22 nt, synthetic construct
  source 1..22: mol_type = other RNA
gaaattataagcttcctctggc

SEQ ID NO: 135000 - RNA, 22 nt, synthetic construct
  source 1..22: mol_type = other RNA
gaaattatctgtgggttaaaag

SEQ ID NO: 135001 - RNA, 22 nt, synthetic construct
  source 1..22: mol_type = other RNA
gaaattatttccagcctttaat

SEQ ID NO: 135002 - RNA, 22 nt, synthetic construct
  source 1..22: mol_type = other RNA
gaaattcaacttggtaaaaagt

SEQ ID NO: 135003 - RNA, 22 nt, synthetic construct
  source 1..22: mol_type = other RNA
gaaattctcaaatgaacaggtt

SEQ ID NO: 135004 - RNA, 22 nt, synthetic construct
  source 1..22: mol_type = other RNA
gaaattctcattagttatctct

SEQ ID NO: 135005 - RNA, 22 nt, synthetic construct
  source 1..22: mol_type = other RNA
gaaattcttgggtgaataaccc

SEQ ID NO: 135006 - RNA, 22 nt, synthetic construct
  source 1..22: mol_type = other RNA
gaaattgaccattccacgctgt

SEQ ID NO: 135007 - RNA, 22 nt, synthetic construct
  source 1..22: mol_type = other RNA
gaaattgacttcactagatctc

SEQ ID NO: 135008 - RNA, 22 nt, synthetic construct
  source 1..22: mol_type = other RNA
gaaattgccaaactgttttcca

SEQ ID NO: 135009 - RNA, 22 nt, synthetic construct
  source 1..22: mol_type = other RNA
gaaattggaacctttgtccact

SEQ ID NO: 135010 - RNA, 22 nt, synthetic construct
  source 1..22: mol_type = other RNA
gaaattggacgggtggtaggga

SEQ ID NO: 135011 - RNA, 22 nt, synthetic construct
  source 1..22: mol_type = other RNA
gaaattgtcagaaaagatcagt

SEQ ID NO: 135012 - RNA, 22 nt, synthetic construct
  source 1..22: mol_type = other RNA
gaaatttaaagacgttcagata

SEQ ID NO: 135013 - RNA, 22 nt, synthetic construct
  source 1..22: mol_type = other RNA
gaaatttaaggaccaggtatgg

SEQ ID NO: 135014 - RNA, 22 nt, synthetic construct
  source 1..22: mol_type = other RNA
gaaatttacccatttcttctag

SEQ ID NO: 135015 - RNA, 22 nt, synthetic construct
  source 1..22: mol_type = other RNA
gaaatttgaggccctattcaac

SEQ ID NO: 135016 - RNA, 22 nt, synthetic construct
  source 1..22: mol_type = other RNA
gaaattttcaagggtgttttcc

SEQ ID NO: 135017 - RNA, 22 nt, synthetic construct
  source 1..22: mol_type = other RNA
gaacaaaacaagaagaaaaagc

SEQ ID NO: 135018 - RNA, 22 nt, synthetic construct
  source 1..22: mol_type = other RNA
gaacaaaatacctgggaatcca

SEQ ID NO: 135019 - RNA, 22 nt, synthetic construct
  source 1..22: mol_type = other RNA
gaacaaaatgtggtatatatgc

SEQ ID NO: 135020 - RNA, 22 nt, synthetic construct
  source 1..22: mol_type = other RNA
gaacaaaatttttgcaaaccaa

SEQ ID NO: 135021 - RNA, 22 nt, synthetic construct
  source 1..22: mol_type = other RNA
gaacaaactcaagttccggttc

SEQ ID NO: 135022 - RNA, 22 nt, synthetic construct
  source 1..22: mol_type = other RNA
gaacaaactgcgtggtttattc

SEQ ID NO: 135023 - RNA, 22 nt, synthetic construct
  source 1..22: mol_type = other RNA
gaacaaaggcaggagcagtgtg

SEQ ID NO: 135024 - RNA, 22 nt, synthetic construct
  source 1..22: mol_type = other RNA
gaacaaataacaccatagctga

SEQ ID NO: 135025 - RNA, 22 nt, synthetic construct
  source 1..22: mol_type = other RNA
gaacaaatttatgttcatgaac

SEQ ID NO: 135026 - RNA, 22 nt, synthetic construct
  source 1..22: mol_type = other RNA
gaacaacatggtagaccatata

SEQ ID NO: 135027 - RNA, 22 nt, synthetic construct
  source 1..22: mol_type = other RNA
gaacaacgctgtggctaacaat

SEQ ID NO: 135028 - RNA, 22 nt, synthetic construct
  source 1..22: mol_type = other RNA
gaacaagagcgtcgtacctttc

SEQ ID NO: 135029 - RNA, 22 nt, synthetic construct
  source 1..22: mol_type = other RNA
gaacaagttacaaacatatgca

SEQ ID NO: 135030 - RNA, 22 nt, synthetic construct
  source 1..22: mol_type = other RNA
gaacaatcaaaccatcctttcc

SEQ ID NO: 135031 - RNA, 22 nt, synthetic construct
  source 1..22: mol_type = other RNA
gaacaatccttctaatcagtaa

SEQ ID NO: 135032 - RNA, 22 nt, synthetic construct
  source 1..22: mol_type = other RNA
gaacaatggaatagaagggaga

SEQ ID NO: 135033 - RNA, 22 nt, synthetic construct
  source 1..22: mol_type = other RNA
gaacaattttctctcatgttgg

SEQ ID NO: 135034 - RNA, 22 nt, synthetic construct
  source 1..22: mol_type = other RNA
gaacaattttgaatgtgttgat

SEQ ID NO: 135035 - RNA, 22 nt, synthetic construct
  source 1..22: mol_type = other RNA
gaacacacaatttgaggtagca

SEQ ID NO: 135036 - RNA, 22 nt, synthetic construct
  source 1..22: mol_type = other RNA
gaacacacacctattcataggt

SEQ ID NO: 135037 - RNA, 22 nt, synthetic construct
  source 1..22: mol_type = other RNA
gaacacacattagcctagacct

SEQ ID NO: 135038 - RNA, 22 nt, synthetic construct
  source 1..22: mol_type = other RNA
gaacacactgctcttctattcc

SEQ ID NO: 135039 - RNA, 22 nt, synthetic construct
  source 1..22: mol_type = other RNA
gaacacagtgttgagaaagcac

SEQ ID NO: 135040 - RNA, 22 nt, synthetic construct
  source 1..22: mol_type = other RNA
gaacaccttgaacatgaacgag

SEQ ID NO: 135041 - RNA, 22 nt, synthetic construct
  source 1..22: mol_type = other RNA
gaacactaaaggggatttcatg

SEQ ID NO: 135042 - RNA, 22 nt, synthetic construct
  source 1..22: mol_type = other RNA
gaacactaagaagatggttgga

SEQ ID NO: 135043 - RNA, 22 nt, synthetic construct
  source 1..22: mol_type = other RNA
gaacactataagccaatatccc

SEQ ID NO: 135044 - RNA, 22 nt, synthetic construct
  source 1..22: mol_type = other RNA
gaacactctgcaattttaaatg

SEQ ID NO: 135045 - RNA, 22 nt, synthetic construct
  source 1..22: mol_type = other RNA
gaacacttaacatgagatctaa

SEQ ID NO: 135046 - RNA, 22 nt, synthetic construct
  source 1..22: mol_type = other RNA
gaacagaataaaaagtgacttc

SEQ ID NO: 135047 - RNA, 22 nt, synthetic construct
  source 1..22: mol_type = other RNA
gaacagacagacatgcatgcac

SEQ ID NO: 135048 - RNA, 22 nt, synthetic construct
  source 1..22: mol_type = other RNA
gaacagattcacgcacagggag

SEQ ID NO: 135049 - RNA, 22 nt, synthetic construct
  source 1..22: mol_type = other RNA
gaacagcaggggaaggcttcga

SEQ ID NO: 135050 - RNA, 22 nt, synthetic construct
  source 1..22: mol_type = other RNA
gaacagcattatcttaataacc

SEQ ID NO: 135051 - RNA, 22 nt, synthetic construct
  source 1..22: mol_type = other RNA
gaacagcccctagcatgcagta

SEQ ID NO: 135052 - RNA, 22 nt, synthetic construct
  source 1..22: mol_type = other RNA
gaacagcctaaagtccacagat

SEQ ID NO: 135053 - RNA, 22 nt, synthetic construct
  source 1..22: mol_type = other RNA
gaacaggaagggagagatgcct

SEQ ID NO: 135054 - RNA, 22 nt, synthetic construct
  source 1..22: mol_type = other RNA
gaacaggacttttggtacacat

SEQ ID NO: 135055 - RNA, 22 nt, synthetic construct
  source 1..22: mol_type = other RNA
gaacaggagttaccataaaacc

SEQ ID NO: 135056 - RNA, 22 nt, synthetic construct
  source 1..22: mol_type = other RNA
gaacaggcaaccttgggagaaa

SEQ ID NO: 135057 - RNA, 22 nt, synthetic construct
  source 1..22: mol_type = other RNA
gaacaggccctttgttagtgcc

SEQ ID NO: 135058 - RNA, 22 nt, synthetic construct
  source 1..22: mol_type = other RNA
gaacaggctcaatacctgaaaa

SEQ ID NO: 135059 - RNA, 22 nt, synthetic construct
  source 1..22: mol_type = other RNA
gaacaggttcttcatcagtccc

SEQ ID NO: 135060 - RNA, 22 nt, synthetic construct
  source 1..22: mol_type = other RNA
gaacagtaaagtcactgtggaa

SEQ ID NO: 135061 - RNA, 22 nt, synthetic construct
  source 1..22: mol_type = other RNA
gaacagtgtttacacacctgaa

SEQ ID NO: 135062 - RNA, 22 nt, synthetic construct
  source 1..22: mol_type = other RNA
gaacagtttagcaatccaagga

SEQ ID NO: 135063 - RNA, 22 nt, synthetic construct
  source 1..22: mol_type = other RNA
gaacataatctttggtgctgat

SEQ ID NO: 135064 - RNA, 22 nt, synthetic construct
  source 1..22: mol_type = other RNA
gaacatataatccaactgcagt

SEQ ID NO: 135065 - RNA, 22 nt, synthetic construct
  source 1..22: mol_type = other RNA
gaacatcacccagctcgaccag

SEQ ID NO: 135066 - RNA, 22 nt, synthetic construct
  source 1..22: mol_type = other RNA
gaacatctggcagcaggggcta

SEQ ID NO: 135067 - RNA, 22 nt, synthetic construct
  source 1..22: mol_type = other RNA
gaacatgaacgagaacaaaaca

SEQ ID NO: 135068 - RNA, 22 nt, synthetic construct
  source 1..22: mol_type = other RNA
gaacatgattgggtcaacaaac

SEQ ID NO: 135069 - RNA, 22 nt, synthetic construct
  source 1..22: mol_type = other RNA
gaacatgggaatgcatatatct

SEQ ID NO: 135070 - RNA, 22 nt, synthetic construct
  source 1..22: mol_type = other RNA
gaacatggtttgatcccactag

SEQ ID NO: 135071 - RNA, 22 nt, synthetic construct
  source 1..22: mol_type = other RNA
gaacatgtatgtttctcattct

SEQ ID NO: 135072 - RNA, 22 nt, synthetic construct
  source 1..22: mol_type = other RNA
gaacattctgtagaagtaaata

SEQ ID NO: 135073 - RNA, 22 nt, synthetic construct
  source 1..22: mol_type = other RNA
gaacattggtttgaaatgatct

SEQ ID NO: 135074 - RNA, 22 nt, synthetic construct
  source 1..22: mol_type = other RNA
gaacatttatacagttggaact

SEQ ID NO: 135075 - RNA, 22 nt, synthetic construct
  source 1..22: mol_type = other RNA
gaacattttagctggggcagca

SEQ ID NO: 135076 - RNA, 22 nt, synthetic construct
  source 1..22: mol_type = other RNA
gaacattttgagttattgcata

SEQ ID NO: 135077 - RNA, 22 nt, synthetic construct
  source 1..22: mol_type = other RNA
gaaccaaaaaccacatttcata

SEQ ID NO: 135078 - RNA, 22 nt, synthetic construct
  source 1..22: mol_type = other RNA
gaaccaaacttggtttattttc

SEQ ID NO: 135079 - RNA, 22 nt, synthetic construct
  source 1..22: mol_type = other RNA
gaaccaattaccataaagtctt

SEQ ID NO: 135080 - RNA, 22 nt, synthetic construct
  source 1..22: mol_type = other RNA
gaaccacactgacaggacagag

SEQ ID NO: 135081 - RNA, 22 nt, synthetic construct
  source 1..22: mol_type = other RNA
gaaccacctgggggagactgtg

SEQ ID NO: 135082 - RNA, 22 nt, synthetic construct
  source 1..22: mol_type = other RNA
gaaccacgcatctggtctatct

SEQ ID NO: 135083 - RNA, 22 nt, synthetic construct
  source 1..22: mol_type = other RNA
gaaccactgagcacaatgcctg

SEQ ID NO: 135084 - RNA, 22 nt, synthetic construct
  source 1..22: mol_type = other RNA
gaaccactgtaggccccgatgc

SEQ ID NO: 135085 - RNA, 22 nt, synthetic construct
  source 1..22: mol_type = other RNA
gaaccagggaggcggaggttgc

SEQ ID NO: 135086 - RNA, 22 nt, synthetic construct
  source 1..22: mol_type = other RNA
gaaccatacagtgccttcagct

SEQ ID NO: 135087 - RNA, 22 nt, synthetic construct
  source 1..22: mol_type = other RNA
gaaccatattagagtgaaaaga

SEQ ID NO: 135088 - RNA, 22 nt, synthetic construct
  source 1..22: mol_type = other RNA
gaaccatgtaacaggtttaata

SEQ ID NO: 135089 - RNA, 22 nt, synthetic construct
  source 1..22: mol_type = other RNA
gaaccattgtaaaccatatggt

SEQ ID NO: 135090 - RNA, 22 nt, synthetic construct
  source 1..22: mol_type = other RNA
gaacccaccaggaggcggagct

SEQ ID NO: 135091 - RNA, 22 nt, synthetic construct
  source 1..22: mol_type = other RNA
gaacccactgagcatttatata

SEQ ID NO: 135092 - RNA, 22 nt, synthetic construct
  source 1..22: mol_type = other RNA
gaacccaggaacagattcacgc

SEQ ID NO: 135093 - RNA, 22 nt, synthetic construct
  source 1..22: mol_type = other RNA
gaacccaggaggcaaaggttga

SEQ ID NO: 135094 - RNA, 22 nt, synthetic construct
  source 1..22: mol_type = other RNA
gaacccagtgtctgctacaggg

SEQ ID NO: 135095 - RNA, 22 nt, synthetic construct
  source 1..22: mol_type = other RNA
gaaccccagaaggttaactaat

SEQ ID NO: 135096 - RNA, 22 nt, synthetic construct
  source 1..22: mol_type = other RNA
gaacccgaggtgcacaagggaa

SEQ ID NO: 135097 - RNA, 22 nt, synthetic construct
  source 1..22: mol_type = other RNA
gaaccctttgttatctgaacgt

SEQ ID NO: 135098 - RNA, 22 nt, synthetic construct
  source 1..22: mol_type = other RNA
gaaccgactgaaaggaaatgag

SEQ ID NO: 135099 - RNA, 22 nt, synthetic construct
  source 1..22: mol_type = other RNA
gaaccggaacttgagtttgttc

SEQ ID NO: 135100 - RNA, 22 nt, synthetic construct
  source 1..22: mol_type = other RNA
gaaccgtaacttcttttcttaa

SEQ ID NO: 135101 - RNA, 22 nt, synthetic construct
  source 1..22: mol_type = other RNA
gaacctctggaaaggacttgat

SEQ ID NO: 135102 - RNA, 22 nt, synthetic construct
  source 1..22: mol_type = other RNA
gaacctgaaaaacggaggttgc

SEQ ID NO: 135103 - RNA, 22 nt, synthetic construct
  source 1..22: mol_type = other RNA
gaacctgcatggtgtaaaatac

SEQ ID NO: 135104 - RNA, 22 nt, synthetic construct
  source 1..22: mol_type = other RNA
gaacctgctttctactagtata

SEQ ID NO: 135105 - RNA, 22 nt, synthetic construct
  source 1..22: mol_type = other RNA
gaacctgttcatttgagaattt

SEQ ID NO: 135106 - RNA, 22 nt, synthetic construct
  source 1..22: mol_type = other RNA
gaaccttagaaatttaaggacc

SEQ ID NO: 135107 - RNA, 22 nt, synthetic construct
  source 1..22: mol_type = other RNA
gaaccttcaccaaagatttact

SEQ ID NO: 135108 - RNA, 22 nt, synthetic construct
  source 1..22: mol_type = other RNA
gaaccttcatactattttctat

SEQ ID NO: 135109 - RNA, 22 nt, synthetic construct
  source 1..22: mol_type = other RNA
gaaccttcctcttcctcatccc

SEQ ID NO: 135110 - RNA, 22 nt, synthetic construct
  source 1..22: mol_type = other RNA
gaaccttgaagtacttcagcgc

SEQ ID NO: 135111 - RNA, 22 nt, synthetic construct
  source 1..22: mol_type = other RNA
gaacctttgtccactgtcagtg

SEQ ID NO: 135112 - RNA, 22 nt, synthetic construct
  source 1..22: mol_type = other RNA
gaacgaatgaaaacacaacata

SEQ ID NO: 135113 - RNA, 22 nt, synthetic construct
  source 1..22: mol_type = other RNA
gaacgagaacaaaacaagaaga

SEQ ID NO: 135114 - RNA, 22 nt, synthetic construct
  source 1..22: mol_type = other RNA
gaacgatggtttctgacacccg

SEQ ID NO: 135115 - RNA, 22 nt, synthetic construct
  source 1..22: mol_type = other RNA
gaacgctaaattaaaggctgga

SEQ ID NO: 135116 - RNA, 22 nt, synthetic construct
  source 1..22: mol_type = other RNA
gaacggcttaacacctttgtat

SEQ ID NO: 135117 - RNA, 22 nt, synthetic construct
  source 1..22: mol_type = other RNA
gaacgtctttaaatttcaaaca

SEQ ID NO: 135118 - RNA, 22 nt, synthetic construct
  source 1..22: mol_type = other RNA
gaactaagaccccagtagaaat

SEQ ID NO: 135119 - RNA, 22 nt, synthetic construct
  source 1..22: mol_type = other RNA
gaactaaggaaagctcaggacc

SEQ ID NO: 135120 - RNA, 22 nt, synthetic construct
  source 1..22: mol_type = other RNA
gaactaagtgtgaagattaagc

SEQ ID NO: 135121 - RNA, 22 nt, synthetic construct
  source 1..22: mol_type = other RNA
gaactaattgataaaactgaag

SEQ ID NO: 135122 - RNA, 22 nt, synthetic construct
  source 1..22: mol_type = other RNA
gaactaatttcatacaagttgt

SEQ ID NO: 135123 - RNA, 22 nt, synthetic construct
  source 1..22: mol_type = other RNA
gaactacacagacatgaacaat

SEQ ID NO: 135124 - RNA, 22 nt, synthetic construct
  source 1..22: mol_type = other RNA
gaactacacattccagaccagc

SEQ ID NO: 135125 - RNA, 22 nt, synthetic construct
  source 1..22: mol_type = other RNA
gaactacagtgtttagggacga

SEQ ID NO: 135126 - RNA, 22 nt, synthetic construct
  source 1..22: mol_type = other RNA
gaactactcaaagaaaataatg

SEQ ID NO: 135127 - RNA, 22 nt, synthetic construct
  source 1..22: mol_type = other RNA
gaactagaactgtgttacattg

SEQ ID NO: 135128 - RNA, 22 nt, synthetic construct
  source 1..22: mol_type = other RNA
gaactagaatactccaccagca

SEQ ID NO: 135129 - RNA, 22 nt, synthetic construct
  source 1..22: mol_type = other RNA
gaactcaaaagtgaatcactac

SEQ ID NO: 135130 - RNA, 22 nt, synthetic construct
  source 1..22: mol_type = other RNA
gaactcaaaatggatcaaagac

SEQ ID NO: 135131 - RNA, 22 nt, synthetic construct
  source 1..22: mol_type = other RNA
gaactcactggccagcattact

SEQ ID NO: 135132 - RNA, 22 nt, synthetic construct
  source 1..22: mol_type = other RNA
gaactcatattagtctgtagct

SEQ ID NO: 135133 - RNA, 22 nt, synthetic construct
  source 1..22: mol_type = other RNA
gaactcatttctgcttgaatgt

SEQ ID NO: 135134 - RNA, 22 nt, synthetic construct
  source 1..22: mol_type = other RNA
gaactccaacaattcaacaata

SEQ ID NO: 135135 - RNA, 22 nt, synthetic construct
  source 1..22: mol_type = other RNA
gaactccacctcagaaacaaac

SEQ ID NO: 135136 - RNA, 22 nt, synthetic construct
  source 1..22: mol_type = other RNA
gaactcccagaactcgaagcct

SEQ ID NO: 135137 - RNA, 22 nt, synthetic construct
  source 1..22: mol_type = other RNA
gaactcctatagttaagtctga

SEQ ID NO: 135138 - RNA, 22 nt, synthetic construct
  source 1..22: mol_type = other RNA
gaactcctgacctcaagcgatc

SEQ ID NO: 135139 - RNA, 22 nt, synthetic construct
  source 1..22: mol_type = other RNA
gaactcctggtctcccagcatg

SEQ ID NO: 135140 - RNA, 22 nt, synthetic construct
  source 1..22: mol_type = other RNA
gaactcctgtatgccgctggtg

SEQ ID NO: 135141 - RNA, 22 nt, synthetic construct
  source 1..22: mol_type = other RNA
gaactcctttcttaccctcaca

SEQ ID NO: 135142 - RNA, 22 nt, synthetic construct
  source 1..22: mol_type = other RNA
gaactcgaagccttcccctgct

SEQ ID NO: 135143 - RNA, 22 nt, synthetic construct
  source 1..22: mol_type = other RNA
gaactcgtggcctcaagcagtc

SEQ ID NO: 135144 - RNA, 22 nt, synthetic construct
  source 1..22: mol_type = other RNA
gaactctattttcctaaaactc

SEQ ID NO: 135145 - RNA, 22 nt, synthetic construct
  source 1..22: mol_type = other RNA
gaactctcgacctcgtgatctg

SEQ ID NO: 135146 - RNA, 22 nt, synthetic construct
  source 1..22: mol_type = other RNA
gaactctgtcatggtgtgtctg

SEQ ID NO: 135147 - RNA, 22 nt, synthetic construct
  source 1..22: mol_type = other RNA
gaactctgtggagtcctgtcag

SEQ ID NO: 135148 - RNA, 22 nt, synthetic construct
  source 1..22: mol_type = other RNA
gaactcttctccaaggaaagtg

SEQ ID NO: 135149 - RNA, 22 nt, synthetic construct
  source 1..22: mol_type = other RNA
gaactcttgcggtcttttagcc

SEQ ID NO: 135150 - RNA, 22 nt, synthetic construct
  source 1..22: mol_type = other RNA
gaactcttgtagtatttttgca

SEQ ID NO: 135151 - RNA, 22 nt, synthetic construct
  source 1..22: mol_type = other RNA
gaactgaaagcagggactccca

SEQ ID NO: 135152 - RNA, 22 nt, synthetic construct
  source 1..22: mol_type = other RNA
gaactgactgaaggattcctcc

SEQ ID NO: 135153 - RNA, 22 nt, synthetic construct
  source 1..22: mol_type = other RNA
gaactgcctggacccgggaggc

SEQ ID NO: 135154 - RNA, 22 nt, synthetic construct
  source 1..22: mol_type = other RNA
gaactgctaatggtccttgctg

SEQ ID NO: 135155 - RNA, 22 nt, synthetic construct
  source 1..22: mol_type = other RNA
gaactgctgacagattaaatac

SEQ ID NO: 135156 - RNA, 22 nt, synthetic construct
  source 1..22: mol_type = other RNA
gaactgctggtctggaatgtgt

SEQ ID NO: 135157 - RNA, 22 nt, synthetic construct
  source 1..22: mol_type = other RNA
gaactgggacttctagcctcca

SEQ ID NO: 135158 - RNA, 22 nt, synthetic construct
  source 1..22: mol_type = other RNA
gaactggggcttgaacccgagg

SEQ ID NO: 135159 - RNA, 22 nt, synthetic construct
  source 1..22: mol_type = other RNA
gaactgggtgtagggggaaaac

SEQ ID NO: 135160 - RNA, 22 nt, synthetic construct
  source 1..22: mol_type = other RNA
gaactgtcacaattcacagaat

SEQ ID NO: 135161 - RNA, 22 nt, synthetic construct
  source 1..22: mol_type = other RNA
gaactgtcactgacacaggctg

SEQ ID NO: 135162 - RNA, 22 nt, synthetic construct
  source 1..22: mol_type = other RNA
gaactgtgttacattgccttcg

SEQ ID NO: 135163 - RNA, 22 nt, synthetic construct
  source 1..22: mol_type = other RNA
gaactgttacttgactatttta

SEQ ID NO: 135164 - RNA, 22 nt, synthetic construct
  source 1..22: mol_type = other RNA
gaacttaaaggtttggagtttg

SEQ ID NO: 135165 - RNA, 22 nt, synthetic construct
  source 1..22: mol_type = other RNA
gaacttacagtaagatcctgga

SEQ ID NO: 135166 - RNA, 22 nt, synthetic construct
  source 1..22: mol_type = other RNA
gaacttatataaatgctcagtg

SEQ ID NO: 135167 - RNA, 22 nt, synthetic construct
  source 1..22: mol_type = other RNA
gaacttatgcatcttgcaaaac

SEQ ID NO: 135168 - RNA, 22 nt, synthetic construct
  source 1..22: mol_type = other RNA
gaacttcttcaaaagacatcac

SEQ ID NO: 135169 - RNA, 22 nt, synthetic construct
  source 1..22: mol_type = other RNA
gaacttgacaagtatattacaa

SEQ ID NO: 135170 - RNA, 22 nt, synthetic construct
  source 1..22: mol_type = other RNA
gaacttgagtttgttctgtcac

SEQ ID NO: 135171 - RNA, 22 nt, synthetic construct
  source 1..22: mol_type = other RNA
gaacttgtcacaaaatgtggat

SEQ ID NO: 135172 - RNA, 22 nt, synthetic construct
  source 1..22: mol_type = other RNA
gaacttgtctcggatttaagag

SEQ ID NO: 135173 - RNA, 22 nt, synthetic construct
  source 1..22: mol_type = other RNA
gaacttgtctttgtctattccc

SEQ ID NO: 135174 - RNA, 22 nt, synthetic construct
  source 1..22: mol_type = other RNA
gaactttcaacctaacatgtct

SEQ ID NO: 135175 - RNA, 22 nt, synthetic construct
  source 1..22: mol_type = other RNA
gaactttccagaagtaactctt

SEQ ID NO: 135176 - RNA, 22 nt, synthetic construct
  source 1..22: mol_type = other RNA
gaactttcgaagtgggaagcaa

SEQ ID NO: 135177 - RNA, 22 nt, synthetic construct
  source 1..22: mol_type = other RNA
gaagaaaaaataaaggctttcg

SEQ ID NO: 135178 - RNA, 22 nt, synthetic construct
  source 1..22: mol_type = other RNA
gaagaaaaagcaacttgaaggc

SEQ ID NO: 135179 - RNA, 22 nt, synthetic construct
  source 1..22: mol_type = other RNA
gaagaaaacactccagaatgac

SEQ ID NO: 135180 - RNA, 22 nt, synthetic construct
  source 1..22: mol_type = other RNA
gaagaaaataaaattctgaccc

SEQ ID NO: 135181 - RNA, 22 nt, synthetic construct
  source 1..22: mol_type = other RNA
gaagaaaatccaagaagacatg

SEQ ID NO: 135182 - RNA, 22 nt, synthetic construct
  source 1..22: mol_type = other RNA
gaagaaaccaagagcatagact

SEQ ID NO: 135183 - RNA, 22 nt, synthetic construct
  source 1..22: mol_type = other RNA
gaagaaacctttctcaaagccc

SEQ ID NO: 135184 - RNA, 22 nt, synthetic construct
  source 1..22: mol_type = other RNA
gaagaaagtaggaattaaacat

SEQ ID NO: 135185 - RNA, 22 nt, synthetic construct
  source 1..22: mol_type = other RNA
gaagaaagttttgcagttgggg

SEQ ID NO: 135186 - RNA, 22 nt, synthetic construct
  source 1..22: mol_type = other RNA
gaagaaataaacgacaccagaa

SEQ ID NO: 135187 - RNA, 22 nt, synthetic construct
  source 1..22: mol_type = other RNA
gaagaaatagaaaacttgagca

SEQ ID NO: 135188 - RNA, 22 nt, synthetic construct
  source 1..22: mol_type = other RNA
gaagaaatcaaatgggaaatta

SEQ ID NO: 135189 - RNA, 22 nt, synthetic construct
  source 1..22: mol_type = other RNA
gaagaaatgggtaaatttctaa

SEQ ID NO: 135190 - RNA, 22 nt, synthetic construct
  source 1..22: mol_type = other RNA
gaagaaatgttaacaattggtg

SEQ ID NO: 135191 - RNA, 22 nt, synthetic construct
  source 1..22: mol_type = other RNA
gaagaaattacttctttctctt

SEQ ID NO: 135192 - RNA, 22 nt, synthetic construct
  source 1..22: mol_type = other RNA
gaagaaattatctgtgggttaa

SEQ ID NO: 135193 - RNA, 22 nt, synthetic construct
  source 1..22: mol_type = other RNA
gaagaaccgactgaaaggaaat

SEQ ID NO: 135194 - RNA, 22 nt, synthetic construct
  source 1..22: mol_type = other RNA
gaagaacctgttcatttgagaa

SEQ ID NO: 135195 - RNA, 22 nt, synthetic construct
  source 1..22: mol_type = other RNA
gaagaagaattctataggtagt

SEQ ID NO: 135196 - RNA, 22 nt, synthetic construct
  source 1..22: mol_type = other RNA
gaagaagacttaggagaaaagc

SEQ ID NO: 135197 - RNA, 22 nt, synthetic construct
  source 1..22: mol_type = other RNA
gaagaaggaatgtgcactcttt

SEQ ID NO: 135198 - RNA, 22 nt, synthetic construct
  source 1..22: mol_type = other RNA
gaagaataactgtcctgaattc

SEQ ID NO: 135199 - RNA, 22 nt, synthetic construct
  source 1..22: mol_type = other RNA
gaagaatcaggtctctttgaaa

SEQ ID NO: 135200 - RNA, 22 nt, synthetic construct
  source 1..22: mol_type = other RNA
gaagaatcgcttgaacccggga

SEQ ID NO: 135201 - RNA, 22 nt, synthetic construct
  source 1..22: mol_type = other RNA
gaagaatgagaaacatacatgt

SEQ ID NO: 135202 - RNA, 22 nt, synthetic construct
  source 1..22: mol_type = other RNA
gaagaatgattatttgcggctt

SEQ ID NO: 135203 - RNA, 22 nt, synthetic construct
  source 1..22: mol_type = other RNA
gaagaatgtgaaaaatttgaca

SEQ ID NO: 135204 - RNA, 22 nt, synthetic construct
  source 1..22: mol_type = other RNA
gaagaattaacactaatccttc

SEQ ID NO: 135205 - RNA, 22 nt, synthetic construct
  source 1..22: mol_type = other RNA
gaagaattattgtctgcaagca

SEQ ID NO: 135206 - RNA, 22 nt, synthetic construct
  source 1..22: mol_type = other RNA
gaagaattctataggtagtaca

SEQ ID NO: 135207 - RNA, 22 nt, synthetic construct
  source 1..22: mol_type = other RNA
gaagaattttaagcctagagat

SEQ ID NO: 135208 - RNA, 22 nt, synthetic construct
  source 1..22: mol_type = other RNA
gaagacaatactgttatgacaa

SEQ ID NO: 135209 - RNA, 22 nt, synthetic construct
  source 1..22: mol_type = other RNA
gaagacacaaaatcagatatga

SEQ ID NO: 135210 - RNA, 22 nt, synthetic construct
  source 1..22: mol_type = other RNA
gaagacatgataaatacgtata

SEQ ID NO: 135211 - RNA, 22 nt, synthetic construct
  source 1..22: mol_type = other RNA
gaagacatgctgaggccccagg

SEQ ID NO: 135212 - RNA, 22 nt, synthetic construct
  source 1..22: mol_type = other RNA
gaagacctcaaattctgaggga

SEQ ID NO: 135213 - RNA, 22 nt, synthetic construct
  source 1..22: mol_type = other RNA
gaagacctgcagtctgcaggca

SEQ ID NO: 135214 - RNA, 22 nt, synthetic construct
  source 1..22: mol_type = other RNA
gaagactaagcagaaatgacaa

SEQ ID NO: 135215 - RNA, 22 nt, synthetic construct
  source 1..22: mol_type = other RNA
gaagactatcacgattctgacc

SEQ ID NO: 135216 - RNA, 22 nt, synthetic construct
  source 1..22: mol_type = other RNA
gaagactatgagaaggattagt

SEQ ID NO: 135217 - RNA, 22 nt, synthetic construct
  source 1..22: mol_type = other RNA
gaagactcagcagttttaaaga

SEQ ID NO: 135218 - RNA, 22 nt, synthetic construct
  source 1..22: mol_type = other RNA
gaagactggaaaagtgttgact

SEQ ID NO: 135219 - RNA, 22 nt, synthetic construct
  source 1..22: mol_type = other RNA
gaagactggatttgattgggca

SEQ ID NO: 135220 - RNA, 22 nt, synthetic construct
  source 1..22: mol_type = other RNA
gaagacttaggagaaaagcttc

SEQ ID NO: 135221 - RNA, 22 nt, synthetic construct
  source 1..22: mol_type = other RNA
gaagactttatggtaattggtt

SEQ ID NO: 135222 - RNA, 22 nt, synthetic construct
  source 1..22: mol_type = other RNA
gaagagaatggctggaatggtg

SEQ ID NO: 135223 - RNA, 22 nt, synthetic construct
  source 1..22: mol_type = other RNA
gaagagaccacaggctctcttc

SEQ ID NO: 135224 - RNA, 22 nt, synthetic construct
  source 1..22: mol_type = other RNA
gaagagactatctcttcctcct

SEQ ID NO: 135225 - RNA, 22 nt, synthetic construct
  source 1..22: mol_type = other RNA
gaagagagaaggctgccagcac

SEQ ID NO: 135226 - RNA, 22 nt, synthetic construct
  source 1..22: mol_type = other RNA
gaagagagcattgcctttatta

SEQ ID NO: 135227 - RNA, 22 nt, synthetic construct
  source 1..22: mol_type = other RNA
gaagagagcctgtggtctcttc

SEQ ID NO: 135228 - RNA, 22 nt, synthetic construct
  source 1..22: mol_type = other RNA
gaagagatagtctcttcctgta

SEQ ID NO: 135229 - RNA, 22 nt, synthetic construct
  source 1..22: mol_type = other RNA
gaagagcactatgtaaattatt

SEQ ID NO: 135230 - RNA, 22 nt, synthetic construct
  source 1..22: mol_type = other RNA
gaagagcagtgtgttctgcctt

SEQ ID NO: 135231 - RNA, 22 nt, synthetic construct
  source 1..22: mol_type = other RNA
gaagagcgcttctatgtgacaa

SEQ ID NO: 135232 - RNA, 22 nt, synthetic construct
  source 1..22: mol_type = other RNA
gaagagctaagatgctattcaa

SEQ ID NO: 135233 - RNA, 22 nt, synthetic construct
  source 1..22: mol_type = other RNA
gaagagctgtaacagaggcatg

SEQ ID NO: 135234 - RNA, 22 nt, synthetic construct
  source 1..22: mol_type = other RNA
gaagaggaaggttcaagtttgg

SEQ ID NO: 135235 - RNA, 22 nt, synthetic construct
  source 1..22: mol_type = other RNA
gaagaggacgatttttccaaca

SEQ ID NO: 135236 - RNA, 22 nt, synthetic construct
  source 1..22: mol_type = other RNA
gaagaggataaggggcagggtg

SEQ ID NO: 135237 - RNA, 22 nt, synthetic construct
  source 1..22: mol_type = other RNA
gaagaggcagctaagcaccaac

SEQ ID NO: 135238 - RNA, 22 nt, synthetic construct
  source 1..22: mol_type = other RNA
gaagaggccacaaagtccccac

SEQ ID NO: 135239 - RNA, 22 nt, synthetic construct
  source 1..22: mol_type = other RNA
gaagaggctttctgtgtaatac

SEQ ID NO: 135240 - RNA, 22 nt, synthetic construct
  source 1..22: mol_type = other RNA
gaagagggaacattttcatttt

SEQ ID NO: 135241 - RNA, 22 nt, synthetic construct
  source 1..22: mol_type = other RNA
gaagagggagaagaaataaacg

SEQ ID NO: 135242 - RNA, 22 nt, synthetic construct
  source 1..22: mol_type = other RNA
gaagagggggcataacatctat

SEQ ID NO: 135243 - RNA, 22 nt, synthetic construct
  source 1..22: mol_type = other RNA
gaagagtaatggttggccgagg

SEQ ID NO: 135244 - RNA, 22 nt, synthetic construct
  source 1..22: mol_type = other RNA
gaagagtctatctttgggaaaa

SEQ ID NO: 135245 - RNA, 22 nt, synthetic construct
  source 1..22: mol_type = other RNA
gaagagtgaagctggaccctta

SEQ ID NO: 135246 - RNA, 22 nt, synthetic construct
  source 1..22: mol_type = other RNA
gaagagttctgaaggctcagcc

SEQ ID NO: 135247 - RNA, 22 nt, synthetic construct
  source 1..22: mol_type = other RNA
gaagataatgttagaattcagg

SEQ ID NO: 135248 - RNA, 22 nt, synthetic construct
  source 1..22: mol_type = other RNA
gaagatagtactgaccatctca

SEQ ID NO: 135249 - RNA, 22 nt, synthetic construct
  source 1..22: mol_type = other RNA
gaagatgacatttgcttttcct

SEQ ID NO: 135250 - RNA, 22 nt, synthetic construct
  source 1..22: mol_type = other RNA
gaagatgcagttgcttactcta

SEQ ID NO: 135251 - RNA, 22 nt, synthetic construct
  source 1..22: mol_type = other RNA
gaagatgctccctctatggcag

SEQ ID NO: 135252 - RNA, 22 nt, synthetic construct
  source 1..22: mol_type = other RNA
gaagatgctgaacttgtcacaa

SEQ ID NO: 135253 - RNA, 22 nt, synthetic construct
  source 1..22: mol_type = other RNA
gaagatggagttacgctgccaa

SEQ ID NO: 135254 - RNA, 22 nt, synthetic construct
  source 1..22: mol_type = other RNA
gaagatggcaaacagactgagc

SEQ ID NO: 135255 - RNA, 22 nt, synthetic construct
  source 1..22: mol_type = other RNA
gaagatggcctccctcactaag

SEQ ID NO: 135256 - RNA, 22 nt, synthetic construct
  source 1..22: mol_type = other RNA
gaagatgggacttcactagtgg

SEQ ID NO: 135257 - RNA, 22 nt, synthetic construct
  source 1..22: mol_type = other RNA
gaagatggttggaagtttctgg

SEQ ID NO: 135258 - RNA, 22 nt, synthetic construct
  source 1..22: mol_type = other RNA
gaagattaagcacatctgtctt

SEQ ID NO: 135259 - RNA, 22 nt, synthetic construct
  source 1..22: mol_type = other RNA
gaagattagaaaattagctgac

SEQ ID NO: 135260 - RNA, 22 nt, synthetic construct
  source 1..22: mol_type = other RNA
gaagattgagtcagtaatcaaa

SEQ ID NO: 135261 - RNA, 22 nt, synthetic construct
  source 1..22: mol_type = other RNA
gaagattggctttagatttatc

SEQ ID NO: 135262 - RNA, 22 nt, synthetic construct
  source 1..22: mol_type = other RNA
gaagatttctactggggtctta

SEQ ID NO: 135263 - RNA, 22 nt, synthetic construct
  source 1..22: mol_type = other RNA
gaagcaaaacatatgtcagatg

SEQ ID NO: 135264 - RNA, 22 nt, synthetic construct
  source 1..22: mol_type = other RNA
gaagcaaaggattcgggggaga

SEQ ID NO: 135265 - RNA, 22 nt, synthetic construct
  source 1..22: mol_type = other RNA
gaagcacaaccactgatggaat

SEQ ID NO: 135266 - RNA, 22 nt, synthetic construct
  source 1..22: mol_type = other RNA
gaagcacaccaaggtttctctc

SEQ ID NO: 135267 - RNA, 22 nt, synthetic construct
  source 1..22: mol_type = other RNA
gaagcacagtctctgcagagca

SEQ ID NO: 135268 - RNA, 22 nt, synthetic construct
  source 1..22: mol_type = other RNA
gaagcacattccttccgacctg

SEQ ID NO: 135269 - RNA, 22 nt, synthetic construct
  source 1..22: mol_type = other RNA
gaagcaccaacccttgttggac

SEQ ID NO: 135270 - RNA, 22 nt, synthetic construct
  source 1..22: mol_type = other RNA
gaagcactttttaccaagttga

SEQ ID NO: 135271 - RNA, 22 nt, synthetic construct
  source 1..22: mol_type = other RNA
gaagcagaaaatcagtgtgaaa

SEQ ID NO: 135272 - RNA, 22 nt, synthetic construct
  source 1..22: mol_type = other RNA
gaagcagaactaagaccccagt

SEQ ID NO: 135273 - RNA, 22 nt, synthetic construct
  source 1..22: mol_type = other RNA
gaagcagaatgtccatcaggaa

SEQ ID NO: 135274 - RNA, 22 nt, synthetic construct
  source 1..22: mol_type = other RNA
gaagcagagagagaagatgaca

SEQ ID NO: 135275 - RNA, 22 nt, synthetic construct
  source 1..22: mol_type = other RNA
gaagcagcaagggtggctggca

SEQ ID NO: 135276 - RNA, 22 nt, synthetic construct
  source 1..22: mol_type = other RNA
gaagcaggaactcatattagtc

SEQ ID NO: 135277 - RNA, 22 nt, synthetic construct
  source 1..22: mol_type = other RNA
gaagcaggccttcgaggcatct

SEQ ID NO: 135278 - RNA, 22 nt, synthetic construct
  source 1..22: mol_type = other RNA
gaagcaggctttttacccggag

SEQ ID NO: 135279 - RNA, 22 nt, synthetic construct
  source 1..22: mol_type = other RNA
gaagcagggaaatggagggcca

SEQ ID NO: 135280 - RNA, 22 nt, synthetic construct
  source 1..22: mol_type = other RNA
gaagcagttgatgcaatttgtt

SEQ ID NO: 135281 - RNA, 22 nt, synthetic construct
  source 1..22: mol_type = other RNA
gaagcatctgatacacttctat

SEQ ID NO: 135282 - RNA, 22 nt, synthetic construct
  source 1..22: mol_type = other RNA
gaagcatgtggccaggaggagg

SEQ ID NO: 135283 - RNA, 22 nt, synthetic construct
  source 1..22: mol_type = other RNA
gaagcattaatgcaacctgctt

SEQ ID NO: 135284 - RNA, 22 nt, synthetic construct
  source 1..22: mol_type = other RNA
gaagccacacagtacaaggcta

SEQ ID NO: 135285 - RNA, 22 nt, synthetic construct
  source 1..22: mol_type = other RNA
gaagccactgcattcatccagg

SEQ ID NO: 135286 - RNA, 22 nt, synthetic construct
  source 1..22: mol_type = other RNA
gaagccagcacctaacaatgat

SEQ ID NO: 135287 - RNA, 22 nt, synthetic construct
  source 1..22: mol_type = other RNA
gaagccagcattaccctaataa

SEQ ID NO: 135288 - RNA, 22 nt, synthetic construct
  source 1..22: mol_type = other RNA
gaagccagtccttgtgatctat

SEQ ID NO: 135289 - RNA, 22 nt, synthetic construct
  source 1..22: mol_type = other RNA
gaagcccagagaggctaggtga

SEQ ID NO: 135290 - RNA, 22 nt, synthetic construct
  source 1..22: mol_type = other RNA
gaagcccgccgctcgcaggtgg

SEQ ID NO: 135291 - RNA, 22 nt, synthetic construct
  source 1..22: mol_type = other RNA
gaagccctctaagtcagcctgg

SEQ ID NO: 135292 - RNA, 22 nt, synthetic construct
  source 1..22: mol_type = other RNA
gaagccctgcagccagatttga

SEQ ID NO: 135293 - RNA, 22 nt, synthetic construct
  source 1..22: mol_type = other RNA
gaagccttcccctgctgttccc

SEQ ID NO: 135294 - RNA, 22 nt, synthetic construct
  source 1..22: mol_type = other RNA
gaagcgctcttcaagcattggg

SEQ ID NO: 135295 - RNA, 22 nt, synthetic construct
  source 1..22: mol_type = other RNA
gaagcggcagggccgggggttg

SEQ ID NO: 135296 - RNA, 22 nt, synthetic construct
  source 1..22: mol_type = other RNA
gaagcggggctgccactactta

SEQ ID NO: 135297 - RNA, 22 nt, synthetic construct
  source 1..22: mol_type = other RNA
gaagctaaattttcataggaaa

SEQ ID NO: 135298 - RNA, 22 nt, synthetic construct
  source 1..22: mol_type = other RNA
gaagctaatcaagccgcaaata

SEQ ID NO: 135299 - RNA, 22 nt, synthetic construct
  source 1..22: mol_type = other RNA
gaagctacagactaatatgagt

SEQ ID NO: 135300 - RNA, 22 nt, synthetic construct
  source 1..22: mol_type = other RNA
gaagctacagtaatcaaacagt

SEQ ID NO: 135301 - RNA, 22 nt, synthetic construct
  source 1..22: mol_type = other RNA
gaagctactattccaggatcaa

SEQ ID NO: 135302 - RNA, 22 nt, synthetic construct
  source 1..22: mol_type = other RNA
gaagctatagctgagaagtaac

SEQ ID NO: 135303 - RNA, 22 nt, synthetic construct
  source 1..22: mol_type = other RNA
gaagctatggagcactgtgagc

SEQ ID NO: 135304 - RNA, 22 nt, synthetic construct
  source 1..22: mol_type = other RNA
gaagctctagtgagctatgatt

SEQ ID NO: 135305 - RNA, 22 nt, synthetic construct
  source 1..22: mol_type = other RNA
gaagctgatcaaggaagcttcc

SEQ ID NO: 135306 - RNA, 22 nt, synthetic construct
  source 1..22: mol_type = other RNA
gaagctggacccttaccttaaa

SEQ ID NO: 135307 - RNA, 22 nt, synthetic construct
  source 1..22: mol_type = other RNA
gaagctgggctagagccaggaa

SEQ ID NO: 135308 - RNA, 22 nt, synthetic construct
  source 1..22: mol_type = other RNA
gaagctgtccttctcgtgtgag

SEQ ID NO: 135309 - RNA, 22 nt, synthetic construct
  source 1..22: mol_type = other RNA
gaagctgttttggtaaaatgtg

SEQ ID NO: 135310 - RNA, 22 nt, synthetic construct
  source 1..22: mol_type = other RNA
gaagcttaatttagatgagagt

SEQ ID NO: 135311 - RNA, 22 nt, synthetic construct
  source 1..22: mol_type = other RNA
gaagcttataatttctgagagt

SEQ ID NO: 135312 - RNA, 22 nt, synthetic construct
  source 1..22: mol_type = other RNA
gaagcttattaaaatgaacctg

SEQ ID NO: 135313 - RNA, 22 nt, synthetic construct
  source 1..22: mol_type = other RNA
gaagcttcaaaccactatctaa

SEQ ID NO: 135314 - RNA, 22 nt, synthetic construct
  source 1..22: mol_type = other RNA
gaagcttcacttctctgctgct

SEQ ID NO: 135315 - RNA, 22 nt, synthetic construct
  source 1..22: mol_type = other RNA
gaagcttcctaaagagagtgac

SEQ ID NO: 135316 - RNA, 22 nt, synthetic construct
  source 1..22: mol_type = other RNA
gaagcttccttgatcagcttcc

SEQ ID NO: 135317 - RNA, 22 nt, synthetic construct
  source 1..22: mol_type = other RNA
gaagctttcagacttaactata

SEQ ID NO: 135318 - RNA, 22 nt, synthetic construct
  source 1..22: mol_type = other RNA
gaagcttttcatatacagattt

SEQ ID NO: 135319 - RNA, 22 nt, synthetic construct
  source 1..22: mol_type = other RNA
gaagcttttctcctaagtcttc

SEQ ID NO: 135320 - RNA, 22 nt, synthetic construct
  source 1..22: mol_type = other RNA
gaaggaaaaaacacctaaagat

SEQ ID NO: 135321 - RNA, 22 nt, synthetic construct
  source 1..22: mol_type = other RNA
gaaggaaaaaacgggttataca

SEQ ID NO: 135322 - RNA, 22 nt, synthetic construct
  source 1..22: mol_type = other RNA
gaaggaaaagaacacagtgttg

SEQ ID NO: 135323 - RNA, 22 nt, synthetic construct
  source 1..22: mol_type = other RNA
gaaggaaacactataaatcagt

SEQ ID NO: 135324 - RNA, 22 nt, synthetic construct
  source 1..22: mol_type = other RNA
gaaggaaaggagatactggcca

SEQ ID NO: 135325 - RNA, 22 nt, synthetic construct
  source 1..22: mol_type = other RNA
gaaggaaataagaaggtttgta

SEQ ID NO: 135326 - RNA, 22 nt, synthetic construct
  source 1..22: mol_type = other RNA
gaaggaacacacacctattcat

SEQ ID NO: 135327 - RNA, 22 nt, synthetic construct
  source 1..22: mol_type = other RNA
gaaggaagcaccaacccttgtt

SEQ ID NO: 135328 - RNA, 22 nt, synthetic construct
  source 1..22: mol_type = other RNA
gaaggaaggattggaatgagtc

SEQ ID NO: 135329 - RNA, 22 nt, synthetic construct
  source 1..22: mol_type = other RNA
gaaggaatgtgcactcttttaa

SEQ ID NO: 135330 - RNA, 22 nt, synthetic construct
  source 1..22: mol_type = other RNA
gaaggaatgtgcttcctaaacc

SEQ ID NO: 135331 - RNA, 22 nt, synthetic construct
  source 1..22: mol_type = other RNA
gaaggaattttaggacaaggaa

SEQ ID NO: 135332 - RNA, 22 nt, synthetic construct
  source 1..22: mol_type = other RNA
gaaggaattttcaggactcatg

SEQ ID NO: 135333 - RNA, 22 nt, synthetic construct
  source 1..22: mol_type = other RNA
gaaggacagcttccacccaagt

SEQ ID NO: 135334 - RNA, 22 nt, synthetic construct
  source 1..22: mol_type = other RNA
gaaggactcacagcttaccaag

SEQ ID NO: 135335 - RNA, 22 nt, synthetic construct
  source 1..22: mol_type = other RNA
gaaggagaaaacaaaaagaaac

SEQ ID NO: 135336 - RNA, 22 nt, synthetic construct
  source 1..22: mol_type = other RNA
gaaggagaaaccatttacccct

SEQ ID NO: 135337 - RNA, 22 nt, synthetic construct
  source 1..22: mol_type = other RNA
gaaggagaatcgcttaaacccg

SEQ ID NO: 135338 - RNA, 22 nt, synthetic construct
  source 1..22: mol_type = other RNA
gaaggaggaaaataatttgcaa

SEQ ID NO: 135339 - RNA, 22 nt, synthetic construct
  source 1..22: mol_type = other RNA
gaaggagtccagtcctgctaac

SEQ ID NO: 135340 - RNA, 22 nt, synthetic construct
  source 1..22: mol_type = other RNA
gaaggagtctgcccatcctatc

SEQ ID NO: 135341 - RNA, 22 nt, synthetic construct
  source 1..22: mol_type = other RNA
gaaggatatgttttctaaacct

SEQ ID NO: 135342 - RNA, 22 nt, synthetic construct
  source 1..22: mol_type = other RNA
gaaggatggccagtcatgtggg

SEQ ID NO: 135343 - RNA, 22 nt, synthetic construct
  source 1..22: mol_type = other RNA
gaaggattagtgttaattcttc

SEQ ID NO: 135344 - RNA, 22 nt, synthetic construct
  source 1..22: mol_type = other RNA
gaaggattcctccctggagagg

SEQ ID NO: 135345 - RNA, 22 nt, synthetic construct
  source 1..22: mol_type = other RNA
gaaggattgcctaacaccagta

SEQ ID NO: 135346 - RNA, 22 nt, synthetic construct
  source 1..22: mol_type = other RNA
gaaggattggaatgagtccagc

SEQ ID NO: 135347 - RNA, 22 nt, synthetic construct
  source 1..22: mol_type = other RNA
gaaggattgttcatgtctgtgt

SEQ ID NO: 135348 - RNA, 22 nt, synthetic construct
  source 1..22: mol_type = other RNA
gaaggcaatgtaacacagttct

SEQ ID NO: 135349 - RNA, 22 nt, synthetic construct
  source 1..22: mol_type = other RNA
gaaggcaatgtagggaatagac

SEQ ID NO: 135350 - RNA, 22 nt, synthetic construct
  source 1..22: mol_type = other RNA
gaaggcactaacaaagggcctg

SEQ ID NO: 135351 - RNA, 22 nt, synthetic construct
  source 1..22: mol_type = other RNA
gaaggcactgtatggttcttaa

SEQ ID NO: 135352 - RNA, 22 nt, synthetic construct
  source 1..22: mol_type = other RNA
gaaggcagaattatagagggcc

SEQ ID NO: 135353 - RNA, 22 nt, synthetic construct
  source 1..22: mol_type = other RNA
gaaggcaggaggcctcagaatt

SEQ ID NO: 135354 - RNA, 22 nt, synthetic construct
  source 1..22: mol_type = other RNA
gaaggcagggtaggaaggcggt

SEQ ID NO: 135355 - RNA, 22 nt, synthetic construct
  source 1..22: mol_type = other RNA
gaaggcatagggccttctactt

SEQ ID NO: 135356 - RNA, 22 nt, synthetic construct
  source 1..22: mol_type = other RNA
gaaggccagagggaatctagga

SEQ ID NO: 135357 - RNA, 22 nt, synthetic construct
  source 1..22: mol_type = other RNA
gaaggccatttgattgccagtt

SEQ ID NO: 135358 - RNA, 22 nt, synthetic construct
  source 1..22: mol_type = other RNA
gaaggccctatgccttcagtat

SEQ ID NO: 135359 - RNA, 22 nt, synthetic construct
  source 1..22: mol_type = other RNA
gaaggccctgattgagattagc

SEQ ID NO: 135360 - RNA, 22 nt, synthetic construct
  source 1..22: mol_type = other RNA
gaaggccgtccctattttctac

SEQ ID NO: 135361 - RNA, 22 nt, synthetic construct
  source 1..22: mol_type = other RNA
gaaggcctgatagctgtggaag

SEQ ID NO: 135362 - RNA, 22 nt, synthetic construct
  source 1..22: mol_type = other RNA
gaaggcctgcttcattccgcgt

SEQ ID NO: 135363 - RNA, 22 nt, synthetic construct
  source 1..22: mol_type = other RNA
gaaggccttccacggaatgccc

SEQ ID NO: 135364 - RNA, 22 nt, synthetic construct
  source 1..22: mol_type = other RNA
gaaggccttctcctccaaccca

SEQ ID NO: 135365 - RNA, 22 nt, synthetic construct
  source 1..22: mol_type = other RNA
gaaggcgaaatgtgaacagaca

SEQ ID NO: 135366 - RNA, 22 nt, synthetic construct
  source 1..22: mol_type = other RNA
gaaggcggaagttgcagtgagc

SEQ ID NO: 135367 - RNA, 22 nt, synthetic construct
  source 1..22: mol_type = other RNA
gaaggcggtggggacagctcaa

SEQ ID NO: 135368 - RNA, 22 nt, synthetic construct
  source 1..22: mol_type = other RNA
gaaggcgtgtaaactgttggaa

SEQ ID NO: 135369 - RNA, 22 nt, synthetic construct
  source 1..22: mol_type = other RNA
gaaggctaagcatgtaacttgc

SEQ ID NO: 135370 - RNA, 22 nt, synthetic construct
  source 1..22: mol_type = other RNA
gaaggctagcacagaggcaaca

SEQ ID NO: 135371 - RNA, 22 nt, synthetic construct
  source 1..22: mol_type = other RNA
gaaggctcagcccctcatcctc

SEQ ID NO: 135372 - RNA, 22 nt, synthetic construct
  source 1..22: mol_type = other RNA
gaaggctgcaagcactggtaag

SEQ ID NO: 135373 - RNA, 22 nt, synthetic construct
  source 1..22: mol_type = other RNA
gaaggctgccagcaccagatac

SEQ ID NO: 135374 - RNA, 22 nt, synthetic construct
  source 1..22: mol_type = other RNA
gaaggcttcgagttctgggagt

SEQ ID NO: 135375 - RNA, 22 nt, synthetic construct
  source 1..22: mol_type = other RNA
gaaggctttgtgttggtgtttc

SEQ ID NO: 135376 - RNA, 22 nt, synthetic construct
  source 1..22: mol_type = other RNA
gaagggaaaggatgaccttgac

SEQ ID NO: 135377 - RNA, 22 nt, synthetic construct
  source 1..22: mol_type = other RNA
gaagggaacactaagaagatgg

SEQ ID NO: 135378 - RNA, 22 nt, synthetic construct
  source 1..22: mol_type = other RNA
gaagggaagtaaagatcaagct

SEQ ID NO: 135379 - RNA, 22 nt, synthetic construct
  source 1..22: mol_type = other RNA
gaagggaattttactgatcttt

SEQ ID NO: 135380 - RNA, 22 nt, synthetic construct
  source 1..22: mol_type = other RNA
gaagggagaacccaggaacaga

SEQ ID NO: 135381 - RNA, 22 nt, synthetic construct
  source 1..22: mol_type = other RNA
gaagggagagatgcctatgaaa

SEQ ID NO: 135382 - RNA, 22 nt, synthetic construct
  source 1..22: mol_type = other RNA
gaagggagcccaagcacacttt

SEQ ID NO: 135383 - RNA, 22 nt, synthetic construct
  source 1..22: mol_type = other RNA
gaagggaggaaaaaacagttgc

SEQ ID NO: 135384 - RNA, 22 nt, synthetic construct
  source 1..22: mol_type = other RNA
gaagggaggtaggcttagatga

SEQ ID NO: 135385 - RNA, 22 nt, synthetic construct
  source 1..22: mol_type = other RNA
gaagggcttgatctagtaaata

SEQ ID NO: 135386 - RNA, 22 nt, synthetic construct
  source 1..22: mol_type = other RNA
gaagggtatatacaatattaca

SEQ ID NO: 135387 - RNA, 22 nt, synthetic construct
  source 1..22: mol_type = other RNA
gaagggttttctgtagaatatc

SEQ ID NO: 135388 - RNA, 22 nt, synthetic construct
  source 1..22: mol_type = other RNA
gaaggtaagaatgtcaagctgt

SEQ ID NO: 135389 - RNA, 22 nt, synthetic construct
  source 1..22: mol_type = other RNA
gaaggtaggagggtgtgatcag

SEQ ID NO: 135390 - RNA, 22 nt, synthetic construct
  source 1..22: mol_type = other RNA
gaaggtatcatcggaaatataa

SEQ ID NO: 135391 - RNA, 22 nt, synthetic construct
  source 1..22: mol_type = other RNA
gaaggtcaaatggtaacagcca

SEQ ID NO: 135392 - RNA, 22 nt, synthetic construct
  source 1..22: mol_type = other RNA
gaaggtcaatctaggaggtcta

SEQ ID NO: 135393 - RNA, 22 nt, synthetic construct
  source 1..22: mol_type = other RNA
gaaggtgagggactgagcagtg

SEQ ID NO: 135394 - RNA, 22 nt, synthetic construct
  source 1..22: mol_type = other RNA
gaaggtgcccgcgaaggcgtgt

SEQ ID NO: 135395 - RNA, 22 nt, synthetic construct
  source 1..22: mol_type = other RNA
gaaggtgcctgccatagaggga

SEQ ID NO: 135396 - RNA, 22 nt, synthetic construct
  source 1..22: mol_type = other RNA
gaaggttaactaatagccagtg

SEQ ID NO: 135397 - RNA, 22 nt, synthetic construct
  source 1..22: mol_type = other RNA
gaaggttcaagtttggctccca

SEQ ID NO: 135398 - RNA, 22 nt, synthetic construct
  source 1..22: mol_type = other RNA
gaaggttcatgaacataaattt

SEQ ID NO: 135399 - RNA, 22 nt, synthetic construct
  source 1..22: mol_type = other RNA
gaaggtttgtagagcaagcaac

SEQ ID NO: 135400 - RNA, 22 nt, synthetic construct
  source 1..22: mol_type = other RNA
gaagtaaagatcaagctcgccg

SEQ ID NO: 135401 - RNA, 22 nt, synthetic construct
  source 1..22: mol_type = other RNA
gaagtaaatcccggccaggtgc

SEQ ID NO: 135402 - RNA, 22 nt, synthetic construct
  source 1..22: mol_type = other RNA
gaagtaacattacaacagcaag

SEQ ID NO: 135403 - RNA, 22 nt, synthetic construct
  source 1..22: mol_type = other RNA
gaagtaactcttgagttaggaa

SEQ ID NO: 135404 - RNA, 22 nt, synthetic construct
  source 1..22: mol_type = other RNA
gaagtaaggattttctattcat

SEQ ID NO: 135405 - RNA, 22 nt, synthetic construct
  source 1..22: mol_type = other RNA
gaagtaataaagcaagtatgag

SEQ ID NO: 135406 - RNA, 22 nt, synthetic construct
  source 1..22: mol_type = other RNA
gaagtaattgggatctgataaa

SEQ ID NO: 135407 - RNA, 22 nt, synthetic construct
  source 1..22: mol_type = other RNA
gaagtaatttcttctgaagaaa

SEQ ID NO: 135408 - RNA, 22 nt, synthetic construct
  source 1..22: mol_type = other RNA
gaagtacaaacattacagaaaa

SEQ ID NO: 135409 - RNA, 22 nt, synthetic construct
  source 1..22: mol_type = other RNA
gaagtactgagtcaaaaccaaa

SEQ ID NO: 135410 - RNA, 22 nt, synthetic construct
  source 1..22: mol_type = other RNA
gaagtacttcaaggttcacaaa

SEQ ID NO: 135411 - RNA, 22 nt, synthetic construct
  source 1..22: mol_type = other RNA
gaagtacttcagcgcttgaaca

SEQ ID NO: 135412 - RNA, 22 nt, synthetic construct
  source 1..22: mol_type = other RNA
gaagtatagaaaggagaccagt

SEQ ID NO: 135413 - RNA, 22 nt, synthetic construct
  source 1..22: mol_type = other RNA
gaagtatcccagatggggattg

SEQ ID NO: 135414 - RNA, 22 nt, synthetic construct
  source 1..22: mol_type = other RNA
gaagtatgagtcttccgtctca

SEQ ID NO: 135415 - RNA, 22 nt, synthetic construct
  source 1..22: mol_type = other RNA
gaagtatgtaattacaggggac

SEQ ID NO: 135416 - RNA, 22 nt, synthetic construct
  source 1..22: mol_type = other RNA
gaagtattgatttgaccatggg

SEQ ID NO: 135417 - RNA, 22 nt, synthetic construct
  source 1..22: mol_type = other RNA
gaagtcaaagcctgtggaggca

SEQ ID NO: 135418 - RNA, 22 nt, synthetic construct
  source 1..22: mol_type = other RNA
gaagtcaagatgaatctgcaac

SEQ ID NO: 135419 - RNA, 22 nt, synthetic construct
  source 1..22: mol_type = other RNA
gaagtcaatttcagatctctga

SEQ ID NO: 135420 - RNA, 22 nt, synthetic construct
  source 1..22: mol_type = other RNA
gaagtcacattctagtgatggg

SEQ ID NO: 135421 - RNA, 22 nt, synthetic construct
  source 1..22: mol_type = other RNA
gaagtcactttttattctgttc

SEQ ID NO: 135422 - RNA, 22 nt, synthetic construct
  source 1..22: mol_type = other RNA
gaagtcagactaagacactagc

SEQ ID NO: 135423 - RNA, 22 nt, synthetic construct
  source 1..22: mol_type = other RNA
gaagtcagagattttcccaaag

SEQ ID NO: 135424 - RNA, 22 nt, synthetic construct
  source 1..22: mol_type = other RNA
gaagtcagcaactcttggccat

SEQ ID NO: 135425 - RNA, 22 nt, synthetic construct
  source 1..22: mol_type = other RNA
gaagtcagttacagcatttcag

SEQ ID NO: 135426 - RNA, 22 nt, synthetic construct
  source 1..22: mol_type = other RNA
gaagtcatctggtcctgagctt

SEQ ID NO: 135427 - RNA, 22 nt, synthetic construct
  source 1..22: mol_type = other RNA
gaagtccatgaaacttatttcc

SEQ ID NO: 135428 - RNA, 22 nt, synthetic construct
  source 1..22: mol_type = other RNA
gaagtcccagttcaaggtgtta

SEQ ID NO: 135429 - RNA, 22 nt, synthetic construct
  source 1..22: mol_type = other RNA
gaagtcccatcttccatacgaa

SEQ ID NO: 135430 - RNA, 22 nt, synthetic construct
  source 1..22: mol_type = other RNA
gaagtcctcaatcatgtcaaga

SEQ ID NO: 135431 - RNA, 22 nt, synthetic construct
  source 1..22: mol_type = other RNA
gaagtcctttcttggtctgcag

SEQ ID NO: 135432 - RNA, 22 nt, synthetic construct
  source 1..22: mol_type = other RNA
gaagtctttggcccattttcga

SEQ ID NO: 135433 - RNA, 22 nt, synthetic construct
  source 1..22: mol_type = other RNA
gaagtctttggtgatcctaagc

SEQ ID NO: 135434 - RNA, 22 nt, synthetic construct
  source 1..22: mol_type = other RNA
gaagtcttttcctaccctgagg

SEQ ID NO: 135435 - RNA, 22 nt, synthetic construct
  source 1..22: mol_type = other RNA
gaagtgaaaaatgacctaaaat

SEQ ID NO: 135436 - RNA, 22 nt, synthetic construct
  source 1..22: mol_type = other RNA
gaagtgaaactgctggatcata

SEQ ID NO: 135437 - RNA, 22 nt, synthetic construct
  source 1..22: mol_type = other RNA
gaagtgaagcttcaaaccacta

SEQ ID NO: 135438 - RNA, 22 nt, synthetic construct
  source 1..22: mol_type = other RNA
gaagtgaagtcaagatgaatct

SEQ ID NO: 135439 - RNA, 22 nt, synthetic construct
  source 1..22: mol_type = other RNA
gaagtgaccctgagtccagagg

SEQ ID NO: 135440 - RNA, 22 nt, synthetic construct
  source 1..22: mol_type = other RNA
gaagtgctgggctagggaagca

SEQ ID NO: 135441 - RNA, 22 nt, synthetic construct
  source 1..22: mol_type = other RNA
gaagtggagtgcgagtgtgaac

SEQ ID NO: 135442 - RNA, 22 nt, synthetic construct
  source 1..22: mol_type = other RNA
gaagtggctagacggaaaaaca

SEQ ID NO: 135443 - RNA, 22 nt, synthetic construct
  source 1..22: mol_type = other RNA
gaagtgggaagcaaaggattcg

SEQ ID NO: 135444 - RNA, 22 nt, synthetic construct
  source 1..22: mol_type = other RNA
gaagtggtgcttgaactgctgg

SEQ ID NO: 135445 - RNA, 22 nt, synthetic construct
  source 1..22: mol_type = other RNA
gaagtgtaacatacacatcaga

SEQ ID NO: 135446 - RNA, 22 nt, synthetic construct
  source 1..22: mol_type = other RNA
gaagtgtatcagatgcttctag

SEQ ID NO: 135447 - RNA, 22 nt, synthetic construct
  source 1..22: mol_type = other RNA
gaagtgttgagaggctttaagc

SEQ ID NO: 135448 - RNA, 22 nt, synthetic construct
  source 1..22: mol_type = other RNA
gaagtgttttgatagttgcaga

SEQ ID NO: 135449 - RNA, 22 nt, synthetic construct
  source 1..22: mol_type = other RNA
gaagttaagggccatttcattt

SEQ ID NO: 135450 - RNA, 22 nt, synthetic construct
  source 1..22: mol_type = other RNA
gaagttacggttccctgtagag

SEQ ID NO: 135451 - RNA, 22 nt, synthetic construct
  source 1..22: mol_type = other RNA
gaagttatgtagctgggatggc

SEQ ID NO: 135452 - RNA, 22 nt, synthetic construct
  source 1..22: mol_type = other RNA
gaagttatttaatctctcttga

SEQ ID NO: 135453 - RNA, 22 nt, synthetic construct
  source 1..22: mol_type = other RNA
gaagttcaaggttataatcagc

SEQ ID NO: 135454 - RNA, 22 nt, synthetic construct
  source 1..22: mol_type = other RNA
gaagttctcaggggtaaagggg

SEQ ID NO: 135455 - RNA, 22 nt, synthetic construct
  source 1..22: mol_type = other RNA
gaagttgagaaagagggaagta

SEQ ID NO: 135456 - RNA, 22 nt, synthetic construct
  source 1..22: mol_type = other RNA
gaagttgcagtgagcccagaga

SEQ ID NO: 135457 - RNA, 22 nt, synthetic construct
  source 1..22: mol_type = other RNA
gaagttggcccaacatgctctt

SEQ ID NO: 135458 - RNA, 22 nt, synthetic construct
  source 1..22: mol_type = other RNA
gaagttgggcttaacatttgaa

SEQ ID NO: 135459 - RNA, 22 nt, synthetic construct
  source 1..22: mol_type = other RNA
gaagttgtggtgagccaagatc

SEQ ID NO: 135460 - RNA, 22 nt, synthetic construct
  source 1..22: mol_type = other RNA
gaagtttatcagtctccaatcc

SEQ ID NO: 135461 - RNA, 22 nt, synthetic construct
  source 1..22: mol_type = other RNA
gaagtttcctgcacatgcacaa

SEQ ID NO: 135462 - RNA, 22 nt, synthetic construct
  source 1..22: mol_type = other RNA
gaagtttctggaagtttcctgc

SEQ ID NO: 135463 - RNA, 22 nt, synthetic construct
  source 1..22: mol_type = other RNA
gaagtttggaaccagcctggcc

SEQ ID NO: 135464 - RNA, 22 nt, synthetic construct
  source 1..22: mol_type = other RNA
gaagttttccaggaaaagcaaa

SEQ ID NO: 135465 - RNA, 22 nt, synthetic construct
  source 1..22: mol_type = other RNA
gaataaaaagtgacttctggat

SEQ ID NO: 135466 - RNA, 22 nt, synthetic construct
  source 1..22: mol_type = other RNA
gaataaaaggaatataaacgtg

SEQ ID NO: 135467 - RNA, 22 nt, synthetic construct
  source 1..22: mol_type = other RNA
gaataaaattcaccaaacacct

SEQ ID NO: 135468 - RNA, 22 nt, synthetic construct
  source 1..22: mol_type = other RNA
gaataaaattctgatagcttga

SEQ ID NO: 135469 - RNA, 22 nt, synthetic construct
  source 1..22: mol_type = other RNA
gaataaaccacgcagtttgttc

SEQ ID NO: 135470 - RNA, 22 nt, synthetic construct
  source 1..22: mol_type = other RNA
gaataaactaacaaagaacagg

SEQ ID NO: 135471 - RNA, 22 nt, synthetic construct
  source 1..22: mol_type = other RNA
gaataaagggtcagaattttat

SEQ ID NO: 135472 - RNA, 22 nt, synthetic construct
  source 1..22: mol_type = other RNA
gaataaatggtagcttgggcta

SEQ ID NO: 135473 - RNA, 22 nt, synthetic construct
  source 1..22: mol_type = other RNA
gaataaccaatgtcagagatct

SEQ ID NO: 135474 - RNA, 22 nt, synthetic construct
  source 1..22: mol_type = other RNA
gaataacccatatctttgctta

SEQ ID NO: 135475 - RNA, 22 nt, synthetic construct
  source 1..22: mol_type = other RNA
gaataacctcataagaactcct

SEQ ID NO: 135476 - RNA, 22 nt, synthetic construct
  source 1..22: mol_type = other RNA
gaataactgtcctgaattctaa

SEQ ID NO: 135477 - RNA, 22 nt, synthetic construct
  source 1..22: mol_type = other RNA
gaataagctaatcccaaagtga

SEQ ID NO: 135478 - RNA, 22 nt, synthetic construct
  source 1..22: mol_type = other RNA
gaataaggtctgtaagtcagtt

SEQ ID NO: 135479 - RNA, 22 nt, synthetic construct
  source 1..22: mol_type = other RNA
gaataatacacttttcaggtat

SEQ ID NO: 135480 - RNA, 22 nt, synthetic construct
  source 1..22: mol_type = other RNA
gaataatgtctttttacacttg

SEQ ID NO: 135481 - RNA, 22 nt, synthetic construct
  source 1..22: mol_type = other RNA
gaataatttccaggtcattaca

SEQ ID NO: 135482 - RNA, 22 nt, synthetic construct
  source 1..22: mol_type = other RNA
gaatacaaaaatgacacaactt

SEQ ID NO: 135483 - RNA, 22 nt, synthetic construct
  source 1..22: mol_type = other RNA
gaatacaaaggtgttaagccgt

SEQ ID NO: 135484 - RNA, 22 nt, synthetic construct
  source 1..22: mol_type = other RNA
gaataccaaattcacgagactg

SEQ ID NO: 135485 - RNA, 22 nt, synthetic construct
  source 1..22: mol_type = other RNA
gaataccacttagtttgcaata

SEQ ID NO: 135486 - RNA, 22 nt, synthetic construct
  source 1..22: mol_type = other RNA
gaataccagagattgggaaaat

SEQ ID NO: 135487 - RNA, 22 nt, synthetic construct
  source 1..22: mol_type = other RNA
gaatacccctccctacctggca

SEQ ID NO: 135488 - RNA, 22 nt, synthetic construct
  source 1..22: mol_type = other RNA
gaatacctatttagagggatga

SEQ ID NO: 135489 - RNA, 22 nt, synthetic construct
  source 1..22: mol_type = other RNA
gaatactccaccagcatctttt

SEQ ID NO: 135490 - RNA, 22 nt, synthetic construct
  source 1..22: mol_type = other RNA
gaatactcgtgtgtctcataaa

SEQ ID NO: 135491 - RNA, 22 nt, synthetic construct
  source 1..22: mol_type = other RNA
gaatactttcccatctctagtt

SEQ ID NO: 135492 - RNA, 22 nt, synthetic construct
  source 1..22: mol_type = other RNA
gaatagaaaatccttacttcca

SEQ ID NO: 135493 - RNA, 22 nt, synthetic construct
  source 1..22: mol_type = other RNA
gaatagaaagttagtgtctaat

SEQ ID NO: 135494 - RNA, 22 nt, synthetic construct
  source 1..22: mol_type = other RNA
gaatagaagagcagtgtgttct

SEQ ID NO: 135495 - RNA, 22 nt, synthetic construct
  source 1..22: mol_type = other RNA
gaatagaagggagaacccagga

SEQ ID NO: 135496 - RNA, 22 nt, synthetic construct
  source 1..22: mol_type = other RNA
gaatagacaaagacaagttctt

SEQ ID NO: 135497 - RNA, 22 nt, synthetic construct
  source 1..22: mol_type = other RNA
gaatagcaactgttttttcctc

SEQ ID NO: 135498 - RNA, 22 nt, synthetic construct
  source 1..22: mol_type = other RNA
gaatagcagaaacacaggactg

SEQ ID NO: 135499 - RNA, 22 nt, synthetic construct
  source 1..22: mol_type = other RNA
gaatagcatcttagctcttccc

SEQ ID NO: 135500 - RNA, 22 nt, synthetic construct
  source 1..22: mol_type = other RNA
gaataggaaagtgacagatgag

SEQ ID NO: 135501 - RNA, 22 nt, synthetic construct
  source 1..22: mol_type = other RNA
gaataggcaaattcatagatca

SEQ ID NO: 135502 - RNA, 22 nt, synthetic construct
  source 1..22: mol_type = other RNA
gaatagggcctcaaatttcatt

SEQ ID NO: 135503 - RNA, 22 nt, synthetic construct
  source 1..22: mol_type = other RNA
gaataggtgtgtgttccttcct

SEQ ID NO: 135504 - RNA, 22 nt, synthetic construct
  source 1..22: mol_type = other RNA
gaatagtagcttcaatgagggc

SEQ ID NO: 135505 - RNA, 22 nt, synthetic construct
  source 1..22: mol_type = other RNA
gaatagtattcaggacagatta

SEQ ID NO: 135506 - RNA, 22 nt, synthetic construct
  source 1..22: mol_type = other RNA
gaatagttgattatttttaccc

SEQ ID NO: 135507 - RNA, 22 nt, synthetic construct
  source 1..22: mol_type = other RNA
gaatataaacgtgtgtgtaagc

SEQ ID NO: 135508 - RNA, 22 nt, synthetic construct
  source 1..22: mol_type = other RNA
gaatataaactcttccttatcc

SEQ ID NO: 135509 - RNA, 22 nt, synthetic construct
  source 1..22: mol_type = other RNA
gaatatactggaaaactagaga

SEQ ID NO: 135510 - RNA, 22 nt, synthetic construct
  source 1..22: mol_type = other RNA
gaatatagctaagaaacagtaa

SEQ ID NO: 135511 - RNA, 22 nt, synthetic construct
  source 1..22: mol_type = other RNA
gaatatataaagaactccaaca

SEQ ID NO: 135512 - RNA, 22 nt, synthetic construct
  source 1..22: mol_type = other RNA
gaatatcatttgaatgatgcga

SEQ ID NO: 135513 - RNA, 22 nt, synthetic construct
  source 1..22: mol_type = other RNA
gaatatccaagcacaaacctgg

SEQ ID NO: 135514 - RNA, 22 nt, synthetic construct
  source 1..22: mol_type = other RNA
gaatatgtactacctatagaat

SEQ ID NO: 135515 - RNA, 22 nt, synthetic construct
  source 1..22: mol_type = other RNA
gaatattactcagtctcgaaaa

SEQ ID NO: 135516 - RNA, 22 nt, synthetic construct
  source 1..22: mol_type = other RNA
gaatattcgttccagcagggta

SEQ ID NO: 135517 - RNA, 22 nt, synthetic construct
  source 1..22: mol_type = other RNA
gaatattgttcagccttaaaaa

SEQ ID NO: 135518 - RNA, 22 nt, synthetic construct
  source 1..22: mol_type = other RNA
gaatcaatccagacagctaata

SEQ ID NO: 135519 - RNA, 22 nt, synthetic construct
  source 1..22: mol_type = other RNA
gaatcacctcaaggcagaacac

SEQ ID NO: 135520 - RNA, 22 nt, synthetic construct
  source 1..22: mol_type = other RNA
gaatcactacagcatattagct

SEQ ID NO: 135521 - RNA, 22 nt, synthetic construct
  source 1..22: mol_type = other RNA
gaatcagacaacacattaataa

SEQ ID NO: 135522 - RNA, 22 nt, synthetic construct
  source 1..22: mol_type = other RNA
gaatcaggtctctttgaaagga

SEQ ID NO: 135523 - RNA, 22 nt, synthetic construct
  source 1..22: mol_type = other RNA
gaatcatccggggagcttttga

SEQ ID NO: 135524 - RNA, 22 nt, synthetic construct
  source 1..22: mol_type = other RNA
gaatcatctaggcatataaact

SEQ ID NO: 135525 - RNA, 22 nt, synthetic construct
  source 1..22: mol_type = other RNA
gaatcatgcagtacttgtcttt

SEQ ID NO: 135526 - RNA, 22 nt, synthetic construct
  source 1..22: mol_type = other RNA
gaatcatgggagccaaacttga

SEQ ID NO: 135527 - RNA, 22 nt, synthetic construct
  source 1..22: mol_type = other RNA
gaatccccaaataacatgcata

SEQ ID NO: 135528 - RNA, 22 nt, synthetic construct
  source 1..22: mol_type = other RNA
gaatccctttcgctaatctcaa

SEQ ID NO: 135529 - RNA, 22 nt, synthetic construct
  source 1..22: mol_type = other RNA
gaatccggctttatgagacaca

SEQ ID NO: 135530 - RNA, 22 nt, synthetic construct
  source 1..22: mol_type = other RNA
gaatcctcacaacaggcctgag

SEQ ID NO: 135531 - RNA, 22 nt, synthetic construct
  source 1..22: mol_type = other RNA
gaatcctgctattttattagat

SEQ ID NO: 135532 - RNA, 22 nt, synthetic construct
  source 1..22: mol_type = other RNA
gaatccttcagtcagttctctg

SEQ ID NO: 135533 - RNA, 22 nt, synthetic construct
  source 1..22: mol_type = other RNA
gaatcctttgcttcccacttcg

SEQ ID NO: 135534 - RNA, 22 nt, synthetic construct
  source 1..22: mol_type = other RNA
gaatcgtgatagtcttccaatt

SEQ ID NO: 135535 - RNA, 22 nt, synthetic construct
  source 1..22: mol_type = other RNA
gaatctactcttttgtttttgg

SEQ ID NO: 135536 - RNA, 22 nt, synthetic construct
  source 1..22: mol_type = other RNA
gaatctagaaagataaatccaa

SEQ ID NO: 135537 - RNA, 22 nt, synthetic construct
  source 1..22: mol_type = other RNA
gaatctaggaaacactgctcag

SEQ ID NO: 135538 - RNA, 22 nt, synthetic construct
  source 1..22: mol_type = other RNA
gaatctctctatccaccactcc

SEQ ID NO: 135539 - RNA, 22 nt, synthetic construct
  source 1..22: mol_type = other RNA
gaatctgacctaagcttgggta

SEQ ID NO: 135540 - RNA, 22 nt, synthetic construct
  source 1..22: mol_type = other RNA
gaatctgagtaaagggtaagaa

SEQ ID NO: 135541 - RNA, 22 nt, synthetic construct
  source 1..22: mol_type = other RNA
gaatctgcaactatcaaaacac

SEQ ID NO: 135542 - RNA, 22 nt, synthetic construct
  source 1..22: mol_type = other RNA
gaatctgggccgggcgcggtgg

SEQ ID NO: 135543 - RNA, 22 nt, synthetic construct
  source 1..22: mol_type = other RNA
gaatctgtagattgttttaggt

SEQ ID NO: 135544 - RNA, 22 nt, synthetic construct
  source 1..22: mol_type = other RNA
gaatctgttcctgggttctccc

SEQ ID NO: 135545 - RNA, 22 nt, synthetic construct
  source 1..22: mol_type = other RNA
gaatcttaaaataccagaggtt

SEQ ID NO: 135546 - RNA, 22 nt, synthetic construct
  source 1..22: mol_type = other RNA
gaatcttaacatttctcatgta

SEQ ID NO: 135547 - RNA, 22 nt, synthetic construct
  source 1..22: mol_type = other RNA
gaatcttaccctgttgaccagg

SEQ ID NO: 135548 - RNA, 22 nt, synthetic construct
  source 1..22: mol_type = other RNA
gaatcttactggtgttaggcaa

SEQ ID NO: 135549 - RNA, 22 nt, synthetic construct
  source 1..22: mol_type = other RNA
gaatctttggcaaacttagaat

SEQ ID NO: 135550 - RNA, 22 nt, synthetic construct
  source 1..22: mol_type = other RNA
gaatgaaaacacaacataccaa

SEQ ID NO: 135551 - RNA, 22 nt, synthetic construct
  source 1..22: mol_type = other RNA
gaatgaaaatttttgtctggaa

SEQ ID NO: 135552 - RNA, 22 nt, synthetic construct
  source 1..22: mol_type = other RNA
gaatgaacaaaatgtggtatat

SEQ ID NO: 135553 - RNA, 22 nt, synthetic construct
  source 1..22: mol_type = other RNA
gaatgaactcctatagttaagt

SEQ ID NO: 135554 - RNA, 22 nt, synthetic construct
  source 1..22: mol_type = other RNA
gaatgaagcaggccttcgaggc

SEQ ID NO: 135555 - RNA, 22 nt, synthetic construct
  source 1..22: mol_type = other RNA
gaatgaagtcagagattttccc

SEQ ID NO: 135556 - RNA, 22 nt, synthetic construct
  source 1..22: mol_type = other RNA
gaatgacagaaaatatctacaa

SEQ ID NO: 135557 - RNA, 22 nt, synthetic construct
  source 1..22: mol_type = other RNA
gaatgaccgagatacttaagtt

SEQ ID NO: 135558 - RNA, 22 nt, synthetic construct
  source 1..22: mol_type = other RNA
gaatgactgttgcctctgtgct

SEQ ID NO: 135559 - RNA, 22 nt, synthetic construct
  source 1..22: mol_type = other RNA
gaatgagaaacatacatgttca

SEQ ID NO: 135560 - RNA, 22 nt, synthetic construct
  source 1..22: mol_type = other RNA
gaatgagaccaaatgcataaaa

SEQ ID NO: 135561 - RNA, 22 nt, synthetic construct
  source 1..22: mol_type = other RNA
gaatgagcaaggtcgtttcaga

SEQ ID NO: 135562 - RNA, 22 nt, synthetic construct
  source 1..22: mol_type = other RNA
gaatgaggagtgaatttttcat

SEQ ID NO: 135563 - RNA, 22 nt, synthetic construct
  source 1..22: mol_type = other RNA
gaatgagtccagctttctaatt

SEQ ID NO: 135564 - RNA, 22 nt, synthetic construct
  source 1..22: mol_type = other RNA
gaatgatgccatcacattttga

SEQ ID NO: 135565 - RNA, 22 nt, synthetic construct
  source 1..22: mol_type = other RNA
gaatgattatttgcggcttgat

SEQ ID NO: 135566 - RNA, 22 nt, synthetic construct
  source 1..22: mol_type = other RNA
gaatgattccacttatatgaag

SEQ ID NO: 135567 - RNA, 22 nt, synthetic construct
  source 1..22: mol_type = other RNA
gaatgatttccctgcatacact

SEQ ID NO: 135568 - RNA, 22 nt, synthetic construct
  source 1..22: mol_type = other RNA
gaatgcaaagtttcctacatac

SEQ ID NO: 135569 - RNA, 22 nt, synthetic construct
  source 1..22: mol_type = other RNA
gaatgcacgtgaagctacagac

SEQ ID NO: 135570 - RNA, 22 nt, synthetic construct
  source 1..22: mol_type = other RNA
gaatgcagtggcttcctaactg

SEQ ID NO: 135571 - RNA, 22 nt, synthetic construct
  source 1..22: mol_type = other RNA
gaatgcatatatctgtctggga

SEQ ID NO: 135572 - RNA, 22 nt, synthetic construct
  source 1..22: mol_type = other RNA
gaatgcatccctcctctggccc

SEQ ID NO: 135573 - RNA, 22 nt, synthetic construct
  source 1..22: mol_type = other RNA
gaatgcatcgtttcaatattaa

SEQ ID NO: 135574 - RNA, 22 nt, synthetic construct
  source 1..22: mol_type = other RNA
gaatgcatcttttaaaaacctt

SEQ ID NO: 135575 - RNA, 22 nt, synthetic construct
  source 1..22: mol_type = other RNA
gaatgcatgggaggtaatacta

SEQ ID NO: 135576 - RNA, 22 nt, synthetic construct
  source 1..22: mol_type = other RNA
gaatgcccatcctctatttttg

SEQ ID NO: 135577 - RNA, 22 nt, synthetic construct
  source 1..22: mol_type = other RNA
gaatgcccctgtagcagacact

SEQ ID NO: 135578 - RNA, 22 nt, synthetic construct
  source 1..22: mol_type = other RNA
gaatgcccctttgagcagagtc

SEQ ID NO: 135579 - RNA, 22 nt, synthetic construct
  source 1..22: mol_type = other RNA
gaatgcctataaaatgctggaa

SEQ ID NO: 135580 - RNA, 22 nt, synthetic construct
  source 1..22: mol_type = other RNA
gaatgctcataattaaagagag

SEQ ID NO: 135581 - RNA, 22 nt, synthetic construct
  source 1..22: mol_type = other RNA
gaatggaaaattcaaacatgac

SEQ ID NO: 135582 - RNA, 22 nt, synthetic construct
  source 1..22: mol_type = other RNA
gaatggaaaattcttggtcttt

SEQ ID NO: 135583 - RNA, 22 nt, synthetic construct
  source 1..22: mol_type = other RNA
gaatggaaacttgccatcttgc

SEQ ID NO: 135584 - RNA, 22 nt, synthetic construct
  source 1..22: mol_type = other RNA
gaatggaaagaaatagaactgt

SEQ ID NO: 135585 - RNA, 22 nt, synthetic construct
  source 1..22: mol_type = other RNA
gaatggaaatgtaaattcctaa

SEQ ID NO: 135586 - RNA, 22 nt, synthetic construct
  source 1..22: mol_type = other RNA
gaatggaattctgatgcacaag

SEQ ID NO: 135587 - RNA, 22 nt, synthetic construct
  source 1..22: mol_type = other RNA
gaatggataaggaaaatatgat

SEQ ID NO: 135588 - RNA, 22 nt, synthetic construct
  source 1..22: mol_type = other RNA
gaatggcaaggctaacagccaa

SEQ ID NO: 135589 - RNA, 22 nt, synthetic construct
  source 1..22: mol_type = other RNA
gaatggcatgaacccaccagga

SEQ ID NO: 135590 - RNA, 22 nt, synthetic construct
  source 1..22: mol_type = other RNA
gaatggccctgcgattggttgg

SEQ ID NO: 135591 - RNA, 22 nt, synthetic construct
  source 1..22: mol_type = other RNA
gaatggctggaatggtgaagaa

SEQ ID NO: 135592 - RNA, 22 nt, synthetic construct
  source 1..22: mol_type = other RNA
gaatggggagctagagggtaag

SEQ ID NO: 135593 - RNA, 22 nt, synthetic construct
  source 1..22: mol_type = other RNA
gaatggggatgcaacaaatgtt

SEQ ID NO: 135594 - RNA, 22 nt, synthetic construct
  source 1..22: mol_type = other RNA
gaatggggtaattttggggcca

SEQ ID NO: 135595 - RNA, 22 nt, synthetic construct
  source 1..22: mol_type = other RNA
gaatgggttggaggagaaggcc

SEQ ID NO: 135596 - RNA, 22 nt, synthetic construct
  source 1..22: mol_type = other RNA
gaatggtactgcctccacaggc

SEQ ID NO: 135597 - RNA, 22 nt, synthetic construct
  source 1..22: mol_type = other RNA
gaatggtcaatttcatcgtaaa

SEQ ID NO: 135598 - RNA, 22 nt, synthetic construct
  source 1..22: mol_type = other RNA
gaatggtgaagaatgtgaaaaa

SEQ ID NO: 135599 - RNA, 22 nt, synthetic construct
  source 1..22: mol_type = other RNA
gaatggtttaacacatacaaac

SEQ ID NO: 135600 - RNA, 22 nt, synthetic construct
  source 1..22: mol_type = other RNA
gaatgtcaagctgtttgagctg

SEQ ID NO: 135601 - RNA, 22 nt, synthetic construct
  source 1..22: mol_type = other RNA
gaatgtccatcaggaaaaccag

SEQ ID NO: 135602 - RNA, 22 nt, synthetic construct
  source 1..22: mol_type = other RNA
gaatgtgaaaaatttgacatga

SEQ ID NO: 135603 - RNA, 22 nt, synthetic construct
  source 1..22: mol_type = other RNA
gaatgtgacctgtccttgtgtt

SEQ ID NO: 135604 - RNA, 22 nt, synthetic construct
  source 1..22: mol_type = other RNA
gaatgtgacttcgtcaagggga

SEQ ID NO: 135605 - RNA, 22 nt, synthetic construct
  source 1..22: mol_type = other RNA
gaatgtgaggtgaggacatgga

SEQ ID NO: 135606 - RNA, 22 nt, synthetic construct
  source 1..22: mol_type = other RNA
gaatgtgcacctccagtgtcct

SEQ ID NO: 135607 - RNA, 22 nt, synthetic construct
  source 1..22: mol_type = other RNA
gaatgtgcactcttttaaaccc

SEQ ID NO: 135608 - RNA, 22 nt, synthetic construct
  source 1..22: mol_type = other RNA
gaatgtgcctacatagtccact

SEQ ID NO: 135609 - RNA, 22 nt, synthetic construct
  source 1..22: mol_type = other RNA
gaatgtgcttcctaaacctgct

SEQ ID NO: 135610 - RNA, 22 nt, synthetic construct
  source 1..22: mol_type = other RNA
gaatgtggcagaatttacattt

SEQ ID NO: 135611 - RNA, 22 nt, synthetic construct
  source 1..22: mol_type = other RNA
gaatgtggtcacactttttgtg

SEQ ID NO: 135612 - RNA, 22 nt, synthetic construct
  source 1..22: mol_type = other RNA
gaatgtggtggtatgcactgta

SEQ ID NO: 135613 - RNA, 22 nt, synthetic construct
  source 1..22: mol_type = other RNA
gaatgtgtagttctggtgtcgt

SEQ ID NO: 135614 - RNA, 22 nt, synthetic construct
  source 1..22: mol_type = other RNA
gaatgttcaagtatttccacgg

SEQ ID NO: 135615 - RNA, 22 nt, synthetic construct
  source 1..22: mol_type = other RNA
gaatgtttttccgtctagccac

SEQ ID NO: 135616 - RNA, 22 nt, synthetic construct
  source 1..22: mol_type = other RNA
gaattaaaaacattggaggata

SEQ ID NO: 135617 - RNA, 22 nt, synthetic construct
  source 1..22: mol_type = other RNA
gaattaaaatgttgccaatatc

SEQ ID NO: 135618 - RNA, 22 nt, synthetic construct
  source 1..22: mol_type = other RNA
gaattaaacaatcttgaaaggg

SEQ ID NO: 135619 - RNA, 22 nt, synthetic construct
  source 1..22: mol_type = other RNA
gaattaaactcattatcccaga

SEQ ID NO: 135620 - RNA, 22 nt, synthetic construct
  source 1..22: mol_type = other RNA
gaattaacactaatccttctca

SEQ ID NO: 135621 - RNA, 22 nt, synthetic construct
  source 1..22: mol_type = other RNA
gaattaactccaggggacatgc

SEQ ID NO: 135622 - RNA, 22 nt, synthetic construct
  source 1..22: mol_type = other RNA
gaattaagcaccactagagtat

SEQ ID NO: 135623 - RNA, 22 nt, synthetic construct
  source 1..22: mol_type = other RNA
gaattaatctcttacacctgtt

SEQ ID NO: 135624 - RNA, 22 nt, synthetic construct
  source 1..22: mol_type = other RNA
gaattacaaatgaaagtcagct

SEQ ID NO: 135625 - RNA, 22 nt, synthetic construct
  source 1..22: mol_type = other RNA
gaattacaggcatgagtcgcca

SEQ ID NO: 135626 - RNA, 22 nt, synthetic construct
  source 1..22: mol_type = other RNA
gaattactgacaatagccaaga

SEQ ID NO: 135627 - RNA, 22 nt, synthetic construct
  source 1..22: mol_type = other RNA
gaattagaaagctggactcatt

SEQ ID NO: 135628 - RNA, 22 nt, synthetic construct
  source 1..22: mol_type = other RNA
gaattagatggcttaggatcac

SEQ ID NO: 135629 - RNA, 22 nt, synthetic construct
  source 1..22: mol_type = other RNA
gaattagattgttttgttgcta

SEQ ID NO: 135630 - RNA, 22 nt, synthetic construct
  source 1..22: mol_type = other RNA
gaattagcaatgcgaatcatct

SEQ ID NO: 135631 - RNA, 22 nt, synthetic construct
  source 1..22: mol_type = other RNA
gaattagtgattttaccaaggc

SEQ ID NO: 135632 - RNA, 22 nt, synthetic construct
  source 1..22: mol_type = other RNA
gaattatagagggcctaaataa

SEQ ID NO: 135633 - RNA, 22 nt, synthetic construct
  source 1..22: mol_type = other RNA
gaattatgctaacatgaactac

SEQ ID NO: 135634 - RNA, 22 nt, synthetic construct
  source 1..22: mol_type = other RNA
gaattattaagcaaaatggaag

SEQ ID NO: 135635 - RNA, 22 nt, synthetic construct
  source 1..22: mol_type = other RNA
gaattattgattggcaaatctt

SEQ ID NO: 135636 - RNA, 22 nt, synthetic construct
  source 1..22: mol_type = other RNA
gaattattgtctgcaagcagat

SEQ ID NO: 135637 - RNA, 22 nt, synthetic construct
  source 1..22: mol_type = other RNA
gaattcacagtagaagactcag

SEQ ID NO: 135638 - RNA, 22 nt, synthetic construct
  source 1..22: mol_type = other RNA
gaattcactaatgcctcaaatt

SEQ ID NO: 135639 - RNA, 22 nt, synthetic construct
  source 1..22: mol_type = other RNA
gaattcactgtgactccaaagc

SEQ ID NO: 135640 - RNA, 22 nt, synthetic construct
  source 1..22: mol_type = other RNA
gaattcagagtggctaatgtgg

SEQ ID NO: 135641 - RNA, 22 nt, synthetic construct
  source 1..22: mol_type = other RNA
gaattcagatggccccaaaatt

SEQ ID NO: 135642 - RNA, 22 nt, synthetic construct
  source 1..22: mol_type = other RNA
gaattcaggacagtcatcctca

SEQ ID NO: 135643 - RNA, 22 nt, synthetic construct
  source 1..22: mol_type = other RNA
gaattcaggacagttattcttc

SEQ ID NO: 135644 - RNA, 22 nt, synthetic construct
  source 1..22: mol_type = other RNA
gaattcagtcaccaaacgttta

SEQ ID NO: 135645 - RNA, 22 nt, synthetic construct
  source 1..22: mol_type = other RNA
gaattcattgttgtgtgttaaa

SEQ ID NO: 135646 - RNA, 22 nt, synthetic construct
  source 1..22: mol_type = other RNA
gaattccatcagtggttgtgct

SEQ ID NO: 135647 - RNA, 22 nt, synthetic construct
  source 1..22: mol_type = other RNA
gaattccattccttttcgagac

SEQ ID NO: 135648 - RNA, 22 nt, synthetic construct
  source 1..22: mol_type = other RNA
gaattcccacaaaatatgaagc

SEQ ID NO: 135649 - RNA, 22 nt, synthetic construct
  source 1..22: mol_type = other RNA
gaattcgttaatacttgtgtag

SEQ ID NO: 135650 - RNA, 22 nt, synthetic construct
  source 1..22: mol_type = other RNA
gaattctaacattatcttctac

SEQ ID NO: 135651 - RNA, 22 nt, synthetic construct
  source 1..22: mol_type = other RNA
gaattctaatgaactcccagaa

SEQ ID NO: 135652 - RNA, 22 nt, synthetic construct
  source 1..22: mol_type = other RNA
gaattctactaaacattaagga

SEQ ID NO: 135653 - RNA, 22 nt, synthetic construct
  source 1..22: mol_type = other RNA
gaattctataggtagtacatat

SEQ ID NO: 135654 - RNA, 22 nt, synthetic construct
  source 1..22: mol_type = other RNA
gaattctctctcaactggcccc

SEQ ID NO: 135655 - RNA, 22 nt, synthetic construct
  source 1..22: mol_type = other RNA
gaattctctggaatagaagagc

SEQ ID NO: 135656 - RNA, 22 nt, synthetic construct
  source 1..22: mol_type = other RNA
gaattctgacacccgaagagga

SEQ ID NO: 135657 - RNA, 22 nt, synthetic construct
  source 1..22: mol_type = other RNA
gaattctgacttagtgagggag

SEQ ID NO: 135658 - RNA, 22 nt, synthetic construct
  source 1..22: mol_type = other RNA
gaattctgatgcacaagccttg

SEQ ID NO: 135659 - RNA, 22 nt, synthetic construct
  source 1..22: mol_type = other RNA
gaattctgcttattatatgcct

SEQ ID NO: 135660 - RNA, 22 nt, synthetic construct
  source 1..22: mol_type = other RNA
gaattcttgacctcaaatgatc

SEQ ID NO: 135661 - RNA, 22 nt, synthetic construct
  source 1..22: mol_type = other RNA
gaattctttaaaactgctgagt

SEQ ID NO: 135662 - RNA, 22 nt, synthetic construct
  source 1..22: mol_type = other RNA
gaattgactttaccctgctgga

SEQ ID NO: 135663 - RNA, 22 nt, synthetic construct
  source 1..22: mol_type = other RNA
gaattgagatgtactggaagtg

SEQ ID NO: 135664 - RNA, 22 nt, synthetic construct
  source 1..22: mol_type = other RNA
gaattgcatgagacttggagtt

SEQ ID NO: 135665 - RNA, 22 nt, synthetic construct
  source 1..22: mol_type = other RNA
gaattgccatatgtagggcacc

SEQ ID NO: 135666 - RNA, 22 nt, synthetic construct
  source 1..22: mol_type = other RNA
gaattggtagtcaatgcaatgc

SEQ ID NO: 135667 - RNA, 22 nt, synthetic construct
  source 1..22: mol_type = other RNA
gaattgtaatcacagtacgctt

SEQ ID NO: 135668 - RNA, 22 nt, synthetic construct
  source 1..22: mol_type = other RNA
gaattgtgacagttctatttct

SEQ ID NO: 135669 - RNA, 22 nt, synthetic construct
  source 1..22: mol_type = other RNA
gaattgttgcgcgtcaaaagat

SEQ ID NO: 135670 - RNA, 22 nt, synthetic construct
  source 1..22: mol_type = other RNA
gaattgttggagttctttatat

SEQ ID NO: 135671 - RNA, 22 nt, synthetic construct
  source 1..22: mol_type = other RNA
gaatttaagacacaaggaaggt

SEQ ID NO: 135672 - RNA, 22 nt, synthetic construct
  source 1..22: mol_type = other RNA
gaatttaaggggtaaatggttt

SEQ ID NO: 135673 - RNA, 22 nt, synthetic construct
  source 1..22: mol_type = other RNA
gaatttaatatgtgtacaatgg

SEQ ID NO: 135674 - RNA, 22 nt, synthetic construct
  source 1..22: mol_type = other RNA
gaatttaattttgagagtgcag

SEQ ID NO: 135675 - RNA, 22 nt, synthetic construct
  source 1..22: mol_type = other RNA
gaatttcagaaagagaatagca

SEQ ID NO: 135676 - RNA, 22 nt, synthetic construct
  source 1..22: mol_type = other RNA
gaatttcaggtgtgtaaacact

SEQ ID NO: 135677 - RNA, 22 nt, synthetic construct
  source 1..22: mol_type = other RNA
gaatttcatgcctttcagcata

SEQ ID NO: 135678 - RNA, 22 nt, synthetic construct
  source 1..22: mol_type = other RNA
gaatttctgtccttggattgct

SEQ ID NO: 135679 - RNA, 22 nt, synthetic construct
  source 1..22: mol_type = other RNA
gaatttgaggtcttctagcttt

SEQ ID NO: 135680 - RNA, 22 nt, synthetic construct
  source 1..22: mol_type = other RNA
gaatttgcctattctggggctc

SEQ ID NO: 135681 - RNA, 22 nt, synthetic construct
  source 1..22: mol_type = other RNA
gaatttggaaagggtagagcac

SEQ ID NO: 135682 - RNA, 22 nt, synthetic construct
  source 1..22: mol_type = other RNA
gaatttggatttgagtaactaa

SEQ ID NO: 135683 - RNA, 22 nt, synthetic construct
  source 1..22: mol_type = other RNA
gaatttggtattcttatcccta

SEQ ID NO: 135684 - RNA, 22 nt, synthetic construct
  source 1..22: mol_type = other RNA
gaatttgttttaccatctaaag

SEQ ID NO: 135685 - RNA, 22 nt, synthetic construct
  source 1..22: mol_type = other RNA
gaattttaagcctagagattag

SEQ ID NO: 135686 - RNA, 22 nt, synthetic construct
  source 1..22: mol_type = other RNA
gaattttactgatcttttctga

SEQ ID NO: 135687 - RNA, 22 nt, synthetic construct
  source 1..22: mol_type = other RNA
gaattttaggacaaggaaagga

SEQ ID NO: 135688 - RNA, 22 nt, synthetic construct
  source 1..22: mol_type = other RNA
gaattttagtaattctccactt

SEQ ID NO: 135689 - RNA, 22 nt, synthetic construct
  source 1..22: mol_type = other RNA
gaattttcaggactcatgagag

SEQ ID NO: 135690 - RNA, 22 nt, synthetic construct
  source 1..22: mol_type = other RNA
gaattttccattcacacaccct

SEQ ID NO: 135691 - RNA, 22 nt, synthetic construct
  source 1..22: mol_type = other RNA
gaattttccattcatgtaatgc

SEQ ID NO: 135692 - RNA, 22 nt, synthetic construct
  source 1..22: mol_type = other RNA
gaattttgcttttgctttgggt

SEQ ID NO: 135693 - RNA, 22 nt, synthetic construct
  source 1..22: mol_type = other RNA
gaatttttcttacctaagcatc

SEQ ID NO: 135694 - RNA, 22 nt, synthetic construct
  source 1..22: mol_type = other RNA
gacaaaaaacgcggcacttggt

SEQ ID NO: 135695 - RNA, 22 nt, synthetic construct
  source 1..22: mol_type = other RNA
gacaaaaagtaggggtaaatct

SEQ ID NO: 135696 - RNA, 22 nt, synthetic construct
  source 1..22: mol_type = other RNA
gacaaaaataatatgataccct

SEQ ID NO: 135697 - RNA, 22 nt, synthetic construct
  source 1..22: mol_type = other RNA
gacaaaaatagaggatgggcat

SEQ ID NO: 135698 - RNA, 22 nt, synthetic construct
  source 1..22: mol_type = other RNA
gacaaaaattttcattctacct

SEQ ID NO: 135699 - RNA, 22 nt, synthetic construct
  source 1..22: mol_type = other RNA
gacaaaaggccccttgaaagat

SEQ ID NO: 135700 - RNA, 22 nt, synthetic construct
  source 1..22: mol_type = other RNA
gacaaacacttttcaaacactt

SEQ ID NO: 135701 - RNA, 22 nt, synthetic construct
  source 1..22: mol_type = other RNA
gacaaagacaagttcttacctc

SEQ ID NO: 135702 - RNA, 22 nt, synthetic construct
  source 1..22: mol_type = other RNA
gacaaagcataaaatatgtgaa

SEQ ID NO: 135703 - RNA, 22 nt, synthetic construct
  source 1..22: mol_type = other RNA
gacaaaggttgcagtgagcaga

SEQ ID NO: 135704 - RNA, 22 nt, synthetic construct
  source 1..22: mol_type = other RNA
gacaaagtatgagaaatgtctg

SEQ ID NO: 135705 - RNA, 22 nt, synthetic construct
  source 1..22: mol_type = other RNA
gacaaataaaagcttatgatct

SEQ ID NO: 135706 - RNA, 22 nt, synthetic construct
  source 1..22: mol_type = other RNA
gacaaattaccatgtttccata

SEQ ID NO: 135707 - RNA, 22 nt, synthetic construct
  source 1..22: mol_type = other RNA
gacaacacattaataagatcat

SEQ ID NO: 135708 - RNA, 22 nt, synthetic construct
  source 1..22: mol_type = other RNA
gacaacagtgtgagaccgtgtc

SEQ ID NO: 135709 - RNA, 22 nt, synthetic construct
  source 1..22: mol_type = other RNA
gacaactgggagaatggcaagg

SEQ ID NO: 135710 - RNA, 22 nt, synthetic construct
  source 1..22: mol_type = other RNA
gacaagaatctttggcaaactt

SEQ ID NO: 135711 - RNA, 22 nt, synthetic construct
  source 1..22: mol_type = other RNA
gacaagacgtgtacataaaata

SEQ ID NO: 135712 - RNA, 22 nt, synthetic construct
  source 1..22: mol_type = other RNA
gacaagactaaaaaattagaca

SEQ ID NO: 135713 - RNA, 22 nt, synthetic construct
  source 1..22: mol_type = other RNA
gacaagactacctaaaacaatc

SEQ ID NO: 135714 - RNA, 22 nt, synthetic construct
  source 1..22: mol_type = other RNA
gacaagagcagaactccacctc

SEQ ID NO: 135715 - RNA, 22 nt, synthetic construct
  source 1..22: mol_type = other RNA
gacaagagtctgcagaccaaga

SEQ ID NO: 135716 - RNA, 22 nt, synthetic construct
  source 1..22: mol_type = other RNA
gacaagcaaggaagggcttgat

SEQ ID NO: 135717 - RNA, 22 nt, synthetic construct
  source 1..22: mol_type = other RNA
gacaagcacaggcatctctcta

SEQ ID NO: 135718 - RNA, 22 nt, synthetic construct
  source 1..22: mol_type = other RNA
gacaaggaaaggatggtttgat

SEQ ID NO: 135719 - RNA, 22 nt, synthetic construct
  source 1..22: mol_type = other RNA
gacaagtaaatgcaatgcaggc

SEQ ID NO: 135720 - RNA, 22 nt, synthetic construct
  source 1..22: mol_type = other RNA
gacaagtactgcatgattcccc

SEQ ID NO: 135721 - RNA, 22 nt, synthetic construct
  source 1..22: mol_type = other RNA
gacaagtagtacaaaagtgctg

SEQ ID NO: 135722 - RNA, 22 nt, synthetic construct
  source 1..22: mol_type = other RNA
gacaagtatattacaaaaagag

SEQ ID NO: 135723 - RNA, 22 nt, synthetic construct
  source 1..22: mol_type = other RNA
gacaagtgggtggatgggtgta

SEQ ID NO: 135724 - RNA, 22 nt, synthetic construct
  source 1..22: mol_type = other RNA
gacaagttcagcatcttcactg

SEQ ID NO: 135725 - RNA, 22 nt, synthetic construct
  source 1..22: mol_type = other RNA
gacaagttctcctgtgtgcatg

SEQ ID NO: 135726 - RNA, 22 nt, synthetic construct
  source 1..22: mol_type = other RNA
gacaagttcttacctcaaagga

SEQ ID NO: 135727 - RNA, 22 nt, synthetic construct
  source 1..22: mol_type = other RNA
gacaataaatggtgcaggccag

SEQ ID NO: 135728 - RNA, 22 nt, synthetic construct
  source 1..22: mol_type = other RNA
gacaataataactacacatcag

SEQ ID NO: 135729 - RNA, 22 nt, synthetic construct
  source 1..22: mol_type = other RNA
gacaataattcttcctgtcttg

SEQ ID NO: 135730 - RNA, 22 nt, synthetic construct
  source 1..22: mol_type = other RNA
gacaatactgttatgacaagac

SEQ ID NO: 135731 - RNA, 22 nt, synthetic construct
  source 1..22: mol_type = other RNA
gacaatagccaagacatggaaa

SEQ ID NO: 135732 - RNA, 22 nt, synthetic construct
  source 1..22: mol_type = other RNA
gacaatagctagtgtcttagtc

SEQ ID NO: 135733 - RNA, 22 nt, synthetic construct
  source 1..22: mol_type = other RNA
gacaatataggagactatcgtt

SEQ ID NO: 135734 - RNA, 22 nt, synthetic construct
  source 1..22: mol_type = other RNA
gacaatctctggggttagggcc

SEQ ID NO: 135735 - RNA, 22 nt, synthetic construct
  source 1..22: mol_type = other RNA
gacaatgccagggcgctcctct

SEQ ID NO: 135736 - RNA, 22 nt, synthetic construct
  source 1..22: mol_type = other RNA
gacaatgtctttggctcttaga

SEQ ID NO: 135737 - RNA, 22 nt, synthetic construct
  source 1..22: mol_type = other RNA
gacaatgtggagttggtgcaag

SEQ ID NO: 135738 - RNA, 22 nt, synthetic construct
  source 1..22: mol_type = other RNA
gacaattgaatggggatgcaac

SEQ ID NO: 135739 - RNA, 22 nt, synthetic construct
  source 1..22: mol_type = other RNA
gacaatttcagggagaattggt

SEQ ID NO: 135740 - RNA, 22 nt, synthetic construct
  source 1..22: mol_type = other RNA
gacaatttgccaaaatgatttt

SEQ ID NO: 135741 - RNA, 22 nt, synthetic construct
  source 1..22: mol_type = other RNA
gacacaaaagagctgggcccgc

SEQ ID NO: 135742 - RNA, 22 nt, synthetic construct
  source 1..22: mol_type = other RNA
gacacaaaatcagatatgaaag

SEQ ID NO: 135743 - RNA, 22 nt, synthetic construct
  source 1..22: mol_type = other RNA
gacacaaaggactggaactcat

SEQ ID NO: 135744 - RNA, 22 nt, synthetic construct
  source 1..22: mol_type = other RNA
gacacaaattatgactgagata

SEQ ID NO: 135745 - RNA, 22 nt, synthetic construct
  source 1..22: mol_type = other RNA
gacacaacttactactaaaaaa

SEQ ID NO: 135746 - RNA, 22 nt, synthetic construct
  source 1..22: mol_type = other RNA
gacacaaggaaggtcaaatggt

SEQ ID NO: 135747 - RNA, 22 nt, synthetic construct
  source 1..22: mol_type = other RNA
gacacacaatccaagtttctag

SEQ ID NO: 135748 - RNA, 22 nt, synthetic construct
  source 1..22: mol_type = other RNA
gacacacacagtcctgtgtttc

SEQ ID NO: 135749 - RNA, 22 nt, synthetic construct
  source 1..22: mol_type = other RNA
gacacacatcagacacctacat

SEQ ID NO: 135750 - RNA, 22 nt, synthetic construct
  source 1..22: mol_type = other RNA
gacacaccatgacagagttcca

SEQ ID NO: 135751 - RNA, 22 nt, synthetic construct
  source 1..22: mol_type = other RNA
gacacacgagtattcaagtttc

SEQ ID NO: 135752 - RNA, 22 nt, synthetic construct
  source 1..22: mol_type = other RNA
gacacactagctgacccactgg

SEQ ID NO: 135753 - RNA, 22 nt, synthetic construct
  source 1..22: mol_type = other RNA
gacacactgaaacaatcgcaat

SEQ ID NO: 135754 - RNA, 22 nt, synthetic construct
  source 1..22: mol_type = other RNA
gacacaggctgaagggaggaaa

SEQ ID NO: 135755 - RNA, 22 nt, synthetic construct
  source 1..22: mol_type = other RNA
gacacatactgaaagacagacc

SEQ ID NO: 135756 - RNA, 22 nt, synthetic construct
  source 1..22: mol_type = other RNA
gacacatttttgacagccacgt

SEQ ID NO: 135757 - RNA, 22 nt, synthetic construct
  source 1..22: mol_type = other RNA
gacaccaaaactacaggcaaca

SEQ ID NO: 135758 - RNA, 22 nt, synthetic construct
  source 1..22: mol_type = other RNA
gacaccagaactacacattcca

SEQ ID NO: 135759 - RNA, 22 nt, synthetic construct
  source 1..22: mol_type = other RNA
gacacccgaagaggacgatttt

SEQ ID NO: 135760 - RNA, 22 nt, synthetic construct
  source 1..22: mol_type = other RNA
gacacccgacccactagtgaag

SEQ ID NO: 135761 - RNA, 22 nt, synthetic construct
  source 1..22: mol_type = other RNA
gacaccgctccacgcccattag

SEQ ID NO: 135762 - RNA, 22 nt, synthetic construct
  source 1..22: mol_type = other RNA
gacacctacaatattaactttt

SEQ ID NO: 135763 - RNA, 22 nt, synthetic construct
  source 1..22: mol_type = other RNA
gacacctacattaatctcatcc

SEQ ID NO: 135764 - RNA, 22 nt, synthetic construct
  source 1..22: mol_type = other RNA
gacacctgaggggtcttatgct

SEQ ID NO: 135765 - RNA, 22 nt, synthetic construct
  source 1..22: mol_type = other RNA
gacacggtctcacactgttgtc

SEQ ID NO: 135766 - RNA, 22 nt, synthetic construct
  source 1..22: mol_type = other RNA
gacactaactttctattcccct

SEQ ID NO: 135767 - RNA, 22 nt, synthetic construct
  source 1..22: mol_type = other RNA
gacactagcaatccaggatctt

SEQ ID NO: 135768 - RNA, 22 nt, synthetic construct
  source 1..22: mol_type = other RNA
gacactagctattgtcttttct

SEQ ID NO: 135769 - RNA, 22 nt, synthetic construct
  source 1..22: mol_type = other RNA
gacactagggactggcctcggc

SEQ ID NO: 135770 - RNA, 22 nt, synthetic construct
  source 1..22: mol_type = other RNA
gacactattgagagtgaaaaca

SEQ ID NO: 135771 - RNA, 22 nt, synthetic construct
  source 1..22: mol_type = other RNA
gacactgcagatgaatgagcaa

SEQ ID NO: 135772 - RNA, 22 nt, synthetic construct
  source 1..22: mol_type = other RNA
gacactggaggtgcacattcca

SEQ ID NO: 135773 - RNA, 22 nt, synthetic construct
  source 1..22: mol_type = other RNA
gacactgggttctcaccaacat

SEQ ID NO: 135774 - RNA, 22 nt, synthetic construct
  source 1..22: mol_type = other RNA
gacagaaaatatctacaaatca

SEQ ID NO: 135775 - RNA, 22 nt, synthetic construct
  source 1..22: mol_type = other RNA
gacagaaataatacaaatgatg

SEQ ID NO: 135776 - RNA, 22 nt, synthetic construct
  source 1..22: mol_type = other RNA
gacagaaattcaacttggtaaa

SEQ ID NO: 135777 - RNA, 22 nt, synthetic construct
  source 1..22: mol_type = other RNA
gacagaacaaactcaagttccg

SEQ ID NO: 135778 - RNA, 22 nt, synthetic construct
  source 1..22: mol_type = other RNA
gacagaacaaataacaccatag

SEQ ID NO: 135779 - RNA, 22 nt, synthetic construct
  source 1..22: mol_type = other RNA
gacagaatcttactggtgttag

SEQ ID NO: 135780 - RNA, 22 nt, synthetic construct
  source 1..22: mol_type = other RNA
gacagaatgcatcttttaaaaa

SEQ ID NO: 135781 - RNA, 22 nt, synthetic construct
  source 1..22: mol_type = other RNA
gacagacatgcatgcacacaga

SEQ ID NO: 135782 - RNA, 22 nt, synthetic construct
  source 1..22: mol_type = other RNA
gacagacatttggaatagagag

SEQ ID NO: 135783 - RNA, 22 nt, synthetic construct
  source 1..22: mol_type = other RNA
gacagaccctggcttgtgacat

SEQ ID NO: 135784 - RNA, 22 nt, synthetic construct
  source 1..22: mol_type = other RNA
gacagacctctattaaatcatg

SEQ ID NO: 135785 - RNA, 22 nt, synthetic construct
  source 1..22: mol_type = other RNA
gacagactgcagttggattata

SEQ ID NO: 135786 - RNA, 22 nt, synthetic construct
  source 1..22: mol_type = other RNA
gacagagagagacctttcttta

SEQ ID NO: 135787 - RNA, 22 nt, synthetic construct
  source 1..22: mol_type = other RNA
gacagagcaacaacctgtctca

SEQ ID NO: 135788 - RNA, 22 nt, synthetic construct
  source 1..22: mol_type = other RNA
gacagagcagtaggcttagata

SEQ ID NO: 135789 - RNA, 22 nt, synthetic construct
  source 1..22: mol_type = other RNA
gacagagccgagcagaagggaa

SEQ ID NO: 135790 - RNA, 22 nt, synthetic construct
  source 1..22: mol_type = other RNA
gacagagctagaactagaatac

SEQ ID NO: 135791 - RNA, 22 nt, synthetic construct
  source 1..22: mol_type = other RNA
gacagagctccctctccctccc

SEQ ID NO: 135792 - RNA, 22 nt, synthetic construct
  source 1..22: mol_type = other RNA
gacagagtgaaactctggctca

SEQ ID NO: 135793 - RNA, 22 nt, synthetic construct
  source 1..22: mol_type = other RNA
gacagagttccacctccatcac

SEQ ID NO: 135794 - RNA, 22 nt, synthetic construct
  source 1..22: mol_type = other RNA
gacagatatatgcattcccatg

SEQ ID NO: 135795 - RNA, 22 nt, synthetic construct
  source 1..22: mol_type = other RNA
gacagatcccaaaaaggttttt

SEQ ID NO: 135796 - RNA, 22 nt, synthetic construct
  source 1..22: mol_type = other RNA
gacagatcttatggaatagttg

SEQ ID NO: 135797 - RNA, 22 nt, synthetic construct
  source 1..22: mol_type = other RNA
gacagatgagaaatacttggac

SEQ ID NO: 135798 - RNA, 22 nt, synthetic construct
  source 1..22: mol_type = other RNA
gacagatgagactcttaatatt

SEQ ID NO: 135799 - RNA, 22 nt, synthetic construct
  source 1..22: mol_type = other RNA
gacagatgtgcttaatcttcac

SEQ ID NO: 135800 - RNA, 22 nt, synthetic construct
  source 1..22: mol_type = other RNA
gacagattaaataccacctgaa

SEQ ID NO: 135801 - RNA, 22 nt, synthetic construct
  source 1..22: mol_type = other RNA
gacagattctctgtctctgttg

SEQ ID NO: 135802 - RNA, 22 nt, synthetic construct
  source 1..22: mol_type = other RNA
gacagcaaataaacaaaatcaa

SEQ ID NO: 135803 - RNA, 22 nt, synthetic construct
  source 1..22: mol_type = other RNA
gacagcacattaaataagggca

SEQ ID NO: 135804 - RNA, 22 nt, synthetic construct
  source 1..22: mol_type = other RNA
gacagcagataagatccaagta

SEQ ID NO: 135805 - RNA, 22 nt, synthetic construct
  source 1..22: mol_type = other RNA
gacagcaggaaaagctaccctc

SEQ ID NO: 135806 - RNA, 22 nt, synthetic construct
  source 1..22: mol_type = other RNA
gacagcatccccagaaagagag

SEQ ID NO: 135807 - RNA, 22 nt, synthetic construct
  source 1..22: mol_type = other RNA
gacagccacgtgtattgagtgt

SEQ ID NO: 135808 - RNA, 22 nt, synthetic construct
  source 1..22: mol_type = other RNA
gacagcctaaaccattttcaat

SEQ ID NO: 135809 - RNA, 22 nt, synthetic construct
  source 1..22: mol_type = other RNA
gacagcggggatggttgcacaa

SEQ ID NO: 135810 - RNA, 22 nt, synthetic construct
  source 1..22: mol_type = other RNA
gacagctaatatgctgtagtga

SEQ ID NO: 135811 - RNA, 22 nt, synthetic construct
  source 1..22: mol_type = other RNA
gacagctacggaggatgagggg

SEQ ID NO: 135812 - RNA, 22 nt, synthetic construct
  source 1..22: mol_type = other RNA
gacagctactaaacaaatcaga

SEQ ID NO: 135813 - RNA, 22 nt, synthetic construct
  source 1..22: mol_type = other RNA
gacagctcaattaagcaacctt

SEQ ID NO: 135814 - RNA, 22 nt, synthetic construct
  source 1..22: mol_type = other RNA
gacagctgagtagcgctttaag

SEQ ID NO: 135815 - RNA, 22 nt, synthetic construct
  source 1..22: mol_type = other RNA
gacagctgggagaaagctaatt

SEQ ID NO: 135816 - RNA, 22 nt, synthetic construct
  source 1..22: mol_type = other RNA
gacagcttccacccaagtggag

SEQ ID NO: 135817 - RNA, 22 nt, synthetic construct
  source 1..22: mol_type = other RNA
gacaggaagaattattgtctgc

SEQ ID NO: 135818 - RNA, 22 nt, synthetic construct
  source 1..22: mol_type = other RNA
gacaggacagagcagtaggctt

SEQ ID NO: 135819 - RNA, 22 nt, synthetic construct
  source 1..22: mol_type = other RNA
gacaggactccacagagttcag

SEQ ID NO: 135820 - RNA, 22 nt, synthetic construct
  source 1..22: mol_type = other RNA
gacaggatccagatgtagagaa

SEQ ID NO: 135821 - RNA, 22 nt, synthetic construct
  source 1..22: mol_type = other RNA
gacaggatcccggaacaggaaa

SEQ ID NO: 135822 - RNA, 22 nt, synthetic construct
  source 1..22: mol_type = other RNA
gacagggaatgcccctgtagca

SEQ ID NO: 135823 - RNA, 22 nt, synthetic construct
  source 1..22: mol_type = other RNA
gacagggaatggggagctagag

SEQ ID NO: 135824 - RNA, 22 nt, synthetic construct
  source 1..22: mol_type = other RNA
gacaggggacatgaaggaagga

SEQ ID NO: 135825 - RNA, 22 nt, synthetic construct
  source 1..22: mol_type = other RNA
gacagggtctcactcttaccaa

SEQ ID NO: 135826 - RNA, 22 nt, synthetic construct
  source 1..22: mol_type = other RNA
gacagggtcttgctctgtcacc

SEQ ID NO: 135827 - RNA, 22 nt, synthetic construct
  source 1..22: mol_type = other RNA
gacaggtagacatgagtaaaaa

SEQ ID NO: 135828 - RNA, 22 nt, synthetic construct
  source 1..22: mol_type = other RNA
gacaggtcacattctgcctgca

SEQ ID NO: 135829 - RNA, 22 nt, synthetic construct
  source 1..22: mol_type = other RNA
gacaggtgagtggactgtgagg

SEQ ID NO: 135830 - RNA, 22 nt, synthetic construct
  source 1..22: mol_type = other RNA
gacaggtggtatgggagatgtg

SEQ ID NO: 135831 - RNA, 22 nt, synthetic construct
  source 1..22: mol_type = other RNA
gacagtatgtcagactcattgc

SEQ ID NO: 135832 - RNA, 22 nt, synthetic construct
  source 1..22: mol_type = other RNA
gacagtattgtgctgaaacccc

SEQ ID NO: 135833 - RNA, 22 nt, synthetic construct
  source 1..22: mol_type = other RNA
gacagtcatcctcaacaagaga

SEQ ID NO: 135834 - RNA, 22 nt, synthetic construct
  source 1..22: mol_type = other RNA
gacagtcccttgcctgacagca

SEQ ID NO: 135835 - RNA, 22 nt, synthetic construct
  source 1..22: mol_type = other RNA
gacagtgagcatgctgcaactg

SEQ ID NO: 135836 - RNA, 22 nt, synthetic construct
  source 1..22: mol_type = other RNA
gacagtggacaaaggttccaat

SEQ ID NO: 135837 - RNA, 22 nt, synthetic construct
  source 1..22: mol_type = other RNA
gacagttactctaaaagaataa

SEQ ID NO: 135838 - RNA, 22 nt, synthetic construct
  source 1..22: mol_type = other RNA
gacagttattcttcagcaagga

SEQ ID NO: 135839 - RNA, 22 nt, synthetic construct
  source 1..22: mol_type = other RNA
gacagttctatttctttccatt

SEQ ID NO: 135840 - RNA, 22 nt, synthetic construct
  source 1..22: mol_type = other RNA
gacagttctgtgaatttgatta

SEQ ID NO: 135841 - RNA, 22 nt, synthetic construct
  source 1..22: mol_type = other RNA
gacagttggccttgaggtgaga

SEQ ID NO: 135842 - RNA, 22 nt, synthetic construct
  source 1..22: mol_type = other RNA
gacataactgtaaagtaatcaa

SEQ ID NO: 135843 - RNA, 22 nt, synthetic construct
  source 1..22: mol_type = other RNA
gacataagcattttctaaattg

SEQ ID NO: 135844 - RNA, 22 nt, synthetic construct
  source 1..22: mol_type = other RNA
gacataagggtctgttttacat

SEQ ID NO: 135845 - RNA, 22 nt, synthetic construct
  source 1..22: mol_type = other RNA
gacatactgtcacaggctttcc

SEQ ID NO: 135846 - RNA, 22 nt, synthetic construct
  source 1..22: mol_type = other RNA
gacatagatgaaactaaatgtg

SEQ ID NO: 135847 - RNA, 22 nt, synthetic construct
  source 1..22: mol_type = other RNA
gacatatcagggatcacagata

SEQ ID NO: 135848 - RNA, 22 nt, synthetic construct
  source 1..22: mol_type = other RNA
gacatatgccggctgttaggta

SEQ ID NO: 135849 - RNA, 22 nt, synthetic construct
  source 1..22: mol_type = other RNA
gacatatgttttgcttcgaagc

SEQ ID NO: 135850 - RNA, 22 nt, synthetic construct
  source 1..22: mol_type = other RNA
gacatcaagggtggtgctggac

SEQ ID NO: 135851 - RNA, 22 nt, synthetic construct
  source 1..22: mol_type = other RNA
gacatcacaatgcgtttgttag

SEQ ID NO: 135852 - RNA, 22 nt, synthetic construct
  source 1..22: mol_type = other RNA
gacatcactaagagtgaaaagg

SEQ ID NO: 135853 - RNA, 22 nt, synthetic construct
  source 1..22: mol_type = other RNA
gacatccacaacattgtgcaac

SEQ ID NO: 135854 - RNA, 22 nt, synthetic construct
  source 1..22: mol_type = other RNA
gacatcctgatttaggccactc

SEQ ID NO: 135855 - RNA, 22 nt, synthetic construct
  source 1..22: mol_type = other RNA
gacatcctttaatttgggtttg

SEQ ID NO: 135856 - RNA, 22 nt, synthetic construct
  source 1..22: mol_type = other RNA
gacatcctttgcgtctgtgatt

SEQ ID NO: 135857 - RNA, 22 nt, synthetic construct
  source 1..22: mol_type = other RNA
gacatctgagacatcacaatgc

SEQ ID NO: 135858 - RNA, 22 nt, synthetic construct
  source 1..22: mol_type = other RNA
gacatcttgcataactcgtaat

SEQ ID NO: 135859 - RNA, 22 nt, synthetic construct
  source 1..22: mol_type = other RNA
gacatctttcctgtgatttatg

SEQ ID NO: 135860 - RNA, 22 nt, synthetic construct
  source 1..22: mol_type = other RNA
gacatgaacaatccttctaatc

SEQ ID NO: 135861 - RNA, 22 nt, synthetic construct
  source 1..22: mol_type = other RNA
gacatgaaggaaggattggaat

SEQ ID NO: 135862 - RNA, 22 nt, synthetic construct
  source 1..22: mol_type = other RNA
gacatgacaggtgagtggactg

SEQ ID NO: 135863 - RNA, 22 nt, synthetic construct
  source 1..22: mol_type = other RNA
gacatgagagctaagggaagtt

SEQ ID NO: 135864 - RNA, 22 nt, synthetic construct
  source 1..22: mol_type = other RNA
gacatgaggaaagcaggttgca

SEQ ID NO: 135865 - RNA, 22 nt, synthetic construct
  source 1..22: mol_type = other RNA
gacatgagtaaaaagaaatctg

SEQ ID NO: 135866 - RNA, 22 nt, synthetic construct
  source 1..22: mol_type = other RNA
gacatgataaatacgtatatga

SEQ ID NO: 135867 - RNA, 22 nt, synthetic construct
  source 1..22: mol_type = other RNA
gacatgattgaggacttcatgt

SEQ ID NO: 135868 - RNA, 22 nt, synthetic construct
  source 1..22: mol_type = other RNA
gacatgcacgagaaaagcacag

SEQ ID NO: 135869 - RNA, 22 nt, synthetic construct
  source 1..22: mol_type = other RNA
gacatgcatgcacacagaggga

SEQ ID NO: 135870 - RNA, 22 nt, synthetic construct
  source 1..22: mol_type = other RNA
gacatgccacaccacatccagc

SEQ ID NO: 135871 - RNA, 22 nt, synthetic construct
  source 1..22: mol_type = other RNA
gacatgctctgataggataatg

SEQ ID NO: 135872 - RNA, 22 nt, synthetic construct
  source 1..22: mol_type = other RNA
gacatgctgaggccccagggga

SEQ ID NO: 135873 - RNA, 22 nt, synthetic construct
  source 1..22: mol_type = other RNA
gacatggaaacaacctaaatgt

SEQ ID NO: 135874 - RNA, 22 nt, synthetic construct
  source 1..22: mol_type = other RNA
gacatggagacagtgagcatgc

SEQ ID NO: 135875 - RNA, 22 nt, synthetic construct
  source 1..22: mol_type = other RNA
gacatgggctaaataaaacatt

SEQ ID NO: 135876 - RNA, 22 nt, synthetic construct
  source 1..22: mol_type = other RNA
gacatggttttcctactaacaa

SEQ ID NO: 135877 - RNA, 22 nt, synthetic construct
  source 1..22: mol_type = other RNA
gacatgtgtaaaacatctggaa

SEQ ID NO: 135878 - RNA, 22 nt, synthetic construct
  source 1..22: mol_type = other RNA
gacatgtgttttatttaggccc

SEQ ID NO: 135879 - RNA, 22 nt, synthetic construct
  source 1..22: mol_type = other RNA
gacatgttaggttgaaagttca

SEQ ID NO: 135880 - RNA, 22 nt, synthetic construct
  source 1..22: mol_type = other RNA
gacattacaattgataccatga

SEQ ID NO: 135881 - RNA, 22 nt, synthetic construct
  source 1..22: mol_type = other RNA
gacattagtggaaaaactgcag

SEQ ID NO: 135882 - RNA, 22 nt, synthetic construct
  source 1..22: mol_type = other RNA
gacattagtggtggtagtaagg

SEQ ID NO: 135883 - RNA, 22 nt, synthetic construct
  source 1..22: mol_type = other RNA
gacattatcctatcagagcatg

SEQ ID NO: 135884 - RNA, 22 nt, synthetic construct
  source 1..22: mol_type = other RNA
gacattattcttacagtgacat

SEQ ID NO: 135885 - RNA, 22 nt, synthetic construct
  source 1..22: mol_type = other RNA
gacattctgcttccttgctatg

SEQ ID NO: 135886 - RNA, 22 nt, synthetic construct
  source 1..22: mol_type = other RNA
gacattcttaccttctaaaatc

SEQ ID NO: 135887 - RNA, 22 nt, synthetic construct
  source 1..22: mol_type = other RNA
gacattggttattcatgtttgt

SEQ ID NO: 135888 - RNA, 22 nt, synthetic construct
  source 1..22: mol_type = other RNA
gacattgtcttacataggctta

SEQ ID NO: 135889 - RNA, 22 nt, synthetic construct
  source 1..22: mol_type = other RNA
gacatttctcatactttgtcag

SEQ ID NO: 135890 - RNA, 22 nt, synthetic construct
  source 1..22: mol_type = other RNA
gacatttgagggtgctgatcag

SEQ ID NO: 135891 - RNA, 22 nt, synthetic construct
  source 1..22: mol_type = other RNA
gacatttgcttttcctggaaaa

SEQ ID NO: 135892 - RNA, 22 nt, synthetic construct
  source 1..22: mol_type = other RNA
gacatttggaatagagagccca

SEQ ID NO: 135893 - RNA, 22 nt, synthetic construct
  source 1..22: mol_type = other RNA
gacatttgggaatgtggtcaca

SEQ ID NO: 135894 - RNA, 22 nt, synthetic construct
  source 1..22: mol_type = other RNA
gacattttatttatacaggtgc

SEQ ID NO: 135895 - RNA, 22 nt, synthetic construct
  source 1..22: mol_type = other RNA
gacatttttcaaatacctagtt

SEQ ID NO: 135896 - RNA, 22 nt, synthetic construct
  source 1..22: mol_type = other RNA
gaccaaaacaaaaaacaaaccc

SEQ ID NO: 135897 - RNA, 22 nt, synthetic construct
  source 1..22: mol_type = other RNA
gaccaaaatggagacccatact

SEQ ID NO: 135898 - RNA, 22 nt, synthetic construct
  source 1..22: mol_type = other RNA
gaccaaacatgtgaggatttat

SEQ ID NO: 135899 - RNA, 22 nt, synthetic construct
  source 1..22: mol_type = other RNA
gaccaactatttcactaaataa

SEQ ID NO: 135900 - RNA, 22 nt, synthetic construct
  source 1..22: mol_type = other RNA
gaccaactttaagcaaaatttt

SEQ ID NO: 135901 - RNA, 22 nt, synthetic construct
  source 1..22: mol_type = other RNA
gaccaagaaaggacttcagtcc

SEQ ID NO: 135902 - RNA, 22 nt, synthetic construct
  source 1..22: mol_type = other RNA
gaccaagaattttccattcatg

SEQ ID NO: 135903 - RNA, 22 nt, synthetic construct
  source 1..22: mol_type = other RNA
gaccaagagtgtggctttaagg

SEQ ID NO: 135904 - RNA, 22 nt, synthetic construct
  source 1..22: mol_type = other RNA
gaccaagttactagaagcactt

SEQ ID NO: 135905 - RNA, 22 nt, synthetic construct
  source 1..22: mol_type = other RNA
gaccaagtttaaccaattatgc

SEQ ID NO: 135906 - RNA, 22 nt, synthetic construct
  source 1..22: mol_type = other RNA
gaccaatttaccatctgacata

SEQ ID NO: 135907 - RNA, 22 nt, synthetic construct
  source 1..22: mol_type = other RNA
gaccacaaggattaatctttct

SEQ ID NO: 135908 - RNA, 22 nt, synthetic construct
  source 1..22: mol_type = other RNA
gaccacaatcttacccccatca

SEQ ID NO: 135909 - RNA, 22 nt, synthetic construct
  source 1..22: mol_type = other RNA
gaccacaggctctcttcaccaa

SEQ ID NO: 135910 - RNA, 22 nt, synthetic construct
  source 1..22: mol_type = other RNA
gaccacagtttgaaactttaag

SEQ ID NO: 135911 - RNA, 22 nt, synthetic construct
  source 1..22: mol_type = other RNA
gaccacattcccaaatgtctta

SEQ ID NO: 135912 - RNA, 22 nt, synthetic construct
  source 1..22: mol_type = other RNA
gaccaccacacttgcttgggaa

SEQ ID NO: 135913 - RNA, 22 nt, synthetic construct
  source 1..22: mol_type = other RNA
gaccagatcaaacgtgctttcc

SEQ ID NO: 135914 - RNA, 22 nt, synthetic construct
  source 1..22: mol_type = other RNA
gaccagatgcgtggttcacacc

SEQ ID NO: 135915 - RNA, 22 nt, synthetic construct
  source 1..22: mol_type = other RNA
gaccagcagttcaagcaccact

SEQ ID NO: 135916 - RNA, 22 nt, synthetic construct
  source 1..22: mol_type = other RNA
gaccagcctggccaacatcgta

SEQ ID NO: 135917 - RNA, 22 nt, synthetic construct
  source 1..22: mol_type = other RNA
gaccagcttgggcaagagagca

SEQ ID NO: 135918 - RNA, 22 nt, synthetic construct
  source 1..22: mol_type = other RNA
gaccaggagttcttatgaggtt

SEQ ID NO: 135919 - RNA, 22 nt, synthetic construct
  source 1..22: mol_type = other RNA
gaccaggcagtcctctcactcc

SEQ ID NO: 135920 - RNA, 22 nt, synthetic construct
  source 1..22: mol_type = other RNA
gaccaggggaaggagtctgccc

SEQ ID NO: 135921 - RNA, 22 nt, synthetic construct
  source 1..22: mol_type = other RNA
gaccaggtatggcgactcatgc

SEQ ID NO: 135922 - RNA, 22 nt, synthetic construct
  source 1..22: mol_type = other RNA
gaccagtgtgatgggggtaaga

SEQ ID NO: 135923 - RNA, 22 nt, synthetic construct
  source 1..22: mol_type = other RNA
gaccagttactctctctgcctc

SEQ ID NO: 135924 - RNA, 22 nt, synthetic construct
  source 1..22: mol_type = other RNA
gaccagttaggaagccactgca

SEQ ID NO: 135925 - RNA, 22 nt, synthetic construct
  source 1..22: mol_type = other RNA
gaccataatatatttcacaatc

SEQ ID NO: 135926 - RNA, 22 nt, synthetic construct
  source 1..22: mol_type = other RNA
gaccataggcacgcgcccccat

SEQ ID NO: 135927 - RNA, 22 nt, synthetic construct
  source 1..22: mol_type = other RNA
gaccatataatctaaccctcct

SEQ ID NO: 135928 - RNA, 22 nt, synthetic construct
  source 1..22: mol_type = other RNA
gaccatctcagcacagagccga

SEQ ID NO: 135929 - RNA, 22 nt, synthetic construct
  source 1..22: mol_type = other RNA
gaccatctgttaaaagatacga

SEQ ID NO: 135930 - RNA, 22 nt, synthetic construct
  source 1..22: mol_type = other RNA
gaccatgggacaagtgggtgga

SEQ ID NO: 135931 - RNA, 22 nt, synthetic construct
  source 1..22: mol_type = other RNA
gaccatgttttaggagtcaact

SEQ ID NO: 135932 - RNA, 22 nt, synthetic construct
  source 1..22: mol_type = other RNA
gaccattagcagttctgtaccc

SEQ ID NO: 135933 - RNA, 22 nt, synthetic construct
  source 1..22: mol_type = other RNA
gaccattccacgctgtggcttg

SEQ ID NO: 135934 - RNA, 22 nt, synthetic construct
  source 1..22: mol_type = other RNA
gaccattgtgtggacacactga

SEQ ID NO: 135935 - RNA, 22 nt, synthetic construct
  source 1..22: mol_type = other RNA
gaccatttttatatctttggaa

SEQ ID NO: 135936 - RNA, 22 nt, synthetic construct
  source 1..22: mol_type = other RNA
gacccaaagcaaaagcaaaatt

SEQ ID NO: 135937 - RNA, 22 nt, synthetic construct
  source 1..22: mol_type = other RNA
gacccaatcatgttctttatag

SEQ ID NO: 135938 - RNA, 22 nt, synthetic construct
  source 1..22: mol_type = other RNA
gacccactagtgaagtcccatc

SEQ ID NO: 135939 - RNA, 22 nt, synthetic construct
  source 1..22: mol_type = other RNA
gacccactggtttcagtccctc

SEQ ID NO: 135940 - RNA, 22 nt, synthetic construct
  source 1..22: mol_type = other RNA
gacccagagcctaatgtgtaag

SEQ ID NO: 135941 - RNA, 22 nt, synthetic construct
  source 1..22: mol_type = other RNA
gacccagtggctagtgtgttga

SEQ ID NO: 135942 - RNA, 22 nt, synthetic construct
  source 1..22: mol_type = other RNA
gacccataaactgaacatttat

SEQ ID NO: 135943 - RNA, 22 nt, synthetic construct
  source 1..22: mol_type = other RNA
gacccatactcagccccctcga

SEQ ID NO: 135944 - RNA, 22 nt, synthetic construct
  source 1..22: mol_type = other RNA
gacccatgcccatgtgcattat

SEQ ID NO: 135945 - RNA, 22 nt, synthetic construct
  source 1..22: mol_type = other RNA
gaccccagtagaaatcttccag

SEQ ID NO: 135946 - RNA, 22 nt, synthetic construct
  source 1..22: mol_type = other RNA
gaccccatctctaccaaaatat

SEQ ID NO: 135947 - RNA, 22 nt, synthetic construct
  source 1..22: mol_type = other RNA
gaccccctgggctcaagccatc

SEQ ID NO: 135948 - RNA, 22 nt, synthetic construct
  source 1..22: mol_type = other RNA
gaccccgtacgctccctcgcgc

SEQ ID NO: 135949 - RNA, 22 nt, synthetic construct
  source 1..22: mol_type = other RNA
gaccccgtctctgcaaaaaatg

SEQ ID NO: 135950 - RNA, 22 nt, synthetic construct
  source 1..22: mol_type = other RNA
gacccctcaggtgtcactggat

SEQ ID NO: 135951 - RNA, 22 nt, synthetic construct
  source 1..22: mol_type = other RNA
gacccctccctgctttaaaaca

SEQ ID NO: 135952 - RNA, 22 nt, synthetic construct
  source 1..22: mol_type = other RNA
gacccgggaggcagatgttgcg

SEQ ID NO: 135953 - RNA, 22 nt, synthetic construct
  source 1..22: mol_type = other RNA
gaccctgagtccagaggtgagc

SEQ ID NO: 135954 - RNA, 22 nt, synthetic construct
  source 1..22: mol_type = other RNA
gaccctgctatgcatactttgg

SEQ ID NO: 135955 - RNA, 22 nt, synthetic construct
  source 1..22: mol_type = other RNA
gaccctggcttgtgacatcaag

SEQ ID NO: 135956 - RNA, 22 nt, synthetic construct
  source 1..22: mol_type = other RNA
gaccctgtctctaaaaaatacc

SEQ ID NO: 135957 - RNA, 22 nt, synthetic construct
  source 1..22: mol_type = other RNA
gaccctgttagtcccctagtgg

SEQ ID NO: 135958 - RNA, 22 nt, synthetic construct
  source 1..22: mol_type = other RNA
gacccttaccttaaaccatata

SEQ ID NO: 135959 - RNA, 22 nt, synthetic construct
  source 1..22: mol_type = other RNA
gacccttatgtccagcccccag

SEQ ID NO: 135960 - RNA, 22 nt, synthetic construct
  source 1..22: mol_type = other RNA
gaccctttatcggataaggaag

SEQ ID NO: 135961 - RNA, 22 nt, synthetic construct
  source 1..22: mol_type = other RNA
gaccctttattcaaagatcatt

SEQ ID NO: 135962 - RNA, 22 nt, synthetic construct
  source 1..22: mol_type = other RNA
gaccctttgaagtatgtaatta

SEQ ID NO: 135963 - RNA, 22 nt, synthetic construct
  source 1..22: mol_type = other RNA
gaccgagatacttaagttttta

SEQ ID NO: 135964 - RNA, 22 nt, synthetic construct
  source 1..22: mol_type = other RNA
gaccgaggaaacccgctctggg

SEQ ID NO: 135965 - RNA, 22 nt, synthetic construct
  source 1..22: mol_type = other RNA
gaccgcaagagttccaactgta

SEQ ID NO: 135966 - RNA, 22 nt, synthetic construct
  source 1..22: mol_type = other RNA
gaccgctttcgtgagggtttca

SEQ ID NO: 135967 - RNA, 22 nt, synthetic construct
  source 1..22: mol_type = other RNA
gaccggatgaggtggctcacgc

SEQ ID NO: 135968 - RNA, 22 nt, synthetic construct
  source 1..22: mol_type = other RNA
gaccggggactgcaacagatct

SEQ ID NO: 135969 - RNA, 22 nt, synthetic construct
  source 1..22: mol_type = other RNA
gacctaaaatcttattccccag

SEQ ID NO: 135970 - RNA, 22 nt, synthetic construct
  source 1..22: mol_type = other RNA
gacctaaagttttaagaaaaga

SEQ ID NO: 135971 - RNA, 22 nt, synthetic construct
  source 1..22: mol_type = other RNA
gacctaagcttaagagctaaga

SEQ ID NO: 135972 - RNA, 22 nt, synthetic construct
  source 1..22: mol_type = other RNA
gacctaagcttgggtaggaagc

SEQ ID NO: 135973 - RNA, 22 nt, synthetic construct
  source 1..22: mol_type = other RNA
gacctactaaaagttgacaaat

SEQ ID NO: 135974 - RNA, 22 nt, synthetic construct
  source 1..22: mol_type = other RNA
gacctatctattaacagaaggg

SEQ ID NO: 135975 - RNA, 22 nt, synthetic construct
  source 1..22: mol_type = other RNA
gacctcaaattaatcagtctgt

SEQ ID NO: 135976 - RNA, 22 nt, synthetic construct
  source 1..22: mol_type = other RNA
gacctcaaattctgagggaaat

SEQ ID NO: 135977 - RNA, 22 nt, synthetic construct
  source 1..22: mol_type = other RNA
gacctcaagcgatccagccgcc

SEQ ID NO: 135978 - RNA, 22 nt, synthetic construct
  source 1..22: mol_type = other RNA
gacctcaggcagtctagtccat

SEQ ID NO: 135979 - RNA, 22 nt, synthetic construct
  source 1..22: mol_type = other RNA
gacctcaggtttagaatatatt

SEQ ID NO: 135980 - RNA, 22 nt, synthetic construct
  source 1..22: mol_type = other RNA
gacctcagtggtagttacacaa

SEQ ID NO: 135981 - RNA, 22 nt, synthetic construct
  source 1..22: mol_type = other RNA
gacctcatctctgcaaaacatt

SEQ ID NO: 135982 - RNA, 22 nt, synthetic construct
  source 1..22: mol_type = other RNA
gacctcatcttagccgggagga

SEQ ID NO: 135983 - RNA, 22 nt, synthetic construct
  source 1..22: mol_type = other RNA
gacctcatgtaactaattactg

SEQ ID NO: 135984 - RNA, 22 nt, synthetic construct
  source 1..22: mol_type = other RNA
gacctccagcgctaagcactgc

SEQ ID NO: 135985 - RNA, 22 nt, synthetic construct
  source 1..22: mol_type = other RNA
gacctcccaaaggactgggatc

SEQ ID NO: 135986 - RNA, 22 nt, synthetic construct
  source 1..22: mol_type = other RNA
gacctcctagattgaccttcta

SEQ ID NO: 135987 - RNA, 22 nt, synthetic construct
  source 1..22: mol_type = other RNA
gacctcctcccacttacatcag

SEQ ID NO: 135988 - RNA, 22 nt, synthetic construct
  source 1..22: mol_type = other RNA
gacctcgaagcacaaccactga

SEQ ID NO: 135989 - RNA, 22 nt, synthetic construct
  source 1..22: mol_type = other RNA
gacctctattaaatcatgatgt

SEQ ID NO: 135990 - RNA, 22 nt, synthetic construct
  source 1..22: mol_type = other RNA
gacctctgaagagtctatcttt

SEQ ID NO: 135991 - RNA, 22 nt, synthetic construct
  source 1..22: mol_type = other RNA
gacctctgcagttagcatgcct

SEQ ID NO: 135992 - RNA, 22 nt, synthetic construct
  source 1..22: mol_type = other RNA
gacctgaagactggatttgatt

SEQ ID NO: 135993 - RNA, 22 nt, synthetic construct
  source 1..22: mol_type = other RNA
gacctgaatgactgttgcctct

SEQ ID NO: 135994 - RNA, 22 nt, synthetic construct
  source 1..22: mol_type = other RNA
gacctgattcttccactagtgg

SEQ ID NO: 135995 - RNA, 22 nt, synthetic construct
  source 1..22: mol_type = other RNA
gacctgcacaaaggattgggaa

SEQ ID NO: 135996 - RNA, 22 nt, synthetic construct
  source 1..22: mol_type = other RNA
gacctgcagtctgcaggcagaa

SEQ ID NO: 135997 - RNA, 22 nt, synthetic construct
  source 1..22: mol_type = other RNA
gacctgccagagttggcacagc

SEQ ID NO: 135998 - RNA, 22 nt, synthetic construct
  source 1..22: mol_type = other RNA
gacctgctttcttggggctcta

SEQ ID NO: 135999 - RNA, 22 nt, synthetic construct
  source 1..22: mol_type = other RNA
gacctggaaattattcaatatg

SEQ ID NO: 136000 - RNA, 22 nt, synthetic construct
  source 1..22: mol_type = other RNA
gacctgggagaaagaccaagag

SEQ ID NO: 136001 - RNA, 22 nt, synthetic construct
  source 1..22: mol_type = other RNA
gacctggtactctatgatatat

SEQ ID NO: 136002 - RNA, 22 nt, synthetic construct
  source 1..22: mol_type = other RNA
gacctgtaatttttctcttttt

SEQ ID NO: 136003 - RNA, 22 nt, synthetic construct
  source 1..22: mol_type = other RNA
gacctgtagattgggcttttca

SEQ ID NO: 136004 - RNA, 22 nt, synthetic construct
  source 1..22: mol_type = other RNA
gacctgtccttgtgttttattt

SEQ ID NO: 136005 - RNA, 22 nt, synthetic construct
  source 1..22: mol_type = other RNA
gaccttagtggttgacccataa

SEQ ID NO: 136006 - RNA, 22 nt, synthetic construct
  source 1..22: mol_type = other RNA
gaccttagttttcacttttgtg

SEQ ID NO: 136007 - RNA, 22 nt, synthetic construct
  source 1..22: mol_type = other RNA
gaccttattcaaataattgctg

SEQ ID NO: 136008 - RNA, 22 nt, synthetic construct
  source 1..22: mol_type = other RNA
gaccttatttggaaatatggtc

SEQ ID NO: 136009 - RNA, 22 nt, synthetic construct
  source 1..22: mol_type = other RNA
gaccttccttgtgtcttaaatt

SEQ ID NO: 136010 - RNA, 22 nt, synthetic construct
  source 1..22: mol_type = other RNA
gaccttctacttatcttttcta

SEQ ID NO: 136011 - RNA, 22 nt, synthetic construct
  source 1..22: mol_type = other RNA
gaccttgacaataaatggtgca

SEQ ID NO: 136012 - RNA, 22 nt, synthetic construct
  source 1..22: mol_type = other RNA
gaccttgctcattcatctgcag

SEQ ID NO: 136013 - RNA, 22 nt, synthetic construct
  source 1..22: mol_type = other RNA
gaccttgtatccagtaatcttg

SEQ ID NO: 136014 - RNA, 22 nt, synthetic construct
  source 1..22: mol_type = other RNA
gaccttgtgcatgtgcaggaaa

SEQ ID NO: 136015 - RNA, 22 nt, synthetic construct
  source 1..22: mol_type = other RNA
gacctttcttaggtttctcatt

SEQ ID NO: 136016 - RNA, 22 nt, synthetic construct
  source 1..22: mol_type = other RNA
gacgaaagtgaagcccagagag

SEQ ID NO: 136017 - RNA, 22 nt, synthetic construct
  source 1..22: mol_type = other RNA
gacgaagtcacattctagtgat

SEQ ID NO: 136018 - RNA, 22 nt, synthetic construct
  source 1..22: mol_type = other RNA
gacgaatgcatgggaggtaata

SEQ ID NO: 136019 - RNA, 22 nt, synthetic construct
  source 1..22: mol_type = other RNA
gacgacgtatgcaacttactct

SEQ ID NO: 136020 - RNA, 22 nt, synthetic construct
  source 1..22: mol_type = other RNA
gacgatattcctatcagaagca

SEQ ID NO: 136021 - RNA, 22 nt, synthetic construct
  source 1..22: mol_type = other RNA
gacgatttttccaacagtttac

SEQ ID NO: 136022 - RNA, 22 nt, synthetic construct
  source 1..22: mol_type = other RNA
gacgcaaaggatgtcaacaaaa

SEQ ID NO: 136023 - RNA, 22 nt, synthetic construct
  source 1..22: mol_type = other RNA
gacgcaggcaaacagcgccact

SEQ ID NO: 136024 - RNA, 22 nt, synthetic construct
  source 1..22: mol_type = other RNA
gacgcctttcatttggcctctg

SEQ ID NO: 136025 - RNA, 22 nt, synthetic construct
  source 1..22: mol_type = other RNA
gacgcgcaacaattcaacagct

SEQ ID NO: 136026 - RNA, 22 nt, synthetic construct
  source 1..22: mol_type = other RNA
gacgcgcattttttaagtggcg

SEQ ID NO: 136027 - RNA, 22 nt, synthetic construct
  source 1..22: mol_type = other RNA
gacgctcttgttcaaaaacctt

SEQ ID NO: 136028 - RNA, 22 nt, synthetic construct
  source 1..22: mol_type = other RNA
gacgctgatgacagttactcta

SEQ ID NO: 136029 - RNA, 22 nt, synthetic construct
  source 1..22: mol_type = other RNA
gacggaaaaacattctacagta

SEQ ID NO: 136030 - RNA, 22 nt, synthetic construct
  source 1..22: mol_type = other RNA
gacggaagactcatacttcctg

SEQ ID NO: 136031 - RNA, 22 nt, synthetic construct
  source 1..22: mol_type = other RNA
gacggaatcttaccctgttgac

SEQ ID NO: 136032 - RNA, 22 nt, synthetic construct
  source 1..22: mol_type = other RNA
gacggcgagcttgatctttact

SEQ ID NO: 136033 - RNA, 22 nt, synthetic construct
  source 1..22: mol_type = other RNA
gacggcgtttcgccatgttggc

SEQ ID NO: 136034 - RNA, 22 nt, synthetic construct
  source 1..22: mol_type = other RNA
gacggctcaggcctgttgtgag

SEQ ID NO: 136035 - RNA, 22 nt, synthetic construct
  source 1..22: mol_type = other RNA
gacgggtggtagggagggggct

SEQ ID NO: 136036 - RNA, 22 nt, synthetic construct
  source 1..22: mol_type = other RNA
gacgtatgcaacttactctcaa

SEQ ID NO: 136037 - RNA, 22 nt, synthetic construct
  source 1..22: mol_type = other RNA
gacgtgagatcatgccactcca

SEQ ID NO: 136038 - RNA, 22 nt, synthetic construct
  source 1..22: mol_type = other RNA
gacgtgagccaccgcacctggc

SEQ ID NO: 136039 - RNA, 22 nt, synthetic construct
  source 1..22: mol_type = other RNA
gacgtgtacataaaataaaaac

SEQ ID NO: 136040 - RNA, 22 nt, synthetic construct
  source 1..22: mol_type = other RNA
gacgttcagataacaaagggtt

SEQ ID NO: 136041 - RNA, 22 nt, synthetic construct
  source 1..22: mol_type = other RNA
gacgtttgagttgtttccactt

SEQ ID NO: 136042 - RNA, 22 nt, synthetic construct
  source 1..22: mol_type = other RNA
gactaacagggtctacaaaagg

SEQ ID NO: 136043 - RNA, 22 nt, synthetic construct
  source 1..22: mol_type = other RNA
gactaagaaaaacagaagacac

SEQ ID NO: 136044 - RNA, 22 nt, synthetic construct
  source 1..22: mol_type = other RNA
gactaagacactagctattgtc

SEQ ID NO: 136045 - RNA, 22 nt, synthetic construct
  source 1..22: mol_type = other RNA
gactaagcagaaatgacaagta

SEQ ID NO: 136046 - RNA, 22 nt, synthetic construct
  source 1..22: mol_type = other RNA
gactaatatgagttcctgcttc

SEQ ID NO: 136047 - RNA, 22 nt, synthetic construct
  source 1..22: mol_type = other RNA
gactaatttgaggcattagtga

SEQ ID NO: 136048 - RNA, 22 nt, synthetic construct
  source 1..22: mol_type = other RNA
gactacacatacacagggaaaa

SEQ ID NO: 136049 - RNA, 22 nt, synthetic construct
  source 1..22: mol_type = other RNA
gactacactgaagggaatttta

SEQ ID NO: 136050 - RNA, 22 nt, synthetic construct
  source 1..22: mol_type = other RNA
gactacaggtgtgaaccacgca

SEQ ID NO: 136051 - RNA, 22 nt, synthetic construct
  source 1..22: mol_type = other RNA
gactacagtcacacaccactac

SEQ ID NO: 136052 - RNA, 22 nt, synthetic construct
  source 1..22: mol_type = other RNA
gactaccaattctccctgaaat

SEQ ID NO: 136053 - RNA, 22 nt, synthetic construct
  source 1..22: mol_type = other RNA
gactaccatctctccaacagaa

SEQ ID NO: 136054 - RNA, 22 nt, synthetic construct
  source 1..22: mol_type = other RNA
gactacctaaaacaatctacag

SEQ ID NO: 136055 - RNA, 22 nt, synthetic construct
  source 1..22: mol_type = other RNA
gactagaagaaatgttaacaat

SEQ ID NO: 136056 - RNA, 22 nt, synthetic construct
  source 1..22: mol_type = other RNA
gactagactgcctgaggtctca

SEQ ID NO: 136057 - RNA, 22 nt, synthetic construct
  source 1..22: mol_type = other RNA
gactaggctcctgagaaccgga

SEQ ID NO: 136058 - RNA, 22 nt, synthetic construct
  source 1..22: mol_type = other RNA
gactagtacactgttgatttag

SEQ ID NO: 136059 - RNA, 22 nt, synthetic construct
  source 1..22: mol_type = other RNA
gactagtacgtgcagagcaggg

SEQ ID NO: 136060 - RNA, 22 nt, synthetic construct
  source 1..22: mol_type = other RNA
gactagtggctcatacttgctt

SEQ ID NO: 136061 - RNA, 22 nt, synthetic construct
  source 1..22: mol_type = other RNA
gactagtgtgaatgaggagtga

SEQ ID NO: 136062 - RNA, 22 nt, synthetic construct
  source 1..22: mol_type = other RNA
gactataaaactcttagcttag

SEQ ID NO: 136063 - RNA, 22 nt, synthetic construct
  source 1..22: mol_type = other RNA
gactatcacgattctgacccag

SEQ ID NO: 136064 - RNA, 22 nt, synthetic construct
  source 1..22: mol_type = other RNA
gactatcgttatatcctcaggg

SEQ ID NO: 136065 - RNA, 22 nt, synthetic construct
  source 1..22: mol_type = other RNA
gactatctcttcctcctctgga

SEQ ID NO: 136066 - RNA, 22 nt, synthetic construct
  source 1..22: mol_type = other RNA
gactatgaaaagcctcaaacga

SEQ ID NO: 136067 - RNA, 22 nt, synthetic construct
  source 1..22: mol_type = other RNA
gactatgagaaggattagtgtt

SEQ ID NO: 136068 - RNA, 22 nt, synthetic construct
  source 1..22: mol_type = other RNA
gactatgtaggcacattcaagc

SEQ ID NO: 136069 - RNA, 22 nt, synthetic construct
  source 1..22: mol_type = other RNA
gactattatgagcagttgtatg

SEQ ID NO: 136070 - RNA, 22 nt, synthetic construct
  source 1..22: mol_type = other RNA
gactattttaccctcattttat

SEQ ID NO: 136071 - RNA, 22 nt, synthetic construct
  source 1..22: mol_type = other RNA
gactcaacatgtgtatttaggg

SEQ ID NO: 136072 - RNA, 22 nt, synthetic construct
  source 1..22: mol_type = other RNA
gactcaagcctgataagctccc

SEQ ID NO: 136073 - RNA, 22 nt, synthetic construct
  source 1..22: mol_type = other RNA
gactcaataaccacatgtggct

SEQ ID NO: 136074 - RNA, 22 nt, synthetic construct
  source 1..22: mol_type = other RNA
gactcaatcttcttatttgtta

SEQ ID NO: 136075 - RNA, 22 nt, synthetic construct
  source 1..22: mol_type = other RNA
gactcacagcttaccaagtgcc

SEQ ID NO: 136076 - RNA, 22 nt, synthetic construct
  source 1..22: mol_type = other RNA
gactcagcagttttaaagaatt

SEQ ID NO: 136077 - RNA, 22 nt, synthetic construct
  source 1..22: mol_type = other RNA
gactcagggtcacttcctctct

SEQ ID NO: 136078 - RNA, 22 nt, synthetic construct
  source 1..22: mol_type = other RNA
gactcagtacttccctctttct

SEQ ID NO: 136079 - RNA, 22 nt, synthetic construct
  source 1..22: mol_type = other RNA
gactcatgagagctgtgccgag

SEQ ID NO: 136080 - RNA, 22 nt, synthetic construct
  source 1..22: mol_type = other RNA
gactcattccaatccttccttc

SEQ ID NO: 136081 - RNA, 22 nt, synthetic construct
  source 1..22: mol_type = other RNA
gactcattgcctatagacagca

SEQ ID NO: 136082 - RNA, 22 nt, synthetic construct
  source 1..22: mol_type = other RNA
gactccaaagcaaaccagacat

SEQ ID NO: 136083 - RNA, 22 nt, synthetic construct
  source 1..22: mol_type = other RNA
gactccaactcaaaaaagaaaa

SEQ ID NO: 136084 - RNA, 22 nt, synthetic construct
  source 1..22: mol_type = other RNA
gactccaagcacacagtttgag

SEQ ID NO: 136085 - RNA, 22 nt, synthetic construct
  source 1..22: mol_type = other RNA
gactccacagagttcagcttac

SEQ ID NO: 136086 - RNA, 22 nt, synthetic construct
  source 1..22: mol_type = other RNA
gactccaccctgccccttatcc

SEQ ID NO: 136087 - RNA, 22 nt, synthetic construct
  source 1..22: mol_type = other RNA
gactccatctcaagaaaacaag

SEQ ID NO: 136088 - RNA, 22 nt, synthetic construct
  source 1..22: mol_type = other RNA
gactcccaacttataatattaa

SEQ ID NO: 136089 - RNA, 22 nt, synthetic construct
  source 1..22: mol_type = other RNA
gactcccatatctacatgtacg

SEQ ID NO: 136090 - RNA, 22 nt, synthetic construct
  source 1..22: mol_type = other RNA
gactccctttttaggtagggat

SEQ ID NO: 136091 - RNA, 22 nt, synthetic construct
  source 1..22: mol_type = other RNA
gactccggcgggagaggagcgc

SEQ ID NO: 136092 - RNA, 22 nt, synthetic construct
  source 1..22: mol_type = other RNA
gactcctaaaacatggtccaca

SEQ ID NO: 136093 - RNA, 22 nt, synthetic construct
  source 1..22: mol_type = other RNA
gactccttcccctggtcgagct

SEQ ID NO: 136094 - RNA, 22 nt, synthetic construct
  source 1..22: mol_type = other RNA
gactccttctgaaggcactaac

SEQ ID NO: 136095 - RNA, 22 nt, synthetic construct
  source 1..22: mol_type = other RNA
gactcggtctcaaaacaaacaa

SEQ ID NO: 136096 - RNA, 22 nt, synthetic construct
  source 1..22: mol_type = other RNA
gactctaaactagttcaaccat

SEQ ID NO: 136097 - RNA, 22 nt, synthetic construct
  source 1..22: mol_type = other RNA
gactctaaagtctatgctcttg

SEQ ID NO: 136098 - RNA, 22 nt, synthetic construct
  source 1..22: mol_type = other RNA
gactctcaagaaggtatcatcg

SEQ ID NO: 136099 - RNA, 22 nt, synthetic construct
  source 1..22: mol_type = other RNA
gactctgctcaaaggggcattc

SEQ ID NO: 136100 - RNA, 22 nt, synthetic construct
  source 1..22: mol_type = other RNA
gactctgtgcttgtgcttttaa

SEQ ID NO: 136101 - RNA, 22 nt, synthetic construct
  source 1..22: mol_type = other RNA
gactcttaatattgaaacgatg

SEQ ID NO: 136102 - RNA, 22 nt, synthetic construct
  source 1..22: mol_type = other RNA
gactcttatggctataaccacg

SEQ ID NO: 136103 - RNA, 22 nt, synthetic construct
  source 1..22: mol_type = other RNA
gactcttcagaggtctgttact

SEQ ID NO: 136104 - RNA, 22 nt, synthetic construct
  source 1..22: mol_type = other RNA
gactcttgtcccggcatgcctc

SEQ ID NO: 136105 - RNA, 22 nt, synthetic construct
  source 1..22: mol_type = other RNA
gactgaaaagatacagaaataa

SEQ ID NO: 136106 - RNA, 22 nt, synthetic construct
  source 1..22: mol_type = other RNA
gactgaaaccagtgggtcagct

SEQ ID NO: 136107 - RNA, 22 nt, synthetic construct
  source 1..22: mol_type = other RNA
gactgaaaggaaatgagtgtat

SEQ ID NO: 136108 - RNA, 22 nt, synthetic construct
  source 1..22: mol_type = other RNA
gactgaaggattcctccctgga

SEQ ID NO: 136109 - RNA, 22 nt, synthetic construct
  source 1..22: mol_type = other RNA
gactgaagtcctttcttggtct

SEQ ID NO: 136110 - RNA, 22 nt, synthetic construct
  source 1..22: mol_type = other RNA
gactgaatcatgaagaaataga

SEQ ID NO: 136111 - RNA, 22 nt, synthetic construct
  source 1..22: mol_type = other RNA
gactgaattaatctcttacacc

SEQ ID NO: 136112 - RNA, 22 nt, synthetic construct
  source 1..22: mol_type = other RNA
gactgaattcccacaaaatatg

SEQ ID NO: 136113 - RNA, 22 nt, synthetic construct
  source 1..22: mol_type = other RNA
gactgacataactgtaaagtaa

SEQ ID NO: 136114 - RNA, 22 nt, synthetic construct
  source 1..22: mol_type = other RNA
gactgaccaacatggacaaacc

SEQ ID NO: 136115 - RNA, 22 nt, synthetic construct
  source 1..22: mol_type = other RNA
gactgagacagtattgtgctga

SEQ ID NO: 136116 - RNA, 22 nt, synthetic construct
  source 1..22: mol_type = other RNA
gactgagatacttaagttttta

SEQ ID NO: 136117 - RNA, 22 nt, synthetic construct
  source 1..22: mol_type = other RNA
gactgagcagtgaaagtctccc

SEQ ID NO: 136118 - RNA, 22 nt, synthetic construct
  source 1..22: mol_type = other RNA
gactgagccagcaaatcagaaa

SEQ ID NO: 136119 - RNA, 22 nt, synthetic construct
  source 1..22: mol_type = other RNA
gactgagtaatattccattgtg

SEQ ID NO: 136120 - RNA, 22 nt, synthetic construct
  source 1..22: mol_type = other RNA
gactgataaacttcagttttga

SEQ ID NO: 136121 - RNA, 22 nt, synthetic construct
  source 1..22: mol_type = other RNA
gactgatgaagaacctgttcat

SEQ ID NO: 136122 - RNA, 22 nt, synthetic construct
  source 1..22: mol_type = other RNA
gactgattaatttgaggtctag

SEQ ID NO: 136123 - RNA, 22 nt, synthetic construct
  source 1..22: mol_type = other RNA
gactgcaacagatctgagaaga

SEQ ID NO: 136124 - RNA, 22 nt, synthetic construct
  source 1..22: mol_type = other RNA
gactgcacataaaaggatatgg

SEQ ID NO: 136125 - RNA, 22 nt, synthetic construct
  source 1..22: mol_type = other RNA
gactgcaggtcttcaacctcaa

SEQ ID NO: 136126 - RNA, 22 nt, synthetic construct
  source 1..22: mol_type = other RNA
gactgcagtgacctatcattgc

SEQ ID NO: 136127 - RNA, 22 nt, synthetic construct
  source 1..22: mol_type = other RNA
gactgcagttggattatatgtt

SEQ ID NO: 136128 - RNA, 22 nt, synthetic construct
  source 1..22: mol_type = other RNA
gactgccaggtagggaggggta

SEQ ID NO: 136129 - RNA, 22 nt, synthetic construct
  source 1..22: mol_type = other RNA
gactgcctattttgtaatttat

SEQ ID NO: 136130 - RNA, 22 nt, synthetic construct
  source 1..22: mol_type = other RNA
gactgcctgaggtctcaaaatt

SEQ ID NO: 136131 - RNA, 22 nt, synthetic construct
  source 1..22: mol_type = other RNA
gactgcctggtcctgagggctt

SEQ ID NO: 136132 - RNA, 22 nt, synthetic construct
  source 1..22: mol_type = other RNA
gactgctgtttaccaagggtgt

SEQ ID NO: 136133 - RNA, 22 nt, synthetic construct
  source 1..22: mol_type = other RNA
gactgcttgaggccacgagttc

SEQ ID NO: 136134 - RNA, 22 nt, synthetic construct
  source 1..22: mol_type = other RNA
gactggaaaagtgttgactacc

SEQ ID NO: 136135 - RNA, 22 nt, synthetic construct
  source 1..22: mol_type = other RNA
gactggaactcatttctgcttg

SEQ ID NO: 136136 - RNA, 22 nt, synthetic construct
  source 1..22: mol_type = other RNA
gactggactccttctgaaggca

SEQ ID NO: 136137 - RNA, 22 nt, synthetic construct
  source 1..22: mol_type = other RNA
gactggagaacagtaaagtcac

SEQ ID NO: 136138 - RNA, 22 nt, synthetic construct
  source 1..22: mol_type = other RNA
gactggagggatgctggagtgt

SEQ ID NO: 136139 - RNA, 22 nt, synthetic construct
  source 1..22: mol_type = other RNA
gactggagttcactggcacaat

SEQ ID NO: 136140 - RNA, 22 nt, synthetic construct
  source 1..22: mol_type = other RNA
gactggatagcaacttgcagaa

SEQ ID NO: 136141 - RNA, 22 nt, synthetic construct
  source 1..22: mol_type = other RNA
gactggatcctggagggctccc

SEQ ID NO: 136142 - RNA, 22 nt, synthetic construct
  source 1..22: mol_type = other RNA
gactggattaaggagatggcac

SEQ ID NO: 136143 - RNA, 22 nt, synthetic construct
  source 1..22: mol_type = other RNA
gactggatttgattgggcatta

SEQ ID NO: 136144 - RNA, 22 nt, synthetic construct
  source 1..22: mol_type = other RNA
gactggccatccttcccaaatc

SEQ ID NO: 136145 - RNA, 22 nt, synthetic construct
  source 1..22: mol_type = other RNA
gactggcctcggccaaccatta

SEQ ID NO: 136146 - RNA, 22 nt, synthetic construct
  source 1..22: mol_type = other RNA
gactggctgtgccaactctggc

SEQ ID NO: 136147 - RNA, 22 nt, synthetic construct
  source 1..22: mol_type = other RNA
gactggcttaatgcatataaaa

SEQ ID NO: 136148 - RNA, 22 nt, synthetic construct
  source 1..22: mol_type = other RNA
gactggcttcagtgccaacaca

SEQ ID NO: 136149 - RNA, 22 nt, synthetic construct
  source 1..22: mol_type = other RNA
gactgggatcctaagcatgaga

SEQ ID NO: 136150 - RNA, 22 nt, synthetic construct
  source 1..22: mol_type = other RNA
gactgggcaacagagacagaga

SEQ ID NO: 136151 - RNA, 22 nt, synthetic construct
  source 1..22: mol_type = other RNA
gactggtgtccttctgagaagg

SEQ ID NO: 136152 - RNA, 22 nt, synthetic construct
  source 1..22: mol_type = other RNA
gactgtaaaaattttctcccaa

SEQ ID NO: 136153 - RNA, 22 nt, synthetic construct
  source 1..22: mol_type = other RNA
gactgtaagctgaactctgtgg

SEQ ID NO: 136154 - RNA, 22 nt, synthetic construct
  source 1..22: mol_type = other RNA
gactgtaatgagctgagattgc

SEQ ID NO: 136155 - RNA, 22 nt, synthetic construct
  source 1..22: mol_type = other RNA
gactgtagtccctgctacttgt

SEQ ID NO: 136156 - RNA, 22 nt, synthetic construct
  source 1..22: mol_type = other RNA
gactgtattaccagcttacagc

SEQ ID NO: 136157 - RNA, 22 nt, synthetic construct
  source 1..22: mol_type = other RNA
gactgtcctgaattctaatgaa

SEQ ID NO: 136158 - RNA, 22 nt, synthetic construct
  source 1..22: mol_type = other RNA
gactgtcgaagcttaatttaga

SEQ ID NO: 136159 - RNA, 22 nt, synthetic construct
  source 1..22: mol_type = other RNA
gactgtgagggagatatttcgc

SEQ ID NO: 136160 - RNA, 22 nt, synthetic construct
  source 1..22: mol_type = other RNA
gactgtgagggtaagaaaggag

SEQ ID NO: 136161 - RNA, 22 nt, synthetic construct
  source 1..22: mol_type = other RNA
gactgtgatgactgtaagctga

SEQ ID NO: 136162 - RNA, 22 nt, synthetic construct
  source 1..22: mol_type = other RNA
gactgtgccttgatccattaca

SEQ ID NO: 136163 - RNA, 22 nt, synthetic construct
  source 1..22: mol_type = other RNA
gactgtgcttccacagctatca

SEQ ID NO: 136164 - RNA, 22 nt, synthetic construct
  source 1..22: mol_type = other RNA
gactgtgtgtgtccaggccaac

SEQ ID NO: 136165 - RNA, 22 nt, synthetic construct
  source 1..22: mol_type = other RNA
gactgttagggacttatggaga

SEQ ID NO: 136166 - RNA, 22 nt, synthetic construct
  source 1..22: mol_type = other RNA
gactgttgcctctgtgctagcc

SEQ ID NO: 136167 - RNA, 22 nt, synthetic construct
  source 1..22: mol_type = other RNA
gacttaactataggagttcatt

SEQ ID NO: 136168 - RNA, 22 nt, synthetic construct
  source 1..22: mol_type = other RNA
gacttaagcaacagaaatttat

SEQ ID NO: 136169 - RNA, 22 nt, synthetic construct
  source 1..22: mol_type = other RNA
gacttacagaccttattcaaat

SEQ ID NO: 136170 - RNA, 22 nt, synthetic construct
  source 1..22: mol_type = other RNA
gacttacagatatcacccagac

SEQ ID NO: 136171 - RNA, 22 nt, synthetic construct
  source 1..22: mol_type = other RNA
gacttagagggcttcatgctgg

SEQ ID NO: 136172 - RNA, 22 nt, synthetic construct
  source 1..22: mol_type = other RNA
gacttaggagaaaagcttcata

SEQ ID NO: 136173 - RNA, 22 nt, synthetic construct
  source 1..22: mol_type = other RNA
gacttaggcaaaggaaaaatct

SEQ ID NO: 136174 - RNA, 22 nt, synthetic construct
  source 1..22: mol_type = other RNA
gacttagtgagggaggccatct

SEQ ID NO: 136175 - RNA, 22 nt, synthetic construct
  source 1..22: mol_type = other RNA
gacttatggagataaattaccc

SEQ ID NO: 136176 - RNA, 22 nt, synthetic construct
  source 1..22: mol_type = other RNA
gacttcaaactatacttcaatg

SEQ ID NO: 136177 - RNA, 22 nt, synthetic construct
  source 1..22: mol_type = other RNA
gacttcaacggacatttttcca

SEQ ID NO: 136178 - RNA, 22 nt, synthetic construct
  source 1..22: mol_type = other RNA
gacttcaagaggttaaaaccac

SEQ ID NO: 136179 - RNA, 22 nt, synthetic construct
  source 1..22: mol_type = other RNA
gacttcacgatgcttaggtaag

SEQ ID NO: 136180 - RNA, 22 nt, synthetic construct
  source 1..22: mol_type = other RNA
gacttcactagatctcttttcc

SEQ ID NO: 136181 - RNA, 22 nt, synthetic construct
  source 1..22: mol_type = other RNA
gacttcactagtgggtcgggtg

SEQ ID NO: 136182 - RNA, 22 nt, synthetic construct
  source 1..22: mol_type = other RNA
gacttcactggagaattctact

SEQ ID NO: 136183 - RNA, 22 nt, synthetic construct
  source 1..22: mol_type = other RNA
gacttcacttccaagtcccgga

SEQ ID NO: 136184 - RNA, 22 nt, synthetic construct
  source 1..22: mol_type = other RNA
gacttcaggaacaccttgaaca

SEQ ID NO: 136185 - RNA, 22 nt, synthetic construct
  source 1..22: mol_type = other RNA
gacttcagtccttaccactgaa

SEQ ID NO: 136186 - RNA, 22 nt, synthetic construct
  source 1..22: mol_type = other RNA
gacttcatgtacaatgaattag

SEQ ID NO: 136187 - RNA, 22 nt, synthetic construct
  source 1..22: mol_type = other RNA
gacttcattcttgacatgattg

SEQ ID NO: 136188 - RNA, 22 nt, synthetic construct
  source 1..22: mol_type = other RNA
gacttcctattttataatgggc

SEQ ID NO: 136189 - RNA, 22 nt, synthetic construct
  source 1..22: mol_type = other RNA
gacttcctggctctagcccagc

SEQ ID NO: 136190 - RNA, 22 nt, synthetic construct
  source 1..22: mol_type = other RNA
gacttcgtcaaggggagaggcc

SEQ ID NO: 136191 - RNA, 22 nt, synthetic construct
  source 1..22: mol_type = other RNA
gacttctagcctccagaaaacc

SEQ ID NO: 136192 - RNA, 22 nt, synthetic construct
  source 1..22: mol_type = other RNA
gacttctcaaacaggatacaaa

SEQ ID NO: 136193 - RNA, 22 nt, synthetic construct
  source 1..22: mol_type = other RNA
gacttctcagggcctgcttttg

SEQ ID NO: 136194 - RNA, 22 nt, synthetic construct
  source 1..22: mol_type = other RNA
gacttctctcagagggaaactg

SEQ ID NO: 136195 - RNA, 22 nt, synthetic construct
  source 1..22: mol_type = other RNA
gacttctggatgtgtatgatca

SEQ ID NO: 136196 - RNA, 22 nt, synthetic construct
  source 1..22: mol_type = other RNA
gacttgaggtttacttggggag

SEQ ID NO: 136197 - RNA, 22 nt, synthetic construct
  source 1..22: mol_type = other RNA
gacttgatctaaaatggaagac

SEQ ID NO: 136198 - RNA, 22 nt, synthetic construct
  source 1..22: mol_type = other RNA
gacttgctctcttgcccaagct

SEQ ID NO: 136199 - RNA, 22 nt, synthetic construct
  source 1..22: mol_type = other RNA
gacttggaagtgaagtcaagat

SEQ ID NO: 136200 - RNA, 22 nt, synthetic construct
  source 1..22: mol_type = other RNA
gacttggcacaggagagcgaca

SEQ ID NO: 136201 - RNA, 22 nt, synthetic construct
  source 1..22: mol_type = other RNA
gacttgtttattttacttagca

SEQ ID NO: 136202 - RNA, 22 nt, synthetic construct
  source 1..22: mol_type = other RNA
gactttaccctgctggaacgaa

SEQ ID NO: 136203 - RNA, 22 nt, synthetic construct
  source 1..22: mol_type = other RNA
gactttactgttctccagtccc

SEQ ID NO: 136204 - RNA, 22 nt, synthetic construct
  source 1..22: mol_type = other RNA
gactttagagtcagttgtttac

SEQ ID NO: 136205 - RNA, 22 nt, synthetic construct
  source 1..22: mol_type = other RNA
gactttaggctgttcaatttag

SEQ ID NO: 136206 - RNA, 22 nt, synthetic construct
  source 1..22: mol_type = other RNA
gactttatggtaattggttcgt

SEQ ID NO: 136207 - RNA, 22 nt, synthetic construct
  source 1..22: mol_type = other RNA
gactttatggtatcactttttg

SEQ ID NO: 136208 - RNA, 22 nt, synthetic construct
  source 1..22: mol_type = other RNA
gactttatgtggaaaaatatag

SEQ ID NO: 136209 - RNA, 22 nt, synthetic construct
  source 1..22: mol_type = other RNA
gactttcactgctcagtccctc

SEQ ID NO: 136210 - RNA, 22 nt, synthetic construct
  source 1..22: mol_type = other RNA
gactttcatttgtaattcatcc

SEQ ID NO: 136211 - RNA, 22 nt, synthetic construct
  source 1..22: mol_type = other RNA
gactttgatgttttacattttc

SEQ ID NO: 136212 - RNA, 22 nt, synthetic construct
  source 1..22: mol_type = other RNA
gactttgtggcctcttcccttg

SEQ ID NO: 136213 - RNA, 22 nt, synthetic construct
  source 1..22: mol_type = other RNA
gactttgttttgtttttctctc

SEQ ID NO: 136214 - RNA, 22 nt, synthetic construct
  source 1..22: mol_type = other RNA
gacttttatcaattcacaagat

SEQ ID NO: 136215 - RNA, 22 nt, synthetic construct
  source 1..22: mol_type = other RNA
gacttttccttaaaaaaggttt

SEQ ID NO: 136216 - RNA, 22 nt, synthetic construct
  source 1..22: mol_type = other RNA
gacttttggtacacatcttttt

SEQ ID NO: 136217 - RNA, 22 nt, synthetic construct
  source 1..22: mol_type = other RNA
gacttttttgcccactcttata

SEQ ID NO: 136218 - RNA, 22 nt, synthetic construct
  source 1..22: mol_type = other RNA
gagaaaaacaaaacaaagtctt

SEQ ID NO: 136219 - RNA, 22 nt, synthetic construct
  source 1..22: mol_type = other RNA
gagaaaaatggggatatccaaa

SEQ ID NO: 136220 - RNA, 22 nt, synthetic construct
  source 1..22: mol_type = other RNA
gagaaaaattacaggtcaaact

SEQ ID NO: 136221 - RNA, 22 nt, synthetic construct
  source 1..22: mol_type = other RNA
gagaaaacaaaaagaaactaga

SEQ ID NO: 136222 - RNA, 22 nt, synthetic construct
  source 1..22: mol_type = other RNA
gagaaaagcacaggcatcggcc

SEQ ID NO: 136223 - RNA, 22 nt, synthetic construct
  source 1..22: mol_type = other RNA
gagaaaagcttcataacattat

SEQ ID NO: 136224 - RNA, 22 nt, synthetic construct
  source 1..22: mol_type = other RNA
gagaaaatgttatacagcaaat

SEQ ID NO: 136225 - RNA, 22 nt, synthetic construct
  source 1..22: mol_type = other RNA
gagaaaattgttcatgaaatcc

SEQ ID NO: 136226 - RNA, 22 nt, synthetic construct
  source 1..22: mol_type = other RNA
gagaaacaggattacaatgtaa

SEQ ID NO: 136227 - RNA, 22 nt, synthetic construct
  source 1..22: mol_type = other RNA
gagaaacatacatgttcagtta

SEQ ID NO: 136228 - RNA, 22 nt, synthetic construct
  source 1..22: mol_type = other RNA
gagaaacatggcttagaaatga

SEQ ID NO: 136229 - RNA, 22 nt, synthetic construct
  source 1..22: mol_type = other RNA
gagaaaccatttaccccttaaa

SEQ ID NO: 136230 - RNA, 22 nt, synthetic construct
  source 1..22: mol_type = other RNA
gagaaacctaagaaaggtctag

SEQ ID NO: 136231 - RNA, 22 nt, synthetic construct
  source 1..22: mol_type = other RNA
gagaaaccttggtgtgcttctg

SEQ ID NO: 136232 - RNA, 22 nt, synthetic construct
  source 1..22: mol_type = other RNA
gagaaactatccaacatgccag

SEQ ID NO: 136233 - RNA, 22 nt, synthetic construct
  source 1..22: mol_type = other RNA
gagaaactggaatcaatccaga

SEQ ID NO: 136234 - RNA, 22 nt, synthetic construct
  source 1..22: mol_type = other RNA
gagaaagaagtaatttcttctg

SEQ ID NO: 136235 - RNA, 22 nt, synthetic construct
  source 1..22: mol_type = other RNA
gagaaagaccaagagtgtggct

SEQ ID NO: 136236 - RNA, 22 nt, synthetic construct
  source 1..22: mol_type = other RNA
gagaaagagagagacaagcaca

SEQ ID NO: 136237 - RNA, 22 nt, synthetic construct
  source 1..22: mol_type = other RNA
gagaaagagggaagtactgagt

SEQ ID NO: 136238 - RNA, 22 nt, synthetic construct
  source 1..22: mol_type = other RNA
gagaaagcacataaaaaaggaa

SEQ ID NO: 136239 - RNA, 22 nt, synthetic construct
  source 1..22: mol_type = other RNA
gagaaagcatcagagctttgtt

SEQ ID NO: 136240 - RNA, 22 nt, synthetic construct
  source 1..22: mol_type = other RNA
gagaaagcccagccgcggactc

SEQ ID NO: 136241 - RNA, 22 nt, synthetic construct
  source 1..22: mol_type = other RNA
gagaaagctaatttggaattaa

SEQ ID NO: 136242 - RNA, 22 nt, synthetic construct
  source 1..22: mol_type = other RNA
gagaaaggcgaagcggcagggc

SEQ ID NO: 136243 - RNA, 22 nt, synthetic construct
  source 1..22: mol_type = other RNA
gagaaaggtttcttcactctta

SEQ ID NO: 136244 - RNA, 22 nt, synthetic construct
  source 1..22: mol_type = other RNA
gagaaatacttggacaggggac

SEQ ID NO: 136245 - RNA, 22 nt, synthetic construct
  source 1..22: mol_type = other RNA
gagaaatagttaacgtttatct

SEQ ID NO: 136246 - RNA, 22 nt, synthetic construct
  source 1..22: mol_type = other RNA
gagaaatcggaactcctgtatg

SEQ ID NO: 136247 - RNA, 22 nt, synthetic construct
  source 1..22: mol_type = other RNA
gagaaatgcaaatcaaaacaat

SEQ ID NO: 136248 - RNA, 22 nt, synthetic construct
  source 1..22: mol_type = other RNA
gagaaatgtctggtttgctttg

SEQ ID NO: 136249 - RNA, 22 nt, synthetic construct
  source 1..22: mol_type = other RNA
gagaaatgttaagattcaacaa

SEQ ID NO: 136250 - RNA, 22 nt, synthetic construct
  source 1..22: mol_type = other RNA
gagaaattggaacctttgtcca

SEQ ID NO: 136251 - RNA, 22 nt, synthetic construct
  source 1..22: mol_type = other RNA
gagaacaaaacaagaagaaaaa

SEQ ID NO: 136252 - RNA, 22 nt, synthetic construct
  source 1..22: mol_type = other RNA
gagaacaaaatacctgggaatc

SEQ ID NO: 136253 - RNA, 22 nt, synthetic construct
  source 1..22: mol_type = other RNA
gagaacaatggaatagaaggga

SEQ ID NO: 136254 - RNA, 22 nt, synthetic construct
  source 1..22: mol_type = other RNA
gagaacacacaatttgaggtag

SEQ ID NO: 136255 - RNA, 22 nt, synthetic construct
  source 1..22: mol_type = other RNA
gagaacagcattatcttaataa

SEQ ID NO: 136256 - RNA, 22 nt, synthetic construct
  source 1..22: mol_type = other RNA
gagaacagtaaagtcactgtgg

SEQ ID NO: 136257 - RNA, 22 nt, synthetic construct
  source 1..22: mol_type = other RNA
gagaacattggtttgaaatgat

SEQ ID NO: 136258 - RNA, 22 nt, synthetic construct
  source 1..22: mol_type = other RNA
gagaacccaggaacagattcac

SEQ ID NO: 136259 - RNA, 22 nt, synthetic construct
  source 1..22: mol_type = other RNA
gagaacccagtgtctgctacag

SEQ ID NO: 136260 - RNA, 22 nt, synthetic construct
  source 1..22: mol_type = other RNA
gagaaccggaacttgagtttgt

SEQ ID NO: 136261 - RNA, 22 nt, synthetic construct
  source 1..22: mol_type = other RNA
gagaactgactgaaggattcct

SEQ ID NO: 136262 - RNA, 22 nt, synthetic construct
  source 1..22: mol_type = other RNA
gagaactgcctggacccgggag

SEQ ID NO: 136263 - RNA, 22 nt, synthetic construct
  source 1..22: mol_type = other RNA
gagaacttaaaggtttggagtt

SEQ ID NO: 136264 - RNA, 22 nt, synthetic construct
  source 1..22: mol_type = other RNA
gagaacttcagtatatattttc

SEQ ID NO: 136265 - RNA, 22 nt, synthetic construct
  source 1..22: mol_type = other RNA
gagaacttgcacataatataaa

SEQ ID NO: 136266 - RNA, 22 nt, synthetic construct
  source 1..22: mol_type = other RNA
gagaacttgtctcggatttaag

SEQ ID NO: 136267 - RNA, 22 nt, synthetic construct
  source 1..22: mol_type = other RNA
gagaagaaataaacgacaccag

SEQ ID NO: 136268 - RNA, 22 nt, synthetic construct
  source 1..22: mol_type = other RNA
gagaagaatgagaaacatacat

SEQ ID NO: 136269 - RNA, 22 nt, synthetic construct
  source 1..22: mol_type = other RNA
gagaagactaagcagaaatgac

SEQ ID NO: 136270 - RNA, 22 nt, synthetic construct
  source 1..22: mol_type = other RNA
gagaagactggaaaagtgttga

SEQ ID NO: 136271 - RNA, 22 nt, synthetic construct
  source 1..22: mol_type = other RNA
gagaagagctgtaacagaggca

SEQ ID NO: 136272 - RNA, 22 nt, synthetic construct
  source 1..22: mol_type = other RNA
gagaagagggggcataacatct

SEQ ID NO: 136273 - RNA, 22 nt, synthetic construct
  source 1..22: mol_type = other RNA
gagaagagttctgaaggctcag

SEQ ID NO: 136274 - RNA, 22 nt, synthetic construct
  source 1..22: mol_type = other RNA
gagaagatgacatttgcttttc

SEQ ID NO: 136275 - RNA, 22 nt, synthetic construct
  source 1..22: mol_type = other RNA
gagaagcagaaaatcagtgtga

SEQ ID NO: 136276 - RNA, 22 nt, synthetic construct
  source 1..22: mol_type = other RNA
gagaagccacacagtacaaggc

SEQ ID NO: 136277 - RNA, 22 nt, synthetic construct
  source 1..22: mol_type = other RNA
gagaaggaagcaccaacccttg

SEQ ID NO: 136278 - RNA, 22 nt, synthetic construct
  source 1..22: mol_type = other RNA
gagaaggacagcttccacccaa

SEQ ID NO: 136279 - RNA, 22 nt, synthetic construct
  source 1..22: mol_type = other RNA
gagaaggccttccacggaatgc

SEQ ID NO: 136280 - RNA, 22 nt, synthetic construct
  source 1..22: mol_type = other RNA
gagaaggcgaaatgtgaacaga

SEQ ID NO: 136281 - RNA, 22 nt, synthetic construct
  source 1..22: mol_type = other RNA
gagaaggctgccagcaccagat

SEQ ID NO: 136282 - RNA, 22 nt, synthetic construct
  source 1..22: mol_type = other RNA
gagaaggctttgtgttggtgtt

SEQ ID NO: 136283 - RNA, 22 nt, synthetic construct
  source 1..22: mol_type = other RNA
gagaagggaagtaaagatcaag

SEQ ID NO: 136284 - RNA, 22 nt, synthetic construct
  source 1..22: mol_type = other RNA
gagaagtaacattacaacagca

SEQ ID NO: 136285 - RNA, 22 nt, synthetic construct
  source 1..22: mol_type = other RNA
gagaagtcaaagcctgtggagg

SEQ ID NO: 136286 - RNA, 22 nt, synthetic construct
  source 1..22: mol_type = other RNA
gagaagtcagactaagacacta

SEQ ID NO: 136287 - RNA, 22 nt, synthetic construct
  source 1..22: mol_type = other RNA
gagaagtcttttcctaccctga

SEQ ID NO: 136288 - RNA, 22 nt, synthetic construct
  source 1..22: mol_type = other RNA
gagaagtgaagcttcaaaccac

SEQ ID NO: 136289 - RNA, 22 nt, synthetic construct
  source 1..22: mol_type = other RNA
gagaagttttccaggaaaagca

SEQ ID NO: 136290 - RNA, 22 nt, synthetic construct
  source 1..22: mol_type = other RNA
gagaatagcagaaacacaggac

SEQ ID NO: 136291 - RNA, 22 nt, synthetic construct
  source 1..22: mol_type = other RNA
gagaatcgcttaaacccgggag

SEQ ID NO: 136292 - RNA, 22 nt, synthetic construct
  source 1..22: mol_type = other RNA
gagaatctgggaggtggaggtt

SEQ ID NO: 136293 - RNA, 22 nt, synthetic construct
  source 1..22: mol_type = other RNA
gagaatcttaaaataccagagg

SEQ ID NO: 136294 - RNA, 22 nt, synthetic construct
  source 1..22: mol_type = other RNA
gagaatggaaacttgccatctt

SEQ ID NO: 136295 - RNA, 22 nt, synthetic construct
  source 1..22: mol_type = other RNA
gagaatggcaaggctaacagcc

SEQ ID NO: 136296 - RNA, 22 nt, synthetic construct
  source 1..22: mol_type = other RNA
gagaatggcatgaacccaccag

SEQ ID NO: 136297 - RNA, 22 nt, synthetic construct
  source 1..22: mol_type = other RNA
gagaatggctggaatggtgaag

SEQ ID NO: 136298 - RNA, 22 nt, synthetic construct
  source 1..22: mol_type = other RNA
gagaattcagagtggctaatgt

SEQ ID NO: 136299 - RNA, 22 nt, synthetic construct
  source 1..22: mol_type = other RNA
gagaattcattgttgtgtgtta

SEQ ID NO: 136300 - RNA, 22 nt, synthetic construct
  source 1..22: mol_type = other RNA
gagaattctaaattgcctataa

SEQ ID NO: 136301 - RNA, 22 nt, synthetic construct
  source 1..22: mol_type = other RNA
gagaattctactaaacattaag

SEQ ID NO: 136302 - RNA, 22 nt, synthetic construct
  source 1..22: mol_type = other RNA
gagaattggtagtcaatgcaat

SEQ ID NO: 136303 - RNA, 22 nt, synthetic construct
  source 1..22: mol_type = other RNA
gagaatttcagaaagagaatag

SEQ ID NO: 136304 - RNA, 22 nt, synthetic construct
  source 1..22: mol_type = other RNA
gagaatttcaggtgtgtaaaca

SEQ ID NO: 136305 - RNA, 22 nt, synthetic construct
  source 1..22: mol_type = other RNA
gagacaaagcataaaatatgtg

SEQ ID NO: 136306 - RNA, 22 nt, synthetic construct
  source 1..22: mol_type = other RNA
gagacaaaggttgcagtgagca

SEQ ID NO: 136307 - RNA, 22 nt, synthetic construct
  source 1..22: mol_type = other RNA
gagacaagcacaggcatctctc

SEQ ID NO: 136308 - RNA, 22 nt, synthetic construct
  source 1..22: mol_type = other RNA
gagacaagttctcctgtgtgca

SEQ ID NO: 136309 - RNA, 22 nt, synthetic construct
  source 1..22: mol_type = other RNA
gagacacacatcagacacctac

SEQ ID NO: 136310 - RNA, 22 nt, synthetic construct
  source 1..22: mol_type = other RNA
gagacacacgagtattcaagtt

SEQ ID NO: 136311 - RNA, 22 nt, synthetic construct
  source 1..22: mol_type = other RNA
gagacacatactgaaagacaga

SEQ ID NO: 136312 - RNA, 22 nt, synthetic construct
  source 1..22: mol_type = other RNA
gagacacctacaatattaactt

SEQ ID NO: 136313 - RNA, 22 nt, synthetic construct
  source 1..22: mol_type = other RNA
gagacacggtctcacactgttg

SEQ ID NO: 136314 - RNA, 22 nt, synthetic construct
  source 1..22: mol_type = other RNA
gagacactagggactggcctcg

SEQ ID NO: 136315 - RNA, 22 nt, synthetic construct
  source 1..22: mol_type = other RNA
gagacagaatcttactggtgtt

SEQ ID NO: 136316 - RNA, 22 nt, synthetic construct
  source 1..22: mol_type = other RNA
gagacagaccctggcttgtgac

SEQ ID NO: 136317 - RNA, 22 nt, synthetic construct
  source 1..22: mol_type = other RNA
gagacagattctctgtctctgt

SEQ ID NO: 136318 - RNA, 22 nt, synthetic construct
  source 1..22: mol_type = other RNA
gagacagcctaaaccattttca

SEQ ID NO: 136319 - RNA, 22 nt, synthetic construct
  source 1..22: mol_type = other RNA
gagacaggatccagatgtagag

SEQ ID NO: 136320 - RNA, 22 nt, synthetic construct
  source 1..22: mol_type = other RNA
gagacagggtctcactcttacc

SEQ ID NO: 136321 - RNA, 22 nt, synthetic construct
  source 1..22: mol_type = other RNA
gagacagtattgtgctgaaacc

SEQ ID NO: 136322 - RNA, 22 nt, synthetic construct
  source 1..22: mol_type = other RNA
gagacagtgagcatgctgcaac

SEQ ID NO: 136323 - RNA, 22 nt, synthetic construct
  source 1..22: mol_type = other RNA
gagacatcacaatgcgtttgtt

SEQ ID NO: 136324 - RNA, 22 nt, synthetic construct
  source 1..22: mol_type = other RNA
gagacatctgagacatcacaat

SEQ ID NO: 136325 - RNA, 22 nt, synthetic construct
  source 1..22: mol_type = other RNA
gagacattacaattgataccat

SEQ ID NO: 136326 - RNA, 22 nt, synthetic construct
  source 1..22: mol_type = other RNA
gagacatttgagggtgctgatc

SEQ ID NO: 136327 - RNA, 22 nt, synthetic construct
  source 1..22: mol_type = other RNA
gagaccaaatgcataaaaatat

SEQ ID NO: 136328 - RNA, 22 nt, synthetic construct
  source 1..22: mol_type = other RNA
gagaccacagacgtgcagcacc

SEQ ID NO: 136329 - RNA, 22 nt, synthetic construct
  source 1..22: mol_type = other RNA
gagaccacaggctctcttcacc

SEQ ID NO: 136330 - RNA, 22 nt, synthetic construct
  source 1..22: mol_type = other RNA
gagaccaccacacttgcttggg

SEQ ID NO: 136331 - RNA, 22 nt, synthetic construct
  source 1..22: mol_type = other RNA
gagaccaggagttcttatgagg

SEQ ID NO: 136332 - RNA, 22 nt, synthetic construct
  source 1..22: mol_type = other RNA
gagaccagttaggaagccactg

SEQ ID NO: 136333 - RNA, 22 nt, synthetic construct
  source 1..22: mol_type = other RNA
gagacccatactcagccccctc

SEQ ID NO: 136334 - RNA, 22 nt, synthetic construct
  source 1..22: mol_type = other RNA
gagaccccatctctaccaaaat

SEQ ID NO: 136335 - RNA, 22 nt, synthetic construct
  source 1..22: mol_type = other RNA
gagaccggatgaggtggctcac

SEQ ID NO: 136336 - RNA, 22 nt, synthetic construct
  source 1..22: mol_type = other RNA
gagaccgtggggggagggaggg

SEQ ID NO: 136337 - RNA, 22 nt, synthetic construct
  source 1..22: mol_type = other RNA
gagacctactaaaagttgacaa

SEQ ID NO: 136338 - RNA, 22 nt, synthetic construct
  source 1..22: mol_type = other RNA
gagacctcaggcagtctagtcc

SEQ ID NO: 136339 - RNA, 22 nt, synthetic construct
  source 1..22: mol_type = other RNA
gagacctcatctctgcaaaaca

SEQ ID NO: 136340 - RNA, 22 nt, synthetic construct
  source 1..22: mol_type = other RNA
gagacctcatcttagccgggag

SEQ ID NO: 136341 - RNA, 22 nt, synthetic construct
  source 1..22: mol_type = other RNA
gagacctgaagactggatttga

SEQ ID NO: 136342 - RNA, 22 nt, synthetic construct
  source 1..22: mol_type = other RNA
gagacctgattcttccactagt

SEQ ID NO: 136343 - RNA, 22 nt, synthetic construct
  source 1..22: mol_type = other RNA
gagacctttctttaaaagtaat

SEQ ID NO: 136344 - RNA, 22 nt, synthetic construct
  source 1..22: mol_type = other RNA
gagacggaagactcatacttcc

SEQ ID NO: 136345 - RNA, 22 nt, synthetic construct
  source 1..22: mol_type = other RNA
gagacggaatcttaccctgttg

SEQ ID NO: 136346 - RNA, 22 nt, synthetic construct
  source 1..22: mol_type = other RNA
gagacggcgagcttgatcttta

SEQ ID NO: 136347 - RNA, 22 nt, synthetic construct
  source 1..22: mol_type = other RNA
gagacggcgtttcgccatgttg

SEQ ID NO: 136348 - RNA, 22 nt, synthetic construct
  source 1..22: mol_type = other RNA
gagactagtacactgttgattt

SEQ ID NO: 136349 - RNA, 22 nt, synthetic construct
  source 1..22: mol_type = other RNA
gagactatcgttatatcctcag

SEQ ID NO: 136350 - RNA, 22 nt, synthetic construct
  source 1..22: mol_type = other RNA
gagactatctcttcctcctctg

SEQ ID NO: 136351 - RNA, 22 nt, synthetic construct
  source 1..22: mol_type = other RNA
gagactattatgagcagttgta

SEQ ID NO: 136352 - RNA, 22 nt, synthetic construct
  source 1..22: mol_type = other RNA
gagactccaactcaaaaaagaa

SEQ ID NO: 136353 - RNA, 22 nt, synthetic construct
  source 1..22: mol_type = other RNA
gagactccatctcaagaaaaca

SEQ ID NO: 136354 - RNA, 22 nt, synthetic construct
  source 1..22: mol_type = other RNA
gagactcggtctcaaaacaaac

SEQ ID NO: 136355 - RNA, 22 nt, synthetic construct
  source 1..22: mol_type = other RNA
gagactctcaagaaggtatcat

SEQ ID NO: 136356 - RNA, 22 nt, synthetic construct
  source 1..22: mol_type = other RNA
gagactcttaatattgaaacga

SEQ ID NO: 136357 - RNA, 22 nt, synthetic construct
  source 1..22: mol_type = other RNA
gagactgagtaatattccattg

SEQ ID NO: 136358 - RNA, 22 nt, synthetic construct
  source 1..22: mol_type = other RNA
gagactgataaacttcagtttt

SEQ ID NO: 136359 - RNA, 22 nt, synthetic construct
  source 1..22: mol_type = other RNA
gagactgcagtgacctatcatt

SEQ ID NO: 136360 - RNA, 22 nt, synthetic construct
  source 1..22: mol_type = other RNA
gagactggatagcaacttgcag

SEQ ID NO: 136361 - RNA, 22 nt, synthetic construct
  source 1..22: mol_type = other RNA
gagactggatcctggagggctc

SEQ ID NO: 136362 - RNA, 22 nt, synthetic construct
  source 1..22: mol_type = other RNA
gagactgtaatgagctgagatt

SEQ ID NO: 136363 - RNA, 22 nt, synthetic construct
  source 1..22: mol_type = other RNA
gagactgtgcaatgtgaaaaaa

SEQ ID NO: 136364 - RNA, 22 nt, synthetic construct
  source 1..22: mol_type = other RNA
gagactgtgcttccacagctat

SEQ ID NO: 136365 - RNA, 22 nt, synthetic construct
  source 1..22: mol_type = other RNA
gagactgttagggacttatgga

SEQ ID NO: 136366 - RNA, 22 nt, synthetic construct
  source 1..22: mol_type = other RNA
gagacttaggcaaaggaaaaat

SEQ ID NO: 136367 - RNA, 22 nt, synthetic construct
  source 1..22: mol_type = other RNA
gagactttcactgctcagtccc

SEQ ID NO: 136368 - RNA, 22 nt, synthetic construct
  source 1..22: mol_type = other RNA
gagagaaaaacaaaacaaagtc

SEQ ID NO: 136369 - RNA, 22 nt, synthetic construct
  source 1..22: mol_type = other RNA
gagagaaaattgttcatgaaat

SEQ ID NO: 136370 - RNA, 22 nt, synthetic construct
  source 1..22: mol_type = other RNA
gagagaaaccttggtgtgcttc

SEQ ID NO: 136371 - RNA, 22 nt, synthetic construct
  source 1..22: mol_type = other RNA
gagagaaactttacactttaaa

SEQ ID NO: 136372 - RNA, 22 nt, synthetic construct
  source 1..22: mol_type = other RNA
gagagaaagagagagacaagca

SEQ ID NO: 136373 - RNA, 22 nt, synthetic construct
  source 1..22: mol_type = other RNA
gagagaagagggggcataacat

SEQ ID NO: 136374 - RNA, 22 nt, synthetic construct
  source 1..22: mol_type = other RNA
gagagaagatgacatttgcttt

SEQ ID NO: 136375 - RNA, 22 nt, synthetic construct
  source 1..22: mol_type = other RNA
gagagaaggctgccagcaccag

SEQ ID NO: 136376 - RNA, 22 nt, synthetic construct
  source 1..22: mol_type = other RNA
gagagaagtcagactaagacac

SEQ ID NO: 136377 - RNA, 22 nt, synthetic construct
  source 1..22: mol_type = other RNA
gagagaattctaaattgcctat

SEQ ID NO: 136378 - RNA, 22 nt, synthetic construct
  source 1..22: mol_type = other RNA
gagagacaagcacaggcatctc

SEQ ID NO: 136379 - RNA, 22 nt, synthetic construct
  source 1..22: mol_type = other RNA
gagagacctgaagactggattt

SEQ ID NO: 136380 - RNA, 22 nt, synthetic construct
  source 1..22: mol_type = other RNA
gagagacctttctttaaaagta

SEQ ID NO: 136381 - RNA, 22 nt, synthetic construct
  source 1..22: mol_type = other RNA
gagagagaaactttacacttta

SEQ ID NO: 136382 - RNA, 22 nt, synthetic construct
  source 1..22: mol_type = other RNA
gagagagaaagagagagacaag

SEQ ID NO: 136383 - RNA, 22 nt, synthetic construct
  source 1..22: mol_type = other RNA
gagagagaagatgacatttgct

SEQ ID NO: 136384 - RNA, 22 nt, synthetic construct
  source 1..22: mol_type = other RNA
gagagagaattctaaattgcct

SEQ ID NO: 136385 - RNA, 22 nt, synthetic construct
  source 1..22: mol_type = other RNA
gagagagacaagcacaggcatc

SEQ ID NO: 136386 - RNA, 22 nt, synthetic construct
  source 1..22: mol_type = other RNA
gagagagacctttctttaaaag

SEQ ID NO: 136387 - RNA, 22 nt, synthetic construct
  source 1..22: mol_type = other RNA
gagagagagaaagagagagaca

SEQ ID NO: 136388 - RNA, 22 nt, synthetic construct
  source 1..22: mol_type = other RNA
gagagagataaaacctggaatg

SEQ ID NO: 136389 - RNA, 22 nt, synthetic construct
  source 1..22: mol_type = other RNA
gagagaggggggaagcttttca

SEQ ID NO: 136390 - RNA, 22 nt, synthetic construct
  source 1..22: mol_type = other RNA
gagagagtaactggtccagatg

SEQ ID NO: 136391 - RNA, 22 nt, synthetic construct
  source 1..22: mol_type = other RNA
gagagataaaacctggaatggg

SEQ ID NO: 136392 - RNA, 22 nt, synthetic construct
  source 1..22: mol_type = other RNA
gagagatagaaagcaccagggc

SEQ ID NO: 136393 - RNA, 22 nt, synthetic construct
  source 1..22: mol_type = other RNA
gagagatgaatggataaggaaa

SEQ ID NO: 136394 - RNA, 22 nt, synthetic construct
  source 1..22: mol_type = other RNA
gagagatgcctatgaaatcttg

SEQ ID NO: 136395 - RNA, 22 nt, synthetic construct
  source 1..22: mol_type = other RNA
gagagatgcctgtgcttgtctc

SEQ ID NO: 136396 - RNA, 22 nt, synthetic construct
  source 1..22: mol_type = other RNA
gagagatggtagtcaacacttt

SEQ ID NO: 136397 - RNA, 22 nt, synthetic construct
  source 1..22: mol_type = other RNA
gagagatggtgggagaggcatg

SEQ ID NO: 136398 - RNA, 22 nt, synthetic construct
  source 1..22: mol_type = other RNA
gagagattaaataacttccatg

SEQ ID NO: 136399 - RNA, 22 nt, synthetic construct
  source 1..22: mol_type = other RNA
gagagattcaagaaaccacaga

SEQ ID NO: 136400 - RNA, 22 nt, synthetic construct
  source 1..22: mol_type = other RNA
gagagcaagactcaaatctcaa

SEQ ID NO: 136401 - RNA, 22 nt, synthetic construct
  source 1..22: mol_type = other RNA
gagagcaagtccccatctccac

SEQ ID NO: 136402 - RNA, 22 nt, synthetic construct
  source 1..22: mol_type = other RNA
gagagcactggtttcagtacac

SEQ ID NO: 136403 - RNA, 22 nt, synthetic construct
  source 1..22: mol_type = other RNA
gagagcagagacacacatcaga

SEQ ID NO: 136404 - RNA, 22 nt, synthetic construct
  source 1..22: mol_type = other RNA
gagagcattgcctttattacta

SEQ ID NO: 136405 - RNA, 22 nt, synthetic construct
  source 1..22: mol_type = other RNA
gagagcccagaaataaatcctc

SEQ ID NO: 136406 - RNA, 22 nt, synthetic construct
  source 1..22: mol_type = other RNA
gagagcctgtggtctcttcgag

SEQ ID NO: 136407 - RNA, 22 nt, synthetic construct
  source 1..22: mol_type = other RNA
gagagcgacagctacggaggat

SEQ ID NO: 136408 - RNA, 22 nt, synthetic construct
  source 1..22: mol_type = other RNA
gagagctaagggaagttttttc

SEQ ID NO: 136409 - RNA, 22 nt, synthetic construct
  source 1..22: mol_type = other RNA
gagagctcaggccagtgagtga

SEQ ID NO: 136410 - RNA, 22 nt, synthetic construct
  source 1..22: mol_type = other RNA
gagagctgtgccgaggcagaga

SEQ ID NO: 136411 - RNA, 22 nt, synthetic construct
  source 1..22: mol_type = other RNA
gagagctttcttttaaagacct

SEQ ID NO: 136412 - RNA, 22 nt, synthetic construct
  source 1..22: mol_type = other RNA
gagaggaagtgaccctgagtcc

SEQ ID NO: 136413 - RNA, 22 nt, synthetic construct
  source 1..22: mol_type = other RNA
gagaggaataaatggtagcttg

SEQ ID NO: 136414 - RNA, 22 nt, synthetic construct
  source 1..22: mol_type = other RNA
gagaggacagttggccttgagg

SEQ ID NO: 136415 - RNA, 22 nt, synthetic construct
  source 1..22: mol_type = other RNA
gagaggactgcctggtcctgag

SEQ ID NO: 136416 - RNA, 22 nt, synthetic construct
  source 1..22: mol_type = other RNA
gagaggagcgccctggcattgt

SEQ ID NO: 136417 - RNA, 22 nt, synthetic construct
  source 1..22: mol_type = other RNA
gagaggcaaaggccgctcttga

SEQ ID NO: 136418 - RNA, 22 nt, synthetic construct
  source 1..22: mol_type = other RNA
gagaggcatgccgggacaagag

SEQ ID NO: 136419 - RNA, 22 nt, synthetic construct
  source 1..22: mol_type = other RNA
gagaggcctcatgtattttcct

SEQ ID NO: 136420 - RNA, 22 nt, synthetic construct
  source 1..22: mol_type = other RNA
gagaggctaggtgacctgccag

SEQ ID NO: 136421 - RNA, 22 nt, synthetic construct
  source 1..22: mol_type = other RNA
gagaggctttaagcagaaagtt

SEQ ID NO: 136422 - RNA, 22 nt, synthetic construct
  source 1..22: mol_type = other RNA
gagaggctttttattagattta

SEQ ID NO: 136423 - RNA, 22 nt, synthetic construct
  source 1..22: mol_type = other RNA
gagagggaagtttatagcagta

SEQ ID NO: 136424 - RNA, 22 nt, synthetic construct
  source 1..22: mol_type = other RNA
gagagggagaccgtggggggag

SEQ ID NO: 136425 - RNA, 22 nt, synthetic construct
  source 1..22: mol_type = other RNA
gagagggagctctgtcttgatg

SEQ ID NO: 136426 - RNA, 22 nt, synthetic construct
  source 1..22: mol_type = other RNA
gagaggggggaagcttttcata

SEQ ID NO: 136427 - RNA, 22 nt, synthetic construct
  source 1..22: mol_type = other RNA
gagaggtgaactattagagctt

SEQ ID NO: 136428 - RNA, 22 nt, synthetic construct
  source 1..22: mol_type = other RNA
gagagtaaaataaaagctctaa

SEQ ID NO: 136429 - RNA, 22 nt, synthetic construct
  source 1..22: mol_type = other RNA
gagagtaactggtccagatgaa

SEQ ID NO: 136430 - RNA, 22 nt, synthetic construct
  source 1..22: mol_type = other RNA
gagagtaagttgcatacgtcgt

SEQ ID NO: 136431 - RNA, 22 nt, synthetic construct
  source 1..22: mol_type = other RNA
gagagtattgccaggtttgtgc

SEQ ID NO: 136432 - RNA, 22 nt, synthetic construct
  source 1..22: mol_type = other RNA
gagagtcatttgagcccaggag

SEQ ID NO: 136433 - RNA, 22 nt, synthetic construct
  source 1..22: mol_type = other RNA
gagagtcgcttgaacctgaaaa

SEQ ID NO: 136434 - RNA, 22 nt, synthetic construct
  source 1..22: mol_type = other RNA
gagagtctcttaagaccacaag

SEQ ID NO: 136435 - RNA, 22 nt, synthetic construct
  source 1..22: mol_type = other RNA
gagagtgaaaacacaaactgca

SEQ ID NO: 136436 - RNA, 22 nt, synthetic construct
  source 1..22: mol_type = other RNA
gagagtgacagctgagtagcgc

SEQ ID NO: 136437 - RNA, 22 nt, synthetic construct
  source 1..22: mol_type = other RNA
gagagtgcagtatgtaggaaac

SEQ ID NO: 136438 - RNA, 22 nt, synthetic construct
  source 1..22: mol_type = other RNA
gagagtggaaagagccagcctg

SEQ ID NO: 136439 - RNA, 22 nt, synthetic construct
  source 1..22: mol_type = other RNA
gagagtggcctaaatcaggatg

SEQ ID NO: 136440 - RNA, 22 nt, synthetic construct
  source 1..22: mol_type = other RNA
gagagtgggcccagcagaaggt

SEQ ID NO: 136441 - RNA, 22 nt, synthetic construct
  source 1..22: mol_type = other RNA
gagataaaacctggaatgggtt

SEQ ID NO: 136442 - RNA, 22 nt, synthetic construct
  source 1..22: mol_type = other RNA
gagataaactagattaccttga

SEQ ID NO: 136443 - RNA, 22 nt, synthetic construct
  source 1..22: mol_type = other RNA
gagataaagagcaggtggaagg

SEQ ID NO: 136444 - RNA, 22 nt, synthetic construct
  source 1..22: mol_type = other RNA
gagataaattacccaaagactt

SEQ ID NO: 136445 - RNA, 22 nt, synthetic construct
  source 1..22: mol_type = other RNA
gagataactaatgagaatttca

SEQ ID NO: 136446 - RNA, 22 nt, synthetic construct
  source 1..22: mol_type = other RNA
gagataactgggtgtgcacgtt

SEQ ID NO: 136447 - RNA, 22 nt, synthetic construct
  source 1..22: mol_type = other RNA
gagataccttgaaaggatactg

SEQ ID NO: 136448 - RNA, 22 nt, synthetic construct
  source 1..22: mol_type = other RNA
gagatactacgcctagctgact

SEQ ID NO: 136449 - RNA, 22 nt, synthetic construct
  source 1..22: mol_type = other RNA
gagatactggccatgttttatt

SEQ ID NO: 136450 - RNA, 22 nt, synthetic construct
  source 1..22: mol_type = other RNA
gagatacttgattacaagggtg

SEQ ID NO: 136451 - RNA, 22 nt, synthetic construct
  source 1..22: mol_type = other RNA
gagatagaaagcaccagggcct

SEQ ID NO: 136452 - RNA, 22 nt, synthetic construct
  source 1..22: mol_type = other RNA
gagatagaccagatgcgtggtt

SEQ ID NO: 136453 - RNA, 22 nt, synthetic construct
  source 1..22: mol_type = other RNA
gagatagtctcttcctgtatat

SEQ ID NO: 136454 - RNA, 22 nt, synthetic construct
  source 1..22: mol_type = other RNA
gagatatacaggaagagactat

SEQ ID NO: 136455 - RNA, 22 nt, synthetic construct
  source 1..22: mol_type = other RNA
gagatatttcgcctagataaga

SEQ ID NO: 136456 - RNA, 22 nt, synthetic construct
  source 1..22: mol_type = other RNA
gagatcacgccactgcattccg

SEQ ID NO: 136457 - RNA, 22 nt, synthetic construct
  source 1..22: mol_type = other RNA
gagatctaaattttaagtgcac

SEQ ID NO: 136458 - RNA, 22 nt, synthetic construct
  source 1..22: mol_type = other RNA
gagatctagtgaagtcaatttc

SEQ ID NO: 136459 - RNA, 22 nt, synthetic construct
  source 1..22: mol_type = other RNA
gagatctgaaattgacttcact

SEQ ID NO: 136460 - RNA, 22 nt, synthetic construct
  source 1..22: mol_type = other RNA
gagatcttgtgtatcttttgtt

SEQ ID NO: 136461 - RNA, 22 nt, synthetic construct
  source 1..22: mol_type = other RNA
gagatgaatggataaggaaaat

SEQ ID NO: 136462 - RNA, 22 nt, synthetic construct
  source 1..22: mol_type = other RNA
gagatgaggttttacgatgttg

SEQ ID NO: 136463 - RNA, 22 nt, synthetic construct
  source 1..22: mol_type = other RNA
gagatgcctatgaaatcttgaa

SEQ ID NO: 136464 - RNA, 22 nt, synthetic construct
  source 1..22: mol_type = other RNA
gagatgcctgtgcttgtctctc

SEQ ID NO: 136465 - RNA, 22 nt, synthetic construct
  source 1..22: mol_type = other RNA
gagatggacactgcagatgaat

SEQ ID NO: 136466 - RNA, 22 nt, synthetic construct
  source 1..22: mol_type = other RNA
gagatggcacataccatggaat

SEQ ID NO: 136467 - RNA, 22 nt, synthetic construct
  source 1..22: mol_type = other RNA
gagatggcgtgcgcctgtaatc

SEQ ID NO: 136468 - RNA, 22 nt, synthetic construct
  source 1..22: mol_type = other RNA
gagatgggaaagtattcccaag

SEQ ID NO: 136469 - RNA, 22 nt, synthetic construct
  source 1..22: mol_type = other RNA
gagatgggaagaaaaaataaag

SEQ ID NO: 136470 - RNA, 22 nt, synthetic construct
  source 1..22: mol_type = other RNA
gagatggggacttgctctcttg

SEQ ID NO: 136471 - RNA, 22 nt, synthetic construct
  source 1..22: mol_type = other RNA
gagatggggtctcattgtgttg

SEQ ID NO: 136472 - RNA, 22 nt, synthetic construct
  source 1..22: mol_type = other RNA
gagatggggtttgtccatgttg

SEQ ID NO: 136473 - RNA, 22 nt, synthetic construct
  source 1..22: mol_type = other RNA
gagatggtagtcaacacttttc

SEQ ID NO: 136474 - RNA, 22 nt, synthetic construct
  source 1..22: mol_type = other RNA
gagatggtcagtactatcttcc

SEQ ID NO: 136475 - RNA, 22 nt, synthetic construct
  source 1..22: mol_type = other RNA
gagatggtgggagaggcatgcc

SEQ ID NO: 136476 - RNA, 22 nt, synthetic construct
  source 1..22: mol_type = other RNA
gagatgtactggaagtgtaaca

SEQ ID NO: 136477 - RNA, 22 nt, synthetic construct
  source 1..22: mol_type = other RNA
gagatgtgtaattgtaccttgg

SEQ ID NO: 136478 - RNA, 22 nt, synthetic construct
  source 1..22: mol_type = other RNA
gagattaaataacttccatgag

SEQ ID NO: 136479 - RNA, 22 nt, synthetic construct
  source 1..22: mol_type = other RNA
gagattaaggctggaggatggc

SEQ ID NO: 136480 - RNA, 22 nt, synthetic construct
  source 1..22: mol_type = other RNA
gagattaatgtaggtgtctgat

SEQ ID NO: 136481 - RNA, 22 nt, synthetic construct
  source 1..22: mol_type = other RNA
gagattaattcagtcaacacca

SEQ ID NO: 136482 - RNA, 22 nt, synthetic construct
  source 1..22: mol_type = other RNA
gagattacagatgtgagccccc

SEQ ID NO: 136483 - RNA, 22 nt, synthetic construct
  source 1..22: mol_type = other RNA
gagattacatagcaaggaagca

SEQ ID NO: 136484 - RNA, 22 nt, synthetic construct
  source 1..22: mol_type = other RNA
gagattagcgaaagggattctg

SEQ ID NO: 136485 - RNA, 22 nt, synthetic construct
  source 1..22: mol_type = other RNA
gagattaggcagaaccacctgg

SEQ ID NO: 136486 - RNA, 22 nt, synthetic construct
  source 1..22: mol_type = other RNA
gagattataggtgtgagccact

SEQ ID NO: 136487 - RNA, 22 nt, synthetic construct
  source 1..22: mol_type = other RNA
gagattcaagaaaccacagagc

SEQ ID NO: 136488 - RNA, 22 nt, synthetic construct
  source 1..22: mol_type = other RNA
gagattgatagatcatatgata

SEQ ID NO: 136489 - RNA, 22 nt, synthetic construct
  source 1..22: mol_type = other RNA
gagattgcacaattgcactcca

SEQ ID NO: 136490 - RNA, 22 nt, synthetic construct
  source 1..22: mol_type = other RNA
gagattgccccattgcactcca

SEQ ID NO: 136491 - RNA, 22 nt, synthetic construct
  source 1..22: mol_type = other RNA
gagattgggaaaatcttggaac

SEQ ID NO: 136492 - RNA, 22 nt, synthetic construct
  source 1..22: mol_type = other RNA
gagattgtcgttgagtacctct

SEQ ID NO: 136493 - RNA, 22 nt, synthetic construct
  source 1..22: mol_type = other RNA
gagattgtgccagtgaactcca

SEQ ID NO: 136494 - RNA, 22 nt, synthetic construct
  source 1..22: mol_type = other RNA
gagatttgagtcttgctctctt

SEQ ID NO: 136495 - RNA, 22 nt, synthetic construct
  source 1..22: mol_type = other RNA
gagatttgctgtataacatttt

SEQ ID NO: 136496 - RNA, 22 nt, synthetic construct
  source 1..22: mol_type = other RNA
gagattttcccaaagatagact

SEQ ID NO: 136497 - RNA, 22 nt, synthetic construct
  source 1..22: mol_type = other RNA
gagatttttatcaaaatcaagg

SEQ ID NO: 136498 - RNA, 22 nt, synthetic construct
  source 1..22: mol_type = other RNA
gagcaaaaatacagctccaaag

SEQ ID NO: 136499 - RNA, 22 nt, synthetic construct
  source 1..22: mol_type = other RNA
gagcaaactcagatctgagaga

SEQ ID NO: 136500 - RNA, 22 nt, synthetic construct
  source 1..22: mol_type = other RNA
gagcaacaacctgtctcaaaaa

SEQ ID NO: 136501 - RNA, 22 nt, synthetic construct
  source 1..22: mol_type = other RNA
gagcaactactatttcgcaaag

SEQ ID NO: 136502 - RNA, 22 nt, synthetic construct
  source 1..22: mol_type = other RNA
gagcaagaccctgtctctaaaa

SEQ ID NO: 136503 - RNA, 22 nt, synthetic construct
  source 1..22: mol_type = other RNA
gagcaagactcaaatctcaaaa

SEQ ID NO: 136504 - RNA, 22 nt, synthetic construct
  source 1..22: mol_type = other RNA
gagcaagcaacaccagatactc

SEQ ID NO: 136505 - RNA, 22 nt, synthetic construct
  source 1..22: mol_type = other RNA
gagcaagcacgttagcatcacc

SEQ ID NO: 136506 - RNA, 22 nt, synthetic construct
  source 1..22: mol_type = other RNA
gagcaagcatgagtatctggtg

SEQ ID NO: 136507 - RNA, 22 nt, synthetic construct
  source 1..22: mol_type = other RNA
gagcaaggaaggaaaggagata

SEQ ID NO: 136508 - RNA, 22 nt, synthetic construct
  source 1..22: mol_type = other RNA
gagcaaggtcgtttcagattgc

SEQ ID NO: 136509 - RNA, 22 nt, synthetic construct
  source 1..22: mol_type = other RNA
gagcaagtccccatctccacaa

SEQ ID NO: 136510 - RNA, 22 nt, synthetic construct
  source 1..22: mol_type = other RNA
gagcacaatgcctgccgcagag

SEQ ID NO: 136511 - RNA, 22 nt, synthetic construct
  source 1..22: mol_type = other RNA
gagcacaccaagacatgttagg

SEQ ID NO: 136512 - RNA, 22 nt, synthetic construct
  source 1..22: mol_type = other RNA
gagcacagactcaagcctgata

SEQ ID NO: 136513 - RNA, 22 nt, synthetic construct
  source 1..22: mol_type = other RNA
gagcactggtttcagtacacga

SEQ ID NO: 136514 - RNA, 22 nt, synthetic construct
  source 1..22: mol_type = other RNA
gagcactgtgagccactaaaac

SEQ ID NO: 136515 - RNA, 22 nt, synthetic construct
  source 1..22: mol_type = other RNA
gagcactttcgtatttttgtta

SEQ ID NO: 136516 - RNA, 22 nt, synthetic construct
  source 1..22: mol_type = other RNA
gagcagaactccacctcagaaa

SEQ ID NO: 136517 - RNA, 22 nt, synthetic construct
  source 1..22: mol_type = other RNA
gagcagaaggaggaaaataatt

SEQ ID NO: 136518 - RNA, 22 nt, synthetic construct
  source 1..22: mol_type = other RNA
gagcagaagggaaaggatgacc

SEQ ID NO: 136519 - RNA, 22 nt, synthetic construct
  source 1..22: mol_type = other RNA
gagcagagacacacatcagaca

SEQ ID NO: 136520 - RNA, 22 nt, synthetic construct
  source 1..22: mol_type = other RNA
gagcagagtcctgagggtgaga

SEQ ID NO: 136521 - RNA, 22 nt, synthetic construct
  source 1..22: mol_type = other RNA
gagcagatcagtaacaaataag

SEQ ID NO: 136522 - RNA, 22 nt, synthetic construct
  source 1..22: mol_type = other RNA
gagcagcactgatgtgtagtta

SEQ ID NO: 136523 - RNA, 22 nt, synthetic construct
  source 1..22: mol_type = other RNA
gagcaggctccacttgggtgga

SEQ ID NO: 136524 - RNA, 22 nt, synthetic construct
  source 1..22: mol_type = other RNA
gagcaggggtggggggatgtag

SEQ ID NO: 136525 - RNA, 22 nt, synthetic construct
  source 1..22: mol_type = other RNA
gagcagggtgggcccttaatcc

SEQ ID NO: 136526 - RNA, 22 nt, synthetic construct
  source 1..22: mol_type = other RNA
gagcaggtggaaggcctgatag

SEQ ID NO: 136527 - RNA, 22 nt, synthetic construct
  source 1..22: mol_type = other RNA
gagcagtaggcttagataggat

SEQ ID NO: 136528 - RNA, 22 nt, synthetic construct
  source 1..22: mol_type = other RNA
gagcagtgaaagtctccctaac

SEQ ID NO: 136529 - RNA, 22 nt, synthetic construct
  source 1..22: mol_type = other RNA
gagcagtgtgaataggaaagtg

SEQ ID NO: 136530 - RNA, 22 nt, synthetic construct
  source 1..22: mol_type = other RNA
gagcagtgtgttctgccttgag

SEQ ID NO: 136531 - RNA, 22 nt, synthetic construct
  source 1..22: mol_type = other RNA
gagcagtgtttcctagattccc

SEQ ID NO: 136532 - RNA, 22 nt, synthetic construct
  source 1..22: mol_type = other RNA
gagcagttactcctgagcaagg

SEQ ID NO: 136533 - RNA, 22 nt, synthetic construct
  source 1..22: mol_type = other RNA
gagcagttgtatgccaaaaaat

SEQ ID NO: 136534 - RNA, 22 nt, synthetic construct
  source 1..22: mol_type = other RNA
gagcatagactttagagtcagt

SEQ ID NO: 136535 - RNA, 22 nt, synthetic construct
  source 1..22: mol_type = other RNA
gagcatagcttgaaccagggag

SEQ ID NO: 136536 - RNA, 22 nt, synthetic construct
  source 1..22: mol_type = other RNA
gagcatatatactctgagacag

SEQ ID NO: 136537 - RNA, 22 nt, synthetic construct
  source 1..22: mol_type = other RNA
gagcatcccagaggtactcaac

SEQ ID NO: 136538 - RNA, 22 nt, synthetic construct
  source 1..22: mol_type = other RNA
gagcatccccgctgcgagaaag

SEQ ID NO: 136539 - RNA, 22 nt, synthetic construct
  source 1..22: mol_type = other RNA
gagcatcttcccatgaacatgg

SEQ ID NO: 136540 - RNA, 22 nt, synthetic construct
  source 1..22: mol_type = other RNA
gagcatgcacacaggagaactt

SEQ ID NO: 136541 - RNA, 22 nt, synthetic construct
  source 1..22: mol_type = other RNA
gagcatgctgcaactgagaaga

SEQ ID NO: 136542 - RNA, 22 nt, synthetic construct
  source 1..22: mol_type = other RNA
gagcatgtcccctggagttaat

SEQ ID NO: 136543 - RNA, 22 nt, synthetic construct
  source 1..22: mol_type = other RNA
gagcatgttgggccaacttcca

SEQ ID NO: 136544 - RNA, 22 nt, synthetic construct
  source 1..22: mol_type = other RNA
gagcattccccacataggatag

SEQ ID NO: 136545 - RNA, 22 nt, synthetic construct
  source 1..22: mol_type = other RNA
gagcattgcctttattactatt

SEQ ID NO: 136546 - RNA, 22 nt, synthetic construct
  source 1..22: mol_type = other RNA
gagcatttagccccctgaatac

SEQ ID NO: 136547 - RNA, 22 nt, synthetic construct
  source 1..22: mol_type = other RNA
gagcatttatataagttcaaag

SEQ ID NO: 136548 - RNA, 22 nt, synthetic construct
  source 1..22: mol_type = other RNA
gagccaaacatcatgatttaat

SEQ ID NO: 136549 - RNA, 22 nt, synthetic construct
  source 1..22: mol_type = other RNA
gagccaaacttgaaccttcctc

SEQ ID NO: 136550 - RNA, 22 nt, synthetic construct
  source 1..22: mol_type = other RNA
gagccaaagaagaaatcaaatg

SEQ ID NO: 136551 - RNA, 22 nt, synthetic construct
  source 1..22: mol_type = other RNA
gagccaaagacattgtcttaca

SEQ ID NO: 136552 - RNA, 22 nt, synthetic construct
  source 1..22: mol_type = other RNA
gagccaagtaaaagcaacctca

SEQ ID NO: 136553 - RNA, 22 nt, synthetic construct
  source 1..22: mol_type = other RNA
gagccacagcgcccggcccgtt

SEQ ID NO: 136554 - RNA, 22 nt, synthetic construct
  source 1..22: mol_type = other RNA
gagccacagctacactcaatac

SEQ ID NO: 136555 - RNA, 22 nt, synthetic construct
  source 1..22: mol_type = other RNA
gagccacagggcccagcctcaa

SEQ ID NO: 136556 - RNA, 22 nt, synthetic construct
  source 1..22: mol_type = other RNA
gagccacatacatagtattaaa

SEQ ID NO: 136557 - RNA, 22 nt, synthetic construct
  source 1..22: mol_type = other RNA
gagccaccacgtccggtcgttg

SEQ ID NO: 136558 - RNA, 22 nt, synthetic construct
  source 1..22: mol_type = other RNA
gagccaccactcccggccgtat

SEQ ID NO: 136559 - RNA, 22 nt, synthetic construct
  source 1..22: mol_type = other RNA
gagccaccgcacctggccggga

SEQ ID NO: 136560 - RNA, 22 nt, synthetic construct
  source 1..22: mol_type = other RNA
gagccaccgcgcccggccaaat

SEQ ID NO: 136561 - RNA, 22 nt, synthetic construct
  source 1..22: mol_type = other RNA
gagccaccgcgcctggtgatta

SEQ ID NO: 136562 - RNA, 22 nt, synthetic construct
  source 1..22: mol_type = other RNA
gagccaccgtgccgggcttggt

SEQ ID NO: 136563 - RNA, 22 nt, synthetic construct
  source 1..22: mol_type = other RNA
gagccacctcatccggtctcag

SEQ ID NO: 136564 - RNA, 22 nt, synthetic construct
  source 1..22: mol_type = other RNA
gagccactaaaacaggaagttg

SEQ ID NO: 136565 - RNA, 22 nt, synthetic construct
  source 1..22: mol_type = other RNA
gagccactacgcccggcccatg

SEQ ID NO: 136566 - RNA, 22 nt, synthetic construct
  source 1..22: mol_type = other RNA
gagccactagtcagtatattta

SEQ ID NO: 136567 - RNA, 22 nt, synthetic construct
  source 1..22: mol_type = other RNA
gagccactgcgggcccagctct

SEQ ID NO: 136568 - RNA, 22 nt, synthetic construct
  source 1..22: mol_type = other RNA
gagccagagtttcactctgtcg

SEQ ID NO: 136569 - RNA, 22 nt, synthetic construct
  source 1..22: mol_type = other RNA
gagccagcaaatcagaaaaggc

SEQ ID NO: 136570 - RNA, 22 nt, synthetic construct
  source 1..22: mol_type = other RNA
gagccagcctgatgatgatggt

SEQ ID NO: 136571 - RNA, 22 nt, synthetic construct
  source 1..22: mol_type = other RNA
gagccaggaagtcagcaactct

SEQ ID NO: 136572 - RNA, 22 nt, synthetic construct
  source 1..22: mol_type = other RNA
gagccaggcatggtggtgggct

SEQ ID NO: 136573 - RNA, 22 nt, synthetic construct
  source 1..22: mol_type = other RNA
gagccatcatgcctgggtaatt

SEQ ID NO: 136574 - RNA, 22 nt, synthetic construct
  source 1..22: mol_type = other RNA
gagccatcgcgcccagcccgtg

SEQ ID NO: 136575 - RNA, 22 nt, synthetic construct
  source 1..22: mol_type = other RNA
gagcccaagcacactttccttg

SEQ ID NO: 136576 - RNA, 22 nt, synthetic construct
  source 1..22: mol_type = other RNA
gagcccaccaccatgcctggct

SEQ ID NO: 136577 - RNA, 22 nt, synthetic construct
  source 1..22: mol_type = other RNA
gagcccagaaataaatcctcac

SEQ ID NO: 136578 - RNA, 22 nt, synthetic construct
  source 1..22: mol_type = other RNA
gagcccagagatcccaccattg

SEQ ID NO: 136579 - RNA, 22 nt, synthetic construct
  source 1..22: mol_type = other RNA
gagcccaggaggttgaagctct

SEQ ID NO: 136580 - RNA, 22 nt, synthetic construct
  source 1..22: mol_type = other RNA
gagcccaggagttgcatcactt

SEQ ID NO: 136581 - RNA, 22 nt, synthetic construct
  source 1..22: mol_type = other RNA
gagcccagggggtcgagactgt

SEQ ID NO: 136582 - RNA, 22 nt, synthetic construct
  source 1..22: mol_type = other RNA
gagccccaagaaagcaggtcat

SEQ ID NO: 136583 - RNA, 22 nt, synthetic construct
  source 1..22: mol_type = other RNA
gagccccagaataggcaaattc

SEQ ID NO: 136584 - RNA, 22 nt, synthetic construct
  source 1..22: mol_type = other RNA
gagccctccaggatccagtctc

SEQ ID NO: 136585 - RNA, 22 nt, synthetic construct
  source 1..22: mol_type = other RNA
gagccctgctgtggccgaggga

SEQ ID NO: 136586 - RNA, 22 nt, synthetic construct
  source 1..22: mol_type = other RNA
gagccgaaatgcacttagcgct

SEQ ID NO: 136587 - RNA, 22 nt, synthetic construct
  source 1..22: mol_type = other RNA
gagccgagatcacgccactgca

SEQ ID NO: 136588 - RNA, 22 nt, synthetic construct
  source 1..22: mol_type = other RNA
gagccgagcagaagggaaagga

SEQ ID NO: 136589 - RNA, 22 nt, synthetic construct
  source 1..22: mol_type = other RNA
gagccgtcggtatgttaataac

SEQ ID NO: 136590 - RNA, 22 nt, synthetic construct
  source 1..22: mol_type = other RNA
gagcctaaaataggcctaggtg

SEQ ID NO: 136591 - RNA, 22 nt, synthetic construct
  source 1..22: mol_type = other RNA
gagcctaatgtgtaagaaatgc

SEQ ID NO: 136592 - RNA, 22 nt, synthetic construct
  source 1..22: mol_type = other RNA
gagcctagtcatccactgcaca

SEQ ID NO: 136593 - RNA, 22 nt, synthetic construct
  source 1..22: mol_type = other RNA
gagcctccacacctggcccctt

SEQ ID NO: 136594 - RNA, 22 nt, synthetic construct
  source 1..22: mol_type = other RNA
gagcctgaggacactagcaatc

SEQ ID NO: 136595 - RNA, 22 nt, synthetic construct
  source 1..22: mol_type = other RNA
gagcctgctctgcagagactgt

SEQ ID NO: 136596 - RNA, 22 nt, synthetic construct
  source 1..22: mol_type = other RNA
gagcctggaagttcaaggttat

SEQ ID NO: 136597 - RNA, 22 nt, synthetic construct
  source 1..22: mol_type = other RNA
gagcctgtggtctcttcgaggg

SEQ ID NO: 136598 - RNA, 22 nt, synthetic construct
  source 1..22: mol_type = other RNA
gagcctgttccgattttactta

SEQ ID NO: 136599 - RNA, 22 nt, synthetic construct
  source 1..22: mol_type = other RNA
gagccttcagaactcttctcca

SEQ ID NO: 136600 - RNA, 22 nt, synthetic construct
  source 1..22: mol_type = other RNA
gagccttgctgttgtaatgtta

SEQ ID NO: 136601 - RNA, 22 nt, synthetic construct
  source 1..22: mol_type = other RNA
gagcgaagagggagaagaaata

SEQ ID NO: 136602 - RNA, 22 nt, synthetic construct
  source 1..22: mol_type = other RNA
gagcgacagctacggaggatga

SEQ ID NO: 136603 - RNA, 22 nt, synthetic construct
  source 1..22: mol_type = other RNA
gagcgagactccatctcaagaa

SEQ ID NO: 136604 - RNA, 22 nt, synthetic construct
  source 1..22: mol_type = other RNA
gagcgaggcctggaacaggccc

SEQ ID NO: 136605 - RNA, 22 nt, synthetic construct
  source 1..22: mol_type = other RNA
gagcgccacgtgaagatggagt

SEQ ID NO: 136606 - RNA, 22 nt, synthetic construct
  source 1..22: mol_type = other RNA
gagcgccctggcattgtcccgg

SEQ ID NO: 136607 - RNA, 22 nt, synthetic construct
  source 1..22: mol_type = other RNA
gagcgcttctatgtgacaaaca

SEQ ID NO: 136608 - RNA, 22 nt, synthetic construct
  source 1..22: mol_type = other RNA
gagcggcctttgcctctccagg

SEQ ID NO: 136609 - RNA, 22 nt, synthetic construct
  source 1..22: mol_type = other RNA
gagcggcgggcttcgcctttgt

SEQ ID NO: 136610 - RNA, 22 nt, synthetic construct
  source 1..22: mol_type = other RNA
gagcgggcagccttggaggagc

SEQ ID NO: 136611 - RNA, 22 nt, synthetic construct
  source 1..22: mol_type = other RNA
gagcgggtttcctcggtctacg

SEQ ID NO: 136612 - RNA, 22 nt, synthetic construct
  source 1..22: mol_type = other RNA
gagcggtgtcttattgttttga

SEQ ID NO: 136613 - RNA, 22 nt, synthetic construct
  source 1..22: mol_type = other RNA
gagcgtcgtacctttcgctatc

SEQ ID NO: 136614 - RNA, 22 nt, synthetic construct
  source 1..22: mol_type = other RNA
gagctaagactataaaactctt

SEQ ID NO: 136615 - RNA, 22 nt, synthetic construct
  source 1..22: mol_type = other RNA
gagctaagatgctattcaagac

SEQ ID NO: 136616 - RNA, 22 nt, synthetic construct
  source 1..22: mol_type = other RNA
gagctaagggaagttttttcaa

SEQ ID NO: 136617 - RNA, 22 nt, synthetic construct
  source 1..22: mol_type = other RNA
gagctacaaactccaaaccttt

SEQ ID NO: 136618 - RNA, 22 nt, synthetic construct
  source 1..22: mol_type = other RNA
gagctactgcatgctaggggct

SEQ ID NO: 136619 - RNA, 22 nt, synthetic construct
  source 1..22: mol_type = other RNA
gagctagaacagaataaaaagt

SEQ ID NO: 136620 - RNA, 22 nt, synthetic construct
  source 1..22: mol_type = other RNA
gagctagaactagaatactcca

SEQ ID NO: 136621 - RNA, 22 nt, synthetic construct
  source 1..22: mol_type = other RNA
gagctagagggtaagaccaaaa

SEQ ID NO: 136622 - RNA, 22 nt, synthetic construct
  source 1..22: mol_type = other RNA
gagctataatttatctggattt

SEQ ID NO: 136623 - RNA, 22 nt, synthetic construct
  source 1..22: mol_type = other RNA
gagctcacacgagaaggacagc

SEQ ID NO: 136624 - RNA, 22 nt, synthetic construct
  source 1..22: mol_type = other RNA
gagctcaggccagtgagtgatg

SEQ ID NO: 136625 - RNA, 22 nt, synthetic construct
  source 1..22: mol_type = other RNA
gagctccagcctgggcgacaga

SEQ ID NO: 136626 - RNA, 22 nt, synthetic construct
  source 1..22: mol_type = other RNA
gagctcctgacctcagatatcc

SEQ ID NO: 136627 - RNA, 22 nt, synthetic construct
  source 1..22: mol_type = other RNA
gagctctagccttgtactgtgt

SEQ ID NO: 136628 - RNA, 22 nt, synthetic construct
  source 1..22: mol_type = other RNA
gagctctcagtggccctgttgg

SEQ ID NO: 136629 - RNA, 22 nt, synthetic construct
  source 1..22: mol_type = other RNA
gagctctgtcttgatgatagaa

SEQ ID NO: 136630 - RNA, 22 nt, synthetic construct
  source 1..22: mol_type = other RNA
gagctgaaagtaaagatagccc

SEQ ID NO: 136631 - RNA, 22 nt, synthetic construct
  source 1..22: mol_type = other RNA
gagctgagaccacagacgtgca

SEQ ID NO: 136632 - RNA, 22 nt, synthetic construct
  source 1..22: mol_type = other RNA
gagctgctgtaacaaagatgcc

SEQ ID NO: 136633 - RNA, 22 nt, synthetic construct
  source 1..22: mol_type = other RNA
gagctggaagtaaggattttct

SEQ ID NO: 136634 - RNA, 22 nt, synthetic construct
  source 1..22: mol_type = other RNA
gagctgggactacaggtgtgaa

SEQ ID NO: 136635 - RNA, 22 nt, synthetic construct
  source 1..22: mol_type = other RNA
gagctgggcccgcagtggctca

SEQ ID NO: 136636 - RNA, 22 nt, synthetic construct
  source 1..22: mol_type = other RNA
gagctgggtgatgttcaaccct

SEQ ID NO: 136637 - RNA, 22 nt, synthetic construct
  source 1..22: mol_type = other RNA
gagctgtaacagaggcatgcac

SEQ ID NO: 136638 - RNA, 22 nt, synthetic construct
  source 1..22: mol_type = other RNA
gagctgtatttttgctcacact

SEQ ID NO: 136639 - RNA, 22 nt, synthetic construct
  source 1..22: mol_type = other RNA
gagctgtccccaccgccttcct

SEQ ID NO: 136640 - RNA, 22 nt, synthetic construct
  source 1..22: mol_type = other RNA
gagctgtgccgaggcagagaga

SEQ ID NO: 136641 - RNA, 22 nt, synthetic construct
  source 1..22: mol_type = other RNA
gagctgttaatggttagactgc

SEQ ID NO: 136642 - RNA, 22 nt, synthetic construct
  source 1..22: mol_type = other RNA
gagcttatcaggcttgagtctg

SEQ ID NO: 136643 - RNA, 22 nt, synthetic construct
  source 1..22: mol_type = other RNA
gagcttcaacctcctgggctca

SEQ ID NO: 136644 - RNA, 22 nt, synthetic construct
  source 1..22: mol_type = other RNA
gagcttgatctttacttccctt

SEQ ID NO: 136645 - RNA, 22 nt, synthetic construct
  source 1..22: mol_type = other RNA
gagctttcattattaccaggtt

SEQ ID NO: 136646 - RNA, 22 nt, synthetic construct
  source 1..22: mol_type = other RNA
gagctttccttagttcgaagtt

SEQ ID NO: 136647 - RNA, 22 nt, synthetic construct
  source 1..22: mol_type = other RNA
gagctttcttttaaagacctca

SEQ ID NO: 136648 - RNA, 22 nt, synthetic construct
  source 1..22: mol_type = other RNA
gagctttgttatgaaaatagta

SEQ ID NO: 136649 - RNA, 22 nt, synthetic construct
  source 1..22: mol_type = other RNA
gagcttttattttactctcttt

SEQ ID NO: 136650 - RNA, 22 nt, synthetic construct
  source 1..22: mol_type = other RNA
gagcttttgaaactgagcatcc

SEQ ID NO: 136651 - RNA, 22 nt, synthetic construct
  source 1..22: mol_type = other RNA
gagctttttctttttaaacagg

SEQ ID NO: 136652 - RNA, 22 nt, synthetic construct
  source 1..22: mol_type = other RNA
gaggaaaaaacagttgctattc

SEQ ID NO: 136653 - RNA, 22 nt, synthetic construct
  source 1..22: mol_type = other RNA
gaggaaaagagaacattggttt

SEQ ID NO: 136654 - RNA, 22 nt, synthetic construct
  source 1..22: mol_type = other RNA
gaggaaaataatttgcaacaga

SEQ ID NO: 136655 - RNA, 22 nt, synthetic construct
  source 1..22: mol_type = other RNA
gaggaaacccgctctgggtgcg

SEQ ID NO: 136656 - RNA, 22 nt, synthetic construct
  source 1..22: mol_type = other RNA
gaggaaagcaggttgcattaat

SEQ ID NO: 136657 - RNA, 22 nt, synthetic construct
  source 1..22: mol_type = other RNA
gaggaactaattgataaaactg

SEQ ID NO: 136658 - RNA, 22 nt, synthetic construct
  source 1..22: mol_type = other RNA
gaggaagagatagtctcttcct

SEQ ID NO: 136659 - RNA, 22 nt, synthetic construct
  source 1..22: mol_type = other RNA
gaggaagaggaaggttcaagtt

SEQ ID NO: 136660 - RNA, 22 nt, synthetic construct
  source 1..22: mol_type = other RNA
gaggaagctaatcaagccgcaa

SEQ ID NO: 136661 - RNA, 22 nt, synthetic construct
  source 1..22: mol_type = other RNA
gaggaagcttataatttctgag

SEQ ID NO: 136662 - RNA, 22 nt, synthetic construct
  source 1..22: mol_type = other RNA
gaggaaggagaatcgcttaaac

SEQ ID NO: 136663 - RNA, 22 nt, synthetic construct
  source 1..22: mol_type = other RNA
gaggaaggttcaagtttggctc

SEQ ID NO: 136664 - RNA, 22 nt, synthetic construct
  source 1..22: mol_type = other RNA
gaggaagtgaccctgagtccag

SEQ ID NO: 136665 - RNA, 22 nt, synthetic construct
  source 1..22: mol_type = other RNA
gaggaataaatggtagcttggg

SEQ ID NO: 136666 - RNA, 22 nt, synthetic construct
  source 1..22: mol_type = other RNA
gaggaatccttcagtcagttct

SEQ ID NO: 136667 - RNA, 22 nt, synthetic construct
  source 1..22: mol_type = other RNA
gaggacactagcaatccaggat

SEQ ID NO: 136668 - RNA, 22 nt, synthetic construct
  source 1..22: mol_type = other RNA
gaggacagactgcagttggatt

SEQ ID NO: 136669 - RNA, 22 nt, synthetic construct
  source 1..22: mol_type = other RNA
gaggacagttggccttgaggtg

SEQ ID NO: 136670 - RNA, 22 nt, synthetic construct
  source 1..22: mol_type = other RNA
gaggacatggagacagtgagca

SEQ ID NO: 136671 - RNA, 22 nt, synthetic construct
  source 1..22: mol_type = other RNA
gaggacattatgctaagtaaaa

SEQ ID NO: 136672 - RNA, 22 nt, synthetic construct
  source 1..22: mol_type = other RNA
gaggacgatttttccaacagtt

SEQ ID NO: 136673 - RNA, 22 nt, synthetic construct
  source 1..22: mol_type = other RNA
gaggacgctgatgacagttact

SEQ ID NO: 136674 - RNA, 22 nt, synthetic construct
  source 1..22: mol_type = other RNA
gaggactgcctattttgtaatt

SEQ ID NO: 136675 - RNA, 22 nt, synthetic construct
  source 1..22: mol_type = other RNA
gaggactgcctggtcctgaggg

SEQ ID NO: 136676 - RNA, 22 nt, synthetic construct
  source 1..22: mol_type = other RNA
gaggacttcatgtacaatgaat

SEQ ID NO: 136677 - RNA, 22 nt, synthetic construct
  source 1..22: mol_type = other RNA
gaggagaaggccttccacggaa

SEQ ID NO: 136678 - RNA, 22 nt, synthetic construct
  source 1..22: mol_type = other RNA
gaggagacattacaattgatac

SEQ ID NO: 136679 - RNA, 22 nt, synthetic construct
  source 1..22: mol_type = other RNA
gaggagcagttactcctgagca

SEQ ID NO: 136680 - RNA, 22 nt, synthetic construct
  source 1..22: mol_type = other RNA
gaggagccaagtaaaagcaacc

SEQ ID NO: 136681 - RNA, 22 nt, synthetic construct
  source 1..22: mol_type = other RNA
gaggagccctgctgtggccgag

SEQ ID NO: 136682 - RNA, 22 nt, synthetic construct
  source 1..22: mol_type = other RNA
gaggagcgccctggcattgtcc

SEQ ID NO: 136683 - RNA, 22 nt, synthetic construct
  source 1..22: mol_type = other RNA
gaggagctgagaccacagacgt

SEQ ID NO: 136684 - RNA, 22 nt, synthetic construct
  source 1..22: mol_type = other RNA
gaggaggaagagatagtctctt

SEQ ID NO: 136685 - RNA, 22 nt, synthetic construct
  source 1..22: mol_type = other RNA
gaggaggagggtgcagcctcta

SEQ ID NO: 136686 - RNA, 22 nt, synthetic construct
  source 1..22: mol_type = other RNA
gaggaggagggttagattatat

SEQ ID NO: 136687 - RNA, 22 nt, synthetic construct
  source 1..22: mol_type = other RNA
gaggagggatgcattctagaaa

SEQ ID NO: 136688 - RNA, 22 nt, synthetic construct
  source 1..22: mol_type = other RNA
gaggagggtgcagcctctaatc

SEQ ID NO: 136689 - RNA, 22 nt, synthetic construct
  source 1..22: mol_type = other RNA
gaggagggttagattatatggt

SEQ ID NO: 136690 - RNA, 22 nt, synthetic construct
  source 1..22: mol_type = other RNA
gaggaggtcatactggagcagg

SEQ ID NO: 136691 - RNA, 22 nt, synthetic construct
  source 1..22: mol_type = other RNA
gaggagtgaatttttcatttta

SEQ ID NO: 136692 - RNA, 22 nt, synthetic construct
  source 1..22: mol_type = other RNA
gaggataaggggcagggtggag

SEQ ID NO: 136693 - RNA, 22 nt, synthetic construct
  source 1..22: mol_type = other RNA
gaggataatatctggactgaaa

SEQ ID NO: 136694 - RNA, 22 nt, synthetic construct
  source 1..22: mol_type = other RNA
gaggatataacgatagtctcct

SEQ ID NO: 136695 - RNA, 22 nt, synthetic construct
  source 1..22: mol_type = other RNA
gaggatctgttggtgcttagct

SEQ ID NO: 136696 - RNA, 22 nt, synthetic construct
  source 1..22: mol_type = other RNA
gaggatgactgtcctgaattct

SEQ ID NO: 136697 - RNA, 22 nt, synthetic construct
  source 1..22: mol_type = other RNA
gaggatgaggggctgagccttc

SEQ ID NO: 136698 - RNA, 22 nt, synthetic construct
  source 1..22: mol_type = other RNA
gaggatggcttgagcccagggg

SEQ ID NO: 136699 - RNA, 22 nt, synthetic construct
  source 1..22: mol_type = other RNA
gaggatgggcattccagagggt

SEQ ID NO: 136700 - RNA, 22 nt, synthetic construct
  source 1..22: mol_type = other RNA
gaggattccaggtttacaggat

SEQ ID NO: 136701 - RNA, 22 nt, synthetic construct
  source 1..22: mol_type = other RNA
gaggattcgattaaaataacac

SEQ ID NO: 136702 - RNA, 22 nt, synthetic construct
  source 1..22: mol_type = other RNA
gaggattggagactgataaact

SEQ ID NO: 136703 - RNA, 22 nt, synthetic construct
  source 1..22: mol_type = other RNA
gaggattgtttgaggctgggag

SEQ ID NO: 136704 - RNA, 22 nt, synthetic construct
  source 1..22: mol_type = other RNA
gaggattttggattgcgattgt

SEQ ID NO: 136705 - RNA, 22 nt, synthetic construct
  source 1..22: mol_type = other RNA
gaggcaaaactcctgaacaaaa

SEQ ID NO: 136706 - RNA, 22 nt, synthetic construct
  source 1..22: mol_type = other RNA
gaggcaaaggccgctcttgacc

SEQ ID NO: 136707 - RNA, 22 nt, synthetic construct
  source 1..22: mol_type = other RNA
gaggcaaaggttgagacaagac

SEQ ID NO: 136708 - RNA, 22 nt, synthetic construct
  source 1..22: mol_type = other RNA
gaggcaacagtcattcaggtct

SEQ ID NO: 136709 - RNA, 22 nt, synthetic construct
  source 1..22: mol_type = other RNA
gaggcaatgttgattttgaggc

SEQ ID NO: 136710 - RNA, 22 nt, synthetic construct
  source 1..22: mol_type = other RNA
gaggcacctgaacccaggaggc

SEQ ID NO: 136711 - RNA, 22 nt, synthetic construct
  source 1..22: mol_type = other RNA
gaggcagagagagtaactggtc

SEQ ID NO: 136712 - RNA, 22 nt, synthetic construct
  source 1..22: mol_type = other RNA
gaggcagagagatggtgggaga

SEQ ID NO: 136713 - RNA, 22 nt, synthetic construct
  source 1..22: mol_type = other RNA
gaggcagagtagagaaggcttt

SEQ ID NO: 136714 - RNA, 22 nt, synthetic construct
  source 1..22: mol_type = other RNA
gaggcagatgttgcggtgagca

SEQ ID NO: 136715 - RNA, 22 nt, synthetic construct
  source 1..22: mol_type = other RNA
gaggcagcccgacctccagcgc

SEQ ID NO: 136716 - RNA, 22 nt, synthetic construct
  source 1..22: mol_type = other RNA
gaggcagctaagcaccaacaga

SEQ ID NO: 136717 - RNA, 22 nt, synthetic construct
  source 1..22: mol_type = other RNA
gaggcaggagaactgcctggac

SEQ ID NO: 136718 - RNA, 22 nt, synthetic construct
  source 1..22: mol_type = other RNA
gaggcaggagaatggcatgaac

SEQ ID NO: 136719 - RNA, 22 nt, synthetic construct
  source 1..22: mol_type = other RNA
gaggcaggagagtcgcttgaac

SEQ ID NO: 136720 - RNA, 22 nt, synthetic construct
  source 1..22: mol_type = other RNA
gaggcaggagcatagcttgaac

SEQ ID NO: 136721 - RNA, 22 nt, synthetic construct
  source 1..22: mol_type = other RNA
gaggcaggaggcacctgaaccc

SEQ ID NO: 136722 - RNA, 22 nt, synthetic construct
  source 1..22: mol_type = other RNA
gaggcaggtggatatctgaggt

SEQ ID NO: 136723 - RNA, 22 nt, synthetic construct
  source 1..22: mol_type = other RNA
gaggcaggtggatcaggagatt

SEQ ID NO: 136724 - RNA, 22 nt, synthetic construct
  source 1..22: mol_type = other RNA
gaggcagtaccattccccttgc

SEQ ID NO: 136725 - RNA, 22 nt, synthetic construct
  source 1..22: mol_type = other RNA
gaggcagttgagttttcaacct

SEQ ID NO: 136726 - RNA, 22 nt, synthetic construct
  source 1..22: mol_type = other RNA
gaggcatattattgtaacttga

SEQ ID NO: 136727 - RNA, 22 nt, synthetic construct
  source 1..22: mol_type = other RNA
gaggcatctagttaccactagc

SEQ ID NO: 136728 - RNA, 22 nt, synthetic construct
  source 1..22: mol_type = other RNA
gaggcatgcacggacttggcac

SEQ ID NO: 136729 - RNA, 22 nt, synthetic construct
  source 1..22: mol_type = other RNA
gaggcatgccgggacaagagtc

SEQ ID NO: 136730 - RNA, 22 nt, synthetic construct
  source 1..22: mol_type = other RNA
gaggcattagtgaattcacagt

SEQ ID NO: 136731 - RNA, 22 nt, synthetic construct
  source 1..22: mol_type = other RNA
gaggccaaatgaaaggcgtcgg

SEQ ID NO: 136732 - RNA, 22 nt, synthetic construct
  source 1..22: mol_type = other RNA
gaggccacaaagtccccacatg

SEQ ID NO: 136733 - RNA, 22 nt, synthetic construct
  source 1..22: mol_type = other RNA
gaggccagtccctagtgtctcc

SEQ ID NO: 136734 - RNA, 22 nt, synthetic construct
  source 1..22: mol_type = other RNA
gaggccatcttcatttctaagc

SEQ ID NO: 136735 - RNA, 22 nt, synthetic construct
  source 1..22: mol_type = other RNA
gaggccccaggggacatagatg

SEQ ID NO: 136736 - RNA, 22 nt, synthetic construct
  source 1..22: mol_type = other RNA
gaggccctattcaacctataag

SEQ ID NO: 136737 - RNA, 22 nt, synthetic construct
  source 1..22: mol_type = other RNA
gaggccctggtgctttctatct

SEQ ID NO: 136738 - RNA, 22 nt, synthetic construct
  source 1..22: mol_type = other RNA
gaggccgaggcaggtggatcag

SEQ ID NO: 136739 - RNA, 22 nt, synthetic construct
  source 1..22: mol_type = other RNA
gaggccgagggttgaacatcac

SEQ ID NO: 136740 - RNA, 22 nt, synthetic construct
  source 1..22: mol_type = other RNA
gaggccgcagtgagccatggct

SEQ ID NO: 136741 - RNA, 22 nt, synthetic construct
  source 1..22: mol_type = other RNA
gaggccggaggattgcttgagt

SEQ ID NO: 136742 - RNA, 22 nt, synthetic construct
  source 1..22: mol_type = other RNA
gaggcctcagaattaatataag

SEQ ID NO: 136743 - RNA, 22 nt, synthetic construct
  source 1..22: mol_type = other RNA
gaggcctcatgtattttcctaa

SEQ ID NO: 136744 - RNA, 22 nt, synthetic construct
  source 1..22: mol_type = other RNA
gaggcctcctgccttcctgacc

SEQ ID NO: 136745 - RNA, 22 nt, synthetic construct
  source 1..22: mol_type = other RNA
gaggcctctccccttgacgaag

SEQ ID NO: 136746 - RNA, 22 nt, synthetic construct
  source 1..22: mol_type = other RNA
gaggcctggaacaggccctttg

SEQ ID NO: 136747 - RNA, 22 nt, synthetic construct
  source 1..22: mol_type = other RNA
gaggcggaaggattgcctaaca

SEQ ID NO: 136748 - RNA, 22 nt, synthetic construct
  source 1..22: mol_type = other RNA
gaggcggaggttgcggtgacgt

SEQ ID NO: 136749 - RNA, 22 nt, synthetic construct
  source 1..22: mol_type = other RNA
gaggcggctggatcgcttgagg

SEQ ID NO: 136750 - RNA, 22 nt, synthetic construct
  source 1..22: mol_type = other RNA
gaggctagaagtcccagttcaa

SEQ ID NO: 136751 - RNA, 22 nt, synthetic construct
  source 1..22: mol_type = other RNA
gaggctaggtgacctgccagag

SEQ ID NO: 136752 - RNA, 22 nt, synthetic construct
  source 1..22: mol_type = other RNA
gaggctattaactttgaaatca

SEQ ID NO: 136753 - RNA, 22 nt, synthetic construct
  source 1..22: mol_type = other RNA
gaggctgaggcaggaggcacct

SEQ ID NO: 136754 - RNA, 22 nt, synthetic construct
  source 1..22: mol_type = other RNA
gaggctgaggcggaaggattgc

SEQ ID NO: 136755 - RNA, 22 nt, synthetic construct
  source 1..22: mol_type = other RNA
gaggctgaggctggggaattgc

SEQ ID NO: 136756 - RNA, 22 nt, synthetic construct
  source 1..22: mol_type = other RNA
gaggctgcaccctcctcctcct

SEQ ID NO: 136757 - RNA, 22 nt, synthetic construct
  source 1..22: mol_type = other RNA
gaggctgcagtgagctccagcc

SEQ ID NO: 136758 - RNA, 22 nt, synthetic construct
  source 1..22: mol_type = other RNA
gaggctgggagtacaagaccag

SEQ ID NO: 136759 - RNA, 22 nt, synthetic construct
  source 1..22: mol_type = other RNA
gaggctggggaattgcatgaga

SEQ ID NO: 136760 - RNA, 22 nt, synthetic construct
  source 1..22: mol_type = other RNA
gaggctgtattgtaggaaagcc

SEQ ID NO: 136761 - RNA, 22 nt, synthetic construct
  source 1..22: mol_type = other RNA
gaggctttaagcagaaagttac

SEQ ID NO: 136762 - RNA, 22 nt, synthetic construct
  source 1..22: mol_type = other RNA
gaggctttctgtgtaatactgt

SEQ ID NO: 136763 - RNA, 22 nt, synthetic construct
  source 1..22: mol_type = other RNA
gaggcttttattggtaatgtta

SEQ ID NO: 136764 - RNA, 22 nt, synthetic construct
  source 1..22: mol_type = other RNA
gaggcttttcatagtcatcatt

SEQ ID NO: 136765 - RNA, 22 nt, synthetic construct
  source 1..22: mol_type = other RNA
gaggcttttggattttctttct

SEQ ID NO: 136766 - RNA, 22 nt, synthetic construct
  source 1..22: mol_type = other RNA
gaggctttttatatttccgatg

SEQ ID NO: 136767 - RNA, 22 nt, synthetic construct
  source 1..22: mol_type = other RNA
gagggaaactgtttttgcaatt

SEQ ID NO: 136768 - RNA, 22 nt, synthetic construct
  source 1..22: mol_type = other RNA
gagggaaattatttccagcctt

SEQ ID NO: 136769 - RNA, 22 nt, synthetic construct
  source 1..22: mol_type = other RNA
gagggaacattttcattttaac

SEQ ID NO: 136770 - RNA, 22 nt, synthetic construct
  source 1..22: mol_type = other RNA
gagggaagtactgagtcaaaac

SEQ ID NO: 136771 - RNA, 22 nt, synthetic construct
  source 1..22: mol_type = other RNA
gagggaatctaggaaacactgc

SEQ ID NO: 136772 - RNA, 22 nt, synthetic construct
  source 1..22: mol_type = other RNA
gagggaatttgttttaccatct

SEQ ID NO: 136773 - RNA, 22 nt, synthetic construct
  source 1..22: mol_type = other RNA
gagggaatttttcttacctaag

SEQ ID NO: 136774 - RNA, 22 nt, synthetic construct
  source 1..22: mol_type = other RNA
gagggactgaaaccagtgggtc

SEQ ID NO: 136775 - RNA, 22 nt, synthetic construct
  source 1..22: mol_type = other RNA
gagggactgagcagtgaaagtc

SEQ ID NO: 136776 - RNA, 22 nt, synthetic construct
  source 1..22: mol_type = other RNA
gagggagaagaaataaacgaca

SEQ ID NO: 136777 - RNA, 22 nt, synthetic construct
  source 1..22: mol_type = other RNA
gagggagaccgtggggggaggg

SEQ ID NO: 136778 - RNA, 22 nt, synthetic construct
  source 1..22: mol_type = other RNA
gagggagacggcgagcttgatc

SEQ ID NO: 136779 - RNA, 22 nt, synthetic construct
  source 1..22: mol_type = other RNA
gagggagagggagctctgtctt

SEQ ID NO: 136780 - RNA, 22 nt, synthetic construct
  source 1..22: mol_type = other RNA
gagggagatatttcgcctagat

SEQ ID NO: 136781 - RNA, 22 nt, synthetic construct
  source 1..22: mol_type = other RNA
gagggagcatcttcccatgaac

SEQ ID NO: 136782 - RNA, 22 nt, synthetic construct
  source 1..22: mol_type = other RNA
gagggagcgccacgtgaagatg

SEQ ID NO: 136783 - RNA, 22 nt, synthetic construct
  source 1..22: mol_type = other RNA
gagggagcgtacggggtccgcg

SEQ ID NO: 136784 - RNA, 22 nt, synthetic construct
  source 1..22: mol_type = other RNA
gagggagctctgtcttgatgat

SEQ ID NO: 136785 - RNA, 22 nt, synthetic construct
  source 1..22: mol_type = other RNA
gagggaggattgtttgaggctg

SEQ ID NO: 136786 - RNA, 22 nt, synthetic construct
  source 1..22: mol_type = other RNA
gagggaggccatcttcatttct

SEQ ID NO: 136787 - RNA, 22 nt, synthetic construct
  source 1..22: mol_type = other RNA
gagggatgaatgttgtacattt

SEQ ID NO: 136788 - RNA, 22 nt, synthetic construct
  source 1..22: mol_type = other RNA
gagggatgaggaagaggaaggt

SEQ ID NO: 136789 - RNA, 22 nt, synthetic construct
  source 1..22: mol_type = other RNA
gagggatgcattctagaaagga

SEQ ID NO: 136790 - RNA, 22 nt, synthetic construct
  source 1..22: mol_type = other RNA
gagggatgctggagtgtggcag

SEQ ID NO: 136791 - RNA, 22 nt, synthetic construct
  source 1..22: mol_type = other RNA
gagggcagagataactgggtgt

SEQ ID NO: 136792 - RNA, 22 nt, synthetic construct
  source 1..22: mol_type = other RNA
gagggccagaggagggatgcat

SEQ ID NO: 136793 - RNA, 22 nt, synthetic construct
  source 1..22: mol_type = other RNA
gagggcctaaataaaacacatg

SEQ ID NO: 136794 - RNA, 22 nt, synthetic construct
  source 1..22: mol_type = other RNA
gagggctcccagtgcccacctg

SEQ ID NO: 136795 - RNA, 22 nt, synthetic construct
  source 1..22: mol_type = other RNA
gagggcttcatgctgggagacc

SEQ ID NO: 136796 - RNA, 22 nt, synthetic construct
  source 1..22: mol_type = other RNA
gagggctttgtgaagggaggta

SEQ ID NO: 136797 - RNA, 22 nt, synthetic construct
  source 1..22: mol_type = other RNA
gaggggcaggaaaggtggggaa

SEQ ID NO: 136798 - RNA, 22 nt, synthetic construct
  source 1..22: mol_type = other RNA
gaggggccagttgagagagaat

SEQ ID NO: 136799 - RNA, 22 nt, synthetic construct
  source 1..22: mol_type = other RNA
gaggggctgagccttcagaact

SEQ ID NO: 136800 - RNA, 22 nt, synthetic construct
  source 1..22: mol_type = other RNA
gagggggagggagagggagctc

SEQ ID NO: 136801 - RNA, 22 nt, synthetic construct
  source 1..22: mol_type = other RNA
gagggggcataacatctatgaa

SEQ ID NO: 136802 - RNA, 22 nt, synthetic construct
  source 1..22: mol_type = other RNA
gagggggctgaggattggagac

SEQ ID NO: 136803 - RNA, 22 nt, synthetic construct
  source 1..22: mol_type = other RNA
gagggggctgagtatgggtctc

SEQ ID NO: 136804 - RNA, 22 nt, synthetic construct
  source 1..22: mol_type = other RNA
gaggggggaagcttttcatata

SEQ ID NO: 136805 - RNA, 22 nt, synthetic construct
  source 1..22: mol_type = other RNA
gaggggtattcagggggctaaa

SEQ ID NO: 136806 - RNA, 22 nt, synthetic construct
  source 1..22: mol_type = other RNA
gaggggtccccagcatccacta

SEQ ID NO: 136807 - RNA, 22 nt, synthetic construct
  source 1..22: mol_type = other RNA
gaggggtcttatgctggtgggc

SEQ ID NO: 136808 - RNA, 22 nt, synthetic construct
  source 1..22: mol_type = other RNA
gagggtaaaatagtcaagtaac

SEQ ID NO: 136809 - RNA, 22 nt, synthetic construct
  source 1..22: mol_type = other RNA
gagggtaacgtgagctggaagt

SEQ ID NO: 136810 - RNA, 22 nt, synthetic construct
  source 1..22: mol_type = other RNA
gagggtaagaaaggagttcagc

SEQ ID NO: 136811 - RNA, 22 nt, synthetic construct
  source 1..22: mol_type = other RNA
gagggtaagaccaaaatggaga

SEQ ID NO: 136812 - RNA, 22 nt, synthetic construct
  source 1..22: mol_type = other RNA
gagggtagcttttcctgctgtc

SEQ ID NO: 136813 - RNA, 22 nt, synthetic construct
  source 1..22: mol_type = other RNA
gagggtatcatattatttttgt

SEQ ID NO: 136814 - RNA, 22 nt, synthetic construct
  source 1..22: mol_type = other RNA
gagggtgagaccaccacacttg

SEQ ID NO: 136815 - RNA, 22 nt, synthetic construct
  source 1..22: mol_type = other RNA
gagggtgcagcctctaatcagg

SEQ ID NO: 136816 - RNA, 22 nt, synthetic construct
  source 1..22: mol_type = other RNA
gagggtgctgatcaggaaagac

SEQ ID NO: 136817 - RNA, 22 nt, synthetic construct
  source 1..22: mol_type = other RNA
gagggtgtgatcaggaaagatg

SEQ ID NO: 136818 - RNA, 22 nt, synthetic construct
  source 1..22: mol_type = other RNA
gagggttagaagacaatactgt

SEQ ID NO: 136819 - RNA, 22 nt, synthetic construct
  source 1..22: mol_type = other RNA
gagggttagattatatggtcta

SEQ ID NO: 136820 - RNA, 22 nt, synthetic construct
  source 1..22: mol_type = other RNA
gagggttagatttttcctttgc

SEQ ID NO: 136821 - RNA, 22 nt, synthetic construct
  source 1..22: mol_type = other RNA
gagggttgaacatcacccagct

SEQ ID NO: 136822 - RNA, 22 nt, synthetic construct
  source 1..22: mol_type = other RNA
gagggtttcagtgagtagggaa

SEQ ID NO: 136823 - RNA, 22 nt, synthetic construct
  source 1..22: mol_type = other RNA
gaggtaagaacttgtctttgtc

SEQ ID NO: 136824 - RNA, 22 nt, synthetic construct
  source 1..22: mol_type = other RNA
gaggtaatactataaggaaata

SEQ ID NO: 136825 - RNA, 22 nt, synthetic construct
  source 1..22: mol_type = other RNA
gaggtactcaacgacaatctct

SEQ ID NO: 136826 - RNA, 22 nt, synthetic construct
  source 1..22: mol_type = other RNA
gaggtagcacaactagtaagta

SEQ ID NO: 136827 - RNA, 22 nt, synthetic construct
  source 1..22: mol_type = other RNA
gaggtaggcttagatgagccca

SEQ ID NO: 136828 - RNA, 22 nt, synthetic construct
  source 1..22: mol_type = other RNA
gaggtatcaccatctgataagc

SEQ ID NO: 136829 - RNA, 22 nt, synthetic construct
  source 1..22: mol_type = other RNA
gaggtatcatttccaagattga

SEQ ID NO: 136830 - RNA, 22 nt, synthetic construct
  source 1..22: mol_type = other RNA
gaggtatttggggctaggattt

SEQ ID NO: 136831 - RNA, 22 nt, synthetic construct
  source 1..22: mol_type = other RNA
gaggtcaagaaataaaacatgg

SEQ ID NO: 136832 - RNA, 22 nt, synthetic construct
  source 1..22: mol_type = other RNA
gaggtcacccaagccacagcgt

SEQ ID NO: 136833 - RNA, 22 nt, synthetic construct
  source 1..22: mol_type = other RNA
gaggtcaggaaggcaggaggcc

SEQ ID NO: 136834 - RNA, 22 nt, synthetic construct
  source 1..22: mol_type = other RNA
gaggtcgcaccctgagcatccc

SEQ ID NO: 136835 - RNA, 22 nt, synthetic construct
  source 1..22: mol_type = other RNA
gaggtcgggctgcctcagccgc

SEQ ID NO: 136836 - RNA, 22 nt, synthetic construct
  source 1..22: mol_type = other RNA
gaggtctaagagataactaatg

SEQ ID NO: 136837 - RNA, 22 nt, synthetic construct
  source 1..22: mol_type = other RNA
gaggtctaggctaatgtgtgtt

SEQ ID NO: 136838 - RNA, 22 nt, synthetic construct
  source 1..22: mol_type = other RNA
gaggtctcaaaatttaaagtta

SEQ ID NO: 136839 - RNA, 22 nt, synthetic construct
  source 1..22: mol_type = other RNA
gaggtctcagccttttctgatt

SEQ ID NO: 136840 - RNA, 22 nt, synthetic construct
  source 1..22: mol_type = other RNA
gaggtctgtctttcagtatgtg

SEQ ID NO: 136841 - RNA, 22 nt, synthetic construct
  source 1..22: mol_type = other RNA
gaggtctgttactcccgatttc

SEQ ID NO: 136842 - RNA, 22 nt, synthetic construct
  source 1..22: mol_type = other RNA
gaggtcttctagctttcagcac

SEQ ID NO: 136843 - RNA, 22 nt, synthetic construct
  source 1..22: mol_type = other RNA
gaggtctttaaaagaaagctct

SEQ ID NO: 136844 - RNA, 22 nt, synthetic construct
  source 1..22: mol_type = other RNA
gaggtgaactattagagctttt

SEQ ID NO: 136845 - RNA, 22 nt, synthetic construct
  source 1..22: mol_type = other RNA
gaggtgaagttaagggccattt

SEQ ID NO: 136846 - RNA, 22 nt, synthetic construct
  source 1..22: mol_type = other RNA
gaggtgagacagaccctggctt

SEQ ID NO: 136847 - RNA, 22 nt, synthetic construct
  source 1..22: mol_type = other RNA
gaggtgagctttttctttttaa

SEQ ID NO: 136848 - RNA, 22 nt, synthetic construct
  source 1..22: mol_type = other RNA
gaggtgaggacatggagacagt

SEQ ID NO: 136849 - RNA, 22 nt, synthetic construct
  source 1..22: mol_type = other RNA
gaggtgattaaaggccctgatt

SEQ ID NO: 136850 - RNA, 22 nt, synthetic construct
  source 1..22: mol_type = other RNA
gaggtgattcagagtgctgggt

SEQ ID NO: 136851 - RNA, 22 nt, synthetic construct
  source 1..22: mol_type = other RNA
gaggtgcacaagggaagaggcc

SEQ ID NO: 136852 - RNA, 22 nt, synthetic construct
  source 1..22: mol_type = other RNA
gaggtgcacattccaagagagg

SEQ ID NO: 136853 - RNA, 22 nt, synthetic construct
  source 1..22: mol_type = other RNA
gaggtggaactctgtcatggtg

SEQ ID NO: 136854 - RNA, 22 nt, synthetic construct
  source 1..22: mol_type = other RNA
gaggtggagttctgctcttgtc

SEQ ID NO: 136855 - RNA, 22 nt, synthetic construct
  source 1..22: mol_type = other RNA
gaggtgtacaattaggctgttt

SEQ ID NO: 136856 - RNA, 22 nt, synthetic construct
  source 1..22: mol_type = other RNA
gaggtgtttttcagccctgata

SEQ ID NO: 136857 - RNA, 22 nt, synthetic construct
  source 1..22: mol_type = other RNA
gaggttaaaaccacaaacatga

SEQ ID NO: 136858 - RNA, 22 nt, synthetic construct
  source 1..22: mol_type = other RNA
gaggttaaagcaacaggaagag

SEQ ID NO: 136859 - RNA, 22 nt, synthetic construct
  source 1..22: mol_type = other RNA
gaggttattaagataatgctgt

SEQ ID NO: 136860 - RNA, 22 nt, synthetic construct
  source 1..22: mol_type = other RNA
gaggttattcaaaacaaaacac

SEQ ID NO: 136861 - RNA, 22 nt, synthetic construct
  source 1..22: mol_type = other RNA
gaggttcttttaaatgccaatt

SEQ ID NO: 136862 - RNA, 22 nt, synthetic construct
  source 1..22: mol_type = other RNA
gaggttgaagacctgcagtctg

SEQ ID NO: 136863 - RNA, 22 nt, synthetic construct
  source 1..22: mol_type = other RNA
gaggttgaagctctagtgagct

SEQ ID NO: 136864 - RNA, 22 nt, synthetic construct
  source 1..22: mol_type = other RNA
gaggttgaggctgcagtgagct

SEQ ID NO: 136865 - RNA, 22 nt, synthetic construct
  source 1..22: mol_type = other RNA
gaggttgcggtgacgtgagatc

SEQ ID NO: 136866 - RNA, 22 nt, synthetic construct
  source 1..22: mol_type = other RNA
gaggttgcttttacttggctcc

SEQ ID NO: 136867 - RNA, 22 nt, synthetic construct
  source 1..22: mol_type = other RNA
gaggtttacttggggagagtgg

SEQ ID NO: 136868 - RNA, 22 nt, synthetic construct
  source 1..22: mol_type = other RNA
gaggtttgcactggcacagcac

SEQ ID NO: 136869 - RNA, 22 nt, synthetic construct
  source 1..22: mol_type = other RNA
gaggttttacgatgttggccag

SEQ ID NO: 136870 - RNA, 22 nt, synthetic construct
  source 1..22: mol_type = other RNA
gaggtttttgattactgactca

SEQ ID NO: 136871 - RNA, 22 nt, synthetic construct
  source 1..22: mol_type = other RNA
gagtaaaaagaaatctgcatcc

SEQ ID NO: 136872 - RNA, 22 nt, synthetic construct
  source 1..22: mol_type = other RNA
gagtaaagggtaagaaaattgt

SEQ ID NO: 136873 - RNA, 22 nt, synthetic construct
  source 1..22: mol_type = other RNA
gagtaacagacctctgaagagt

SEQ ID NO: 136874 - RNA, 22 nt, synthetic construct
  source 1..22: mol_type = other RNA
gagtaacatgtggaacataatc

SEQ ID NO: 136875 - RNA, 22 nt, synthetic construct
  source 1..22: mol_type = other RNA
gagtaactaaactattgtatga

SEQ ID NO: 136876 - RNA, 22 nt, synthetic construct
  source 1..22: mol_type = other RNA
gagtaactgctcctctgacttt

SEQ ID NO: 136877 - RNA, 22 nt, synthetic construct
  source 1..22: mol_type = other RNA
gagtaactggtccagatgaagc

SEQ ID NO: 136878 - RNA, 22 nt, synthetic construct
  source 1..22: mol_type = other RNA
gagtaactgtcatcagcgtcct

SEQ ID NO: 136879 - RNA, 22 nt, synthetic construct
  source 1..22: mol_type = other RNA
gagtaagcaactgcatcttctt

SEQ ID NO: 136880 - RNA, 22 nt, synthetic construct
  source 1..22: mol_type = other RNA
gagtaagttgcatacgtcgtcc

SEQ ID NO: 136881 - RNA, 22 nt, synthetic construct
  source 1..22: mol_type = other RNA
gagtaatggatgtttttagaga

SEQ ID NO: 136882 - RNA, 22 nt, synthetic construct
  source 1..22: mol_type = other RNA
gagtaatgggatggctgggcca

SEQ ID NO: 136883 - RNA, 22 nt, synthetic construct
  source 1..22: mol_type = other RNA
gagtaatggttggccgaggcca

SEQ ID NO: 136884 - RNA, 22 nt, synthetic construct
  source 1..22: mol_type = other RNA
gagtacagtgcataccaccaca

SEQ ID NO: 136885 - RNA, 22 nt, synthetic construct
  source 1..22: mol_type = other RNA
gagtaccaggtcagccagagga

SEQ ID NO: 136886 - RNA, 22 nt, synthetic construct
  source 1..22: mol_type = other RNA
gagtacctctgggatgctcagt

SEQ ID NO: 136887 - RNA, 22 nt, synthetic construct
  source 1..22: mol_type = other RNA
gagtactatgcagcaacggaaa

SEQ ID NO: 136888 - RNA, 22 nt, synthetic construct
  source 1..22: mol_type = other RNA
gagtagaagagtaatggttggc

SEQ ID NO: 136889 - RNA, 22 nt, synthetic construct
  source 1..22: mol_type = other RNA
gagtagagaaggctttgtgttg

SEQ ID NO: 136890 - RNA, 22 nt, synthetic construct
  source 1..22: mol_type = other RNA
gagtagattcccccttatgtgt

SEQ ID NO: 136891 - RNA, 22 nt, synthetic construct
  source 1..22: mol_type = other RNA
gagtagcaccctatttatgttg

SEQ ID NO: 136892 - RNA, 22 nt, synthetic construct
  source 1..22: mol_type = other RNA
gagtagcgctttaagcatccca

SEQ ID NO: 136893 - RNA, 22 nt, synthetic construct
  source 1..22: mol_type = other RNA
gagtagctgggattacacacac

SEQ ID NO: 136894 - RNA, 22 nt, synthetic construct
  source 1..22: mol_type = other RNA
gagtagctgtgattaccggcat

SEQ ID NO: 136895 - RNA, 22 nt, synthetic construct
  source 1..22: mol_type = other RNA
gagtagggaaggtgcccgcgaa

SEQ ID NO: 136896 - RNA, 22 nt, synthetic construct
  source 1..22: mol_type = other RNA
gagtagtacttctgagtgttac

SEQ ID NO: 136897 - RNA, 22 nt, synthetic construct
  source 1..22: mol_type = other RNA
gagtagttcatgttagcataat

SEQ ID NO: 136898 - RNA, 22 nt, synthetic construct
  source 1..22: mol_type = other RNA
gagtagttgtaactacagacat

SEQ ID NO: 136899 - RNA, 22 nt, synthetic construct
  source 1..22: mol_type = other RNA
gagtatatatgctccctaaata

SEQ ID NO: 136900 - RNA, 22 nt, synthetic construct
  source 1..22: mol_type = other RNA
gagtatattctgtgaattgtga

SEQ ID NO: 136901 - RNA, 22 nt, synthetic construct
  source 1..22: mol_type = other RNA
gagtatctaggagtacagtgca

SEQ ID NO: 136902 - RNA, 22 nt, synthetic construct
  source 1..22: mol_type = other RNA
gagtatctggtgctggcagcct

SEQ ID NO: 136903 - RNA, 22 nt, synthetic construct
  source 1..22: mol_type = other RNA
gagtatctggtgttgcttgctc

SEQ ID NO: 136904 - RNA, 22 nt, synthetic construct
  source 1..22: mol_type = other RNA
gagtatcttttcatgttgacca

SEQ ID NO: 136905 - RNA, 22 nt, synthetic construct
  source 1..22: mol_type = other RNA
gagtatctttttcagcagcaga

SEQ ID NO: 136906 - RNA, 22 nt, synthetic construct
  source 1..22: mol_type = other RNA
gagtatgggtctccattttggt

SEQ ID NO: 136907 - RNA, 22 nt, synthetic construct
  source 1..22: mol_type = other RNA
gagtattacctatgaataggtg

SEQ ID NO: 136908 - RNA, 22 nt, synthetic construct
  source 1..22: mol_type = other RNA
gagtattcaagtttcaccctgc

SEQ ID NO: 136909 - RNA, 22 nt, synthetic construct
  source 1..22: mol_type = other RNA
gagtattctagttctagctctg

SEQ ID NO: 136910 - RNA, 22 nt, synthetic construct
  source 1..22: mol_type = other RNA
gagtattgccaggtttgtgctt

SEQ ID NO: 136911 - RNA, 22 nt, synthetic construct
  source 1..22: mol_type = other RNA
gagtatttcatgtacttgtaaa

SEQ ID NO: 136912 - RNA, 22 nt, synthetic construct
  source 1..22: mol_type = other RNA
gagtatttttgagcttttcaaa

SEQ ID NO: 136913 - RNA, 22 nt, synthetic construct
  source 1..22: mol_type = other RNA
gagtcaaaaccaaagaaagggg

SEQ ID NO: 136914 - RNA, 22 nt, synthetic construct
  source 1..22: mol_type = other RNA
gagtcaactaatcaaacatacc

SEQ ID NO: 136915 - RNA, 22 nt, synthetic construct
  source 1..22: mol_type = other RNA
gagtcacagtgaattctgactt

SEQ ID NO: 136916 - RNA, 22 nt, synthetic construct
  source 1..22: mol_type = other RNA
gagtcacttgacaaaaattaaa

SEQ ID NO: 136917 - RNA, 22 nt, synthetic construct
  source 1..22: mol_type = other RNA
gagtcagtaatcaaaaacctcc

SEQ ID NO: 136918 - RNA, 22 nt, synthetic construct
  source 1..22: mol_type = other RNA
gagtcagtagaggccgagggtt

SEQ ID NO: 136919 - RNA, 22 nt, synthetic construct
  source 1..22: mol_type = other RNA
gagtcagttgtttacttgggta

SEQ ID NO: 136920 - RNA, 22 nt, synthetic construct
  source 1..22: mol_type = other RNA
gagtcatttgagcccaggaggt

SEQ ID NO: 136921 - RNA, 22 nt, synthetic construct
  source 1..22: mol_type = other RNA
gagtccaaccaatcgcagggcc

SEQ ID NO: 136922 - RNA, 22 nt, synthetic construct
  source 1..22: mol_type = other RNA
gagtccagaggtgagctttttc

SEQ ID NO: 136923 - RNA, 22 nt, synthetic construct
  source 1..22: mol_type = other RNA
gagtccagctttctaattctga

SEQ ID NO: 136924 - RNA, 22 nt, synthetic construct
  source 1..22: mol_type = other RNA
gagtccagtcctgctaacacct

SEQ ID NO: 136925 - RNA, 22 nt, synthetic construct
  source 1..22: mol_type = other RNA
gagtccccaactgcaaaacttt

SEQ ID NO: 136926 - RNA, 22 nt, synthetic construct
  source 1..22: mol_type = other RNA
gagtccctgctttcagttcttt

SEQ ID NO: 136927 - RNA, 22 nt, synthetic construct
  source 1..22: mol_type = other RNA
gagtccgcggctgggctttctc

SEQ ID NO: 136928 - RNA, 22 nt, synthetic construct
  source 1..22: mol_type = other RNA
gagtcctgaaaattccttcccc

SEQ ID NO: 136929 - RNA, 22 nt, synthetic construct
  source 1..22: mol_type = other RNA
gagtcctgagggtgagaccacc

SEQ ID NO: 136930 - RNA, 22 nt, synthetic construct
  source 1..22: mol_type = other RNA
gagtcctgtcagtttctgattt

SEQ ID NO: 136931 - RNA, 22 nt, synthetic construct
  source 1..22: mol_type = other RNA
gagtccttccagtatgatgcca

SEQ ID NO: 136932 - RNA, 22 nt, synthetic construct
  source 1..22: mol_type = other RNA
gagtcgccatacctggtcctta

SEQ ID NO: 136933 - RNA, 22 nt, synthetic construct
  source 1..22: mol_type = other RNA
gagtcgcttgaacctgaaaaac

SEQ ID NO: 136934 - RNA, 22 nt, synthetic construct
  source 1..22: mol_type = other RNA
gagtctatctttgggaaaatct

SEQ ID NO: 136935 - RNA, 22 nt, synthetic construct
  source 1..22: mol_type = other RNA
gagtctatttctgaacaaatat

SEQ ID NO: 136936 - RNA, 22 nt, synthetic construct
  source 1..22: mol_type = other RNA
gagtctcatctgtcaaaaagag

SEQ ID NO: 136937 - RNA, 22 nt, synthetic construct
  source 1..22: mol_type = other RNA
gagtctcgctctgtcgcccagg

SEQ ID NO: 136938 - RNA, 22 nt, synthetic construct
  source 1..22: mol_type = other RNA
gagtctcttaagaccacaagga

SEQ ID NO: 136939 - RNA, 22 nt, synthetic construct
  source 1..22: mol_type = other RNA
gagtctgacatactgtcacagg

SEQ ID NO: 136940 - RNA, 22 nt, synthetic construct
  source 1..22: mol_type = other RNA
gagtctgcagaccaagaaagga

SEQ ID NO: 136941 - RNA, 22 nt, synthetic construct
  source 1..22: mol_type = other RNA
gagtctgcccatcctatctaag

SEQ ID NO: 136942 - RNA, 22 nt, synthetic construct
  source 1..22: mol_type = other RNA
gagtctgtagggtgactagtgt

SEQ ID NO: 136943 - RNA, 22 nt, synthetic construct
  source 1..22: mol_type = other RNA
gagtctgtgctctgtatttaat

SEQ ID NO: 136944 - RNA, 22 nt, synthetic construct
  source 1..22: mol_type = other RNA
gagtcttccgtctcaagattgt

SEQ ID NO: 136945 - RNA, 22 nt, synthetic construct
  source 1..22: mol_type = other RNA
gagtcttctactgtgaattcac

SEQ ID NO: 136946 - RNA, 22 nt, synthetic construct
  source 1..22: mol_type = other RNA
gagtcttgtttacccagtgtgt

SEQ ID NO: 136947 - RNA, 22 nt, synthetic construct
  source 1..22: mol_type = other RNA
gagtgaaaacacaaactgcaga

SEQ ID NO: 136948 - RNA, 22 nt, synthetic construct
  source 1..22: mol_type = other RNA
gagtgaaaagaaacaagtgaaa

SEQ ID NO: 136949 - RNA, 22 nt, synthetic construct
  source 1..22: mol_type = other RNA
gagtgaaaaggcaaaccacaca

SEQ ID NO: 136950 - RNA, 22 nt, synthetic construct
  source 1..22: mol_type = other RNA
gagtgaaactctggctcagaaa

SEQ ID NO: 136951 - RNA, 22 nt, synthetic construct
  source 1..22: mol_type = other RNA
gagtgaaatgatttcaagtaac

SEQ ID NO: 136952 - RNA, 22 nt, synthetic construct
  source 1..22: mol_type = other RNA
gagtgaacaggcaaccttggga

SEQ ID NO: 136953 - RNA, 22 nt, synthetic construct
  source 1..22: mol_type = other RNA
gagtgaagaaacctttctcaaa

SEQ ID NO: 136954 - RNA, 22 nt, synthetic construct
  source 1..22: mol_type = other RNA
gagtgaagctggacccttacct

SEQ ID NO: 136955 - RNA, 22 nt, synthetic construct
  source 1..22: mol_type = other RNA
gagtgaatggggtaattttggg

SEQ ID NO: 136956 - RNA, 22 nt, synthetic construct
  source 1..22: mol_type = other RNA
gagtgacagctgagtagcgctt

SEQ ID NO: 136957 - RNA, 22 nt, synthetic construct
  source 1..22: mol_type = other RNA
gagtgacttaagcaacagaaat

SEQ ID NO: 136958 - RNA, 22 nt, synthetic construct
  source 1..22: mol_type = other RNA
gagtgagaggactgcctggtcc

SEQ ID NO: 136959 - RNA, 22 nt, synthetic construct
  source 1..22: mol_type = other RNA
gagtgagatgggaagaaaaaat

SEQ ID NO: 136960 - RNA, 22 nt, synthetic construct
  source 1..22: mol_type = other RNA
gagtgagccacagctacactca

SEQ ID NO: 136961 - RNA, 22 nt, synthetic construct
  source 1..22: mol_type = other RNA
gagtgatgaaaagagcacacca

SEQ ID NO: 136962 - RNA, 22 nt, synthetic construct
  source 1..22: mol_type = other RNA
gagtgcaatggtgggatctctg

SEQ ID NO: 136963 - RNA, 22 nt, synthetic construct
  source 1..22: mol_type = other RNA
gagtgcacattccttcttcaca

SEQ ID NO: 136964 - RNA, 22 nt, synthetic construct
  source 1..22: mol_type = other RNA
gagtgcaggagtttgagactgc

SEQ ID NO: 136965 - RNA, 22 nt, synthetic construct
  source 1..22: mol_type = other RNA
gagtgcagtatgtaggaaactt

SEQ ID NO: 136966 - RNA, 22 nt, synthetic construct
  source 1..22: mol_type = other RNA
gagtgcagtggtgtggtcttgt

SEQ ID NO: 136967 - RNA, 22 nt, synthetic construct
  source 1..22: mol_type = other RNA
gagtgcgagtgtgaacgatggt

SEQ ID NO: 136968 - RNA, 22 nt, synthetic construct
  source 1..22: mol_type = other RNA
gagtgctgggtagagactggat

SEQ ID NO: 136969 - RNA, 22 nt, synthetic construct
  source 1..22: mol_type = other RNA
gagtggaaagagccagcctgat

SEQ ID NO: 136970 - RNA, 22 nt, synthetic construct
  source 1..22: mol_type = other RNA
gagtggactgtgagggagatat

SEQ ID NO: 136971 - RNA, 22 nt, synthetic construct
  source 1..22: mol_type = other RNA
gagtggaggggcaggaaaggtg

SEQ ID NO: 136972 - RNA, 22 nt, synthetic construct
  source 1..22: mol_type = other RNA
gagtggagtggcatgatctcac

SEQ ID NO: 136973 - RNA, 22 nt, synthetic construct
  source 1..22: mol_type = other RNA
gagtggatcatttgaggtcaag

SEQ ID NO: 136974 - RNA, 22 nt, synthetic construct
  source 1..22: mol_type = other RNA
gagtggcatcatactggaagga

SEQ ID NO: 136975 - RNA, 22 nt, synthetic construct
  source 1..22: mol_type = other RNA
gagtggcatgatctcacgtcac

SEQ ID NO: 136976 - RNA, 22 nt, synthetic construct
  source 1..22: mol_type = other RNA
gagtggcctaaatcaggatgtc

SEQ ID NO: 136977 - RNA, 22 nt, synthetic construct
  source 1..22: mol_type = other RNA
gagtggctaatgtggcttgcaa

SEQ ID NO: 136978 - RNA, 22 nt, synthetic construct
  source 1..22: mol_type = other RNA
gagtgggcaaaaaagtcatgac

SEQ ID NO: 136979 - RNA, 22 nt, synthetic construct
  source 1..22: mol_type = other RNA
gagtgggcccagcagaaggtga

SEQ ID NO: 136980 - RNA, 22 nt, synthetic construct
  source 1..22: mol_type = other RNA
gagtggggcacctaaaaggttg

SEQ ID NO: 136981 - RNA, 22 nt, synthetic construct
  source 1..22: mol_type = other RNA
gagtggtggatagagagattca

SEQ ID NO: 136982 - RNA, 22 nt, synthetic construct
  source 1..22: mol_type = other RNA
gagtgtaaggtgtttggtgaat

SEQ ID NO: 136983 - RNA, 22 nt, synthetic construct
  source 1..22: mol_type = other RNA
gagtgtagctgtggctcactca

SEQ ID NO: 136984 - RNA, 22 nt, synthetic construct
  source 1..22: mol_type = other RNA
gagtgtatgcagggaaatcatt

SEQ ID NO: 136985 - RNA, 22 nt, synthetic construct
  source 1..22: mol_type = other RNA
gagtgtgaacgatggtttctga

SEQ ID NO: 136986 - RNA, 22 nt, synthetic construct
  source 1..22: mol_type = other RNA
gagtgtgcccaaggaaggcagg

SEQ ID NO: 136987 - RNA, 22 nt, synthetic construct
  source 1..22: mol_type = other RNA
gagtgtgctgactagtacgtgc

SEQ ID NO: 136988 - RNA, 22 nt, synthetic construct
  source 1..22: mol_type = other RNA
gagtgtggcaggggctgcatca

SEQ ID NO: 136989 - RNA, 22 nt, synthetic construct
  source 1..22: mol_type = other RNA
gagtgtggctttaaggcgcaga

SEQ ID NO: 136990 - RNA, 22 nt, synthetic construct
  source 1..22: mol_type = other RNA
gagtgtgtttcgcaaagtaaaa

SEQ ID NO: 136991 - RNA, 22 nt, synthetic construct
  source 1..22: mol_type = other RNA
gagtgttacttgaaatcatttc

SEQ ID NO: 136992 - RNA, 22 nt, synthetic construct
  source 1..22: mol_type = other RNA
gagtgttcaaaagccccaaacc

SEQ ID NO: 136993 - RNA, 22 nt, synthetic construct
  source 1..22: mol_type = other RNA
gagtgttgtgtgcacctaataa

SEQ ID NO: 136994 - RNA, 22 nt, synthetic construct
  source 1..22: mol_type = other RNA
gagtgtttcccttaaaaggaac

SEQ ID NO: 136995 - RNA, 22 nt, synthetic construct
  source 1..22: mol_type = other RNA
gagtgttttcttcatggactag

SEQ ID NO: 136996 - RNA, 22 nt, synthetic construct
  source 1..22: mol_type = other RNA
gagttaaaactcacaaaaagtg

SEQ ID NO: 136997 - RNA, 22 nt, synthetic construct
  source 1..22: mol_type = other RNA
gagttaattccacaaccactgg

SEQ ID NO: 136998 - RNA, 22 nt, synthetic construct
  source 1..22: mol_type = other RNA
gagttaccataaaaccattttt

SEQ ID NO: 136999 - RNA, 22 nt, synthetic construct
  source 1..22: mol_type = other RNA
gagttacgctgccaaaagccaa

SEQ ID NO: 137000 - RNA, 22 nt, synthetic construct
  source 1..22: mol_type = other RNA
gagttacttctggaaagttcaa

SEQ ID NO: 137001 - RNA, 22 nt, synthetic construct
  source 1..22: mol_type = other RNA
gagttaggaatttacatttcca

SEQ ID NO: 137002 - RNA, 22 nt, synthetic construct
  source 1..22: mol_type = other RNA
gagttatgcaagatgtcaacat

SEQ ID NO: 137003 - RNA, 22 nt, synthetic construct
  source 1..22: mol_type = other RNA
gagttattgcatagggatgttg

SEQ ID NO: 137004 - RNA, 22 nt, synthetic construct
  source 1..22: mol_type = other RNA
gagttcaaatgttaagcccaac

SEQ ID NO: 137005 - RNA, 22 nt, synthetic construct
  source 1..22: mol_type = other RNA
gagttcagaaagattaatcctt

SEQ ID NO: 137006 - RNA, 22 nt, synthetic construct
  source 1..22: mol_type = other RNA
gagttcagcttacagtcatcac

SEQ ID NO: 137007 - RNA, 22 nt, synthetic construct
  source 1..22: mol_type = other RNA
gagttcagctttaaagagaaat

SEQ ID NO: 137008 - RNA, 22 nt, synthetic construct
  source 1..22: mol_type = other RNA
gagttcaggaccagcttgggca

SEQ ID NO: 137009 - RNA, 22 nt, synthetic construct
  source 1..22: mol_type = other RNA
gagttcagtggtgcaatcacgg

SEQ ID NO: 137010 - RNA, 22 nt, synthetic construct
  source 1..22: mol_type = other RNA
gagttcagttttgtatatggtt

SEQ ID NO: 137011 - RNA, 22 nt, synthetic construct
  source 1..22: mol_type = other RNA
gagttcattagaattcaggaca

SEQ ID NO: 137012 - RNA, 22 nt, synthetic construct
  source 1..22: mol_type = other RNA
gagttcattcgtagcaggttta

SEQ ID NO: 137013 - RNA, 22 nt, synthetic construct
  source 1..22: mol_type = other RNA
gagttccaactgtataaatgtt

SEQ ID NO: 137014 - RNA, 22 nt, synthetic construct
  source 1..22: mol_type = other RNA
gagttccacctccatcactgac

SEQ ID NO: 137015 - RNA, 22 nt, synthetic construct
  source 1..22: mol_type = other RNA
gagttccagtcctttgtgtcaa

SEQ ID NO: 137016 - RNA, 22 nt, synthetic construct
  source 1..22: mol_type = other RNA
gagttccatctgttatagtgtg

SEQ ID NO: 137017 - RNA, 22 nt, synthetic construct
  source 1..22: mol_type = other RNA
gagttcccctatactgtaaccc

SEQ ID NO: 137018 - RNA, 22 nt, synthetic construct
  source 1..22: mol_type = other RNA
gagttccgatttctcggccggg

SEQ ID NO: 137019 - RNA, 22 nt, synthetic construct
  source 1..22: mol_type = other RNA
gagttcctgcttcccccaaaga

SEQ ID NO: 137020 - RNA, 22 nt, synthetic construct
  source 1..22: mol_type = other RNA
gagttctgaaggctcagcccct

SEQ ID NO: 137021 - RNA, 22 nt, synthetic construct
  source 1..22: mol_type = other RNA
gagttctgggagttcattagaa

SEQ ID NO: 137022 - RNA, 22 nt, synthetic construct
  source 1..22: mol_type = other RNA
gagttcttatgaggttattcaa

SEQ ID NO: 137023 - RNA, 22 nt, synthetic construct
  source 1..22: mol_type = other RNA
gagttgcatcacttgaggtgat

SEQ ID NO: 137024 - RNA, 22 nt, synthetic construct
  source 1..22: mol_type = other RNA
gagttgctgacttcctggctct

SEQ ID NO: 137025 - RNA, 22 nt, synthetic construct
  source 1..22: mol_type = other RNA
gagttggcacagccagtcagtg

SEQ ID NO: 137026 - RNA, 22 nt, synthetic construct
  source 1..22: mol_type = other RNA
gagttggtgcaaggataaacaa

SEQ ID NO: 137027 - RNA, 22 nt, synthetic construct
  source 1..22: mol_type = other RNA
gagttgtaacacatatttatca

SEQ ID NO: 137028 - RNA, 22 nt, synthetic construct
  source 1..22: mol_type = other RNA
gagttgtatctgtgatccctga

SEQ ID NO: 137029 - RNA, 22 nt, synthetic construct
  source 1..22: mol_type = other RNA
gagttgtttccactttgaggtt

SEQ ID NO: 137030 - RNA, 22 nt, synthetic construct
  source 1..22: mol_type = other RNA
gagtttaattcttttgctgtat

SEQ ID NO: 137031 - RNA, 22 nt, synthetic construct
  source 1..22: mol_type = other RNA
gagtttatattctaagtttgcc

SEQ ID NO: 137032 - RNA, 22 nt, synthetic construct
  source 1..22: mol_type = other RNA
gagtttcaatgacttttatcaa

SEQ ID NO: 137033 - RNA, 22 nt, synthetic construct
  source 1..22: mol_type = other RNA
gagtttccagaaaactggcaat

SEQ ID NO: 137034 - RNA, 22 nt, synthetic construct
  source 1..22: mol_type = other RNA
gagtttgacctgtaatttttct

SEQ ID NO: 137035 - RNA, 22 nt, synthetic construct
  source 1..22: mol_type = other RNA
gagtttgagaccagcgtgggca

SEQ ID NO: 137036 - RNA, 22 nt, synthetic construct
  source 1..22: mol_type = other RNA
gagtttgagactgcagtgacct

SEQ ID NO: 137037 - RNA, 22 nt, synthetic construct
  source 1..22: mol_type = other RNA
gagtttgaggccgcagtgagcc

SEQ ID NO: 137038 - RNA, 22 nt, synthetic construct
  source 1..22: mol_type = other RNA
gagtttgcattacatgaatgga

SEQ ID NO: 137039 - RNA, 22 nt, synthetic construct
  source 1..22: mol_type = other RNA
gagtttgctctgcaaatgaggt

SEQ ID NO: 137040 - RNA, 22 nt, synthetic construct
  source 1..22: mol_type = other RNA
gagtttggtgtatttagtatat

SEQ ID NO: 137041 - RNA, 22 nt, synthetic construct
  source 1..22: mol_type = other RNA
gagtttgtagctcaaagcatat

SEQ ID NO: 137042 - RNA, 22 nt, synthetic construct
  source 1..22: mol_type = other RNA
gagtttgttctgtcacatttga

SEQ ID NO: 137043 - RNA, 22 nt, synthetic construct
  source 1..22: mol_type = other RNA
gagttttaactcttgcattaga

SEQ ID NO: 137044 - RNA, 22 nt, synthetic construct
  source 1..22: mol_type = other RNA
gagttttaggaaaatagagttc

SEQ ID NO: 137045 - RNA, 22 nt, synthetic construct
  source 1..22: mol_type = other RNA
gagttttatagtcttagctctt

SEQ ID NO: 137046 - RNA, 22 nt, synthetic construct
  source 1..22: mol_type = other RNA
gagttttcaacctttgttgaaa

SEQ ID NO: 137047 - RNA, 22 nt, synthetic construct
  source 1..22: mol_type = other RNA
gagttttccaataagttaactg

SEQ ID NO: 137048 - RNA, 22 nt, synthetic construct
  source 1..22: mol_type = other RNA
gagttttccccctacacccagt

SEQ ID NO: 137049 - RNA, 22 nt, synthetic construct
  source 1..22: mol_type = other RNA
gagttttgcctctttgctaata

SEQ ID NO: 137050 - RNA, 22 nt, synthetic construct
  source 1..22: mol_type = other RNA
gataaaaaggagggaaaatgtt

SEQ ID NO: 137051 - RNA, 22 nt, synthetic construct
  source 1..22: mol_type = other RNA
gataaaaataacgggccgggcg

SEQ ID NO: 137052 - RNA, 22 nt, synthetic construct
  source 1..22: mol_type = other RNA
gataaaaatctctacagggaac

SEQ ID NO: 137053 - RNA, 22 nt, synthetic construct
  source 1..22: mol_type = other RNA
gataaaacctggaatgggttgg

SEQ ID NO: 137054 - RNA, 22 nt, synthetic construct
  source 1..22: mol_type = other RNA
gataaaactgaagtttatcgta

SEQ ID NO: 137055 - RNA, 22 nt, synthetic construct
  source 1..22: mol_type = other RNA
gataaaagtcattgaaactcaa

SEQ ID NO: 137056 - RNA, 22 nt, synthetic construct
  source 1..22: mol_type = other RNA
gataaacaaagagaacaatgga

SEQ ID NO: 137057 - RNA, 22 nt, synthetic construct
  source 1..22: mol_type = other RNA
gataaacgttaactatttctct

SEQ ID NO: 137058 - RNA, 22 nt, synthetic construct
  source 1..22: mol_type = other RNA
gataaactagattaccttgaag

SEQ ID NO: 137059 - RNA, 22 nt, synthetic construct
  source 1..22: mol_type = other RNA
gataaactggaattcatcaaag

SEQ ID NO: 137060 - RNA, 22 nt, synthetic construct
  source 1..22: mol_type = other RNA
gataaacttcagttttgagtgg

SEQ ID NO: 137061 - RNA, 22 nt, synthetic construct
  source 1..22: mol_type = other RNA
gataaagagcaggtggaaggcc

SEQ ID NO: 137062 - RNA, 22 nt, synthetic construct
  source 1..22: mol_type = other RNA
gataaagggtctggtatctacc

SEQ ID NO: 137063 - RNA, 22 nt, synthetic construct
  source 1..22: mol_type = other RNA
gataaaggtaaggaaaccccag

SEQ ID NO: 137064 - RNA, 22 nt, synthetic construct
  source 1..22: mol_type = other RNA
gataaatacgataaacttcagt

SEQ ID NO: 137065 - RNA, 22 nt, synthetic construct
  source 1..22: mol_type = other RNA
gataaatacgtatatgaaaagc

SEQ ID NO: 137066 - RNA, 22 nt, synthetic construct
  source 1..22: mol_type = other RNA
gataaatatgtgttacaactct

SEQ ID NO: 137067 - RNA, 22 nt, synthetic construct
  source 1..22: mol_type = other RNA
gataaatcagaaactgacagga

SEQ ID NO: 137068 - RNA, 22 nt, synthetic construct
  source 1..22: mol_type = other RNA
gataaatccaacgaccggacgt

SEQ ID NO: 137069 - RNA, 22 nt, synthetic construct
  source 1..22: mol_type = other RNA
gataaatcccacttgatccagg

SEQ ID NO: 137070 - RNA, 22 nt, synthetic construct
  source 1..22: mol_type = other RNA
gataaatctaaagccaatcttc

SEQ ID NO: 137071 - RNA, 22 nt, synthetic construct
  source 1..22: mol_type = other RNA
gataaatggctttttacgatga

SEQ ID NO: 137072 - RNA, 22 nt, synthetic construct
  source 1..22: mol_type = other RNA
gataaattacccaaagactttg

SEQ ID NO: 137073 - RNA, 22 nt, synthetic construct
  source 1..22: mol_type = other RNA
gataaattatagctccaaaagc

SEQ ID NO: 137074 - RNA, 22 nt, synthetic construct
  source 1..22: mol_type = other RNA
gataaattattagcttgctagt

SEQ ID NO: 137075 - RNA, 22 nt, synthetic construct
  source 1..22: mol_type = other RNA
gataacaaagggttcttggaaa

SEQ ID NO: 137076 - RNA, 22 nt, synthetic construct
  source 1..22: mol_type = other RNA
gataacagtggttaggaaaata

SEQ ID NO: 137077 - RNA, 22 nt, synthetic construct
  source 1..22: mol_type = other RNA
gataaccaataagaagtgaaaa

SEQ ID NO: 137078 - RNA, 22 nt, synthetic construct
  source 1..22: mol_type = other RNA
gataacctagaagaaatgggta

SEQ ID NO: 137079 - RNA, 22 nt, synthetic construct
  source 1..22: mol_type = other RNA
gataactaatgagaatttcaga

SEQ ID NO: 137080 - RNA, 22 nt, synthetic construct
  source 1..22: mol_type = other RNA
gataactgatatgagggatgag

SEQ ID NO: 137081 - RNA, 22 nt, synthetic construct
  source 1..22: mol_type = other RNA
gataactgggtgtgcacgtttg

SEQ ID NO: 137082 - RNA, 22 nt, synthetic construct
  source 1..22: mol_type = other RNA
gataactggtgcttttttggtg

SEQ ID NO: 137083 - RNA, 22 nt, synthetic construct
  source 1..22: mol_type = other RNA
gataagaaaatgtgacattagt

SEQ ID NO: 137084 - RNA, 22 nt, synthetic construct
  source 1..22: mol_type = other RNA
gataagaataccaaattcacga

SEQ ID NO: 137085 - RNA, 22 nt, synthetic construct
  source 1..22: mol_type = other RNA
gataagatccaagtattgtatc

SEQ ID NO: 137086 - RNA, 22 nt, synthetic construct
  source 1..22: mol_type = other RNA
gataagcaaaattgacaaaccc

SEQ ID NO: 137087 - RNA, 22 nt, synthetic construct
  source 1..22: mol_type = other RNA
gataagcacatggtgataactg

SEQ ID NO: 137088 - RNA, 22 nt, synthetic construct
  source 1..22: mol_type = other RNA
gataagcccaacctgattagag

SEQ ID NO: 137089 - RNA, 22 nt, synthetic construct
  source 1..22: mol_type = other RNA
gataagctcccagccaaacagt

SEQ ID NO: 137090 - RNA, 22 nt, synthetic construct
  source 1..22: mol_type = other RNA
gataaggaagagtttatattct

SEQ ID NO: 137091 - RNA, 22 nt, synthetic construct
  source 1..22: mol_type = other RNA
gataaggggcagggtggagtcc

SEQ ID NO: 137092 - RNA, 22 nt, synthetic construct
  source 1..22: mol_type = other RNA
gataaggggctatctttacttt

SEQ ID NO: 137093 - RNA, 22 nt, synthetic construct
  source 1..22: mol_type = other RNA
gataaggttgttcttggttaat

SEQ ID NO: 137094 - RNA, 22 nt, synthetic construct
  source 1..22: mol_type = other RNA
gataagtagaaggtcaatctag

SEQ ID NO: 137095 - RNA, 22 nt, synthetic construct
  source 1..22: mol_type = other RNA
gataatatctggactgaaaaga

SEQ ID NO: 137096 - RNA, 22 nt, synthetic construct
  source 1..22: mol_type = other RNA
gataatcacagacgcaaaggat

SEQ ID NO: 137097 - RNA, 22 nt, synthetic construct
  source 1..22: mol_type = other RNA
gataatgctatcattttaaagg

SEQ ID NO: 137098 - RNA, 22 nt, synthetic construct
  source 1..22: mol_type = other RNA
gataatgctatccagaagagaa

SEQ ID NO: 137099 - RNA, 22 nt, synthetic construct
  source 1..22: mol_type = other RNA
gataatgctgttctctgtgtgg

SEQ ID NO: 137100 - RNA, 22 nt, synthetic construct
  source 1..22: mol_type = other RNA
gataatgtccagaggaggaaga

SEQ ID NO: 137101 - RNA, 22 nt, synthetic construct
  source 1..22: mol_type = other RNA
gataatgttagaattcaggaca

SEQ ID NO: 137102 - RNA, 22 nt, synthetic construct
  source 1..22: mol_type = other RNA
gataattacaataatgcacatg

SEQ ID NO: 137103 - RNA, 22 nt, synthetic construct
  source 1..22: mol_type = other RNA
gatacaaaaagcacctaccata

SEQ ID NO: 137104 - RNA, 22 nt, synthetic construct
  source 1..22: mol_type = other RNA
gatacaactctgaccattgtgt

SEQ ID NO: 137105 - RNA, 22 nt, synthetic construct
  source 1..22: mol_type = other RNA
gatacaaggtcaatctgaaaaa

SEQ ID NO: 137106 - RNA, 22 nt, synthetic construct
  source 1..22: mol_type = other RNA
gatacaatacttggatcttatc

SEQ ID NO: 137107 - RNA, 22 nt, synthetic construct
  source 1..22: mol_type = other RNA
gatacacaagatctctatgcag

SEQ ID NO: 137108 - RNA, 22 nt, synthetic construct
  source 1..22: mol_type = other RNA
gatacacttctatccagtgaca

SEQ ID NO: 137109 - RNA, 22 nt, synthetic construct
  source 1..22: mol_type = other RNA
gatacagaaataaaacatgttg

SEQ ID NO: 137110 - RNA, 22 nt, synthetic construct
  source 1..22: mol_type = other RNA
gataccagaccctttatcggat

SEQ ID NO: 137111 - RNA, 22 nt, synthetic construct
  source 1..22: mol_type = other RNA
gataccataaagtcagaggagc

SEQ ID NO: 137112 - RNA, 22 nt, synthetic construct
  source 1..22: mol_type = other RNA
gataccctcaaaagatgcagaa

SEQ ID NO: 137113 - RNA, 22 nt, synthetic construct
  source 1..22: mol_type = other RNA
gatacctagtacgtaacctaaa

SEQ ID NO: 137114 - RNA, 22 nt, synthetic construct
  source 1..22: mol_type = other RNA
gatacctcttactaaaaagaaa

SEQ ID NO: 137115 - RNA, 22 nt, synthetic construct
  source 1..22: mol_type = other RNA
gataccttcttgagagtctctt

SEQ ID NO: 137116 - RNA, 22 nt, synthetic construct
  source 1..22: mol_type = other RNA
gataccttgaaaggatactgag

SEQ ID NO: 137117 - RNA, 22 nt, synthetic construct
  source 1..22: mol_type = other RNA
gatacggaaatataacattacc

SEQ ID NO: 137118 - RNA, 22 nt, synthetic construct
  source 1..22: mol_type = other RNA
gatacggagtctcgctctgtcc

SEQ ID NO: 137119 - RNA, 22 nt, synthetic construct
  source 1..22: mol_type = other RNA
gatacgttaaaggaaaagagat

SEQ ID NO: 137120 - RNA, 22 nt, synthetic construct
  source 1..22: mol_type = other RNA
gatactacgcctagctgacttt

SEQ ID NO: 137121 - RNA, 22 nt, synthetic construct
  source 1..22: mol_type = other RNA
gatactagtttagtgcagtatc

SEQ ID NO: 137122 - RNA, 22 nt, synthetic construct
  source 1..22: mol_type = other RNA
gatactcaacatcactagctat

SEQ ID NO: 137123 - RNA, 22 nt, synthetic construct
  source 1..22: mol_type = other RNA
gatactcaatcagtggccagtg

SEQ ID NO: 137124 - RNA, 22 nt, synthetic construct
  source 1..22: mol_type = other RNA
gatactcatgcttgctccagag

SEQ ID NO: 137125 - RNA, 22 nt, synthetic construct
  source 1..22: mol_type = other RNA
gatactcgtagttttttggtag

SEQ ID NO: 137126 - RNA, 22 nt, synthetic construct
  source 1..22: mol_type = other RNA
gatactcttaaagtttcaaact

SEQ ID NO: 137127 - RNA, 22 nt, synthetic construct
  source 1..22: mol_type = other RNA
gatactgagaacagaatttttt

SEQ ID NO: 137128 - RNA, 22 nt, synthetic construct
  source 1..22: mol_type = other RNA
gatactgcactaaactagtatc

SEQ ID NO: 137129 - RNA, 22 nt, synthetic construct
  source 1..22: mol_type = other RNA
gatactggccatgttttatttc

SEQ ID NO: 137130 - RNA, 22 nt, synthetic construct
  source 1..22: mol_type = other RNA
gatacttctaactttagaacat

SEQ ID NO: 137131 - RNA, 22 nt, synthetic construct
  source 1..22: mol_type = other RNA
gatacttgattacaagggtgac

SEQ ID NO: 137132 - RNA, 22 nt, synthetic construct
  source 1..22: mol_type = other RNA
gatagaaaagacaatagctagt

SEQ ID NO: 137133 - RNA, 22 nt, synthetic construct
  source 1..22: mol_type = other RNA
gatagaaagcaccagggcctct

SEQ ID NO: 137134 - RNA, 22 nt, synthetic construct
  source 1..22: mol_type = other RNA
gatagaagtgtatcagatgctt

SEQ ID NO: 137135 - RNA, 22 nt, synthetic construct
  source 1..22: mol_type = other RNA
gatagaataccacttagtttgc

SEQ ID NO: 137136 - RNA, 22 nt, synthetic construct
  source 1..22: mol_type = other RNA
gatagaccagatgcgtggttca

SEQ ID NO: 137137 - RNA, 22 nt, synthetic construct
  source 1..22: mol_type = other RNA
gatagactcttcagaggtctgt

SEQ ID NO: 137138 - RNA, 22 nt, synthetic construct
  source 1..22: mol_type = other RNA
gatagactggattaaggagatg

SEQ ID NO: 137139 - RNA, 22 nt, synthetic construct
  source 1..22: mol_type = other RNA
gatagagagattcaagaaacca

SEQ ID NO: 137140 - RNA, 22 nt, synthetic construct
  source 1..22: mol_type = other RNA
gatagatattggcaacatttta

SEQ ID NO: 137141 - RNA, 22 nt, synthetic construct
  source 1..22: mol_type = other RNA
gatagcaacttgcagaagagtg

SEQ ID NO: 137142 - RNA, 22 nt, synthetic construct
  source 1..22: mol_type = other RNA
gatagcattatcccagatctaa

SEQ ID NO: 137143 - RNA, 22 nt, synthetic construct
  source 1..22: mol_type = other RNA
gatagcattatccctttaaaat

SEQ ID NO: 137144 - RNA, 22 nt, synthetic construct
  source 1..22: mol_type = other RNA
gatagccccttatcaggaaagt

SEQ ID NO: 137145 - RNA, 22 nt, synthetic construct
  source 1..22: mol_type = other RNA
gatagcgaaaggtacgacgctc

SEQ ID NO: 137146 - RNA, 22 nt, synthetic construct
  source 1..22: mol_type = other RNA
gatagctattatttgaaaaagg

SEQ ID NO: 137147 - RNA, 22 nt, synthetic construct
  source 1..22: mol_type = other RNA
gatagctgtggaagcacagtct

SEQ ID NO: 137148 - RNA, 22 nt, synthetic construct
  source 1..22: mol_type = other RNA
gatagcttgacaaaaggcccct

SEQ ID NO: 137149 - RNA, 22 nt, synthetic construct
  source 1..22: mol_type = other RNA
gataggataatgtccagaggag

SEQ ID NO: 137150 - RNA, 22 nt, synthetic construct
  source 1..22: mol_type = other RNA
gataggatgggcagactccttc

SEQ ID NO: 137151 - RNA, 22 nt, synthetic construct
  source 1..22: mol_type = other RNA
gataggtcactgcagtctcaaa

SEQ ID NO: 137152 - RNA, 22 nt, synthetic construct
  source 1..22: mol_type = other RNA
gataggtcatgtacataaattt

SEQ ID NO: 137153 - RNA, 22 nt, synthetic construct
  source 1..22: mol_type = other RNA
gatagtactgaccatctcagca

SEQ ID NO: 137154 - RNA, 22 nt, synthetic construct
  source 1..22: mol_type = other RNA
gatagtctcctatattgtcaat

SEQ ID NO: 137155 - RNA, 22 nt, synthetic construct
  source 1..22: mol_type = other RNA
gatagtctcttcctgtatatct

SEQ ID NO: 137156 - RNA, 22 nt, synthetic construct
  source 1..22: mol_type = other RNA
gatagtcttccaattgcagaaa

SEQ ID NO: 137157 - RNA, 22 nt, synthetic construct
  source 1..22: mol_type = other RNA
gatagtgctttttactttgcga

SEQ ID NO: 137158 - RNA, 22 nt, synthetic construct
  source 1..22: mol_type = other RNA
gatagtggtttgaagcttcact

SEQ ID NO: 137159 - RNA, 22 nt, synthetic construct
  source 1..22: mol_type = other RNA
gatagttaaacatgtaaaacag

SEQ ID NO: 137160 - RNA, 22 nt, synthetic construct
  source 1..22: mol_type = other RNA
gatagttgcagattcatcttga

SEQ ID NO: 137161 - RNA, 22 nt, synthetic construct
  source 1..22: mol_type = other RNA
gatagtttctcaacttagcctt

SEQ ID NO: 137162 - RNA, 22 nt, synthetic construct
  source 1..22: mol_type = other RNA
gatataaaaatggtcaacatga

SEQ ID NO: 137163 - RNA, 22 nt, synthetic construct
  source 1..22: mol_type = other RNA
gatataacgatagtctcctata

SEQ ID NO: 137164 - RNA, 22 nt, synthetic construct
  source 1..22: mol_type = other RNA
gatataagagtgggcaaaaaag

SEQ ID NO: 137165 - RNA, 22 nt, synthetic construct
  source 1..22: mol_type = other RNA
gatatacaggaagagactatct

SEQ ID NO: 137166 - RNA, 22 nt, synthetic construct
  source 1..22: mol_type = other RNA
gatatatgcattcccatgttca

SEQ ID NO: 137167 - RNA, 22 nt, synthetic construct
  source 1..22: mol_type = other RNA
gatatcaatctggatataacaa

SEQ ID NO: 137168 - RNA, 22 nt, synthetic construct
  source 1..22: mol_type = other RNA
gatatcacccagaccaagttta

SEQ ID NO: 137169 - RNA, 22 nt, synthetic construct
  source 1..22: mol_type = other RNA
gatatcagaagtgctgacttgg

SEQ ID NO: 137170 - RNA, 22 nt, synthetic construct
  source 1..22: mol_type = other RNA
gatatccaaagataaaggtaag

SEQ ID NO: 137171 - RNA, 22 nt, synthetic construct
  source 1..22: mol_type = other RNA
gatatccacagtatgctgttta

SEQ ID NO: 137172 - RNA, 22 nt, synthetic construct
  source 1..22: mol_type = other RNA
gatatcccatataaggggaatc

SEQ ID NO: 137173 - RNA, 22 nt, synthetic construct
  source 1..22: mol_type = other RNA
gatatccccatttttctcgaca

SEQ ID NO: 137174 - RNA, 22 nt, synthetic construct
  source 1..22: mol_type = other RNA
gatatcctgtaaacctggaatc

SEQ ID NO: 137175 - RNA, 22 nt, synthetic construct
  source 1..22: mol_type = other RNA
gatatctgaggtcaggagctcg

SEQ ID NO: 137176 - RNA, 22 nt, synthetic construct
  source 1..22: mol_type = other RNA
gatatctgagtgttgtgtgcac

SEQ ID NO: 137177 - RNA, 22 nt, synthetic construct
  source 1..22: mol_type = other RNA
gatatctggcctgcaccattta

SEQ ID NO: 137178 - RNA, 22 nt, synthetic construct
  source 1..22: mol_type = other RNA
gatatctgtaagtcatcaaagg

SEQ ID NO: 137179 - RNA, 22 nt, synthetic construct
  source 1..22: mol_type = other RNA
gatatgaaagaggagacattac

SEQ ID NO: 137180 - RNA, 22 nt, synthetic construct
  source 1..22: mol_type = other RNA
gatatgagggatgaggaagagg

SEQ ID NO: 137181 - RNA, 22 nt, synthetic construct
  source 1..22: mol_type = other RNA
gatatgccacattttttggttt

SEQ ID NO: 137182 - RNA, 22 nt, synthetic construct
  source 1..22: mol_type = other RNA
gatatgggagtccctgctttca

SEQ ID NO: 137183 - RNA, 22 nt, synthetic construct
  source 1..22: mol_type = other RNA
gatatgggccaaagacagatct

SEQ ID NO: 137184 - RNA, 22 nt, synthetic construct
  source 1..22: mol_type = other RNA
gatatgggttattcacccaaga

SEQ ID NO: 137185 - RNA, 22 nt, synthetic construct
  source 1..22: mol_type = other RNA
gatatgtcgcatgaaaacagct

SEQ ID NO: 137186 - RNA, 22 nt, synthetic construct
  source 1..22: mol_type = other RNA
gatatgtgtaggaaggaacaca

SEQ ID NO: 137187 - RNA, 22 nt, synthetic construct
  source 1..22: mol_type = other RNA
gatattagctacaaaagggaaa

SEQ ID NO: 137188 - RNA, 22 nt, synthetic construct
  source 1..22: mol_type = other RNA
gatattatcctccaatgttttt

SEQ ID NO: 137189 - RNA, 22 nt, synthetic construct
  source 1..22: mol_type = other RNA
gatattcctatcagaagcacac

SEQ ID NO: 137190 - RNA, 22 nt, synthetic construct
  source 1..22: mol_type = other RNA
gatattctacagaaaacccttc

SEQ ID NO: 137191 - RNA, 22 nt, synthetic construct
  source 1..22: mol_type = other RNA
gatattggcaacattttaattc

SEQ ID NO: 137192 - RNA, 22 nt, synthetic construct
  source 1..22: mol_type = other RNA
gatattggcataaagacagaca

SEQ ID NO: 137193 - RNA, 22 nt, synthetic construct
  source 1..22: mol_type = other RNA
gatattggcttatagtgttctt

SEQ ID NO: 137194 - RNA, 22 nt, synthetic construct
  source 1..22: mol_type = other RNA
gatatttactaagaagtgaaac

SEQ ID NO: 137195 - RNA, 22 nt, synthetic construct
  source 1..22: mol_type = other RNA
gatatttcgcctagataagaaa

SEQ ID NO: 137196 - RNA, 22 nt, synthetic construct
  source 1..22: mol_type = other RNA
gatatttgcagtagtattgaac

SEQ ID NO: 137197 - RNA, 22 nt, synthetic construct
  source 1..22: mol_type = other RNA
gatatttgttcagaaatagact

SEQ ID NO: 137198 - RNA, 22 nt, synthetic construct
  source 1..22: mol_type = other RNA
gatattttcgtgtactgaaacc

SEQ ID NO: 137199 - RNA, 22 nt, synthetic construct
  source 1..22: mol_type = other RNA
gatattttctgtcattctgcag

SEQ ID NO: 137200 - RNA, 22 nt, synthetic construct
  source 1..22: mol_type = other RNA
gatatttttcagattgaccttg

SEQ ID NO: 137201 - RNA, 22 nt, synthetic construct
  source 1..22: mol_type = other RNA
gatcaaaaccaggaggtttgca

SEQ ID NO: 137202 - RNA, 22 nt, synthetic construct
  source 1..22: mol_type = other RNA
gatcaaaccatgttcatgggaa

SEQ ID NO: 137203 - RNA, 22 nt, synthetic construct
  source 1..22: mol_type = other RNA
gatcaaacgtgctttccttatt

SEQ ID NO: 137204 - RNA, 22 nt, synthetic construct
  source 1..22: mol_type = other RNA
gatcaaagacctaagcttaaga

SEQ ID NO: 137205 - RNA, 22 nt, synthetic construct
  source 1..22: mol_type = other RNA
gatcaaagtgaaaggcaaagga

SEQ ID NO: 137206 - RNA, 22 nt, synthetic construct
  source 1..22: mol_type = other RNA
gatcaaatctggctgcagggct

SEQ ID NO: 137207 - RNA, 22 nt, synthetic construct
  source 1..22: mol_type = other RNA
gatcaagcccttccttgcttgt

SEQ ID NO: 137208 - RNA, 22 nt, synthetic construct
  source 1..22: mol_type = other RNA
gatcaagctcgccgtctccctc

SEQ ID NO: 137209 - RNA, 22 nt, synthetic construct
  source 1..22: mol_type = other RNA
gatcaaggaagcttcctaaaga

SEQ ID NO: 137210 - RNA, 22 nt, synthetic construct
  source 1..22: mol_type = other RNA
gatcaaggcacagtctgtgctt

SEQ ID NO: 137211 - RNA, 22 nt, synthetic construct
  source 1..22: mol_type = other RNA
gatcaagtatttcctatgaaaa

SEQ ID NO: 137212 - RNA, 22 nt, synthetic construct
  source 1..22: mol_type = other RNA
gatcaagtcctttccagaggtt

SEQ ID NO: 137213 - RNA, 22 nt, synthetic construct
  source 1..22: mol_type = other RNA
gatcaagttgcttggcacagaa

SEQ ID NO: 137214 - RNA, 22 nt, synthetic construct
  source 1..22: mol_type = other RNA
gatcaattgaccaaacatgtga

SEQ ID NO: 137215 - RNA, 22 nt, synthetic construct
  source 1..22: mol_type = other RNA
gatcacaaggactggcttcagt

SEQ ID NO: 137216 - RNA, 22 nt, synthetic construct
  source 1..22: mol_type = other RNA
gatcacaaggtcagaagtttgg

SEQ ID NO: 137217 - RNA, 22 nt, synthetic construct
  source 1..22: mol_type = other RNA
gatcacaccctcctaccttcca

SEQ ID NO: 137218 - RNA, 22 nt, synthetic construct
  source 1..22: mol_type = other RNA
gatcacaccgctgcattccagc

SEQ ID NO: 137219 - RNA, 22 nt, synthetic construct
  source 1..22: mol_type = other RNA
gatcacacttgatggtttgggg

SEQ ID NO: 137220 - RNA, 22 nt, synthetic construct
  source 1..22: mol_type = other RNA
gatcacagaagtgttttgatag

SEQ ID NO: 137221 - RNA, 22 nt, synthetic construct
  source 1..22: mol_type = other RNA
gatcacagatacaactctgacc

SEQ ID NO: 137222 - RNA, 22 nt, synthetic construct
  source 1..22: mol_type = other RNA
gatcacaggcgttgagccatca

SEQ ID NO: 137223 - RNA, 22 nt, synthetic construct
  source 1..22: mol_type = other RNA
gatcaccaaagacttcaggaac

SEQ ID NO: 137224 - RNA, 22 nt, synthetic construct
  source 1..22: mol_type = other RNA
gatcaccaggggctgggggatc

SEQ ID NO: 137225 - RNA, 22 nt, synthetic construct
  source 1..22: mol_type = other RNA
gatcacgccactgcattccgcc

SEQ ID NO: 137226 - RNA, 22 nt, synthetic construct
  source 1..22: mol_type = other RNA
gatcagaagagcactatgtaaa

SEQ ID NO: 137227 - RNA, 22 nt, synthetic construct
  source 1..22: mol_type = other RNA
gatcagcaccctcaaatgtctc

SEQ ID NO: 137228 - RNA, 22 nt, synthetic construct
  source 1..22: mol_type = other RNA
gatcagcttcctacccaagctt

SEQ ID NO: 137229 - RNA, 22 nt, synthetic construct
  source 1..22: mol_type = other RNA
gatcaggaaagaccggggactg

SEQ ID NO: 137230 - RNA, 22 nt, synthetic construct
  source 1..22: mol_type = other RNA
gatcaggaaagatgaagtatag

SEQ ID NO: 137231 - RNA, 22 nt, synthetic construct
  source 1..22: mol_type = other RNA
gatcagggatttggccagaatc

SEQ ID NO: 137232 - RNA, 22 nt, synthetic construct
  source 1..22: mol_type = other RNA
gatcagtaaaattcccttcagt

SEQ ID NO: 137233 - RNA, 22 nt, synthetic construct
  source 1..22: mol_type = other RNA
gatcagtaacaaataagaagat

SEQ ID NO: 137234 - RNA, 22 nt, synthetic construct
  source 1..22: mol_type = other RNA
gatcataagcttttatttgtca

SEQ ID NO: 137235 - RNA, 22 nt, synthetic construct
  source 1..22: mol_type = other RNA
gatcatacacatccagaagtca

SEQ ID NO: 137236 - RNA, 22 nt, synthetic construct
  source 1..22: mol_type = other RNA
gatcatacacctggatcaagtg

SEQ ID NO: 137237 - RNA, 22 nt, synthetic construct
  source 1..22: mol_type = other RNA
gatcatatagtaattctgtgct

SEQ ID NO: 137238 - RNA, 22 nt, synthetic construct
  source 1..22: mol_type = other RNA
gatcatcgcattacgagttatg

SEQ ID NO: 137239 - RNA, 22 nt, synthetic construct
  source 1..22: mol_type = other RNA
gatcatttagtaagtgtgagca

SEQ ID NO: 137240 - RNA, 22 nt, synthetic construct
  source 1..22: mol_type = other RNA
gatcatttcaaaccaatgttct

SEQ ID NO: 137241 - RNA, 22 nt, synthetic construct
  source 1..22: mol_type = other RNA
gatcatttcacttgattacttt

SEQ ID NO: 137242 - RNA, 22 nt, synthetic construct
  source 1..22: mol_type = other RNA
gatccaagtattgtatcaatgt

SEQ ID NO: 137243 - RNA, 22 nt, synthetic construct
  source 1..22: mol_type = other RNA
gatccagatgtagagaaacagg

SEQ ID NO: 137244 - RNA, 22 nt, synthetic construct
  source 1..22: mol_type = other RNA
gatccagcagtttcacttctta

SEQ ID NO: 137245 - RNA, 22 nt, synthetic construct
  source 1..22: mol_type = other RNA
gatccaggggaatagaaagtta

SEQ ID NO: 137246 - RNA, 22 nt, synthetic construct
  source 1..22: mol_type = other RNA
gatccaggtgtatgatcttatt

SEQ ID NO: 137247 - RNA, 22 nt, synthetic construct
  source 1..22: mol_type = other RNA
gatccagtctctacccagcact

SEQ ID NO: 137248 - RNA, 22 nt, synthetic construct
  source 1..22: mol_type = other RNA
gatccattacatcaacatataa

SEQ ID NO: 137249 - RNA, 22 nt, synthetic construct
  source 1..22: mol_type = other RNA
gatccattttgagttcagtttt

SEQ ID NO: 137250 - RNA, 22 nt, synthetic construct
  source 1..22: mol_type = other RNA
gatcccaaaaaggtttttattt

SEQ ID NO: 137251 - RNA, 22 nt, synthetic construct
  source 1..22: mol_type = other RNA
gatcccaattacttccagtgtt

SEQ ID NO: 137252 - RNA, 22 nt, synthetic construct
  source 1..22: mol_type = other RNA
gatcccactagtggaagaatca

SEQ ID NO: 137253 - RNA, 22 nt, synthetic construct
  source 1..22: mol_type = other RNA
gatcccagtcctttgggaggtc

SEQ ID NO: 137254 - RNA, 22 nt, synthetic construct
  source 1..22: mol_type = other RNA
gatcccccagcccctggtgatc

SEQ ID NO: 137255 - RNA, 22 nt, synthetic construct
  source 1..22: mol_type = other RNA
gatcccggaacaggaaaaggac

SEQ ID NO: 137256 - RNA, 22 nt, synthetic construct
  source 1..22: mol_type = other RNA
gatccctgatatgtcgcatgaa

SEQ ID NO: 137257 - RNA, 22 nt, synthetic construct
  source 1..22: mol_type = other RNA
gatcctaagcatgagatactac

SEQ ID NO: 137258 - RNA, 22 nt, synthetic construct
  source 1..22: mol_type = other RNA
gatcctaagccatctaattcac

SEQ ID NO: 137259 - RNA, 22 nt, synthetic construct
  source 1..22: mol_type = other RNA
gatcctcacatcagttaccacc

SEQ ID NO: 137260 - RNA, 22 nt, synthetic construct
  source 1..22: mol_type = other RNA
gatcctcctgccttggccttct

SEQ ID NO: 137261 - RNA, 22 nt, synthetic construct
  source 1..22: mol_type = other RNA
gatcctgaggaagctaatcaag

SEQ ID NO: 137262 - RNA, 22 nt, synthetic construct
  source 1..22: mol_type = other RNA
gatcctggaatagtagcttcaa

SEQ ID NO: 137263 - RNA, 22 nt, synthetic construct
  source 1..22: mol_type = other RNA
gatcctggagggctcccagtgc

SEQ ID NO: 137264 - RNA, 22 nt, synthetic construct
  source 1..22: mol_type = other RNA
gatcctggattgctagtgtcct

SEQ ID NO: 137265 - RNA, 22 nt, synthetic construct
  source 1..22: mol_type = other RNA
gatcctgtccaggcgcctgcat

SEQ ID NO: 137266 - RNA, 22 nt, synthetic construct
  source 1..22: mol_type = other RNA
gatcctgtctcagagtatatat

SEQ ID NO: 137267 - RNA, 22 nt, synthetic construct
  source 1..22: mol_type = other RNA
gatccttactaccaccactaat

SEQ ID NO: 137268 - RNA, 22 nt, synthetic construct
  source 1..22: mol_type = other RNA
gatccttctgccttgacctccc

SEQ ID NO: 137269 - RNA, 22 nt, synthetic construct
  source 1..22: mol_type = other RNA
gatcgttagtattttcacatat

SEQ ID NO: 137270 - RNA, 22 nt, synthetic construct
  source 1..22: mol_type = other RNA
gatctaaaatggaagactttat

SEQ ID NO: 137271 - RNA, 22 nt, synthetic construct
  source 1..22: mol_type = other RNA
gatctaaatggtgtgaagttgg

SEQ ID NO: 137272 - RNA, 22 nt, synthetic construct
  source 1..22: mol_type = other RNA
gatctaaattttaagtgcacaa

SEQ ID NO: 137273 - RNA, 22 nt, synthetic construct
  source 1..22: mol_type = other RNA
gatctaacaaacgcattgtgat

SEQ ID NO: 137274 - RNA, 22 nt, synthetic construct
  source 1..22: mol_type = other RNA
gatctagtgaagtcaatttcag

SEQ ID NO: 137275 - RNA, 22 nt, synthetic construct
  source 1..22: mol_type = other RNA
gatctatcaatctcacacctgg

SEQ ID NO: 137276 - RNA, 22 nt, synthetic construct
  source 1..22: mol_type = other RNA
gatctatgaatttgcctattct

SEQ ID NO: 137277 - RNA, 22 nt, synthetic construct
  source 1..22: mol_type = other RNA
gatctatgcatactgcagcact

SEQ ID NO: 137278 - RNA, 22 nt, synthetic construct
  source 1..22: mol_type = other RNA
gatctcaaacagcctaattgta

SEQ ID NO: 137279 - RNA, 22 nt, synthetic construct
  source 1..22: mol_type = other RNA
gatctcacgtcaccgcaacctc

SEQ ID NO: 137280 - RNA, 22 nt, synthetic construct
  source 1..22: mol_type = other RNA
gatctcattttgaaaaacagat

SEQ ID NO: 137281 - RNA, 22 nt, synthetic construct
  source 1..22: mol_type = other RNA
gatctcggcttactgcaacctc

SEQ ID NO: 137282 - RNA, 22 nt, synthetic construct
  source 1..22: mol_type = other RNA
gatctctatgcagaaatctacc

SEQ ID NO: 137283 - RNA, 22 nt, synthetic construct
  source 1..22: mol_type = other RNA
gatctctgacattggttattca

SEQ ID NO: 137284 - RNA, 22 nt, synthetic construct
  source 1..22: mol_type = other RNA
gatctctgctcaccgcaacatc

SEQ ID NO: 137285 - RNA, 22 nt, synthetic construct
  source 1..22: mol_type = other RNA
gatctctgggctcactgcaact

SEQ ID NO: 137286 - RNA, 22 nt, synthetic construct
  source 1..22: mol_type = other RNA
gatctcttttcctttaacgtat

SEQ ID NO: 137287 - RNA, 22 nt, synthetic construct
  source 1..22: mol_type = other RNA
gatctgaaattgacttcactag

SEQ ID NO: 137288 - RNA, 22 nt, synthetic construct
  source 1..22: mol_type = other RNA
gatctgagaagactaagcagaa

SEQ ID NO: 137289 - RNA, 22 nt, synthetic construct
  source 1..22: mol_type = other RNA
gatctgagagatagaaagcacc

SEQ ID NO: 137290 - RNA, 22 nt, synthetic construct
  source 1..22: mol_type = other RNA
gatctgagtttgctctgcaaat

SEQ ID NO: 137291 - RNA, 22 nt, synthetic construct
  source 1..22: mol_type = other RNA
gatctgataaattattagcttg

SEQ ID NO: 137292 - RNA, 22 nt, synthetic construct
  source 1..22: mol_type = other RNA
gatctgccaggacaattgaatg

SEQ ID NO: 137293 - RNA, 22 nt, synthetic construct
  source 1..22: mol_type = other RNA
gatctgctcaagttttctattt

SEQ ID NO: 137294 - RNA, 22 nt, synthetic construct
  source 1..22: mol_type = other RNA
gatctgctgtaagctggtaata

SEQ ID NO: 137295 - RNA, 22 nt, synthetic construct
  source 1..22: mol_type = other RNA
gatctgcttgcagacaataatt

SEQ ID NO: 137296 - RNA, 22 nt, synthetic construct
  source 1..22: mol_type = other RNA
gatctgggataatgctatcatt

SEQ ID NO: 137297 - RNA, 22 nt, synthetic construct
  source 1..22: mol_type = other RNA
gatctggtcacaaacacaaaac

SEQ ID NO: 137298 - RNA, 22 nt, synthetic construct
  source 1..22: mol_type = other RNA
gatctgtcatgtttgaattttc

SEQ ID NO: 137299 - RNA, 22 nt, synthetic construct
  source 1..22: mol_type = other RNA
gatctgtctttggcccatatcc

SEQ ID NO: 137300 - RNA, 22 nt, synthetic construct
  source 1..22: mol_type = other RNA
gatctgtggactttaggctgtt

SEQ ID NO: 137301 - RNA, 22 nt, synthetic construct
  source 1..22: mol_type = other RNA
gatctgttgcagtccccggtct

SEQ ID NO: 137302 - RNA, 22 nt, synthetic construct
  source 1..22: mol_type = other RNA
gatctgttggtgcttagctgcc

SEQ ID NO: 137303 - RNA, 22 nt, synthetic construct
  source 1..22: mol_type = other RNA
gatctgtttttcaaaatgagat

SEQ ID NO: 137304 - RNA, 22 nt, synthetic construct
  source 1..22: mol_type = other RNA
gatcttactgtaagttcctgga

SEQ ID NO: 137305 - RNA, 22 nt, synthetic construct
  source 1..22: mol_type = other RNA
gatcttatctgctgtcggtttt

SEQ ID NO: 137306 - RNA, 22 nt, synthetic construct
  source 1..22: mol_type = other RNA
gatcttatggaatagttgatta

SEQ ID NO: 137307 - RNA, 22 nt, synthetic construct
  source 1..22: mol_type = other RNA
gatcttattaatgtgttgtctg

SEQ ID NO: 137308 - RNA, 22 nt, synthetic construct
  source 1..22: mol_type = other RNA
gatcttggccgaatgtggtggt

SEQ ID NO: 137309 - RNA, 22 nt, synthetic construct
  source 1..22: mol_type = other RNA
gatcttgggaatactttcccat

SEQ ID NO: 137310 - RNA, 22 nt, synthetic construct
  source 1..22: mol_type = other RNA
gatcttgtgtatcttttgttag

SEQ ID NO: 137311 - RNA, 22 nt, synthetic construct
  source 1..22: mol_type = other RNA
gatctttacttcccttctcgaa

SEQ ID NO: 137312 - RNA, 22 nt, synthetic construct
  source 1..22: mol_type = other RNA
gatctttcaaggggccttttgt

SEQ ID NO: 137313 - RNA, 22 nt, synthetic construct
  source 1..22: mol_type = other RNA
gatctttgaataaagggtcaga

SEQ ID NO: 137314 - RNA, 22 nt, synthetic construct
  source 1..22: mol_type = other RNA
gatcttttctgacaatttcagg

SEQ ID NO: 137315 - RNA, 22 nt, synthetic construct
  source 1..22: mol_type = other RNA
gatctttttgtgtatatggtaa

SEQ ID NO: 137316 - RNA, 22 nt, synthetic construct
  source 1..22: mol_type = other RNA
gatgaaaaagtactggaaatgg

SEQ ID NO: 137317 - RNA, 22 nt, synthetic construct
  source 1..22: mol_type = other RNA
gatgaaaagagcacaccaagac

SEQ ID NO: 137318 - RNA, 22 nt, synthetic construct
  source 1..22: mol_type = other RNA
gatgaaactaaatgtgagcatt

SEQ ID NO: 137319 - RNA, 22 nt, synthetic construct
  source 1..22: mol_type = other RNA
gatgaaattgaccattccacgc

SEQ ID NO: 137320 - RNA, 22 nt, synthetic construct
  source 1..22: mol_type = other RNA
gatgaacaaaggcaggagcagt

SEQ ID NO: 137321 - RNA, 22 nt, synthetic construct
  source 1..22: mol_type = other RNA
gatgaacgctaaattaaaggct

SEQ ID NO: 137322 - RNA, 22 nt, synthetic construct
  source 1..22: mol_type = other RNA
gatgaactacacagacatgaac

SEQ ID NO: 137323 - RNA, 22 nt, synthetic construct
  source 1..22: mol_type = other RNA
gatgaagaacctgttcatttga

SEQ ID NO: 137324 - RNA, 22 nt, synthetic construct
  source 1..22: mol_type = other RNA
gatgaagattagaaaattagct

SEQ ID NO: 137325 - RNA, 22 nt, synthetic construct
  source 1..22: mol_type = other RNA
gatgaagcagggaaatggaggg

SEQ ID NO: 137326 - RNA, 22 nt, synthetic construct
  source 1..22: mol_type = other RNA
gatgaagggttttctgtagaat

SEQ ID NO: 137327 - RNA, 22 nt, synthetic construct
  source 1..22: mol_type = other RNA
gatgaagtatagaaaggagacc

SEQ ID NO: 137328 - RNA, 22 nt, synthetic construct
  source 1..22: mol_type = other RNA
gatgaatacaaaggtgttaagc

SEQ ID NO: 137329 - RNA, 22 nt, synthetic construct
  source 1..22: mol_type = other RNA
gatgaatctgcaactatcaaaa

SEQ ID NO: 137330 - RNA, 22 nt, synthetic construct
  source 1..22: mol_type = other RNA
gatgaatgaacaaaatgtggta

SEQ ID NO: 137331 - RNA, 22 nt, synthetic construct
  source 1..22: mol_type = other RNA
gatgaatgagcaaggtcgtttc

SEQ ID NO: 137332 - RNA, 22 nt, synthetic construct
  source 1..22: mol_type = other RNA
gatgaatgcagtggcttcctaa

SEQ ID NO: 137333 - RNA, 22 nt, synthetic construct
  source 1..22: mol_type = other RNA
gatgaatggataaggaaaatat

SEQ ID NO: 137334 - RNA, 22 nt, synthetic construct
  source 1..22: mol_type = other RNA
gatgaattacaaatgaaagtca

SEQ ID NO: 137335 - RNA, 22 nt, synthetic construct
  source 1..22: mol_type = other RNA
gatgaattccagtttatctatt

SEQ ID NO: 137336 - RNA, 22 nt, synthetic construct
  source 1..22: mol_type = other RNA
gatgacagaaataatacaaatg

SEQ ID NO: 137337 - RNA, 22 nt, synthetic construct
  source 1..22: mol_type = other RNA
gatgacagttactctaaaagaa

SEQ ID NO: 137338 - RNA, 22 nt, synthetic construct
  source 1..22: mol_type = other RNA
gatgacatttgcttttcctgga

SEQ ID NO: 137339 - RNA, 22 nt, synthetic construct
  source 1..22: mol_type = other RNA
gatgaccttgacaataaatggt

SEQ ID NO: 137340 - RNA, 22 nt, synthetic construct
  source 1..22: mol_type = other RNA
gatgacgaaagtgaagcccaga

SEQ ID NO: 137341 - RNA, 22 nt, synthetic construct
  source 1..22: mol_type = other RNA
gatgactaggctcctgagaacc

SEQ ID NO: 137342 - RNA, 22 nt, synthetic construct
  source 1..22: mol_type = other RNA
gatgactatgaaaagcctcaaa

SEQ ID NO: 137343 - RNA, 22 nt, synthetic construct
  source 1..22: mol_type = other RNA
gatgactgtaagctgaactctg

SEQ ID NO: 137344 - RNA, 22 nt, synthetic construct
  source 1..22: mol_type = other RNA
gatgactgtcctgaattctaat

SEQ ID NO: 137345 - RNA, 22 nt, synthetic construct
  source 1..22: mol_type = other RNA
gatgacttacagatatcaccca

SEQ ID NO: 137346 - RNA, 22 nt, synthetic construct
  source 1..22: mol_type = other RNA
gatgacttcactggagaattct

SEQ ID NO: 137347 - RNA, 22 nt, synthetic construct
  source 1..22: mol_type = other RNA
gatgagaaatacttggacaggg

SEQ ID NO: 137348 - RNA, 22 nt, synthetic construct
  source 1..22: mol_type = other RNA
gatgagactcttaatattgaaa

SEQ ID NO: 137349 - RNA, 22 nt, synthetic construct
  source 1..22: mol_type = other RNA
gatgagagtggcctaaatcagg

SEQ ID NO: 137350 - RNA, 22 nt, synthetic construct
  source 1..22: mol_type = other RNA
gatgagattaatgtaggtgtct

SEQ ID NO: 137351 - RNA, 22 nt, synthetic construct
  source 1..22: mol_type = other RNA
gatgagcccaggagttgcatca

SEQ ID NO: 137352 - RNA, 22 nt, synthetic construct
  source 1..22: mol_type = other RNA
gatgagctactgcatgctaggg

SEQ ID NO: 137353 - RNA, 22 nt, synthetic construct
  source 1..22: mol_type = other RNA
gatgaggaagaggaaggttcaa

SEQ ID NO: 137354 - RNA, 22 nt, synthetic construct
  source 1..22: mol_type = other RNA
gatgaggggctgagccttcaga

SEQ ID NO: 137355 - RNA, 22 nt, synthetic construct
  source 1..22: mol_type = other RNA
gatgaggtctcagccttttctg

SEQ ID NO: 137356 - RNA, 22 nt, synthetic construct
  source 1..22: mol_type = other RNA
gatgaggttttacgatgttggc

SEQ ID NO: 137357 - RNA, 22 nt, synthetic construct
  source 1..22: mol_type = other RNA
gatgataccttcttgagagtct

SEQ ID NO: 137358 - RNA, 22 nt, synthetic construct
  source 1..22: mol_type = other RNA
gatgatagaataccacttagtt

SEQ ID NO: 137359 - RNA, 22 nt, synthetic construct
  source 1..22: mol_type = other RNA
gatgatcaaaaccaggaggttt

SEQ ID NO: 137360 - RNA, 22 nt, synthetic construct
  source 1..22: mol_type = other RNA
gatgatcctcccgccttggcct

SEQ ID NO: 137361 - RNA, 22 nt, synthetic construct
  source 1..22: mol_type = other RNA
gatgatctaaatggtgtgaagt

SEQ ID NO: 137362 - RNA, 22 nt, synthetic construct
  source 1..22: mol_type = other RNA
gatgatgaacaaaggcaggagc

SEQ ID NO: 137363 - RNA, 22 nt, synthetic construct
  source 1..22: mol_type = other RNA
gatgatgatggtgatgctaacg

SEQ ID NO: 137364 - RNA, 22 nt, synthetic construct
  source 1..22: mol_type = other RNA
gatgatggtgatgctaacgtgc

SEQ ID NO: 137365 - RNA, 22 nt, synthetic construct
  source 1..22: mol_type = other RNA
gatgatgttttgaacgaatgaa

SEQ ID NO: 137366 - RNA, 22 nt, synthetic construct
  source 1..22: mol_type = other RNA
gatgattcgcattgctaattca

SEQ ID NO: 137367 - RNA, 22 nt, synthetic construct
  source 1..22: mol_type = other RNA
gatgattctaatgtgcaaggag

SEQ ID NO: 137368 - RNA, 22 nt, synthetic construct
  source 1..22: mol_type = other RNA
gatgattttagaaggtaagaat

SEQ ID NO: 137369 - RNA, 22 nt, synthetic construct
  source 1..22: mol_type = other RNA
gatgatttttgccagtgtttta

SEQ ID NO: 137370 - RNA, 22 nt, synthetic construct
  source 1..22: mol_type = other RNA
gatgcaacaaatgttgcagaga

SEQ ID NO: 137371 - RNA, 22 nt, synthetic construct
  source 1..22: mol_type = other RNA
gatgcaactcctgggctcatct

SEQ ID NO: 137372 - RNA, 22 nt, synthetic construct
  source 1..22: mol_type = other RNA
gatgcaagaatggtttaacaca

SEQ ID NO: 137373 - RNA, 22 nt, synthetic construct
  source 1..22: mol_type = other RNA
gatgcaatttgttttccaagcc

SEQ ID NO: 137374 - RNA, 22 nt, synthetic construct
  source 1..22: mol_type = other RNA
gatgcacaaaagtttaactttg

SEQ ID NO: 137375 - RNA, 22 nt, synthetic construct
  source 1..22: mol_type = other RNA
gatgcacaagacagatgtgctt

SEQ ID NO: 137376 - RNA, 22 nt, synthetic construct
  source 1..22: mol_type = other RNA
gatgcacaagccttgaaaatat

SEQ ID NO: 137377 - RNA, 22 nt, synthetic construct
  source 1..22: mol_type = other RNA
gatgcagatttctttttactca

SEQ ID NO: 137378 - RNA, 22 nt, synthetic construct
  source 1..22: mol_type = other RNA
gatgcagcaaaagcaccactga

SEQ ID NO: 137379 - RNA, 22 nt, synthetic construct
  source 1..22: mol_type = other RNA
gatgcagcccctgccacactcc

SEQ ID NO: 137380 - RNA, 22 nt, synthetic construct
  source 1..22: mol_type = other RNA
gatgcagttgcttactctaatg

SEQ ID NO: 137381 - RNA, 22 nt, synthetic construct
  source 1..22: mol_type = other RNA
gatgcataagttctagagattt

SEQ ID NO: 137382 - RNA, 22 nt, synthetic construct
  source 1..22: mol_type = other RNA
gatgcataccaagcccggcacg

SEQ ID NO: 137383 - RNA, 22 nt, synthetic construct
  source 1..22: mol_type = other RNA
gatgcatgaggcatattattgt

SEQ ID NO: 137384 - RNA, 22 nt, synthetic construct
  source 1..22: mol_type = other RNA
gatgcattccagattgaaatct

SEQ ID NO: 137385 - RNA, 22 nt, synthetic construct
  source 1..22: mol_type = other RNA
gatgcattctagaaaggaggga

SEQ ID NO: 137386 - RNA, 22 nt, synthetic construct
  source 1..22: mol_type = other RNA
gatgcattctgtcacatagacc

SEQ ID NO: 137387 - RNA, 22 nt, synthetic construct
  source 1..22: mol_type = other RNA
gatgccacaaatggagtgactt

SEQ ID NO: 137388 - RNA, 22 nt, synthetic construct
  source 1..22: mol_type = other RNA
gatgccactcaaaactgaagtt

SEQ ID NO: 137389 - RNA, 22 nt, synthetic construct
  source 1..22: mol_type = other RNA
gatgccatcacattttgaatca

SEQ ID NO: 137390 - RNA, 22 nt, synthetic construct
  source 1..22: mol_type = other RNA
gatgccatgtgttttgttttga

SEQ ID NO: 137391 - RNA, 22 nt, synthetic construct
  source 1..22: mol_type = other RNA
gatgccatttataatagcataa

SEQ ID NO: 137392 - RNA, 22 nt, synthetic construct
  source 1..22: mol_type = other RNA
gatgccggtaatcacagctact

SEQ ID NO: 137393 - RNA, 22 nt, synthetic construct
  source 1..22: mol_type = other RNA
gatgcctagaaaggaattgtaa

SEQ ID NO: 137394 - RNA, 22 nt, synthetic construct
  source 1..22: mol_type = other RNA
gatgcctatgaaatcttgaaga

SEQ ID NO: 137395 - RNA, 22 nt, synthetic construct
  source 1..22: mol_type = other RNA
gatgcctcgaaggcctgcttca

SEQ ID NO: 137396 - RNA, 22 nt, synthetic construct
  source 1..22: mol_type = other RNA
gatgcctgtgcttgtctctctc

SEQ ID NO: 137397 - RNA, 22 nt, synthetic construct
  source 1..22: mol_type = other RNA
gatgcctgtgcttttctcgtgc

SEQ ID NO: 137398 - RNA, 22 nt, synthetic construct
  source 1..22: mol_type = other RNA
gatgcgtggttcacacctgtag

SEQ ID NO: 137399 - RNA, 22 nt, synthetic construct
  source 1..22: mol_type = other RNA
gatgctaaacagtacagtagta

SEQ ID NO: 137400 - RNA, 22 nt, synthetic construct
  source 1..22: mol_type = other RNA
gatgctaacgtgcttgctctgc

SEQ ID NO: 137401 - RNA, 22 nt, synthetic construct
  source 1..22: mol_type = other RNA
gatgctattcaagacaagcaag

SEQ ID NO: 137402 - RNA, 22 nt, synthetic construct
  source 1..22: mol_type = other RNA
gatgctcagggtgcgacctcga

SEQ ID NO: 137403 - RNA, 22 nt, synthetic construct
  source 1..22: mol_type = other RNA
gatgctcagtttcaaaagctcc

SEQ ID NO: 137404 - RNA, 22 nt, synthetic construct
  source 1..22: mol_type = other RNA
gatgctccctctatggcaggca

SEQ ID NO: 137405 - RNA, 22 nt, synthetic construct
  source 1..22: mol_type = other RNA
gatgctgaacttgtcacaaaat

SEQ ID NO: 137406 - RNA, 22 nt, synthetic construct
  source 1..22: mol_type = other RNA
gatgctgcgagccccgggggag

SEQ ID NO: 137407 - RNA, 22 nt, synthetic construct
  source 1..22: mol_type = other RNA
gatgctggagtgtggcaggggc

SEQ ID NO: 137408 - RNA, 22 nt, synthetic construct
  source 1..22: mol_type = other RNA
gatgctggggacccctccctgc

SEQ ID NO: 137409 - RNA, 22 nt, synthetic construct
  source 1..22: mol_type = other RNA
gatgctggtggagtattctagt

SEQ ID NO: 137410 - RNA, 22 nt, synthetic construct
  source 1..22: mol_type = other RNA
gatgctgtctataggcaatgag

SEQ ID NO: 137411 - RNA, 22 nt, synthetic construct
  source 1..22: mol_type = other RNA
gatgcttaaagcgctactcagc

SEQ ID NO: 137412 - RNA, 22 nt, synthetic construct
  source 1..22: mol_type = other RNA
gatgcttaggtaagaaaaattc

SEQ ID NO: 137413 - RNA, 22 nt, synthetic construct
  source 1..22: mol_type = other RNA
gatgcttctagccaaagcaagc

SEQ ID NO: 137414 - RNA, 22 nt, synthetic construct
  source 1..22: mol_type = other RNA
gatgctttctctagttgcacgg

SEQ ID NO: 137415 - RNA, 22 nt, synthetic construct
  source 1..22: mol_type = other RNA
gatggaaagtggactatgtagg

SEQ ID NO: 137416 - RNA, 22 nt, synthetic construct
  source 1..22: mol_type = other RNA
gatggaacggcttaacaccttt

SEQ ID NO: 137417 - RNA, 22 nt, synthetic construct
  source 1..22: mol_type = other RNA
gatggaactctattttcctaaa

SEQ ID NO: 137418 - RNA, 22 nt, synthetic construct
  source 1..22: mol_type = other RNA
gatggaattctgacacccgaag

SEQ ID NO: 137419 - RNA, 22 nt, synthetic construct
  source 1..22: mol_type = other RNA
gatggacaaattaccatgtttc

SEQ ID NO: 137420 - RNA, 22 nt, synthetic construct
  source 1..22: mol_type = other RNA
gatggacactgcagatgaatga

SEQ ID NO: 137421 - RNA, 22 nt, synthetic construct
  source 1..22: mol_type = other RNA
gatggacattctgcttccttgc

SEQ ID NO: 137422 - RNA, 22 nt, synthetic construct
  source 1..22: mol_type = other RNA
gatggacatttaggttgtttcc

SEQ ID NO: 137423 - RNA, 22 nt, synthetic construct
  source 1..22: mol_type = other RNA
gatggacgtttgagttgtttcc

SEQ ID NO: 137424 - RNA, 22 nt, synthetic construct
  source 1..22: mol_type = other RNA
gatggaggtggaactctgtcat

SEQ ID NO: 137425 - RNA, 22 nt, synthetic construct
  source 1..22: mol_type = other RNA
gatggagttacgctgccaaaag

SEQ ID NO: 137426 - RNA, 22 nt, synthetic construct
  source 1..22: mol_type = other RNA
gatggatttttctgtttctgtg

SEQ ID NO: 137427 - RNA, 22 nt, synthetic construct
  source 1..22: mol_type = other RNA
gatggcaaacagactgagccag

SEQ ID NO: 137428 - RNA, 22 nt, synthetic construct
  source 1..22: mol_type = other RNA
gatggcaacaatcaacaggtag

SEQ ID NO: 137429 - RNA, 22 nt, synthetic construct
  source 1..22: mol_type = other RNA
gatggcaagtttccattctctt

SEQ ID NO: 137430 - RNA, 22 nt, synthetic construct
  source 1..22: mol_type = other RNA
gatggcacataccatggaatac

SEQ ID NO: 137431 - RNA, 22 nt, synthetic construct
  source 1..22: mol_type = other RNA
gatggcatcattcataaacaca

SEQ ID NO: 137432 - RNA, 22 nt, synthetic construct
  source 1..22: mol_type = other RNA
gatggcatgaaatgggtttaaa

SEQ ID NO: 137433 - RNA, 22 nt, synthetic construct
  source 1..22: mol_type = other RNA
gatggccagtcatgtggggact

SEQ ID NO: 137434 - RNA, 22 nt, synthetic construct
  source 1..22: mol_type = other RNA
gatggccccaaaattaccccat

SEQ ID NO: 137435 - RNA, 22 nt, synthetic construct
  source 1..22: mol_type = other RNA
gatggcctccctcactaagtca

SEQ ID NO: 137436 - RNA, 22 nt, synthetic construct
  source 1..22: mol_type = other RNA
gatggcgcatgcctgtggtccc

SEQ ID NO: 137437 - RNA, 22 nt, synthetic construct
  source 1..22: mol_type = other RNA
gatggctcaacgcctgtgatcc

SEQ ID NO: 137438 - RNA, 22 nt, synthetic construct
  source 1..22: mol_type = other RNA
gatggctgaaagagaaagaagt

SEQ ID NO: 137439 - RNA, 22 nt, synthetic construct
  source 1..22: mol_type = other RNA
gatggctgtactaagcctatgt

SEQ ID NO: 137440 - RNA, 22 nt, synthetic construct
  source 1..22: mol_type = other RNA
gatggcttaggatcaccaaaga

SEQ ID NO: 137441 - RNA, 22 nt, synthetic construct
  source 1..22: mol_type = other RNA
gatggcttgagcccagggggtc

SEQ ID NO: 137442 - RNA, 22 nt, synthetic construct
  source 1..22: mol_type = other RNA
gatgggaaagtattcccaagat

SEQ ID NO: 137443 - RNA, 22 nt, synthetic construct
  source 1..22: mol_type = other RNA
gatgggaagaaaaaataaaggc

SEQ ID NO: 137444 - RNA, 22 nt, synthetic construct
  source 1..22: mol_type = other RNA
gatgggacttcactagtgggtc

SEQ ID NO: 137445 - RNA, 22 nt, synthetic construct
  source 1..22: mol_type = other RNA
gatgggagatggacactgcaga

SEQ ID NO: 137446 - RNA, 22 nt, synthetic construct
  source 1..22: mol_type = other RNA
gatgggcagactccttcccctg

SEQ ID NO: 137447 - RNA, 22 nt, synthetic construct
  source 1..22: mol_type = other RNA
gatgggcattccagagggtaac

SEQ ID NO: 137448 - RNA, 22 nt, synthetic construct
  source 1..22: mol_type = other RNA
gatggggacttgctctcttgcc

SEQ ID NO: 137449 - RNA, 22 nt, synthetic construct
  source 1..22: mol_type = other RNA
gatggggattgagggttagatt

SEQ ID NO: 137450 - RNA, 22 nt, synthetic construct
  source 1..22: mol_type = other RNA
gatgggggacgacgtatgcaac

SEQ ID NO: 137451 - RNA, 22 nt, synthetic construct
  source 1..22: mol_type = other RNA
gatgggggtaagattgtggtcc

SEQ ID NO: 137452 - RNA, 22 nt, synthetic construct
  source 1..22: mol_type = other RNA
gatggggtctcattgtgttgcc

SEQ ID NO: 137453 - RNA, 22 nt, synthetic construct
  source 1..22: mol_type = other RNA
gatggggtttgtccatgttggt

SEQ ID NO: 137454 - RNA, 22 nt, synthetic construct
  source 1..22: mol_type = other RNA
gatgggtgtagggtttggcagt

SEQ ID NO: 137455 - RNA, 22 nt, synthetic construct
  source 1..22: mol_type = other RNA
gatggtaaaacaaattccctct

SEQ ID NO: 137456 - RNA, 22 nt, synthetic construct
  source 1..22: mol_type = other RNA
gatggtaaattggtcctggaaa

SEQ ID NO: 137457 - RNA, 22 nt, synthetic construct
  source 1..22: mol_type = other RNA
gatggtagtcaacacttttcca

SEQ ID NO: 137458 - RNA, 22 nt, synthetic construct
  source 1..22: mol_type = other RNA
gatggtcagtactatcttccct

SEQ ID NO: 137459 - RNA, 22 nt, synthetic construct
  source 1..22: mol_type = other RNA
gatggtccttttttactgactt

SEQ ID NO: 137460 - RNA, 22 nt, synthetic construct
  source 1..22: mol_type = other RNA
gatggtctcaatctcctgatcc

SEQ ID NO: 137461 - RNA, 22 nt, synthetic construct
  source 1..22: mol_type = other RNA
gatggtgatacctcttactaaa

SEQ ID NO: 137462 - RNA, 22 nt, synthetic construct
  source 1..22: mol_type = other RNA
gatggtgatgctaacgtgcttg

SEQ ID NO: 137463 - RNA, 22 nt, synthetic construct
  source 1..22: mol_type = other RNA
gatggtgctgatttaaaatttt

SEQ ID NO: 137464 - RNA, 22 nt, synthetic construct
  source 1..22: mol_type = other RNA
gatggtgggagaggcatgccgg

SEQ ID NO: 137465 - RNA, 22 nt, synthetic construct
  source 1..22: mol_type = other RNA
gatggttgcacaatgttgtgga

SEQ ID NO: 137466 - RNA, 22 nt, synthetic construct
  source 1..22: mol_type = other RNA
gatggttggaagtttctggaag

SEQ ID NO: 137467 - RNA, 22 nt, synthetic construct
  source 1..22: mol_type = other RNA
gatggtttctgacacccgaccc

SEQ ID NO: 137468 - RNA, 22 nt, synthetic construct
  source 1..22: mol_type = other RNA
gatggtttgattgttccagggg

SEQ ID NO: 137469 - RNA, 22 nt, synthetic construct
  source 1..22: mol_type = other RNA
gatggtttggggcttttgaaca

SEQ ID NO: 137470 - RNA, 22 nt, synthetic construct
  source 1..22: mol_type = other RNA
gatgtaagtgggaggaggtcat

SEQ ID NO: 137471 - RNA, 22 nt, synthetic construct
  source 1..22: mol_type = other RNA
gatgtaatggatcaaggcacag

SEQ ID NO: 137472 - RNA, 22 nt, synthetic construct
  source 1..22: mol_type = other RNA
gatgtactggaagtgtaacata

SEQ ID NO: 137473 - RNA, 22 nt, synthetic construct
  source 1..22: mol_type = other RNA
gatgtagaaggatatgttttct

SEQ ID NO: 137474 - RNA, 22 nt, synthetic construct
  source 1..22: mol_type = other RNA
gatgtagagaaacaggattaca

SEQ ID NO: 137475 - RNA, 22 nt, synthetic construct
  source 1..22: mol_type = other RNA
gatgtagaggcagttgagtttt

SEQ ID NO: 137476 - RNA, 22 nt, synthetic construct
  source 1..22: mol_type = other RNA
gatgtcaacaaaatactagcaa

SEQ ID NO: 137477 - RNA, 22 nt, synthetic construct
  source 1..22: mol_type = other RNA
gatgtcaacattaagggaaaca

SEQ ID NO: 137478 - RNA, 22 nt, synthetic construct
  source 1..22: mol_type = other RNA
gatgtcaactgaggcagagtag

SEQ ID NO: 137479 - RNA, 22 nt, synthetic construct
  source 1..22: mol_type = other RNA
gatgtcacaagccagggtctgt

SEQ ID NO: 137480 - RNA, 22 nt, synthetic construct
  source 1..22: mol_type = other RNA
gatgtccttaatgccaccgaat

SEQ ID NO: 137481 - RNA, 22 nt, synthetic construct
  source 1..22: mol_type = other RNA
gatgtctcagatgtctccattt

SEQ ID NO: 137482 - RNA, 22 nt, synthetic construct
  source 1..22: mol_type = other RNA
gatgtctccattttgccagcta

SEQ ID NO: 137483 - RNA, 22 nt, synthetic construct
  source 1..22: mol_type = other RNA
gatgtctttgggaaggccctga

SEQ ID NO: 137484 - RNA, 22 nt, synthetic construct
  source 1..22: mol_type = other RNA
gatgtcttttaacttgctttga

SEQ ID NO: 137485 - RNA, 22 nt, synthetic construct
  source 1..22: mol_type = other RNA
gatgtcttttgaagaagttctt

SEQ ID NO: 137486 - RNA, 22 nt, synthetic construct
  source 1..22: mol_type = other RNA
gatgtgagcccccacgcccggc

SEQ ID NO: 137487 - RNA, 22 nt, synthetic construct
  source 1..22: mol_type = other RNA
gatgtgaggatctgttggtgct

SEQ ID NO: 137488 - RNA, 22 nt, synthetic construct
  source 1..22: mol_type = other RNA
gatgtgcttaatcttcacactt

SEQ ID NO: 137489 - RNA, 22 nt, synthetic construct
  source 1..22: mol_type = other RNA
gatgtggtgtggcatgtctgta

SEQ ID NO: 137490 - RNA, 22 nt, synthetic construct
  source 1..22: mol_type = other RNA
gatgtgtaattgtaccttggag

SEQ ID NO: 137491 - RNA, 22 nt, synthetic construct
  source 1..22: mol_type = other RNA
gatgtgtaccaaaagtcctgtt

SEQ ID NO: 137492 - RNA, 22 nt, synthetic construct
  source 1..22: mol_type = other RNA
gatgtgtacccgtgtgttttgt

SEQ ID NO: 137493 - RNA, 22 nt, synthetic construct
  source 1..22: mol_type = other RNA
gatgtgtagttattattgtcat

SEQ ID NO: 137494 - RNA, 22 nt, synthetic construct
  source 1..22: mol_type = other RNA
gatgtgtatgatcaaagtgaaa

SEQ ID NO: 137495 - RNA, 22 nt, synthetic construct
  source 1..22: mol_type = other RNA
gatgtgtatgttacacttccag

SEQ ID NO: 137496 - RNA, 22 nt, synthetic construct
  source 1..22: mol_type = other RNA
gatgtgtgcacaacacatgcac

SEQ ID NO: 137497 - RNA, 22 nt, synthetic construct
  source 1..22: mol_type = other RNA
gatgtgtgtctctgctctcaag

SEQ ID NO: 137498 - RNA, 22 nt, synthetic construct
  source 1..22: mol_type = other RNA
gatgtgttgaccttagtggttg

SEQ ID NO: 137499 - RNA, 22 nt, synthetic construct
  source 1..22: mol_type = other RNA
gatgttatgccccctcttctct

SEQ ID NO: 137500 - RNA, 22 nt, synthetic construct
  source 1..22: mol_type = other RNA
gatgttcaaccctcggcctcta

SEQ ID NO: 137501 - RNA, 22 nt, synthetic construct
  source 1..22: mol_type = other RNA
gatgttgagtatcttttcatgt

SEQ ID NO: 137502 - RNA, 22 nt, synthetic construct
  source 1..22: mol_type = other RNA
gatgttgcctactagccagtga

SEQ ID NO: 137503 - RNA, 22 nt, synthetic construct
  source 1..22: mol_type = other RNA
gatgttgcggtgagcagagatc

SEQ ID NO: 137504 - RNA, 22 nt, synthetic construct
  source 1..22: mol_type = other RNA
gatgttggccaggctggtcttg

SEQ ID NO: 137505 - RNA, 22 nt, synthetic construct
  source 1..22: mol_type = other RNA
gatgttggtgagaacccagtgt

SEQ ID NO: 137506 - RNA, 22 nt, synthetic construct
  source 1..22: mol_type = other RNA
gatgtttctacctttggctact

SEQ ID NO: 137507 - RNA, 22 nt, synthetic construct
  source 1..22: mol_type = other RNA
gatgtttggctccttaccacta

SEQ ID NO: 137508 - RNA, 22 nt, synthetic construct
  source 1..22: mol_type = other RNA
gatgttttacacatgtcagcca

SEQ ID NO: 137509 - RNA, 22 nt, synthetic construct
  source 1..22: mol_type = other RNA
gatgttttacattttccattga

SEQ ID NO: 137510 - RNA, 22 nt, synthetic construct
  source 1..22: mol_type = other RNA
gatgttttcagttgcatgaatt

SEQ ID NO: 137511 - RNA, 22 nt, synthetic construct
  source 1..22: mol_type = other RNA
gatgttttgaacgaatgaaaac

SEQ ID NO: 137512 - RNA, 22 nt, synthetic construct
  source 1..22: mol_type = other RNA
gatgtttttagagagatgcctg

SEQ ID NO: 137513 - RNA, 22 nt, synthetic construct
  source 1..22: mol_type = other RNA
gattaaaataacacgcagaacc

SEQ ID NO: 137514 - RNA, 22 nt, synthetic construct
  source 1..22: mol_type = other RNA
gattaaaggccctgatttaaag

SEQ ID NO: 137515 - RNA, 22 nt, synthetic construct
  source 1..22: mol_type = other RNA
gattaaataacttccatgagat

SEQ ID NO: 137516 - RNA, 22 nt, synthetic construct
  source 1..22: mol_type = other RNA
gattaaatacagagcacagact

SEQ ID NO: 137517 - RNA, 22 nt, synthetic construct
  source 1..22: mol_type = other RNA
gattaaataccacctgaaatct

SEQ ID NO: 137518 - RNA, 22 nt, synthetic construct
  source 1..22: mol_type = other RNA
gattaagcacatctgtcttgtg

SEQ ID NO: 137519 - RNA, 22 nt, synthetic construct
  source 1..22: mol_type = other RNA
gattaagcatagtttgagtatt

SEQ ID NO: 137520 - RNA, 22 nt, synthetic construct
  source 1..22: mol_type = other RNA
gattaaggagatggcacatacc

SEQ ID NO: 137521 - RNA, 22 nt, synthetic construct
  source 1..22: mol_type = other RNA
gattaaggctggaggatggctt

SEQ ID NO: 137522 - RNA, 22 nt, synthetic construct
  source 1..22: mol_type = other RNA
gattaatccttgtggtcttaag

SEQ ID NO: 137523 - RNA, 22 nt, synthetic construct
  source 1..22: mol_type = other RNA
gattaatcttgcaaaacaatag

SEQ ID NO: 137524 - RNA, 22 nt, synthetic construct
  source 1..22: mol_type = other RNA
gattaatctttctgaactcaaa

SEQ ID NO: 137525 - RNA, 22 nt, synthetic construct
  source 1..22: mol_type = other RNA
gattaatgtaggtgtctgatgt

SEQ ID NO: 137526 - RNA, 22 nt, synthetic construct
  source 1..22: mol_type = other RNA
gattaattcagtcaacaccaag

SEQ ID NO: 137527 - RNA, 22 nt, synthetic construct
  source 1..22: mol_type = other RNA
gattaatttgaggtctaggcta

SEQ ID NO: 137528 - RNA, 22 nt, synthetic construct
  source 1..22: mol_type = other RNA
gattacaaaagaacaggacttt

SEQ ID NO: 137529 - RNA, 22 nt, synthetic construct
  source 1..22: mol_type = other RNA
gattacaagggtgacagagccg

SEQ ID NO: 137530 - RNA, 22 nt, synthetic construct
  source 1..22: mol_type = other RNA
gattacaatgtaaggtgcacgc

SEQ ID NO: 137531 - RNA, 22 nt, synthetic construct
  source 1..22: mol_type = other RNA
gattacaattcctttctaggca

SEQ ID NO: 137532 - RNA, 22 nt, synthetic construct
  source 1..22: mol_type = other RNA
gattacacacacctaccaccat

SEQ ID NO: 137533 - RNA, 22 nt, synthetic construct
  source 1..22: mol_type = other RNA
gattacaggcatgagccactgc

SEQ ID NO: 137534 - RNA, 22 nt, synthetic construct
  source 1..22: mol_type = other RNA
gattacaggcgcacgccatctc

SEQ ID NO: 137535 - RNA, 22 nt, synthetic construct
  source 1..22: mol_type = other RNA
gattacatagcaaggaagcaga

SEQ ID NO: 137536 - RNA, 22 nt, synthetic construct
  source 1..22: mol_type = other RNA
gattaccggcatccgccaccac

SEQ ID NO: 137537 - RNA, 22 nt, synthetic construct
  source 1..22: mol_type = other RNA
gattactgactcaatcttctta

SEQ ID NO: 137538 - RNA, 22 nt, synthetic construct
  source 1..22: mol_type = other RNA
gattactggatacaaggtcaat

SEQ ID NO: 137539 - RNA, 22 nt, synthetic construct
  source 1..22: mol_type = other RNA
gattactttacagttatgtcag

SEQ ID NO: 137540 - RNA, 22 nt, synthetic construct
  source 1..22: mol_type = other RNA
gattagaaaattagctgacttt

SEQ ID NO: 137541 - RNA, 22 nt, synthetic construct
  source 1..22: mol_type = other RNA
gattagaaagtagattagcttt

SEQ ID NO: 137542 - RNA, 22 nt, synthetic construct
  source 1..22: mol_type = other RNA
gattagaaggattgttcatgtc

SEQ ID NO: 137543 - RNA, 22 nt, synthetic construct
  source 1..22: mol_type = other RNA
gattagaggctgcaccctcctc

SEQ ID NO: 137544 - RNA, 22 nt, synthetic construct
  source 1..22: mol_type = other RNA
gattagcgaaagggattctggc

SEQ ID NO: 137545 - RNA, 22 nt, synthetic construct
  source 1..22: mol_type = other RNA
gattagcttattctttttctag

SEQ ID NO: 137546 - RNA, 22 nt, synthetic construct
  source 1..22: mol_type = other RNA
gattagcttcctcaggatctac

SEQ ID NO: 137547 - RNA, 22 nt, synthetic construct
  source 1..22: mol_type = other RNA
gattagcttttacgaggacaga

SEQ ID NO: 137548 - RNA, 22 nt, synthetic construct
  source 1..22: mol_type = other RNA
gattaggaaacagattgattta

SEQ ID NO: 137549 - RNA, 22 nt, synthetic construct
  source 1..22: mol_type = other RNA
gattaggcagaaccacctgggg

SEQ ID NO: 137550 - RNA, 22 nt, synthetic construct
  source 1..22: mol_type = other RNA
gattagtgttaattcttcctta

SEQ ID NO: 137551 - RNA, 22 nt, synthetic construct
  source 1..22: mol_type = other RNA
gattagttgactcctaaaacat

SEQ ID NO: 137552 - RNA, 22 nt, synthetic construct
  source 1..22: mol_type = other RNA
gattataaccttgaacttccag

SEQ ID NO: 137553 - RNA, 22 nt, synthetic construct
  source 1..22: mol_type = other RNA
gattatagtggtaaggagccaa

SEQ ID NO: 137554 - RNA, 22 nt, synthetic construct
  source 1..22: mol_type = other RNA
gattatatggtctaccatgttg

SEQ ID NO: 137555 - RNA, 22 nt, synthetic construct
  source 1..22: mol_type = other RNA
gattatcagggatattggctta

SEQ ID NO: 137556 - RNA, 22 nt, synthetic construct
  source 1..22: mol_type = other RNA
gattatggctagaaacttggat

SEQ ID NO: 137557 - RNA, 22 nt, synthetic construct
  source 1..22: mol_type = other RNA
gattatgttagatatcccatat

SEQ ID NO: 137558 - RNA, 22 nt, synthetic construct
  source 1..22: mol_type = other RNA
gattatgttccacatgttactc

SEQ ID NO: 137559 - RNA, 22 nt, synthetic construct
  source 1..22: mol_type = other RNA
gattatttcgaattatgctaac

SEQ ID NO: 137560 - RNA, 22 nt, synthetic construct
  source 1..22: mol_type = other RNA
gattatttgcggcttgattagc

SEQ ID NO: 137561 - RNA, 22 nt, synthetic construct
  source 1..22: mol_type = other RNA
gattatttggaagagagaaggc

SEQ ID NO: 137562 - RNA, 22 nt, synthetic construct
  source 1..22: mol_type = other RNA
gattatttttacccaacatgag

SEQ ID NO: 137563 - RNA, 22 nt, synthetic construct
  source 1..22: mol_type = other RNA
gattcaaaatgtgatggcatca

SEQ ID NO: 137564 - RNA, 22 nt, synthetic construct
  source 1..22: mol_type = other RNA
gattcaacaaaactgggggctg

SEQ ID NO: 137565 - RNA, 22 nt, synthetic construct
  source 1..22: mol_type = other RNA
gattcaagaaaccacagagcct

SEQ ID NO: 137566 - RNA, 22 nt, synthetic construct
  source 1..22: mol_type = other RNA
gattcaatgcaatacttaatag

SEQ ID NO: 137567 - RNA, 22 nt, synthetic construct
  source 1..22: mol_type = other RNA
gattcaccaattgttaacattt

SEQ ID NO: 137568 - RNA, 22 nt, synthetic construct
  source 1..22: mol_type = other RNA
gattcacgcacagggagatact

SEQ ID NO: 137569 - RNA, 22 nt, synthetic construct
  source 1..22: mol_type = other RNA
gattcacttttgagttcagaaa

SEQ ID NO: 137570 - RNA, 22 nt, synthetic construct
  source 1..22: mol_type = other RNA
gattcagagtgctgggtagaga

SEQ ID NO: 137571 - RNA, 22 nt, synthetic construct
  source 1..22: mol_type = other RNA
gattcagatgacagaaataata

SEQ ID NO: 137572 - RNA, 22 nt, synthetic construct
  source 1..22: mol_type = other RNA
gattcagtcttggtagtttgca

SEQ ID NO: 137573 - RNA, 22 nt, synthetic construct
  source 1..22: mol_type = other RNA
gattcagtggttggaaaacttt

SEQ ID NO: 137574 - RNA, 22 nt, synthetic construct
  source 1..22: mol_type = other RNA
gattcatatgctttgagctaca

SEQ ID NO: 137575 - RNA, 22 nt, synthetic construct
  source 1..22: mol_type = other RNA
gattcatcttgacttcacttcc

SEQ ID NO: 137576 - RNA, 22 nt, synthetic construct
  source 1..22: mol_type = other RNA
gattccacttatatgaagctaa

SEQ ID NO: 137577 - RNA, 22 nt, synthetic construct
  source 1..22: mol_type = other RNA
gattccaggtttacaggatatc

SEQ ID NO: 137578 - RNA, 22 nt, synthetic construct
  source 1..22: mol_type = other RNA
gattccagtttctctgcttttt

SEQ ID NO: 137579 - RNA, 22 nt, synthetic construct
  source 1..22: mol_type = other RNA
gattcccaggtattttgttctc

SEQ ID NO: 137580 - RNA, 22 nt, synthetic construct
  source 1..22: mol_type = other RNA
gattcccccttatgtgtgtata

SEQ ID NO: 137581 - RNA, 22 nt, synthetic construct
  source 1..22: mol_type = other RNA
gattccccttatatgggatatc

SEQ ID NO: 137582 - RNA, 22 nt, synthetic construct
  source 1..22: mol_type = other RNA
gattccctctggccttctatat

SEQ ID NO: 137583 - RNA, 22 nt, synthetic construct
  source 1..22: mol_type = other RNA
gattccgtctcaaaaaattata

SEQ ID NO: 137584 - RNA, 22 nt, synthetic construct
  source 1..22: mol_type = other RNA
gattcctccctggagaggcaaa

SEQ ID NO: 137585 - RNA, 22 nt, synthetic construct
  source 1..22: mol_type = other RNA
gattcctttcaaagagacctga

SEQ ID NO: 137586 - RNA, 22 nt, synthetic construct
  source 1..22: mol_type = other RNA
gattccttttttatgtgctttc

SEQ ID NO: 137587 - RNA, 22 nt, synthetic construct
  source 1..22: mol_type = other RNA
gattcgattaaaataacacgca

SEQ ID NO: 137588 - RNA, 22 nt, synthetic construct
  source 1..22: mol_type = other RNA
gattcgcattgctaattcattg

SEQ ID NO: 137589 - RNA, 22 nt, synthetic construct
  source 1..22: mol_type = other RNA
gattcgggggagagcactggtt

SEQ ID NO: 137590 - RNA, 22 nt, synthetic construct
  source 1..22: mol_type = other RNA
gattctaatgtgcaaggagaga

SEQ ID NO: 137591 - RNA, 22 nt, synthetic construct
  source 1..22: mol_type = other RNA
gattctctgtctctgttgccca

SEQ ID NO: 137592 - RNA, 22 nt, synthetic construct
  source 1..22: mol_type = other RNA
gattctctttagggaagatagt

SEQ ID NO: 137593 - RNA, 22 nt, synthetic construct
  source 1..22: mol_type = other RNA
gattctgacccagagcctaatg

SEQ ID NO: 137594 - RNA, 22 nt, synthetic construct
  source 1..22: mol_type = other RNA
gattctgctactagcaagctaa

SEQ ID NO: 137595 - RNA, 22 nt, synthetic construct
  source 1..22: mol_type = other RNA
gattctggccaaatccctgatc

SEQ ID NO: 137596 - RNA, 22 nt, synthetic construct
  source 1..22: mol_type = other RNA
gattctgtctctacaaaaaagt

SEQ ID NO: 137597 - RNA, 22 nt, synthetic construct
  source 1..22: mol_type = other RNA
gattcttccactagtgggatca

SEQ ID NO: 137598 - RNA, 22 nt, synthetic construct
  source 1..22: mol_type = other RNA
gattcttgtcatgaatgaatgt

SEQ ID NO: 137599 - RNA, 22 nt, synthetic construct
  source 1..22: mol_type = other RNA
gattcttgttaagcattttccg

SEQ ID NO: 137600 - RNA, 22 nt, synthetic construct
  source 1..22: mol_type = other RNA
gattcttttataactgaacatg

SEQ ID NO: 137601 - RNA, 22 nt, synthetic construct
  source 1..22: mol_type = other RNA
gattgaaaatggtttaggctgt

SEQ ID NO: 137602 - RNA, 22 nt, synthetic construct
  source 1..22: mol_type = other RNA
gattgaaatctaggcatataat

SEQ ID NO: 137603 - RNA, 22 nt, synthetic construct
  source 1..22: mol_type = other RNA
gattgaatggaaagaaatagaa

SEQ ID NO: 137604 - RNA, 22 nt, synthetic construct
  source 1..22: mol_type = other RNA
gattgaccttctacttatcttt

SEQ ID NO: 137605 - RNA, 22 nt, synthetic construct
  source 1..22: mol_type = other RNA
gattgaccttgtatccagtaat

SEQ ID NO: 137606 - RNA, 22 nt, synthetic construct
  source 1..22: mol_type = other RNA
gattgagattagcgaaagggat

SEQ ID NO: 137607 - RNA, 22 nt, synthetic construct
  source 1..22: mol_type = other RNA
gattgaggacttcatgtacaat

SEQ ID NO: 137608 - RNA, 22 nt, synthetic construct
  source 1..22: mol_type = other RNA
gattgagggttagatttttcct

SEQ ID NO: 137609 - RNA, 22 nt, synthetic construct
  source 1..22: mol_type = other RNA
gattgagtatctggtgctggca

SEQ ID NO: 137610 - RNA, 22 nt, synthetic construct
  source 1..22: mol_type = other RNA
gattgatatctgagtgttgtgt

SEQ ID NO: 137611 - RNA, 22 nt, synthetic construct
  source 1..22: mol_type = other RNA
gattgattccagtttctctgct

SEQ ID NO: 137612 - RNA, 22 nt, synthetic construct
  source 1..22: mol_type = other RNA
gattgcaggtgtgggccaccaa

SEQ ID NO: 137613 - RNA, 22 nt, synthetic construct
  source 1..22: mol_type = other RNA
gattgccagttttctggaaact

SEQ ID NO: 137614 - RNA, 22 nt, synthetic construct
  source 1..22: mol_type = other RNA
gattgcccattataaaatagga

SEQ ID NO: 137615 - RNA, 22 nt, synthetic construct
  source 1..22: mol_type = other RNA
gattgccccattgcactccacg

SEQ ID NO: 137616 - RNA, 22 nt, synthetic construct
  source 1..22: mol_type = other RNA
gattgcctaacaccagtaagat

SEQ ID NO: 137617 - RNA, 22 nt, synthetic construct
  source 1..22: mol_type = other RNA
gattgcgattgtttcagtgtgt

SEQ ID NO: 137618 - RNA, 22 nt, synthetic construct
  source 1..22: mol_type = other RNA
gattgctaaactgttccccaag

SEQ ID NO: 137619 - RNA, 22 nt, synthetic construct
  source 1..22: mol_type = other RNA
gattgctagtgtcctcaggctc

SEQ ID NO: 137620 - RNA, 22 nt, synthetic construct
  source 1..22: mol_type = other RNA
gattgcttgagagagataaaac

SEQ ID NO: 137621 - RNA, 22 nt, synthetic construct
  source 1..22: mol_type = other RNA
gattggaaaactaggtatttga

SEQ ID NO: 137622 - RNA, 22 nt, synthetic construct
  source 1..22: mol_type = other RNA
gattggaatgagtccagctttc

SEQ ID NO: 137623 - RNA, 22 nt, synthetic construct
  source 1..22: mol_type = other RNA
gattggagactgataaacttca

SEQ ID NO: 137624 - RNA, 22 nt, synthetic construct
  source 1..22: mol_type = other RNA
gattggatatttgcagtagtat

SEQ ID NO: 137625 - RNA, 22 nt, synthetic construct
  source 1..22: mol_type = other RNA
gattggcaaatctttagtgttg

SEQ ID NO: 137626 - RNA, 22 nt, synthetic construct
  source 1..22: mol_type = other RNA
gattggctttagatttatcaat

SEQ ID NO: 137627 - RNA, 22 nt, synthetic construct
  source 1..22: mol_type = other RNA
gattgggaaaatcttggaactt

SEQ ID NO: 137628 - RNA, 22 nt, synthetic construct
  source 1..22: mol_type = other RNA
gattgggaagattggctttaga

SEQ ID NO: 137629 - RNA, 22 nt, synthetic construct
  source 1..22: mol_type = other RNA
gattgggcattaattgagagct

SEQ ID NO: 137630 - RNA, 22 nt, synthetic construct
  source 1..22: mol_type = other RNA
gattgggcttttcatatacgta

SEQ ID NO: 137631 - RNA, 22 nt, synthetic construct
  source 1..22: mol_type = other RNA
gattgggtcaacaaactaacta

SEQ ID NO: 137632 - RNA, 22 nt, synthetic construct
  source 1..22: mol_type = other RNA
gattggttggactccaccctgc

SEQ ID NO: 137633 - RNA, 22 nt, synthetic construct
  source 1..22: mol_type = other RNA
gattgtcgttgagtacctctgg

SEQ ID NO: 137634 - RNA, 22 nt, synthetic construct
  source 1..22: mol_type = other RNA
gattgtgaaatatattatggtc

SEQ ID NO: 137635 - RNA, 22 nt, synthetic construct
  source 1..22: mol_type = other RNA
gattgtgccagtgaactccagt

SEQ ID NO: 137636 - RNA, 22 nt, synthetic construct
  source 1..22: mol_type = other RNA
gattgtgtgatttcatatgaat

SEQ ID NO: 137637 - RNA, 22 nt, synthetic construct
  source 1..22: mol_type = other RNA
gattgtgtgtcgagaaaaatgg

SEQ ID NO: 137638 - RNA, 22 nt, synthetic construct
  source 1..22: mol_type = other RNA
gattgttagccacagcgttgtt

SEQ ID NO: 137639 - RNA, 22 nt, synthetic construct
  source 1..22: mol_type = other RNA
gattgttcatgtctgtgtagtt

SEQ ID NO: 137640 - RNA, 22 nt, synthetic construct
  source 1..22: mol_type = other RNA
gattgttccaggggggaaaaaa

SEQ ID NO: 137641 - RNA, 22 nt, synthetic construct
  source 1..22: mol_type = other RNA
gattgttgccatcattttatga

SEQ ID NO: 137642 - RNA, 22 nt, synthetic construct
  source 1..22: mol_type = other RNA
gattgtttaattctgtttaccc

SEQ ID NO: 137643 - RNA, 22 nt, synthetic construct
  source 1..22: mol_type = other RNA
gattgtttcagtgtgtccacac

SEQ ID NO: 137644 - RNA, 22 nt, synthetic construct
  source 1..22: mol_type = other RNA
gattgtttgaggctgggagtac

SEQ ID NO: 137645 - RNA, 22 nt, synthetic construct
  source 1..22: mol_type = other RNA
gattgttttaggtagtcttgtc

SEQ ID NO: 137646 - RNA, 22 nt, synthetic construct
  source 1..22: mol_type = other RNA
gattgttttgttgctattgttg

SEQ ID NO: 137647 - RNA, 22 nt, synthetic construct
  source 1..22: mol_type = other RNA
gatttaaagtaggttgagactt

SEQ ID NO: 137648 - RNA, 22 nt, synthetic construct
  source 1..22: mol_type = other RNA
gatttaagagaggaagtgaccc

SEQ ID NO: 137649 - RNA, 22 nt, synthetic construct
  source 1..22: mol_type = other RNA
gatttaatagaggtctgtcttt

SEQ ID NO: 137650 - RNA, 22 nt, synthetic construct
  source 1..22: mol_type = other RNA
gatttacccctactttttgtca

SEQ ID NO: 137651 - RNA, 22 nt, synthetic construct
  source 1..22: mol_type = other RNA
gatttactaaactgaacgaagt

SEQ ID NO: 137652 - RNA, 22 nt, synthetic construct
  source 1..22: mol_type = other RNA
gatttagaaatacctgcaggtt

SEQ ID NO: 137653 - RNA, 22 nt, synthetic construct
  source 1..22: mol_type = other RNA
gatttaggccactctcatctaa

SEQ ID NO: 137654 - RNA, 22 nt, synthetic construct
  source 1..22: mol_type = other RNA
gatttataatccattgggtaca

SEQ ID NO: 137655 - RNA, 22 nt, synthetic construct
  source 1..22: mol_type = other RNA
gatttatagtgtttccttccag

SEQ ID NO: 137656 - RNA, 22 nt, synthetic construct
  source 1..22: mol_type = other RNA
gatttatatgttgatgtaatgg

SEQ ID NO: 137657 - RNA, 22 nt, synthetic construct
  source 1..22: mol_type = other RNA
gatttatcaatagcagtgctga

SEQ ID NO: 137658 - RNA, 22 nt, synthetic construct
  source 1..22: mol_type = other RNA
gatttatggcctaagatggaaa

SEQ ID NO: 137659 - RNA, 22 nt, synthetic construct
  source 1..22: mol_type = other RNA
gatttatttctgggctctctat

SEQ ID NO: 137660 - RNA, 22 nt, synthetic construct
  source 1..22: mol_type = other RNA
gatttatttttacccgtggaaa

SEQ ID NO: 137661 - RNA, 22 nt, synthetic construct
  source 1..22: mol_type = other RNA
gatttcaaagttaatagcctcc

SEQ ID NO: 137662 - RNA, 22 nt, synthetic construct
  source 1..22: mol_type = other RNA
gatttcaagtaacactcagaag

SEQ ID NO: 137663 - RNA, 22 nt, synthetic construct
  source 1..22: mol_type = other RNA
gatttcaatctggaatgcatcg

SEQ ID NO: 137664 - RNA, 22 nt, synthetic construct
  source 1..22: mol_type = other RNA
gatttcacttacttgagcccca

SEQ ID NO: 137665 - RNA, 22 nt, synthetic construct
  source 1..22: mol_type = other RNA
gatttcaggtggtatttaatct

SEQ ID NO: 137666 - RNA, 22 nt, synthetic construct
  source 1..22: mol_type = other RNA
gatttcagttaacttattggaa

SEQ ID NO: 137667 - RNA, 22 nt, synthetic construct
  source 1..22: mol_type = other RNA
gatttcataggcatctctccct

SEQ ID NO: 137668 - RNA, 22 nt, synthetic construct
  source 1..22: mol_type = other RNA
gatttcatgaacaattttctct

SEQ ID NO: 137669 - RNA, 22 nt, synthetic construct
  source 1..22: mol_type = other RNA
gatttccagtgtttggttttta

SEQ ID NO: 137670 - RNA, 22 nt, synthetic construct
  source 1..22: mol_type = other RNA
gatttccctgcatacactcatt

SEQ ID NO: 137671 - RNA, 22 nt, synthetic construct
  source 1..22: mol_type = other RNA
gatttctactggggtcttagtt

SEQ ID NO: 137672 - RNA, 22 nt, synthetic construct
  source 1..22: mol_type = other RNA
gatttctaggccctaaccccag

SEQ ID NO: 137673 - RNA, 22 nt, synthetic construct
  source 1..22: mol_type = other RNA
gatttctcggccgggcgcggtg

SEQ ID NO: 137674 - RNA, 22 nt, synthetic construct
  source 1..22: mol_type = other RNA
gatttctgcatagagatcttgt

SEQ ID NO: 137675 - RNA, 22 nt, synthetic construct
  source 1..22: mol_type = other RNA
gatttcttaaaaatgacaccaa

SEQ ID NO: 137676 - RNA, 22 nt, synthetic construct
  source 1..22: mol_type = other RNA
gatttcttctttggctcaatgg

SEQ ID NO: 137677 - RNA, 22 nt, synthetic construct
  source 1..22: mol_type = other RNA
gatttctttttactcatgtcta

SEQ ID NO: 137678 - RNA, 22 nt, synthetic construct
  source 1..22: mol_type = other RNA
gatttgaccatgggacaagtgg

SEQ ID NO: 137679 - RNA, 22 nt, synthetic construct
  source 1..22: mol_type = other RNA
gatttgagtaactaaactattg

SEQ ID NO: 137680 - RNA, 22 nt, synthetic construct
  source 1..22: mol_type = other RNA
gatttgagtcttgctctcttgc

SEQ ID NO: 137681 - RNA, 22 nt, synthetic construct
  source 1..22: mol_type = other RNA
gatttgatcctggaatagtagc

SEQ ID NO: 137682 - RNA, 22 nt, synthetic construct
  source 1..22: mol_type = other RNA
gatttgattgggcattaattga

SEQ ID NO: 137683 - RNA, 22 nt, synthetic construct
  source 1..22: mol_type = other RNA
gatttgcatttctctaatagct

SEQ ID NO: 137684 - RNA, 22 nt, synthetic construct
  source 1..22: mol_type = other RNA
gatttgccaatcaataattctg

SEQ ID NO: 137685 - RNA, 22 nt, synthetic construct
  source 1..22: mol_type = other RNA
gatttgctggctcagtctgttt

SEQ ID NO: 137686 - RNA, 22 nt, synthetic construct
  source 1..22: mol_type = other RNA
gatttgctgtataacattttct

SEQ ID NO: 137687 - RNA, 22 nt, synthetic construct
  source 1..22: mol_type = other RNA
gatttggccagaatccctttcg

SEQ ID NO: 137688 - RNA, 22 nt, synthetic construct
  source 1..22: mol_type = other RNA
gatttgggaaggatggccagtc

SEQ ID NO: 137689 - RNA, 22 nt, synthetic construct
  source 1..22: mol_type = other RNA
gatttggtgtgtgcaaaggatt

SEQ ID NO: 137690 - RNA, 22 nt, synthetic construct
  source 1..22: mol_type = other RNA
gatttgtagatattttctgtca

SEQ ID NO: 137691 - RNA, 22 nt, synthetic construct
  source 1..22: mol_type = other RNA
gatttgttatatccagattgat

SEQ ID NO: 137692 - RNA, 22 nt, synthetic construct
  source 1..22: mol_type = other RNA
gatttgtttagtagctgtcttt

SEQ ID NO: 137693 - RNA, 22 nt, synthetic construct
  source 1..22: mol_type = other RNA
gatttgtttgaattaagcacca

SEQ ID NO: 137694 - RNA, 22 nt, synthetic construct
  source 1..22: mol_type = other RNA
gatttgtttgtgaagatacaaa

SEQ ID NO: 137695 - RNA, 22 nt, synthetic construct
  source 1..22: mol_type = other RNA
gattttaatctgtcctgaatac

SEQ ID NO: 137696 - RNA, 22 nt, synthetic construct
  source 1..22: mol_type = other RNA
gattttaccaaggctaagttga

SEQ ID NO: 137697 - RNA, 22 nt, synthetic construct
  source 1..22: mol_type = other RNA
gattttacttactagttgtgct

SEQ ID NO: 137698 - RNA, 22 nt, synthetic construct
  source 1..22: mol_type = other RNA
gattttagaaggtaagaatgtc

SEQ ID NO: 137699 - RNA, 22 nt, synthetic construct
  source 1..22: mol_type = other RNA
gattttaggtcatttttcactt

SEQ ID NO: 137700 - RNA, 22 nt, synthetic construct
  source 1..22: mol_type = other RNA
gattttcacagggcagggagag

SEQ ID NO: 137701 - RNA, 22 nt, synthetic construct
  source 1..22: mol_type = other RNA
gattttcccaaagatagactct

SEQ ID NO: 137702 - RNA, 22 nt, synthetic construct
  source 1..22: mol_type = other RNA
gattttcccaatctctggtatt

SEQ ID NO: 137703 - RNA, 22 nt, synthetic construct
  source 1..22: mol_type = other RNA
gattttcgtatcttttaacaga

SEQ ID NO: 137704 - RNA, 22 nt, synthetic construct
  source 1..22: mol_type = other RNA
gattttctattcattaccaggc

SEQ ID NO: 137705 - RNA, 22 nt, synthetic construct
  source 1..22: mol_type = other RNA
gattttctgcttctcaataagg

SEQ ID NO: 137706 - RNA, 22 nt, synthetic construct
  source 1..22: mol_type = other RNA
gattttcttgttataagcaaag

SEQ ID NO: 137707 - RNA, 22 nt, synthetic construct
  source 1..22: mol_type = other RNA
gattttgaggcagagagatggt

SEQ ID NO: 137708 - RNA, 22 nt, synthetic construct
  source 1..22: mol_type = other RNA
gattttgctgccaagtcagcac

SEQ ID NO: 137709 - RNA, 22 nt, synthetic construct
  source 1..22: mol_type = other RNA
gattttggattgcgattgtttc

SEQ ID NO: 137710 - RNA, 22 nt, synthetic construct
  source 1..22: mol_type = other RNA
gattttgtatcctgagacttag

SEQ ID NO: 137711 - RNA, 22 nt, synthetic construct
  source 1..22: mol_type = other RNA
gattttgtgtcttctgtttttc

SEQ ID NO: 137712 - RNA, 22 nt, synthetic construct
  source 1..22: mol_type = other RNA
gattttgtttatttgctgtcag

SEQ ID NO: 137713 - RNA, 22 nt, synthetic construct
  source 1..22: mol_type = other RNA
gatttttaaaaactttttgggc

SEQ ID NO: 137714 - RNA, 22 nt, synthetic construct
  source 1..22: mol_type = other RNA
gatttttagtgactggcttaat

SEQ ID NO: 137715 - RNA, 22 nt, synthetic construct
  source 1..22: mol_type = other RNA
gatttttatcaaaatcaaggtg

SEQ ID NO: 137716 - RNA, 22 nt, synthetic construct
  source 1..22: mol_type = other RNA
gatttttccaacagtttacacg

SEQ ID NO: 137717 - RNA, 22 nt, synthetic construct
  source 1..22: mol_type = other RNA
gatttttcctttgcctaagtct

SEQ ID NO: 137718 - RNA, 22 nt, synthetic construct
  source 1..22: mol_type = other RNA
gatttttctgtttctgtgaaaa

SEQ ID NO: 137719 - RNA, 22 nt, synthetic construct
  source 1..22: mol_type = other RNA
gatttttgccagtgttttaaag

SEQ ID NO: 137720 - RNA, 22 nt, synthetic construct
  source 1..22: mol_type = other RNA
gatttttgtgtagaggtgaagt

SEQ ID NO: 137721 - RNA, 22 nt, synthetic construct
  source 1..22: mol_type = other RNA
gattttttgttgttggtttgtg

SEQ ID NO: 137722 - RNA, 22 nt, synthetic construct
  source 1..22: mol_type = other RNA
gcaaaaaagtcatgacctgctt

SEQ ID NO: 137723 - RNA, 22 nt, synthetic construct
  source 1..22: mol_type = other RNA
gcaaaaaatgcagtagtaaagc

SEQ ID NO: 137724 - RNA, 22 nt, synthetic construct
  source 1..22: mol_type = other RNA
gcaaaaacagtttccctctgag

SEQ ID NO: 137725 - RNA, 22 nt, synthetic construct
  source 1..22: mol_type = other RNA
gcaaaaatacagctccaaagaa

SEQ ID NO: 137726 - RNA, 22 nt, synthetic construct
  source 1..22: mol_type = other RNA
gcaaaaatactacaagagttcc

SEQ ID NO: 137727 - RNA, 22 nt, synthetic construct
  source 1..22: mol_type = other RNA
gcaaaaattttgttcaggagtt

SEQ ID NO: 137728 - RNA, 22 nt, synthetic construct
  source 1..22: mol_type = other RNA
gcaaaacaatagcccagcagga

SEQ ID NO: 137729 - RNA, 22 nt, synthetic construct
  source 1..22: mol_type = other RNA
gcaaaacatatgtcagatggta

SEQ ID NO: 137730 - RNA, 22 nt, synthetic construct
  source 1..22: mol_type = other RNA
gcaaaacatttaaaaattagcc

SEQ ID NO: 137731 - RNA, 22 nt, synthetic construct
  source 1..22: mol_type = other RNA
gcaaaacggaaactttatacct

SEQ ID NO: 137732 - RNA, 22 nt, synthetic construct
  source 1..22: mol_type = other RNA
gcaaaactcctgaacaaaattt

SEQ ID NO: 137733 - RNA, 22 nt, synthetic construct
  source 1..22: mol_type = other RNA
gcaaaagatgatgaacaaaggc

SEQ ID NO: 137734 - RNA, 22 nt, synthetic construct
  source 1..22: mol_type = other RNA
gcaaaagcaaaattctaacaag

SEQ ID NO: 137735 - RNA, 22 nt, synthetic construct
  source 1..22: mol_type = other RNA
gcaaaagcaattattagttgta

SEQ ID NO: 137736 - RNA, 22 nt, synthetic construct
  source 1..22: mol_type = other RNA
gcaaaagcaccactgagaggga

SEQ ID NO: 137737 - RNA, 22 nt, synthetic construct
  source 1..22: mol_type = other RNA
gcaaaatggaagtgctgggcta

SEQ ID NO: 137738 - RNA, 22 nt, synthetic construct
  source 1..22: mol_type = other RNA
gcaaaatggagacatctgagac

SEQ ID NO: 137739 - RNA, 22 nt, synthetic construct
  source 1..22: mol_type = other RNA
gcaaaattctaacaagaagctg

SEQ ID NO: 137740 - RNA, 22 nt, synthetic construct
  source 1..22: mol_type = other RNA
gcaaaattgacaaacccttggc

SEQ ID NO: 137741 - RNA, 22 nt, synthetic construct
  source 1..22: mol_type = other RNA
gcaaaattttaaatcagcacca

SEQ ID NO: 137742 - RNA, 22 nt, synthetic construct
  source 1..22: mol_type = other RNA
gcaaacaaacacactgggtaaa

SEQ ID NO: 137743 - RNA, 22 nt, synthetic construct
  source 1..22: mol_type = other RNA
gcaaacagactgagccagcaaa

SEQ ID NO: 137744 - RNA, 22 nt, synthetic construct
  source 1..22: mol_type = other RNA
gcaaacagcgccacttaaaaaa

SEQ ID NO: 137745 - RNA, 22 nt, synthetic construct
  source 1..22: mol_type = other RNA
gcaaacatttatggaattgcca

SEQ ID NO: 137746 - RNA, 22 nt, synthetic construct
  source 1..22: mol_type = other RNA
gcaaaccaaatgcagaaaataa

SEQ ID NO: 137747 - RNA, 22 nt, synthetic construct
  source 1..22: mol_type = other RNA
gcaaaccacacagagaacagca

SEQ ID NO: 137748 - RNA, 22 nt, synthetic construct
  source 1..22: mol_type = other RNA
gcaaaccagacatttctcatac

SEQ ID NO: 137749 - RNA, 22 nt, synthetic construct
  source 1..22: mol_type = other RNA
gcaaacctcctggttttgatca

SEQ ID NO: 137750 - RNA, 22 nt, synthetic construct
  source 1..22: mol_type = other RNA
gcaaacgtgcacacccagttat

SEQ ID NO: 137751 - RNA, 22 nt, synthetic construct
  source 1..22: mol_type = other RNA
gcaaactaagtggtattctatc

SEQ ID NO: 137752 - RNA, 22 nt, synthetic construct
  source 1..22: mol_type = other RNA
gcaaactaccaagactgaatca

SEQ ID NO: 137753 - RNA, 22 nt, synthetic construct
  source 1..22: mol_type = other RNA
gcaaactactgatagcgaaagg

SEQ ID NO: 137754 - RNA, 22 nt, synthetic construct
  source 1..22: mol_type = other RNA
gcaaactcagatctgagagata

SEQ ID NO: 137755 - RNA, 22 nt, synthetic construct
  source 1..22: mol_type = other RNA
gcaaactctaaataataggttt

SEQ ID NO: 137756 - RNA, 22 nt, synthetic construct
  source 1..22: mol_type = other RNA
gcaaactgaatcagacaacaca

SEQ ID NO: 137757 - RNA, 22 nt, synthetic construct
  source 1..22: mol_type = other RNA
gcaaacttagaatataaactct

SEQ ID NO: 137758 - RNA, 22 nt, synthetic construct
  source 1..22: mol_type = other RNA
gcaaagaggcaaaactcctgaa

SEQ ID NO: 137759 - RNA, 22 nt, synthetic construct
  source 1..22: mol_type = other RNA
gcaaagatatgggttattcacc

SEQ ID NO: 137760 - RNA, 22 nt, synthetic construct
  source 1..22: mol_type = other RNA
gcaaagcaacatgctaagtgtt

SEQ ID NO: 137761 - RNA, 22 nt, synthetic construct
  source 1..22: mol_type = other RNA
gcaaagcaagaaaaagaaataa

SEQ ID NO: 137762 - RNA, 22 nt, synthetic construct
  source 1..22: mol_type = other RNA
gcaaaggaaaaatctaaccctc

SEQ ID NO: 137763 - RNA, 22 nt, synthetic construct
  source 1..22: mol_type = other RNA
gcaaaggatgtcaacaaaatac

SEQ ID NO: 137764 - RNA, 22 nt, synthetic construct
  source 1..22: mol_type = other RNA
gcaaaggattagaaagtagatt

SEQ ID NO: 137765 - RNA, 22 nt, synthetic construct
  source 1..22: mol_type = other RNA
gcaaaggattcgggggagagca

SEQ ID NO: 137766 - RNA, 22 nt, synthetic construct
  source 1..22: mol_type = other RNA
gcaaaggccgctcttgaccttg

SEQ ID NO: 137767 - RNA, 22 nt, synthetic construct
  source 1..22: mol_type = other RNA
gcaaaggttgagacaagaccac

SEQ ID NO: 137768 - RNA, 22 nt, synthetic construct
  source 1..22: mol_type = other RNA
gcaaagtaaaaagcactatcca

SEQ ID NO: 137769 - RNA, 22 nt, synthetic construct
  source 1..22: mol_type = other RNA
gcaaagtttcctacatactgca

SEQ ID NO: 137770 - RNA, 22 nt, synthetic construct
  source 1..22: mol_type = other RNA
gcaaatatccaatcactggcta

SEQ ID NO: 137771 - RNA, 22 nt, synthetic construct
  source 1..22: mol_type = other RNA
gcaaatcaaaacaataagacac

SEQ ID NO: 137772 - RNA, 22 nt, synthetic construct
  source 1..22: mol_type = other RNA
gcaaatcagaaaaggctgagac

SEQ ID NO: 137773 - RNA, 22 nt, synthetic construct
  source 1..22: mol_type = other RNA
gcaaatctctagaacttatgca

SEQ ID NO: 137774 - RNA, 22 nt, synthetic construct
  source 1..22: mol_type = other RNA
gcaaatctttagtgttgcttgg

SEQ ID NO: 137775 - RNA, 22 nt, synthetic construct
  source 1..22: mol_type = other RNA
gcaaatgaggttgcttttactt

SEQ ID NO: 137776 - RNA, 22 nt, synthetic construct
  source 1..22: mol_type = other RNA
gcaaatgtcatcttctctctct

SEQ ID NO: 137777 - RNA, 22 nt, synthetic construct
  source 1..22: mol_type = other RNA
gcaaatgtgactagaagaaatg

SEQ ID NO: 137778 - RNA, 22 nt, synthetic construct
  source 1..22: mol_type = other RNA
gcaaattattttcctccttctg

SEQ ID NO: 137779 - RNA, 22 nt, synthetic construct
  source 1..22: mol_type = other RNA
gcaaattcatagatcaccaggg

SEQ ID NO: 137780 - RNA, 22 nt, synthetic construct
  source 1..22: mol_type = other RNA
gcaaattgtcagattttcttgt

SEQ ID NO: 137781 - RNA, 22 nt, synthetic construct
  source 1..22: mol_type = other RNA
gcaacaaaacaatctaattcga

SEQ ID NO: 137782 - RNA, 22 nt, synthetic construct
  source 1..22: mol_type = other RNA
gcaacaaaggcgaagcccgccg

SEQ ID NO: 137783 - RNA, 22 nt, synthetic construct
  source 1..22: mol_type = other RNA
gcaacaaatgttgcagagactg

SEQ ID NO: 137784 - RNA, 22 nt, synthetic construct
  source 1..22: mol_type = other RNA
gcaacaatcaacaggtagctgc

SEQ ID NO: 137785 - RNA, 22 nt, synthetic construct
  source 1..22: mol_type = other RNA
gcaacaattcaacagctactat

SEQ ID NO: 137786 - RNA, 22 nt, synthetic construct
  source 1..22: mol_type = other RNA
gcaacaccagatactcatgctt

SEQ ID NO: 137787 - RNA, 22 nt, synthetic construct
  source 1..22: mol_type = other RNA
gcaacactaaagatttgccaat

SEQ ID NO: 137788 - RNA, 22 nt, synthetic construct
  source 1..22: mol_type = other RNA
gcaacagaaatttattgtttca

SEQ ID NO: 137789 - RNA, 22 nt, synthetic construct
  source 1..22: mol_type = other RNA
gcaacagaataaatgaaaacag

SEQ ID NO: 137790 - RNA, 22 nt, synthetic construct
  source 1..22: mol_type = other RNA
gcaacagagacagagaatctgt

SEQ ID NO: 137791 - RNA, 22 nt, synthetic construct
  source 1..22: mol_type = other RNA
gcaacagatctgagaagactaa

SEQ ID NO: 137792 - RNA, 22 nt, synthetic construct
  source 1..22: mol_type = other RNA
gcaacaggaagaggcagctaag

SEQ ID NO: 137793 - RNA, 22 nt, synthetic construct
  source 1..22: mol_type = other RNA
gcaacagtcattcaggtctatg

SEQ ID NO: 137794 - RNA, 22 nt, synthetic construct
  source 1..22: mol_type = other RNA
gcaacataaatagggtgctact

SEQ ID NO: 137795 - RNA, 22 nt, synthetic construct
  source 1..22: mol_type = other RNA
gcaacatccctatgcaataact

SEQ ID NO: 137796 - RNA, 22 nt, synthetic construct
  source 1..22: mol_type = other RNA
gcaacatctgcctcccgggtcc

SEQ ID NO: 137797 - RNA, 22 nt, synthetic construct
  source 1..22: mol_type = other RNA
gcaacatgctaagtgtttagga

SEQ ID NO: 137798 - RNA, 22 nt, synthetic construct
  source 1..22: mol_type = other RNA
gcaacatttgttgcatccccat

SEQ ID NO: 137799 - RNA, 22 nt, synthetic construct
  source 1..22: mol_type = other RNA
gcaaccatccccgctgtccatt

SEQ ID NO: 137800 - RNA, 22 nt, synthetic construct
  source 1..22: mol_type = other RNA
gcaacctcatttgcagagcaaa

SEQ ID NO: 137801 - RNA, 22 nt, synthetic construct
  source 1..22: mol_type = other RNA
gcaacctccgtttttcaggttc

SEQ ID NO: 137802 - RNA, 22 nt, synthetic construct
  source 1..22: mol_type = other RNA
gcaacctgctttcctcatgtcc

SEQ ID NO: 137803 - RNA, 22 nt, synthetic construct
  source 1..22: mol_type = other RNA
gcaaccttgggagaaaattttt

SEQ ID NO: 137804 - RNA, 22 nt, synthetic construct
  source 1..22: mol_type = other RNA
gcaaccttttaggtgccccact

SEQ ID NO: 137805 - RNA, 22 nt, synthetic construct
  source 1..22: mol_type = other RNA
gcaacggaaatgagtgagccac

SEQ ID NO: 137806 - RNA, 22 nt, synthetic construct
  source 1..22: mol_type = other RNA
gcaactactatttcgcaaagca

SEQ ID NO: 137807 - RNA, 22 nt, synthetic construct
  source 1..22: mol_type = other RNA
gcaactagagaaagcatcagag

SEQ ID NO: 137808 - RNA, 22 nt, synthetic construct
  source 1..22: mol_type = other RNA
gcaactatcaaaacacttctgt

SEQ ID NO: 137809 - RNA, 22 nt, synthetic construct
  source 1..22: mol_type = other RNA
gcaactcctgggctcatctaag

SEQ ID NO: 137810 - RNA, 22 nt, synthetic construct
  source 1..22: mol_type = other RNA
gcaactcttggccattttcttt

SEQ ID NO: 137811 - RNA, 22 nt, synthetic construct
  source 1..22: mol_type = other RNA
gcaactgagaagagctgtaaca

SEQ ID NO: 137812 - RNA, 22 nt, synthetic construct
  source 1..22: mol_type = other RNA
gcaactgcatcttcttttactt

SEQ ID NO: 137813 - RNA, 22 nt, synthetic construct
  source 1..22: mol_type = other RNA
gcaactgttttttcctcccttc

SEQ ID NO: 137814 - RNA, 22 nt, synthetic construct
  source 1..22: mol_type = other RNA
gcaacttactctcaaataattt

SEQ ID NO: 137815 - RNA, 22 nt, synthetic construct
  source 1..22: mol_type = other RNA
gcaacttgaaggcaatgtaggg

SEQ ID NO: 137816 - RNA, 22 nt, synthetic construct
  source 1..22: mol_type = other RNA
gcaacttgatcagggatttggc

SEQ ID NO: 137817 - RNA, 22 nt, synthetic construct
  source 1..22: mol_type = other RNA
gcaacttgcagaagagtgaagc

SEQ ID NO: 137818 - RNA, 22 nt, synthetic construct
  source 1..22: mol_type = other RNA
gcaagaatggtttaacacatac

SEQ ID NO: 137819 - RNA, 22 nt, synthetic construct
  source 1..22: mol_type = other RNA
gcaagaccctgtctctaaaaaa

SEQ ID NO: 137820 - RNA, 22 nt, synthetic construct
  source 1..22: mol_type = other RNA
gcaagactcaaatctcaaaaaa

SEQ ID NO: 137821 - RNA, 22 nt, synthetic construct
  source 1..22: mol_type = other RNA
gcaagactttatgtggaaaaat

SEQ ID NO: 137822 - RNA, 22 nt, synthetic construct
  source 1..22: mol_type = other RNA
gcaagagagcaagactcaaatc

SEQ ID NO: 137823 - RNA, 22 nt, synthetic construct
  source 1..22: mol_type = other RNA
gcaagagagcaagtccccatct

SEQ ID NO: 137824 - RNA, 22 nt, synthetic construct
  source 1..22: mol_type = other RNA
gcaagagttaaaactcacaaaa

SEQ ID NO: 137825 - RNA, 22 nt, synthetic construct
  source 1..22: mol_type = other RNA
gcaagagttccaactgtataaa

SEQ ID NO: 137826 - RNA, 22 nt, synthetic construct
  source 1..22: mol_type = other RNA
gcaagatgcataagttctagag

SEQ ID NO: 137827 - RNA, 22 nt, synthetic construct
  source 1..22: mol_type = other RNA
gcaagatggcaagtttccattc

SEQ ID NO: 137828 - RNA, 22 nt, synthetic construct
  source 1..22: mol_type = other RNA
gcaagatgtcaacattaaggga

SEQ ID NO: 137829 - RNA, 22 nt, synthetic construct
  source 1..22: mol_type = other RNA
gcaagattaatcttgtgaattg

SEQ ID NO: 137830 - RNA, 22 nt, synthetic construct
  source 1..22: mol_type = other RNA
gcaagattactggatacaaggt

SEQ ID NO: 137831 - RNA, 22 nt, synthetic construct
  source 1..22: mol_type = other RNA
gcaagcaacaccagatactcat

SEQ ID NO: 137832 - RNA, 22 nt, synthetic construct
  source 1..22: mol_type = other RNA
gcaagcacgttagcatcaccat

SEQ ID NO: 137833 - RNA, 22 nt, synthetic construct
  source 1..22: mol_type = other RNA
gcaagcactggtaaggaaacag

SEQ ID NO: 137834 - RNA, 22 nt, synthetic construct
  source 1..22: mol_type = other RNA
gcaagcagatctgctgtaagct

SEQ ID NO: 137835 - RNA, 22 nt, synthetic construct
  source 1..22: mol_type = other RNA
gcaagcagtaaatatactgact

SEQ ID NO: 137836 - RNA, 22 nt, synthetic construct
  source 1..22: mol_type = other RNA
gcaagcatgagtatctggtgtt

SEQ ID NO: 137837 - RNA, 22 nt, synthetic construct
  source 1..22: mol_type = other RNA
gcaagccacattagccactctg

SEQ ID NO: 137838 - RNA, 22 nt, synthetic construct
  source 1..22: mol_type = other RNA
gcaagccttggcaaggggaatg

SEQ ID NO: 137839 - RNA, 22 nt, synthetic construct
  source 1..22: mol_type = other RNA
gcaagctaataatttatcagat

SEQ ID NO: 137840 - RNA, 22 nt, synthetic construct
  source 1..22: mol_type = other RNA
gcaagctccgcctcctggtggg

SEQ ID NO: 137841 - RNA, 22 nt, synthetic construct
  source 1..22: mol_type = other RNA
gcaaggaagcagaatgtccatc

SEQ ID NO: 137842 - RNA, 22 nt, synthetic construct
  source 1..22: mol_type = other RNA
gcaaggaaggaaaggagatact

SEQ ID NO: 137843 - RNA, 22 nt, synthetic construct
  source 1..22: mol_type = other RNA
gcaaggaagggcttgatctagt

SEQ ID NO: 137844 - RNA, 22 nt, synthetic construct
  source 1..22: mol_type = other RNA
gcaaggaccattagcagttctg

SEQ ID NO: 137845 - RNA, 22 nt, synthetic construct
  source 1..22: mol_type = other RNA
gcaaggagagaaaaacaaaaca

SEQ ID NO: 137846 - RNA, 22 nt, synthetic construct
  source 1..22: mol_type = other RNA
gcaaggataaacaaagagaaca

SEQ ID NO: 137847 - RNA, 22 nt, synthetic construct
  source 1..22: mol_type = other RNA
gcaaggcccaccatgatgcagc

SEQ ID NO: 137848 - RNA, 22 nt, synthetic construct
  source 1..22: mol_type = other RNA
gcaaggctaacagccaaagaaa

SEQ ID NO: 137849 - RNA, 22 nt, synthetic construct
  source 1..22: mol_type = other RNA
gcaaggctcctgcagacatgca

SEQ ID NO: 137850 - RNA, 22 nt, synthetic construct
  source 1..22: mol_type = other RNA
gcaagggactgtcgaagcttaa

SEQ ID NO: 137851 - RNA, 22 nt, synthetic construct
  source 1..22: mol_type = other RNA
gcaaggggaatggtactgcctc

SEQ ID NO: 137852 - RNA, 22 nt, synthetic construct
  source 1..22: mol_type = other RNA
gcaagggtggctggcactttcc

SEQ ID NO: 137853 - RNA, 22 nt, synthetic construct
  source 1..22: mol_type = other RNA
gcaaggtcgtttcagattgctt

SEQ ID NO: 137854 - RNA, 22 nt, synthetic construct
  source 1..22: mol_type = other RNA
gcaagtaaaagaagatgcagtt

SEQ ID NO: 137855 - RNA, 22 nt, synthetic construct
  source 1..22: mol_type = other RNA
gcaagtatgagccactagtcag

SEQ ID NO: 137856 - RNA, 22 nt, synthetic construct
  source 1..22: mol_type = other RNA
gcaagtccccatctccacaaaa

SEQ ID NO: 137857 - RNA, 22 nt, synthetic construct
  source 1..22: mol_type = other RNA
gcaagtgtggtggtctcaccct

SEQ ID NO: 137858 - RNA, 22 nt, synthetic construct
  source 1..22: mol_type = other RNA
gcaagttaaaagacatctttcc

SEQ ID NO: 137859 - RNA, 22 nt, synthetic construct
  source 1..22: mol_type = other RNA
gcaagttacatgcttagccttc

SEQ ID NO: 137860 - RNA, 22 nt, synthetic construct
  source 1..22: mol_type = other RNA
gcaagttgctatccagtctctg

SEQ ID NO: 137861 - RNA, 22 nt, synthetic construct
  source 1..22: mol_type = other RNA
gcaagtttccattctcttaatt

SEQ ID NO: 137862 - RNA, 22 nt, synthetic construct
  source 1..22: mol_type = other RNA
gcaataactcaaaatgttcata

SEQ ID NO: 137863 - RNA, 22 nt, synthetic construct
  source 1..22: mol_type = other RNA
gcaatacagttaacgtatgaat

SEQ ID NO: 137864 - RNA, 22 nt, synthetic construct
  source 1..22: mol_type = other RNA
gcaatactctcagaaattataa

SEQ ID NO: 137865 - RNA, 22 nt, synthetic construct
  source 1..22: mol_type = other RNA
gcaatacttaatagcccaacag

SEQ ID NO: 137866 - RNA, 22 nt, synthetic construct
  source 1..22: mol_type = other RNA
gcaatatagtgggaccccgtct

SEQ ID NO: 137867 - RNA, 22 nt, synthetic construct
  source 1..22: mol_type = other RNA
gcaatcaaatggccttctttct

SEQ ID NO: 137868 - RNA, 22 nt, synthetic construct
  source 1..22: mol_type = other RNA
gcaatcacagcacttggggagg

SEQ ID NO: 137869 - RNA, 22 nt, synthetic construct
  source 1..22: mol_type = other RNA
gcaatcacggctgattataacc

SEQ ID NO: 137870 - RNA, 22 nt, synthetic construct
  source 1..22: mol_type = other RNA
gcaatccaaaatcctctgtaga

SEQ ID NO: 137871 - RNA, 22 nt, synthetic construct
  source 1..22: mol_type = other RNA
gcaatccaaggacagaaattca

SEQ ID NO: 137872 - RNA, 22 nt, synthetic construct
  source 1..22: mol_type = other RNA
gcaatccaggatcttactgtaa

SEQ ID NO: 137873 - RNA, 22 nt, synthetic construct
  source 1..22: mol_type = other RNA
gcaatctcagctcattacagtc

SEQ ID NO: 137874 - RNA, 22 nt, synthetic construct
  source 1..22: mol_type = other RNA
gcaatctcggcttcactgcaac

SEQ ID NO: 137875 - RNA, 22 nt, synthetic construct
  source 1..22: mol_type = other RNA
gcaatctgaaacgaccttgctc

SEQ ID NO: 137876 - RNA, 22 nt, synthetic construct
  source 1..22: mol_type = other RNA
gcaatgagtctgacatactgtc

SEQ ID NO: 137877 - RNA, 22 nt, synthetic construct
  source 1..22: mol_type = other RNA
gcaatgataggtcactgcagtc

SEQ ID NO: 137878 - RNA, 22 nt, synthetic construct
  source 1..22: mol_type = other RNA
gcaatgcaggcgcctggacagg

SEQ ID NO: 137879 - RNA, 22 nt, synthetic construct
  source 1..22: mol_type = other RNA
gcaatgcgaatcatctaggcat

SEQ ID NO: 137880 - RNA, 22 nt, synthetic construct
  source 1..22: mol_type = other RNA
gcaatgcgtgtgaaaccaagca

SEQ ID NO: 137881 - RNA, 22 nt, synthetic construct
  source 1..22: mol_type = other RNA
gcaatgctctcttcccccaaaa

SEQ ID NO: 137882 - RNA, 22 nt, synthetic construct
  source 1..22: mol_type = other RNA
gcaatggggcaatctcagctca

SEQ ID NO: 137883 - RNA, 22 nt, synthetic construct
  source 1..22: mol_type = other RNA
gcaatggtgggatctctgggct

SEQ ID NO: 137884 - RNA, 22 nt, synthetic construct
  source 1..22: mol_type = other RNA
gcaatgtaacacagttctagtt

SEQ ID NO: 137885 - RNA, 22 nt, synthetic construct
  source 1..22: mol_type = other RNA
gcaatgtagggaatagacaaag

SEQ ID NO: 137886 - RNA, 22 nt, synthetic construct
  source 1..22: mol_type = other RNA
gcaatgttgattttgaggcaga

SEQ ID NO: 137887 - RNA, 22 nt, synthetic construct
  source 1..22: mol_type = other RNA
gcaattattagttgtacttgac

SEQ ID NO: 137888 - RNA, 22 nt, synthetic construct
  source 1..22: mol_type = other RNA
gcaattatttgaataaggtctg

SEQ ID NO: 137889 - RNA, 22 nt, synthetic construct
  source 1..22: mol_type = other RNA
gcaattccataaatgtttgcta

SEQ ID NO: 137890 - RNA, 22 nt, synthetic construct
  source 1..22: mol_type = other RNA
gcaattccccagcctcagcctc

SEQ ID NO: 137891 - RNA, 22 nt, synthetic construct
  source 1..22: mol_type = other RNA
gcaattgcagccagagagtgga

SEQ ID NO: 137892 - RNA, 22 nt, synthetic construct
  source 1..22: mol_type = other RNA
gcaattgcgcagaactggggct

SEQ ID NO: 137893 - RNA, 22 nt, synthetic construct
  source 1..22: mol_type = other RNA
gcaattggaagactatcacgat

SEQ ID NO: 137894 - RNA, 22 nt, synthetic construct
  source 1..22: mol_type = other RNA
gcaatttagaattctctctcaa

SEQ ID NO: 137895 - RNA, 22 nt, synthetic construct
  source 1..22: mol_type = other RNA
gcaatttatatgatactcgtag

SEQ ID NO: 137896 - RNA, 22 nt, synthetic construct
  source 1..22: mol_type = other RNA
gcaatttctcaaaaatttaagc

SEQ ID NO: 137897 - RNA, 22 nt, synthetic construct
  source 1..22: mol_type = other RNA
gcaatttgttttccaagcctta

SEQ ID NO: 137898 - RNA, 22 nt, synthetic construct
  source 1..22: mol_type = other RNA
gcacaaaagtgaaaactaaggt

SEQ ID NO: 137899 - RNA, 22 nt, synthetic construct
  source 1..22: mol_type = other RNA
gcacaaaagtttaactttgatg

SEQ ID NO: 137900 - RNA, 22 nt, synthetic construct
  source 1..22: mol_type = other RNA
gcacaaacctggcaatactctc

SEQ ID NO: 137901 - RNA, 22 nt, synthetic construct
  source 1..22: mol_type = other RNA
gcacaaaggattgggaagattg

SEQ ID NO: 137902 - RNA, 22 nt, synthetic construct
  source 1..22: mol_type = other RNA
gcacaaataattaacactatgt

SEQ ID NO: 137903 - RNA, 22 nt, synthetic construct
  source 1..22: mol_type = other RNA
gcacaacacatgcacactagac

SEQ ID NO: 137904 - RNA, 22 nt, synthetic construct
  source 1..22: mol_type = other RNA
gcacaaccactgatggaattct

SEQ ID NO: 137905 - RNA, 22 nt, synthetic construct
  source 1..22: mol_type = other RNA
gcacaactagtaagtaaaatcg

SEQ ID NO: 137906 - RNA, 22 nt, synthetic construct
  source 1..22: mol_type = other RNA
gcacaagacagatgtgcttaat

SEQ ID NO: 137907 - RNA, 22 nt, synthetic construct
  source 1..22: mol_type = other RNA
gcacaagcacagagtcagaaaa

SEQ ID NO: 137908 - RNA, 22 nt, synthetic construct
  source 1..22: mol_type = other RNA
gcacaagccttgaaaatatact

SEQ ID NO: 137909 - RNA, 22 nt, synthetic construct
  source 1..22: mol_type = other RNA
gcacaagggaagaggccacaaa

SEQ ID NO: 137910 - RNA, 22 nt, synthetic construct
  source 1..22: mol_type = other RNA
gcacaaggtcaagagcggcctt

SEQ ID NO: 137911 - RNA, 22 nt, synthetic construct
  source 1..22: mol_type = other RNA
gcacaatactgtctcagtccca

SEQ ID NO: 137912 - RNA, 22 nt, synthetic construct
  source 1..22: mol_type = other RNA
gcacaatcatagctcactagag

SEQ ID NO: 137913 - RNA, 22 nt, synthetic construct
  source 1..22: mol_type = other RNA
gcacaatgcagtattgttaact

SEQ ID NO: 137914 - RNA, 22 nt, synthetic construct
  source 1..22: mol_type = other RNA
gcacaatgcctgccgcagagca

SEQ ID NO: 137915 - RNA, 22 nt, synthetic construct
  source 1..22: mol_type = other RNA
gcacaatggaatattactcagt

SEQ ID NO: 137916 - RNA, 22 nt, synthetic construct
  source 1..22: mol_type = other RNA
gcacaatgttgtggatgtcctt

SEQ ID NO: 137917 - RNA, 22 nt, synthetic construct
  source 1..22: mol_type = other RNA
gcacaattgcactccagcctag

SEQ ID NO: 137918 - RNA, 22 nt, synthetic construct
  source 1..22: mol_type = other RNA
gcacacaacactcagatatcaa

SEQ ID NO: 137919 - RNA, 22 nt, synthetic construct
  source 1..22: mol_type = other RNA
gcacacaccaaatcatgaaagt

SEQ ID NO: 137920 - RNA, 22 nt, synthetic construct
  source 1..22: mol_type = other RNA
gcacacagagggagcgccacgt

SEQ ID NO: 137921 - RNA, 22 nt, synthetic construct
  source 1..22: mol_type = other RNA
gcacacaggagaacttgtctcg

SEQ ID NO: 137922 - RNA, 22 nt, synthetic construct
  source 1..22: mol_type = other RNA
gcacacagtttgagaagccaca

SEQ ID NO: 137923 - RNA, 22 nt, synthetic construct
  source 1..22: mol_type = other RNA
gcacacatccacgcgtaagggt

SEQ ID NO: 137924 - RNA, 22 nt, synthetic construct
  source 1..22: mol_type = other RNA
gcacacatgaacctgcatggtg

SEQ ID NO: 137925 - RNA, 22 nt, synthetic construct
  source 1..22: mol_type = other RNA
gcacaccaacatggcacatgtc

SEQ ID NO: 137926 - RNA, 22 nt, synthetic construct
  source 1..22: mol_type = other RNA
gcacaccaagacatgttaggtt

SEQ ID NO: 137927 - RNA, 22 nt, synthetic construct
  source 1..22: mol_type = other RNA
gcacaccaaggtttctctccaa

SEQ ID NO: 137928 - RNA, 22 nt, synthetic construct
  source 1..22: mol_type = other RNA
gcacacccagttatctctgccc

SEQ ID NO: 137929 - RNA, 22 nt, synthetic construct
  source 1..22: mol_type = other RNA
gcacacgccactgcaggtgttg

SEQ ID NO: 137930 - RNA, 22 nt, synthetic construct
  source 1..22: mol_type = other RNA
gcacacgctggaagggagccca

SEQ ID NO: 137931 - RNA, 22 nt, synthetic construct
  source 1..22: mol_type = other RNA
gcacactagacctttcttaggt

SEQ ID NO: 137932 - RNA, 22 nt, synthetic construct
  source 1..22: mol_type = other RNA
gcacactccccagtggttgtgg

SEQ ID NO: 137933 - RNA, 22 nt, synthetic construct
  source 1..22: mol_type = other RNA
gcacactcttaataactgccta

SEQ ID NO: 137934 - RNA, 22 nt, synthetic construct
  source 1..22: mol_type = other RNA
gcacactttccttggagaagag

SEQ ID NO: 137935 - RNA, 22 nt, synthetic construct
  source 1..22: mol_type = other RNA
gcacagaaccatgtaacaggtt

SEQ ID NO: 137936 - RNA, 22 nt, synthetic construct
  source 1..22: mol_type = other RNA
gcacagaattactatatgatcc

SEQ ID NO: 137937 - RNA, 22 nt, synthetic construct
  source 1..22: mol_type = other RNA
gcacagaattattgattggcaa

SEQ ID NO: 137938 - RNA, 22 nt, synthetic construct
  source 1..22: mol_type = other RNA
gcacagactcaagcctgataag

SEQ ID NO: 137939 - RNA, 22 nt, synthetic construct
  source 1..22: mol_type = other RNA
gcacagactgtgccttgatcca

SEQ ID NO: 137940 - RNA, 22 nt, synthetic construct
  source 1..22: mol_type = other RNA
gcacagagccgaaatgcactta

SEQ ID NO: 137941 - RNA, 22 nt, synthetic construct
  source 1..22: mol_type = other RNA
gcacagaggcaacagtcattca

SEQ ID NO: 137942 - RNA, 22 nt, synthetic construct
  source 1..22: mol_type = other RNA
gcacagagtcagaaaattaaat

SEQ ID NO: 137943 - RNA, 22 nt, synthetic construct
  source 1..22: mol_type = other RNA
gcacagcactgttaactgactt

SEQ ID NO: 137944 - RNA, 22 nt, synthetic construct
  source 1..22: mol_type = other RNA
gcacagccagtcagtgatggag

SEQ ID NO: 137945 - RNA, 22 nt, synthetic construct
  source 1..22: mol_type = other RNA
gcacagctctcatgagtcctga

SEQ ID NO: 137946 - RNA, 22 nt, synthetic construct
  source 1..22: mol_type = other RNA
gcacaggagagcgacagctacg

SEQ ID NO: 137947 - RNA, 22 nt, synthetic construct
  source 1..22: mol_type = other RNA
gcacaggcatcggccgggcgtg

SEQ ID NO: 137948 - RNA, 22 nt, synthetic construct
  source 1..22: mol_type = other RNA
gcacaggcatctctctaaaaac

SEQ ID NO: 137949 - RNA, 22 nt, synthetic construct
  source 1..22: mol_type = other RNA
gcacagggagatacttgattac

SEQ ID NO: 137950 - RNA, 22 nt, synthetic construct
  source 1..22: mol_type = other RNA
gcacagtatgcggggtttcagc

SEQ ID NO: 137951 - RNA, 22 nt, synthetic construct
  source 1..22: mol_type = other RNA
gcacagtctcccccaggtggtt

SEQ ID NO: 137952 - RNA, 22 nt, synthetic construct
  source 1..22: mol_type = other RNA
gcacagtctctgcagagcaggc

SEQ ID NO: 137953 - RNA, 22 nt, synthetic construct
  source 1..22: mol_type = other RNA
gcacagtctgtgcttaaggaaa

SEQ ID NO: 137954 - RNA, 22 nt, synthetic construct
  source 1..22: mol_type = other RNA
gcacataaaaaaggaatctggg

SEQ ID NO: 137955 - RNA, 22 nt, synthetic construct
  source 1..22: mol_type = other RNA
gcacataaaaggatatgggcca

SEQ ID NO: 137956 - RNA, 22 nt, synthetic construct
  source 1..22: mol_type = other RNA
gcacataatataaaaagacaca

SEQ ID NO: 137957 - RNA, 22 nt, synthetic construct
  source 1..22: mol_type = other RNA
gcacatactgcatattgaagcc

SEQ ID NO: 137958 - RNA, 22 nt, synthetic construct
  source 1..22: mol_type = other RNA
gcacatctgtcttgtgcatcct

SEQ ID NO: 137959 - RNA, 22 nt, synthetic construct
  source 1..22: mol_type = other RNA
gcacatgcacaaggtcaagagc

SEQ ID NO: 137960 - RNA, 22 nt, synthetic construct
  source 1..22: mol_type = other RNA
gcacatgggcatgggtccaaga

SEQ ID NO: 137961 - RNA, 22 nt, synthetic construct
  source 1..22: mol_type = other RNA
gcacatggtgataactggtgct

SEQ ID NO: 137962 - RNA, 22 nt, synthetic construct
  source 1..22: mol_type = other RNA
gcacatgttccctagaacttaa

SEQ ID NO: 137963 - RNA, 22 nt, synthetic construct
  source 1..22: mol_type = other RNA
gcacattaaataagggcatttt

SEQ ID NO: 137964 - RNA, 22 nt, synthetic construct
  source 1..22: mol_type = other RNA
gcacattagaatcatccgggga

SEQ ID NO: 137965 - RNA, 22 nt, synthetic construct
  source 1..22: mol_type = other RNA
gcacattcaagcagaaatgagt

SEQ ID NO: 137966 - RNA, 22 nt, synthetic construct
  source 1..22: mol_type = other RNA
gcacattccaagagaggaataa

SEQ ID NO: 137967 - RNA, 22 nt, synthetic construct
  source 1..22: mol_type = other RNA
gcacattccttccgacctgtag

SEQ ID NO: 137968 - RNA, 22 nt, synthetic construct
  source 1..22: mol_type = other RNA
gcacattccttcttcacacatt

SEQ ID NO: 137969 - RNA, 22 nt, synthetic construct
  source 1..22: mol_type = other RNA
gcaccaaagattatgttccaca

SEQ ID NO: 137970 - RNA, 22 nt, synthetic construct
  source 1..22: mol_type = other RNA
gcaccaacacctgcagtggcgt

SEQ ID NO: 137971 - RNA, 22 nt, synthetic construct
  source 1..22: mol_type = other RNA
gcaccaacagatcctcacatca

SEQ ID NO: 137972 - RNA, 22 nt, synthetic construct
  source 1..22: mol_type = other RNA
gcaccaacccttgttggacagc

SEQ ID NO: 137973 - RNA, 22 nt, synthetic construct
  source 1..22: mol_type = other RNA
gcaccaactccacattgtctta

SEQ ID NO: 137974 - RNA, 22 nt, synthetic construct
  source 1..22: mol_type = other RNA
gcaccacacctggctaattttt

SEQ ID NO: 137975 - RNA, 22 nt, synthetic construct
  source 1..22: mol_type = other RNA
gcaccacccttgatgtcacaag

SEQ ID NO: 137976 - RNA, 22 nt, synthetic construct
  source 1..22: mol_type = other RNA
gcaccactagagtattacctat

SEQ ID NO: 137977 - RNA, 22 nt, synthetic construct
  source 1..22: mol_type = other RNA
gcaccactgagagggaagttta

SEQ ID NO: 137978 - RNA, 22 nt, synthetic construct
  source 1..22: mol_type = other RNA
gcaccacttcgagaagggaagt

SEQ ID NO: 137979 - RNA, 22 nt, synthetic construct
  source 1..22: mol_type = other RNA
gcaccagatactcaatcagtgg

SEQ ID NO: 137980 - RNA, 22 nt, synthetic construct
  source 1..22: mol_type = other RNA
gcaccagggcctctgaagacat

SEQ ID NO: 137981 - RNA, 22 nt, synthetic construct
  source 1..22: mol_type = other RNA
gcaccagttatcaccatgtgct

SEQ ID NO: 137982 - RNA, 22 nt, synthetic construct
  source 1..22: mol_type = other RNA
gcaccatctaacagaaatacaa

SEQ ID NO: 137983 - RNA, 22 nt, synthetic construct
  source 1..22: mol_type = other RNA
gcaccatttattgtcaaggtca

SEQ ID NO: 137984 - RNA, 22 nt, synthetic construct
  source 1..22: mol_type = other RNA
gcaccattttttcaccagcggc

SEQ ID NO: 137985 - RNA, 22 nt, synthetic construct
  source 1..22: mol_type = other RNA
gcacccagagcgggtttcctcg

SEQ ID NO: 137986 - RNA, 22 nt, synthetic construct
  source 1..22: mol_type = other RNA
gcaccctatttatgttgcacaa

SEQ ID NO: 137987 - RNA, 22 nt, synthetic construct
  source 1..22: mol_type = other RNA
gcaccctcaaatgtctcattgt

SEQ ID NO: 137988 - RNA, 22 nt, synthetic construct
  source 1..22: mol_type = other RNA
gcaccctcctcctcctggccac

SEQ ID NO: 137989 - RNA, 22 nt, synthetic construct
  source 1..22: mol_type = other RNA
gcaccctgagcatccccgctgc

SEQ ID NO: 137990 - RNA, 22 nt, synthetic construct
  source 1..22: mol_type = other RNA
gcaccgcgcccggccgagaaat

SEQ ID NO: 137991 - RNA, 22 nt, synthetic construct
  source 1..22: mol_type = other RNA
gcaccgtgacagaacaaataac

SEQ ID NO: 137992 - RNA, 22 nt, synthetic construct
  source 1..22: mol_type = other RNA
gcacctaaaaggttgcttaatt

SEQ ID NO: 137993 - RNA, 22 nt, synthetic construct
  source 1..22: mol_type = other RNA
gcacctaacaatgattatttcg

SEQ ID NO: 137994 - RNA, 22 nt, synthetic construct
  source 1..22: mol_type = other RNA
gcacctaataaaatgtttagcg

SEQ ID NO: 137995 - RNA, 22 nt, synthetic construct
  source 1..22: mol_type = other RNA
gcacctccagtgtcctgaatga

SEQ ID NO: 137996 - RNA, 22 nt, synthetic construct
  source 1..22: mol_type = other RNA
gcacctcgggttcaagccccag

SEQ ID NO: 137997 - RNA, 22 nt, synthetic construct
  source 1..22: mol_type = other RNA
gcacctgaacccaggaggcaaa

SEQ ID NO: 137998 - RNA, 22 nt, synthetic construct
  source 1..22: mol_type = other RNA
gcacctggccgggatttacttc

SEQ ID NO: 137999 - RNA, 22 nt, synthetic construct
  source 1..22: mol_type = other RNA
gcacctgtataaataaaatgtc

SEQ ID NO: 138000 - RNA, 22 nt, synthetic construct
  source 1..22: mol_type = other RNA
gcaccttacattgtaatcctgt

SEQ ID NO: 138001 - RNA, 22 nt, synthetic construct
  source 1..22: mol_type = other RNA
gcaccttcagaagccctgcagc

SEQ ID NO: 138002 - RNA, 22 nt, synthetic construct
  source 1..22: mol_type = other RNA
gcaccttccctactcactgaaa

SEQ ID NO: 138003 - RNA, 22 nt, synthetic construct
  source 1..22: mol_type = other RNA
gcaccttgattttgataaaaat

SEQ ID NO: 138004 - RNA, 22 nt, synthetic construct
  source 1..22: mol_type = other RNA
gcacctttattaactagaattg

SEQ ID NO: 138005 - RNA, 22 nt, synthetic construct
  source 1..22: mol_type = other RNA
gcaccttttttggtatttttta

SEQ ID NO: 138006 - RNA, 22 nt, synthetic construct
  source 1..22: mol_type = other RNA
gcacgagaaaagcacaggcatc

SEQ ID NO: 138007 - RNA, 22 nt, synthetic construct
  source 1..22: mol_type = other RNA
gcacgccatctcgcccagctaa

SEQ ID NO: 138008 - RNA, 22 nt, synthetic construct
  source 1..22: mol_type = other RNA
gcacgctgtgaatgtgaggtga

SEQ ID NO: 138009 - RNA, 22 nt, synthetic construct
  source 1..22: mol_type = other RNA
gcacggacttggcacaggagag

SEQ ID NO: 138010 - RNA, 22 nt, synthetic construct
  source 1..22: mol_type = other RNA
gcacggtgaagaaccgactgaa

SEQ ID NO: 138011 - RNA, 22 nt, synthetic construct
  source 1..22: mol_type = other RNA
gcacgtactagtcagcacactc

SEQ ID NO: 138012 - RNA, 22 nt, synthetic construct
  source 1..22: mol_type = other RNA
gcacgtctgtggtctcagctcc

SEQ ID NO: 138013 - RNA, 22 nt, synthetic construct
  source 1..22: mol_type = other RNA
gcacgtgaagctacagactaat

SEQ ID NO: 138014 - RNA, 22 nt, synthetic construct
  source 1..22: mol_type = other RNA
gcacgttagcatcaccatcatc

SEQ ID NO: 138015 - RNA, 22 nt, synthetic construct
  source 1..22: mol_type = other RNA
gcacgtttgatctggtcacaaa

SEQ ID NO: 138016 - RNA, 22 nt, synthetic construct
  source 1..22: mol_type = other RNA
gcacgtttgctttggagtgaga

SEQ ID NO: 138017 - RNA, 22 nt, synthetic construct
  source 1..22: mol_type = other RNA
gcacgtttttagaaatttaccc

SEQ ID NO: 138018 - RNA, 22 nt, synthetic construct
  source 1..22: mol_type = other RNA
gcactaaactagtatcaacctg

SEQ ID NO: 138019 - RNA, 22 nt, synthetic construct
  source 1..22: mol_type = other RNA
gcactaacaaagggcctgttcc

SEQ ID NO: 138020 - RNA, 22 nt, synthetic construct
  source 1..22: mol_type = other RNA
gcactatccacatttggtttta

SEQ ID NO: 138021 - RNA, 22 nt, synthetic construct
  source 1..22: mol_type = other RNA
gcactcaagcaatcctccggcc

SEQ ID NO: 138022 - RNA, 22 nt, synthetic construct
  source 1..22: mol_type = other RNA
gcactcagcctgttgggaggtt

SEQ ID NO: 138023 - RNA, 22 nt, synthetic construct
  source 1..22: mol_type = other RNA
gcactccacgtgggtgacagag

SEQ ID NO: 138024 - RNA, 22 nt, synthetic construct
  source 1..22: mol_type = other RNA
gcactccacttcccactgctat

SEQ ID NO: 138025 - RNA, 22 nt, synthetic construct
  source 1..22: mol_type = other RNA
gcactccagccttggtaagagt

SEQ ID NO: 138026 - RNA, 22 nt, synthetic construct
  source 1..22: mol_type = other RNA
gcactctcaaaattaaattcat

SEQ ID NO: 138027 - RNA, 22 nt, synthetic construct
  source 1..22: mol_type = other RNA
gcactctgaatcacctcaaggc

SEQ ID NO: 138028 - RNA, 22 nt, synthetic construct
  source 1..22: mol_type = other RNA
gcactctggcctggacaacagt

SEQ ID NO: 138029 - RNA, 22 nt, synthetic construct
  source 1..22: mol_type = other RNA
gcactcttttaaacccatttca

SEQ ID NO: 138030 - RNA, 22 nt, synthetic construct
  source 1..22: mol_type = other RNA
gcactgaagccagtccttgtga

SEQ ID NO: 138031 - RNA, 22 nt, synthetic construct
  source 1..22: mol_type = other RNA
gcactgatgtgtagttattatt

SEQ ID NO: 138032 - RNA, 22 nt, synthetic construct
  source 1..22: mol_type = other RNA
gcactgcgccaagcagggacgg

SEQ ID NO: 138033 - RNA, 22 nt, synthetic construct
  source 1..22: mol_type = other RNA
gcactgctattgataaatctaa

SEQ ID NO: 138034 - RNA, 22 nt, synthetic construct
  source 1..22: mol_type = other RNA
gcactggcacagcactgttaac

SEQ ID NO: 138035 - RNA, 22 nt, synthetic construct
  source 1..22: mol_type = other RNA
gcactggctattagttaacctt

SEQ ID NO: 138036 - RNA, 22 nt, synthetic construct
  source 1..22: mol_type = other RNA
gcactgggagccctccaggatc

SEQ ID NO: 138037 - RNA, 22 nt, synthetic construct
  source 1..22: mol_type = other RNA
gcactgggtccccggaggaggt

SEQ ID NO: 138038 - RNA, 22 nt, synthetic construct
  source 1..22: mol_type = other RNA
gcactggtaaggaaacagagtt

SEQ ID NO: 138039 - RNA, 22 nt, synthetic construct
  source 1..22: mol_type = other RNA
gcactggtttcagtacacgaaa

SEQ ID NO: 138040 - RNA, 22 nt, synthetic construct
  source 1..22: mol_type = other RNA
gcactgtactcctagatactcg

SEQ ID NO: 138041 - RNA, 22 nt, synthetic construct
  source 1..22: mol_type = other RNA
gcactgtatggttcttaagatg

SEQ ID NO: 138042 - RNA, 22 nt, synthetic construct
  source 1..22: mol_type = other RNA
gcactgtgagccactaaaacag

SEQ ID NO: 138043 - RNA, 22 nt, synthetic construct
  source 1..22: mol_type = other RNA
gcactgttaactgacttacaga

SEQ ID NO: 138044 - RNA, 22 nt, synthetic construct
  source 1..22: mol_type = other RNA
gcacttaaaatttagatctcat

SEQ ID NO: 138045 - RNA, 22 nt, synthetic construct
  source 1..22: mol_type = other RNA
gcacttagcgctgatgtgttga

SEQ ID NO: 138046 - RNA, 22 nt, synthetic construct
  source 1..22: mol_type = other RNA
gcacttccattttgcttaataa

SEQ ID NO: 138047 - RNA, 22 nt, synthetic construct
  source 1..22: mol_type = other RNA
gcacttctgatatcctgtaaac

SEQ ID NO: 138048 - RNA, 22 nt, synthetic construct
  source 1..22: mol_type = other RNA
gcacttgggatgtttctacctt

SEQ ID NO: 138049 - RNA, 22 nt, synthetic construct
  source 1..22: mol_type = other RNA
gcacttggggaggccaaggcag

SEQ ID NO: 138050 - RNA, 22 nt, synthetic construct
  source 1..22: mol_type = other RNA
gcacttggtaagctgtgagtcc

SEQ ID NO: 138051 - RNA, 22 nt, synthetic construct
  source 1..22: mol_type = other RNA
gcactttcctgataaggggcta

SEQ ID NO: 138052 - RNA, 22 nt, synthetic construct
  source 1..22: mol_type = other RNA
gcactttcgtatttttgttatt

SEQ ID NO: 138053 - RNA, 22 nt, synthetic construct
  source 1..22: mol_type = other RNA
gcacttttaaggcttggaaaac

SEQ ID NO: 138054 - RNA, 22 nt, synthetic construct
  source 1..22: mol_type = other RNA
gcacttttgtactacttgtcag

SEQ ID NO: 138055 - RNA, 22 nt, synthetic construct
  source 1..22: mol_type = other RNA
gcactttttaccaagttgaatt

SEQ ID NO: 138056 - RNA, 22 nt, synthetic construct
  source 1..22: mol_type = other RNA
gcagaaaataaaccaagtttgg

SEQ ID NO: 138057 - RNA, 22 nt, synthetic construct
  source 1..22: mol_type = other RNA
gcagaaaatcagtgtgaaagta

SEQ ID NO: 138058 - RNA, 22 nt, synthetic construct
  source 1..22: mol_type = other RNA
gcagaaacacaggactgtgtgt

SEQ ID NO: 138059 - RNA, 22 nt, synthetic construct
  source 1..22: mol_type = other RNA
gcagaaaccagttgtaattttt

SEQ ID NO: 138060 - RNA, 22 nt, synthetic construct
  source 1..22: mol_type = other RNA
gcagaaagttactattttcata

SEQ ID NO: 138061 - RNA, 22 nt, synthetic construct
  source 1..22: mol_type = other RNA
gcagaaatacagaccgatggaa

SEQ ID NO: 138062 - RNA, 22 nt, synthetic construct
  source 1..22: mol_type = other RNA
gcagaaatctaccaaacattga

SEQ ID NO: 138063 - RNA, 22 nt, synthetic construct
  source 1..22: mol_type = other RNA
gcagaaatgacaagtaaatgca

SEQ ID NO: 138064 - RNA, 22 nt, synthetic construct
  source 1..22: mol_type = other RNA
gcagaaatgagttccagtcctt

SEQ ID NO: 138065 - RNA, 22 nt, synthetic construct
  source 1..22: mol_type = other RNA
gcagaacaaactgcgtggttta

SEQ ID NO: 138066 - RNA, 22 nt, synthetic construct
  source 1..22: mol_type = other RNA
gcagaacacactgctcttctat

SEQ ID NO: 138067 - RNA, 22 nt, synthetic construct
  source 1..22: mol_type = other RNA
gcagaacagtgtttacacacct

SEQ ID NO: 138068 - RNA, 22 nt, synthetic construct
  source 1..22: mol_type = other RNA
gcagaaccacctgggggagact

SEQ ID NO: 138069 - RNA, 22 nt, synthetic construct
  source 1..22: mol_type = other RNA
gcagaaccactgagcacaatgc

SEQ ID NO: 138070 - RNA, 22 nt, synthetic construct
  source 1..22: mol_type = other RNA
gcagaaccttagaaatttaagg

SEQ ID NO: 138071 - RNA, 22 nt, synthetic construct
  source 1..22: mol_type = other RNA
gcagaactaagaccccagtaga

SEQ ID NO: 138072 - RNA, 22 nt, synthetic construct
  source 1..22: mol_type = other RNA
gcagaactccacctcagaaaca

SEQ ID NO: 138073 - RNA, 22 nt, synthetic construct
  source 1..22: mol_type = other RNA
gcagaactggggcttgaacccg

SEQ ID NO: 138074 - RNA, 22 nt, synthetic construct
  source 1..22: mol_type = other RNA
gcagaagagtgaagctggaccc

SEQ ID NO: 138075 - RNA, 22 nt, synthetic construct
  source 1..22: mol_type = other RNA
gcagaaggagaaaccatttacc

SEQ ID NO: 138076 - RNA, 22 nt, synthetic construct
  source 1..22: mol_type = other RNA
gcagaaggaggaaaataatttg

SEQ ID NO: 138077 - RNA, 22 nt, synthetic construct
  source 1..22: mol_type = other RNA
gcagaagggaaaggatgacctt

SEQ ID NO: 138078 - RNA, 22 nt, synthetic construct
  source 1..22: mol_type = other RNA
gcagaaggtgagggactgagca

SEQ ID NO: 138079 - RNA, 22 nt, synthetic construct
  source 1..22: mol_type = other RNA
gcagaagttgtggtgagccaag

SEQ ID NO: 138080 - RNA, 22 nt, synthetic construct
  source 1..22: mol_type = other RNA
gcagaatccccaaataacatgc

SEQ ID NO: 138081 - RNA, 22 nt, synthetic construct
  source 1..22: mol_type = other RNA
gcagaatgacagaaaatatcta

SEQ ID NO: 138082 - RNA, 22 nt, synthetic construct
  source 1..22: mol_type = other RNA
gcagaatggccctgcgattggt

SEQ ID NO: 138083 - RNA, 22 nt, synthetic construct
  source 1..22: mol_type = other RNA
gcagaatgtccatcaggaaaac

SEQ ID NO: 138084 - RNA, 22 nt, synthetic construct
  source 1..22: mol_type = other RNA
gcagaatgtgacctgtccttgt

SEQ ID NO: 138085 - RNA, 22 nt, synthetic construct
  source 1..22: mol_type = other RNA
gcagaattactgacaatagcca

SEQ ID NO: 138086 - RNA, 22 nt, synthetic construct
  source 1..22: mol_type = other RNA
gcagaattatagagggcctaaa

SEQ ID NO: 138087 - RNA, 22 nt, synthetic construct
  source 1..22: mol_type = other RNA
gcagaattcaaaaacactgtat

SEQ ID NO: 138088 - RNA, 22 nt, synthetic construct
  source 1..22: mol_type = other RNA
gcagaattttttaatatgttcc

SEQ ID NO: 138089 - RNA, 22 nt, synthetic construct
  source 1..22: mol_type = other RNA
gcagacaataattcttcctgtc

SEQ ID NO: 138090 - RNA, 22 nt, synthetic construct
  source 1..22: mol_type = other RNA
gcagacacaccatgacagagtt

SEQ ID NO: 138091 - RNA, 22 nt, synthetic construct
  source 1..22: mol_type = other RNA
gcagacactgggttctcaccaa

SEQ ID NO: 138092 - RNA, 22 nt, synthetic construct
  source 1..22: mol_type = other RNA
gcagacagaaagacagggagag

SEQ ID NO: 138093 - RNA, 22 nt, synthetic construct
  source 1..22: mol_type = other RNA
gcagacatgcacgagaaaagca

SEQ ID NO: 138094 - RNA, 22 nt, synthetic construct
  source 1..22: mol_type = other RNA
gcagaccaagaaaggacttcag

SEQ ID NO: 138095 - RNA, 22 nt, synthetic construct
  source 1..22: mol_type = other RNA
gcagactccttcccctggtcga

SEQ ID NO: 138096 - RNA, 22 nt, synthetic construct
  source 1..22: mol_type = other RNA
gcagactcttgtcccggcatgc

SEQ ID NO: 138097 - RNA, 22 nt, synthetic construct
  source 1..22: mol_type = other RNA
gcagactgcaggtcttcaacct

SEQ ID NO: 138098 - RNA, 22 nt, synthetic construct
  source 1..22: mol_type = other RNA
gcagagaaactggaatcaatcc

SEQ ID NO: 138099 - RNA, 22 nt, synthetic construct
  source 1..22: mol_type = other RNA
gcagagaactgactgaaggatt

SEQ ID NO: 138100 - RNA, 22 nt, synthetic construct
  source 1..22: mol_type = other RNA
gcagagaagtgaagcttcaaac

SEQ ID NO: 138101 - RNA, 22 nt, synthetic construct
  source 1..22: mol_type = other RNA
gcagagacacacatcagacacc

SEQ ID NO: 138102 - RNA, 22 nt, synthetic construct
  source 1..22: mol_type = other RNA
gcagagacggggtcccactata

SEQ ID NO: 138103 - RNA, 22 nt, synthetic construct
  source 1..22: mol_type = other RNA
gcagagactggatagcaacttg

SEQ ID NO: 138104 - RNA, 22 nt, synthetic construct
  source 1..22: mol_type = other RNA
gcagagactgtgcttccacagc

SEQ ID NO: 138105 - RNA, 22 nt, synthetic construct
  source 1..22: mol_type = other RNA
gcagagagagaagatgacattt

SEQ ID NO: 138106 - RNA, 22 nt, synthetic construct
  source 1..22: mol_type = other RNA
gcagagagagtaactggtccag

SEQ ID NO: 138107 - RNA, 22 nt, synthetic construct
  source 1..22: mol_type = other RNA
gcagagagatggtgggagaggc

SEQ ID NO: 138108 - RNA, 22 nt, synthetic construct
  source 1..22: mol_type = other RNA
gcagagataactgggtgtgcac

SEQ ID NO: 138109 - RNA, 22 nt, synthetic construct
  source 1..22: mol_type = other RNA
gcagagcaaactcagatctgag

SEQ ID NO: 138110 - RNA, 22 nt, synthetic construct
  source 1..22: mol_type = other RNA
gcagagcaagcacgttagcatc

SEQ ID NO: 138111 - RNA, 22 nt, synthetic construct
  source 1..22: mol_type = other RNA
gcagagcaggctccacttgggt

SEQ ID NO: 138112 - RNA, 22 nt, synthetic construct
  source 1..22: mol_type = other RNA
gcagagcaggggtggggggatg

SEQ ID NO: 138113 - RNA, 22 nt, synthetic construct
  source 1..22: mol_type = other RNA
gcagaggccaaatgaaaggcgt

SEQ ID NO: 138114 - RNA, 22 nt, synthetic construct
  source 1..22: mol_type = other RNA
gcagaggtcaggaaggcaggag

SEQ ID NO: 138115 - RNA, 22 nt, synthetic construct
  source 1..22: mol_type = other RNA
gcagaggttgcagtgaagccga

SEQ ID NO: 138116 - RNA, 22 nt, synthetic construct
  source 1..22: mol_type = other RNA
gcagagtagagaaggctttgtg

SEQ ID NO: 138117 - RNA, 22 nt, synthetic construct
  source 1..22: mol_type = other RNA
gcagagtcctgagggtgagacc

SEQ ID NO: 138118 - RNA, 22 nt, synthetic construct
  source 1..22: mol_type = other RNA
gcagagtgttcaaaagccccaa

SEQ ID NO: 138119 - RNA, 22 nt, synthetic construct
  source 1..22: mol_type = other RNA
gcagataagatccaagtattgt

SEQ ID NO: 138120 - RNA, 22 nt, synthetic construct
  source 1..22: mol_type = other RNA
gcagatcaattgaccaaacatg

SEQ ID NO: 138121 - RNA, 22 nt, synthetic construct
  source 1..22: mol_type = other RNA
gcagatcacaaggtcagaagtt

SEQ ID NO: 138122 - RNA, 22 nt, synthetic construct
  source 1..22: mol_type = other RNA
gcagatcacgaggtcgagagtt

SEQ ID NO: 138123 - RNA, 22 nt, synthetic construct
  source 1..22: mol_type = other RNA
gcagatcagtaacaaataagaa

SEQ ID NO: 138124 - RNA, 22 nt, synthetic construct
  source 1..22: mol_type = other RNA
gcagatctgctgtaagctggta

SEQ ID NO: 138125 - RNA, 22 nt, synthetic construct
  source 1..22: mol_type = other RNA
gcagatctgcttgcagacaata

SEQ ID NO: 138126 - RNA, 22 nt, synthetic construct
  source 1..22: mol_type = other RNA
gcagatgaatgagcaaggtcgt

SEQ ID NO: 138127 - RNA, 22 nt, synthetic construct
  source 1..22: mol_type = other RNA
gcagatgttgcggtgagcagag

SEQ ID NO: 138128 - RNA, 22 nt, synthetic construct
  source 1..22: mol_type = other RNA
gcagattcatcttgacttcact

SEQ ID NO: 138129 - RNA, 22 nt, synthetic construct
  source 1..22: mol_type = other RNA
gcagatttctttttactcatgt

SEQ ID NO: 138130 - RNA, 22 nt, synthetic construct
  source 1..22: mol_type = other RNA
gcagcaaaagcaccactgagag

SEQ ID NO: 138131 - RNA, 22 nt, synthetic construct
  source 1..22: mol_type = other RNA
gcagcaaagcaagaaaaagaaa

SEQ ID NO: 138132 - RNA, 22 nt, synthetic construct
  source 1..22: mol_type = other RNA
gcagcaacggaaatgagtgagc

SEQ ID NO: 138133 - RNA, 22 nt, synthetic construct
  source 1..22: mol_type = other RNA
gcagcaagcagtaaatatactg

SEQ ID NO: 138134 - RNA, 22 nt, synthetic construct
  source 1..22: mol_type = other RNA
gcagcaagggtggctggcactt

SEQ ID NO: 138135 - RNA, 22 nt, synthetic construct
  source 1..22: mol_type = other RNA
gcagcaattatttgaataaggt

SEQ ID NO: 138136 - RNA, 22 nt, synthetic construct
  source 1..22: mol_type = other RNA
gcagcactgatgtgtagttatt

SEQ ID NO: 138137 - RNA, 22 nt, synthetic construct
  source 1..22: mol_type = other RNA
gcagcacttttaaggcttggaa

SEQ ID NO: 138138 - RNA, 22 nt, synthetic construct
  source 1..22: mol_type = other RNA
gcagcagagaagtgaagcttca

SEQ ID NO: 138139 - RNA, 22 nt, synthetic construct
  source 1..22: mol_type = other RNA
gcagcaggggctaagtagtggc

SEQ ID NO: 138140 - RNA, 22 nt, synthetic construct
  source 1..22: mol_type = other RNA
gcagcatccctgccgcgcgcga

SEQ ID NO: 138141 - RNA, 22 nt, synthetic construct
  source 1..22: mol_type = other RNA
gcagcatgatttataatccatt

SEQ ID NO: 138142 - RNA, 22 nt, synthetic construct
  source 1..22: mol_type = other RNA
gcagcatgctcactgtctccat

SEQ ID NO: 138143 - RNA, 22 nt, synthetic construct
  source 1..22: mol_type = other RNA
gcagcattgtttacagtagcca

SEQ ID NO: 138144 - RNA, 22 nt, synthetic construct
  source 1..22: mol_type = other RNA
gcagccactatagaaaatagta

SEQ ID NO: 138145 - RNA, 22 nt, synthetic construct
  source 1..22: mol_type = other RNA
gcagccagagagtggaaagagc

SEQ ID NO: 138146 - RNA, 22 nt, synthetic construct
  source 1..22: mol_type = other RNA
gcagccagatttgatcctggaa

SEQ ID NO: 138147 - RNA, 22 nt, synthetic construct
  source 1..22: mol_type = other RNA
gcagccatggctcactgcggcc

SEQ ID NO: 138148 - RNA, 22 nt, synthetic construct
  source 1..22: mol_type = other RNA
gcagccccgacgcctttcattt

SEQ ID NO: 138149 - RNA, 22 nt, synthetic construct
  source 1..22: mol_type = other RNA
gcagccccgcttcagttggtga

SEQ ID NO: 138150 - RNA, 22 nt, synthetic construct
  source 1..22: mol_type = other RNA
gcagcccctgccacactccagc

SEQ ID NO: 138151 - RNA, 22 nt, synthetic construct
  source 1..22: mol_type = other RNA
gcagcccgacctccagcgctaa

SEQ ID NO: 138152 - RNA, 22 nt, synthetic construct
  source 1..22: mol_type = other RNA
gcagcctctaatcaggttgggc

SEQ ID NO: 138153 - RNA, 22 nt, synthetic construct
  source 1..22: mol_type = other RNA
gcagccttccctgaacaatgat

SEQ ID NO: 138154 - RNA, 22 nt, synthetic construct
  source 1..22: mol_type = other RNA
gcagccttctctcttccaaata

SEQ ID NO: 138155 - RNA, 22 nt, synthetic construct
  source 1..22: mol_type = other RNA
gcagccttggaggagccctgct

SEQ ID NO: 138156 - RNA, 22 nt, synthetic construct
  source 1..22: mol_type = other RNA
gcagcggggatgctcagggtgc

SEQ ID NO: 138157 - RNA, 22 nt, synthetic construct
  source 1..22: mol_type = other RNA
gcagcgtaactccatcttcacg

SEQ ID NO: 138158 - RNA, 22 nt, synthetic construct
  source 1..22: mol_type = other RNA
gcagctaagcaccaacagatcc

SEQ ID NO: 138159 - RNA, 22 nt, synthetic construct
  source 1..22: mol_type = other RNA
gcagctacctgttgattgttgc

SEQ ID NO: 138160 - RNA, 22 nt, synthetic construct
  source 1..22: mol_type = other RNA
gcagctctagcaaacaaacaca

SEQ ID NO: 138161 - RNA, 22 nt, synthetic construct
  source 1..22: mol_type = other RNA
gcaggaaaagctaccctcgagt

SEQ ID NO: 138162 - RNA, 22 nt, synthetic construct
  source 1..22: mol_type = other RNA
gcaggaaacttccagaaacttc

SEQ ID NO: 138163 - RNA, 22 nt, synthetic construct
  source 1..22: mol_type = other RNA
gcaggaaaggtggggaagggat

SEQ ID NO: 138164 - RNA, 22 nt, synthetic construct
  source 1..22: mol_type = other RNA
gcaggaactcatattagtctgt

SEQ ID NO: 138165 - RNA, 22 nt, synthetic construct
  source 1..22: mol_type = other RNA
gcaggaccaactttaagcaaaa

SEQ ID NO: 138166 - RNA, 22 nt, synthetic construct
  source 1..22: mol_type = other RNA
gcaggactgcttgaggccacga

SEQ ID NO: 138167 - RNA, 22 nt, synthetic construct
  source 1..22: mol_type = other RNA
gcaggactggactccttctgaa

SEQ ID NO: 138168 - RNA, 22 nt, synthetic construct
  source 1..22: mol_type = other RNA
gcaggagaaacatggcttagaa

SEQ ID NO: 138169 - RNA, 22 nt, synthetic construct
  source 1..22: mol_type = other RNA
gcaggagaactgcctggacccg

SEQ ID NO: 138170 - RNA, 22 nt, synthetic construct
  source 1..22: mol_type = other RNA
gcaggagaatctgggaggtgga

SEQ ID NO: 138171 - RNA, 22 nt, synthetic construct
  source 1..22: mol_type = other RNA
gcaggagaatggcatgaaccca

SEQ ID NO: 138172 - RNA, 22 nt, synthetic construct
  source 1..22: mol_type = other RNA
gcaggagagtcgcttgaacctg

SEQ ID NO: 138173 - RNA, 22 nt, synthetic construct
  source 1..22: mol_type = other RNA
gcaggagcagtgtgaataggaa

SEQ ID NO: 138174 - RNA, 22 nt, synthetic construct
  source 1..22: mol_type = other RNA
gcaggagcatagcttgaaccag

SEQ ID NO: 138175 - RNA, 22 nt, synthetic construct
  source 1..22: mol_type = other RNA
gcaggagccttgctgttgtaat

SEQ ID NO: 138176 - RNA, 22 nt, synthetic construct
  source 1..22: mol_type = other RNA
gcaggaggcacctgaacccagg

SEQ ID NO: 138177 - RNA, 22 nt, synthetic construct
  source 1..22: mol_type = other RNA
gcaggaggcctcagaattaata

SEQ ID NO: 138178 - RNA, 22 nt, synthetic construct
  source 1..22: mol_type = other RNA
gcaggagtttgagactgcagtg

SEQ ID NO: 138179 - RNA, 22 nt, synthetic construct
  source 1..22: mol_type = other RNA
gcaggattcttgttaagcattt

SEQ ID NO: 138180 - RNA, 22 nt, synthetic construct
  source 1..22: mol_type = other RNA
gcaggcaaacagcgccacttaa

SEQ ID NO: 138181 - RNA, 22 nt, synthetic construct
  source 1..22: mol_type = other RNA
gcaggcaccttcagaagccctg

SEQ ID NO: 138182 - RNA, 22 nt, synthetic construct
  source 1..22: mol_type = other RNA
gcaggcagaatgtgacctgtcc

SEQ ID NO: 138183 - RNA, 22 nt, synthetic construct
  source 1..22: mol_type = other RNA
gcaggcagatcacgaggtcgag

SEQ ID NO: 138184 - RNA, 22 nt, synthetic construct
  source 1..22: mol_type = other RNA
gcaggcattgtgctcagtggtt

SEQ ID NO: 138185 - RNA, 22 nt, synthetic construct
  source 1..22: mol_type = other RNA
gcaggccagatatccataagga

SEQ ID NO: 138186 - RNA, 22 nt, synthetic construct
  source 1..22: mol_type = other RNA
gcaggccctgagaagtcaaagc

SEQ ID NO: 138187 - RNA, 22 nt, synthetic construct
  source 1..22: mol_type = other RNA
gcaggccttcgaggcatctagt

SEQ ID NO: 138188 - RNA, 22 nt, synthetic construct
  source 1..22: mol_type = other RNA
gcaggcgcctggacaggatccc

SEQ ID NO: 138189 - RNA, 22 nt, synthetic construct
  source 1..22: mol_type = other RNA
gcaggctccacttgggtggaag

SEQ ID NO: 138190 - RNA, 22 nt, synthetic construct
  source 1..22: mol_type = other RNA
gcaggctgaactgctgacagat

SEQ ID NO: 138191 - RNA, 22 nt, synthetic construct
  source 1..22: mol_type = other RNA
gcaggctttttacccggagagg

SEQ ID NO: 138192 - RNA, 22 nt, synthetic construct
  source 1..22: mol_type = other RNA
gcagggaaatcattcaggacac

SEQ ID NO: 138193 - RNA, 22 nt, synthetic construct
  source 1..22: mol_type = other RNA
gcagggaaatggagggccagag

SEQ ID NO: 138194 - RNA, 22 nt, synthetic construct
  source 1..22: mol_type = other RNA
gcagggaccacaggcatgcgcc

SEQ ID NO: 138195 - RNA, 22 nt, synthetic construct
  source 1..22: mol_type = other RNA
gcagggactacagtcacacacc

SEQ ID NO: 138196 - RNA, 22 nt, synthetic construct
  source 1..22: mol_type = other RNA
gcagggactcccatatctacat

SEQ ID NO: 138197 - RNA, 22 nt, synthetic construct
  source 1..22: mol_type = other RNA
gcagggagagagaaactttaca

SEQ ID NO: 138198 - RNA, 22 nt, synthetic construct
  source 1..22: mol_type = other RNA
gcagggaggggtccccagcatc

SEQ ID NO: 138199 - RNA, 22 nt, synthetic construct
  source 1..22: mol_type = other RNA
gcagggatgctgcgagccccgg

SEQ ID NO: 138200 - RNA, 22 nt, synthetic construct
  source 1..22: mol_type = other RNA
gcagggccattctgctatgaaa

SEQ ID NO: 138201 - RNA, 22 nt, synthetic construct
  source 1..22: mol_type = other RNA
gcagggctcctccaaggctgcc

SEQ ID NO: 138202 - RNA, 22 nt, synthetic construct
  source 1..22: mol_type = other RNA
gcagggcttctgaaggtgcctg

SEQ ID NO: 138203 - RNA, 22 nt, synthetic construct
  source 1..22: mol_type = other RNA
gcagggcttggtggcccacacc

SEQ ID NO: 138204 - RNA, 22 nt, synthetic construct
  source 1..22: mol_type = other RNA
gcaggggaaggcttcgagttct

SEQ ID NO: 138205 - RNA, 22 nt, synthetic construct
  source 1..22: mol_type = other RNA
gcaggggctaagtagtggcagc

SEQ ID NO: 138206 - RNA, 22 nt, synthetic construct
  source 1..22: mol_type = other RNA
gcaggggctgcatcatggtggg

SEQ ID NO: 138207 - RNA, 22 nt, synthetic construct
  source 1..22: mol_type = other RNA
gcaggggtggggggatgtagaa

SEQ ID NO: 138208 - RNA, 22 nt, synthetic construct
  source 1..22: mol_type = other RNA
gcagggtaaagtcaattctagt

SEQ ID NO: 138209 - RNA, 22 nt, synthetic construct
  source 1..22: mol_type = other RNA
gcagggtaggaaggcggtgggg

SEQ ID NO: 138210 - RNA, 22 nt, synthetic construct
  source 1..22: mol_type = other RNA
gcagggtcatgcacacgctgga

SEQ ID NO: 138211 - RNA, 22 nt, synthetic construct
  source 1..22: mol_type = other RNA
gcagggtgaaacttgaatactc

SEQ ID NO: 138212 - RNA, 22 nt, synthetic construct
  source 1..22: mol_type = other RNA
gcagggtggagtccaaccaatc

SEQ ID NO: 138213 - RNA, 22 nt, synthetic construct
  source 1..22: mol_type = other RNA
gcagggtgggcccttaatccaa

SEQ ID NO: 138214 - RNA, 22 nt, synthetic construct
  source 1..22: mol_type = other RNA
gcaggtatttctaaatcaacag

SEQ ID NO: 138215 - RNA, 22 nt, synthetic construct
  source 1..22: mol_type = other RNA
gcaggtcacctagcctctctgg

SEQ ID NO: 138216 - RNA, 22 nt, synthetic construct
  source 1..22: mol_type = other RNA
gcaggtcatgacttttttgccc

SEQ ID NO: 138217 - RNA, 22 nt, synthetic construct
  source 1..22: mol_type = other RNA
gcaggtcttcaacctcaacttt

SEQ ID NO: 138218 - RNA, 22 nt, synthetic construct
  source 1..22: mol_type = other RNA
gcaggtggaaggcctgatagct

SEQ ID NO: 138219 - RNA, 22 nt, synthetic construct
  source 1..22: mol_type = other RNA
gcaggtggatatctgaggtcag

SEQ ID NO: 138220 - RNA, 22 nt, synthetic construct
  source 1..22: mol_type = other RNA
gcaggtggatcaggagattgag

SEQ ID NO: 138221 - RNA, 22 nt, synthetic construct
  source 1..22: mol_type = other RNA
gcaggtgtgggccaccaagccc

SEQ ID NO: 138222 - RNA, 22 nt, synthetic construct
  source 1..22: mol_type = other RNA
gcaggtgttggtgcatttggga

SEQ ID NO: 138223 - RNA, 22 nt, synthetic construct
  source 1..22: mol_type = other RNA
gcaggttcatgtgtgcttacac

SEQ ID NO: 138224 - RNA, 22 nt, synthetic construct
  source 1..22: mol_type = other RNA
gcaggttcattttaataagctt

SEQ ID NO: 138225 - RNA, 22 nt, synthetic construct
  source 1..22: mol_type = other RNA
gcaggttgatactagtttagtg

SEQ ID NO: 138226 - RNA, 22 nt, synthetic construct
  source 1..22: mol_type = other RNA
gcaggttgcattaatgcttcat

SEQ ID NO: 138227 - RNA, 22 nt, synthetic construct
  source 1..22: mol_type = other RNA
gcaggtttactccaagaaggct

SEQ ID NO: 138228 - RNA, 22 nt, synthetic construct
  source 1..22: mol_type = other RNA
gcaggtttaggaagcacattcc

SEQ ID NO: 138229 - RNA, 22 nt, synthetic construct
  source 1..22: mol_type = other RNA
gcaggtttcaagtgaaccaaaa

SEQ ID NO: 138230 - RNA, 22 nt, synthetic construct
  source 1..22: mol_type = other RNA
gcagtaaaatgaaaaaacctat

SEQ ID NO: 138231 - RNA, 22 nt, synthetic construct
  source 1..22: mol_type = other RNA
gcagtaaatatactgactagtg

SEQ ID NO: 138232 - RNA, 22 nt, synthetic construct
  source 1..22: mol_type = other RNA
gcagtaaatgcctacattaaaa

SEQ ID NO: 138233 - RNA, 22 nt, synthetic construct
  source 1..22: mol_type = other RNA
gcagtaccattccccttgccaa

SEQ ID NO: 138234 - RNA, 22 nt, synthetic construct
  source 1..22: mol_type = other RNA
gcagtacttgtctttttgtgac

SEQ ID NO: 138235 - RNA, 22 nt, synthetic construct
  source 1..22: mol_type = other RNA
gcagtagctcatcatttatacc

SEQ ID NO: 138236 - RNA, 22 nt, synthetic construct
  source 1..22: mol_type = other RNA
gcagtaggcttagataggatgg

SEQ ID NO: 138237 - RNA, 22 nt, synthetic construct
  source 1..22: mol_type = other RNA
gcagtagtaaagcaaatgtgac

SEQ ID NO: 138238 - RNA, 22 nt, synthetic construct
  source 1..22: mol_type = other RNA
gcagtagtattgaactgttact

SEQ ID NO: 138239 - RNA, 22 nt, synthetic construct
  source 1..22: mol_type = other RNA
gcagtatcttgaagaaaccaag

SEQ ID NO: 138240 - RNA, 22 nt, synthetic construct
  source 1..22: mol_type = other RNA
gcagtatgcatagatcacaagg

SEQ ID NO: 138241 - RNA, 22 nt, synthetic construct
  source 1..22: mol_type = other RNA
gcagtatgtaggaaactttgca

SEQ ID NO: 138242 - RNA, 22 nt, synthetic construct
  source 1..22: mol_type = other RNA
gcagtatgtgccatttttataa

SEQ ID NO: 138243 - RNA, 22 nt, synthetic construct
  source 1..22: mol_type = other RNA
gcagtattgttaactgtagaga

SEQ ID NO: 138244 - RNA, 22 nt, synthetic construct
  source 1..22: mol_type = other RNA
gcagtccccggtctttcctgat

SEQ ID NO: 138245 - RNA, 22 nt, synthetic construct
  source 1..22: mol_type = other RNA
gcagtcctctactttcacataa

SEQ ID NO: 138246 - RNA, 22 nt, synthetic construct
  source 1..22: mol_type = other RNA
gcagtcctctcactccaaagca

SEQ ID NO: 138247 - RNA, 22 nt, synthetic construct
  source 1..22: mol_type = other RNA
gcagtcctgccttggcctcccc

SEQ ID NO: 138248 - RNA, 22 nt, synthetic construct
  source 1..22: mol_type = other RNA
gcagtctaaccattaacagctc

SEQ ID NO: 138249 - RNA, 22 nt, synthetic construct
  source 1..22: mol_type = other RNA
gcagtctaggaaaagacttgag

SEQ ID NO: 138250 - RNA, 22 nt, synthetic construct
  source 1..22: mol_type = other RNA
gcagtctagtccatgaagaaaa

SEQ ID NO: 138251 - RNA, 22 nt, synthetic construct
  source 1..22: mol_type = other RNA
gcagtctcaaactcctgcactc

SEQ ID NO: 138252 - RNA, 22 nt, synthetic construct
  source 1..22: mol_type = other RNA
gcagtctctgctcactgcaacc

SEQ ID NO: 138253 - RNA, 22 nt, synthetic construct
  source 1..22: mol_type = other RNA
gcagtctgcaggcagaatgtga

SEQ ID NO: 138254 - RNA, 22 nt, synthetic construct
  source 1..22: mol_type = other RNA
gcagtctgtcctcgtaaaagct

SEQ ID NO: 138255 - RNA, 22 nt, synthetic construct
  source 1..22: mol_type = other RNA
gcagtcttaaccattgagccaa

SEQ ID NO: 138256 - RNA, 22 nt, synthetic construct
  source 1..22: mol_type = other RNA
gcagtgaaagtctccctaacca

SEQ ID NO: 138257 - RNA, 22 nt, synthetic construct
  source 1..22: mol_type = other RNA
gcagtgaacatgggaatgcata

SEQ ID NO: 138258 - RNA, 22 nt, synthetic construct
  source 1..22: mol_type = other RNA
gcagtgagcccagagatcccac

SEQ ID NO: 138259 - RNA, 22 nt, synthetic construct
  source 1..22: mol_type = other RNA
gcagtgctgaaagctagaagac

SEQ ID NO: 138260 - RNA, 22 nt, synthetic construct
  source 1..22: mol_type = other RNA
gcagtgcttagcgctggaggtc

SEQ ID NO: 138261 - RNA, 22 nt, synthetic construct
  source 1..22: mol_type = other RNA
gcagtggatgactaggctcctg

SEQ ID NO: 138262 - RNA, 22 nt, synthetic construct
  source 1..22: mol_type = other RNA
gcagtggcgcagccatggctca

SEQ ID NO: 138263 - RNA, 22 nt, synthetic construct
  source 1..22: mol_type = other RNA
gcagtggcgtgtgcccaggctg

SEQ ID NO: 138264 - RNA, 22 nt, synthetic construct
  source 1..22: mol_type = other RNA
gcagtggcttcctaactggtct

SEQ ID NO: 138265 - RNA, 22 nt, synthetic construct
  source 1..22: mol_type = other RNA
gcagtgggaagtggagtgcgag

SEQ ID NO: 138266 - RNA, 22 nt, synthetic construct
  source 1..22: mol_type = other RNA
gcagtggtgtggtcttgtctca

SEQ ID NO: 138267 - RNA, 22 nt, synthetic construct
  source 1..22: mol_type = other RNA
gcagtgtccatctcccatcact

SEQ ID NO: 138268 - RNA, 22 nt, synthetic construct
  source 1..22: mol_type = other RNA
gcagtgtgaataggaaagtgac

SEQ ID NO: 138269 - RNA, 22 nt, synthetic construct
  source 1..22: mol_type = other RNA
gcagtgtgttctgccttgaggt

SEQ ID NO: 138270 - RNA, 22 nt, synthetic construct
  source 1..22: mol_type = other RNA
gcagtgtttcctagattccctc

SEQ ID NO: 138271 - RNA, 22 nt, synthetic construct
  source 1..22: mol_type = other RNA
gcagttactcctgagcaaggaa

SEQ ID NO: 138272 - RNA, 22 nt, synthetic construct
  source 1..22: mol_type = other RNA
gcagttagcatgcctgacaaag

SEQ ID NO: 138273 - RNA, 22 nt, synthetic construct
  source 1..22: mol_type = other RNA
gcagttattaagagtgtgctga

SEQ ID NO: 138274 - RNA, 22 nt, synthetic construct
  source 1..22: mol_type = other RNA
gcagttcaagcaccacttcgag

SEQ ID NO: 138275 - RNA, 22 nt, synthetic construct
  source 1..22: mol_type = other RNA
gcagttcagcctgcagaaggag

SEQ ID NO: 138276 - RNA, 22 nt, synthetic construct
  source 1..22: mol_type = other RNA
gcagttctgtacccttacgcgt

SEQ ID NO: 138277 - RNA, 22 nt, synthetic construct
  source 1..22: mol_type = other RNA
gcagttgagttttcaacctttg

SEQ ID NO: 138278 - RNA, 22 nt, synthetic construct
  source 1..22: mol_type = other RNA
gcagttgatgcaatttgttttc

SEQ ID NO: 138279 - RNA, 22 nt, synthetic construct
  source 1..22: mol_type = other RNA
gcagttgcttactctaatgggg

SEQ ID NO: 138280 - RNA, 22 nt, synthetic construct
  source 1..22: mol_type = other RNA
gcagttggattatatgttctaa

SEQ ID NO: 138281 - RNA, 22 nt, synthetic construct
  source 1..22: mol_type = other RNA
gcagttggggactcttatggct

SEQ ID NO: 138282 - RNA, 22 nt, synthetic construct
  source 1..22: mol_type = other RNA
gcagttgtatgccaaaaaattg

SEQ ID NO: 138283 - RNA, 22 nt, synthetic construct
  source 1..22: mol_type = other RNA
gcagtttcacttcttagtaaat

SEQ ID NO: 138284 - RNA, 22 nt, synthetic construct
  source 1..22: mol_type = other RNA
gcagtttgtgttttcactctca

SEQ ID NO: 138285 - RNA, 22 nt, synthetic construct
  source 1..22: mol_type = other RNA
gcagtttgttctgctgttgatg

SEQ ID NO: 138286 - RNA, 22 nt, synthetic construct
  source 1..22: mol_type = other RNA
gcagttttaaagaattcgttaa

SEQ ID NO: 138287 - RNA, 22 nt, synthetic construct
  source 1..22: mol_type = other RNA
gcagtttttccactaatgtcct

SEQ ID NO: 138288 - RNA, 22 nt, synthetic construct
  source 1..22: mol_type = other RNA
gcataaaaaagatcaaatgact

SEQ ID NO: 138289 - RNA, 22 nt, synthetic construct
  source 1..22: mol_type = other RNA
gcataaaaatatatacggaatg

SEQ ID NO: 138290 - RNA, 22 nt, synthetic construct
  source 1..22: mol_type = other RNA
gcataaacgacagcaggaaaag

SEQ ID NO: 138291 - RNA, 22 nt, synthetic construct
  source 1..22: mol_type = other RNA
gcataaagacagacatttggaa

SEQ ID NO: 138292 - RNA, 22 nt, synthetic construct
  source 1..22: mol_type = other RNA
gcataacatctatgaagtaatt

SEQ ID NO: 138293 - RNA, 22 nt, synthetic construct
  source 1..22: mol_type = other RNA
gcataaccaaattatttcagtt

SEQ ID NO: 138294 - RNA, 22 nt, synthetic construct
  source 1..22: mol_type = other RNA
gcataactcgtaatgcgatgat

SEQ ID NO: 138295 - RNA, 22 nt, synthetic construct
  source 1..22: mol_type = other RNA
gcataagacccctcaggtgtca

SEQ ID NO: 138296 - RNA, 22 nt, synthetic construct
  source 1..22: mol_type = other RNA
gcataagccaccgcactcagcc

SEQ ID NO: 138297 - RNA, 22 nt, synthetic construct
  source 1..22: mol_type = other RNA
gcataagttctagagatttgct

SEQ ID NO: 138298 - RNA, 22 nt, synthetic construct
  source 1..22: mol_type = other RNA
gcataattcgaaataatcattg

SEQ ID NO: 138299 - RNA, 22 nt, synthetic construct
  source 1..22: mol_type = other RNA
gcataattggttaaacttggtc

SEQ ID NO: 138300 - RNA, 22 nt, synthetic construct
  source 1..22: mol_type = other RNA
gcatacaactgctcataatagt

SEQ ID NO: 138301 - RNA, 22 nt, synthetic construct
  source 1..22: mol_type = other RNA
gcatacactcatttcctttcag

SEQ ID NO: 138302 - RNA, 22 nt, synthetic construct
  source 1..22: mol_type = other RNA
gcatacaggagttccgatttct

SEQ ID NO: 138303 - RNA, 22 nt, synthetic construct
  source 1..22: mol_type = other RNA
gcataccaagcccggcacggtg

SEQ ID NO: 138304 - RNA, 22 nt, synthetic construct
  source 1..22: mol_type = other RNA
gcataccaccacattcggccaa

SEQ ID NO: 138305 - RNA, 22 nt, synthetic construct
  source 1..22: mol_type = other RNA
gcatacgtcgtcccccatcccc

SEQ ID NO: 138306 - RNA, 22 nt, synthetic construct
  source 1..22: mol_type = other RNA
gcatactgcagcacttttaagg

SEQ ID NO: 138307 - RNA, 22 nt, synthetic construct
  source 1..22: mol_type = other RNA
gcatactgtgatgattttagaa

SEQ ID NO: 138308 - RNA, 22 nt, synthetic construct
  source 1..22: mol_type = other RNA
gcatactgtgcagtggatgact

SEQ ID NO: 138309 - RNA, 22 nt, synthetic construct
  source 1..22: mol_type = other RNA
gcatactgtggatatcttttaa

SEQ ID NO: 138310 - RNA, 22 nt, synthetic construct
  source 1..22: mol_type = other RNA
gcatacttagctaatttcagag

SEQ ID NO: 138311 - RNA, 22 nt, synthetic construct
  source 1..22: mol_type = other RNA
gcatactttggaaggtaggagg

SEQ ID NO: 138312 - RNA, 22 nt, synthetic construct
  source 1..22: mol_type = other RNA
gcatagactttagagtcagttg

SEQ ID NO: 138313 - RNA, 22 nt, synthetic construct
  source 1..22: mol_type = other RNA
gcatagagatcttgtgtatctt

SEQ ID NO: 138314 - RNA, 22 nt, synthetic construct
  source 1..22: mol_type = other RNA
gcatagatcacaaggactggct

SEQ ID NO: 138315 - RNA, 22 nt, synthetic construct
  source 1..22: mol_type = other RNA
gcatagcagaaccttagaaatt

SEQ ID NO: 138316 - RNA, 22 nt, synthetic construct
  source 1..22: mol_type = other RNA
gcatagcagggtcatgcacacg

SEQ ID NO: 138317 - RNA, 22 nt, synthetic construct
  source 1..22: mol_type = other RNA
gcatagcttgaaccagggaggc

SEQ ID NO: 138318 - RNA, 22 nt, synthetic construct
  source 1..22: mol_type = other RNA
gcatagggatgttgcctactag

SEQ ID NO: 138319 - RNA, 22 nt, synthetic construct
  source 1..22: mol_type = other RNA
gcatagggccttctactttaat

SEQ ID NO: 138320 - RNA, 22 nt, synthetic construct
  source 1..22: mol_type = other RNA
gcatagtactccattatatgaa

SEQ ID NO: 138321 - RNA, 22 nt, synthetic construct
  source 1..22: mol_type = other RNA
gcatagtattccatggtatgtg

SEQ ID NO: 138322 - RNA, 22 nt, synthetic construct
  source 1..22: mol_type = other RNA
gcatagtttgagtatttcatgt

SEQ ID NO: 138323 - RNA, 22 nt, synthetic construct
  source 1..22: mol_type = other RNA
gcatataaactggaaggaaata

SEQ ID NO: 138324 - RNA, 22 nt, synthetic construct
  source 1..22: mol_type = other RNA
gcatataataagcagaattcaa

SEQ ID NO: 138325 - RNA, 22 nt, synthetic construct
  source 1..22: mol_type = other RNA
gcatatacatgacatggttttc

SEQ ID NO: 138326 - RNA, 22 nt, synthetic construct
  source 1..22: mol_type = other RNA
gcatatataccacattttgttc

SEQ ID NO: 138327 - RNA, 22 nt, synthetic construct
  source 1..22: mol_type = other RNA
gcatatatactctgagacagga

SEQ ID NO: 138328 - RNA, 22 nt, synthetic construct
  source 1..22: mol_type = other RNA
gcatatatctgtctgggataat

SEQ ID NO: 138329 - RNA, 22 nt, synthetic construct
  source 1..22: mol_type = other RNA
gcatatcacattaacagaatga

SEQ ID NO: 138330 - RNA, 22 nt, synthetic construct
  source 1..22: mol_type = other RNA
gcatatgaatctagaaagataa

SEQ ID NO: 138331 - RNA, 22 nt, synthetic construct
  source 1..22: mol_type = other RNA
gcatatgtcactgtaagaataa

SEQ ID NO: 138332 - RNA, 22 nt, synthetic construct
  source 1..22: mol_type = other RNA
gcatatgtttgtaacttgttca

SEQ ID NO: 138333 - RNA, 22 nt, synthetic construct
  source 1..22: mol_type = other RNA
gcatatgtttttattagcagaa

SEQ ID NO: 138334 - RNA, 22 nt, synthetic construct
  source 1..22: mol_type = other RNA
gcatattagctgtctggattga

SEQ ID NO: 138335 - RNA, 22 nt, synthetic construct
  source 1..22: mol_type = other RNA
gcatattgaagccagcacctaa

SEQ ID NO: 138336 - RNA, 22 nt, synthetic construct
  source 1..22: mol_type = other RNA
gcatcaaagctaccctttcttg

SEQ ID NO: 138337 - RNA, 22 nt, synthetic construct
  source 1..22: mol_type = other RNA
gcatcaaaggacactattgaga

SEQ ID NO: 138338 - RNA, 22 nt, synthetic construct
  source 1..22: mol_type = other RNA
gcatcaactgcttccctagccc

SEQ ID NO: 138339 - RNA, 22 nt, synthetic construct
  source 1..22: mol_type = other RNA
gcatcaccatcatcatcaggct

SEQ ID NO: 138340 - RNA, 22 nt, synthetic construct
  source 1..22: mol_type = other RNA
gcatcacttgaggtgattaaag

SEQ ID NO: 138341 - RNA, 22 nt, synthetic construct
  source 1..22: mol_type = other RNA
gcatcagaattccattcctttt

SEQ ID NO: 138342 - RNA, 22 nt, synthetic construct
  source 1..22: mol_type = other RNA
gcatcagagctttgttatgaaa

SEQ ID NO: 138343 - RNA, 22 nt, synthetic construct
  source 1..22: mol_type = other RNA
gcatcatactggaaggactcac

SEQ ID NO: 138344 - RNA, 22 nt, synthetic construct
  source 1..22: mol_type = other RNA
gcatcatggtgggccttgcaag

SEQ ID NO: 138345 - RNA, 22 nt, synthetic construct
  source 1..22: mol_type = other RNA
gcatcattcaaatgatattcac

SEQ ID NO: 138346 - RNA, 22 nt, synthetic construct
  source 1..22: mol_type = other RNA
gcatcattcataaacacagaac

SEQ ID NO: 138347 - RNA, 22 nt, synthetic construct
  source 1..22: mol_type = other RNA
gcatccaaaagggaaatatgaa

SEQ ID NO: 138348 - RNA, 22 nt, synthetic construct
  source 1..22: mol_type = other RNA
gcatccacattttgtgacaagt

SEQ ID NO: 138349 - RNA, 22 nt, synthetic construct
  source 1..22: mol_type = other RNA
gcatccactaggggactaacag

SEQ ID NO: 138350 - RNA, 22 nt, synthetic construct
  source 1..22: mol_type = other RNA
gcatcccaagggttttggtatg

SEQ ID NO: 138351 - RNA, 22 nt, synthetic construct
  source 1..22: mol_type = other RNA
gcatcccagaggtactcaacga

SEQ ID NO: 138352 - RNA, 22 nt, synthetic construct
  source 1..22: mol_type = other RNA
gcatcccatatggaggcaatgt

SEQ ID NO: 138353 - RNA, 22 nt, synthetic construct
  source 1..22: mol_type = other RNA
gcatccccagaaagagagaggg

SEQ ID NO: 138354 - RNA, 22 nt, synthetic construct
  source 1..22: mol_type = other RNA
gcatccccattcaattgtcctg

SEQ ID NO: 138355 - RNA, 22 nt, synthetic construct
  source 1..22: mol_type = other RNA
gcatccccgctgcgagaaaggc

SEQ ID NO: 138356 - RNA, 22 nt, synthetic construct
  source 1..22: mol_type = other RNA
gcatccctccagtccagcacca

SEQ ID NO: 138357 - RNA, 22 nt, synthetic construct
  source 1..22: mol_type = other RNA
gcatccctcctctggccctcca

SEQ ID NO: 138358 - RNA, 22 nt, synthetic construct
  source 1..22: mol_type = other RNA
gcatccctgccgcgcgcgaagg

SEQ ID NO: 138359 - RNA, 22 nt, synthetic construct
  source 1..22: mol_type = other RNA
gcatccgccaccacgcctggct

SEQ ID NO: 138360 - RNA, 22 nt, synthetic construct
  source 1..22: mol_type = other RNA
gcatcctttataccttttaatg

SEQ ID NO: 138361 - RNA, 22 nt, synthetic construct
  source 1..22: mol_type = other RNA
gcatcggggcctacagtggttc

SEQ ID NO: 138362 - RNA, 22 nt, synthetic construct
  source 1..22: mol_type = other RNA
gcatcgtgaagtctttattttt

SEQ ID NO: 138363 - RNA, 22 nt, synthetic construct
  source 1..22: mol_type = other RNA
gcatcgtttcaatattaagagt

SEQ ID NO: 138364 - RNA, 22 nt, synthetic construct
  source 1..22: mol_type = other RNA
gcatctagcacagaaccatgta

SEQ ID NO: 138365 - RNA, 22 nt, synthetic construct
  source 1..22: mol_type = other RNA
gcatctagttaccactagcaaa

SEQ ID NO: 138366 - RNA, 22 nt, synthetic construct
  source 1..22: mol_type = other RNA
gcatctatttccccattagagt

SEQ ID NO: 138367 - RNA, 22 nt, synthetic construct
  source 1..22: mol_type = other RNA
gcatctctcccttcctgttctt

SEQ ID NO: 138368 - RNA, 22 nt, synthetic construct
  source 1..22: mol_type = other RNA
gcatctctctaaaaacatccat

SEQ ID NO: 138369 - RNA, 22 nt, synthetic construct
  source 1..22: mol_type = other RNA
gcatctgatacacttctatcca

SEQ ID NO: 138370 - RNA, 22 nt, synthetic construct
  source 1..22: mol_type = other RNA
gcatctggtctatctcattata

SEQ ID NO: 138371 - RNA, 22 nt, synthetic construct
  source 1..22: mol_type = other RNA
gcatcttagctcttcccttaac

SEQ ID NO: 138372 - RNA, 22 nt, synthetic construct
  source 1..22: mol_type = other RNA
gcatcttcactgactacacata

SEQ ID NO: 138373 - RNA, 22 nt, synthetic construct
  source 1..22: mol_type = other RNA
gcatcttcccatgaacatggtt

SEQ ID NO: 138374 - RNA, 22 nt, synthetic construct
  source 1..22: mol_type = other RNA
gcatcttcttttacttgcttgg

SEQ ID NO: 138375 - RNA, 22 nt, synthetic construct
  source 1..22: mol_type = other RNA
gcatcttgaactaagtgtgaag

SEQ ID NO: 138376 - RNA, 22 nt, synthetic construct
  source 1..22: mol_type = other RNA
gcatcttgcaaaacggaaactt

SEQ ID NO: 138377 - RNA, 22 nt, synthetic construct
  source 1..22: mol_type = other RNA
gcatctttaagattttttgttg

SEQ ID NO: 138378 - RNA, 22 nt, synthetic construct
  source 1..22: mol_type = other RNA
gcatctttgttacagcagctct

SEQ ID NO: 138379 - RNA, 22 nt, synthetic construct
  source 1..22: mol_type = other RNA
gcatcttttgacgcgcaacaat

SEQ ID NO: 138380 - RNA, 22 nt, synthetic construct
  source 1..22: mol_type = other RNA
gcatcttttgagggtatcatat

SEQ ID NO: 138381 - RNA, 22 nt, synthetic construct
  source 1..22: mol_type = other RNA
gcatgaaaacagctaggtgagt

SEQ ID NO: 138382 - RNA, 22 nt, synthetic construct
  source 1..22: mol_type = other RNA
gcatgaaatgggtttaaaagag

SEQ ID NO: 138383 - RNA, 22 nt, synthetic construct
  source 1..22: mol_type = other RNA
gcatgaaattcttgggtgaata

SEQ ID NO: 138384 - RNA, 22 nt, synthetic construct
  source 1..22: mol_type = other RNA
gcatgaacccaccaggaggcgg

SEQ ID NO: 138385 - RNA, 22 nt, synthetic construct
  source 1..22: mol_type = other RNA
gcatgaagccctctaagtcagc

SEQ ID NO: 138386 - RNA, 22 nt, synthetic construct
  source 1..22: mol_type = other RNA
gcatgaatacctatttagaggg

SEQ ID NO: 138387 - RNA, 22 nt, synthetic construct
  source 1..22: mol_type = other RNA
gcatgaccctgctatgcatact

SEQ ID NO: 138388 - RNA, 22 nt, synthetic construct
  source 1..22: mol_type = other RNA
gcatgagacttggagtttgaga

SEQ ID NO: 138389 - RNA, 22 nt, synthetic construct
  source 1..22: mol_type = other RNA
gcatgagatactacgcctagct

SEQ ID NO: 138390 - RNA, 22 nt, synthetic construct
  source 1..22: mol_type = other RNA
gcatgagccacagggcccagcc

SEQ ID NO: 138391 - RNA, 22 nt, synthetic construct
  source 1..22: mol_type = other RNA
gcatgagccactgcgggcccag

SEQ ID NO: 138392 - RNA, 22 nt, synthetic construct
  source 1..22: mol_type = other RNA
gcatgaggcatattattgtaac

SEQ ID NO: 138393 - RNA, 22 nt, synthetic construct
  source 1..22: mol_type = other RNA
gcatgagtatctggtgttgctt

SEQ ID NO: 138394 - RNA, 22 nt, synthetic construct
  source 1..22: mol_type = other RNA
gcatgagtcgccatacctggtc

SEQ ID NO: 138395 - RNA, 22 nt, synthetic construct
  source 1..22: mol_type = other RNA
gcatgatctcacgtcaccgcaa

SEQ ID NO: 138396 - RNA, 22 nt, synthetic construct
  source 1..22: mol_type = other RNA
gcatgatggctcaacgcctgtg

SEQ ID NO: 138397 - RNA, 22 nt, synthetic construct
  source 1..22: mol_type = other RNA
gcatgattccccttatatggga

SEQ ID NO: 138398 - RNA, 22 nt, synthetic construct
  source 1..22: mol_type = other RNA
gcatgatttataatccattggg

SEQ ID NO: 138399 - RNA, 22 nt, synthetic construct
  source 1..22: mol_type = other RNA
gcatgcacacagagggagcgcc

SEQ ID NO: 138400 - RNA, 22 nt, synthetic construct
  source 1..22: mol_type = other RNA
gcatgcacacaggagaacttgt

SEQ ID NO: 138401 - RNA, 22 nt, synthetic construct
  source 1..22: mol_type = other RNA
gcatgcacggacttggcacagg

SEQ ID NO: 138402 - RNA, 22 nt, synthetic construct
  source 1..22: mol_type = other RNA
gcatgcagtagctcatcattta

SEQ ID NO: 138403 - RNA, 22 nt, synthetic construct
  source 1..22: mol_type = other RNA
gcatgcatgtctgtctgttcac

SEQ ID NO: 138404 - RNA, 22 nt, synthetic construct
  source 1..22: mol_type = other RNA
gcatgccgggacaagagtctgc

SEQ ID NO: 138405 - RNA, 22 nt, synthetic construct
  source 1..22: mol_type = other RNA
gcatgcctctcccaccatctct

SEQ ID NO: 138406 - RNA, 22 nt, synthetic construct
  source 1..22: mol_type = other RNA
gcatgcctctgttacagctctt

SEQ ID NO: 138407 - RNA, 22 nt, synthetic construct
  source 1..22: mol_type = other RNA
gcatgcctgacaaagtatgaga

SEQ ID NO: 138408 - RNA, 22 nt, synthetic construct
  source 1..22: mol_type = other RNA
gcatgcgccatcacacccagta

SEQ ID NO: 138409 - RNA, 22 nt, synthetic construct
  source 1..22: mol_type = other RNA
gcatgctaactgcagaggtcag

SEQ ID NO: 138410 - RNA, 22 nt, synthetic construct
  source 1..22: mol_type = other RNA
gcatgctaggggctgttcccag

SEQ ID NO: 138411 - RNA, 22 nt, synthetic construct
  source 1..22: mol_type = other RNA
gcatgctcactgtctccatgtc

SEQ ID NO: 138412 - RNA, 22 nt, synthetic construct
  source 1..22: mol_type = other RNA
gcatgctcccatttgggactga

SEQ ID NO: 138413 - RNA, 22 nt, synthetic construct
  source 1..22: mol_type = other RNA
gcatgctgcaactgagaagagc

SEQ ID NO: 138414 - RNA, 22 nt, synthetic construct
  source 1..22: mol_type = other RNA
gcatgggaggtaatactataag

SEQ ID NO: 138415 - RNA, 22 nt, synthetic construct
  source 1..22: mol_type = other RNA
gcatggggagttttaggaaaat

SEQ ID NO: 138416 - RNA, 22 nt, synthetic construct
  source 1..22: mol_type = other RNA
gcatgggggcgcgtgcctatgg

SEQ ID NO: 138417 - RNA, 22 nt, synthetic construct
  source 1..22: mol_type = other RNA
gcatgggtccaagacaggaaga

SEQ ID NO: 138418 - RNA, 22 nt, synthetic construct
  source 1..22: mol_type = other RNA
gcatggtggtaggtgtgtgtaa

SEQ ID NO: 138419 - RNA, 22 nt, synthetic construct
  source 1..22: mol_type = other RNA
gcatggtgtaaaatacaacagc

SEQ ID NO: 138420 - RNA, 22 nt, synthetic construct
  source 1..22: mol_type = other RNA
gcatgtaacttgcttaggctga

SEQ ID NO: 138421 - RNA, 22 nt, synthetic construct
  source 1..22: mol_type = other RNA
gcatgtcccctggagttaattc

SEQ ID NO: 138422 - RNA, 22 nt, synthetic construct
  source 1..22: mol_type = other RNA
gcatgtctgcaggagccttgct

SEQ ID NO: 138423 - RNA, 22 nt, synthetic construct
  source 1..22: mol_type = other RNA
gcatgtctgtagttacaactac

SEQ ID NO: 138424 - RNA, 22 nt, synthetic construct
  source 1..22: mol_type = other RNA
gcatgtctgtctgttcacattt

SEQ ID NO: 138425 - RNA, 22 nt, synthetic construct
  source 1..22: mol_type = other RNA
gcatgtcttcagaggccctggt

SEQ ID NO: 138426 - RNA, 22 nt, synthetic construct
  source 1..22: mol_type = other RNA
gcatgtgcaggaaacttccaga

SEQ ID NO: 138427 - RNA, 22 nt, synthetic construct
  source 1..22: mol_type = other RNA
gcatgtggccaggaggaggagg

SEQ ID NO: 138428 - RNA, 22 nt, synthetic construct
  source 1..22: mol_type = other RNA
gcatgtgttgtgcacacatcca

SEQ ID NO: 138429 - RNA, 22 nt, synthetic construct
  source 1..22: mol_type = other RNA
gcatgttatttggggattctgc

SEQ ID NO: 138430 - RNA, 22 nt, synthetic construct
  source 1..22: mol_type = other RNA
gcatgttgctttgcgaaatagt

SEQ ID NO: 138431 - RNA, 22 nt, synthetic construct
  source 1..22: mol_type = other RNA
gcatgttggatagtttctcaac

SEQ ID NO: 138432 - RNA, 22 nt, synthetic construct
  source 1..22: mol_type = other RNA
gcatgttgggccaacttccagc

SEQ ID NO: 138433 - RNA, 22 nt, synthetic construct
  source 1..22: mol_type = other RNA
gcattaagccagtcactaaaaa

SEQ ID NO: 138434 - RNA, 22 nt, synthetic construct
  source 1..22: mol_type = other RNA
gcattaaggacatccacaacat

SEQ ID NO: 138435 - RNA, 22 nt, synthetic construct
  source 1..22: mol_type = other RNA
gcattaatgcaacctgctttcc

SEQ ID NO: 138436 - RNA, 22 nt, synthetic construct
  source 1..22: mol_type = other RNA
gcattaatgcttcatattttgt

SEQ ID NO: 138437 - RNA, 22 nt, synthetic construct
  source 1..22: mol_type = other RNA
gcattaattgagagctttcttt

SEQ ID NO: 138438 - RNA, 22 nt, synthetic construct
  source 1..22: mol_type = other RNA
gcattacatgaatggaaaattc

SEQ ID NO: 138439 - RNA, 22 nt, synthetic construct
  source 1..22: mol_type = other RNA
gcattaccctaataacaaaata

SEQ ID NO: 138440 - RNA, 22 nt, synthetic construct
  source 1..22: mol_type = other RNA
gcattacgagttatgcaagatg

SEQ ID NO: 138441 - RNA, 22 nt, synthetic construct
  source 1..22: mol_type = other RNA
gcattacttaggcagttattaa

SEQ ID NO: 138442 - RNA, 22 nt, synthetic construct
  source 1..22: mol_type = other RNA
gcattagagccccaagaaagca

SEQ ID NO: 138443 - RNA, 22 nt, synthetic construct
  source 1..22: mol_type = other RNA
gcattagtgaattcacagtaga

SEQ ID NO: 138444 - RNA, 22 nt, synthetic construct
  source 1..22: mol_type = other RNA
gcattatcccagatctaacaaa

SEQ ID NO: 138445 - RNA, 22 nt, synthetic construct
  source 1..22: mol_type = other RNA
gcattatccctttaaaatgata

SEQ ID NO: 138446 - RNA, 22 nt, synthetic construct
  source 1..22: mol_type = other RNA
gcattatcttaataacctcaaa

SEQ ID NO: 138447 - RNA, 22 nt, synthetic construct
  source 1..22: mol_type = other RNA
gcattcatactgaaggcatagg

SEQ ID NO: 138448 - RNA, 22 nt, synthetic construct
  source 1..22: mol_type = other RNA
gcattcatccaggcaaaagatg

SEQ ID NO: 138449 - RNA, 22 nt, synthetic construct
  source 1..22: mol_type = other RNA
gcattccagagggtaacgtgag

SEQ ID NO: 138450 - RNA, 22 nt, synthetic construct
  source 1..22: mol_type = other RNA
gcattccagattgaaatctagg

SEQ ID NO: 138451 - RNA, 22 nt, synthetic construct
  source 1..22: mol_type = other RNA
gcattcccatgttcactgcaga

SEQ ID NO: 138452 - RNA, 22 nt, synthetic construct
  source 1..22: mol_type = other RNA
gcattccccacataggatagtt

SEQ ID NO: 138453 - RNA, 22 nt, synthetic construct
  source 1..22: mol_type = other RNA
gcattccctgtctgggaagtta

SEQ ID NO: 138454 - RNA, 22 nt, synthetic construct
  source 1..22: mol_type = other RNA
gcattccgcctgggcgacagag

SEQ ID NO: 138455 - RNA, 22 nt, synthetic construct
  source 1..22: mol_type = other RNA
gcattccgtggaaggccttctc

SEQ ID NO: 138456 - RNA, 22 nt, synthetic construct
  source 1..22: mol_type = other RNA
gcattcctgaaatgaaccaaac

SEQ ID NO: 138457 - RNA, 22 nt, synthetic construct
  source 1..22: mol_type = other RNA
gcattcgtccctaaacactgta

SEQ ID NO: 138458 - RNA, 22 nt, synthetic construct
  source 1..22: mol_type = other RNA
gcattctagaaaggagggactg

SEQ ID NO: 138459 - RNA, 22 nt, synthetic construct
  source 1..22: mol_type = other RNA
gcattctgtcacatagacctga

SEQ ID NO: 138460 - RNA, 22 nt, synthetic construct
  source 1..22: mol_type = other RNA
gcattgaagtatagtttgaagt

SEQ ID NO: 138461 - RNA, 22 nt, synthetic construct
  source 1..22: mol_type = other RNA
gcattgactaccaattctccct

SEQ ID NO: 138462 - RNA, 22 nt, synthetic construct
  source 1..22: mol_type = other RNA
gcattgcattgactaccaattc

SEQ ID NO: 138463 - RNA, 22 nt, synthetic construct
  source 1..22: mol_type = other RNA
gcattgcatttacttgtcattt

SEQ ID NO: 138464 - RNA, 22 nt, synthetic construct
  source 1..22: mol_type = other RNA
gcattgcctttattactattat

SEQ ID NO: 138465 - RNA, 22 nt, synthetic construct
  source 1..22: mol_type = other RNA
gcattgctaattcattgtacat

SEQ ID NO: 138466 - RNA, 22 nt, synthetic construct
  source 1..22: mol_type = other RNA
gcattgggagctttcattatta

SEQ ID NO: 138467 - RNA, 22 nt, synthetic construct
  source 1..22: mol_type = other RNA
gcattgtcccgggggagggcgg

SEQ ID NO: 138468 - RNA, 22 nt, synthetic construct
  source 1..22: mol_type = other RNA
gcattgtgatgtctcagatgtc

SEQ ID NO: 138469 - RNA, 22 nt, synthetic construct
  source 1..22: mol_type = other RNA
gcattgtgcacttaaaatttag

SEQ ID NO: 138470 - RNA, 22 nt, synthetic construct
  source 1..22: mol_type = other RNA
gcattgtgctcagtggttctgc

SEQ ID NO: 138471 - RNA, 22 nt, synthetic construct
  source 1..22: mol_type = other RNA
gcattgtttacagtagccaaag

SEQ ID NO: 138472 - RNA, 22 nt, synthetic construct
  source 1..22: mol_type = other RNA
gcatttaaaagaacctctggaa

SEQ ID NO: 138473 - RNA, 22 nt, synthetic construct
  source 1..22: mol_type = other RNA
gcatttactgctataaacttcc

SEQ ID NO: 138474 - RNA, 22 nt, synthetic construct
  source 1..22: mol_type = other RNA
gcatttacttgtcatttctgct

SEQ ID NO: 138475 - RNA, 22 nt, synthetic construct
  source 1..22: mol_type = other RNA
gcatttagccccctgaataccc

SEQ ID NO: 138476 - RNA, 22 nt, synthetic construct
  source 1..22: mol_type = other RNA
gcatttattagtagttaggtgg

SEQ ID NO: 138477 - RNA, 22 nt, synthetic construct
  source 1..22: mol_type = other RNA
gcatttcagccaaagctggcat

SEQ ID NO: 138478 - RNA, 22 nt, synthetic construct
  source 1..22: mol_type = other RNA
gcatttcggctctgtgctgaga

SEQ ID NO: 138479 - RNA, 22 nt, synthetic construct
  source 1..22: mol_type = other RNA
gcatttctctaatagctagtga

SEQ ID NO: 138480 - RNA, 22 nt, synthetic construct
  source 1..22: mol_type = other RNA
gcatttcttacacattaggctc

SEQ ID NO: 138481 - RNA, 22 nt, synthetic construct
  source 1..22: mol_type = other RNA
gcatttgaaaacatgttttgtt

SEQ ID NO: 138482 - RNA, 22 nt, synthetic construct
  source 1..22: mol_type = other RNA
gcatttgagggttagaagacaa

SEQ ID NO: 138483 - RNA, 22 nt, synthetic construct
  source 1..22: mol_type = other RNA
gcatttgggacagcctagtttt

SEQ ID NO: 138484 - RNA, 22 nt, synthetic construct
  source 1..22: mol_type = other RNA
gcatttggtctcattcactaga

SEQ ID NO: 138485 - RNA, 22 nt, synthetic construct
  source 1..22: mol_type = other RNA
gcatttggtttgcaaaaatttt

SEQ ID NO: 138486 - RNA, 22 nt, synthetic construct
  source 1..22: mol_type = other RNA
gcattttataggcattccttaa

SEQ ID NO: 138487 - RNA, 22 nt, synthetic construct
  source 1..22: mol_type = other RNA
gcattttcaaggtagaagtaca

SEQ ID NO: 138488 - RNA, 22 nt, synthetic construct
  source 1..22: mol_type = other RNA
gcattttccggttgtatagcag

SEQ ID NO: 138489 - RNA, 22 nt, synthetic construct
  source 1..22: mol_type = other RNA
gcattttctaaattgaacagcc

SEQ ID NO: 138490 - RNA, 22 nt, synthetic construct
  source 1..22: mol_type = other RNA
gcattttttaagtggcgctgtt

SEQ ID NO: 138491 - RNA, 22 nt, synthetic construct
  source 1..22: mol_type = other RNA
gcattttttgccaaattatttg

SEQ ID NO: 138492 - RNA, 22 nt, synthetic construct
  source 1..22: mol_type = other RNA
gccaaaagccaagagcgaggcc

SEQ ID NO: 138493 - RNA, 22 nt, synthetic construct
  source 1..22: mol_type = other RNA
gccaaaatgattttcacagggc

SEQ ID NO: 138494 - RNA, 22 nt, synthetic construct
  source 1..22: mol_type = other RNA
gccaaacagtttttacatgtag

SEQ ID NO: 138495 - RNA, 22 nt, synthetic construct
  source 1..22: mol_type = other RNA
gccaaacatcatgatttaatag

SEQ ID NO: 138496 - RNA, 22 nt, synthetic construct
  source 1..22: mol_type = other RNA
gccaaaccctacacccatccac

SEQ ID NO: 138497 - RNA, 22 nt, synthetic construct
  source 1..22: mol_type = other RNA
gccaaactgttttccacagtga

SEQ ID NO: 138498 - RNA, 22 nt, synthetic construct
  source 1..22: mol_type = other RNA
gccaaacttgaaccttcctctt

SEQ ID NO: 138499 - RNA, 22 nt, synthetic construct
  source 1..22: mol_type = other RNA
gccaaagaaattggacgggtgg

SEQ ID NO: 138500 - RNA, 22 nt, synthetic construct
  source 1..22: mol_type = other RNA
gccaaagaagaaatcaaatggg

SEQ ID NO: 138501 - RNA, 22 nt, synthetic construct
  source 1..22: mol_type = other RNA
gccaaagacagatcttatggaa

SEQ ID NO: 138502 - RNA, 22 nt, synthetic construct
  source 1..22: mol_type = other RNA
gccaaagacattgtcttacata

SEQ ID NO: 138503 - RNA, 22 nt, synthetic construct
  source 1..22: mol_type = other RNA
gccaaagacttcaacggacatt

SEQ ID NO: 138504 - RNA, 22 nt, synthetic construct
  source 1..22: mol_type = other RNA
gccaaagattcttgtcatgaat

SEQ ID NO: 138505 - RNA, 22 nt, synthetic construct
  source 1..22: mol_type = other RNA
gccaaagcaagccttggcaagg

SEQ ID NO: 138506 - RNA, 22 nt, synthetic construct
  source 1..22: mol_type = other RNA
gccaaagctggcatgttggata

SEQ ID NO: 138507 - RNA, 22 nt, synthetic construct
  source 1..22: mol_type = other RNA
gccaaaggtagaaacatcccaa

SEQ ID NO: 138508 - RNA, 22 nt, synthetic construct
  source 1..22: mol_type = other RNA
gccaaataaaacacaaggacag

SEQ ID NO: 138509 - RNA, 22 nt, synthetic construct
  source 1..22: mol_type = other RNA
gccaaatatccatgttttaata

SEQ ID NO: 138510 - RNA, 22 nt, synthetic construct
  source 1..22: mol_type = other RNA
gccaaatccctgatcaagttgc

SEQ ID NO: 138511 - RNA, 22 nt, synthetic construct
  source 1..22: mol_type = other RNA
gccaaatgaaaggcgtcggggc

SEQ ID NO: 138512 - RNA, 22 nt, synthetic construct
  source 1..22: mol_type = other RNA
gccaaattatttgagagtaagt

SEQ ID NO: 138513 - RNA, 22 nt, synthetic construct
  source 1..22: mol_type = other RNA
gccaacaaccataatgagtaac

SEQ ID NO: 138514 - RNA, 22 nt, synthetic construct
  source 1..22: mol_type = other RNA
gccaacacatggggcattaatt

SEQ ID NO: 138515 - RNA, 22 nt, synthetic construct
  source 1..22: mol_type = other RNA
gccaacagggccactgagagct

SEQ ID NO: 138516 - RNA, 22 nt, synthetic construct
  source 1..22: mol_type = other RNA
gccaacagttactttccttttt

SEQ ID NO: 138517 - RNA, 22 nt, synthetic construct
  source 1..22: mol_type = other RNA
gccaacatcgtaaaacctcatc

SEQ ID NO: 138518 - RNA, 22 nt, synthetic construct
  source 1..22: mol_type = other RNA
gccaaccattactcttctactc

SEQ ID NO: 138519 - RNA, 22 nt, synthetic construct
  source 1..22: mol_type = other RNA
gccaactctggcaggtcaccta

SEQ ID NO: 138520 - RNA, 22 nt, synthetic construct
  source 1..22: mol_type = other RNA
gccaactgtcctctcttgttga

SEQ ID NO: 138521 - RNA, 22 nt, synthetic construct
  source 1..22: mol_type = other RNA
gccaacttccagcaagacttta

SEQ ID NO: 138522 - RNA, 22 nt, synthetic construct
  source 1..22: mol_type = other RNA
gccaagagcgaggcctggaaca

SEQ ID NO: 138523 - RNA, 22 nt, synthetic construct
  source 1..22: mol_type = other RNA
gccaagagttgctgacttcctg

SEQ ID NO: 138524 - RNA, 22 nt, synthetic construct
  source 1..22: mol_type = other RNA
gccaagatctgtttttcaaaat

SEQ ID NO: 138525 - RNA, 22 nt, synthetic construct
  source 1..22: mol_type = other RNA
gccaagcaacttgatcagggat

SEQ ID NO: 138526 - RNA, 22 nt, synthetic construct
  source 1..22: mol_type = other RNA
gccaagcatggtggtaggtgtg

SEQ ID NO: 138527 - RNA, 22 nt, synthetic construct
  source 1..22: mol_type = other RNA
gccaaggagggaggattgtttg

SEQ ID NO: 138528 - RNA, 22 nt, synthetic construct
  source 1..22: mol_type = other RNA
gccaaggcaggactgcttgagg

SEQ ID NO: 138529 - RNA, 22 nt, synthetic construct
  source 1..22: mol_type = other RNA
gccaaggcttgctttggctaga

SEQ ID NO: 138530 - RNA, 22 nt, synthetic construct
  source 1..22: mol_type = other RNA
gccaagggtttgtcaattttgc

SEQ ID NO: 138531 - RNA, 22 nt, synthetic construct
  source 1..22: mol_type = other RNA
gccaagtaaaagcaacctcatt

SEQ ID NO: 138532 - RNA, 22 nt, synthetic construct
  source 1..22: mol_type = other RNA
gccaagtataagatgatgatat

SEQ ID NO: 138533 - RNA, 22 nt, synthetic construct
  source 1..22: mol_type = other RNA
gccaagtcagcacttctgatat

SEQ ID NO: 138534 - RNA, 22 nt, synthetic construct
  source 1..22: mol_type = other RNA
gccaagtccgtgcatgcctctg

SEQ ID NO: 138535 - RNA, 22 nt, synthetic construct
  source 1..22: mol_type = other RNA
gccaatatcacactgtttgatt

SEQ ID NO: 138536 - RNA, 22 nt, synthetic construct
  source 1..22: mol_type = other RNA
gccaatatccctgataatcaca

SEQ ID NO: 138537 - RNA, 22 nt, synthetic construct
  source 1..22: mol_type = other RNA
gccaatatctatcagggctgaa

SEQ ID NO: 138538 - RNA, 22 nt, synthetic construct
  source 1..22: mol_type = other RNA
gccaatcaataattctgtgcca

SEQ ID NO: 138539 - RNA, 22 nt, synthetic construct
  source 1..22: mol_type = other RNA
gccaatcttcccaatcctttgt

SEQ ID NO: 138540 - RNA, 22 nt, synthetic construct
  source 1..22: mol_type = other RNA
gccaatttgggatatagctaca

SEQ ID NO: 138541 - RNA, 22 nt, synthetic construct
  source 1..22: mol_type = other RNA
gccaattttcatagcagcattg

SEQ ID NO: 138542 - RNA, 22 nt, synthetic construct
  source 1..22: mol_type = other RNA
gccacaaagtccccacatgact

SEQ ID NO: 138543 - RNA, 22 nt, synthetic construct
  source 1..22: mol_type = other RNA
gccacaaatggagtgacttaag

SEQ ID NO: 138544 - RNA, 22 nt, synthetic construct
  source 1..22: mol_type = other RNA
gccacaagacataagcattttc

SEQ ID NO: 138545 - RNA, 22 nt, synthetic construct
  source 1..22: mol_type = other RNA
gccacaagccacatgtggttat

SEQ ID NO: 138546 - RNA, 22 nt, synthetic construct
  source 1..22: mol_type = other RNA
gccacacagtacaaggctagag

SEQ ID NO: 138547 - RNA, 22 nt, synthetic construct
  source 1..22: mol_type = other RNA
gccacaccacatccagctaatt

SEQ ID NO: 138548 - RNA, 22 nt, synthetic construct
  source 1..22: mol_type = other RNA
gccacactccagcatccctcca

SEQ ID NO: 138549 - RNA, 22 nt, synthetic construct
  source 1..22: mol_type = other RNA
gccacactcttggtctttctcc

SEQ ID NO: 138550 - RNA, 22 nt, synthetic construct
  source 1..22: mol_type = other RNA
gccacagcagggctcctccaag

SEQ ID NO: 138551 - RNA, 22 nt, synthetic construct
  source 1..22: mol_type = other RNA
gccacagcgcccggcccgttat

SEQ ID NO: 138552 - RNA, 22 nt, synthetic construct
  source 1..22: mol_type = other RNA
gccacagcgtggaatggtcaat

SEQ ID NO: 138553 - RNA, 22 nt, synthetic construct
  source 1..22: mol_type = other RNA
gccacagcgttgttcagttgaa

SEQ ID NO: 138554 - RNA, 22 nt, synthetic construct
  source 1..22: mol_type = other RNA
gccacagctacactcaatacac

SEQ ID NO: 138555 - RNA, 22 nt, synthetic construct
  source 1..22: mol_type = other RNA
gccacagggcccagcctcaaca

SEQ ID NO: 138556 - RNA, 22 nt, synthetic construct
  source 1..22: mol_type = other RNA
gccacataaatcacaggaaaga

SEQ ID NO: 138557 - RNA, 22 nt, synthetic construct
  source 1..22: mol_type = other RNA
gccacatacatagtattaaatt

SEQ ID NO: 138558 - RNA, 22 nt, synthetic construct
  source 1..22: mol_type = other RNA
gccacatgcttccaaaagcagg

SEQ ID NO: 138559 - RNA, 22 nt, synthetic construct
  source 1..22: mol_type = other RNA
gccacatgtggttattgagtct

SEQ ID NO: 138560 - RNA, 22 nt, synthetic construct
  source 1..22: mol_type = other RNA
gccacattagccactctgaatt

SEQ ID NO: 138561 - RNA, 22 nt, synthetic construct
  source 1..22: mol_type = other RNA
gccacattcaacaacatggatg

SEQ ID NO: 138562 - RNA, 22 nt, synthetic construct
  source 1..22: mol_type = other RNA
gccacattttaccaaaacagct

SEQ ID NO: 138563 - RNA, 22 nt, synthetic construct
  source 1..22: mol_type = other RNA
gccacattttttggtttgtatg

SEQ ID NO: 138564 - RNA, 22 nt, synthetic construct
  source 1..22: mol_type = other RNA
gccaccaagccctgccttaaaa

SEQ ID NO: 138565 - RNA, 22 nt, synthetic construct
  source 1..22: mol_type = other RNA
gccaccacgtccggtcgttgga

SEQ ID NO: 138566 - RNA, 22 nt, synthetic construct
  source 1..22: mol_type = other RNA
gccaccactcccggccgtattt

SEQ ID NO: 138567 - RNA, 22 nt, synthetic construct
  source 1..22: mol_type = other RNA
gccacccttgctgcttctaccc

SEQ ID NO: 138568 - RNA, 22 nt, synthetic construct
  source 1..22: mol_type = other RNA
gccaccgcacctggccgggatt

SEQ ID NO: 138569 - RNA, 22 nt, synthetic construct
  source 1..22: mol_type = other RNA
gccaccgcactcagcctgttgg

SEQ ID NO: 138570 - RNA, 22 nt, synthetic construct
  source 1..22: mol_type = other RNA
gccaccgcgcccggccaaatat

SEQ ID NO: 138571 - RNA, 22 nt, synthetic construct
  source 1..22: mol_type = other RNA
gccaccgcgcccggcccagatt

SEQ ID NO: 138572 - RNA, 22 nt, synthetic construct
  source 1..22: mol_type = other RNA
gccaccgcgcctggtgattaaa

SEQ ID NO: 138573 - RNA, 22 nt, synthetic construct
  source 1..22: mol_type = other RNA
gccaccgtgcccggccagacat

SEQ ID NO: 138574 - RNA, 22 nt, synthetic construct
  source 1..22: mol_type = other RNA
gccaccgtgccgggcttggtat

SEQ ID NO: 138575 - RNA, 22 nt, synthetic construct
  source 1..22: mol_type = other RNA
gccaccgtgcctggctaatttt

SEQ ID NO: 138576 - RNA, 22 nt, synthetic construct
  source 1..22: mol_type = other RNA
gccacctcatccggtctcagtt

SEQ ID NO: 138577 - RNA, 22 nt, synthetic construct
  source 1..22: mol_type = other RNA
gccacctcctccggggacccag

SEQ ID NO: 138578 - RNA, 22 nt, synthetic construct
  source 1..22: mol_type = other RNA
gccacgtgaagatggagttacg

SEQ ID NO: 138579 - RNA, 22 nt, synthetic construct
  source 1..22: mol_type = other RNA
gccacgtgtattgagtgtagct

SEQ ID NO: 138580 - RNA, 22 nt, synthetic construct
  source 1..22: mol_type = other RNA
gccactaaaacaggaagttgag

SEQ ID NO: 138581 - RNA, 22 nt, synthetic construct
  source 1..22: mol_type = other RNA
gccactacgcccggcccatgac

SEQ ID NO: 138582 - RNA, 22 nt, synthetic construct
  source 1..22: mol_type = other RNA
gccactacttagcccctgctgc

SEQ ID NO: 138583 - RNA, 22 nt, synthetic construct
  source 1..22: mol_type = other RNA
gccactagtcagtatatttact

SEQ ID NO: 138584 - RNA, 22 nt, synthetic construct
  source 1..22: mol_type = other RNA
gccactatagaaaatagtatga

SEQ ID NO: 138585 - RNA, 22 nt, synthetic construct
  source 1..22: mol_type = other RNA
gccactcaaaactgaagtttat

SEQ ID NO: 138586 - RNA, 22 nt, synthetic construct
  source 1..22: mol_type = other RNA
gccactctcatctaaattaagc

SEQ ID NO: 138587 - RNA, 22 nt, synthetic construct
  source 1..22: mol_type = other RNA
gccactctgaattctctggaat

SEQ ID NO: 138588 - RNA, 22 nt, synthetic construct
  source 1..22: mol_type = other RNA
gccactgagagctcaggccagt

SEQ ID NO: 138589 - RNA, 22 nt, synthetic construct
  source 1..22: mol_type = other RNA
gccactgattgagtatctggtg

SEQ ID NO: 138590 - RNA, 22 nt, synthetic construct
  source 1..22: mol_type = other RNA
gccactgcactccagccttggt

SEQ ID NO: 138591 - RNA, 22 nt, synthetic construct
  source 1..22: mol_type = other RNA
gccactgcactctggcctggac

SEQ ID NO: 138592 - RNA, 22 nt, synthetic construct
  source 1..22: mol_type = other RNA
gccactgcaggtgttggtgcat

SEQ ID NO: 138593 - RNA, 22 nt, synthetic construct
  source 1..22: mol_type = other RNA
gccactgcattcatccaggcaa

SEQ ID NO: 138594 - RNA, 22 nt, synthetic construct
  source 1..22: mol_type = other RNA
gccactgcattccgcctgggcg

SEQ ID NO: 138595 - RNA, 22 nt, synthetic construct
  source 1..22: mol_type = other RNA
gccactgcgggcccagctcttt

SEQ ID NO: 138596 - RNA, 22 nt, synthetic construct
  source 1..22: mol_type = other RNA
gccactggaaaccttttgtaga

SEQ ID NO: 138597 - RNA, 22 nt, synthetic construct
  source 1..22: mol_type = other RNA
gccactgggtcttataggttga

SEQ ID NO: 138598 - RNA, 22 nt, synthetic construct
  source 1..22: mol_type = other RNA
gccacttaaaaaatgcgcgtcc

SEQ ID NO: 138599 - RNA, 22 nt, synthetic construct
  source 1..22: mol_type = other RNA
gccacttcctattagaagaatg

SEQ ID NO: 138600 - RNA, 22 nt, synthetic construct
  source 1..22: mol_type = other RNA
gccagaatccctttcgctaatc

SEQ ID NO: 138601 - RNA, 22 nt, synthetic construct
  source 1..22: mol_type = other RNA
gccagacattttatttatacag

SEQ ID NO: 138602 - RNA, 22 nt, synthetic construct
  source 1..22: mol_type = other RNA
gccagagagtggaaagagccag

SEQ ID NO: 138603 - RNA, 22 nt, synthetic construct
  source 1..22: mol_type = other RNA
gccagaggaagcttataatttc

SEQ ID NO: 138604 - RNA, 22 nt, synthetic construct
  source 1..22: mol_type = other RNA
gccagaggagggatgcattcta

SEQ ID NO: 138605 - RNA, 22 nt, synthetic construct
  source 1..22: mol_type = other RNA
gccagagggaatctaggaaaca

SEQ ID NO: 138606 - RNA, 22 nt, synthetic construct
  source 1..22: mol_type = other RNA
gccagagttggcacagccagtc

SEQ ID NO: 138607 - RNA, 22 nt, synthetic construct
  source 1..22: mol_type = other RNA
gccagagtttcactctgtcgcc

SEQ ID NO: 138608 - RNA, 22 nt, synthetic construct
  source 1..22: mol_type = other RNA
gccagatatccataaggaaaaa

SEQ ID NO: 138609 - RNA, 22 nt, synthetic construct
  source 1..22: mol_type = other RNA
gccagatgttctaatttcttta

SEQ ID NO: 138610 - RNA, 22 nt, synthetic construct
  source 1..22: mol_type = other RNA
gccagatttgatcctggaatag

SEQ ID NO: 138611 - RNA, 22 nt, synthetic construct
  source 1..22: mol_type = other RNA
gccagcaaatcagaaaaggctg

SEQ ID NO: 138612 - RNA, 22 nt, synthetic construct
  source 1..22: mol_type = other RNA
gccagcaccagatactcaatca

SEQ ID NO: 138613 - RNA, 22 nt, synthetic construct
  source 1..22: mol_type = other RNA
gccagcacctaacaatgattat

SEQ ID NO: 138614 - RNA, 22 nt, synthetic construct
  source 1..22: mol_type = other RNA
gccagcattaccctaataacaa

SEQ ID NO: 138615 - RNA, 22 nt, synthetic construct
  source 1..22: mol_type = other RNA
gccagcattacttaggcagtta

SEQ ID NO: 138616 - RNA, 22 nt, synthetic construct
  source 1..22: mol_type = other RNA
gccagccacccttgctgcttct

SEQ ID NO: 138617 - RNA, 22 nt, synthetic construct
  source 1..22: mol_type = other RNA
gccagcctgatgatgatggtga

SEQ ID NO: 138618 - RNA, 22 nt, synthetic construct
  source 1..22: mol_type = other RNA
gccagctaacttttaacccaca

SEQ ID NO: 138619 - RNA, 22 nt, synthetic construct
  source 1..22: mol_type = other RNA
gccagctttggctgaaatgctg

SEQ ID NO: 138620 - RNA, 22 nt, synthetic construct
  source 1..22: mol_type = other RNA
gccaggaagtcagcaactcttg

SEQ ID NO: 138621 - RNA, 22 nt, synthetic construct
  source 1..22: mol_type = other RNA
gccaggacaattgaatggggat

SEQ ID NO: 138622 - RNA, 22 nt, synthetic construct
  source 1..22: mol_type = other RNA
gccaggaggaggagggtgcagc

SEQ ID NO: 138623 - RNA, 22 nt, synthetic construct
  source 1..22: mol_type = other RNA
gccaggcgtggtggcggatgcc

SEQ ID NO: 138624 - RNA, 22 nt, synthetic construct
  source 1..22: mol_type = other RNA
gccaggctggttccaaacttct

SEQ ID NO: 138625 - RNA, 22 nt, synthetic construct
  source 1..22: mol_type = other RNA
gccaggctttcccagggtgtag

SEQ ID NO: 138626 - RNA, 22 nt, synthetic construct
  source 1..22: mol_type = other RNA
gccagggtctgtctcacctcaa

SEQ ID NO: 138627 - RNA, 22 nt, synthetic construct
  source 1..22: mol_type = other RNA
gccaggtagggaggggtattca

SEQ ID NO: 138628 - RNA, 22 nt, synthetic construct
  source 1..22: mol_type = other RNA
gccaggtttgtgcttggatatt

SEQ ID NO: 138629 - RNA, 22 nt, synthetic construct
  source 1..22: mol_type = other RNA
gccagtatctcctttccttcct

SEQ ID NO: 138630 - RNA, 22 nt, synthetic construct
  source 1..22: mol_type = other RNA
gccagtcactaaaaatcagatt

SEQ ID NO: 138631 - RNA, 22 nt, synthetic construct
  source 1..22: mol_type = other RNA
gccagtcagtgatggaggtgga

SEQ ID NO: 138632 - RNA, 22 nt, synthetic construct
  source 1..22: mol_type = other RNA
gccagtcatgtggggactttgt

SEQ ID NO: 138633 - RNA, 22 nt, synthetic construct
  source 1..22: mol_type = other RNA
gccagtccctagtgtctccata

SEQ ID NO: 138634 - RNA, 22 nt, synthetic construct
  source 1..22: mol_type = other RNA
gccagtccttgtgatctatgca

SEQ ID NO: 138635 - RNA, 22 nt, synthetic construct
  source 1..22: mol_type = other RNA
gccagtgaactccagtctgggc

SEQ ID NO: 138636 - RNA, 22 nt, synthetic construct
  source 1..22: mol_type = other RNA
gccagtgaccagtgtgatgggg

SEQ ID NO: 138637 - RNA, 22 nt, synthetic construct
  source 1..22: mol_type = other RNA
gccagtgagtgatgaaaagagc

SEQ ID NO: 138638 - RNA, 22 nt, synthetic construct
  source 1..22: mol_type = other RNA
gccagtgagttcaaatgttaag

SEQ ID NO: 138639 - RNA, 22 nt, synthetic construct
  source 1..22: mol_type = other RNA
gccagtgattggatatttgcag

SEQ ID NO: 138640 - RNA, 22 nt, synthetic construct
  source 1..22: mol_type = other RNA
gccagtgcaaacctcctggttt

SEQ ID NO: 138641 - RNA, 22 nt, synthetic construct
  source 1..22: mol_type = other RNA
gccagtgcagcaagcagtaaat

SEQ ID NO: 138642 - RNA, 22 nt, synthetic construct
  source 1..22: mol_type = other RNA
gccagtgttttaaagcagggag

SEQ ID NO: 138643 - RNA, 22 nt, synthetic construct
  source 1..22: mol_type = other RNA
gccagttgagagagaattctaa

SEQ ID NO: 138644 - RNA, 22 nt, synthetic construct
  source 1..22: mol_type = other RNA
gccagttttctggaaactcaaa

SEQ ID NO: 138645 - RNA, 22 nt, synthetic construct
  source 1..22: mol_type = other RNA
gccataaatcaaggtacaatac

SEQ ID NO: 138646 - RNA, 22 nt, synthetic construct
  source 1..22: mol_type = other RNA
gccataagagtccccaactgca

SEQ ID NO: 138647 - RNA, 22 nt, synthetic construct
  source 1..22: mol_type = other RNA
gccataatccttagattacaaa

SEQ ID NO: 138648 - RNA, 22 nt, synthetic construct
  source 1..22: mol_type = other RNA
gccatacctggtccttaaattt

SEQ ID NO: 138649 - RNA, 22 nt, synthetic construct
  source 1..22: mol_type = other RNA
gccatagagctttaaagttaat

SEQ ID NO: 138650 - RNA, 22 nt, synthetic construct
  source 1..22: mol_type = other RNA
gccatagagggagcatcttccc

SEQ ID NO: 138651 - RNA, 22 nt, synthetic construct
  source 1..22: mol_type = other RNA
gccatagtgtaaactaaaagta

SEQ ID NO: 138652 - RNA, 22 nt, synthetic construct
  source 1..22: mol_type = other RNA
gccatatgtagggcaccgtgac

SEQ ID NO: 138653 - RNA, 22 nt, synthetic construct
  source 1..22: mol_type = other RNA
gccatcaacctaatgaaattta

SEQ ID NO: 138654 - RNA, 22 nt, synthetic construct
  source 1..22: mol_type = other RNA
gccatcacacccagtatacacg

SEQ ID NO: 138655 - RNA, 22 nt, synthetic construct
  source 1..22: mol_type = other RNA
gccatcacattttgaatcatgg

SEQ ID NO: 138656 - RNA, 22 nt, synthetic construct
  source 1..22: mol_type = other RNA
gccatcatgcctgggtaattaa

SEQ ID NO: 138657 - RNA, 22 nt, synthetic construct
  source 1..22: mol_type = other RNA
gccatcattttatgaaaccatt

SEQ ID NO: 138658 - RNA, 22 nt, synthetic construct
  source 1..22: mol_type = other RNA
gccatcccagctacataacttc

SEQ ID NO: 138659 - RNA, 22 nt, synthetic construct
  source 1..22: mol_type = other RNA
gccatcctccagccttaatctc

SEQ ID NO: 138660 - RNA, 22 nt, synthetic construct
  source 1..22: mol_type = other RNA
gccatcctggatttgggaagga

SEQ ID NO: 138661 - RNA, 22 nt, synthetic construct
  source 1..22: mol_type = other RNA
gccatccttcccaaatccagga

SEQ ID NO: 138662 - RNA, 22 nt, synthetic construct
  source 1..22: mol_type = other RNA
gccatcgcgcccagcccgtgtg

SEQ ID NO: 138663 - RNA, 22 nt, synthetic construct
  source 1..22: mol_type = other RNA
gccatctaattcacatttaaga

SEQ ID NO: 138664 - RNA, 22 nt, synthetic construct
  source 1..22: mol_type = other RNA
gccatctccttaatccagtcta

SEQ ID NO: 138665 - RNA, 22 nt, synthetic construct
  source 1..22: mol_type = other RNA
gccatctgaattcaagttacaa

SEQ ID NO: 138666 - RNA, 22 nt, synthetic construct
  source 1..22: mol_type = other RNA
gccatcttcaagatttcatagg

SEQ ID NO: 138667 - RNA, 22 nt, synthetic construct
  source 1..22: mol_type = other RNA
gccatcttcatttctaagccat

SEQ ID NO: 138668 - RNA, 22 nt, synthetic construct
  source 1..22: mol_type = other RNA
gccatggctcactgcggcctca

SEQ ID NO: 138669 - RNA, 22 nt, synthetic construct
  source 1..22: mol_type = other RNA
gccatggtgttaaatatttact

SEQ ID NO: 138670 - RNA, 22 nt, synthetic construct
  source 1..22: mol_type = other RNA
gccatgtgttttgttttgaata

SEQ ID NO: 138671 - RNA, 22 nt, synthetic construct
  source 1..22: mol_type = other RNA
gccatgtttctcctgcatgggg

SEQ ID NO: 138672 - RNA, 22 nt, synthetic construct
  source 1..22: mol_type = other RNA
gccatgttttatttcttgacct

SEQ ID NO: 138673 - RNA, 22 nt, synthetic construct
  source 1..22: mol_type = other RNA
gccattctcccagttgtcagaa

SEQ ID NO: 138674 - RNA, 22 nt, synthetic construct
  source 1..22: mol_type = other RNA
gccattctcttctggatagcat

SEQ ID NO: 138675 - RNA, 22 nt, synthetic construct
  source 1..22: mol_type = other RNA
gccattctgctatgaaatgtgg

SEQ ID NO: 138676 - RNA, 22 nt, synthetic construct
  source 1..22: mol_type = other RNA
gccatttatcagcaccaaagat

SEQ ID NO: 138677 - RNA, 22 nt, synthetic construct
  source 1..22: mol_type = other RNA
gccatttcaggttttcgaccaa

SEQ ID NO: 138678 - RNA, 22 nt, synthetic construct
  source 1..22: mol_type = other RNA
gccatttgattgccagttttct

SEQ ID NO: 138679 - RNA, 22 nt, synthetic construct
  source 1..22: mol_type = other RNA
gcccaaaaagtttttaaaaatc

SEQ ID NO: 138680 - RNA, 22 nt, synthetic construct
  source 1..22: mol_type = other RNA
gcccaacagggttttgttttgt

SEQ ID NO: 138681 - RNA, 22 nt, synthetic construct
  source 1..22: mol_type = other RNA
gcccaacatgctcttaagtatt

SEQ ID NO: 138682 - RNA, 22 nt, synthetic construct
  source 1..22: mol_type = other RNA
gcccaacctgattagaggctgc

SEQ ID NO: 138683 - RNA, 22 nt, synthetic construct
  source 1..22: mol_type = other RNA
gcccaacttcacaccatttaga

SEQ ID NO: 138684 - RNA, 22 nt, synthetic construct
  source 1..22: mol_type = other RNA
gcccaactttttctttttagta

SEQ ID NO: 138685 - RNA, 22 nt, synthetic construct
  source 1..22: mol_type = other RNA
gcccaagcacactttccttgga

SEQ ID NO: 138686 - RNA, 22 nt, synthetic construct
  source 1..22: mol_type = other RNA
gcccaagctaccatttattcct

SEQ ID NO: 138687 - RNA, 22 nt, synthetic construct
  source 1..22: mol_type = other RNA
gcccaaggaaggcagggtagga

SEQ ID NO: 138688 - RNA, 22 nt, synthetic construct
  source 1..22: mol_type = other RNA
gcccaatcaaatccagtcttca

SEQ ID NO: 138689 - RNA, 22 nt, synthetic construct
  source 1..22: mol_type = other RNA
gcccaatctacaggtcggaagg

SEQ ID NO: 138690 - RNA, 22 nt, synthetic construct
  source 1..22: mol_type = other RNA
gcccaatgcctgcgattgcagg

SEQ ID NO: 138691 - RNA, 22 nt, synthetic construct
  source 1..22: mol_type = other RNA
gcccacacctgcaatcacagca

SEQ ID NO: 138692 - RNA, 22 nt, synthetic construct
  source 1..22: mol_type = other RNA
gcccaccagcataagacccctc

SEQ ID NO: 138693 - RNA, 22 nt, synthetic construct
  source 1..22: mol_type = other RNA
gcccaccatgatgcagcccctg

SEQ ID NO: 138694 - RNA, 22 nt, synthetic construct
  source 1..22: mol_type = other RNA
gcccaccctgctccagtatgac

SEQ ID NO: 138695 - RNA, 22 nt, synthetic construct
  source 1..22: mol_type = other RNA
gcccacctgacaagtagtacaa

SEQ ID NO: 138696 - RNA, 22 nt, synthetic construct
  source 1..22: mol_type = other RNA
gcccactctccccaagtaaacc

SEQ ID NO: 138697 - RNA, 22 nt, synthetic construct
  source 1..22: mol_type = other RNA
gcccactcttatatcctaaaca

SEQ ID NO: 138698 - RNA, 22 nt, synthetic construct
  source 1..22: mol_type = other RNA
gcccagaaataaatcctcacat

SEQ ID NO: 138699 - RNA, 22 nt, synthetic construct
  source 1..22: mol_type = other RNA
gcccagactggagttcactggc

SEQ ID NO: 138700 - RNA, 22 nt, synthetic construct
  source 1..22: mol_type = other RNA
gcccagagaggctaggtgacct

SEQ ID NO: 138701 - RNA, 22 nt, synthetic construct
  source 1..22: mol_type = other RNA
gcccagagatcccaccattgca

SEQ ID NO: 138702 - RNA, 22 nt, synthetic construct
  source 1..22: mol_type = other RNA
gcccagattccttttttatgtg

SEQ ID NO: 138703 - RNA, 22 nt, synthetic construct
  source 1..22: mol_type = other RNA
gcccagcacttccattttgctt

SEQ ID NO: 138704 - RNA, 22 nt, synthetic construct
  source 1..22: mol_type = other RNA
gcccagcagaaggtgagggact

SEQ ID NO: 138705 - RNA, 22 nt, synthetic construct
  source 1..22: mol_type = other RNA
gcccagccatcccattactcgg

SEQ ID NO: 138706 - RNA, 22 nt, synthetic construct
  source 1..22: mol_type = other RNA
gcccagcccgtgtgtttagaat

SEQ ID NO: 138707 - RNA, 22 nt, synthetic construct
  source 1..22: mol_type = other RNA
gcccagcctcaacagcactttt

SEQ ID NO: 138708 - RNA, 22 nt, synthetic construct
  source 1..22: mol_type = other RNA
gcccagctcttttgtgtctttt

SEQ ID NO: 138709 - RNA, 22 nt, synthetic construct
  source 1..22: mol_type = other RNA
gcccagcttccgggacttggaa

SEQ ID NO: 138710 - RNA, 22 nt, synthetic construct
  source 1..22: mol_type = other RNA
gcccaggaggttgaagctctag

SEQ ID NO: 138711 - RNA, 22 nt, synthetic construct
  source 1..22: mol_type = other RNA
gcccaggagttgcatcacttga

SEQ ID NO: 138712 - RNA, 22 nt, synthetic construct
  source 1..22: mol_type = other RNA
gcccaggcggaatgcagtggcg

SEQ ID NO: 138713 - RNA, 22 nt, synthetic construct
  source 1..22: mol_type = other RNA
gcccaggctgacttagagggct

SEQ ID NO: 138714 - RNA, 22 nt, synthetic construct
  source 1..22: mol_type = other RNA
gcccaggctggagctcactgca

SEQ ID NO: 138715 - RNA, 22 nt, synthetic construct
  source 1..22: mol_type = other RNA
gcccaggctggtcttgtactcc

SEQ ID NO: 138716 - RNA, 22 nt, synthetic construct
  source 1..22: mol_type = other RNA
gcccagggggtcgagactgtaa

SEQ ID NO: 138717 - RNA, 22 nt, synthetic construct
  source 1..22: mol_type = other RNA
gcccatatccttttatgtgcag

SEQ ID NO: 138718 - RNA, 22 nt, synthetic construct
  source 1..22: mol_type = other RNA
gcccatcctatctaagcctact

SEQ ID NO: 138719 - RNA, 22 nt, synthetic construct
  source 1..22: mol_type = other RNA
gcccatcctctatttttgtctg

SEQ ID NO: 138720 - RNA, 22 nt, synthetic construct
  source 1..22: mol_type = other RNA
gcccatgacatgtgttttattt

SEQ ID NO: 138721 - RNA, 22 nt, synthetic construct
  source 1..22: mol_type = other RNA
gcccatgtctaaagtattgttt

SEQ ID NO: 138722 - RNA, 22 nt, synthetic construct
  source 1..22: mol_type = other RNA
gcccatgtgcattattgtaatt

SEQ ID NO: 138723 - RNA, 22 nt, synthetic construct
  source 1..22: mol_type = other RNA
gcccattaaaaccatgaaaata

SEQ ID NO: 138724 - RNA, 22 nt, synthetic construct
  source 1..22: mol_type = other RNA
gcccattaacagatgaatgaac

SEQ ID NO: 138725 - RNA, 22 nt, synthetic construct
  source 1..22: mol_type = other RNA
gcccattaggatagctattatt

SEQ ID NO: 138726 - RNA, 22 nt, synthetic construct
  source 1..22: mol_type = other RNA
gcccattataaaataggaagtc

SEQ ID NO: 138727 - RNA, 22 nt, synthetic construct
  source 1..22: mol_type = other RNA
gcccattttcgaattagattgt

SEQ ID NO: 138728 - RNA, 22 nt, synthetic construct
  source 1..22: mol_type = other RNA
gccccaaaattaccccattcac

SEQ ID NO: 138729 - RNA, 22 nt, synthetic construct
  source 1..22: mol_type = other RNA
gccccaaaccatcaagtgtgat

SEQ ID NO: 138730 - RNA, 22 nt, synthetic construct
  source 1..22: mol_type = other RNA
gccccaaatacctctgaatgtg

SEQ ID NO: 138731 - RNA, 22 nt, synthetic construct
  source 1..22: mol_type = other RNA
gccccaagaaagcaggtcatga

SEQ ID NO: 138732 - RNA, 22 nt, synthetic construct
  source 1..22: mol_type = other RNA
gccccacaagtagcagggacta

SEQ ID NO: 138733 - RNA, 22 nt, synthetic construct
  source 1..22: mol_type = other RNA
gccccactccacacacgaagta

SEQ ID NO: 138734 - RNA, 22 nt, synthetic construct
  source 1..22: mol_type = other RNA
gccccagaataggcaaattcat

SEQ ID NO: 138735 - RNA, 22 nt, synthetic construct
  source 1..22: mol_type = other RNA
gccccagctaaaatgttcagat

SEQ ID NO: 138736 - RNA, 22 nt, synthetic construct
  source 1..22: mol_type = other RNA
gccccaggcggcagagggagca

SEQ ID NO: 138737 - RNA, 22 nt, synthetic construct
  source 1..22: mol_type = other RNA
gccccaggggacatagatgaaa

SEQ ID NO: 138738 - RNA, 22 nt, synthetic construct
  source 1..22: mol_type = other RNA
gccccagttctgcgcaattgca

SEQ ID NO: 138739 - RNA, 22 nt, synthetic construct
  source 1..22: mol_type = other RNA
gccccatgtgttggcactgaag

SEQ ID NO: 138740 - RNA, 22 nt, synthetic construct
  source 1..22: mol_type = other RNA
gccccattgcactccacgtggg

SEQ ID NO: 138741 - RNA, 22 nt, synthetic construct
  source 1..22: mol_type = other RNA
gccccattgtacacatattaaa

SEQ ID NO: 138742 - RNA, 22 nt, synthetic construct
  source 1..22: mol_type = other RNA
gcccccagttttgttgaatctt

SEQ ID NO: 138743 - RNA, 22 nt, synthetic construct
  source 1..22: mol_type = other RNA
gcccccctgaaaaatgagaaac

SEQ ID NO: 138744 - RNA, 22 nt, synthetic construct
  source 1..22: mol_type = other RNA
gccccctccctaccacccgtcc

SEQ ID NO: 138745 - RNA, 22 nt, synthetic construct
  source 1..22: mol_type = other RNA
gccccctcgaagagaccacagg

SEQ ID NO: 138746 - RNA, 22 nt, synthetic construct
  source 1..22: mol_type = other RNA
gccccctcttctctcctttgag

SEQ ID NO: 138747 - RNA, 22 nt, synthetic construct
  source 1..22: mol_type = other RNA
gccccctgaatacccctcccta

SEQ ID NO: 138748 - RNA, 22 nt, synthetic construct
  source 1..22: mol_type = other RNA
gccccctgagtagctgtgatta

SEQ ID NO: 138749 - RNA, 22 nt, synthetic construct
  source 1..22: mol_type = other RNA
gccccgacgcctttcatttggc

SEQ ID NO: 138750 - RNA, 22 nt, synthetic construct
  source 1..22: mol_type = other RNA
gccccgatgccatgtgttttgt

SEQ ID NO: 138751 - RNA, 22 nt, synthetic construct
  source 1..22: mol_type = other RNA
gccccgcttcagttggtgaaga

SEQ ID NO: 138752 - RNA, 22 nt, synthetic construct
  source 1..22: mol_type = other RNA
gccccgggcctggttagggaga

SEQ ID NO: 138753 - RNA, 22 nt, synthetic construct
  source 1..22: mol_type = other RNA
gcccctagcatgcagtagctca

SEQ ID NO: 138754 - RNA, 22 nt, synthetic construct
  source 1..22: mol_type = other RNA
gcccctcatcctccgtagctgt

SEQ ID NO: 138755 - RNA, 22 nt, synthetic construct
  source 1..22: mol_type = other RNA
gcccctccactccacaaagccg

SEQ ID NO: 138756 - RNA, 22 nt, synthetic construct
  source 1..22: mol_type = other RNA
gcccctccatggaaactacaat

SEQ ID NO: 138757 - RNA, 22 nt, synthetic construct
  source 1..22: mol_type = other RNA
gcccctgccacactccagcatc

SEQ ID NO: 138758 - RNA, 22 nt, synthetic construct
  source 1..22: mol_type = other RNA
gcccctgctgccagatgttcta

SEQ ID NO: 138759 - RNA, 22 nt, synthetic construct
  source 1..22: mol_type = other RNA
gcccctggagaaagcccagccg

SEQ ID NO: 138760 - RNA, 22 nt, synthetic construct
  source 1..22: mol_type = other RNA
gcccctggtgatctatgaattt

SEQ ID NO: 138761 - RNA, 22 nt, synthetic construct
  source 1..22: mol_type = other RNA
gcccctgtagcagacactgggt

SEQ ID NO: 138762 - RNA, 22 nt, synthetic construct
  source 1..22: mol_type = other RNA
gccccttatcaggaaagtgcca

SEQ ID NO: 138763 - RNA, 22 nt, synthetic construct
  source 1..22: mol_type = other RNA
gccccttatcctcttctgaaga

SEQ ID NO: 138764 - RNA, 22 nt, synthetic construct
  source 1..22: mol_type = other RNA
gccccttgaaagatcatttagt

SEQ ID NO: 138765 - RNA, 22 nt, synthetic construct
  source 1..22: mol_type = other RNA
gcccctttcaagattgtttaat

SEQ ID NO: 138766 - RNA, 22 nt, synthetic construct
  source 1..22: mol_type = other RNA
gcccctttgagcagagtcctga

SEQ ID NO: 138767 - RNA, 22 nt, synthetic construct
  source 1..22: mol_type = other RNA
gcccgacctccagcgctaagca

SEQ ID NO: 138768 - RNA, 22 nt, synthetic construct
  source 1..22: mol_type = other RNA
gcccgcgaaggcgtgtaaactg

SEQ ID NO: 138769 - RNA, 22 nt, synthetic construct
  source 1..22: mol_type = other RNA
gcccggccaaatatccatgttt

SEQ ID NO: 138770 - RNA, 22 nt, synthetic construct
  source 1..22: mol_type = other RNA
gcccggccagacattttattta

SEQ ID NO: 138771 - RNA, 22 nt, synthetic construct
  source 1..22: mol_type = other RNA
gcccggcccagattcctttttt

SEQ ID NO: 138772 - RNA, 22 nt, synthetic construct
  source 1..22: mol_type = other RNA
gcccggcccatgacatgtgttt

SEQ ID NO: 138773 - RNA, 22 nt, synthetic construct
  source 1..22: mol_type = other RNA
gcccggcccgttatttttatca

SEQ ID NO: 138774 - RNA, 22 nt, synthetic construct
  source 1..22: mol_type = other RNA
gcccggccgagaaatcggaact

SEQ ID NO: 138775 - RNA, 22 nt, synthetic construct
  source 1..22: mol_type = other RNA
gcccggccgatgcctgtgcttt

SEQ ID NO: 138776 - RNA, 22 nt, synthetic construct
  source 1..22: mol_type = other RNA
gcccggggcagagaactgactg

SEQ ID NO: 138777 - RNA, 22 nt, synthetic construct
  source 1..22: mol_type = other RNA
gcccgtccctgcttggcgcagt

SEQ ID NO: 138778 - RNA, 22 nt, synthetic construct
  source 1..22: mol_type = other RNA
gcccgtgtgtttagaataatac

SEQ ID NO: 138779 - RNA, 22 nt, synthetic construct
  source 1..22: mol_type = other RNA
gcccgttatttttatcataact

SEQ ID NO: 138780 - RNA, 22 nt, synthetic construct
  source 1..22: mol_type = other RNA
gccctaaccccagagattgtcg

SEQ ID NO: 138781 - RNA, 22 nt, synthetic construct
  source 1..22: mol_type = other RNA
gccctacatatggcaattccat

SEQ ID NO: 138782 - RNA, 22 nt, synthetic construct
  source 1..22: mol_type = other RNA
gccctatgccttcagtatgaat

SEQ ID NO: 138783 - RNA, 22 nt, synthetic construct
  source 1..22: mol_type = other RNA
gccctattcaacctataagacc

SEQ ID NO: 138784 - RNA, 22 nt, synthetic construct
  source 1..22: mol_type = other RNA
gccctcaggaccaggcagtcct

SEQ ID NO: 138785 - RNA, 22 nt, synthetic construct
  source 1..22: mol_type = other RNA
gccctcattgaagctactattc

SEQ ID NO: 138786 - RNA, 22 nt, synthetic construct
  source 1..22: mol_type = other RNA
gccctccaggatccagtctcta

SEQ ID NO: 138787 - RNA, 22 nt, synthetic construct
  source 1..22: mol_type = other RNA
gccctccatttccctgcttcat

SEQ ID NO: 138788 - RNA, 22 nt, synthetic construct
  source 1..22: mol_type = other RNA
gccctcccccgggacaatgcca

SEQ ID NO: 138789 - RNA, 22 nt, synthetic construct
  source 1..22: mol_type = other RNA
gccctctaagtcagcctgggca

SEQ ID NO: 138790 - RNA, 22 nt, synthetic construct
  source 1..22: mol_type = other RNA
gccctctataattctgccttca

SEQ ID NO: 138791 - RNA, 22 nt, synthetic construct
  source 1..22: mol_type = other RNA
gccctgagaagtcaaagcctgt

SEQ ID NO: 138792 - RNA, 22 nt, synthetic construct
  source 1..22: mol_type = other RNA
gccctgatagatattggcaaca

SEQ ID NO: 138793 - RNA, 22 nt, synthetic construct
  source 1..22: mol_type = other RNA
gccctgattgagattagcgaaa

SEQ ID NO: 138794 - RNA, 22 nt, synthetic construct
  source 1..22: mol_type = other RNA
gccctgatttaaagtaggttga

SEQ ID NO: 138795 - RNA, 22 nt, synthetic construct
  source 1..22: mol_type = other RNA
gccctgcagccagatttgatcc

SEQ ID NO: 138796 - RNA, 22 nt, synthetic construct
  source 1..22: mol_type = other RNA
gccctgccgcttcgcctttctc

SEQ ID NO: 138797 - RNA, 22 nt, synthetic construct
  source 1..22: mol_type = other RNA
gccctgccttaaaacatttttt

SEQ ID NO: 138798 - RNA, 22 nt, synthetic construct
  source 1..22: mol_type = other RNA
gccctgcgattggttggactcc

SEQ ID NO: 138799 - RNA, 22 nt, synthetic construct
  source 1..22: mol_type = other RNA
gccctgctgtggccgagggaga

SEQ ID NO: 138800 - RNA, 22 nt, synthetic construct
  source 1..22: mol_type = other RNA
gccctggcattgtcccggggga

SEQ ID NO: 138801 - RNA, 22 nt, synthetic construct
  source 1..22: mol_type = other RNA
gccctggtgctttctatctctc

SEQ ID NO: 138802 - RNA, 22 nt, synthetic construct
  source 1..22: mol_type = other RNA
gccctgtgaaaatcattttggc

SEQ ID NO: 138803 - RNA, 22 nt, synthetic construct
  source 1..22: mol_type = other RNA
gccctgtggctcatgcctgtaa

SEQ ID NO: 138804 - RNA, 22 nt, synthetic construct
  source 1..22: mol_type = other RNA
gccctgttggcctggacacaca

SEQ ID NO: 138805 - RNA, 22 nt, synthetic construct
  source 1..22: mol_type = other RNA
gcccttaacttcacctctacac

SEQ ID NO: 138806 - RNA, 22 nt, synthetic construct
  source 1..22: mol_type = other RNA
gcccttatttaatgtgctgtcc

SEQ ID NO: 138807 - RNA, 22 nt, synthetic construct
  source 1..22: mol_type = other RNA
gcccttccttgcttgtcttgaa

SEQ ID NO: 138808 - RNA, 22 nt, synthetic construct
  source 1..22: mol_type = other RNA
gcccttgagtatttttgagctt

SEQ ID NO: 138809 - RNA, 22 nt, synthetic construct
  source 1..22: mol_type = other RNA
gccctttgttagtgccttcaga

SEQ ID NO: 138810 - RNA, 22 nt, synthetic construct
  source 1..22: mol_type = other RNA
gccgaaatgcacttagcgctga

SEQ ID NO: 138811 - RNA, 22 nt, synthetic construct
  source 1..22: mol_type = other RNA
gccgaatgtggtggtatgcact

SEQ ID NO: 138812 - RNA, 22 nt, synthetic construct
  source 1..22: mol_type = other RNA
gccgacccccctacctccctcc

SEQ ID NO: 138813 - RNA, 22 nt, synthetic construct
  source 1..22: mol_type = other RNA
gccgagaaatcggaactcctgt

SEQ ID NO: 138814 - RNA, 22 nt, synthetic construct
  source 1..22: mol_type = other RNA
gccgagatcacgccactgcatt

SEQ ID NO: 138815 - RNA, 22 nt, synthetic construct
  source 1..22: mol_type = other RNA
gccgagcagaagggaaaggatg

SEQ ID NO: 138816 - RNA, 22 nt, synthetic construct
  source 1..22: mol_type = other RNA
gccgaggcagagagagtaactg

SEQ ID NO: 138817 - RNA, 22 nt, synthetic construct
  source 1..22: mol_type = other RNA
gccgaggcaggtggatcaggag

SEQ ID NO: 138818 - RNA, 22 nt, synthetic construct
  source 1..22: mol_type = other RNA
gccgaggccagtccctagtgtc

SEQ ID NO: 138819 - RNA, 22 nt, synthetic construct
  source 1..22: mol_type = other RNA
gccgagggagacggcgagcttg

SEQ ID NO: 138820 - RNA, 22 nt, synthetic construct
  source 1..22: mol_type = other RNA
gccgagggttgaacatcaccca

SEQ ID NO: 138821 - RNA, 22 nt, synthetic construct
  source 1..22: mol_type = other RNA
gccgatgcctgtgcttttctcg

SEQ ID NO: 138822 - RNA, 22 nt, synthetic construct
  source 1..22: mol_type = other RNA
gccgcaaataatcattcttcta

SEQ ID NO: 138823 - RNA, 22 nt, synthetic construct
  source 1..22: mol_type = other RNA
gccgcagagcaagcacgttagc

SEQ ID NO: 138824 - RNA, 22 nt, synthetic construct
  source 1..22: mol_type = other RNA
gccgcagaggccaaatgaaagg

SEQ ID NO: 138825 - RNA, 22 nt, synthetic construct
  source 1..22: mol_type = other RNA
gccgcagtgagccatggctgcg

SEQ ID NO: 138826 - RNA, 22 nt, synthetic construct
  source 1..22: mol_type = other RNA
gccgcccctggagaaagcccag

SEQ ID NO: 138827 - RNA, 22 nt, synthetic construct
  source 1..22: mol_type = other RNA
gccgccgcagaggccaaatgaa

SEQ ID NO: 138828 - RNA, 22 nt, synthetic construct
  source 1..22: mol_type = other RNA
gccgcgtccacctggcaacaaa

SEQ ID NO: 138829 - RNA, 22 nt, synthetic construct
  source 1..22: mol_type = other RNA
gccgcgttttttgtccaccaga

SEQ ID NO: 138830 - RNA, 22 nt, synthetic construct
  source 1..22: mol_type = other RNA
gccgctcttgaccttgtgcatg

SEQ ID NO: 138831 - RNA, 22 nt, synthetic construct
  source 1..22: mol_type = other RNA
gccgctggtgaaaaaatggtgc

SEQ ID NO: 138832 - RNA, 22 nt, synthetic construct
  source 1..22: mol_type = other RNA
gccgcttcgcctttctcgcagc

SEQ ID NO: 138833 - RNA, 22 nt, synthetic construct
  source 1..22: mol_type = other RNA
gccggagcgggcagccttggag

SEQ ID NO: 138834 - RNA, 22 nt, synthetic construct
  source 1..22: mol_type = other RNA
gccggaggattgcttgagtgca

SEQ ID NO: 138835 - RNA, 22 nt, synthetic construct
  source 1..22: mol_type = other RNA
gccggagtccgcggctgggctt

SEQ ID NO: 138836 - RNA, 22 nt, synthetic construct
  source 1..22: mol_type = other RNA
gccggattcctttcaaagagac

SEQ ID NO: 138837 - RNA, 22 nt, synthetic construct
  source 1..22: mol_type = other RNA
gccggcatatgtcactgtaaga

SEQ ID NO: 138838 - RNA, 22 nt, synthetic construct
  source 1..22: mol_type = other RNA
gccggctgttaggtattatttt

SEQ ID NO: 138839 - RNA, 22 nt, synthetic construct
  source 1..22: mol_type = other RNA
gccgggacaagagtctgcagac

SEQ ID NO: 138840 - RNA, 22 nt, synthetic construct
  source 1..22: mol_type = other RNA
gccgggaggagccaagtaaaag

SEQ ID NO: 138841 - RNA, 22 nt, synthetic construct
  source 1..22: mol_type = other RNA
gccgggatttacttctatatgt

SEQ ID NO: 138842 - RNA, 22 nt, synthetic construct
  source 1..22: mol_type = other RNA
gccgggcttggtatgcatcttg

SEQ ID NO: 138843 - RNA, 22 nt, synthetic construct
  source 1..22: mol_type = other RNA
gccgggtcgcggacgcgcattt

SEQ ID NO: 138844 - RNA, 22 nt, synthetic construct
  source 1..22: mol_type = other RNA
gccgggtgtagtggtgtgtgac

SEQ ID NO: 138845 - RNA, 22 nt, synthetic construct
  source 1..22: mol_type = other RNA
gccggtaatcacagctactcag

SEQ ID NO: 138846 - RNA, 22 nt, synthetic construct
  source 1..22: mol_type = other RNA
gccgtccctattttctacaggt

SEQ ID NO: 138847 - RNA, 22 nt, synthetic construct
  source 1..22: mol_type = other RNA
gccgtcggtatgttaataaccc

SEQ ID NO: 138848 - RNA, 22 nt, synthetic construct
  source 1..22: mol_type = other RNA
gccgtctccctcggccacagca

SEQ ID NO: 138849 - RNA, 22 nt, synthetic construct
  source 1..22: mol_type = other RNA
gccgttccatcagagaggcttt

SEQ ID NO: 138850 - RNA, 22 nt, synthetic construct
  source 1..22: mol_type = other RNA
gcctaaaataggcctaggtgtg

SEQ ID NO: 138851 - RNA, 22 nt, synthetic construct
  source 1..22: mol_type = other RNA
gcctaaaccattttcaatcttg

SEQ ID NO: 138852 - RNA, 22 nt, synthetic construct
  source 1..22: mol_type = other RNA
gcctaaagtccacagatctttt

SEQ ID NO: 138853 - RNA, 22 nt, synthetic construct
  source 1..22: mol_type = other RNA
gcctaaataaaacacatgtcat

SEQ ID NO: 138854 - RNA, 22 nt, synthetic construct
  source 1..22: mol_type = other RNA
gcctaaatcaggatgtctttgg

SEQ ID NO: 138855 - RNA, 22 nt, synthetic construct
  source 1..22: mol_type = other RNA
gcctaacaccagtaagattctg

SEQ ID NO: 138856 - RNA, 22 nt, synthetic construct
  source 1..22: mol_type = other RNA
gcctaagatggaaagtggacta

SEQ ID NO: 138857 - RNA, 22 nt, synthetic construct
  source 1..22: mol_type = other RNA
gcctaagcaaatgtaatgaaaa

SEQ ID NO: 138858 - RNA, 22 nt, synthetic construct
  source 1..22: mol_type = other RNA
gcctaagcaagttacatgctta

SEQ ID NO: 138859 - RNA, 22 nt, synthetic construct
  source 1..22: mol_type = other RNA
gcctaagtaatgctggccagtg

SEQ ID NO: 138860 - RNA, 22 nt, synthetic construct
  source 1..22: mol_type = other RNA
gcctaagtctcaggatacaaaa

SEQ ID NO: 138861 - RNA, 22 nt, synthetic construct
  source 1..22: mol_type = other RNA
gcctaatctctaggcttaaaat

SEQ ID NO: 138862 - RNA, 22 nt, synthetic construct
  source 1..22: mol_type = other RNA
gcctaatgtgtaagaaatgcca

SEQ ID NO: 138863 - RNA, 22 nt, synthetic construct
  source 1..22: mol_type = other RNA
gcctaattgtacacctcaaact

SEQ ID NO: 138864 - RNA, 22 nt, synthetic construct
  source 1..22: mol_type = other RNA
gcctacagtggttccatttgtt

SEQ ID NO: 138865 - RNA, 22 nt, synthetic construct
  source 1..22: mol_type = other RNA
gcctacatagtccactttccat

SEQ ID NO: 138866 - RNA, 22 nt, synthetic construct
  source 1..22: mol_type = other RNA
gcctacctcccttcacaaagcc

SEQ ID NO: 138867 - RNA, 22 nt, synthetic construct
  source 1..22: mol_type = other RNA
gcctactagccagtgattggat

SEQ ID NO: 138868 - RNA, 22 nt, synthetic construct
  source 1..22: mol_type = other RNA
gcctactgctctgtcctgtcag

SEQ ID NO: 138869 - RNA, 22 nt, synthetic construct
  source 1..22: mol_type = other RNA
gcctagaaaggaattgtaatca

SEQ ID NO: 138870 - RNA, 22 nt, synthetic construct
  source 1..22: mol_type = other RNA
gcctagaaatcatacacgagtg

SEQ ID NO: 138871 - RNA, 22 nt, synthetic construct
  source 1..22: mol_type = other RNA
gcctagacctcaaattaatcag

SEQ ID NO: 138872 - RNA, 22 nt, synthetic construct
  source 1..22: mol_type = other RNA
gcctagagattaggcagaacca

SEQ ID NO: 138873 - RNA, 22 nt, synthetic construct
  source 1..22: mol_type = other RNA
gcctagataagaaaatgtgaca

SEQ ID NO: 138874 - RNA, 22 nt, synthetic construct
  source 1..22: mol_type = other RNA
gcctagatgattcgcattgcta

SEQ ID NO: 138875 - RNA, 22 nt, synthetic construct
  source 1..22: mol_type = other RNA
gcctagatttcaatctggaatg

SEQ ID NO: 138876 - RNA, 22 nt, synthetic construct
  source 1..22: mol_type = other RNA
gcctagctgacttttaaaatat

SEQ ID NO: 138877 - RNA, 22 nt, synthetic construct
  source 1..22: mol_type = other RNA
gcctaggcaagagagcaagact

SEQ ID NO: 138878 - RNA, 22 nt, synthetic construct
  source 1..22: mol_type = other RNA
gcctaggtgtgataactgatat

SEQ ID NO: 138879 - RNA, 22 nt, synthetic construct
  source 1..22: mol_type = other RNA
gcctagtcatccactgcacagt

SEQ ID NO: 138880 - RNA, 22 nt, synthetic construct
  source 1..22: mol_type = other RNA
gcctataaaatgctggaaattt

SEQ ID NO: 138881 - RNA, 22 nt, synthetic construct
  source 1..22: mol_type = other RNA
gcctataattcaattttcatgg

SEQ ID NO: 138882 - RNA, 22 nt, synthetic construct
  source 1..22: mol_type = other RNA
gcctatagacagcatccccaga

SEQ ID NO: 138883 - RNA, 22 nt, synthetic construct
  source 1..22: mol_type = other RNA
gcctatgaaatcttgaagatgg

SEQ ID NO: 138884 - RNA, 22 nt, synthetic construct
  source 1..22: mol_type = other RNA
gcctatgtaagacaatgtcttt

SEQ ID NO: 138885 - RNA, 22 nt, synthetic construct
  source 1..22: mol_type = other RNA
gcctattctggggctcaagtaa

SEQ ID NO: 138886 - RNA, 22 nt, synthetic construct
  source 1..22: mol_type = other RNA
gcctattttaggctctgtggtt

SEQ ID NO: 138887 - RNA, 22 nt, synthetic construct
  source 1..22: mol_type = other RNA
gcctcaaaatcaacattgcctc

SEQ ID NO: 138888 - RNA, 22 nt, synthetic construct
  source 1..22: mol_type = other RNA
gcctcaaaatttagtaagggta

SEQ ID NO: 138889 - RNA, 22 nt, synthetic construct
  source 1..22: mol_type = other RNA
gcctcaaacgaaccaattacca

SEQ ID NO: 138890 - RNA, 22 nt, synthetic construct
  source 1..22: mol_type = other RNA
gcctcaaattagtcatagcagt

SEQ ID NO: 138891 - RNA, 22 nt, synthetic construct
  source 1..22: mol_type = other RNA
gcctcaaatttcatttactgaa

SEQ ID NO: 138892 - RNA, 22 nt, synthetic construct
  source 1..22: mol_type = other RNA
gcctcaacagcacttttgtact

SEQ ID NO: 138893 - RNA, 22 nt, synthetic construct
  source 1..22: mol_type = other RNA
gcctcagaattaatataagatg

SEQ ID NO: 138894 - RNA, 22 nt, synthetic construct
  source 1..22: mol_type = other RNA
gcctcagcatgtcttcagaggc

SEQ ID NO: 138895 - RNA, 22 nt, synthetic construct
  source 1..22: mol_type = other RNA
gcctcagccgccgcagaggcca

SEQ ID NO: 138896 - RNA, 22 nt, synthetic construct
  source 1..22: mol_type = other RNA
gcctcagcctcccgagtagttg

SEQ ID NO: 138897 - RNA, 22 nt, synthetic construct
  source 1..22: mol_type = other RNA
gcctcagcctcccgagtatcta

SEQ ID NO: 138898 - RNA, 22 nt, synthetic construct
  source 1..22: mol_type = other RNA
gcctcagttgacatcctttaat

SEQ ID NO: 138899 - RNA, 22 nt, synthetic construct
  source 1..22: mol_type = other RNA
gcctcatgcatccacattttgt

SEQ ID NO: 138900 - RNA, 22 nt, synthetic construct
  source 1..22: mol_type = other RNA
gcctcatgtattttcctaacca

SEQ ID NO: 138901 - RNA, 22 nt, synthetic construct
  source 1..22: mol_type = other RNA
gcctcatttgaactttccagaa

SEQ ID NO: 138902 - RNA, 22 nt, synthetic construct
  source 1..22: mol_type = other RNA
gcctccacacctggcccctttc

SEQ ID NO: 138903 - RNA, 22 nt, synthetic construct
  source 1..22: mol_type = other RNA
gcctccacaggctttgacttct

SEQ ID NO: 138904 - RNA, 22 nt, synthetic construct
  source 1..22: mol_type = other RNA
gcctccagaaaaccagaaaagt

SEQ ID NO: 138905 - RNA, 22 nt, synthetic construct
  source 1..22: mol_type = other RNA
gcctccatatgggatgcttaaa

SEQ ID NO: 138906 - RNA, 22 nt, synthetic construct
  source 1..22: mol_type = other RNA
gcctcccgagtagttgtaacta

SEQ ID NO: 138907 - RNA, 22 nt, synthetic construct
  source 1..22: mol_type = other RNA
gcctcccgagtatctaggagta

SEQ ID NO: 138908 - RNA, 22 nt, synthetic construct
  source 1..22: mol_type = other RNA
gcctcccgggtccaggcagttc

SEQ ID NO: 138909 - RNA, 22 nt, synthetic construct
  source 1..22: mol_type = other RNA
gcctcccgggtttaagcgattc

SEQ ID NO: 138910 - RNA, 22 nt, synthetic construct
  source 1..22: mol_type = other RNA
gcctccctcactaagtcagaat

SEQ ID NO: 138911 - RNA, 22 nt, synthetic construct
  source 1..22: mol_type = other RNA
gcctccctggttcaagctatgc

SEQ ID NO: 138912 - RNA, 22 nt, synthetic construct
  source 1..22: mol_type = other RNA
gcctcctaagttttgggggaag

SEQ ID NO: 138913 - RNA, 22 nt, synthetic construct
  source 1..22: mol_type = other RNA
gcctcctgccttcctgacctct

SEQ ID NO: 138914 - RNA, 22 nt, synthetic construct
  source 1..22: mol_type = other RNA
gcctcctgggttcaggtgcctc

SEQ ID NO: 138915 - RNA, 22 nt, synthetic construct
  source 1..22: mol_type = other RNA
gcctcctggtgggttcatgcca

SEQ ID NO: 138916 - RNA, 22 nt, synthetic construct
  source 1..22: mol_type = other RNA
gcctcgaaggcctgcttcattc

SEQ ID NO: 138917 - RNA, 22 nt, synthetic construct
  source 1..22: mol_type = other RNA
gcctcgctcttggcttttggca

SEQ ID NO: 138918 - RNA, 22 nt, synthetic construct
  source 1..22: mol_type = other RNA
gcctcggcacagctctcatgag

SEQ ID NO: 138919 - RNA, 22 nt, synthetic construct
  source 1..22: mol_type = other RNA
gcctcggccaaccattactctt

SEQ ID NO: 138920 - RNA, 22 nt, synthetic construct
  source 1..22: mol_type = other RNA
gcctctaatcaggttgggctta

SEQ ID NO: 138921 - RNA, 22 nt, synthetic construct
  source 1..22: mol_type = other RNA
gcctctacatcacagacaggga

SEQ ID NO: 138922 - RNA, 22 nt, synthetic construct
  source 1..22: mol_type = other RNA
gcctctactgactcccttttta

SEQ ID NO: 138923 - RNA, 22 nt, synthetic construct
  source 1..22: mol_type = other RNA
gcctctcaacacttcagtggta

SEQ ID NO: 138924 - RNA, 22 nt, synthetic construct
  source 1..22: mol_type = other RNA
gcctctccagggaggaatcctt

SEQ ID NO: 138925 - RNA, 22 nt, synthetic construct
  source 1..22: mol_type = other RNA
gcctctcccaccatctctctgc

SEQ ID NO: 138926 - RNA, 22 nt, synthetic construct
  source 1..22: mol_type = other RNA
gcctctccccttgacgaagtca

SEQ ID NO: 138927 - RNA, 22 nt, synthetic construct
  source 1..22: mol_type = other RNA
gcctctctgatggaacggctta

SEQ ID NO: 138928 - RNA, 22 nt, synthetic construct
  source 1..22: mol_type = other RNA
gcctctctgggcttcactttcg

SEQ ID NO: 138929 - RNA, 22 nt, synthetic construct
  source 1..22: mol_type = other RNA
gcctctgaagacatgctgaggc

SEQ ID NO: 138930 - RNA, 22 nt, synthetic construct
  source 1..22: mol_type = other RNA
gcctctgcggcggctgaggcag

SEQ ID NO: 138931 - RNA, 22 nt, synthetic construct
  source 1..22: mol_type = other RNA
gcctctgtgctagccttcttgg

SEQ ID NO: 138932 - RNA, 22 nt, synthetic construct
  source 1..22: mol_type = other RNA
gcctctgtggaccatgttttag

SEQ ID NO: 138933 - RNA, 22 nt, synthetic construct
  source 1..22: mol_type = other RNA
gcctctgttacagctcttctca

SEQ ID NO: 138934 - RNA, 22 nt, synthetic construct
  source 1..22: mol_type = other RNA
gcctcttcagaagaggataagg

SEQ ID NO: 138935 - RNA, 22 nt, synthetic construct
  source 1..22: mol_type = other RNA
gcctcttcccttgtgcacctcg

SEQ ID NO: 138936 - RNA, 22 nt, synthetic construct
  source 1..22: mol_type = other RNA
gcctcttcctgttgctttaacc

SEQ ID NO: 138937 - RNA, 22 nt, synthetic construct
  source 1..22: mol_type = other RNA
gcctctttgctaataagtgagt

SEQ ID NO: 138938 - RNA, 22 nt, synthetic construct
  source 1..22: mol_type = other RNA
gcctgacaaagtatgagaaatg

SEQ ID NO: 138939 - RNA, 22 nt, synthetic construct
  source 1..22: mol_type = other RNA
gcctgacagcaaataaacaaaa

SEQ ID NO: 138940 - RNA, 22 nt, synthetic construct
  source 1..22: mol_type = other RNA
gcctgagccgtcggtatgttaa

SEQ ID NO: 138941 - RNA, 22 nt, synthetic construct
  source 1..22: mol_type = other RNA
gcctgagctctcagtggccctg

SEQ ID NO: 138942 - RNA, 22 nt, synthetic construct
  source 1..22: mol_type = other RNA
gcctgaggacactagcaatcca

SEQ ID NO: 138943 - RNA, 22 nt, synthetic construct
  source 1..22: mol_type = other RNA
gcctgaggtctcaaaatttaaa

SEQ ID NO: 138944 - RNA, 22 nt, synthetic construct
  source 1..22: mol_type = other RNA
gcctgataagctcccagccaaa

SEQ ID NO: 138945 - RNA, 22 nt, synthetic construct
  source 1..22: mol_type = other RNA
gcctgatagctgtggaagcaca

SEQ ID NO: 138946 - RNA, 22 nt, synthetic construct
  source 1..22: mol_type = other RNA
gcctgatgatgatggtgatgct

SEQ ID NO: 138947 - RNA, 22 nt, synthetic construct
  source 1..22: mol_type = other RNA
gcctgcaccatttattgtcaag

SEQ ID NO: 138948 - RNA, 22 nt, synthetic construct
  source 1..22: mol_type = other RNA
gcctgcagaaggagaaaccatt

SEQ ID NO: 138949 - RNA, 22 nt, synthetic construct
  source 1..22: mol_type = other RNA
gcctgcagactgcaggtcttca

SEQ ID NO: 138950 - RNA, 22 nt, synthetic construct
  source 1..22: mol_type = other RNA
gcctgcattgcatttacttgtc

SEQ ID NO: 138951 - RNA, 22 nt, synthetic construct
  source 1..22: mol_type = other RNA
gcctgccatagagggagcatct

SEQ ID NO: 138952 - RNA, 22 nt, synthetic construct
  source 1..22: mol_type = other RNA
gcctgccgcagagcaagcacgt

SEQ ID NO: 138953 - RNA, 22 nt, synthetic construct
  source 1..22: mol_type = other RNA
gcctgcgtccgtagaccgagga

SEQ ID NO: 138954 - RNA, 22 nt, synthetic construct
  source 1..22: mol_type = other RNA
gcctgctctgcagagactgtgc

SEQ ID NO: 138955 - RNA, 22 nt, synthetic construct
  source 1..22: mol_type = other RNA
gcctgcttcagcctaagcaagt

SEQ ID NO: 138956 - RNA, 22 nt, synthetic construct
  source 1..22: mol_type = other RNA
gcctgcttcattccgcgtttat

SEQ ID NO: 138957 - RNA, 22 nt, synthetic construct
  source 1..22: mol_type = other RNA
gcctgcttttggaagcatgtgg

SEQ ID NO: 138958 - RNA, 22 nt, synthetic construct
  source 1..22: mol_type = other RNA
gcctggaacaggccctttgtta

SEQ ID NO: 138959 - RNA, 22 nt, synthetic construct
  source 1..22: mol_type = other RNA
gcctggaagttcaaggttataa

SEQ ID NO: 138960 - RNA, 22 nt, synthetic construct
  source 1..22: mol_type = other RNA
gcctggacaacagtgtgagacc

SEQ ID NO: 138961 - RNA, 22 nt, synthetic construct
  source 1..22: mol_type = other RNA
gcctggacacacacagtcctgt

SEQ ID NO: 138962 - RNA, 22 nt, synthetic construct
  source 1..22: mol_type = other RNA
gcctggacaggatcccggaaca

SEQ ID NO: 138963 - RNA, 22 nt, synthetic construct
  source 1..22: mol_type = other RNA
gcctggacccgggaggcagatg

SEQ ID NO: 138964 - RNA, 22 nt, synthetic construct
  source 1..22: mol_type = other RNA
gcctggatgaatgcagtggctt

SEQ ID NO: 138965 - RNA, 22 nt, synthetic construct
  source 1..22: mol_type = other RNA
gcctggccaacatcgtaaaacc

SEQ ID NO: 138966 - RNA, 22 nt, synthetic construct
  source 1..22: mol_type = other RNA
gcctggctttagatggtaaaac

SEQ ID NO: 138967 - RNA, 22 nt, synthetic construct
  source 1..22: mol_type = other RNA
gcctgggacagagcgagactcc

SEQ ID NO: 138968 - RNA, 22 nt, synthetic construct
  source 1..22: mol_type = other RNA
gcctgggcacacgccactgcag

SEQ ID NO: 138969 - RNA, 22 nt, synthetic construct
  source 1..22: mol_type = other RNA
gcctgggcgacaagagcagaac

SEQ ID NO: 138970 - RNA, 22 nt, synthetic construct
  source 1..22: mol_type = other RNA
gcctgggcgacagagtgaaact

SEQ ID NO: 138971 - RNA, 22 nt, synthetic construct
  source 1..22: mol_type = other RNA
gcctgggtaattaaacattttt

SEQ ID NO: 138972 - RNA, 22 nt, synthetic construct
  source 1..22: mol_type = other RNA
gcctggtaatgaatagaaaatc

SEQ ID NO: 138973 - RNA, 22 nt, synthetic construct
  source 1..22: mol_type = other RNA
gcctggtcaacagggtaagatt

SEQ ID NO: 138974 - RNA, 22 nt, synthetic construct
  source 1..22: mol_type = other RNA
gcctggtcctgagggctttgtg

SEQ ID NO: 138975 - RNA, 22 nt, synthetic construct
  source 1..22: mol_type = other RNA
gcctggtgattaaagttatttc

SEQ ID NO: 138976 - RNA, 22 nt, synthetic construct
  source 1..22: mol_type = other RNA
gcctggttagggagactttcac

SEQ ID NO: 138977 - RNA, 22 nt, synthetic construct
  source 1..22: mol_type = other RNA
gcctgtagttttggtgtcattt

SEQ ID NO: 138978 - RNA, 22 nt, synthetic construct
  source 1..22: mol_type = other RNA
gcctgtccaacatggcaaaacc

SEQ ID NO: 138979 - RNA, 22 nt, synthetic construct
  source 1..22: mol_type = other RNA
gcctgtgacagtatgtcagact

SEQ ID NO: 138980 - RNA, 22 nt, synthetic construct
  source 1..22: mol_type = other RNA
gcctgtgcttgtctctctcttt

SEQ ID NO: 138981 - RNA, 22 nt, synthetic construct
  source 1..22: mol_type = other RNA
gcctgtgcttttctcgtgcatg

SEQ ID NO: 138982 - RNA, 22 nt, synthetic construct
  source 1..22: mol_type = other RNA
gcctgtggaggcagtaccattc

SEQ ID NO: 138983 - RNA, 22 nt, synthetic construct
  source 1..22: mol_type = other RNA
gcctgtggtccctgctactcag

SEQ ID NO: 138984 - RNA, 22 nt, synthetic construct
  source 1..22: mol_type = other RNA
gcctgtggtctcttcgaggggg

SEQ ID NO: 138985 - RNA, 22 nt, synthetic construct
  source 1..22: mol_type = other RNA
gcctgtgtcagtgacagttctg

SEQ ID NO: 138986 - RNA, 22 nt, synthetic construct
  source 1..22: mol_type = other RNA
gcctgttccaggcctcgctctt

SEQ ID NO: 138987 - RNA, 22 nt, synthetic construct
  source 1..22: mol_type = other RNA
gcctgttccgattttacttact

SEQ ID NO: 138988 - RNA, 22 nt, synthetic construct
  source 1..22: mol_type = other RNA
gcctgttgggaggtttttgatt

SEQ ID NO: 138989 - RNA, 22 nt, synthetic construct
  source 1..22: mol_type = other RNA
gcctgttgtgaggattcgatta

SEQ ID NO: 138990 - RNA, 22 nt, synthetic construct
  source 1..22: mol_type = other RNA
gccttaaaagtgctgcagtatg

SEQ ID NO: 138991 - RNA, 22 nt, synthetic construct
  source 1..22: mol_type = other RNA
gccttaaagccacactcttggt

SEQ ID NO: 138992 - RNA, 22 nt, synthetic construct
  source 1..22: mol_type = other RNA
gccttaatctcctgagtagcag

SEQ ID NO: 138993 - RNA, 22 nt, synthetic construct
  source 1..22: mol_type = other RNA
gccttcaagttgctttttcttc

SEQ ID NO: 138994 - RNA, 22 nt, synthetic construct
  source 1..22: mol_type = other RNA
gccttcaatgtttggtagattt

SEQ ID NO: 138995 - RNA, 22 nt, synthetic construct
  source 1..22: mol_type = other RNA
gccttcagaactcttctccaag

SEQ ID NO: 138996 - RNA, 22 nt, synthetic construct
  source 1..22: mol_type = other RNA
gccttcagaaggagtccagtcc

SEQ ID NO: 138997 - RNA, 22 nt, synthetic construct
  source 1..22: mol_type = other RNA
gccttcagctatggtgttattt

SEQ ID NO: 138998 - RNA, 22 nt, synthetic construct
  source 1..22: mol_type = other RNA
gccttcagtatgaatgcacgtg

SEQ ID NO: 138999 - RNA, 22 nt, synthetic construct
  source 1..22: mol_type = other RNA
gccttccacctgctctttatct

SEQ ID NO: 139000 - RNA, 22 nt, synthetic construct
  source 1..22: mol_type = other RNA
gccttccacggaatgccccttt

SEQ ID NO: 139001 - RNA, 22 nt, synthetic construct
  source 1..22: mol_type = other RNA
gccttccagagacaaagcataa

SEQ ID NO: 139002 - RNA, 22 nt, synthetic construct
  source 1..22: mol_type = other RNA
gccttcccaaagacatcctgat

SEQ ID NO: 139003 - RNA, 22 nt, synthetic construct
  source 1..22: mol_type = other RNA
gccttcccctgctgttcccaag

SEQ ID NO: 139004 - RNA, 22 nt, synthetic construct
  source 1..22: mol_type = other RNA
gccttccctgaacaatgatttt

SEQ ID NO: 139005 - RNA, 22 nt, synthetic construct
  source 1..22: mol_type = other RNA
gccttcctaccctgccttcctt

SEQ ID NO: 139006 - RNA, 22 nt, synthetic construct
  source 1..22: mol_type = other RNA
gccttcctgacctctgcagtta

SEQ ID NO: 139007 - RNA, 22 nt, synthetic construct
  source 1..22: mol_type = other RNA
gccttccttgggcacactcccc

SEQ ID NO: 139008 - RNA, 22 nt, synthetic construct
  source 1..22: mol_type = other RNA
gccttcgaggcatctagttacc

SEQ ID NO: 139009 - RNA, 22 nt, synthetic construct
  source 1..22: mol_type = other RNA
gccttcgcagggtgaaacttga

SEQ ID NO: 139010 - RNA, 22 nt, synthetic construct
  source 1..22: mol_type = other RNA
gccttcgcgcgcggcagggatg

SEQ ID NO: 139011 - RNA, 22 nt, synthetic construct
  source 1..22: mol_type = other RNA
gccttcgcgggcaccttcccta

SEQ ID NO: 139012 - RNA, 22 nt, synthetic construct
  source 1..22: mol_type = other RNA
gccttctactttaataaatgaa

SEQ ID NO: 139013 - RNA, 22 nt, synthetic construct
  source 1..22: mol_type = other RNA
gccttctcagaaggacaccagt

SEQ ID NO: 139014 - RNA, 22 nt, synthetic construct
  source 1..22: mol_type = other RNA
gccttctcctccaacccattcc

SEQ ID NO: 139015 - RNA, 22 nt, synthetic construct
  source 1..22: mol_type = other RNA
gccttctctactctgcctcagt

SEQ ID NO: 139016 - RNA, 22 nt, synthetic construct
  source 1..22: mol_type = other RNA
gccttctctcttccaaataatc

SEQ ID NO: 139017 - RNA, 22 nt, synthetic construct
  source 1..22: mol_type = other RNA
gccttctgaggagctgagacca

SEQ ID NO: 139018 - RNA, 22 nt, synthetic construct
  source 1..22: mol_type = other RNA
gccttcttggagtaaacctgca

SEQ ID NO: 139019 - RNA, 22 nt, synthetic construct
  source 1..22: mol_type = other RNA
gccttctttctttcaaatgtga

SEQ ID NO: 139020 - RNA, 22 nt, synthetic construct
  source 1..22: mol_type = other RNA
gccttgaaaatatactaaatac

SEQ ID NO: 139021 - RNA, 22 nt, synthetic construct
  source 1..22: mol_type = other RNA
gccttgacctcccaaaggactg

SEQ ID NO: 139022 - RNA, 22 nt, synthetic construct
  source 1..22: mol_type = other RNA
gccttgaggtgagacagaccct

SEQ ID NO: 139023 - RNA, 22 nt, synthetic construct
  source 1..22: mol_type = other RNA
gccttgaggtgattcagagtgc

SEQ ID NO: 139024 - RNA, 22 nt, synthetic construct
  source 1..22: mol_type = other RNA
gccttgatccattacatcaaca

SEQ ID NO: 139025 - RNA, 22 nt, synthetic construct
  source 1..22: mol_type = other RNA
gccttgcaagccacattagcca

SEQ ID NO: 139026 - RNA, 22 nt, synthetic construct
  source 1..22: mol_type = other RNA
gccttgccattctcccagttgt

SEQ ID NO: 139027 - RNA, 22 nt, synthetic construct
  source 1..22: mol_type = other RNA
gccttgctgttgtaatgttact

SEQ ID NO: 139028 - RNA, 22 nt, synthetic construct
  source 1..22: mol_type = other RNA
gccttggaggagccctgctgtg

SEQ ID NO: 139029 - RNA, 22 nt, synthetic construct
  source 1..22: mol_type = other RNA
gccttggcaaggggaatggtac

SEQ ID NO: 139030 - RNA, 22 nt, synthetic construct
  source 1..22: mol_type = other RNA
gccttggcctccccaagtgctg

SEQ ID NO: 139031 - RNA, 22 nt, synthetic construct
  source 1..22: mol_type = other RNA
gccttggccttctgaggagctg

SEQ ID NO: 139032 - RNA, 22 nt, synthetic construct
  source 1..22: mol_type = other RNA
gccttggtaaaatcactaattc

SEQ ID NO: 139033 - RNA, 22 nt, synthetic construct
  source 1..22: mol_type = other RNA
gccttggtaagagtgagaccct

SEQ ID NO: 139034 - RNA, 22 nt, synthetic construct
  source 1..22: mol_type = other RNA
gccttgtactgtgtggcttctc

SEQ ID NO: 139035 - RNA, 22 nt, synthetic construct
  source 1..22: mol_type = other RNA
gcctttaatcacctcaagtgat

SEQ ID NO: 139036 - RNA, 22 nt, synthetic construct
  source 1..22: mol_type = other RNA
gcctttaatttagcgttcatcc

SEQ ID NO: 139037 - RNA, 22 nt, synthetic construct
  source 1..22: mol_type = other RNA
gcctttattttttcttcccatc

SEQ ID NO: 139038 - RNA, 22 nt, synthetic construct
  source 1..22: mol_type = other RNA
gcctttcactttgatcatacac

SEQ ID NO: 139039 - RNA, 22 nt, synthetic construct
  source 1..22: mol_type = other RNA
gcctttcagcatagcagaacct

SEQ ID NO: 139040 - RNA, 22 nt, synthetic construct
  source 1..22: mol_type = other RNA
gcctttcatttggcctctgcgg

SEQ ID NO: 139041 - RNA, 22 nt, synthetic construct
  source 1..22: mol_type = other RNA
gcctttcgcttttggagctata

SEQ ID NO: 139042 - RNA, 22 nt, synthetic construct
  source 1..22: mol_type = other RNA
gcctttctcgcagcggggatgc

SEQ ID NO: 139043 - RNA, 22 nt, synthetic construct
  source 1..22: mol_type = other RNA
gcctttctgtttgtttgttttg

SEQ ID NO: 139044 - RNA, 22 nt, synthetic construct
  source 1..22: mol_type = other RNA
gcctttgcctctccagggagga

SEQ ID NO: 139045 - RNA, 22 nt, synthetic construct
  source 1..22: mol_type = other RNA
gcctttgttcatcatcttttgc

SEQ ID NO: 139046 - RNA, 22 nt, synthetic construct
  source 1..22: mol_type = other RNA
gcctttgttgccaggtggacgc

SEQ ID NO: 139047 - RNA, 22 nt, synthetic construct
  source 1..22: mol_type = other RNA
gccttttacaccctaggtaggg

SEQ ID NO: 139048 - RNA, 22 nt, synthetic construct
  source 1..22: mol_type = other RNA
gccttttcactcttagtgatgt

SEQ ID NO: 139049 - RNA, 22 nt, synthetic construct
  source 1..22: mol_type = other RNA
gccttttctgatttgctggctc

SEQ ID NO: 139050 - RNA, 22 nt, synthetic construct
  source 1..22: mol_type = other RNA
gccttttgtcaagctatcagaa

SEQ ID NO: 139051 - RNA, 22 nt, synthetic construct
  source 1..22: mol_type = other RNA
gcgaaacacactcgtgtatgat

SEQ ID NO: 139052 - RNA, 22 nt, synthetic construct
  source 1..22: mol_type = other RNA
gcgaaagggattctggccaaat

SEQ ID NO: 139053 - RNA, 22 nt, synthetic construct
  source 1..22: mol_type = other RNA
gcgaaaggtacgacgctcttgt

SEQ ID NO: 139054 - RNA, 22 nt, synthetic construct
  source 1..22: mol_type = other RNA
gcgaaatagtagttgctcagaa

SEQ ID NO: 139055 - RNA, 22 nt, synthetic construct
  source 1..22: mol_type = other RNA
gcgaaatatctccctcacagtc

SEQ ID NO: 139056 - RNA, 22 nt, synthetic construct
  source 1..22: mol_type = other RNA
gcgaaatgtgaacagacagaca

SEQ ID NO: 139057 - RNA, 22 nt, synthetic construct
  source 1..22: mol_type = other RNA
gcgaagagggagaagaaataaa

SEQ ID NO: 139058 - RNA, 22 nt, synthetic construct
  source 1..22: mol_type = other RNA
gcgaagcccgccgctcgcaggt

SEQ ID NO: 139059 - RNA, 22 nt, synthetic construct
  source 1..22: mol_type = other RNA
gcgaaggcaatgtaacacagtt

SEQ ID NO: 139060 - RNA, 22 nt, synthetic construct
  source 1..22: mol_type = other RNA
gcgaaggcgtgtaaactgttgg

SEQ ID NO: 139061 - RNA, 22 nt, synthetic construct
  source 1..22: mol_type = other RNA
gcgaatcatctaggcatataaa

SEQ ID NO: 139062 - RNA, 22 nt, synthetic construct
  source 1..22: mol_type = other RNA
gcgaatttacttttaaactgta

SEQ ID NO: 139063 - RNA, 22 nt, synthetic construct
  source 1..22: mol_type = other RNA
gcgacaagagcagaactccacc

SEQ ID NO: 139064 - RNA, 22 nt, synthetic construct
  source 1..22: mol_type = other RNA
gcgacagagtgaaactctggct

SEQ ID NO: 139065 - RNA, 22 nt, synthetic construct
  source 1..22: mol_type = other RNA
gcgacagctacggaggatgagg

SEQ ID NO: 139066 - RNA, 22 nt, synthetic construct
  source 1..22: mol_type = other RNA
gcgacatatcagggatcacaga

SEQ ID NO: 139067 - RNA, 22 nt, synthetic construct
  source 1..22: mol_type = other RNA
gcgacctcgaagcacaaccact

SEQ ID NO: 139068 - RNA, 22 nt, synthetic construct
  source 1..22: mol_type = other RNA
gcgactcatgcctgtaattcta

SEQ ID NO: 139069 - RNA, 22 nt, synthetic construct
  source 1..22: mol_type = other RNA
gcgagaaaggcgaagcggcagg

SEQ ID NO: 139070 - RNA, 22 nt, synthetic construct
  source 1..22: mol_type = other RNA
gcgagacctcatctctgcaaaa

SEQ ID NO: 139071 - RNA, 22 nt, synthetic construct
  source 1..22: mol_type = other RNA
gcgagactccatctcaagaaaa

SEQ ID NO: 139072 - RNA, 22 nt, synthetic construct
  source 1..22: mol_type = other RNA
gcgagatggcgtgcgcctgtaa

SEQ ID NO: 139073 - RNA, 22 nt, synthetic construct
  source 1..22: mol_type = other RNA
gcgagcggcgggcttcgccttt

SEQ ID NO: 139074 - RNA, 22 nt, synthetic construct
  source 1..22: mol_type = other RNA
gcgagcttgatctttacttccc

SEQ ID NO: 139075 - RNA, 22 nt, synthetic construct
  source 1..22: mol_type = other RNA
gcgaggcctggaacaggccctt

SEQ ID NO: 139076 - RNA, 22 nt, synthetic construct
  source 1..22: mol_type = other RNA
gcgagggagcgtacggggtccg

SEQ ID NO: 139077 - RNA, 22 nt, synthetic construct
  source 1..22: mol_type = other RNA
gcgagtgtgaacgatggtttct

SEQ ID NO: 139078 - RNA, 22 nt, synthetic construct
  source 1..22: mol_type = other RNA
gcgatgatcaaaaccaggaggt

SEQ ID NO: 139079 - RNA, 22 nt, synthetic construct
  source 1..22: mol_type = other RNA
gcgattctagtgtctcagcctc

SEQ ID NO: 139080 - RNA, 22 nt, synthetic construct
  source 1..22: mol_type = other RNA
gcgattggttggactccaccct

SEQ ID NO: 139081 - RNA, 22 nt, synthetic construct
  source 1..22: mol_type = other RNA
gcgattgtttcagtgtgtccac

SEQ ID NO: 139082 - RNA, 22 nt, synthetic construct
  source 1..22: mol_type = other RNA
gcgcaacaattcaacagctact

SEQ ID NO: 139083 - RNA, 22 nt, synthetic construct
  source 1..22: mol_type = other RNA
gcgcaatctcggcttcactgca

SEQ ID NO: 139084 - RNA, 22 nt, synthetic construct
  source 1..22: mol_type = other RNA
gcgcaattgcagccagagagtg

SEQ ID NO: 139085 - RNA, 22 nt, synthetic construct
  source 1..22: mol_type = other RNA
gcgcacgccatctcgcccagct

SEQ ID NO: 139086 - RNA, 22 nt, synthetic construct
  source 1..22: mol_type = other RNA
gcgcagaactggggcttgaacc

SEQ ID NO: 139087 - RNA, 22 nt, synthetic construct
  source 1..22: mol_type = other RNA
gcgcagacacaccatgacagag

SEQ ID NO: 139088 - RNA, 22 nt, synthetic construct
  source 1..22: mol_type = other RNA
gcgcagccatggctcactgcgg

SEQ ID NO: 139089 - RNA, 22 nt, synthetic construct
  source 1..22: mol_type = other RNA
gcgcagtgcttagcgctggagg

SEQ ID NO: 139090 - RNA, 22 nt, synthetic construct
  source 1..22: mol_type = other RNA
gcgcattttttaagtggcgctg

SEQ ID NO: 139091 - RNA, 22 nt, synthetic construct
  source 1..22: mol_type = other RNA
gcgccacgtgaagatggagtta

SEQ ID NO: 139092 - RNA, 22 nt, synthetic construct
  source 1..22: mol_type = other RNA
gcgccactgcactccagccttg

SEQ ID NO: 139093 - RNA, 22 nt, synthetic construct
  source 1..22: mol_type = other RNA
gcgccacttaaaaaatgcgcgt

SEQ ID NO: 139094 - RNA, 22 nt, synthetic construct
  source 1..22: mol_type = other RNA
gcgccatcacacccagtataca

SEQ ID NO: 139095 - RNA, 22 nt, synthetic construct
  source 1..22: mol_type = other RNA
gcgcccagcccgtgtgtttaga

SEQ ID NO: 139096 - RNA, 22 nt, synthetic construct
  source 1..22: mol_type = other RNA
gcgcccggccaaatatccatgt

SEQ ID NO: 139097 - RNA, 22 nt, synthetic construct
  source 1..22: mol_type = other RNA
gcgcccggcccagattcctttt

SEQ ID NO: 139098 - RNA, 22 nt, synthetic construct
  source 1..22: mol_type = other RNA
gcgcccggcccgttatttttat

SEQ ID NO: 139099 - RNA, 22 nt, synthetic construct
  source 1..22: mol_type = other RNA
gcgcccggccgagaaatcggaa

SEQ ID NO: 139100 - RNA, 22 nt, synthetic construct
  source 1..22: mol_type = other RNA
gcgccctggcattgtcccgggg

SEQ ID NO: 139101 - RNA, 22 nt, synthetic construct
  source 1..22: mol_type = other RNA
gcgcctgcattgcatttacttg

SEQ ID NO: 139102 - RNA, 22 nt, synthetic construct
  source 1..22: mol_type = other RNA
gcgcctggacaggatcccggaa

SEQ ID NO: 139103 - RNA, 22 nt, synthetic construct
  source 1..22: mol_type = other RNA
gcgcctggtgattaaagttatt

SEQ ID NO: 139104 - RNA, 22 nt, synthetic construct
  source 1..22: mol_type = other RNA
gcgccttaaagccacactcttg

SEQ ID NO: 139105 - RNA, 22 nt, synthetic construct
  source 1..22: mol_type = other RNA
gcgcgagggagcgtacggggtc

SEQ ID NO: 139106 - RNA, 22 nt, synthetic construct
  source 1..22: mol_type = other RNA
gcgcgcggcagggatgctgcga

SEQ ID NO: 139107 - RNA, 22 nt, synthetic construct
  source 1..22: mol_type = other RNA
gcgcggaccccgtacgctccct

SEQ ID NO: 139108 - RNA, 22 nt, synthetic construct
  source 1..22: mol_type = other RNA
gcgcggcagggatgctgcgagc

SEQ ID NO: 139109 - RNA, 22 nt, synthetic construct
  source 1..22: mol_type = other RNA
gcgcgtcaaaagatgctggtgg

SEQ ID NO: 139110 - RNA, 22 nt, synthetic construct
  source 1..22: mol_type = other RNA
gcgcgtgcctatggtcctagct

SEQ ID NO: 139111 - RNA, 22 nt, synthetic construct
  source 1..22: mol_type = other RNA
gcgcgtgcctgcaatcgcaggc

SEQ ID NO: 139112 - RNA, 22 nt, synthetic construct
  source 1..22: mol_type = other RNA
gcgctaagcactgcgccaagca

SEQ ID NO: 139113 - RNA, 22 nt, synthetic construct
  source 1..22: mol_type = other RNA
gcgctaagtgcatttcggctct

SEQ ID NO: 139114 - RNA, 22 nt, synthetic construct
  source 1..22: mol_type = other RNA
gcgctactcagctgtcactctc

SEQ ID NO: 139115 - RNA, 22 nt, synthetic construct
  source 1..22: mol_type = other RNA
gcgctccctctgtgtgcatgca

SEQ ID NO: 139116 - RNA, 22 nt, synthetic construct
  source 1..22: mol_type = other RNA
gcgctcctctcccgccggagtc

SEQ ID NO: 139117 - RNA, 22 nt, synthetic construct
  source 1..22: mol_type = other RNA
gcgctcttcaagcattgggagc

SEQ ID NO: 139118 - RNA, 22 nt, synthetic construct
  source 1..22: mol_type = other RNA
gcgctgaagtacttcaaggttc

SEQ ID NO: 139119 - RNA, 22 nt, synthetic construct
  source 1..22: mol_type = other RNA
gcgctgatgtgttgaccttagt

SEQ ID NO: 139120 - RNA, 22 nt, synthetic construct
  source 1..22: mol_type = other RNA
gcgctggaggtcgggctgcctc

SEQ ID NO: 139121 - RNA, 22 nt, synthetic construct
  source 1..22: mol_type = other RNA
gcgctgtttgcctgcgtccgta

SEQ ID NO: 139122 - RNA, 22 nt, synthetic construct
  source 1..22: mol_type = other RNA
gcgcttctatgtgacaaacact

SEQ ID NO: 139123 - RNA, 22 nt, synthetic construct
  source 1..22: mol_type = other RNA
gcgcttgaacaaatatgaatga

SEQ ID NO: 139124 - RNA, 22 nt, synthetic construct
  source 1..22: mol_type = other RNA
gcgctttaagcatcccatatgg

SEQ ID NO: 139125 - RNA, 22 nt, synthetic construct
  source 1..22: mol_type = other RNA
gcggaaggattgcctaacacca

SEQ ID NO: 139126 - RNA, 22 nt, synthetic construct
  source 1..22: mol_type = other RNA
gcggaagttgcagtgagcccag

SEQ ID NO: 139127 - RNA, 22 nt, synthetic construct
  source 1..22: mol_type = other RNA
gcggaatgaagcaggccttcga

SEQ ID NO: 139128 - RNA, 22 nt, synthetic construct
  source 1..22: mol_type = other RNA
gcggaatgactatagaaatttg

SEQ ID NO: 139129 - RNA, 22 nt, synthetic construct
  source 1..22: mol_type = other RNA
gcggaatgcagtggcgtgatct

SEQ ID NO: 139130 - RNA, 22 nt, synthetic construct
  source 1..22: mol_type = other RNA
gcggaatttttatattaaaacc

SEQ ID NO: 139131 - RNA, 22 nt, synthetic construct
  source 1..22: mol_type = other RNA
gcggaccccgtacgctccctcg

SEQ ID NO: 139132 - RNA, 22 nt, synthetic construct
  source 1..22: mol_type = other RNA
gcggacgcgcattttttaagtg

SEQ ID NO: 139133 - RNA, 22 nt, synthetic construct
  source 1..22: mol_type = other RNA
gcggactccggcgggagaggag

SEQ ID NO: 139134 - RNA, 22 nt, synthetic construct
  source 1..22: mol_type = other RNA
gcggaggttgcggtgacgtgag

SEQ ID NO: 139135 - RNA, 22 nt, synthetic construct
  source 1..22: mol_type = other RNA
gcggatgccggtaatcacagct

SEQ ID NO: 139136 - RNA, 22 nt, synthetic construct
  source 1..22: mol_type = other RNA
gcggcacttggtaagctgtgag

SEQ ID NO: 139137 - RNA, 22 nt, synthetic construct
  source 1..22: mol_type = other RNA
gcggcaggcattgtgctcagtg

SEQ ID NO: 139138 - RNA, 22 nt, synthetic construct
  source 1..22: mol_type = other RNA
gcggcagggatgctgcgagccc

SEQ ID NO: 139139 - RNA, 22 nt, synthetic construct
  source 1..22: mol_type = other RNA
gcggcatacaggagttccgatt

SEQ ID NO: 139140 - RNA, 22 nt, synthetic construct
  source 1..22: mol_type = other RNA
gcggcctttgcctctccaggga

SEQ ID NO: 139141 - RNA, 22 nt, synthetic construct
  source 1..22: mol_type = other RNA
gcggcgggcttcgcctttgttg

SEQ ID NO: 139142 - RNA, 22 nt, synthetic construct
  source 1..22: mol_type = other RNA
gcggctgaggcagcccgacctc

SEQ ID NO: 139143 - RNA, 22 nt, synthetic construct
  source 1..22: mol_type = other RNA
gcggctggatcgcttgaggtca

SEQ ID NO: 139144 - RNA, 22 nt, synthetic construct
  source 1..22: mol_type = other RNA
gcggctgggctttctccagggg

SEQ ID NO: 139145 - RNA, 22 nt, synthetic construct
  source 1..22: mol_type = other RNA
gcggcttgattagcttcctcag

SEQ ID NO: 139146 - RNA, 22 nt, synthetic construct
  source 1..22: mol_type = other RNA
gcggctttgtggagtggagggg

SEQ ID NO: 139147 - RNA, 22 nt, synthetic construct
  source 1..22: mol_type = other RNA
gcgggaaaaaataatatgagaa

SEQ ID NO: 139148 - RNA, 22 nt, synthetic construct
  source 1..22: mol_type = other RNA
gcgggagaggagcgccctggca

SEQ ID NO: 139149 - RNA, 22 nt, synthetic construct
  source 1..22: mol_type = other RNA
gcgggaggctgaggcaggagca

SEQ ID NO: 139150 - RNA, 22 nt, synthetic construct
  source 1..22: mol_type = other RNA
gcgggattatttggaagagaga

SEQ ID NO: 139151 - RNA, 22 nt, synthetic construct
  source 1..22: mol_type = other RNA
gcgggcaccttccctactcact

SEQ ID NO: 139152 - RNA, 22 nt, synthetic construct
  source 1..22: mol_type = other RNA
gcgggcagccttggaggagccc

SEQ ID NO: 139153 - RNA, 22 nt, synthetic construct
  source 1..22: mol_type = other RNA
gcgggcccagctcttttgtgtc

SEQ ID NO: 139154 - RNA, 22 nt, synthetic construct
  source 1..22: mol_type = other RNA
gcgggcttcgcctttgttgcca

SEQ ID NO: 139155 - RNA, 22 nt, synthetic construct
  source 1..22: mol_type = other RNA
gcggggatgctcagggtgcgac

SEQ ID NO: 139156 - RNA, 22 nt, synthetic construct
  source 1..22: mol_type = other RNA
gcggggatggttgcacaatgtt

SEQ ID NO: 139157 - RNA, 22 nt, synthetic construct
  source 1..22: mol_type = other RNA
gcggggccgcccctggagaaag

SEQ ID NO: 139158 - RNA, 22 nt, synthetic construct
  source 1..22: mol_type = other RNA
gcggggctgccactacttagcc

SEQ ID NO: 139159 - RNA, 22 nt, synthetic construct
  source 1..22: mol_type = other RNA
gcggggtttcagcacaatactg

SEQ ID NO: 139160 - RNA, 22 nt, synthetic construct
  source 1..22: mol_type = other RNA
gcgggtttcctcggtctacgga

SEQ ID NO: 139161 - RNA, 22 nt, synthetic construct
  source 1..22: mol_type = other RNA
gcggtcaacgcacccagagcgg

SEQ ID NO: 139162 - RNA, 22 nt, synthetic construct
  source 1..22: mol_type = other RNA
gcggtcttttagccaacaacca

SEQ ID NO: 139163 - RNA, 22 nt, synthetic construct
  source 1..22: mol_type = other RNA
gcggtgacgtgagatcatgcca

SEQ ID NO: 139164 - RNA, 22 nt, synthetic construct
  source 1..22: mol_type = other RNA
gcggtggggacagctcaattaa

SEQ ID NO: 139165 - RNA, 22 nt, synthetic construct
  source 1..22: mol_type = other RNA
gcggtgtcttattgttttgatt

SEQ ID NO: 139166 - RNA, 22 nt, synthetic construct
  source 1..22: mol_type = other RNA
gcgtaactccatcttcacgtgg

SEQ ID NO: 139167 - RNA, 22 nt, synthetic construct
  source 1..22: mol_type = other RNA
gcgtaagggtacagaactgcta

SEQ ID NO: 139168 - RNA, 22 nt, synthetic construct
  source 1..22: mol_type = other RNA
gcgtacatgtagatatgggagt

SEQ ID NO: 139169 - RNA, 22 nt, synthetic construct
  source 1..22: mol_type = other RNA
gcgtactgtgattacaattcct

SEQ ID NO: 139170 - RNA, 22 nt, synthetic construct
  source 1..22: mol_type = other RNA
gcgtagtatctcatgcttagga

SEQ ID NO: 139171 - RNA, 22 nt, synthetic construct
  source 1..22: mol_type = other RNA
gcgtcaaaagatgctggtggag

SEQ ID NO: 139172 - RNA, 22 nt, synthetic construct
  source 1..22: mol_type = other RNA
gcgtccacctggcaacaaaggc

SEQ ID NO: 139173 - RNA, 22 nt, synthetic construct
  source 1..22: mol_type = other RNA
gcgtccgtagaccgaggaaacc

SEQ ID NO: 139174 - RNA, 22 nt, synthetic construct
  source 1..22: mol_type = other RNA
gcgtcctcactgtgatacctag

SEQ ID NO: 139175 - RNA, 22 nt, synthetic construct
  source 1..22: mol_type = other RNA
gcgtcgtacctttcgctatcag

SEQ ID NO: 139176 - RNA, 22 nt, synthetic construct
  source 1..22: mol_type = other RNA
gcgtctgtgattatcagggata

SEQ ID NO: 139177 - RNA, 22 nt, synthetic construct
  source 1..22: mol_type = other RNA
gcgtgaatctgttcctgggttc

SEQ ID NO: 139178 - RNA, 22 nt, synthetic construct
  source 1..22: mol_type = other RNA
gcgtgagccaccacgtccggtc

SEQ ID NO: 139179 - RNA, 22 nt, synthetic construct
  source 1..22: mol_type = other RNA
gcgtgagccaccactcccggcc

SEQ ID NO: 139180 - RNA, 22 nt, synthetic construct
  source 1..22: mol_type = other RNA
gcgtgagccaccgcgcctggtg

SEQ ID NO: 139181 - RNA, 22 nt, synthetic construct
  source 1..22: mol_type = other RNA
gcgtgagccacctcatccggtc

SEQ ID NO: 139182 - RNA, 22 nt, synthetic construct
  source 1..22: mol_type = other RNA
gcgtgagccatcgcgcccagcc

SEQ ID NO: 139183 - RNA, 22 nt, synthetic construct
  source 1..22: mol_type = other RNA
gcgtgagcctccacacctggcc

SEQ ID NO: 139184 - RNA, 22 nt, synthetic construct
  source 1..22: mol_type = other RNA
gcgtgcaccttacattgtaatc

SEQ ID NO: 139185 - RNA, 22 nt, synthetic construct
  source 1..22: mol_type = other RNA
gcgtgcctgcaatcgcaggcat

SEQ ID NO: 139186 - RNA, 22 nt, synthetic construct
  source 1..22: mol_type = other RNA
gcgtggaatggtcaatttcatc

SEQ ID NO: 139187 - RNA, 22 nt, synthetic construct
  source 1..22: mol_type = other RNA
gcgtggagcggtgtcttattgt

SEQ ID NO: 139188 - RNA, 22 nt, synthetic construct
  source 1..22: mol_type = other RNA
gcgtggatgtgtgcacaacaca

SEQ ID NO: 139189 - RNA, 22 nt, synthetic construct
  source 1..22: mol_type = other RNA
gcgtgggcaacacaatgagacc

SEQ ID NO: 139190 - RNA, 22 nt, synthetic construct
  source 1..22: mol_type = other RNA
gcgtgggggctcacatctgtaa

SEQ ID NO: 139191 - RNA, 22 nt, synthetic construct
  source 1..22: mol_type = other RNA
gcgtggtggcggatgccggtaa

SEQ ID NO: 139192 - RNA, 22 nt, synthetic construct
  source 1..22: mol_type = other RNA
gcgtggttcacacctgtagtcc

SEQ ID NO: 139193 - RNA, 22 nt, synthetic construct
  source 1..22: mol_type = other RNA
gcgtggtttattcatataatgg

SEQ ID NO: 139194 - RNA, 22 nt, synthetic construct
  source 1..22: mol_type = other RNA
gcgtgtaaactgttggaaaaat

SEQ ID NO: 139195 - RNA, 22 nt, synthetic construct
  source 1..22: mol_type = other RNA
gcgtgtgaaaccaagcaagtaa

SEQ ID NO: 139196 - RNA, 22 nt, synthetic construct
  source 1..22: mol_type = other RNA
gcgtgtgcatgaccctgctatg

SEQ ID NO: 139197 - RNA, 22 nt, synthetic construct
  source 1..22: mol_type = other RNA
gcgtgtgcccaggctgacttag

SEQ ID NO: 139198 - RNA, 22 nt, synthetic construct
  source 1..22: mol_type = other RNA
gcgtgttattttaatcgaatcc

SEQ ID NO: 139199 - RNA, 22 nt, synthetic construct
  source 1..22: mol_type = other RNA
gcgttcatccaaattattgaca

SEQ ID NO: 139200 - RNA, 22 nt, synthetic construct
  source 1..22: mol_type = other RNA
gcgttgaccgctttcgtgaggg

SEQ ID NO: 139201 - RNA, 22 nt, synthetic construct
  source 1..22: mol_type = other RNA
gcgttgagccatcatgcctggg

SEQ ID NO: 139202 - RNA, 22 nt, synthetic construct
  source 1..22: mol_type = other RNA
gcgttggagacagcctaaacca

SEQ ID NO: 139203 - RNA, 22 nt, synthetic construct
  source 1..22: mol_type = other RNA
gcgttgttcagttgaaaagtat

SEQ ID NO: 139204 - RNA, 22 nt, synthetic construct
  source 1..22: mol_type = other RNA
gcgtttattagaactagaactg

SEQ ID NO: 139205 - RNA, 22 nt, synthetic construct
  source 1..22: mol_type = other RNA
gcgtttgttagatctgggataa

SEQ ID NO: 139206 - RNA, 22 nt, synthetic construct
  source 1..22: mol_type = other RNA
gcgttttttgtccaccagacaa

SEQ ID NO: 139207 - RNA, 22 nt, synthetic construct
  source 1..22: mol_type = other RNA
gctaaaacatacatgagaaatg

SEQ ID NO: 139208 - RNA, 22 nt, synthetic construct
  source 1..22: mol_type = other RNA
gctaaaagaccgcaagagttcc

SEQ ID NO: 139209 - RNA, 22 nt, synthetic construct
  source 1..22: mol_type = other RNA
gctaaaatgttcagatagaaaa

SEQ ID NO: 139210 - RNA, 22 nt, synthetic construct
  source 1..22: mol_type = other RNA
gctaaacagtacagtagtaaaa

SEQ ID NO: 139211 - RNA, 22 nt, synthetic construct
  source 1..22: mol_type = other RNA
gctaaacattttattaggtgca

SEQ ID NO: 139212 - RNA, 22 nt, synthetic construct
  source 1..22: mol_type = other RNA
gctaaactgttccccaagccaa

SEQ ID NO: 139213 - RNA, 22 nt, synthetic construct
  source 1..22: mol_type = other RNA
gctaaatgctcacatttagttt

SEQ ID NO: 139214 - RNA, 22 nt, synthetic construct
  source 1..22: mol_type = other RNA
gctaaattaaaggctggaaata

SEQ ID NO: 139215 - RNA, 22 nt, synthetic construct
  source 1..22: mol_type = other RNA
gctaaattttcataggaaatac

SEQ ID NO: 139216 - RNA, 22 nt, synthetic construct
  source 1..22: mol_type = other RNA
gctaacaatcaaatttaacaca

SEQ ID NO: 139217 - RNA, 22 nt, synthetic construct
  source 1..22: mol_type = other RNA
gctaacaccttgaactgggact

SEQ ID NO: 139218 - RNA, 22 nt, synthetic construct
  source 1..22: mol_type = other RNA
gctaacagccaaagaaattgga

SEQ ID NO: 139219 - RNA, 22 nt, synthetic construct
  source 1..22: mol_type = other RNA
gctaacatgaactactcaaaga

SEQ ID NO: 139220 - RNA, 22 nt, synthetic construct
  source 1..22: mol_type = other RNA
gctaacgtgcttgctctgcggc

SEQ ID NO: 139221 - RNA, 22 nt, synthetic construct
  source 1..22: mol_type = other RNA
gctaactgcagaggtcaggaag

SEQ ID NO: 139222 - RNA, 22 nt, synthetic construct
  source 1..22: mol_type = other RNA
gctaacttttaacccacagata

SEQ ID NO: 139223 - RNA, 22 nt, synthetic construct
  source 1..22: mol_type = other RNA
gctaagaaacagtaattagtta

SEQ ID NO: 139224 - RNA, 22 nt, synthetic construct
  source 1..22: mol_type = other RNA
gctaagactataaaactcttag

SEQ ID NO: 139225 - RNA, 22 nt, synthetic construct
  source 1..22: mol_type = other RNA
gctaagagttttatagtcttag

SEQ ID NO: 139226 - RNA, 22 nt, synthetic construct
  source 1..22: mol_type = other RNA
gctaagatgaggtctcagcctt

SEQ ID NO: 139227 - RNA, 22 nt, synthetic construct
  source 1..22: mol_type = other RNA
gctaagatgctattcaagacaa

SEQ ID NO: 139228 - RNA, 22 nt, synthetic construct
  source 1..22: mol_type = other RNA
gctaagcaccaacagatcctca

SEQ ID NO: 139229 - RNA, 22 nt, synthetic construct
  source 1..22: mol_type = other RNA
gctaagcactgcgccaagcagg

SEQ ID NO: 139230 - RNA, 22 nt, synthetic construct
  source 1..22: mol_type = other RNA
gctaagcatgtaacttgcttag

SEQ ID NO: 139231 - RNA, 22 nt, synthetic construct
  source 1..22: mol_type = other RNA
gctaagggaagttttttcaaaa

SEQ ID NO: 139232 - RNA, 22 nt, synthetic construct
  source 1..22: mol_type = other RNA
gctaaggtggagtggtggatag

SEQ ID NO: 139233 - RNA, 22 nt, synthetic construct
  source 1..22: mol_type = other RNA
gctaagtaaaataaacaagtca

SEQ ID NO: 139234 - RNA, 22 nt, synthetic construct
  source 1..22: mol_type = other RNA
gctaagtagtggcagccccgct

SEQ ID NO: 139235 - RNA, 22 nt, synthetic construct
  source 1..22: mol_type = other RNA
gctaagtatgcagaaaccagtt

SEQ ID NO: 139236 - RNA, 22 nt, synthetic construct
  source 1..22: mol_type = other RNA
gctaagtgcatttcggctctgt

SEQ ID NO: 139237 - RNA, 22 nt, synthetic construct
  source 1..22: mol_type = other RNA
gctaagtgtttaggatataaga

SEQ ID NO: 139238 - RNA, 22 nt, synthetic construct
  source 1..22: mol_type = other RNA
gctaagttgagaaactatccaa

SEQ ID NO: 139239 - RNA, 22 nt, synthetic construct
  source 1..22: mol_type = other RNA
gctaataaaaacatatgcagga

SEQ ID NO: 139240 - RNA, 22 nt, synthetic construct
  source 1..22: mol_type = other RNA
gctaataagtgagtttgacctg

SEQ ID NO: 139241 - RNA, 22 nt, synthetic construct
  source 1..22: mol_type = other RNA
gctaataatgatgactatgaaa

SEQ ID NO: 139242 - RNA, 22 nt, synthetic construct
  source 1..22: mol_type = other RNA
gctaataatttatcagatccca

SEQ ID NO: 139243 - RNA, 22 nt, synthetic construct
  source 1..22: mol_type = other RNA
gctaatatctttggggagatac

SEQ ID NO: 139244 - RNA, 22 nt, synthetic construct
  source 1..22: mol_type = other RNA
gctaatatgctgtagtgattca

SEQ ID NO: 139245 - RNA, 22 nt, synthetic construct
  source 1..22: mol_type = other RNA
gctaatcaagccgcaaataatc

SEQ ID NO: 139246 - RNA, 22 nt, synthetic construct
  source 1..22: mol_type = other RNA
gctaatcccaaagtgagcagaa

SEQ ID NO: 139247 - RNA, 22 nt, synthetic construct
  source 1..22: mol_type = other RNA
gctaatctactttctaatcctt

SEQ ID NO: 139248 - RNA, 22 nt, synthetic construct
  source 1..22: mol_type = other RNA
gctaatctcaatcagggccttc

SEQ ID NO: 139249 - RNA, 22 nt, synthetic construct
  source 1..22: mol_type = other RNA
gctaatggtccttgctgaagaa

SEQ ID NO: 139250 - RNA, 22 nt, synthetic construct
  source 1..22: mol_type = other RNA
gctaatgtggcttgcaaggccc

SEQ ID NO: 139251 - RNA, 22 nt, synthetic construct
  source 1..22: mol_type = other RNA
gctaatgtgtgttccagacaaa

SEQ ID NO: 139252 - RNA, 22 nt, synthetic construct
  source 1..22: mol_type = other RNA
gctaattcattgtacatgaagt

SEQ ID NO: 139253 - RNA, 22 nt, synthetic construct
  source 1..22: mol_type = other RNA
gctaattgtttgttgggtttaa

SEQ ID NO: 139254 - RNA, 22 nt, synthetic construct
  source 1..22: mol_type = other RNA
gctaatttcagagagacctgaa

SEQ ID NO: 139255 - RNA, 22 nt, synthetic construct
  source 1..22: mol_type = other RNA
gctaattttctaatcttcatct

SEQ ID NO: 139256 - RNA, 22 nt, synthetic construct
  source 1..22: mol_type = other RNA
gctacaaaagggaaaacaatta

SEQ ID NO: 139257 - RNA, 22 nt, synthetic construct
  source 1..22: mol_type = other RNA
gctacaaactccaaacctttaa

SEQ ID NO: 139258 - RNA, 22 nt, synthetic construct
  source 1..22: mol_type = other RNA
gctacacaagtattaacgaatt

SEQ ID NO: 139259 - RNA, 22 nt, synthetic construct
  source 1..22: mol_type = other RNA
gctacaccctgggaaagcctgg

SEQ ID NO: 139260 - RNA, 22 nt, synthetic construct
  source 1..22: mol_type = other RNA
gctacactcaatacacgtggct

SEQ ID NO: 139261 - RNA, 22 nt, synthetic construct
  source 1..22: mol_type = other RNA
gctacagactaatatgagttcc

SEQ ID NO: 139262 - RNA, 22 nt, synthetic construct
  source 1..22: mol_type = other RNA
gctacaggggcattccctgtct

SEQ ID NO: 139263 - RNA, 22 nt, synthetic construct
  source 1..22: mol_type = other RNA
gctacagtaatcaaacagtgtg

SEQ ID NO: 139264 - RNA, 22 nt, synthetic construct
  source 1..22: mol_type = other RNA
gctacataacttcccagacagg

SEQ ID NO: 139265 - RNA, 22 nt, synthetic construct
  source 1..22: mol_type = other RNA
gctaccatttattcctctcttg

SEQ ID NO: 139266 - RNA, 22 nt, synthetic construct
  source 1..22: mol_type = other RNA
gctaccctcgagtaaaaagaat

SEQ ID NO: 139267 - RNA, 22 nt, synthetic construct
  source 1..22: mol_type = other RNA
gctaccctttcttgttagtagg

SEQ ID NO: 139268 - RNA, 22 nt, synthetic construct
  source 1..22: mol_type = other RNA
gctacctcaaattgtgtgttct

SEQ ID NO: 139269 - RNA, 22 nt, synthetic construct
  source 1..22: mol_type = other RNA
gctacctgacttcaaactatac

SEQ ID NO: 139270 - RNA, 22 nt, synthetic construct
  source 1..22: mol_type = other RNA
gctacctgttgattgttgccat

SEQ ID NO: 139271 - RNA, 22 nt, synthetic construct
  source 1..22: mol_type = other RNA
gctacgaatgaactcctatagt

SEQ ID NO: 139272 - RNA, 22 nt, synthetic construct
  source 1..22: mol_type = other RNA
gctacggaggatgaggggctga

SEQ ID NO: 139273 - RNA, 22 nt, synthetic construct
  source 1..22: mol_type = other RNA
gctactaaacaaatcagatttc

SEQ ID NO: 139274 - RNA, 22 nt, synthetic construct
  source 1..22: mol_type = other RNA
gctactagcaagctaataattt

SEQ ID NO: 139275 - RNA, 22 nt, synthetic construct
  source 1..22: mol_type = other RNA
gctactatgaatatactggaaa

SEQ ID NO: 139276 - RNA, 22 nt, synthetic construct
  source 1..22: mol_type = other RNA
gctactattccaggatcaaatc

SEQ ID NO: 139277 - RNA, 22 nt, synthetic construct
  source 1..22: mol_type = other RNA
gctactcaaagtttagttatta

SEQ ID NO: 139278 - RNA, 22 nt, synthetic construct
  source 1..22: mol_type = other RNA
gctactcagctgtcactctctt

SEQ ID NO: 139279 - RNA, 22 nt, synthetic construct
  source 1..22: mol_type = other RNA
gctactcaggagattaaggctg

SEQ ID NO: 139280 - RNA, 22 nt, synthetic construct
  source 1..22: mol_type = other RNA
gctactcagggggctgaggcag

SEQ ID NO: 139281 - RNA, 22 nt, synthetic construct
  source 1..22: mol_type = other RNA
gctactgcatgctaggggctgt

SEQ ID NO: 139282 - RNA, 22 nt, synthetic construct
  source 1..22: mol_type = other RNA
gctactgtaaacaatgctgcta

SEQ ID NO: 139283 - RNA, 22 nt, synthetic construct
  source 1..22: mol_type = other RNA
gctagaaacttggattgtgtgt

SEQ ID NO: 139284 - RNA, 22 nt, synthetic construct
  source 1..22: mol_type = other RNA
gctagaacagaataaaaagtga

SEQ ID NO: 139285 - RNA, 22 nt, synthetic construct
  source 1..22: mol_type = other RNA
gctagaactagaatactccacc

SEQ ID NO: 139286 - RNA, 22 nt, synthetic construct
  source 1..22: mol_type = other RNA
gctagaagacctcaaattctga

SEQ ID NO: 139287 - RNA, 22 nt, synthetic construct
  source 1..22: mol_type = other RNA
gctagaagcatctgatacactt

SEQ ID NO: 139288 - RNA, 22 nt, synthetic construct
  source 1..22: mol_type = other RNA
gctagaagtcccagttcaaggt

SEQ ID NO: 139289 - RNA, 22 nt, synthetic construct
  source 1..22: mol_type = other RNA
gctagacggaaaaacattctac

SEQ ID NO: 139290 - RNA, 22 nt, synthetic construct
  source 1..22: mol_type = other RNA
gctagactaagaaaaacagaag

SEQ ID NO: 139291 - RNA, 22 nt, synthetic construct
  source 1..22: mol_type = other RNA
gctagagccaggaagtcagcaa

SEQ ID NO: 139292 - RNA, 22 nt, synthetic construct
  source 1..22: mol_type = other RNA
gctagagctcacacgagaagga

SEQ ID NO: 139293 - RNA, 22 nt, synthetic construct
  source 1..22: mol_type = other RNA
gctagagctgctgtaacaaaga

SEQ ID NO: 139294 - RNA, 22 nt, synthetic construct
  source 1..22: mol_type = other RNA
gctagagggtaagaccaaaatg

SEQ ID NO: 139295 - RNA, 22 nt, synthetic construct
  source 1..22: mol_type = other RNA
gctagatgctaaacagtacagt

SEQ ID NO: 139296 - RNA, 22 nt, synthetic construct
  source 1..22: mol_type = other RNA
gctagcacagaggcaacagtca

SEQ ID NO: 139297 - RNA, 22 nt, synthetic construct
  source 1..22: mol_type = other RNA
gctagccttcttggagtaaacc

SEQ ID NO: 139298 - RNA, 22 nt, synthetic construct
  source 1..22: mol_type = other RNA
gctaggaccataggcacgcgcc

SEQ ID NO: 139299 - RNA, 22 nt, synthetic construct
  source 1..22: mol_type = other RNA
gctaggatttcagtaaatgaaa

SEQ ID NO: 139300 - RNA, 22 nt, synthetic construct
  source 1..22: mol_type = other RNA
gctaggcgtagtatctcatgct

SEQ ID NO: 139301 - RNA, 22 nt, synthetic construct
  source 1..22: mol_type = other RNA
gctagggaagcagttgatgcaa

SEQ ID NO: 139302 - RNA, 22 nt, synthetic construct
  source 1..22: mol_type = other RNA
gctaggggctgttcccagataa

SEQ ID NO: 139303 - RNA, 22 nt, synthetic construct
  source 1..22: mol_type = other RNA
gctaggtgacctgccagagttg

SEQ ID NO: 139304 - RNA, 22 nt, synthetic construct
  source 1..22: mol_type = other RNA
gctaggtgagtgagatgggaag

SEQ ID NO: 139305 - RNA, 22 nt, synthetic construct
  source 1..22: mol_type = other RNA
gctagtagcagaatccccaaat

SEQ ID NO: 139306 - RNA, 22 nt, synthetic construct
  source 1..22: mol_type = other RNA
gctagtaggcaacatccctatg

SEQ ID NO: 139307 - RNA, 22 nt, synthetic construct
  source 1..22: mol_type = other RNA
gctagtattttgttgacatcct

SEQ ID NO: 139308 - RNA, 22 nt, synthetic construct
  source 1..22: mol_type = other RNA
gctagtgatgttgagtatcttt

SEQ ID NO: 139309 - RNA, 22 nt, synthetic construct
  source 1..22: mol_type = other RNA
gctagtggtaactagatgcctc

SEQ ID NO: 139310 - RNA, 22 nt, synthetic construct
  source 1..22: mol_type = other RNA
gctagtgtcctcaggctccagg

SEQ ID NO: 139311 - RNA, 22 nt, synthetic construct
  source 1..22: mol_type = other RNA
gctagtgtcttagtctgacttc

SEQ ID NO: 139312 - RNA, 22 nt, synthetic construct
  source 1..22: mol_type = other RNA
gctagtgtgtctgactacactg

SEQ ID NO: 139313 - RNA, 22 nt, synthetic construct
  source 1..22: mol_type = other RNA
gctagtgtgttgactgacataa

SEQ ID NO: 139314 - RNA, 22 nt, synthetic construct
  source 1..22: mol_type = other RNA
gctataaacttccctctcagtg

SEQ ID NO: 139315 - RNA, 22 nt, synthetic construct
  source 1..22: mol_type = other RNA
gctataaagaacatgattgggt

SEQ ID NO: 139316 - RNA, 22 nt, synthetic construct
  source 1..22: mol_type = other RNA
gctataaccacgagtaatggat

SEQ ID NO: 139317 - RNA, 22 nt, synthetic construct
  source 1..22: mol_type = other RNA
gctatacaaccggaaaatgctt

SEQ ID NO: 139318 - RNA, 22 nt, synthetic construct
  source 1..22: mol_type = other RNA
gctatacacgttacaaaatatg

SEQ ID NO: 139319 - RNA, 22 nt, synthetic construct
  source 1..22: mol_type = other RNA
gctatagctgagaagtaacatt

SEQ ID NO: 139320 - RNA, 22 nt, synthetic construct
  source 1..22: mol_type = other RNA
gctatagcttctgagctgttaa

SEQ ID NO: 139321 - RNA, 22 nt, synthetic construct
  source 1..22: mol_type = other RNA
gctatatcccaaattggcattt

SEQ ID NO: 139322 - RNA, 22 nt, synthetic construct
  source 1..22: mol_type = other RNA
gctatattcacttttggaattt

SEQ ID NO: 139323 - RNA, 22 nt, synthetic construct
  source 1..22: mol_type = other RNA
gctatcaggccttccacctgct

SEQ ID NO: 139324 - RNA, 22 nt, synthetic construct
  source 1..22: mol_type = other RNA
gctatcagtagtttgctagtgg

SEQ ID NO: 139325 - RNA, 22 nt, synthetic construct
  source 1..22: mol_type = other RNA
gctatcattttaaagggataat

SEQ ID NO: 139326 - RNA, 22 nt, synthetic construct
  source 1..22: mol_type = other RNA
gctatccagaagagaatggctg

SEQ ID NO: 139327 - RNA, 22 nt, synthetic construct
  source 1..22: mol_type = other RNA
gctatccagtctctgcaacatt

SEQ ID NO: 139328 - RNA, 22 nt, synthetic construct
  source 1..22: mol_type = other RNA
gctatcctaatgggcgtggagc

SEQ ID NO: 139329 - RNA, 22 nt, synthetic construct
  source 1..22: mol_type = other RNA
gctatctttactttcagctcaa

SEQ ID NO: 139330 - RNA, 22 nt, synthetic construct
  source 1..22: mol_type = other RNA
gctatgaaaattggcgtacatg

SEQ ID NO: 139331 - RNA, 22 nt, synthetic construct
  source 1..22: mol_type = other RNA
gctatgaaatgtggtttttggt

SEQ ID NO: 139332 - RNA, 22 nt, synthetic construct
  source 1..22: mol_type = other RNA
gctatgactaatttgaggcatt

SEQ ID NO: 139333 - RNA, 22 nt, synthetic construct
  source 1..22: mol_type = other RNA
gctatgcatactttggaaggta

SEQ ID NO: 139334 - RNA, 22 nt, synthetic construct
  source 1..22: mol_type = other RNA
gctatgctcctgcctcagcctc

SEQ ID NO: 139335 - RNA, 22 nt, synthetic construct
  source 1..22: mol_type = other RNA
gctatgctgaaaggcatgaaat

SEQ ID NO: 139336 - RNA, 22 nt, synthetic construct
  source 1..22: mol_type = other RNA
gctatggagcactgtgagccac

SEQ ID NO: 139337 - RNA, 22 nt, synthetic construct
  source 1..22: mol_type = other RNA
gctatggtgttatttgttctgt

SEQ ID NO: 139338 - RNA, 22 nt, synthetic construct
  source 1..22: mol_type = other RNA
gctatgtaatctcatggaagtt

SEQ ID NO: 139339 - RNA, 22 nt, synthetic construct
  source 1..22: mol_type = other RNA
gctattaactttgaaatcagaa

SEQ ID NO: 139340 - RNA, 22 nt, synthetic construct
  source 1..22: mol_type = other RNA
gctattaagtattgcattgaat

SEQ ID NO: 139341 - RNA, 22 nt, synthetic construct
  source 1..22: mol_type = other RNA
gctattagagaaatgcaaatca

SEQ ID NO: 139342 - RNA, 22 nt, synthetic construct
  source 1..22: mol_type = other RNA
gctattagttaaccttctgggg

SEQ ID NO: 139343 - RNA, 22 nt, synthetic construct
  source 1..22: mol_type = other RNA
gctattataaatggcatcttta

SEQ ID NO: 139344 - RNA, 22 nt, synthetic construct
  source 1..22: mol_type = other RNA
gctattatttgaaaaaggaaag

SEQ ID NO: 139345 - RNA, 22 nt, synthetic construct
  source 1..22: mol_type = other RNA
gctattcaacaggtataaagtt

SEQ ID NO: 139346 - RNA, 22 nt, synthetic construct
  source 1..22: mol_type = other RNA
gctattcaagacaagcaaggaa

SEQ ID NO: 139347 - RNA, 22 nt, synthetic construct
  source 1..22: mol_type = other RNA
gctattctctttctgaaattct

SEQ ID NO: 139348 - RNA, 22 nt, synthetic construct
  source 1..22: mol_type = other RNA
gctattgataaatctaaagcca

SEQ ID NO: 139349 - RNA, 22 nt, synthetic construct
  source 1..22: mol_type = other RNA
gctattgtcagtaattctgcag

SEQ ID NO: 139350 - RNA, 22 nt, synthetic construct
  source 1..22: mol_type = other RNA
gctattgtcttttctatctgaa

SEQ ID NO: 139351 - RNA, 22 nt, synthetic construct
  source 1..22: mol_type = other RNA
gctattgttgaattgttggagt

SEQ ID NO: 139352 - RNA, 22 nt, synthetic construct
  source 1..22: mol_type = other RNA
gctattgttttgcaagattaat

SEQ ID NO: 139353 - RNA, 22 nt, synthetic construct
  source 1..22: mol_type = other RNA
gctattttattagatagtggtt

SEQ ID NO: 139354 - RNA, 22 nt, synthetic construct
  source 1..22: mol_type = other RNA
gctcaaaaatactcaagggctt

SEQ ID NO: 139355 - RNA, 22 nt, synthetic construct
  source 1..22: mol_type = other RNA
gctcaaacagcttgacattctt

SEQ ID NO: 139356 - RNA, 22 nt, synthetic construct
  source 1..22: mol_type = other RNA
gctcaaagcatatgaatctaga

SEQ ID NO: 139357 - RNA, 22 nt, synthetic construct
  source 1..22: mol_type = other RNA
gctcaaaggggcattccgtgga

SEQ ID NO: 139358 - RNA, 22 nt, synthetic construct
  source 1..22: mol_type = other RNA
gctcaacgcctgtgatcccagc

SEQ ID NO: 139359 - RNA, 22 nt, synthetic construct
  source 1..22: mol_type = other RNA
gctcaagccatcctccagcctt

SEQ ID NO: 139360 - RNA, 22 nt, synthetic construct
  source 1..22: mol_type = other RNA
gctcaagtaagtgaaatcataa

SEQ ID NO: 139361 - RNA, 22 nt, synthetic construct
  source 1..22: mol_type = other RNA
gctcaatacctgaaaagtgtat

SEQ ID NO: 139362 - RNA, 22 nt, synthetic construct
  source 1..22: mol_type = other RNA
gctcaatggttaagactgctgt

SEQ ID NO: 139363 - RNA, 22 nt, synthetic construct
  source 1..22: mol_type = other RNA
gctcaattaagcaaccttttag

SEQ ID NO: 139364 - RNA, 22 nt, synthetic construct
  source 1..22: mol_type = other RNA
gctcacacgagaaggacagctt

SEQ ID NO: 139365 - RNA, 22 nt, synthetic construct
  source 1..22: mol_type = other RNA
gctcacacttactaaatgatct

SEQ ID NO: 139366 - RNA, 22 nt, synthetic construct
  source 1..22: mol_type = other RNA
gctcacagtgctccatagcttc

SEQ ID NO: 139367 - RNA, 22 nt, synthetic construct
  source 1..22: mol_type = other RNA
gctcacattgtatttctgttag

SEQ ID NO: 139368 - RNA, 22 nt, synthetic construct
  source 1..22: mol_type = other RNA
gctcacatttagtttcatctat

SEQ ID NO: 139369 - RNA, 22 nt, synthetic construct
  source 1..22: mol_type = other RNA
gctcaccgcaacatctgcctcc

SEQ ID NO: 139370 - RNA, 22 nt, synthetic construct
  source 1..22: mol_type = other RNA
gctcacctctggactcagggtc

SEQ ID NO: 139371 - RNA, 22 nt, synthetic construct
  source 1..22: mol_type = other RNA
gctcacgttaccctctggaatg

SEQ ID NO: 139372 - RNA, 22 nt, synthetic construct
  source 1..22: mol_type = other RNA
gctcactagagcttcaacctcc

SEQ ID NO: 139373 - RNA, 22 nt, synthetic construct
  source 1..22: mol_type = other RNA
gctcactcatttccgttgctgc

SEQ ID NO: 139374 - RNA, 22 nt, synthetic construct
  source 1..22: mol_type = other RNA
gctcactgcaagctccgcctcc

SEQ ID NO: 139375 - RNA, 22 nt, synthetic construct
  source 1..22: mol_type = other RNA
gctcactgtctccatgtcctca

SEQ ID NO: 139376 - RNA, 22 nt, synthetic construct
  source 1..22: mol_type = other RNA
gctcactttgggattagcttat

SEQ ID NO: 139377 - RNA, 22 nt, synthetic construct
  source 1..22: mol_type = other RNA
gctcagaaaattttcttttgtg

SEQ ID NO: 139378 - RNA, 22 nt, synthetic construct
  source 1..22: mol_type = other RNA
gctcagaaacaacaacaacaaa

SEQ ID NO: 139379 - RNA, 22 nt, synthetic construct
  source 1..22: mol_type = other RNA
gctcagaagctatagctgagaa

SEQ ID NO: 139380 - RNA, 22 nt, synthetic construct
  source 1..22: mol_type = other RNA
gctcagaagctttcagacttaa

SEQ ID NO: 139381 - RNA, 22 nt, synthetic construct
  source 1..22: mol_type = other RNA
gctcagcccctcatcctccgta

SEQ ID NO: 139382 - RNA, 22 nt, synthetic construct
  source 1..22: mol_type = other RNA
gctcaggaccagatgacttcac

SEQ ID NO: 139383 - RNA, 22 nt, synthetic construct
  source 1..22: mol_type = other RNA
gctcaggagtaactgctcctct

SEQ ID NO: 139384 - RNA, 22 nt, synthetic construct
  source 1..22: mol_type = other RNA
gctcaggccagtgagtgatgaa

SEQ ID NO: 139385 - RNA, 22 nt, synthetic construct
  source 1..22: mol_type = other RNA
gctcaggcctgttgtgaggatt

SEQ ID NO: 139386 - RNA, 22 nt, synthetic construct
  source 1..22: mol_type = other RNA
gctcagggtgcgacctcgaagc

SEQ ID NO: 139387 - RNA, 22 nt, synthetic construct
  source 1..22: mol_type = other RNA
gctcagtccctcaccttctgct

SEQ ID NO: 139388 - RNA, 22 nt, synthetic construct
  source 1..22: mol_type = other RNA
gctcagtctgtttgccatcttc

SEQ ID NO: 139389 - RNA, 22 nt, synthetic construct
  source 1..22: mol_type = other RNA
gctcagtgggttcaattatgtg

SEQ ID NO: 139390 - RNA, 22 nt, synthetic construct
  source 1..22: mol_type = other RNA
gctcagtggttctgcgtgttat

SEQ ID NO: 139391 - RNA, 22 nt, synthetic construct
  source 1..22: mol_type = other RNA
gctcagtgtgtttttgtaaatg

SEQ ID NO: 139392 - RNA, 22 nt, synthetic construct
  source 1..22: mol_type = other RNA
gctcagtttcaaaagctccccg

SEQ ID NO: 139393 - RNA, 22 nt, synthetic construct
  source 1..22: mol_type = other RNA
gctcataatagtctcacgatac

SEQ ID NO: 139394 - RNA, 22 nt, synthetic construct
  source 1..22: mol_type = other RNA
gctcataattaaagagagtaaa

SEQ ID NO: 139395 - RNA, 22 nt, synthetic construct
  source 1..22: mol_type = other RNA
gctcatacttgctttattactt

SEQ ID NO: 139396 - RNA, 22 nt, synthetic construct
  source 1..22: mol_type = other RNA
gctcatcatttatacccaagta

SEQ ID NO: 139397 - RNA, 22 nt, synthetic construct
  source 1..22: mol_type = other RNA
gctcatctaagcctacctccct

SEQ ID NO: 139398 - RNA, 22 nt, synthetic construct
  source 1..22: mol_type = other RNA
gctcattacagtctcgaccccc

SEQ ID NO: 139399 - RNA, 22 nt, synthetic construct
  source 1..22: mol_type = other RNA
gctcattcatctgcagtgtcca

SEQ ID NO: 139400 - RNA, 22 nt, synthetic construct
  source 1..22: mol_type = other RNA
gctccaaaagcgaaaggcaaaa

SEQ ID NO: 139401 - RNA, 22 nt, synthetic construct
  source 1..22: mol_type = other RNA
gctccaaagaacaggagttacc

SEQ ID NO: 139402 - RNA, 22 nt, synthetic construct
  source 1..22: mol_type = other RNA
gctccacgcccattaggatagc

SEQ ID NO: 139403 - RNA, 22 nt, synthetic construct
  source 1..22: mol_type = other RNA
gctccacttgggtggaagctgt

SEQ ID NO: 139404 - RNA, 22 nt, synthetic construct
  source 1..22: mol_type = other RNA
gctccagagaagttttccagga

SEQ ID NO: 139405 - RNA, 22 nt, synthetic construct
  source 1..22: mol_type = other RNA
gctccaggtagaatgaaaattt

SEQ ID NO: 139406 - RNA, 22 nt, synthetic construct
  source 1..22: mol_type = other RNA
gctccagtatgacctcctccca

SEQ ID NO: 139407 - RNA, 22 nt, synthetic construct
  source 1..22: mol_type = other RNA
gctccatagcttcctaagaaag

SEQ ID NO: 139408 - RNA, 22 nt, synthetic construct
  source 1..22: mol_type = other RNA
gctcccaatgcttgaagagcgc

SEQ ID NO: 139409 - RNA, 22 nt, synthetic construct
  source 1..22: mol_type = other RNA
gctcccagccaaacagttttta

SEQ ID NO: 139410 - RNA, 22 nt, synthetic construct
  source 1..22: mol_type = other RNA
gctcccagtgcccacctgacaa

SEQ ID NO: 139411 - RNA, 22 nt, synthetic construct
  source 1..22: mol_type = other RNA
gctcccatgattcaaaatgtga

SEQ ID NO: 139412 - RNA, 22 nt, synthetic construct
  source 1..22: mol_type = other RNA
gctcccatttgggactgagaca

SEQ ID NO: 139413 - RNA, 22 nt, synthetic construct
  source 1..22: mol_type = other RNA
gctccccattccctgtctgtga

SEQ ID NO: 139414 - RNA, 22 nt, synthetic construct
  source 1..22: mol_type = other RNA
gctcccccggggctcgcagcat

SEQ ID NO: 139415 - RNA, 22 nt, synthetic construct
  source 1..22: mol_type = other RNA
gctccccggatgattctaatgt

SEQ ID NO: 139416 - RNA, 22 nt, synthetic construct
  source 1..22: mol_type = other RNA
gctccctaaatacacatgttga

SEQ ID NO: 139417 - RNA, 22 nt, synthetic construct
  source 1..22: mol_type = other RNA
gctccctctatggcaggcacct

SEQ ID NO: 139418 - RNA, 22 nt, synthetic construct
  source 1..22: mol_type = other RNA
gctccctctgtgtgcatgcatg

SEQ ID NO: 139419 - RNA, 22 nt, synthetic construct
  source 1..22: mol_type = other RNA
gctcccttccagcgtgtgcatg

SEQ ID NO: 139420 - RNA, 22 nt, synthetic construct
  source 1..22: mol_type = other RNA
gctccgcctcctggtgggttca

SEQ ID NO: 139421 - RNA, 22 nt, synthetic construct
  source 1..22: mol_type = other RNA
gctccgggcctcccacctgcga

SEQ ID NO: 139422 - RNA, 22 nt, synthetic construct
  source 1..22: mol_type = other RNA
gctcctcagaaggccaaggcag

SEQ ID NO: 139423 - RNA, 22 nt, synthetic construct
  source 1..22: mol_type = other RNA
gctcctccaaggctgcccgctc

SEQ ID NO: 139424 - RNA, 22 nt, synthetic construct
  source 1..22: mol_type = other RNA
gctcctcccggctaagatgagg

SEQ ID NO: 139425 - RNA, 22 nt, synthetic construct
  source 1..22: mol_type = other RNA
gctcctctcccgccggagtccg

SEQ ID NO: 139426 - RNA, 22 nt, synthetic construct
  source 1..22: mol_type = other RNA
gctcctctgactttatggtatc

SEQ ID NO: 139427 - RNA, 22 nt, synthetic construct
  source 1..22: mol_type = other RNA
gctcctgacctcagatatccac

SEQ ID NO: 139428 - RNA, 22 nt, synthetic construct
  source 1..22: mol_type = other RNA
gctcctgagaaccggaacttga

SEQ ID NO: 139429 - RNA, 22 nt, synthetic construct
  source 1..22: mol_type = other RNA
gctcctgcagacatgcacgaga

SEQ ID NO: 139430 - RNA, 22 nt, synthetic construct
  source 1..22: mol_type = other RNA
gctcctgcctttgttcatcatc

SEQ ID NO: 139431 - RNA, 22 nt, synthetic construct
  source 1..22: mol_type = other RNA
gctcctgggaaaaggatttgtt

SEQ ID NO: 139432 - RNA, 22 nt, synthetic construct
  source 1..22: mol_type = other RNA
gctccttaccactataatccag

SEQ ID NO: 139433 - RNA, 22 nt, synthetic construct
  source 1..22: mol_type = other RNA
gctcgaccaggggaaggagtct

SEQ ID NO: 139434 - RNA, 22 nt, synthetic construct
  source 1..22: mol_type = other RNA
gctcgcagcatccctgccgcgc

SEQ ID NO: 139435 - RNA, 22 nt, synthetic construct
  source 1..22: mol_type = other RNA
gctcgcaggtgggaggcccgga

SEQ ID NO: 139436 - RNA, 22 nt, synthetic construct
  source 1..22: mol_type = other RNA
gctcgccgtctccctcggccac

SEQ ID NO: 139437 - RNA, 22 nt, synthetic construct
  source 1..22: mol_type = other RNA
gctcggctctgtcacccttgta

SEQ ID NO: 139438 - RNA, 22 nt, synthetic construct
  source 1..22: mol_type = other RNA
gctctaataaaagctggagtta

SEQ ID NO: 139439 - RNA, 22 nt, synthetic construct
  source 1..22: mol_type = other RNA
gctctaatagttcacctctccg

SEQ ID NO: 139440 - RNA, 22 nt, synthetic construct
  source 1..22: mol_type = other RNA
gctctaatgcaagagttaaaac

SEQ ID NO: 139441 - RNA, 22 nt, synthetic construct
  source 1..22: mol_type = other RNA
gctctacaaaccttcttatttc

SEQ ID NO: 139442 - RNA, 22 nt, synthetic construct
  source 1..22: mol_type = other RNA
gctctaccctttccaaattcaa

SEQ ID NO: 139443 - RNA, 22 nt, synthetic construct
  source 1..22: mol_type = other RNA
gctctagcaaacaaacacactg

SEQ ID NO: 139444 - RNA, 22 nt, synthetic construct
  source 1..22: mol_type = other RNA
gctctagcccagcttccgggac

SEQ ID NO: 139445 - RNA, 22 nt, synthetic construct
  source 1..22: mol_type = other RNA
gctctagccttgtactgtgtgg

SEQ ID NO: 139446 - RNA, 22 nt, synthetic construct
  source 1..22: mol_type = other RNA
gctctatggcatttgagggtta

SEQ ID NO: 139447 - RNA, 22 nt, synthetic construct
  source 1..22: mol_type = other RNA
gctctcaagtaattgttttccc

SEQ ID NO: 139448 - RNA, 22 nt, synthetic construct
  source 1..22: mol_type = other RNA
gctctcaattaatgcccaatca

SEQ ID NO: 139449 - RNA, 22 nt, synthetic construct
  source 1..22: mol_type = other RNA
gctctcagtggccctgttggcc

SEQ ID NO: 139450 - RNA, 22 nt, synthetic construct
  source 1..22: mol_type = other RNA
gctctcatgagtcctgaaaatt

SEQ ID NO: 139451 - RNA, 22 nt, synthetic construct
  source 1..22: mol_type = other RNA
gctctcatgtcagagacacata

SEQ ID NO: 139452 - RNA, 22 nt, synthetic construct
  source 1..22: mol_type = other RNA
gctctcccccgaatcctttgct

SEQ ID NO: 139453 - RNA, 22 nt, synthetic construct
  source 1..22: mol_type = other RNA
gctctcctgtgccaagtccgtg

SEQ ID NO: 139454 - RNA, 22 nt, synthetic construct
  source 1..22: mol_type = other RNA
gctctctattccaaatgtctgt

SEQ ID NO: 139455 - RNA, 22 nt, synthetic construct
  source 1..22: mol_type = other RNA
gctctcttcaccaactgaagcg

SEQ ID NO: 139456 - RNA, 22 nt, synthetic construct
  source 1..22: mol_type = other RNA
gctctcttcccccaaaacttag

SEQ ID NO: 139457 - RNA, 22 nt, synthetic construct
  source 1..22: mol_type = other RNA
gctctcttgcccaagctggtcc

SEQ ID NO: 139458 - RNA, 22 nt, synthetic construct
  source 1..22: mol_type = other RNA
gctctcttgcctaggctggagt

SEQ ID NO: 139459 - RNA, 22 nt, synthetic construct
  source 1..22: mol_type = other RNA
gctctgacgtttaaatgagtta

SEQ ID NO: 139460 - RNA, 22 nt, synthetic construct
  source 1..22: mol_type = other RNA
gctctgataggataatgtccag

SEQ ID NO: 139461 - RNA, 22 nt, synthetic construct
  source 1..22: mol_type = other RNA
gctctgatgctttctctagttg

SEQ ID NO: 139462 - RNA, 22 nt, synthetic construct
  source 1..22: mol_type = other RNA
gctctgcaaatgaggttgcttt

SEQ ID NO: 139463 - RNA, 22 nt, synthetic construct
  source 1..22: mol_type = other RNA
gctctgcacgtactagtcagca

SEQ ID NO: 139464 - RNA, 22 nt, synthetic construct
  source 1..22: mol_type = other RNA
gctctgcagagactgtgcttcc

SEQ ID NO: 139465 - RNA, 22 nt, synthetic construct
  source 1..22: mol_type = other RNA
gctctgcggcaggcattgtgct

SEQ ID NO: 139466 - RNA, 22 nt, synthetic construct
  source 1..22: mol_type = other RNA
gctctgggtcagaatcgtgata

SEQ ID NO: 139467 - RNA, 22 nt, synthetic construct
  source 1..22: mol_type = other RNA
gctctgggtgcgttgaccgctt

SEQ ID NO: 139468 - RNA, 22 nt, synthetic construct
  source 1..22: mol_type = other RNA
gctctggttttaaagaaattag

SEQ ID NO: 139469 - RNA, 22 nt, synthetic construct
  source 1..22: mol_type = other RNA
gctctgtcacccacgtggagtg

SEQ ID NO: 139470 - RNA, 22 nt, synthetic construct
  source 1..22: mol_type = other RNA
gctctgtcacccttgtaatcaa

SEQ ID NO: 139471 - RNA, 22 nt, synthetic construct
  source 1..22: mol_type = other RNA
gctctgtcctgtcagtgtggtt

SEQ ID NO: 139472 - RNA, 22 nt, synthetic construct
  source 1..22: mol_type = other RNA
gctctgtcgcccaggcggaatg

SEQ ID NO: 139473 - RNA, 22 nt, synthetic construct
  source 1..22: mol_type = other RNA
gctctgtcttgatgatagaata

SEQ ID NO: 139474 - RNA, 22 nt, synthetic construct
  source 1..22: mol_type = other RNA
gctctgtgctgagatggtcagt

SEQ ID NO: 139475 - RNA, 22 nt, synthetic construct
  source 1..22: mol_type = other RNA
gctctgtggtttcttgaatctc

SEQ ID NO: 139476 - RNA, 22 nt, synthetic construct
  source 1..22: mol_type = other RNA
gctctgttctgttccatcggtc

SEQ ID NO: 139477 - RNA, 22 nt, synthetic construct
  source 1..22: mol_type = other RNA
gctctgttgcccagactggagt

SEQ ID NO: 139478 - RNA, 22 nt, synthetic construct
  source 1..22: mol_type = other RNA
gctcttaagcttaggtctttga

SEQ ID NO: 139479 - RNA, 22 nt, synthetic construct
  source 1..22: mol_type = other RNA
gctcttaagtatttttgttaga

SEQ ID NO: 139480 - RNA, 22 nt, synthetic construct
  source 1..22: mol_type = other RNA
gctcttagaaaatatatactga

SEQ ID NO: 139481 - RNA, 22 nt, synthetic construct
  source 1..22: mol_type = other RNA
gctcttcaagcattgggagctt

SEQ ID NO: 139482 - RNA, 22 nt, synthetic construct
  source 1..22: mol_type = other RNA
gctcttcccttaacctttttct

SEQ ID NO: 139483 - RNA, 22 nt, synthetic construct
  source 1..22: mol_type = other RNA
gctcttctattccagagaattc

SEQ ID NO: 139484 - RNA, 22 nt, synthetic construct
  source 1..22: mol_type = other RNA
gctcttctcagttgcagcatgc

SEQ ID NO: 139485 - RNA, 22 nt, synthetic construct
  source 1..22: mol_type = other RNA
gctcttctgatcacagaagtgt

SEQ ID NO: 139486 - RNA, 22 nt, synthetic construct
  source 1..22: mol_type = other RNA
gctcttgaccttgtgcatgtgc

SEQ ID NO: 139487 - RNA, 22 nt, synthetic construct
  source 1..22: mol_type = other RNA
gctcttggcttttggcagcgta

SEQ ID NO: 139488 - RNA, 22 nt, synthetic construct
  source 1..22: mol_type = other RNA
gctcttggtttcttcaagatac

SEQ ID NO: 139489 - RNA, 22 nt, synthetic construct
  source 1..22: mol_type = other RNA
gctcttgttcaaaaaccttttt

SEQ ID NO: 139490 - RNA, 22 nt, synthetic construct
  source 1..22: mol_type = other RNA
gctctttatctccacatttcta

SEQ ID NO: 139491 - RNA, 22 nt, synthetic construct
  source 1..22: mol_type = other RNA
gctctttccactctctggctgc

SEQ ID NO: 139492 - RNA, 22 nt, synthetic construct
  source 1..22: mol_type = other RNA
gctcttttaaaaattacaactg

SEQ ID NO: 139493 - RNA, 22 nt, synthetic construct
  source 1..22: mol_type = other RNA
gctcttttcatcactcactggc

SEQ ID NO: 139494 - RNA, 22 nt, synthetic construct
  source 1..22: mol_type = other RNA
gctcttttgtgtctttttatat

SEQ ID NO: 139495 - RNA, 22 nt, synthetic construct
  source 1..22: mol_type = other RNA
gctgaaaaacacctcagttaaa

SEQ ID NO: 139496 - RNA, 22 nt, synthetic construct
  source 1..22: mol_type = other RNA
gctgaaaaagatactcttaaag

SEQ ID NO: 139497 - RNA, 22 nt, synthetic construct
  source 1..22: mol_type = other RNA
gctgaaaccccgcatactgtgc

SEQ ID NO: 139498 - RNA, 22 nt, synthetic construct
  source 1..22: mol_type = other RNA
gctgaaagagaaagaagtaatt

SEQ ID NO: 139499 - RNA, 22 nt, synthetic construct
  source 1..22: mol_type = other RNA
gctgaaagctagaagacctcaa

SEQ ID NO: 139500 - RNA, 22 nt, synthetic construct
  source 1..22: mol_type = other RNA
gctgaaaggcatgaaattcttg

SEQ ID NO: 139501 - RNA, 22 nt, synthetic construct
  source 1..22: mol_type = other RNA
gctgaaagtaaagatagcccct

SEQ ID NO: 139502 - RNA, 22 nt, synthetic construct
  source 1..22: mol_type = other RNA
gctgaaatgctgtaactgactt

SEQ ID NO: 139503 - RNA, 22 nt, synthetic construct
  source 1..22: mol_type = other RNA
gctgaacaatattccattttat

SEQ ID NO: 139504 - RNA, 22 nt, synthetic construct
  source 1..22: mol_type = other RNA
gctgaactcctttcttaccctc

SEQ ID NO: 139505 - RNA, 22 nt, synthetic construct
  source 1..22: mol_type = other RNA
gctgaactctgtggagtcctgt

SEQ ID NO: 139506 - RNA, 22 nt, synthetic construct
  source 1..22: mol_type = other RNA
gctgaactgctgacagattaaa

SEQ ID NO: 139507 - RNA, 22 nt, synthetic construct
  source 1..22: mol_type = other RNA
gctgaacttgtcacaaaatgtg

SEQ ID NO: 139508 - RNA, 22 nt, synthetic construct
  source 1..22: mol_type = other RNA
gctgaagaataactgtcctgaa

SEQ ID NO: 139509 - RNA, 22 nt, synthetic construct
  source 1..22: mol_type = other RNA
gctgaagcaggctttttacccg

SEQ ID NO: 139510 - RNA, 22 nt, synthetic construct
  source 1..22: mol_type = other RNA
gctgaaggcactgtatggttct

SEQ ID NO: 139511 - RNA, 22 nt, synthetic construct
  source 1..22: mol_type = other RNA
gctgaagggaggaaaaaacagt

SEQ ID NO: 139512 - RNA, 22 nt, synthetic construct
  source 1..22: mol_type = other RNA
gctgaagtacttcaaggttcac

SEQ ID NO: 139513 - RNA, 22 nt, synthetic construct
  source 1..22: mol_type = other RNA
gctgacagattaaataccacct

SEQ ID NO: 139514 - RNA, 22 nt, synthetic construct
  source 1..22: mol_type = other RNA
gctgacatgtgtaaaacatctg

SEQ ID NO: 139515 - RNA, 22 nt, synthetic construct
  source 1..22: mol_type = other RNA
gctgacccactggtttcagtcc

SEQ ID NO: 139516 - RNA, 22 nt, synthetic construct
  source 1..22: mol_type = other RNA
gctgacctggtactctatgata

SEQ ID NO: 139517 - RNA, 22 nt, synthetic construct
  source 1..22: mol_type = other RNA
gctgactagtacgtgcagagca

SEQ ID NO: 139518 - RNA, 22 nt, synthetic construct
  source 1..22: mol_type = other RNA
gctgacttagagggcttcatgc

SEQ ID NO: 139519 - RNA, 22 nt, synthetic construct
  source 1..22: mol_type = other RNA
gctgacttcctggctctagccc

SEQ ID NO: 139520 - RNA, 22 nt, synthetic construct
  source 1..22: mol_type = other RNA
gctgactttcatttgtaattca

SEQ ID NO: 139521 - RNA, 22 nt, synthetic construct
  source 1..22: mol_type = other RNA
gctgacttttaaaatatgtgga

SEQ ID NO: 139522 - RNA, 22 nt, synthetic construct
  source 1..22: mol_type = other RNA
gctgagaagtaacattacaaca

SEQ ID NO: 139523 - RNA, 22 nt, synthetic construct
  source 1..22: mol_type = other RNA
gctgagaccacagacgtgcagc

SEQ ID NO: 139524 - RNA, 22 nt, synthetic construct
  source 1..22: mol_type = other RNA
gctgagacctcatcttagccgg

SEQ ID NO: 139525 - RNA, 22 nt, synthetic construct
  source 1..22: mol_type = other RNA
gctgagatggtcagtactatct

SEQ ID NO: 139526 - RNA, 22 nt, synthetic construct
  source 1..22: mol_type = other RNA
gctgagattacagatgtgagcc

SEQ ID NO: 139527 - RNA, 22 nt, synthetic construct
  source 1..22: mol_type = other RNA
gctgagattgccccattgcact

SEQ ID NO: 139528 - RNA, 22 nt, synthetic construct
  source 1..22: mol_type = other RNA
gctgagattgtgccagtgaact

SEQ ID NO: 139529 - RNA, 22 nt, synthetic construct
  source 1..22: mol_type = other RNA
gctgagccttcagaactcttct

SEQ ID NO: 139530 - RNA, 22 nt, synthetic construct
  source 1..22: mol_type = other RNA
gctgaggaaggagaatcgctta

SEQ ID NO: 139531 - RNA, 22 nt, synthetic construct
  source 1..22: mol_type = other RNA
gctgaggattggagactgataa

SEQ ID NO: 139532 - RNA, 22 nt, synthetic construct
  source 1..22: mol_type = other RNA
gctgaggcagcccgacctccag

SEQ ID NO: 139533 - RNA, 22 nt, synthetic construct
  source 1..22: mol_type = other RNA
gctgaggcaggagaactgcctg

SEQ ID NO: 139534 - RNA, 22 nt, synthetic construct
  source 1..22: mol_type = other RNA
gctgaggcaggagcatagcttg

SEQ ID NO: 139535 - RNA, 22 nt, synthetic construct
  source 1..22: mol_type = other RNA
gctgaggcaggaggcacctgaa

SEQ ID NO: 139536 - RNA, 22 nt, synthetic construct
  source 1..22: mol_type = other RNA
gctgaggccccaggggacatag

SEQ ID NO: 139537 - RNA, 22 nt, synthetic construct
  source 1..22: mol_type = other RNA
gctgaggccggaggattgcttg

SEQ ID NO: 139538 - RNA, 22 nt, synthetic construct
  source 1..22: mol_type = other RNA
gctgaggcggaaggattgccta

SEQ ID NO: 139539 - RNA, 22 nt, synthetic construct
  source 1..22: mol_type = other RNA
gctgaggcggctggatcgcttg

SEQ ID NO: 139540 - RNA, 22 nt, synthetic construct
  source 1..22: mol_type = other RNA
gctgaggctggggaattgcatg

SEQ ID NO: 139541 - RNA, 22 nt, synthetic construct
  source 1..22: mol_type = other RNA
gctgagggaatttttcttacct

SEQ ID NO: 139542 - RNA, 22 nt, synthetic construct
  source 1..22: mol_type = other RNA
gctgagtagcgctttaagcatc

SEQ ID NO: 139543 - RNA, 22 nt, synthetic construct
  source 1..22: mol_type = other RNA
gctgagtatgggtctccatttt

SEQ ID NO: 139544 - RNA, 22 nt, synthetic construct
  source 1..22: mol_type = other RNA
gctgagtcttctactgtgaatt

SEQ ID NO: 139545 - RNA, 22 nt, synthetic construct
  source 1..22: mol_type = other RNA
gctgagtgaatggggtaatttt

SEQ ID NO: 139546 - RNA, 22 nt, synthetic construct
  source 1..22: mol_type = other RNA
gctgataaatggctttttacga

SEQ ID NO: 139547 - RNA, 22 nt, synthetic construct
  source 1..22: mol_type = other RNA
gctgatcaaggaagcttcctaa

SEQ ID NO: 139548 - RNA, 22 nt, synthetic construct
  source 1..22: mol_type = other RNA
gctgatcaggaaagaccgggga

SEQ ID NO: 139549 - RNA, 22 nt, synthetic construct
  source 1..22: mol_type = other RNA
gctgatgaactacacagacatg

SEQ ID NO: 139550 - RNA, 22 nt, synthetic construct
  source 1..22: mol_type = other RNA
gctgatgacagttactctaaaa

SEQ ID NO: 139551 - RNA, 22 nt, synthetic construct
  source 1..22: mol_type = other RNA
gctgatgtaagtgggaggaggt

SEQ ID NO: 139552 - RNA, 22 nt, synthetic construct
  source 1..22: mol_type = other RNA
gctgatgtgttgaccttagtgg

SEQ ID NO: 139553 - RNA, 22 nt, synthetic construct
  source 1..22: mol_type = other RNA
gctgattataaccttgaacttc

SEQ ID NO: 139554 - RNA, 22 nt, synthetic construct
  source 1..22: mol_type = other RNA
gctgcaactgagaagagctgta

SEQ ID NO: 139555 - RNA, 22 nt, synthetic construct
  source 1..22: mol_type = other RNA
gctgcaagcactggtaaggaaa

SEQ ID NO: 139556 - RNA, 22 nt, synthetic construct
  source 1..22: mol_type = other RNA
gctgcaattgcgcagaactggg

SEQ ID NO: 139557 - RNA, 22 nt, synthetic construct
  source 1..22: mol_type = other RNA
gctgcaccattttttcaccagc

SEQ ID NO: 139558 - RNA, 22 nt, synthetic construct
  source 1..22: mol_type = other RNA
gctgcaccctcctcctcctggc

SEQ ID NO: 139559 - RNA, 22 nt, synthetic construct
  source 1..22: mol_type = other RNA
gctgcacgtctgtggtctcagc

SEQ ID NO: 139560 - RNA, 22 nt, synthetic construct
  source 1..22: mol_type = other RNA
gctgcactggctattagttaac

SEQ ID NO: 139561 - RNA, 22 nt, synthetic construct
  source 1..22: mol_type = other RNA
gctgcagggcttctgaaggtgc

SEQ ID NO: 139562 - RNA, 22 nt, synthetic construct
  source 1..22: mol_type = other RNA
gctgcagtatgcatagatcaca

SEQ ID NO: 139563 - RNA, 22 nt, synthetic construct
  source 1..22: mol_type = other RNA
gctgcagtgagctccagcctgg

SEQ ID NO: 139564 - RNA, 22 nt, synthetic construct
  source 1..22: mol_type = other RNA
gctgcagtttttccactaatgt

SEQ ID NO: 139565 - RNA, 22 nt, synthetic construct
  source 1..22: mol_type = other RNA
gctgcatagtactccattatat

SEQ ID NO: 139566 - RNA, 22 nt, synthetic construct
  source 1..22: mol_type = other RNA
gctgcatcatggtgggccttgc

SEQ ID NO: 139567 - RNA, 22 nt, synthetic construct
  source 1..22: mol_type = other RNA
gctgcatcccaagggttttggt

SEQ ID NO: 139568 - RNA, 22 nt, synthetic construct
  source 1..22: mol_type = other RNA
gctgcattccagcctggtgaca

SEQ ID NO: 139569 - RNA, 22 nt, synthetic construct
  source 1..22: mol_type = other RNA
gctgccaaaagccaagagcgag

SEQ ID NO: 139570 - RNA, 22 nt, synthetic construct
  source 1..22: mol_type = other RNA
gctgccaagtcagcacttctga

SEQ ID NO: 139571 - RNA, 22 nt, synthetic construct
  source 1..22: mol_type = other RNA
gctgccactacttagcccctgc

SEQ ID NO: 139572 - RNA, 22 nt, synthetic construct
  source 1..22: mol_type = other RNA
gctgccagatgttctaatttct

SEQ ID NO: 139573 - RNA, 22 nt, synthetic construct
  source 1..22: mol_type = other RNA
gctgccagcaccagatactcaa

SEQ ID NO: 139574 - RNA, 22 nt, synthetic construct
  source 1..22: mol_type = other RNA
gctgccccagctaaaatgttca

SEQ ID NO: 139575 - RNA, 22 nt, synthetic construct
  source 1..22: mol_type = other RNA
gctgcctcagccgccgcagagg

SEQ ID NO: 139576 - RNA, 22 nt, synthetic construct
  source 1..22: mol_type = other RNA
gctgcctcttcctgttgcttta

SEQ ID NO: 139577 - RNA, 22 nt, synthetic construct
  source 1..22: mol_type = other RNA
gctgcgagaaaggcgaagcggc

SEQ ID NO: 139578 - RNA, 22 nt, synthetic construct
  source 1..22: mol_type = other RNA
gctgcgccactgcactccagcc

SEQ ID NO: 139579 - RNA, 22 nt, synthetic construct
  source 1..22: mol_type = other RNA
gctgctatgaaaattggcgtac

SEQ ID NO: 139580 - RNA, 22 nt, synthetic construct
  source 1..22: mol_type = other RNA
gctgctccctctgccgcctggg

SEQ ID NO: 139581 - RNA, 22 nt, synthetic construct
  source 1..22: mol_type = other RNA
gctgctctgacgtttaaatgag

SEQ ID NO: 139582 - RNA, 22 nt, synthetic construct
  source 1..22: mol_type = other RNA
gctgctgaaaaagatactctta

SEQ ID NO: 139583 - RNA, 22 nt, synthetic construct
  source 1..22: mol_type = other RNA
gctgctgtaacaaagatgccac

SEQ ID NO: 139584 - RNA, 22 nt, synthetic construct
  source 1..22: mol_type = other RNA
gctgcttctacccactattgaa

SEQ ID NO: 139585 - RNA, 22 nt, synthetic construct
  source 1..22: mol_type = other RNA
gctggaaataatttccctcaga

SEQ ID NO: 139586 - RNA, 22 nt, synthetic construct
  source 1..22: mol_type = other RNA
gctggaaattttcaagggtgtt

SEQ ID NO: 139587 - RNA, 22 nt, synthetic construct
  source 1..22: mol_type = other RNA
gctggaacgaatattcatttat

SEQ ID NO: 139588 - RNA, 22 nt, synthetic construct
  source 1..22: mol_type = other RNA
gctggaagaattttaagcctag

SEQ ID NO: 139589 - RNA, 22 nt, synthetic construct
  source 1..22: mol_type = other RNA
gctggaagggagcccaagcaca

SEQ ID NO: 139590 - RNA, 22 nt, synthetic construct
  source 1..22: mol_type = other RNA
gctggaagtaaggattttctat

SEQ ID NO: 139591 - RNA, 22 nt, synthetic construct
  source 1..22: mol_type = other RNA
gctggaagttggcccaacatgc

SEQ ID NO: 139592 - RNA, 22 nt, synthetic construct
  source 1..22: mol_type = other RNA
gctggaatggtgaagaatgtga

SEQ ID NO: 139593 - RNA, 22 nt, synthetic construct
  source 1..22: mol_type = other RNA
gctggacataagggtctgtttt

SEQ ID NO: 139594 - RNA, 22 nt, synthetic construct
  source 1..22: mol_type = other RNA
gctggacccttaccttaaacca

SEQ ID NO: 139595 - RNA, 22 nt, synthetic construct
  source 1..22: mol_type = other RNA
gctggactcattccaatccttc

SEQ ID NO: 139596 - RNA, 22 nt, synthetic construct
  source 1..22: mol_type = other RNA
gctggactggagggatgctgga

SEQ ID NO: 139597 - RNA, 22 nt, synthetic construct
  source 1..22: mol_type = other RNA
gctggagctcactgcagcctca

SEQ ID NO: 139598 - RNA, 22 nt, synthetic construct
  source 1..22: mol_type = other RNA
gctggaggatggcttgagccca

SEQ ID NO: 139599 - RNA, 22 nt, synthetic construct
  source 1..22: mol_type = other RNA
gctggaggtcgggctgcctcag

SEQ ID NO: 139600 - RNA, 22 nt, synthetic construct
  source 1..22: mol_type = other RNA
gctggagtgcaatggtgggatc

SEQ ID NO: 139601 - RNA, 22 nt, synthetic construct
  source 1..22: mol_type = other RNA
gctggagtggagtggcatgatc

SEQ ID NO: 139602 - RNA, 22 nt, synthetic construct
  source 1..22: mol_type = other RNA
gctggagtgtggcaggggctgc

SEQ ID NO: 139603 - RNA, 22 nt, synthetic construct
  source 1..22: mol_type = other RNA
gctggagttatttgtataaatt

SEQ ID NO: 139604 - RNA, 22 nt, synthetic construct
  source 1..22: mol_type = other RNA
gctggatcatatagtaattctg

SEQ ID NO: 139605 - RNA, 22 nt, synthetic construct
  source 1..22: mol_type = other RNA
gctggatgtggtgtggcatgtc

SEQ ID NO: 139606 - RNA, 22 nt, synthetic construct
  source 1..22: mol_type = other RNA
gctggcaaaatggagacatctg

SEQ ID NO: 139607 - RNA, 22 nt, synthetic construct
  source 1..22: mol_type = other RNA
gctggcactttcctgataaggg

SEQ ID NO: 139608 - RNA, 22 nt, synthetic construct
  source 1..22: mol_type = other RNA
gctggcagccttctctcttcca

SEQ ID NO: 139609 - RNA, 22 nt, synthetic construct
  source 1..22: mol_type = other RNA
gctggcatgttggatagtttct

SEQ ID NO: 139610 - RNA, 22 nt, synthetic construct
  source 1..22: mol_type = other RNA
gctggccagtgagttcaaatgt

SEQ ID NO: 139611 - RNA, 22 nt, synthetic construct
  source 1..22: mol_type = other RNA
gctggctcagtctgtttgccat

SEQ ID NO: 139612 - RNA, 22 nt, synthetic construct
  source 1..22: mol_type = other RNA
gctggctctttccactctctgg

SEQ ID NO: 139613 - RNA, 22 nt, synthetic construct
  source 1..22: mol_type = other RNA
gctggcttcaatatgcagtatg

SEQ ID NO: 139614 - RNA, 22 nt, synthetic construct
  source 1..22: mol_type = other RNA
gctggcttcatgggtggaaatt

SEQ ID NO: 139615 - RNA, 22 nt, synthetic construct
  source 1..22: mol_type = other RNA
gctgggactacaggtgtgaacc

SEQ ID NO: 139616 - RNA, 22 nt, synthetic construct
  source 1..22: mol_type = other RNA
gctgggagaaagctaatttgga

SEQ ID NO: 139617 - RNA, 22 nt, synthetic construct
  source 1..22: mol_type = other RNA
gctgggagaccaggagttctta

SEQ ID NO: 139618 - RNA, 22 nt, synthetic construct
  source 1..22: mol_type = other RNA
gctgggagcttatcaggcttga

SEQ ID NO: 139619 - RNA, 22 nt, synthetic construct
  source 1..22: mol_type = other RNA
gctgggagtacaagaccagcct

SEQ ID NO: 139620 - RNA, 22 nt, synthetic construct
  source 1..22: mol_type = other RNA
gctgggatcacaggcgttgagc

SEQ ID NO: 139621 - RNA, 22 nt, synthetic construct
  source 1..22: mol_type = other RNA
gctgggatggctgaaagagaaa

SEQ ID NO: 139622 - RNA, 22 nt, synthetic construct
  source 1..22: mol_type = other RNA
gctgggattacacacacctacc

SEQ ID NO: 139623 - RNA, 22 nt, synthetic construct
  source 1..22: mol_type = other RNA
gctgggattacaggcgcacgcc

SEQ ID NO: 139624 - RNA, 22 nt, synthetic construct
  source 1..22: mol_type = other RNA
gctgggcccactctccccaagt

SEQ ID NO: 139625 - RNA, 22 nt, synthetic construct
  source 1..22: mol_type = other RNA
gctgggcccgcagtggctcatg

SEQ ID NO: 139626 - RNA, 22 nt, synthetic construct
  source 1..22: mol_type = other RNA
gctgggcgagatggcgtgcgcc

SEQ ID NO: 139627 - RNA, 22 nt, synthetic construct
  source 1..22: mol_type = other RNA
gctgggctagagccaggaagtc

SEQ ID NO: 139628 - RNA, 22 nt, synthetic construct
  source 1..22: mol_type = other RNA
gctgggctagggaagcagttga

SEQ ID NO: 139629 - RNA, 22 nt, synthetic construct
  source 1..22: mol_type = other RNA
gctgggctattgttttgcaaga

SEQ ID NO: 139630 - RNA, 22 nt, synthetic construct
  source 1..22: mol_type = other RNA
gctgggctttctccaggggcgg

SEQ ID NO: 139631 - RNA, 22 nt, synthetic construct
  source 1..22: mol_type = other RNA
gctggggaattgcatgagactt

SEQ ID NO: 139632 - RNA, 22 nt, synthetic construct
  source 1..22: mol_type = other RNA
gctggggacccctccctgcttt

SEQ ID NO: 139633 - RNA, 22 nt, synthetic construct
  source 1..22: mol_type = other RNA
gctggggcagcaaagcaagaaa

SEQ ID NO: 139634 - RNA, 22 nt, synthetic construct
  source 1..22: mol_type = other RNA
gctgggggatccaggggaatag

SEQ ID NO: 139635 - RNA, 22 nt, synthetic construct
  source 1..22: mol_type = other RNA
gctgggtagagactggatcctg

SEQ ID NO: 139636 - RNA, 22 nt, synthetic construct
  source 1..22: mol_type = other RNA
gctgggtgatgttcaaccctcg

SEQ ID NO: 139637 - RNA, 22 nt, synthetic construct
  source 1..22: mol_type = other RNA
gctggtaatacagtctgattta

SEQ ID NO: 139638 - RNA, 22 nt, synthetic construct
  source 1..22: mol_type = other RNA
gctggtcctgaactcgtggcct

SEQ ID NO: 139639 - RNA, 22 nt, synthetic construct
  source 1..22: mol_type = other RNA
gctggtctcaaactccaagtct

SEQ ID NO: 139640 - RNA, 22 nt, synthetic construct
  source 1..22: mol_type = other RNA
gctggtctggaatgtgtagttc

SEQ ID NO: 139641 - RNA, 22 nt, synthetic construct
  source 1..22: mol_type = other RNA
gctggtcttgtactcccagcct

SEQ ID NO: 139642 - RNA, 22 nt, synthetic construct
  source 1..22: mol_type = other RNA
gctggtgaaaaaatggtgcagc

SEQ ID NO: 139643 - RNA, 22 nt, synthetic construct
  source 1..22: mol_type = other RNA
gctggtggagtattctagttct

SEQ ID NO: 139644 - RNA, 22 nt, synthetic construct
  source 1..22: mol_type = other RNA
gctggtgggctttgagaaaggt

SEQ ID NO: 139645 - RNA, 22 nt, synthetic construct
  source 1..22: mol_type = other RNA
gctggttccaaacttctgacct

SEQ ID NO: 139646 - RNA, 22 nt, synthetic construct
  source 1..22: mol_type = other RNA
gctgtaacaaagatgccacaaa

SEQ ID NO: 139647 - RNA, 22 nt, synthetic construct
  source 1..22: mol_type = other RNA
gctgtaacagaggcatgcacgg

SEQ ID NO: 139648 - RNA, 22 nt, synthetic construct
  source 1..22: mol_type = other RNA
gctgtaactgacttcaagaggt

SEQ ID NO: 139649 - RNA, 22 nt, synthetic construct
  source 1..22: mol_type = other RNA
gctgtaagctggtaatacagtc

SEQ ID NO: 139650 - RNA, 22 nt, synthetic construct
  source 1..22: mol_type = other RNA
gctgtactaagcctatgtaaga

SEQ ID NO: 139651 - RNA, 22 nt, synthetic construct
  source 1..22: mol_type = other RNA
gctgtagtgattcacttttgag

SEQ ID NO: 139652 - RNA, 22 nt, synthetic construct
  source 1..22: mol_type = other RNA
gctgtataacattttctctaca

SEQ ID NO: 139653 - RNA, 22 nt, synthetic construct
  source 1..22: mol_type = other RNA
gctgtatacccaggtgtgagat

SEQ ID NO: 139654 - RNA, 22 nt, synthetic construct
  source 1..22: mol_type = other RNA
gctgtattgtaggaaagcctgt

SEQ ID NO: 139655 - RNA, 22 nt, synthetic construct
  source 1..22: mol_type = other RNA
gctgtatttttgctcacactta

SEQ ID NO: 139656 - RNA, 22 nt, synthetic construct
  source 1..22: mol_type = other RNA
gctgtcaaaaatgtgtctagtg

SEQ ID NO: 139657 - RNA, 22 nt, synthetic construct
  source 1..22: mol_type = other RNA
gctgtcactctctttaggaagc

SEQ ID NO: 139658 - RNA, 22 nt, synthetic construct
  source 1..22: mol_type = other RNA
gctgtcaggcaagggactgtcg

SEQ ID NO: 139659 - RNA, 22 nt, synthetic construct
  source 1..22: mol_type = other RNA
gctgtccaacaagggttggtgc

SEQ ID NO: 139660 - RNA, 22 nt, synthetic construct
  source 1..22: mol_type = other RNA
gctgtccatttccagtactttt

SEQ ID NO: 139661 - RNA, 22 nt, synthetic construct
  source 1..22: mol_type = other RNA
gctgtccatttccttaagcaca

SEQ ID NO: 139662 - RNA, 22 nt, synthetic construct
  source 1..22: mol_type = other RNA
gctgtcccaaatgcaccaacac

SEQ ID NO: 139663 - RNA, 22 nt, synthetic construct
  source 1..22: mol_type = other RNA
gctgtccccaccgccttcctac

SEQ ID NO: 139664 - RNA, 22 nt, synthetic construct
  source 1..22: mol_type = other RNA
gctgtccttctcgtgtgagctc

SEQ ID NO: 139665 - RNA, 22 nt, synthetic construct
  source 1..22: mol_type = other RNA
gctgtcgctctcctgtgccaag

SEQ ID NO: 139666 - RNA, 22 nt, synthetic construct
  source 1..22: mol_type = other RNA
gctgtcggttttctagttagtt

SEQ ID NO: 139667 - RNA, 22 nt, synthetic construct
  source 1..22: mol_type = other RNA
gctgtcgtttatgcatttatta

SEQ ID NO: 139668 - RNA, 22 nt, synthetic construct
  source 1..22: mol_type = other RNA
gctgtctataggcaatgagtct

SEQ ID NO: 139669 - RNA, 22 nt, synthetic construct
  source 1..22: mol_type = other RNA
gctgtctccaacgctttttatg

SEQ ID NO: 139670 - RNA, 22 nt, synthetic construct
  source 1..22: mol_type = other RNA
gctgtctggattgattccagtt

SEQ ID NO: 139671 - RNA, 22 nt, synthetic construct
  source 1..22: mol_type = other RNA
gctgtgaatgtgaggtgaggac

SEQ ID NO: 139672 - RNA, 22 nt, synthetic construct
  source 1..22: mol_type = other RNA
gctgtgaatttggatttgagta

SEQ ID NO: 139673 - RNA, 22 nt, synthetic construct
  source 1..22: mol_type = other RNA
gctgtgagtccttccagtatga

SEQ ID NO: 139674 - RNA, 22 nt, synthetic construct
  source 1..22: mol_type = other RNA
gctgtgattaccggcatccgcc

SEQ ID NO: 139675 - RNA, 22 nt, synthetic construct
  source 1..22: mol_type = other RNA
gctgtgattgcaggtgtgggcc

SEQ ID NO: 139676 - RNA, 22 nt, synthetic construct
  source 1..22: mol_type = other RNA
gctgtgccaactctggcaggtc

SEQ ID NO: 139677 - RNA, 22 nt, synthetic construct
  source 1..22: mol_type = other RNA
gctgtgccagtgcaaacctcct

SEQ ID NO: 139678 - RNA, 22 nt, synthetic construct
  source 1..22: mol_type = other RNA
gctgtgccgaggcagagagagt

SEQ ID NO: 139679 - RNA, 22 nt, synthetic construct
  source 1..22: mol_type = other RNA
gctgtggaagcacagtctctgc

SEQ ID NO: 139680 - RNA, 22 nt, synthetic construct
  source 1..22: mol_type = other RNA
gctgtggatgttggtgagaacc

SEQ ID NO: 139681 - RNA, 22 nt, synthetic construct
  source 1..22: mol_type = other RNA
gctgtggccgagggagacggcg

SEQ ID NO: 139682 - RNA, 22 nt, synthetic construct
  source 1..22: mol_type = other RNA
gctgtggctaacaatcaaattt

SEQ ID NO: 139683 - RNA, 22 nt, synthetic construct
  source 1..22: mol_type = other RNA
gctgtggctcactcatttccgt

SEQ ID NO: 139684 - RNA, 22 nt, synthetic construct
  source 1..22: mol_type = other RNA
gctgtggcttgggtgacctcat

SEQ ID NO: 139685 - RNA, 22 nt, synthetic construct
  source 1..22: mol_type = other RNA
gctgttaatggttagactgcac

SEQ ID NO: 139686 - RNA, 22 nt, synthetic construct
  source 1..22: mol_type = other RNA
gctgttaccatttgaccttcct

SEQ ID NO: 139687 - RNA, 22 nt, synthetic construct
  source 1..22: mol_type = other RNA
gctgttagccttgccattctcc

SEQ ID NO: 139688 - RNA, 22 nt, synthetic construct
  source 1..22: mol_type = other RNA
gctgttaggtattattttcaca

SEQ ID NO: 139689 - RNA, 22 nt, synthetic construct
  source 1..22: mol_type = other RNA
gctgttattagagttgtaacac

SEQ ID NO: 139690 - RNA, 22 nt, synthetic construct
  source 1..22: mol_type = other RNA
gctgttcaatttagaaaatgct

SEQ ID NO: 139691 - RNA, 22 nt, synthetic construct
  source 1..22: mol_type = other RNA
gctgttcccaagcaagtgtggt

SEQ ID NO: 139692 - RNA, 22 nt, synthetic construct
  source 1..22: mol_type = other RNA
gctgttcccagataacagtggt

SEQ ID NO: 139693 - RNA, 22 nt, synthetic construct
  source 1..22: mol_type = other RNA
gctgttctctgtgtggtttgcc

SEQ ID NO: 139694 - RNA, 22 nt, synthetic construct
  source 1..22: mol_type = other RNA
gctgttgaattgttgcgcgtca

SEQ ID NO: 139695 - RNA, 22 nt, synthetic construct
  source 1..22: mol_type = other RNA
gctgttgaggctgggccctgtg

SEQ ID NO: 139696 - RNA, 22 nt, synthetic construct
  source 1..22: mol_type = other RNA
gctgttgatggacgtttgagtt

SEQ ID NO: 139697 - RNA, 22 nt, synthetic construct
  source 1..22: mol_type = other RNA
gctgttgtaatgttacttctca

SEQ ID NO: 139698 - RNA, 22 nt, synthetic construct
  source 1..22: mol_type = other RNA
gctgttgtattttacaccatgc

SEQ ID NO: 139699 - RNA, 22 nt, synthetic construct
  source 1..22: mol_type = other RNA
gctgtttacattagagaagaat

SEQ ID NO: 139700 - RNA, 22 nt, synthetic construct
  source 1..22: mol_type = other RNA
gctgtttaccaagggtgtgttt

SEQ ID NO: 139701 - RNA, 22 nt, synthetic construct
  source 1..22: mol_type = other RNA
gctgtttgagatctttcttatt

SEQ ID NO: 139702 - RNA, 22 nt, synthetic construct
  source 1..22: mol_type = other RNA
gctgtttgagctgaaagtaaag

SEQ ID NO: 139703 - RNA, 22 nt, synthetic construct
  source 1..22: mol_type = other RNA
gctgtttgcctgcgtccgtaga

SEQ ID NO: 139704 - RNA, 22 nt, synthetic construct
  source 1..22: mol_type = other RNA
gctgttttcatgcgacatatca

SEQ ID NO: 139705 - RNA, 22 nt, synthetic construct
  source 1..22: mol_type = other RNA
gctgttttgcttactgtagcat

SEQ ID NO: 139706 - RNA, 22 nt, synthetic construct
  source 1..22: mol_type = other RNA
gctgttttggtaaaatgtggca

SEQ ID NO: 139707 - RNA, 22 nt, synthetic construct
  source 1..22: mol_type = other RNA
gctgtttttgaaaagaacaaca

SEQ ID NO: 139708 - RNA, 22 nt, synthetic construct
  source 1..22: mol_type = other RNA
gcttaaaattcttccagcctgg

SEQ ID NO: 139709 - RNA, 22 nt, synthetic construct
  source 1..22: mol_type = other RNA
gcttaaagcctctcaacacttc

SEQ ID NO: 139710 - RNA, 22 nt, synthetic construct
  source 1..22: mol_type = other RNA
gcttaaagcgctactcagctgt

SEQ ID NO: 139711 - RNA, 22 nt, synthetic construct
  source 1..22: mol_type = other RNA
gcttaaagttggtcctgcatat

SEQ ID NO: 139712 - RNA, 22 nt, synthetic construct
  source 1..22: mol_type = other RNA
gcttaaatttttgagaaattgc

SEQ ID NO: 139713 - RNA, 22 nt, synthetic construct
  source 1..22: mol_type = other RNA
gcttaacaagaatcctgctatt

SEQ ID NO: 139714 - RNA, 22 nt, synthetic construct
  source 1..22: mol_type = other RNA
gcttaacacctttgtattcatc

SEQ ID NO: 139715 - RNA, 22 nt, synthetic construct
  source 1..22: mol_type = other RNA
gcttaacatttgaactcactgg

SEQ ID NO: 139716 - RNA, 22 nt, synthetic construct
  source 1..22: mol_type = other RNA
gcttaagagctaagactataaa

SEQ ID NO: 139717 - RNA, 22 nt, synthetic construct
  source 1..22: mol_type = other RNA
gcttaaggaaatggacagcaca

SEQ ID NO: 139718 - RNA, 22 nt, synthetic construct
  source 1..22: mol_type = other RNA
gcttaagtcactccatttgtgg

SEQ ID NO: 139719 - RNA, 22 nt, synthetic construct
  source 1..22: mol_type = other RNA
gcttaatctgatttttagtgac

SEQ ID NO: 139720 - RNA, 22 nt, synthetic construct
  source 1..22: mol_type = other RNA
gcttaatcttcacacttagttc

SEQ ID NO: 139721 - RNA, 22 nt, synthetic construct
  source 1..22: mol_type = other RNA
gcttaattgagctgtccccacc

SEQ ID NO: 139722 - RNA, 22 nt, synthetic construct
  source 1..22: mol_type = other RNA
gcttaatttagatgagagtggc

SEQ ID NO: 139723 - RNA, 22 nt, synthetic construct
  source 1..22: mol_type = other RNA
gcttacacacacgtttatattc

SEQ ID NO: 139724 - RNA, 22 nt, synthetic construct
  source 1..22: mol_type = other RNA
gcttacagactgattaatttga

SEQ ID NO: 139725 - RNA, 22 nt, synthetic construct
  source 1..22: mol_type = other RNA
gcttacagcagatctgcttgca

SEQ ID NO: 139726 - RNA, 22 nt, synthetic construct
  source 1..22: mol_type = other RNA
gcttacagtcatcacagtccag

SEQ ID NO: 139727 - RNA, 22 nt, synthetic construct
  source 1..22: mol_type = other RNA
gcttaccaagtgccgcgttttt

SEQ ID NO: 139728 - RNA, 22 nt, synthetic construct
  source 1..22: mol_type = other RNA
gcttactctaatggggaaatag

SEQ ID NO: 139729 - RNA, 22 nt, synthetic construct
  source 1..22: mol_type = other RNA
gcttactgcaacctccgttttt

SEQ ID NO: 139730 - RNA, 22 nt, synthetic construct
  source 1..22: mol_type = other RNA
gcttactgtagcattgaagtat

SEQ ID NO: 139731 - RNA, 22 nt, synthetic construct
  source 1..22: mol_type = other RNA
gcttagaaatgaagatggcctc

SEQ ID NO: 139732 - RNA, 22 nt, synthetic construct
  source 1..22: mol_type = other RNA
gcttagaagaagacttaggaga

SEQ ID NO: 139733 - RNA, 22 nt, synthetic construct
  source 1..22: mol_type = other RNA
gcttagataggatgggcagact

SEQ ID NO: 139734 - RNA, 22 nt, synthetic construct
  source 1..22: mol_type = other RNA
gcttagatgagcccaggagttg

SEQ ID NO: 139735 - RNA, 22 nt, synthetic construct
  source 1..22: mol_type = other RNA
gcttagccttccagagacaaag

SEQ ID NO: 139736 - RNA, 22 nt, synthetic construct
  source 1..22: mol_type = other RNA
gcttagcgctggaggtcgggct

SEQ ID NO: 139737 - RNA, 22 nt, synthetic construct
  source 1..22: mol_type = other RNA
gcttagctgcctcttcctgttg

SEQ ID NO: 139738 - RNA, 22 nt, synthetic construct
  source 1..22: mol_type = other RNA
gcttaggatcaccaaagacttc

SEQ ID NO: 139739 - RNA, 22 nt, synthetic construct
  source 1..22: mol_type = other RNA
gcttaggatcccagtcctttgg

SEQ ID NO: 139740 - RNA, 22 nt, synthetic construct
  source 1..22: mol_type = other RNA
gcttaggctgaagcaggctttt

SEQ ID NO: 139741 - RNA, 22 nt, synthetic construct
  source 1..22: mol_type = other RNA
gcttaggctgttattagagttg

SEQ ID NO: 139742 - RNA, 22 nt, synthetic construct
  source 1..22: mol_type = other RNA
gcttaggtaagaaaaattccct

SEQ ID NO: 139743 - RNA, 22 nt, synthetic construct
  source 1..22: mol_type = other RNA
gcttaggtcagattcctttttt

SEQ ID NO: 139744 - RNA, 22 nt, synthetic construct
  source 1..22: mol_type = other RNA
gcttaggtctttgatccatttt

SEQ ID NO: 139745 - RNA, 22 nt, synthetic construct
  source 1..22: mol_type = other RNA
gcttagtacagccatcaaccta

SEQ ID NO: 139746 - RNA, 22 nt, synthetic construct
  source 1..22: mol_type = other RNA
gcttagtcttctcagatctgtt

SEQ ID NO: 139747 - RNA, 22 nt, synthetic construct
  source 1..22: mol_type = other RNA
gcttataacaagaaaatctgac

SEQ ID NO: 139748 - RNA, 22 nt, synthetic construct
  source 1..22: mol_type = other RNA
gcttataatttctgagagtatt

SEQ ID NO: 139749 - RNA, 22 nt, synthetic construct
  source 1..22: mol_type = other RNA
gcttatcagatggtgatacctc

SEQ ID NO: 139750 - RNA, 22 nt, synthetic construct
  source 1..22: mol_type = other RNA
gcttatcaggcttgagtctgtg

SEQ ID NO: 139751 - RNA, 22 nt, synthetic construct
  source 1..22: mol_type = other RNA
gcttatcttttcaaaaacccaa

SEQ ID NO: 139752 - RNA, 22 nt, synthetic construct
  source 1..22: mol_type = other RNA
gcttatgatcttgggaatactt

SEQ ID NO: 139753 - RNA, 22 nt, synthetic construct
  source 1..22: mol_type = other RNA
gcttatgtcttgtggctgacat

SEQ ID NO: 139754 - RNA, 22 nt, synthetic construct
  source 1..22: mol_type = other RNA
gcttattaaaatgaacctgctt

SEQ ID NO: 139755 - RNA, 22 nt, synthetic construct
  source 1..22: mol_type = other RNA
gcttattatatgcctagatttc

SEQ ID NO: 139756 - RNA, 22 nt, synthetic construct
  source 1..22: mol_type = other RNA
gcttattctttttctagtttga

SEQ ID NO: 139757 - RNA, 22 nt, synthetic construct
  source 1..22: mol_type = other RNA
gcttcaaaccactatctaataa

SEQ ID NO: 139758 - RNA, 22 nt, synthetic construct
  source 1..22: mol_type = other RNA
gcttcaaagagaacaaaatacc

SEQ ID NO: 139759 - RNA, 22 nt, synthetic construct
  source 1..22: mol_type = other RNA
gcttcaacctcctgggctcaaa

SEQ ID NO: 139760 - RNA, 22 nt, synthetic construct
  source 1..22: mol_type = other RNA
gcttcaatatgcagtatgtgcc

SEQ ID NO: 139761 - RNA, 22 nt, synthetic construct
  source 1..22: mol_type = other RNA
gcttcaatgagggcagagataa

SEQ ID NO: 139762 - RNA, 22 nt, synthetic construct
  source 1..22: mol_type = other RNA
gcttcacgtgcattcatactga

SEQ ID NO: 139763 - RNA, 22 nt, synthetic construct
  source 1..22: mol_type = other RNA
gcttcactaactttaaattttg

SEQ ID NO: 139764 - RNA, 22 nt, synthetic construct
  source 1..22: mol_type = other RNA
gcttcactcttctgcaagttgc

SEQ ID NO: 139765 - RNA, 22 nt, synthetic construct
  source 1..22: mol_type = other RNA
gcttcacttctctgctgctgaa

SEQ ID NO: 139766 - RNA, 22 nt, synthetic construct
  source 1..22: mol_type = other RNA
gcttcactttcgtcatctataa

SEQ ID NO: 139767 - RNA, 22 nt, synthetic construct
  source 1..22: mol_type = other RNA
gcttcagcctaagcaagttaca

SEQ ID NO: 139768 - RNA, 22 nt, synthetic construct
  source 1..22: mol_type = other RNA
gcttcagtgccaacacatgggg

SEQ ID NO: 139769 - RNA, 22 nt, synthetic construct
  source 1..22: mol_type = other RNA
gcttcagttggtgaagagagcc

SEQ ID NO: 139770 - RNA, 22 nt, synthetic construct
  source 1..22: mol_type = other RNA
gcttcataacattatatttcac

SEQ ID NO: 139771 - RNA, 22 nt, synthetic construct
  source 1..22: mol_type = other RNA
gcttcatataagtggaatcatt

SEQ ID NO: 139772 - RNA, 22 nt, synthetic construct
  source 1..22: mol_type = other RNA
gcttcatattttgtgggaattc

SEQ ID NO: 139773 - RNA, 22 nt, synthetic construct
  source 1..22: mol_type = other RNA
gcttcatctggaccagttactc

SEQ ID NO: 139774 - RNA, 22 nt, synthetic construct
  source 1..22: mol_type = other RNA
gcttcatgctgggagaccagga

SEQ ID NO: 139775 - RNA, 22 nt, synthetic construct
  source 1..22: mol_type = other RNA
gcttcatgggtggaaattaaac

SEQ ID NO: 139776 - RNA, 22 nt, synthetic construct
  source 1..22: mol_type = other RNA
gcttcattccgcgtttattaga

SEQ ID NO: 139777 - RNA, 22 nt, synthetic construct
  source 1..22: mol_type = other RNA
gcttccaaaagcaggccctgag

SEQ ID NO: 139778 - RNA, 22 nt, synthetic construct
  source 1..22: mol_type = other RNA
gcttccacagctatcaggcctt

SEQ ID NO: 139779 - RNA, 22 nt, synthetic construct
  source 1..22: mol_type = other RNA
gcttccacatttctaatttcca

SEQ ID NO: 139780 - RNA, 22 nt, synthetic construct
  source 1..22: mol_type = other RNA
gcttccacccaagtggagcctg

SEQ ID NO: 139781 - RNA, 22 nt, synthetic construct
  source 1..22: mol_type = other RNA
gcttcccacttcgaaagttcag

SEQ ID NO: 139782 - RNA, 22 nt, synthetic construct
  source 1..22: mol_type = other RNA
gcttcccccaaagaaggaaaaa

SEQ ID NO: 139783 - RNA, 22 nt, synthetic construct
  source 1..22: mol_type = other RNA
gcttcccccctctctctttctg

SEQ ID NO: 139784 - RNA, 22 nt, synthetic construct
  source 1..22: mol_type = other RNA
gcttccctagcccagcacttcc

SEQ ID NO: 139785 - RNA, 22 nt, synthetic construct
  source 1..22: mol_type = other RNA
gcttccgggacttggaagtgaa

SEQ ID NO: 139786 - RNA, 22 nt, synthetic construct
  source 1..22: mol_type = other RNA
gcttcctaaacctgctacgaat

SEQ ID NO: 139787 - RNA, 22 nt, synthetic construct
  source 1..22: mol_type = other RNA
gcttcctaaagagagtgacagc

SEQ ID NO: 139788 - RNA, 22 nt, synthetic construct
  source 1..22: mol_type = other RNA
gcttcctaactggtctcctttc

SEQ ID NO: 139789 - RNA, 22 nt, synthetic construct
  source 1..22: mol_type = other RNA
gcttcctaagaaagggtgtgtg

SEQ ID NO: 139790 - RNA, 22 nt, synthetic construct
  source 1..22: mol_type = other RNA
gcttcctacccaagcttaggtc

SEQ ID NO: 139791 - RNA, 22 nt, synthetic construct
  source 1..22: mol_type = other RNA
gcttcctcaggatctacattaa

SEQ ID NO: 139792 - RNA, 22 nt, synthetic construct
  source 1..22: mol_type = other RNA
gcttcctctggctgacctggta

SEQ ID NO: 139793 - RNA, 22 nt, synthetic construct
  source 1..22: mol_type = other RNA
gcttccttctcttatactagta

SEQ ID NO: 139794 - RNA, 22 nt, synthetic construct
  source 1..22: mol_type = other RNA
gcttccttgatcagcttcctac

SEQ ID NO: 139795 - RNA, 22 nt, synthetic construct
  source 1..22: mol_type = other RNA
gcttccttgctatgtaatctca

SEQ ID NO: 139796 - RNA, 22 nt, synthetic construct
  source 1..22: mol_type = other RNA
gcttcgaagcaaaacatatgtc

SEQ ID NO: 139797 - RNA, 22 nt, synthetic construct
  source 1..22: mol_type = other RNA
gcttcgaagcttattaaaatga

SEQ ID NO: 139798 - RNA, 22 nt, synthetic construct
  source 1..22: mol_type = other RNA
gcttcgacagtcccttgcctga

SEQ ID NO: 139799 - RNA, 22 nt, synthetic construct
  source 1..22: mol_type = other RNA
gcttcgaggtcgcaccctgagc

SEQ ID NO: 139800 - RNA, 22 nt, synthetic construct
  source 1..22: mol_type = other RNA
gcttcgagttctgggagttcat

SEQ ID NO: 139801 - RNA, 22 nt, synthetic construct
  source 1..22: mol_type = other RNA
gcttcgcctttctcgcagcggg

SEQ ID NO: 139802 - RNA, 22 nt, synthetic construct
  source 1..22: mol_type = other RNA
gcttcgcctttgttgccaggtg

SEQ ID NO: 139803 - RNA, 22 nt, synthetic construct
  source 1..22: mol_type = other RNA
gcttctacccactattgaaagc

SEQ ID NO: 139804 - RNA, 22 nt, synthetic construct
  source 1..22: mol_type = other RNA
gcttctagccaaagcaagcctt

SEQ ID NO: 139805 - RNA, 22 nt, synthetic construct
  source 1..22: mol_type = other RNA
gcttctagtaacttggtcgaaa

SEQ ID NO: 139806 - RNA, 22 nt, synthetic construct
  source 1..22: mol_type = other RNA
gcttctatgtgacaaacacttt

SEQ ID NO: 139807 - RNA, 22 nt, synthetic construct
  source 1..22: mol_type = other RNA
gcttctcaaactgtgtgcttgg

SEQ ID NO: 139808 - RNA, 22 nt, synthetic construct
  source 1..22: mol_type = other RNA
gcttctcaataaggaaagcacg

SEQ ID NO: 139809 - RNA, 22 nt, synthetic construct
  source 1..22: mol_type = other RNA
gcttctgaaggtgcctgccata

SEQ ID NO: 139810 - RNA, 22 nt, synthetic construct
  source 1..22: mol_type = other RNA
gcttctgaattgagatgtactg

SEQ ID NO: 139811 - RNA, 22 nt, synthetic construct
  source 1..22: mol_type = other RNA
gcttctgagcagtgtttcctag

SEQ ID NO: 139812 - RNA, 22 nt, synthetic construct
  source 1..22: mol_type = other RNA
gcttctgagctgttaatggtta

SEQ ID NO: 139813 - RNA, 22 nt, synthetic construct
  source 1..22: mol_type = other RNA
gcttctgataggaatatcgtct

SEQ ID NO: 139814 - RNA, 22 nt, synthetic construct
  source 1..22: mol_type = other RNA
gcttcttgttagaattttgctt

SEQ ID NO: 139815 - RNA, 22 nt, synthetic construct
  source 1..22: mol_type = other RNA
gcttgaacaaatatgaatgaaa

SEQ ID NO: 139816 - RNA, 22 nt, synthetic construct
  source 1..22: mol_type = other RNA
gcttgaacccgaggtgcacaag

SEQ ID NO: 139817 - RNA, 22 nt, synthetic construct
  source 1..22: mol_type = other RNA
gcttgaacctgaaaaacggagg

SEQ ID NO: 139818 - RNA, 22 nt, synthetic construct
  source 1..22: mol_type = other RNA
gcttgaactgctggtctggaat

SEQ ID NO: 139819 - RNA, 22 nt, synthetic construct
  source 1..22: mol_type = other RNA
gcttgaagagcgcttctatgtg

SEQ ID NO: 139820 - RNA, 22 nt, synthetic construct
  source 1..22: mol_type = other RNA
gcttgaatgtgcctacatagtc

SEQ ID NO: 139821 - RNA, 22 nt, synthetic construct
  source 1..22: mol_type = other RNA
gcttgacaaaaggccccttgaa

SEQ ID NO: 139822 - RNA, 22 nt, synthetic construct
  source 1..22: mol_type = other RNA
gcttgacattcttaccttctaa

SEQ ID NO: 139823 - RNA, 22 nt, synthetic construct
  source 1..22: mol_type = other RNA
gcttgagagagataaaacctgg

SEQ ID NO: 139824 - RNA, 22 nt, synthetic construct
  source 1..22: mol_type = other RNA
gcttgagcccagggggtcgaga

SEQ ID NO: 139825 - RNA, 22 nt, synthetic construct
  source 1..22: mol_type = other RNA
gcttgaggccacgagttcagga

SEQ ID NO: 139826 - RNA, 22 nt, synthetic construct
  source 1..22: mol_type = other RNA
gcttgagtctgtgctctgtatt

SEQ ID NO: 139827 - RNA, 22 nt, synthetic construct
  source 1..22: mol_type = other RNA
gcttgagtgcaggagtttgaga

SEQ ID NO: 139828 - RNA, 22 nt, synthetic construct
  source 1..22: mol_type = other RNA
gcttgatctttacttcccttct

SEQ ID NO: 139829 - RNA, 22 nt, synthetic construct
  source 1..22: mol_type = other RNA
gcttgattagcttcctcaggat

SEQ ID NO: 139830 - RNA, 22 nt, synthetic construct
  source 1..22: mol_type = other RNA
gcttgcaaggcccaccatgatg

SEQ ID NO: 139831 - RNA, 22 nt, synthetic construct
  source 1..22: mol_type = other RNA
gcttgcagacaataattcttcc

SEQ ID NO: 139832 - RNA, 22 nt, synthetic construct
  source 1..22: mol_type = other RNA
gcttgcagccttccctgaacaa

SEQ ID NO: 139833 - RNA, 22 nt, synthetic construct
  source 1..22: mol_type = other RNA
gcttgctagtagcagaatcccc

SEQ ID NO: 139834 - RNA, 22 nt, synthetic construct
  source 1..22: mol_type = other RNA
gcttgctccagagaagttttcc

SEQ ID NO: 139835 - RNA, 22 nt, synthetic construct
  source 1..22: mol_type = other RNA
gcttgctctacaaaccttctta

SEQ ID NO: 139836 - RNA, 22 nt, synthetic construct
  source 1..22: mol_type = other RNA
gcttgctctgcggcaggcattg

SEQ ID NO: 139837 - RNA, 22 nt, synthetic construct
  source 1..22: mol_type = other RNA
gcttgctgcactggctattagt

SEQ ID NO: 139838 - RNA, 22 nt, synthetic construct
  source 1..22: mol_type = other RNA
gcttgctttggctagaagcatc

SEQ ID NO: 139839 - RNA, 22 nt, synthetic construct
  source 1..22: mol_type = other RNA
gcttggaaaacaaattgcatca

SEQ ID NO: 139840 - RNA, 22 nt, synthetic construct
  source 1..22: mol_type = other RNA
gcttggagtcacttgacaaaaa

SEQ ID NO: 139841 - RNA, 22 nt, synthetic construct
  source 1..22: mol_type = other RNA
gcttggatattctacagaaaac

SEQ ID NO: 139842 - RNA, 22 nt, synthetic construct
  source 1..22: mol_type = other RNA
gcttggcacagaattattgatt

SEQ ID NO: 139843 - RNA, 22 nt, synthetic construct
  source 1..22: mol_type = other RNA
gcttggccaacatggcgaaacg

SEQ ID NO: 139844 - RNA, 22 nt, synthetic construct
  source 1..22: mol_type = other RNA
gcttggcgcagtgcttagcgct

SEQ ID NO: 139845 - RNA, 22 nt, synthetic construct
  source 1..22: mol_type = other RNA
gcttgggaacagcaggggaagg

SEQ ID NO: 139846 - RNA, 22 nt, synthetic construct
  source 1..22: mol_type = other RNA
gcttgggcaagagagcaagtcc

SEQ ID NO: 139847 - RNA, 22 nt, synthetic construct
  source 1..22: mol_type = other RNA
gcttgggctaaggtggagtggt

SEQ ID NO: 139848 - RNA, 22 nt, synthetic construct
  source 1..22: mol_type = other RNA
gcttgggctcccttccagcgtg

SEQ ID NO: 139849 - RNA, 22 nt, synthetic construct
  source 1..22: mol_type = other RNA
gcttggggaacagtttagcaat

SEQ ID NO: 139850 - RNA, 22 nt, synthetic construct
  source 1..22: mol_type = other RNA
gcttgggtaggaagctgatcaa

SEQ ID NO: 139851 - RNA, 22 nt, synthetic construct
  source 1..22: mol_type = other RNA
gcttgggtgacctcatgtaact

SEQ ID NO: 139852 - RNA, 22 nt, synthetic construct
  source 1..22: mol_type = other RNA
gcttggtatgcatcttgaacta

SEQ ID NO: 139853 - RNA, 22 nt, synthetic construct
  source 1..22: mol_type = other RNA
gcttggtggcccacacctgcaa

SEQ ID NO: 139854 - RNA, 22 nt, synthetic construct
  source 1..22: mol_type = other RNA
gcttggtgttgactgaattaat

SEQ ID NO: 139855 - RNA, 22 nt, synthetic construct
  source 1..22: mol_type = other RNA
gcttggttggaaaagaaagctg

SEQ ID NO: 139856 - RNA, 22 nt, synthetic construct
  source 1..22: mol_type = other RNA
gcttggtttcacacgcattgca

SEQ ID NO: 139857 - RNA, 22 nt, synthetic construct
  source 1..22: mol_type = other RNA
gcttgtctctctctttctctct

SEQ ID NO: 139858 - RNA, 22 nt, synthetic construct
  source 1..22: mol_type = other RNA
gcttgtcttgaatagcatctta

SEQ ID NO: 139859 - RNA, 22 nt, synthetic construct
  source 1..22: mol_type = other RNA
gcttgtgacatcaagggtggtg

SEQ ID NO: 139860 - RNA, 22 nt, synthetic construct
  source 1..22: mol_type = other RNA
gcttgtgcatcagaattccatt

SEQ ID NO: 139861 - RNA, 22 nt, synthetic construct
  source 1..22: mol_type = other RNA
gcttgtgcttttaatactttca

SEQ ID NO: 139862 - RNA, 22 nt, synthetic construct
  source 1..22: mol_type = other RNA
gcttgtggctacaccctgggaa

SEQ ID NO: 139863 - RNA, 22 nt, synthetic construct
  source 1..22: mol_type = other RNA
gctttaaaacactggcaaaaat

SEQ ID NO: 139864 - RNA, 22 nt, synthetic construct
  source 1..22: mol_type = other RNA
gctttaaactggatgaatacaa

SEQ ID NO: 139865 - RNA, 22 nt, synthetic construct
  source 1..22: mol_type = other RNA
gctttaaagagaaatagttaac

SEQ ID NO: 139866 - RNA, 22 nt, synthetic construct
  source 1..22: mol_type = other RNA
gctttaacctctggtattttaa

SEQ ID NO: 139867 - RNA, 22 nt, synthetic construct
  source 1..22: mol_type = other RNA
gctttaagcagaaagttactat

SEQ ID NO: 139868 - RNA, 22 nt, synthetic construct
  source 1..22: mol_type = other RNA
gctttaagcatcccatatggag

SEQ ID NO: 139869 - RNA, 22 nt, synthetic construct
  source 1..22: mol_type = other RNA
gctttaaggcgcagacacacca

SEQ ID NO: 139870 - RNA, 22 nt, synthetic construct
  source 1..22: mol_type = other RNA
gctttactactgcattttttgc

SEQ ID NO: 139871 - RNA, 22 nt, synthetic construct
  source 1..22: mol_type = other RNA
gctttactgtattaggatgtgt

SEQ ID NO: 139872 - RNA, 22 nt, synthetic construct
  source 1..22: mol_type = other RNA
gctttagatggtaaaacaaatt

SEQ ID NO: 139873 - RNA, 22 nt, synthetic construct
  source 1..22: mol_type = other RNA
gctttagatttatcaatagcag

SEQ ID NO: 139874 - RNA, 22 nt, synthetic construct
  source 1..22: mol_type = other RNA
gctttatgagacacacgagtat

SEQ ID NO: 139875 - RNA, 22 nt, synthetic construct
  source 1..22: mol_type = other RNA
gctttcaatagtgggtagaagc

SEQ ID NO: 139876 - RNA, 22 nt, synthetic construct
  source 1..22: mol_type = other RNA
gctttcagacttaactatagga

SEQ ID NO: 139877 - RNA, 22 nt, synthetic construct
  source 1..22: mol_type = other RNA
gctttcagcactgctattgata

SEQ ID NO: 139878 - RNA, 22 nt, synthetic construct
  source 1..22: mol_type = other RNA
gctttcagttctttcggatatt

SEQ ID NO: 139879 - RNA, 22 nt, synthetic construct
  source 1..22: mol_type = other RNA
gctttcattattaccaggtttt

SEQ ID NO: 139880 - RNA, 22 nt, synthetic construct
  source 1..22: mol_type = other RNA
gctttcccagggtgtagccaca

SEQ ID NO: 139881 - RNA, 22 nt, synthetic construct
  source 1..22: mol_type = other RNA
gctttcctcatgtccatagtta

SEQ ID NO: 139882 - RNA, 22 nt, synthetic construct
  source 1..22: mol_type = other RNA
gctttccttagttcgaagtttt

SEQ ID NO: 139883 - RNA, 22 nt, synthetic construct
  source 1..22: mol_type = other RNA
gctttccttattgagaagcaga

SEQ ID NO: 139884 - RNA, 22 nt, synthetic construct
  source 1..22: mol_type = other RNA
gctttcgtatggaagatgggac

SEQ ID NO: 139885 - RNA, 22 nt, synthetic construct
  source 1..22: mol_type = other RNA
gctttcgtgagggtttcagtga

SEQ ID NO: 139886 - RNA, 22 nt, synthetic construct
  source 1..22: mol_type = other RNA
gctttctaattctgacaactgg

SEQ ID NO: 139887 - RNA, 22 nt, synthetic construct
  source 1..22: mol_type = other RNA
gctttctactagtataagagaa

SEQ ID NO: 139888 - RNA, 22 nt, synthetic construct
  source 1..22: mol_type = other RNA
gctttctatctctcagatctga

SEQ ID NO: 139889 - RNA, 22 nt, synthetic construct
  source 1..22: mol_type = other RNA
gctttctcaacactgtgttctt

SEQ ID NO: 139890 - RNA, 22 nt, synthetic construct
  source 1..22: mol_type = other RNA
gctttctccaggggcggccccg

SEQ ID NO: 139891 - RNA, 22 nt, synthetic construct
  source 1..22: mol_type = other RNA
gctttctcccagctgtccaaca

SEQ ID NO: 139892 - RNA, 22 nt, synthetic construct
  source 1..22: mol_type = other RNA
gctttctctagttgcacggtga

SEQ ID NO: 139893 - RNA, 22 nt, synthetic construct
  source 1..22: mol_type = other RNA
gctttctgtgtaatactgtaga

SEQ ID NO: 139894 - RNA, 22 nt, synthetic construct
  source 1..22: mol_type = other RNA
gctttcttggggctctaatgca

SEQ ID NO: 139895 - RNA, 22 nt, synthetic construct
  source 1..22: mol_type = other RNA
gctttcttttaaagacctcagg

SEQ ID NO: 139896 - RNA, 22 nt, synthetic construct
  source 1..22: mol_type = other RNA
gctttcttttccaaccaagccc

SEQ ID NO: 139897 - RNA, 22 nt, synthetic construct
  source 1..22: mol_type = other RNA
gctttgaatttggaaagggtag

SEQ ID NO: 139898 - RNA, 22 nt, synthetic construct
  source 1..22: mol_type = other RNA
gctttgacttctcagggcctgc

SEQ ID NO: 139899 - RNA, 22 nt, synthetic construct
  source 1..22: mol_type = other RNA
gctttgagaaaggtttcttcac

SEQ ID NO: 139900 - RNA, 22 nt, synthetic construct
  source 1..22: mol_type = other RNA
gctttgagctacaaactccaaa

SEQ ID NO: 139901 - RNA, 22 nt, synthetic construct
  source 1..22: mol_type = other RNA
gctttgatgcccccaccctttt

SEQ ID NO: 139902 - RNA, 22 nt, synthetic construct
  source 1..22: mol_type = other RNA
gctttgcgaaatagtagttgct

SEQ ID NO: 139903 - RNA, 22 nt, synthetic construct
  source 1..22: mol_type = other RNA
gctttgctgccccagctaaaat

SEQ ID NO: 139904 - RNA, 22 nt, synthetic construct
  source 1..22: mol_type = other RNA
gctttggagtcacagtgaattc

SEQ ID NO: 139905 - RNA, 22 nt, synthetic construct
  source 1..22: mol_type = other RNA
gctttggagtgagaggactgcc

SEQ ID NO: 139906 - RNA, 22 nt, synthetic construct
  source 1..22: mol_type = other RNA
gctttggctagaagcatctgat

SEQ ID NO: 139907 - RNA, 22 nt, synthetic construct
  source 1..22: mol_type = other RNA
gctttggctgaaatgctgtaac

SEQ ID NO: 139908 - RNA, 22 nt, synthetic construct
  source 1..22: mol_type = other RNA
gctttgggtctatagtttaatt

SEQ ID NO: 139909 - RNA, 22 nt, synthetic construct
  source 1..22: mol_type = other RNA
gctttgtctctggaaggctaag

SEQ ID NO: 139910 - RNA, 22 nt, synthetic construct
  source 1..22: mol_type = other RNA
gctttgtgaagggaggtaggct

SEQ ID NO: 139911 - RNA, 22 nt, synthetic construct
  source 1..22: mol_type = other RNA
gctttgtgactgtgagggtaag

SEQ ID NO: 139912 - RNA, 22 nt, synthetic construct
  source 1..22: mol_type = other RNA
gctttgtggagtggaggggcag

SEQ ID NO: 139913 - RNA, 22 nt, synthetic construct
  source 1..22: mol_type = other RNA
gctttgtgttggtgtttctgac

SEQ ID NO: 139914 - RNA, 22 nt, synthetic construct
  source 1..22: mol_type = other RNA
gctttgttatgaaaatagtaac

SEQ ID NO: 139915 - RNA, 22 nt, synthetic construct
  source 1..22: mol_type = other RNA
gcttttaatactttcacactga

SEQ ID NO: 139916 - RNA, 22 nt, synthetic construct
  source 1..22: mol_type = other RNA
gcttttacgaggacagactgca

SEQ ID NO: 139917 - RNA, 22 nt, synthetic construct
  source 1..22: mol_type = other RNA
gcttttacttggctcctcccgg

SEQ ID NO: 139918 - RNA, 22 nt, synthetic construct
  source 1..22: mol_type = other RNA
gcttttcatagtcatcattatt

SEQ ID NO: 139919 - RNA, 22 nt, synthetic construct
  source 1..22: mol_type = other RNA
gcttttcatatacgtatttatc

SEQ ID NO: 139920 - RNA, 22 nt, synthetic construct
  source 1..22: mol_type = other RNA
gcttttcctgctgtcgtttatg

SEQ ID NO: 139921 - RNA, 22 nt, synthetic construct
  source 1..22: mol_type = other RNA
gcttttcctggaaaacttctct

SEQ ID NO: 139922 - RNA, 22 nt, synthetic construct
  source 1..22: mol_type = other RNA
gcttttctcctaagtcttcttc

SEQ ID NO: 139923 - RNA, 22 nt, synthetic construct
  source 1..22: mol_type = other RNA
gcttttctcgtgcatgtctgca

SEQ ID NO: 139924 - RNA, 22 nt, synthetic construct
  source 1..22: mol_type = other RNA
gcttttgaaactgagcatccca

SEQ ID NO: 139925 - RNA, 22 nt, synthetic construct
  source 1..22: mol_type = other RNA
gcttttgaacactctgcaattt

SEQ ID NO: 139926 - RNA, 22 nt, synthetic construct
  source 1..22: mol_type = other RNA
gcttttgagtgtaaggtgtttg

SEQ ID NO: 139927 - RNA, 22 nt, synthetic construct
  source 1..22: mol_type = other RNA
gcttttgctgagggaatttttc

SEQ ID NO: 139928 - RNA, 22 nt, synthetic construct
  source 1..22: mol_type = other RNA
gcttttgctgcatcccaagggt

SEQ ID NO: 139929 - RNA, 22 nt, synthetic construct
  source 1..22: mol_type = other RNA
gcttttgctttgggtctatagt

SEQ ID NO: 139930 - RNA, 22 nt, synthetic construct
  source 1..22: mol_type = other RNA
gcttttggaagcatgtggccag

SEQ ID NO: 139931 - RNA, 22 nt, synthetic construct
  source 1..22: mol_type = other RNA
gcttttggagctataatttatc

SEQ ID NO: 139932 - RNA, 22 nt, synthetic construct
  source 1..22: mol_type = other RNA
gcttttggattttctttctaaa

SEQ ID NO: 139933 - RNA, 22 nt, synthetic construct
  source 1..22: mol_type = other RNA
gcttttggcagcgtaactccat

SEQ ID NO: 139934 - RNA, 22 nt, synthetic construct
  source 1..22: mol_type = other RNA
gctttttacccggagaggtgaa

SEQ ID NO: 139935 - RNA, 22 nt, synthetic construct
  source 1..22: mol_type = other RNA
gctttttacgatgaaattgacc

SEQ ID NO: 139936 - RNA, 22 nt, synthetic construct
  source 1..22: mol_type = other RNA
gctttttactttgcgaaacaca

SEQ ID NO: 139937 - RNA, 22 nt, synthetic construct
  source 1..22: mol_type = other RNA
gctttttatatttccgatgata

SEQ ID NO: 139938 - RNA, 22 nt, synthetic construct
  source 1..22: mol_type = other RNA
gctttttatggaaacatggtaa

SEQ ID NO: 139939 - RNA, 22 nt, synthetic construct
  source 1..22: mol_type = other RNA
gctttttctgcatcttttgagg

SEQ ID NO: 139940 - RNA, 22 nt, synthetic construct
  source 1..22: mol_type = other RNA
gctttttcttcttgttttgttc

SEQ ID NO: 139941 - RNA, 22 nt, synthetic construct
  source 1..22: mol_type = other RNA
gctttttcttggtggtaactga

SEQ ID NO: 139942 - RNA, 22 nt, synthetic construct
  source 1..22: mol_type = other RNA
gctttttctttttaaacaggtg

SEQ ID NO: 139943 - RNA, 22 nt, synthetic construct
  source 1..22: mol_type = other RNA
gctttttgtatcctgtttgaga

SEQ ID NO: 139944 - RNA, 22 nt, synthetic construct
  source 1..22: mol_type = other RNA
gcttttttggtgtttttctagg

SEQ ID NO: 139945 - RNA, 22 nt, synthetic construct
  source 1..22: mol_type = other RNA
ggaaaaaacacctaaagatatg

SEQ ID NO: 139946 - RNA, 22 nt, synthetic construct
  source 1..22: mol_type = other RNA
ggaaaaaacagttgctattcaa

SEQ ID NO: 139947 - RNA, 22 nt, synthetic construct
  source 1..22: mol_type = other RNA
ggaaaaaacgggttatacacac

SEQ ID NO: 139948 - RNA, 22 nt, synthetic construct
  source 1..22: mol_type = other RNA
ggaaaaacattctacagtatta

SEQ ID NO: 139949 - RNA, 22 nt, synthetic construct
  source 1..22: mol_type = other RNA
ggaaaaactgcagcaattattt

SEQ ID NO: 139950 - RNA, 22 nt, synthetic construct
  source 1..22: mol_type = other RNA
ggaaaaatcgtcctcttcgggt

SEQ ID NO: 139951 - RNA, 22 nt, synthetic construct
  source 1..22: mol_type = other RNA
ggaaaaatctaaccctcaatcc

SEQ ID NO: 139952 - RNA, 22 nt, synthetic construct
  source 1..22: mol_type = other RNA
ggaaaaatgtccgttgaagtct

SEQ ID NO: 139953 - RNA, 22 nt, synthetic construct
  source 1..22: mol_type = other RNA
ggaaaacaaattgcatcaactg

SEQ ID NO: 139954 - RNA, 22 nt, synthetic construct
  source 1..22: mol_type = other RNA
ggaaaacaattacttgagagca

SEQ ID NO: 139955 - RNA, 22 nt, synthetic construct
  source 1..22: mol_type = other RNA
ggaaaacacccttgaaaatttc

SEQ ID NO: 139956 - RNA, 22 nt, synthetic construct
  source 1..22: mol_type = other RNA
ggaaaacattattttctttgag

SEQ ID NO: 139957 - RNA, 22 nt, synthetic construct
  source 1..22: mol_type = other RNA
ggaaaaccagtttagaaaaata

SEQ ID NO: 139958 - RNA, 22 nt, synthetic construct
  source 1..22: mol_type = other RNA
ggaaaaccatgtcatgtatatg

SEQ ID NO: 139959 - RNA, 22 nt, synthetic construct
  source 1..22: mol_type = other RNA
ggaaaactacatgtaaaaactg

SEQ ID NO: 139960 - RNA, 22 nt, synthetic construct
  source 1..22: mol_type = other RNA
ggaaaactagagatgggaaagt

SEQ ID NO: 139961 - RNA, 22 nt, synthetic construct
  source 1..22: mol_type = other RNA
ggaaaactaggtatttgaaaaa

SEQ ID NO: 139962 - RNA, 22 nt, synthetic construct
  source 1..22: mol_type = other RNA
ggaaaactccaagtgtaaaaag

SEQ ID NO: 139963 - RNA, 22 nt, synthetic construct
  source 1..22: mol_type = other RNA
ggaaaactctgtttccttacca

SEQ ID NO: 139964 - RNA, 22 nt, synthetic construct
  source 1..22: mol_type = other RNA
ggaaaacttctctggagcaagc

SEQ ID NO: 139965 - RNA, 22 nt, synthetic construct
  source 1..22: mol_type = other RNA
ggaaaagaaagctgtggatgtt

SEQ ID NO: 139966 - RNA, 22 nt, synthetic construct
  source 1..22: mol_type = other RNA
ggaaaagaacacagtgttgaga

SEQ ID NO: 139967 - RNA, 22 nt, synthetic construct
  source 1..22: mol_type = other RNA
ggaaaagacttctcaaacagga

SEQ ID NO: 139968 - RNA, 22 nt, synthetic construct
  source 1..22: mol_type = other RNA
ggaaaagacttgaggtttactt

SEQ ID NO: 139969 - RNA, 22 nt, synthetic construct
  source 1..22: mol_type = other RNA
ggaaaagagaacattggtttga

SEQ ID NO: 139970 - RNA, 22 nt, synthetic construct
  source 1..22: mol_type = other RNA
ggaaaagagatctagtgaagtc

SEQ ID NO: 139971 - RNA, 22 nt, synthetic construct
  source 1..22: mol_type = other RNA
ggaaaagcaaatgtcatcttct

SEQ ID NO: 139972 - RNA, 22 nt, synthetic construct
  source 1..22: mol_type = other RNA
ggaaaagctaccctcgagtaaa

SEQ ID NO: 139973 - RNA, 22 nt, synthetic construct
  source 1..22: mol_type = other RNA
ggaaaaggacattagtggaaaa

SEQ ID NO: 139974 - RNA, 22 nt, synthetic construct
  source 1..22: mol_type = other RNA
ggaaaaggatttgtttgtgaag

SEQ ID NO: 139975 - RNA, 22 nt, synthetic construct
  source 1..22: mol_type = other RNA
ggaaaagtcagtaaaaaaggac

SEQ ID NO: 139976 - RNA, 22 nt, synthetic construct
  source 1..22: mol_type = other RNA
ggaaaagtgttgactaccatct

SEQ ID NO: 139977 - RNA, 22 nt, synthetic construct
  source 1..22: mol_type = other RNA
ggaaaataatttgcaacagaat

SEQ ID NO: 139978 - RNA, 22 nt, synthetic construct
  source 1..22: mol_type = other RNA
ggaaaatacatgaggcctctcc

SEQ ID NO: 139979 - RNA, 22 nt, synthetic construct
  source 1..22: mol_type = other RNA
ggaaaatagagttccatctgtt

SEQ ID NO: 139980 - RNA, 22 nt, synthetic construct
  source 1..22: mol_type = other RNA
ggaaaatctctgacttcattct

SEQ ID NO: 139981 - RNA, 22 nt, synthetic construct
  source 1..22: mol_type = other RNA
ggaaaatcttggaacttttatt

SEQ ID NO: 139982 - RNA, 22 nt, synthetic construct
  source 1..22: mol_type = other RNA
ggaaaatgcttaacaagaatcc

SEQ ID NO: 139983 - RNA, 22 nt, synthetic construct
  source 1..22: mol_type = other RNA
ggaaaatgtaaaacatcaaagt

SEQ ID NO: 139984 - RNA, 22 nt, synthetic construct
  source 1..22: mol_type = other RNA
ggaaaatgtatgattttctagg

SEQ ID NO: 139985 - RNA, 22 nt, synthetic construct
  source 1..22: mol_type = other RNA
ggaaaattcaaacatgacagat

SEQ ID NO: 139986 - RNA, 22 nt, synthetic construct
  source 1..22: mol_type = other RNA
ggaaaattcttggtcttttgat

SEQ ID NO: 139987 - RNA, 22 nt, synthetic construct
  source 1..22: mol_type = other RNA
ggaaacaacctaaatgtccatc

SEQ ID NO: 139988 - RNA, 22 nt, synthetic construct
  source 1..22: mol_type = other RNA
ggaaacaactcaaacgtccatc

SEQ ID NO: 139989 - RNA, 22 nt, synthetic construct
  source 1..22: mol_type = other RNA
ggaaacactataaatcagtaag

SEQ ID NO: 139990 - RNA, 22 nt, synthetic construct
  source 1..22: mol_type = other RNA
ggaaacactcataccaggtttt

SEQ ID NO: 139991 - RNA, 22 nt, synthetic construct
  source 1..22: mol_type = other RNA
ggaaacactgctcagaagcttt

SEQ ID NO: 139992 - RNA, 22 nt, synthetic construct
  source 1..22: mol_type = other RNA
ggaaacagagttttccaataag

SEQ ID NO: 139993 - RNA, 22 nt, synthetic construct
  source 1..22: mol_type = other RNA
ggaaacagattgatttatatgt

SEQ ID NO: 139994 - RNA, 22 nt, synthetic construct
  source 1..22: mol_type = other RNA
ggaaacagggttacagtatagg

SEQ ID NO: 139995 - RNA, 22 nt, synthetic construct
  source 1..22: mol_type = other RNA
ggaaacatggtaatttgtccat

SEQ ID NO: 139996 - RNA, 22 nt, synthetic construct
  source 1..22: mol_type = other RNA
ggaaaccccagggatattttcg

SEQ ID NO: 139997 - RNA, 22 nt, synthetic construct
  source 1..22: mol_type = other RNA
ggaaacccgctctgggtgcgtt

SEQ ID NO: 139998 - RNA, 22 nt, synthetic construct
  source 1..22: mol_type = other RNA
ggaaaccttactgtaatattgt

SEQ ID NO: 139999 - RNA, 22 nt, synthetic construct
  source 1..22: mol_type = other RNA
ggaaaccttttgtagaccctgt

SEQ ID NO: 140000 - RNA, 22 nt, synthetic construct
  source 1..22: mol_type = other RNA
ggaaactacaattactgtacaa

SEQ ID NO: 140001 - RNA, 22 nt, synthetic construct
  source 1..22: mol_type = other RNA
ggaaactcaaacccaaattaaa

SEQ ID NO: 140002 - RNA, 22 nt, synthetic construct
  source 1..22: mol_type = other RNA
ggaaactgtttttgcaatttat

SEQ ID NO: 140003 - RNA, 22 nt, synthetic construct
  source 1..22: mol_type = other RNA
ggaaacttccagaaacttccaa

SEQ ID NO: 140004 - RNA, 22 nt, synthetic construct
  source 1..22: mol_type = other RNA
ggaaacttgccatcttgcataa

SEQ ID NO: 140005 - RNA, 22 nt, synthetic construct
  source 1..22: mol_type = other RNA
ggaaactttatacctgttgaat

SEQ ID NO: 140006 - RNA, 22 nt, synthetic construct
  source 1..22: mol_type = other RNA
ggaaactttgcattcctgaaat

SEQ ID NO: 140007 - RNA, 22 nt, synthetic construct
  source 1..22: mol_type = other RNA
ggaaagaaatagaactgtcaca

SEQ ID NO: 140008 - RNA, 22 nt, synthetic construct
  source 1..22: mol_type = other RNA
ggaaagacaggtagacatgagt

SEQ ID NO: 140009 - RNA, 22 nt, synthetic construct
  source 1..22: mol_type = other RNA
ggaaagaccggggactgcaaca

SEQ ID NO: 140010 - RNA, 22 nt, synthetic construct
  source 1..22: mol_type = other RNA
ggaaagagccagcctgatgatg

SEQ ID NO: 140011 - RNA, 22 nt, synthetic construct
  source 1..22: mol_type = other RNA
ggaaagatgaagtatagaaagg

SEQ ID NO: 140012 - RNA, 22 nt, synthetic construct
  source 1..22: mol_type = other RNA
ggaaagatgtcttttaacttgc

SEQ ID NO: 140013 - RNA, 22 nt, synthetic construct
  source 1..22: mol_type = other RNA
ggaaagcacgtttgatctggtc

SEQ ID NO: 140014 - RNA, 22 nt, synthetic construct
  source 1..22: mol_type = other RNA
ggaaagcaggttgcattaatgc

SEQ ID NO: 140015 - RNA, 22 nt, synthetic construct
  source 1..22: mol_type = other RNA
ggaaagcctggctttagatggt

SEQ ID NO: 140016 - RNA, 22 nt, synthetic construct
  source 1..22: mol_type = other RNA
ggaaagcctgtgacagtatgtc

SEQ ID NO: 140017 - RNA, 22 nt, synthetic construct
  source 1..22: mol_type = other RNA
ggaaagctcaggaccagatgac

SEQ ID NO: 140018 - RNA, 22 nt, synthetic construct
  source 1..22: mol_type = other RNA
ggaaaggacttgatctaaaatg

SEQ ID NO: 140019 - RNA, 22 nt, synthetic construct
  source 1..22: mol_type = other RNA
ggaaaggagatactggccatgt

SEQ ID NO: 140020 - RNA, 22 nt, synthetic construct
  source 1..22: mol_type = other RNA
ggaaaggatgaccttgacaata

SEQ ID NO: 140021 - RNA, 22 nt, synthetic construct
  source 1..22: mol_type = other RNA
ggaaaggatggtttgattgttc

SEQ ID NO: 140022 - RNA, 22 nt, synthetic construct
  source 1..22: mol_type = other RNA
ggaaagggtagagcactttcgt

SEQ ID NO: 140023 - RNA, 22 nt, synthetic construct
  source 1..22: mol_type = other RNA
ggaaagtaactgttggcaagga

SEQ ID NO: 140024 - RNA, 22 nt, synthetic construct
  source 1..22: mol_type = other RNA
ggaaagtattcccaagatcata

SEQ ID NO: 140025 - RNA, 22 nt, synthetic construct
  source 1..22: mol_type = other RNA
ggaaagtgacagatgagaaata

SEQ ID NO: 140026 - RNA, 22 nt, synthetic construct
  source 1..22: mol_type = other RNA
ggaaagtgccagccacccttgc

SEQ ID NO: 140027 - RNA, 22 nt, synthetic construct
  source 1..22: mol_type = other RNA
ggaaagtggactatgtaggcac

SEQ ID NO: 140028 - RNA, 22 nt, synthetic construct
  source 1..22: mol_type = other RNA
ggaaagtgtgcttgggctccct

SEQ ID NO: 140029 - RNA, 22 nt, synthetic construct
  source 1..22: mol_type = other RNA
ggaaagttcaaatgaggctttt

SEQ ID NO: 140030 - RNA, 22 nt, synthetic construct
  source 1..22: mol_type = other RNA
ggaaataagaaggtttgtagag

SEQ ID NO: 140031 - RNA, 22 nt, synthetic construct
  source 1..22: mol_type = other RNA
ggaaataagtttcatggacttc

SEQ ID NO: 140032 - RNA, 22 nt, synthetic construct
  source 1..22: mol_type = other RNA
ggaaataatttccctcagaatt

SEQ ID NO: 140033 - RNA, 22 nt, synthetic construct
  source 1..22: mol_type = other RNA
ggaaatacaaaaagtgatacca

SEQ ID NO: 140034 - RNA, 22 nt, synthetic construct
  source 1..22: mol_type = other RNA
ggaaatacttgaacattctgta

SEQ ID NO: 140035 - RNA, 22 nt, synthetic construct
  source 1..22: mol_type = other RNA
ggaaatacttgatctacattta

SEQ ID NO: 140036 - RNA, 22 nt, synthetic construct
  source 1..22: mol_type = other RNA
ggaaatagatgcctagaaagga

SEQ ID NO: 140037 - RNA, 22 nt, synthetic construct
  source 1..22: mol_type = other RNA
ggaaatataaaaagcctctgtg

SEQ ID NO: 140038 - RNA, 22 nt, synthetic construct
  source 1..22: mol_type = other RNA
ggaaatatgaaccacactgaca

SEQ ID NO: 140039 - RNA, 22 nt, synthetic construct
  source 1..22: mol_type = other RNA
ggaaatatggtcactgctgatg

SEQ ID NO: 140040 - RNA, 22 nt, synthetic construct
  source 1..22: mol_type = other RNA
ggaaatcacaggtttaggtttt

SEQ ID NO: 140041 - RNA, 22 nt, synthetic construct
  source 1..22: mol_type = other RNA
ggaaatcattcaggacactgga

SEQ ID NO: 140042 - RNA, 22 nt, synthetic construct
  source 1..22: mol_type = other RNA
ggaaatgaagtattgatttgac

SEQ ID NO: 140043 - RNA, 22 nt, synthetic construct
  source 1..22: mol_type = other RNA
ggaaatgagtgagccacagcta

SEQ ID NO: 140044 - RNA, 22 nt, synthetic construct
  source 1..22: mol_type = other RNA
ggaaatgagtgtatgcagggaa

SEQ ID NO: 140045 - RNA, 22 nt, synthetic construct
  source 1..22: mol_type = other RNA
ggaaatgatacctcatttatac

SEQ ID NO: 140046 - RNA, 22 nt, synthetic construct
  source 1..22: mol_type = other RNA
ggaaatggacagcacattaaat

SEQ ID NO: 140047 - RNA, 22 nt, synthetic construct
  source 1..22: mol_type = other RNA
ggaaatggacagcggggatggt

SEQ ID NO: 140048 - RNA, 22 nt, synthetic construct
  source 1..22: mol_type = other RNA
ggaaatggagggccagaggagg

SEQ ID NO: 140049 - RNA, 22 nt, synthetic construct
  source 1..22: mol_type = other RNA
ggaaatgtaaattcctaactca

SEQ ID NO: 140050 - RNA, 22 nt, synthetic construct
  source 1..22: mol_type = other RNA
ggaaattaaacacacccttggt

SEQ ID NO: 140051 - RNA, 22 nt, synthetic construct
  source 1..22: mol_type = other RNA
ggaaattagaaatgtggaagca

SEQ ID NO: 140052 - RNA, 22 nt, synthetic construct
  source 1..22: mol_type = other RNA
ggaaattagatgatgttttgaa

SEQ ID NO: 140053 - RNA, 22 nt, synthetic construct
  source 1..22: mol_type = other RNA
ggaaattatttccagcctttaa

SEQ ID NO: 140054 - RNA, 22 nt, synthetic construct
  source 1..22: mol_type = other RNA
ggaaattttcaagggtgttttc

SEQ ID NO: 140055 - RNA, 22 nt, synthetic construct
  source 1..22: mol_type = other RNA
ggaacaatcaaaccatcctttc

SEQ ID NO: 140056 - RNA, 22 nt, synthetic construct
  source 1..22: mol_type = other RNA
ggaacacacacctattcatagg

SEQ ID NO: 140057 - RNA, 22 nt, synthetic construct
  source 1..22: mol_type = other RNA
ggaacacacattagcctagacc

SEQ ID NO: 140058 - RNA, 22 nt, synthetic construct
  source 1..22: mol_type = other RNA
ggaacaccttgaacatgaacga

SEQ ID NO: 140059 - RNA, 22 nt, synthetic construct
  source 1..22: mol_type = other RNA
ggaacactaagaagatggttgg

SEQ ID NO: 140060 - RNA, 22 nt, synthetic construct
  source 1..22: mol_type = other RNA
ggaacagattcacgcacaggga

SEQ ID NO: 140061 - RNA, 22 nt, synthetic construct
  source 1..22: mol_type = other RNA
ggaacagcaggggaaggcttcg

SEQ ID NO: 140062 - RNA, 22 nt, synthetic construct
  source 1..22: mol_type = other RNA
ggaacagcccctagcatgcagt

SEQ ID NO: 140063 - RNA, 22 nt, synthetic construct
  source 1..22: mol_type = other RNA
ggaacaggccctttgttagtgc

SEQ ID NO: 140064 - RNA, 22 nt, synthetic construct
  source 1..22: mol_type = other RNA
ggaacaggctcaatacctgaaa

SEQ ID NO: 140065 - RNA, 22 nt, synthetic construct
  source 1..22: mol_type = other RNA
ggaacagtttagcaatccaagg

SEQ ID NO: 140066 - RNA, 22 nt, synthetic construct
  source 1..22: mol_type = other RNA
ggaacataatctttggtgctga

SEQ ID NO: 140067 - RNA, 22 nt, synthetic construct
  source 1..22: mol_type = other RNA
ggaacatattaaaaaattctgc

SEQ ID NO: 140068 - RNA, 22 nt, synthetic construct
  source 1..22: mol_type = other RNA
ggaacattttcattttaactgt

SEQ ID NO: 140069 - RNA, 22 nt, synthetic construct
  source 1..22: mol_type = other RNA
ggaaccactgtaggccccgatg

SEQ ID NO: 140070 - RNA, 22 nt, synthetic construct
  source 1..22: mol_type = other RNA
ggaaccatattagagtgaaaag

SEQ ID NO: 140071 - RNA, 22 nt, synthetic construct
  source 1..22: mol_type = other RNA
ggaaccgtaacttcttttctta

SEQ ID NO: 140072 - RNA, 22 nt, synthetic construct
  source 1..22: mol_type = other RNA
ggaacctttgtccactgtcagt

SEQ ID NO: 140073 - RNA, 22 nt, synthetic construct
  source 1..22: mol_type = other RNA
ggaacggcttaacacctttgta

SEQ ID NO: 140074 - RNA, 22 nt, synthetic construct
  source 1..22: mol_type = other RNA
ggaactaattgataaaactgaa

SEQ ID NO: 140075 - RNA, 22 nt, synthetic construct
  source 1..22: mol_type = other RNA
ggaactaatttcatacaagttg

SEQ ID NO: 140076 - RNA, 22 nt, synthetic construct
  source 1..22: mol_type = other RNA
ggaactcatattagtctgtagc

SEQ ID NO: 140077 - RNA, 22 nt, synthetic construct
  source 1..22: mol_type = other RNA
ggaactcatttctgcttgaatg

SEQ ID NO: 140078 - RNA, 22 nt, synthetic construct
  source 1..22: mol_type = other RNA
ggaactcctgtatgccgctggt

SEQ ID NO: 140079 - RNA, 22 nt, synthetic construct
  source 1..22: mol_type = other RNA
ggaactctattttcctaaaact

SEQ ID NO: 140080 - RNA, 22 nt, synthetic construct
  source 1..22: mol_type = other RNA
ggaactctgtcatggtgtgtct

SEQ ID NO: 140081 - RNA, 22 nt, synthetic construct
  source 1..22: mol_type = other RNA
ggaactcttgcggtcttttagc

SEQ ID NO: 140082 - RNA, 22 nt, synthetic construct
  source 1..22: mol_type = other RNA
ggaactcttgtagtatttttgc

SEQ ID NO: 140083 - RNA, 22 nt, synthetic construct
  source 1..22: mol_type = other RNA
ggaacttacagtaagatcctgg

SEQ ID NO: 140084 - RNA, 22 nt, synthetic construct
  source 1..22: mol_type = other RNA
ggaacttgagtttgttctgtca

SEQ ID NO: 140085 - RNA, 22 nt, synthetic construct
  source 1..22: mol_type = other RNA
ggaagaaaaaataaaggctttc

SEQ ID NO: 140086 - RNA, 22 nt, synthetic construct
  source 1..22: mol_type = other RNA
ggaagaatcaggtctctttgaa

SEQ ID NO: 140087 - RNA, 22 nt, synthetic construct
  source 1..22: mol_type = other RNA
ggaagaattaacactaatcctt

SEQ ID NO: 140088 - RNA, 22 nt, synthetic construct
  source 1..22: mol_type = other RNA
ggaagaattattgtctgcaagc

SEQ ID NO: 140089 - RNA, 22 nt, synthetic construct
  source 1..22: mol_type = other RNA
ggaagaattttaagcctagaga

SEQ ID NO: 140090 - RNA, 22 nt, synthetic construct
  source 1..22: mol_type = other RNA
ggaagactatcacgattctgac

SEQ ID NO: 140091 - RNA, 22 nt, synthetic construct
  source 1..22: mol_type = other RNA
ggaagactatgagaaggattag

SEQ ID NO: 140092 - RNA, 22 nt, synthetic construct
  source 1..22: mol_type = other RNA
ggaagactttatggtaattggt

SEQ ID NO: 140093 - RNA, 22 nt, synthetic construct
  source 1..22: mol_type = other RNA
ggaagagactatctcttcctcc

SEQ ID NO: 140094 - RNA, 22 nt, synthetic construct
  source 1..22: mol_type = other RNA
ggaagagagaaggctgccagca

SEQ ID NO: 140095 - RNA, 22 nt, synthetic construct
  source 1..22: mol_type = other RNA
ggaagagagcattgcctttatt

SEQ ID NO: 140096 - RNA, 22 nt, synthetic construct
  source 1..22: mol_type = other RNA
ggaagagatagtctcttcctgt

SEQ ID NO: 140097 - RNA, 22 nt, synthetic construct
  source 1..22: mol_type = other RNA
ggaagagctaagatgctattca

SEQ ID NO: 140098 - RNA, 22 nt, synthetic construct
  source 1..22: mol_type = other RNA
ggaagaggaaggttcaagtttg

SEQ ID NO: 140099 - RNA, 22 nt, synthetic construct
  source 1..22: mol_type = other RNA
ggaagaggcagctaagcaccaa

SEQ ID NO: 140100 - RNA, 22 nt, synthetic construct
  source 1..22: mol_type = other RNA
ggaagaggccacaaagtcccca

SEQ ID NO: 140101 - RNA, 22 nt, synthetic construct
  source 1..22: mol_type = other RNA
ggaagagtttatattctaagtt

SEQ ID NO: 140102 - RNA, 22 nt, synthetic construct
  source 1..22: mol_type = other RNA
ggaagatagtactgaccatctc

SEQ ID NO: 140103 - RNA, 22 nt, synthetic construct
  source 1..22: mol_type = other RNA
ggaagatgctccctctatggca

SEQ ID NO: 140104 - RNA, 22 nt, synthetic construct
  source 1..22: mol_type = other RNA
ggaagatgggacttcactagtg

SEQ ID NO: 140105 - RNA, 22 nt, synthetic construct
  source 1..22: mol_type = other RNA
ggaagattggctttagatttat

SEQ ID NO: 140106 - RNA, 22 nt, synthetic construct
  source 1..22: mol_type = other RNA
ggaagatttctactggggtctt

SEQ ID NO: 140107 - RNA, 22 nt, synthetic construct
  source 1..22: mol_type = other RNA
ggaagcaaaggattcgggggag

SEQ ID NO: 140108 - RNA, 22 nt, synthetic construct
  source 1..22: mol_type = other RNA
ggaagcacagtctctgcagagc

SEQ ID NO: 140109 - RNA, 22 nt, synthetic construct
  source 1..22: mol_type = other RNA
ggaagcacattccttccgacct

SEQ ID NO: 140110 - RNA, 22 nt, synthetic construct
  source 1..22: mol_type = other RNA
ggaagcaccaacccttgttgga

SEQ ID NO: 140111 - RNA, 22 nt, synthetic construct
  source 1..22: mol_type = other RNA
ggaagcagaactaagaccccag

SEQ ID NO: 140112 - RNA, 22 nt, synthetic construct
  source 1..22: mol_type = other RNA
ggaagcagaatgtccatcagga

SEQ ID NO: 140113 - RNA, 22 nt, synthetic construct
  source 1..22: mol_type = other RNA
ggaagcaggaactcatattagt

SEQ ID NO: 140114 - RNA, 22 nt, synthetic construct
  source 1..22: mol_type = other RNA
ggaagcagttgatgcaatttgt

SEQ ID NO: 140115 - RNA, 22 nt, synthetic construct
  source 1..22: mol_type = other RNA
ggaagcatgtggccaggaggag

SEQ ID NO: 140116 - RNA, 22 nt, synthetic construct
  source 1..22: mol_type = other RNA
ggaagccactgcattcatccag

SEQ ID NO: 140117 - RNA, 22 nt, synthetic construct
  source 1..22: mol_type = other RNA
ggaagctaatcaagccgcaaat

SEQ ID NO: 140118 - RNA, 22 nt, synthetic construct
  source 1..22: mol_type = other RNA
ggaagctatggagcactgtgag

SEQ ID NO: 140119 - RNA, 22 nt, synthetic construct
  source 1..22: mol_type = other RNA
ggaagctgatcaaggaagcttc

SEQ ID NO: 140120 - RNA, 22 nt, synthetic construct
  source 1..22: mol_type = other RNA
ggaagctgggctagagccagga

SEQ ID NO: 140121 - RNA, 22 nt, synthetic construct
  source 1..22: mol_type = other RNA
ggaagctgtccttctcgtgtga

SEQ ID NO: 140122 - RNA, 22 nt, synthetic construct
  source 1..22: mol_type = other RNA
ggaagcttataatttctgagag

SEQ ID NO: 140123 - RNA, 22 nt, synthetic construct
  source 1..22: mol_type = other RNA
ggaagcttcctaaagagagtga

SEQ ID NO: 140124 - RNA, 22 nt, synthetic construct
  source 1..22: mol_type = other RNA
ggaagcttccttgatcagcttc

SEQ ID NO: 140125 - RNA, 22 nt, synthetic construct
  source 1..22: mol_type = other RNA
ggaagcttttcatatacagatt

SEQ ID NO: 140126 - RNA, 22 nt, synthetic construct
  source 1..22: mol_type = other RNA
ggaaggaaacactataaatcag

SEQ ID NO: 140127 - RNA, 22 nt, synthetic construct
  source 1..22: mol_type = other RNA
ggaaggaaaggagatactggcc

SEQ ID NO: 140128 - RNA, 22 nt, synthetic construct
  source 1..22: mol_type = other RNA
ggaaggaaataagaaggtttgt

SEQ ID NO: 140129 - RNA, 22 nt, synthetic construct
  source 1..22: mol_type = other RNA
ggaaggaacacacacctattca

SEQ ID NO: 140130 - RNA, 22 nt, synthetic construct
  source 1..22: mol_type = other RNA
ggaaggaatgtgcttcctaaac

SEQ ID NO: 140131 - RNA, 22 nt, synthetic construct
  source 1..22: mol_type = other RNA
ggaaggaattttaggacaagga

SEQ ID NO: 140132 - RNA, 22 nt, synthetic construct
  source 1..22: mol_type = other RNA
ggaaggaattttcaggactcat

SEQ ID NO: 140133 - RNA, 22 nt, synthetic construct
  source 1..22: mol_type = other RNA
ggaaggactcacagcttaccaa

SEQ ID NO: 140134 - RNA, 22 nt, synthetic construct
  source 1..22: mol_type = other RNA
ggaaggagaatcgcttaaaccc

SEQ ID NO: 140135 - RNA, 22 nt, synthetic construct
  source 1..22: mol_type = other RNA
ggaaggagtctgcccatcctat

SEQ ID NO: 140136 - RNA, 22 nt, synthetic construct
  source 1..22: mol_type = other RNA
ggaaggatggccagtcatgtgg

SEQ ID NO: 140137 - RNA, 22 nt, synthetic construct
  source 1..22: mol_type = other RNA
ggaaggattgcctaacaccagt

SEQ ID NO: 140138 - RNA, 22 nt, synthetic construct
  source 1..22: mol_type = other RNA
ggaaggattggaatgagtccag

SEQ ID NO: 140139 - RNA, 22 nt, synthetic construct
  source 1..22: mol_type = other RNA
ggaaggcaggaggcctcagaat

SEQ ID NO: 140140 - RNA, 22 nt, synthetic construct
  source 1..22: mol_type = other RNA
ggaaggcagggtaggaaggcgg

SEQ ID NO: 140141 - RNA, 22 nt, synthetic construct
  source 1..22: mol_type = other RNA
ggaaggccctgattgagattag

SEQ ID NO: 140142 - RNA, 22 nt, synthetic construct
  source 1..22: mol_type = other RNA
ggaaggcctgatagctgtggaa

SEQ ID NO: 140143 - RNA, 22 nt, synthetic construct
  source 1..22: mol_type = other RNA
ggaaggccttctcctccaaccc

SEQ ID NO: 140144 - RNA, 22 nt, synthetic construct
  source 1..22: mol_type = other RNA
ggaaggcggaagttgcagtgag

SEQ ID NO: 140145 - RNA, 22 nt, synthetic construct
  source 1..22: mol_type = other RNA
ggaaggcggtggggacagctca

SEQ ID NO: 140146 - RNA, 22 nt, synthetic construct
  source 1..22: mol_type = other RNA
ggaaggctaagcatgtaacttg

SEQ ID NO: 140147 - RNA, 22 nt, synthetic construct
  source 1..22: mol_type = other RNA
ggaaggctgcaagcactggtaa

SEQ ID NO: 140148 - RNA, 22 nt, synthetic construct
  source 1..22: mol_type = other RNA
ggaaggcttcgagttctgggag

SEQ ID NO: 140149 - RNA, 22 nt, synthetic construct
  source 1..22: mol_type = other RNA
ggaagggagagatgcctatgaa

SEQ ID NO: 140150 - RNA, 22 nt, synthetic construct
  source 1..22: mol_type = other RNA
ggaagggagcccaagcacactt

SEQ ID NO: 140151 - RNA, 22 nt, synthetic construct
  source 1..22: mol_type = other RNA
ggaagggcttgatctagtaaat

SEQ ID NO: 140152 - RNA, 22 nt, synthetic construct
  source 1..22: mol_type = other RNA
ggaaggtaggagggtgtgatca

SEQ ID NO: 140153 - RNA, 22 nt, synthetic construct
  source 1..22: mol_type = other RNA
ggaaggtcaaatggtaacagcc

SEQ ID NO: 140154 - RNA, 22 nt, synthetic construct
  source 1..22: mol_type = other RNA
ggaaggtgcccgcgaaggcgtg

SEQ ID NO: 140155 - RNA, 22 nt, synthetic construct
  source 1..22: mol_type = other RNA
ggaaggttcaagtttggctccc

SEQ ID NO: 140156 - RNA, 22 nt, synthetic construct
  source 1..22: mol_type = other RNA
ggaagtaaagatcaagctcgcc

SEQ ID NO: 140157 - RNA, 22 nt, synthetic construct
  source 1..22: mol_type = other RNA
ggaagtaaggattttctattca

SEQ ID NO: 140158 - RNA, 22 nt, synthetic construct
  source 1..22: mol_type = other RNA
ggaagtaattgggatctgataa

SEQ ID NO: 140159 - RNA, 22 nt, synthetic construct
  source 1..22: mol_type = other RNA
ggaagtactgagtcaaaaccaa

SEQ ID NO: 140160 - RNA, 22 nt, synthetic construct
  source 1..22: mol_type = other RNA
ggaagtatgagtcttccgtctc

SEQ ID NO: 140161 - RNA, 22 nt, synthetic construct
  source 1..22: mol_type = other RNA
ggaagtcagcaactcttggcca

SEQ ID NO: 140162 - RNA, 22 nt, synthetic construct
  source 1..22: mol_type = other RNA
ggaagtccatgaaacttatttc

SEQ ID NO: 140163 - RNA, 22 nt, synthetic construct
  source 1..22: mol_type = other RNA
ggaagtgaagtcaagatgaatc

SEQ ID NO: 140164 - RNA, 22 nt, synthetic construct
  source 1..22: mol_type = other RNA
ggaagtgaccctgagtccagag

SEQ ID NO: 140165 - RNA, 22 nt, synthetic construct
  source 1..22: mol_type = other RNA
ggaagtgctgggctagggaagc

SEQ ID NO: 140166 - RNA, 22 nt, synthetic construct
  source 1..22: mol_type = other RNA
ggaagtggagtgcgagtgtgaa

SEQ ID NO: 140167 - RNA, 22 nt, synthetic construct
  source 1..22: mol_type = other RNA
ggaagtggctagacggaaaaac

SEQ ID NO: 140168 - RNA, 22 nt, synthetic construct
  source 1..22: mol_type = other RNA
ggaagtgtaacatacacatcag

SEQ ID NO: 140169 - RNA, 22 nt, synthetic construct
  source 1..22: mol_type = other RNA
ggaagttatgtagctgggatgg

SEQ ID NO: 140170 - RNA, 22 nt, synthetic construct
  source 1..22: mol_type = other RNA
ggaagttatttaatctctcttg

SEQ ID NO: 140171 - RNA, 22 nt, synthetic construct
  source 1..22: mol_type = other RNA
ggaagttcaaggttataatcag

SEQ ID NO: 140172 - RNA, 22 nt, synthetic construct
  source 1..22: mol_type = other RNA
ggaagttgagaaagagggaagt

SEQ ID NO: 140173 - RNA, 22 nt, synthetic construct
  source 1..22: mol_type = other RNA
ggaagttgcagtgagcccagag

SEQ ID NO: 140174 - RNA, 22 nt, synthetic construct
  source 1..22: mol_type = other RNA
ggaagttggcccaacatgctct

SEQ ID NO: 140175 - RNA, 22 nt, synthetic construct
  source 1..22: mol_type = other RNA
ggaagtttcctgcacatgcaca

SEQ ID NO: 140176 - RNA, 22 nt, synthetic construct
  source 1..22: mol_type = other RNA
ggaagtttctggaagtttcctg

SEQ ID NO: 140177 - RNA, 22 nt, synthetic construct
  source 1..22: mol_type = other RNA
ggaataaatggtagcttgggct

SEQ ID NO: 140178 - RNA, 22 nt, synthetic construct
  source 1..22: mol_type = other RNA
ggaataagattttaggtcattt

SEQ ID NO: 140179 - RNA, 22 nt, synthetic construct
  source 1..22: mol_type = other RNA
ggaataatggaactaagaaaaa

SEQ ID NO: 140180 - RNA, 22 nt, synthetic construct
  source 1..22: mol_type = other RNA
ggaatactttcccatctctagt

SEQ ID NO: 140181 - RNA, 22 nt, synthetic construct
  source 1..22: mol_type = other RNA
ggaatagaaagttagtgtctaa

SEQ ID NO: 140182 - RNA, 22 nt, synthetic construct
  source 1..22: mol_type = other RNA
ggaatagaagagcagtgtgttc

SEQ ID NO: 140183 - RNA, 22 nt, synthetic construct
  source 1..22: mol_type = other RNA
ggaatagaagggagaacccagg

SEQ ID NO: 140184 - RNA, 22 nt, synthetic construct
  source 1..22: mol_type = other RNA
ggaatagacaaagacaagttct

SEQ ID NO: 140185 - RNA, 22 nt, synthetic construct
  source 1..22: mol_type = other RNA
ggaatagtagcttcaatgaggg

SEQ ID NO: 140186 - RNA, 22 nt, synthetic construct
  source 1..22: mol_type = other RNA
ggaatagtattcaggacagatt

SEQ ID NO: 140187 - RNA, 22 nt, synthetic construct
  source 1..22: mol_type = other RNA
ggaatagttgattatttttacc

SEQ ID NO: 140188 - RNA, 22 nt, synthetic construct
  source 1..22: mol_type = other RNA
ggaatataaacgtgtgtgtaag

SEQ ID NO: 140189 - RNA, 22 nt, synthetic construct
  source 1..22: mol_type = other RNA
ggaatattactcagtctcgaaa

SEQ ID NO: 140190 - RNA, 22 nt, synthetic construct
  source 1..22: mol_type = other RNA
ggaatattgttcagccttaaaa

SEQ ID NO: 140191 - RNA, 22 nt, synthetic construct
  source 1..22: mol_type = other RNA
ggaatcaatccagacagctaat

SEQ ID NO: 140192 - RNA, 22 nt, synthetic construct
  source 1..22: mol_type = other RNA
ggaatcattccgtatatatttt

SEQ ID NO: 140193 - RNA, 22 nt, synthetic construct
  source 1..22: mol_type = other RNA
ggaatccggctttatgagacac

SEQ ID NO: 140194 - RNA, 22 nt, synthetic construct
  source 1..22: mol_type = other RNA
ggaatccttcagtcagttctct

SEQ ID NO: 140195 - RNA, 22 nt, synthetic construct
  source 1..22: mol_type = other RNA
ggaatctactcttttgtttttg

SEQ ID NO: 140196 - RNA, 22 nt, synthetic construct
  source 1..22: mol_type = other RNA
ggaatctaggaaacactgctca

SEQ ID NO: 140197 - RNA, 22 nt, synthetic construct
  source 1..22: mol_type = other RNA
ggaatctgacctaagcttgggt

SEQ ID NO: 140198 - RNA, 22 nt, synthetic construct
  source 1..22: mol_type = other RNA
ggaatcttaccctgttgaccag

SEQ ID NO: 140199 - RNA, 22 nt, synthetic construct
  source 1..22: mol_type = other RNA
ggaatgaagcaggccttcgagg

SEQ ID NO: 140200 - RNA, 22 nt, synthetic construct
  source 1..22: mol_type = other RNA
ggaatgactatagaaatttgta

SEQ ID NO: 140201 - RNA, 22 nt, synthetic construct
  source 1..22: mol_type = other RNA
ggaatgagtccagctttctaat

SEQ ID NO: 140202 - RNA, 22 nt, synthetic construct
  source 1..22: mol_type = other RNA
ggaatgattccacttatatgaa

SEQ ID NO: 140203 - RNA, 22 nt, synthetic construct
  source 1..22: mol_type = other RNA
ggaatgcaaagtttcctacata

SEQ ID NO: 140204 - RNA, 22 nt, synthetic construct
  source 1..22: mol_type = other RNA
ggaatgcatatatctgtctggg

SEQ ID NO: 140205 - RNA, 22 nt, synthetic construct
  source 1..22: mol_type = other RNA
ggaatgcatcgtttcaatatta

SEQ ID NO: 140206 - RNA, 22 nt, synthetic construct
  source 1..22: mol_type = other RNA
ggaatgcccatcctctattttt

SEQ ID NO: 140207 - RNA, 22 nt, synthetic construct
  source 1..22: mol_type = other RNA
ggaatgcccctgtagcagacac

SEQ ID NO: 140208 - RNA, 22 nt, synthetic construct
  source 1..22: mol_type = other RNA
ggaatgcccctttgagcagagt

SEQ ID NO: 140209 - RNA, 22 nt, synthetic construct
  source 1..22: mol_type = other RNA
ggaatgcctataaaatgctgga

SEQ ID NO: 140210 - RNA, 22 nt, synthetic construct
  source 1..22: mol_type = other RNA
ggaatgctcataattaaagaga

SEQ ID NO: 140211 - RNA, 22 nt, synthetic construct
  source 1..22: mol_type = other RNA
ggaatggaattctgatgcacaa

SEQ ID NO: 140212 - RNA, 22 nt, synthetic construct
  source 1..22: mol_type = other RNA
ggaatggggagctagagggtaa

SEQ ID NO: 140213 - RNA, 22 nt, synthetic construct
  source 1..22: mol_type = other RNA
ggaatgggttggaggagaaggc

SEQ ID NO: 140214 - RNA, 22 nt, synthetic construct
  source 1..22: mol_type = other RNA
ggaatggtactgcctccacagg

SEQ ID NO: 140215 - RNA, 22 nt, synthetic construct
  source 1..22: mol_type = other RNA
ggaatggtcaatttcatcgtaa

SEQ ID NO: 140216 - RNA, 22 nt, synthetic construct
  source 1..22: mol_type = other RNA
ggaatggtgaagaatgtgaaaa

SEQ ID NO: 140217 - RNA, 22 nt, synthetic construct
  source 1..22: mol_type = other RNA
ggaatgtgcacctccagtgtcc

SEQ ID NO: 140218 - RNA, 22 nt, synthetic construct
  source 1..22: mol_type = other RNA
ggaatgtgcactcttttaaacc

SEQ ID NO: 140219 - RNA, 22 nt, synthetic construct
  source 1..22: mol_type = other RNA
ggaatgtgcttcctaaacctgc

SEQ ID NO: 140220 - RNA, 22 nt, synthetic construct
  source 1..22: mol_type = other RNA
ggaatgtggtcacactttttgt

SEQ ID NO: 140221 - RNA, 22 nt, synthetic construct
  source 1..22: mol_type = other RNA
ggaatgtgtagttctggtgtcg

SEQ ID NO: 140222 - RNA, 22 nt, synthetic construct
  source 1..22: mol_type = other RNA
ggaattaaaatgttgccaatat

SEQ ID NO: 140223 - RNA, 22 nt, synthetic construct
  source 1..22: mol_type = other RNA
ggaattaactccaggggacatg

SEQ ID NO: 140224 - RNA, 22 nt, synthetic construct
  source 1..22: mol_type = other RNA
ggaattcagtcaccaaacgttt

SEQ ID NO: 140225 - RNA, 22 nt, synthetic construct
  source 1..22: mol_type = other RNA
ggaattcatcaaagttaaactt

SEQ ID NO: 140226 - RNA, 22 nt, synthetic construct
  source 1..22: mol_type = other RNA
ggaattctgacacccgaagagg

SEQ ID NO: 140227 - RNA, 22 nt, synthetic construct
  source 1..22: mol_type = other RNA
ggaattctgatgcacaagcctt

SEQ ID NO: 140228 - RNA, 22 nt, synthetic construct
  source 1..22: mol_type = other RNA
ggaattgcatgagacttggagt

SEQ ID NO: 140229 - RNA, 22 nt, synthetic construct
  source 1..22: mol_type = other RNA
ggaattgccatatgtagggcac

SEQ ID NO: 140230 - RNA, 22 nt, synthetic construct
  source 1..22: mol_type = other RNA
ggaattgtaatcacagtacgct

SEQ ID NO: 140231 - RNA, 22 nt, synthetic construct
  source 1..22: mol_type = other RNA
ggaatttaaggggtaaatggtt

SEQ ID NO: 140232 - RNA, 22 nt, synthetic construct
  source 1..22: mol_type = other RNA
ggaatttacatttccattcata

SEQ ID NO: 140233 - RNA, 22 nt, synthetic construct
  source 1..22: mol_type = other RNA
ggaatttgttttaccatctaaa

SEQ ID NO: 140234 - RNA, 22 nt, synthetic construct
  source 1..22: mol_type = other RNA
ggaattttactgatcttttctg

SEQ ID NO: 140235 - RNA, 22 nt, synthetic construct
  source 1..22: mol_type = other RNA
ggaattttaggacaaggaaagg

SEQ ID NO: 140236 - RNA, 22 nt, synthetic construct
  source 1..22: mol_type = other RNA
ggaattttagtaattctccact

SEQ ID NO: 140237 - RNA, 22 nt, synthetic construct
  source 1..22: mol_type = other RNA
ggaattttcaggactcatgaga

SEQ ID NO: 140238 - RNA, 22 nt, synthetic construct
  source 1..22: mol_type = other RNA
ggaatttttcttacctaagcat

SEQ ID NO: 140239 - RNA, 22 nt, synthetic construct
  source 1..22: mol_type = other RNA
ggacaaaaaacgcggcacttgg

SEQ ID NO: 140240 - RNA, 22 nt, synthetic construct
  source 1..22: mol_type = other RNA
ggacaaaaataatatgataccc

SEQ ID NO: 140241 - RNA, 22 nt, synthetic construct
  source 1..22: mol_type = other RNA
ggacaaattaccatgtttccat

SEQ ID NO: 140242 - RNA, 22 nt, synthetic construct
  source 1..22: mol_type = other RNA
ggacaacagtgtgagaccgtgt

SEQ ID NO: 140243 - RNA, 22 nt, synthetic construct
  source 1..22: mol_type = other RNA
ggacaagagtctgcagaccaag

SEQ ID NO: 140244 - RNA, 22 nt, synthetic construct
  source 1..22: mol_type = other RNA
ggacaaggaaaggatggtttga

SEQ ID NO: 140245 - RNA, 22 nt, synthetic construct
  source 1..22: mol_type = other RNA
ggacaagtgggtggatgggtgt

SEQ ID NO: 140246 - RNA, 22 nt, synthetic construct
  source 1..22: mol_type = other RNA
ggacaatgccagggcgctcctc

SEQ ID NO: 140247 - RNA, 22 nt, synthetic construct
  source 1..22: mol_type = other RNA
ggacaattgaatggggatgcaa

SEQ ID NO: 140248 - RNA, 22 nt, synthetic construct
  source 1..22: mol_type = other RNA
ggacacaaattatgactgagat

SEQ ID NO: 140249 - RNA, 22 nt, synthetic construct
  source 1..22: mol_type = other RNA
ggacacacacagtcctgtgttt

SEQ ID NO: 140250 - RNA, 22 nt, synthetic construct
  source 1..22: mol_type = other RNA
ggacacactgaaacaatcgcaa

SEQ ID NO: 140251 - RNA, 22 nt, synthetic construct
  source 1..22: mol_type = other RNA
ggacactagcaatccaggatct

SEQ ID NO: 140252 - RNA, 22 nt, synthetic construct
  source 1..22: mol_type = other RNA
ggacactattgagagtgaaaac

SEQ ID NO: 140253 - RNA, 22 nt, synthetic construct
  source 1..22: mol_type = other RNA
ggacactgcagatgaatgagca

SEQ ID NO: 140254 - RNA, 22 nt, synthetic construct
  source 1..22: mol_type = other RNA
ggacactggaggtgcacattcc

SEQ ID NO: 140255 - RNA, 22 nt, synthetic construct
  source 1..22: mol_type = other RNA
ggacagaaattcaacttggtaa

SEQ ID NO: 140256 - RNA, 22 nt, synthetic construct
  source 1..22: mol_type = other RNA
ggacagactgcagttggattat

SEQ ID NO: 140257 - RNA, 22 nt, synthetic construct
  source 1..22: mol_type = other RNA
ggacagagcagtaggcttagat

SEQ ID NO: 140258 - RNA, 22 nt, synthetic construct
  source 1..22: mol_type = other RNA
ggacagattaaaatcagattaa

SEQ ID NO: 140259 - RNA, 22 nt, synthetic construct
  source 1..22: mol_type = other RNA
ggacagcacattaaataagggc

SEQ ID NO: 140260 - RNA, 22 nt, synthetic construct
  source 1..22: mol_type = other RNA
ggacagcggggatggttgcaca

SEQ ID NO: 140261 - RNA, 22 nt, synthetic construct
  source 1..22: mol_type = other RNA
ggacagctcaattaagcaacct

SEQ ID NO: 140262 - RNA, 22 nt, synthetic construct
  source 1..22: mol_type = other RNA
ggacagctgggagaaagctaat

SEQ ID NO: 140263 - RNA, 22 nt, synthetic construct
  source 1..22: mol_type = other RNA
ggacagcttccacccaagtgga

SEQ ID NO: 140264 - RNA, 22 nt, synthetic construct
  source 1..22: mol_type = other RNA
ggacaggatcccggaacaggaa

SEQ ID NO: 140265 - RNA, 22 nt, synthetic construct
  source 1..22: mol_type = other RNA
ggacaggggacatgaaggaagg

SEQ ID NO: 140266 - RNA, 22 nt, synthetic construct
  source 1..22: mol_type = other RNA
ggacaggtcacattctgcctgc

SEQ ID NO: 140267 - RNA, 22 nt, synthetic construct
  source 1..22: mol_type = other RNA
ggacagtcatcctcaacaagag

SEQ ID NO: 140268 - RNA, 22 nt, synthetic construct
  source 1..22: mol_type = other RNA
ggacagttattcttcagcaagg

SEQ ID NO: 140269 - RNA, 22 nt, synthetic construct
  source 1..22: mol_type = other RNA
ggacagttggccttgaggtgag

SEQ ID NO: 140270 - RNA, 22 nt, synthetic construct
  source 1..22: mol_type = other RNA
ggacataagggtctgttttaca

SEQ ID NO: 140271 - RNA, 22 nt, synthetic construct
  source 1..22: mol_type = other RNA
ggacatagatgaaactaaatgt

SEQ ID NO: 140272 - RNA, 22 nt, synthetic construct
  source 1..22: mol_type = other RNA
ggacatattttatgatttcact

SEQ ID NO: 140273 - RNA, 22 nt, synthetic construct
  source 1..22: mol_type = other RNA
ggacatccacaacattgtgcaa

SEQ ID NO: 140274 - RNA, 22 nt, synthetic construct
  source 1..22: mol_type = other RNA
ggacatgaaggaaggattggaa

SEQ ID NO: 140275 - RNA, 22 nt, synthetic construct
  source 1..22: mol_type = other RNA
ggacatgaggaaagcaggttgc

SEQ ID NO: 140276 - RNA, 22 nt, synthetic construct
  source 1..22: mol_type = other RNA
ggacatgctctgataggataat

SEQ ID NO: 140277 - RNA, 22 nt, synthetic construct
  source 1..22: mol_type = other RNA
ggacatggagacagtgagcatg

SEQ ID NO: 140278 - RNA, 22 nt, synthetic construct
  source 1..22: mol_type = other RNA
ggacattagtggaaaaactgca

SEQ ID NO: 140279 - RNA, 22 nt, synthetic construct
  source 1..22: mol_type = other RNA
ggacattatcctatcagagcat

SEQ ID NO: 140280 - RNA, 22 nt, synthetic construct
  source 1..22: mol_type = other RNA
ggacattatgctaagtaaaata

SEQ ID NO: 140281 - RNA, 22 nt, synthetic construct
  source 1..22: mol_type = other RNA
ggacattctgcttccttgctat

SEQ ID NO: 140282 - RNA, 22 nt, synthetic construct
  source 1..22: mol_type = other RNA
ggacatttttccaaagatataa

SEQ ID NO: 140283 - RNA, 22 nt, synthetic construct
  source 1..22: mol_type = other RNA
ggaccaactttaagcaaaattt

SEQ ID NO: 140284 - RNA, 22 nt, synthetic construct
  source 1..22: mol_type = other RNA
ggaccaatttaccatctgacat

SEQ ID NO: 140285 - RNA, 22 nt, synthetic construct
  source 1..22: mol_type = other RNA
ggaccacaatcttacccccatc

SEQ ID NO: 140286 - RNA, 22 nt, synthetic construct
  source 1..22: mol_type = other RNA
ggaccagcttgggcaagagagc

SEQ ID NO: 140287 - RNA, 22 nt, synthetic construct
  source 1..22: mol_type = other RNA
ggaccaggcagtcctctcactc

SEQ ID NO: 140288 - RNA, 22 nt, synthetic construct
  source 1..22: mol_type = other RNA
ggaccaggtatggcgactcatg

SEQ ID NO: 140289 - RNA, 22 nt, synthetic construct
  source 1..22: mol_type = other RNA
ggaccagttactctctctgcct

SEQ ID NO: 140290 - RNA, 22 nt, synthetic construct
  source 1..22: mol_type = other RNA
ggaccataggcacgcgccccca

SEQ ID NO: 140291 - RNA, 22 nt, synthetic construct
  source 1..22: mol_type = other RNA
ggaccatctgttaaaagatacg

SEQ ID NO: 140292 - RNA, 22 nt, synthetic construct
  source 1..22: mol_type = other RNA
ggaccatgttttaggagtcaac

SEQ ID NO: 140293 - RNA, 22 nt, synthetic construct
  source 1..22: mol_type = other RNA
ggaccattagcagttctgtacc

SEQ ID NO: 140294 - RNA, 22 nt, synthetic construct
  source 1..22: mol_type = other RNA
ggacccatgcccatgtgcatta

SEQ ID NO: 140295 - RNA, 22 nt, synthetic construct
  source 1..22: mol_type = other RNA
ggaccccgtacgctccctcgcg

SEQ ID NO: 140296 - RNA, 22 nt, synthetic construct
  source 1..22: mol_type = other RNA
ggaccccgtctctgcaaaaaat

SEQ ID NO: 140297 - RNA, 22 nt, synthetic construct
  source 1..22: mol_type = other RNA
ggacccctccctgctttaaaac

SEQ ID NO: 140298 - RNA, 22 nt, synthetic construct
  source 1..22: mol_type = other RNA
ggacccgggaggcagatgttgc

SEQ ID NO: 140299 - RNA, 22 nt, synthetic construct
  source 1..22: mol_type = other RNA
ggacccttaccttaaaccatat

SEQ ID NO: 140300 - RNA, 22 nt, synthetic construct
  source 1..22: mol_type = other RNA
ggacgaatgcatgggaggtaat

SEQ ID NO: 140301 - RNA, 22 nt, synthetic construct
  source 1..22: mol_type = other RNA
ggacgacgtatgcaacttactc

SEQ ID NO: 140302 - RNA, 22 nt, synthetic construct
  source 1..22: mol_type = other RNA
ggacgatttttccaacagttta

SEQ ID NO: 140303 - RNA, 22 nt, synthetic construct
  source 1..22: mol_type = other RNA
ggacgcaggcaaacagcgccac

SEQ ID NO: 140304 - RNA, 22 nt, synthetic construct
  source 1..22: mol_type = other RNA
ggacgcgcattttttaagtggc

SEQ ID NO: 140305 - RNA, 22 nt, synthetic construct
  source 1..22: mol_type = other RNA
ggacgctgatgacagttactct

SEQ ID NO: 140306 - RNA, 22 nt, synthetic construct
  source 1..22: mol_type = other RNA
ggacggggttttgccatgttgg

SEQ ID NO: 140307 - RNA, 22 nt, synthetic construct
  source 1..22: mol_type = other RNA
ggacgggtggtagggagggggc

SEQ ID NO: 140308 - RNA, 22 nt, synthetic construct
  source 1..22: mol_type = other RNA
ggacgtttgagttgtttccact

SEQ ID NO: 140309 - RNA, 22 nt, synthetic construct
  source 1..22: mol_type = other RNA
ggactaacagggtctacaaaag

SEQ ID NO: 140310 - RNA, 22 nt, synthetic construct
  source 1..22: mol_type = other RNA
ggactacaggtgtgaaccacgc

SEQ ID NO: 140311 - RNA, 22 nt, synthetic construct
  source 1..22: mol_type = other RNA
ggactacagtcacacaccacta

SEQ ID NO: 140312 - RNA, 22 nt, synthetic construct
  source 1..22: mol_type = other RNA
ggactagactgcctgaggtctc

SEQ ID NO: 140313 - RNA, 22 nt, synthetic construct
  source 1..22: mol_type = other RNA
ggactatgtaggcacattcaag

SEQ ID NO: 140314 - RNA, 22 nt, synthetic construct
  source 1..22: mol_type = other RNA
ggactcacagcttaccaagtgc

SEQ ID NO: 140315 - RNA, 22 nt, synthetic construct
  source 1..22: mol_type = other RNA
ggactcagggtcacttcctctc

SEQ ID NO: 140316 - RNA, 22 nt, synthetic construct
  source 1..22: mol_type = other RNA
ggactcatgagagctgtgccga

SEQ ID NO: 140317 - RNA, 22 nt, synthetic construct
  source 1..22: mol_type = other RNA
ggactcattccaatccttcctt

SEQ ID NO: 140318 - RNA, 22 nt, synthetic construct
  source 1..22: mol_type = other RNA
ggactccacagagttcagctta

SEQ ID NO: 140319 - RNA, 22 nt, synthetic construct
  source 1..22: mol_type = other RNA
ggactccaccctgccccttatc

SEQ ID NO: 140320 - RNA, 22 nt, synthetic construct
  source 1..22: mol_type = other RNA
ggactcccatatctacatgtac

SEQ ID NO: 140321 - RNA, 22 nt, synthetic construct
  source 1..22: mol_type = other RNA
ggactccggcgggagaggagcg

SEQ ID NO: 140322 - RNA, 22 nt, synthetic construct
  source 1..22: mol_type = other RNA
ggactccttctgaaggcactaa

SEQ ID NO: 140323 - RNA, 22 nt, synthetic construct
  source 1..22: mol_type = other RNA
ggactctaaactagttcaacca

SEQ ID NO: 140324 - RNA, 22 nt, synthetic construct
  source 1..22: mol_type = other RNA
ggactctgctcaaaggggcatt

SEQ ID NO: 140325 - RNA, 22 nt, synthetic construct
  source 1..22: mol_type = other RNA
ggactcttatggctataaccac

SEQ ID NO: 140326 - RNA, 22 nt, synthetic construct
  source 1..22: mol_type = other RNA
ggactgaaaagatacagaaata

SEQ ID NO: 140327 - RNA, 22 nt, synthetic construct
  source 1..22: mol_type = other RNA
ggactgaaaccagtgggtcagc

SEQ ID NO: 140328 - RNA, 22 nt, synthetic construct
  source 1..22: mol_type = other RNA
ggactgaagtcctttcttggtc

SEQ ID NO: 140329 - RNA, 22 nt, synthetic construct
  source 1..22: mol_type = other RNA
ggactgagacagtattgtgctg

SEQ ID NO: 140330 - RNA, 22 nt, synthetic construct
  source 1..22: mol_type = other RNA
ggactgagcagtgaaagtctcc

SEQ ID NO: 140331 - RNA, 22 nt, synthetic construct
  source 1..22: mol_type = other RNA
ggactgatgaagaacctgttca

SEQ ID NO: 140332 - RNA, 22 nt, synthetic construct
  source 1..22: mol_type = other RNA
ggactgcaacagatctgagaag

SEQ ID NO: 140333 - RNA, 22 nt, synthetic construct
  source 1..22: mol_type = other RNA
ggactgcctattttgtaattta

SEQ ID NO: 140334 - RNA, 22 nt, synthetic construct
  source 1..22: mol_type = other RNA
ggactgcctggtcctgagggct

SEQ ID NO: 140335 - RNA, 22 nt, synthetic construct
  source 1..22: mol_type = other RNA
ggactgcttgaggccacgagtt

SEQ ID NO: 140336 - RNA, 22 nt, synthetic construct
  source 1..22: mol_type = other RNA
ggactggaactcatttctgctt

SEQ ID NO: 140337 - RNA, 22 nt, synthetic construct
  source 1..22: mol_type = other RNA
ggactggactccttctgaaggc

SEQ ID NO: 140338 - RNA, 22 nt, synthetic construct
  source 1..22: mol_type = other RNA
ggactggagaacagtaaagtca

SEQ ID NO: 140339 - RNA, 22 nt, synthetic construct
  source 1..22: mol_type = other RNA
ggactggagggatgctggagtg

SEQ ID NO: 140340 - RNA, 22 nt, synthetic construct
  source 1..22: mol_type = other RNA
ggactggcctcggccaaccatt

SEQ ID NO: 140341 - RNA, 22 nt, synthetic construct
  source 1..22: mol_type = other RNA
ggactggcttcagtgccaacac

SEQ ID NO: 140342 - RNA, 22 nt, synthetic construct
  source 1..22: mol_type = other RNA
ggactgggatcctaagcatgag

SEQ ID NO: 140343 - RNA, 22 nt, synthetic construct
  source 1..22: mol_type = other RNA
ggactgtcgaagcttaatttag

SEQ ID NO: 140344 - RNA, 22 nt, synthetic construct
  source 1..22: mol_type = other RNA
ggactgtgagggagatatttcg

SEQ ID NO: 140345 - RNA, 22 nt, synthetic construct
  source 1..22: mol_type = other RNA
ggactgtgatgactgtaagctg

SEQ ID NO: 140346 - RNA, 22 nt, synthetic construct
  source 1..22: mol_type = other RNA
ggactgtgtgtgtccaggccaa

SEQ ID NO: 140347 - RNA, 22 nt, synthetic construct
  source 1..22: mol_type = other RNA
ggacttatggagataaattacc

SEQ ID NO: 140348 - RNA, 22 nt, synthetic construct
  source 1..22: mol_type = other RNA
ggacttcactagtgggtcgggt

SEQ ID NO: 140349 - RNA, 22 nt, synthetic construct
  source 1..22: mol_type = other RNA
ggacttcagtccttaccactga

SEQ ID NO: 140350 - RNA, 22 nt, synthetic construct
  source 1..22: mol_type = other RNA
ggacttcatgtacaatgaatta

SEQ ID NO: 140351 - RNA, 22 nt, synthetic construct
  source 1..22: mol_type = other RNA
ggacttcctattttataatggg

SEQ ID NO: 140352 - RNA, 22 nt, synthetic construct
  source 1..22: mol_type = other RNA
ggacttctagcctccagaaaac

SEQ ID NO: 140353 - RNA, 22 nt, synthetic construct
  source 1..22: mol_type = other RNA
ggacttgatctaaaatggaaga

SEQ ID NO: 140354 - RNA, 22 nt, synthetic construct
  source 1..22: mol_type = other RNA
ggacttgctctcttgcccaagc

SEQ ID NO: 140355 - RNA, 22 nt, synthetic construct
  source 1..22: mol_type = other RNA
ggacttggaagtgaagtcaaga

SEQ ID NO: 140356 - RNA, 22 nt, synthetic construct
  source 1..22: mol_type = other RNA
ggacttggcacaggagagcgac

SEQ ID NO: 140357 - RNA, 22 nt, synthetic construct
  source 1..22: mol_type = other RNA
ggactttaggctgttcaattta

SEQ ID NO: 140358 - RNA, 22 nt, synthetic construct
  source 1..22: mol_type = other RNA
ggactttgatgttttacatttt

SEQ ID NO: 140359 - RNA, 22 nt, synthetic construct
  source 1..22: mol_type = other RNA
ggactttgtggcctcttccctt

SEQ ID NO: 140360 - RNA, 22 nt, synthetic construct
  source 1..22: mol_type = other RNA
ggacttttggtacacatctttt

SEQ ID NO: 140361 - RNA, 22 nt, synthetic construct
  source 1..22: mol_type = other RNA
ggagaaaacaaaaagaaactag

SEQ ID NO: 140362 - RNA, 22 nt, synthetic construct
  source 1..22: mol_type = other RNA
ggagaaaagcttcataacatta

SEQ ID NO: 140363 - RNA, 22 nt, synthetic construct
  source 1..22: mol_type = other RNA
ggagaaacatggcttagaaatg

SEQ ID NO: 140364 - RNA, 22 nt, synthetic construct
  source 1..22: mol_type = other RNA
ggagaaaccatttaccccttaa

SEQ ID NO: 140365 - RNA, 22 nt, synthetic construct
  source 1..22: mol_type = other RNA
ggagaaagaccaagagtgtggc

SEQ ID NO: 140366 - RNA, 22 nt, synthetic construct
  source 1..22: mol_type = other RNA
ggagaaagcccagccgcggact

SEQ ID NO: 140367 - RNA, 22 nt, synthetic construct
  source 1..22: mol_type = other RNA
ggagaaagctaatttggaatta

SEQ ID NO: 140368 - RNA, 22 nt, synthetic construct
  source 1..22: mol_type = other RNA
ggagaaattggaacctttgtcc

SEQ ID NO: 140369 - RNA, 22 nt, synthetic construct
  source 1..22: mol_type = other RNA
ggagaacagtaaagtcactgtg

SEQ ID NO: 140370 - RNA, 22 nt, synthetic construct
  source 1..22: mol_type = other RNA
ggagaacccaggaacagattca

SEQ ID NO: 140371 - RNA, 22 nt, synthetic construct
  source 1..22: mol_type = other RNA
ggagaactgcctggacccggga

SEQ ID NO: 140372 - RNA, 22 nt, synthetic construct
  source 1..22: mol_type = other RNA
ggagaacttaaaggtttggagt

SEQ ID NO: 140373 - RNA, 22 nt, synthetic construct
  source 1..22: mol_type = other RNA
ggagaacttgtctcggatttaa

SEQ ID NO: 140374 - RNA, 22 nt, synthetic construct
  source 1..22: mol_type = other RNA
ggagaagaaataaacgacacca

SEQ ID NO: 140375 - RNA, 22 nt, synthetic construct
  source 1..22: mol_type = other RNA
ggagaagagttctgaaggctca

SEQ ID NO: 140376 - RNA, 22 nt, synthetic construct
  source 1..22: mol_type = other RNA
ggagaaggccttccacggaatg

SEQ ID NO: 140377 - RNA, 22 nt, synthetic construct
  source 1..22: mol_type = other RNA
ggagaatctgggaggtggaggt

SEQ ID NO: 140378 - RNA, 22 nt, synthetic construct
  source 1..22: mol_type = other RNA
ggagaatggcaaggctaacagc

SEQ ID NO: 140379 - RNA, 22 nt, synthetic construct
  source 1..22: mol_type = other RNA
ggagaatggcatgaacccacca

SEQ ID NO: 140380 - RNA, 22 nt, synthetic construct
  source 1..22: mol_type = other RNA
ggagaattactaaaattccaat

SEQ ID NO: 140381 - RNA, 22 nt, synthetic construct
  source 1..22: mol_type = other RNA
ggagaattctactaaacattaa

SEQ ID NO: 140382 - RNA, 22 nt, synthetic construct
  source 1..22: mol_type = other RNA
ggagaattggtagtcaatgcaa

SEQ ID NO: 140383 - RNA, 22 nt, synthetic construct
  source 1..22: mol_type = other RNA
ggagacaaaggttgcagtgagc

SEQ ID NO: 140384 - RNA, 22 nt, synthetic construct
  source 1..22: mol_type = other RNA
ggagacactagggactggcctc

SEQ ID NO: 140385 - RNA, 22 nt, synthetic construct
  source 1..22: mol_type = other RNA
ggagacagcctaaaccattttc

SEQ ID NO: 140386 - RNA, 22 nt, synthetic construct
  source 1..22: mol_type = other RNA
ggagacagtgagcatgctgcaa

SEQ ID NO: 140387 - RNA, 22 nt, synthetic construct
  source 1..22: mol_type = other RNA
ggagacatctgagacatcacaa

SEQ ID NO: 140388 - RNA, 22 nt, synthetic construct
  source 1..22: mol_type = other RNA
ggagacattacaattgatacca

SEQ ID NO: 140389 - RNA, 22 nt, synthetic construct
  source 1..22: mol_type = other RNA
ggagaccaggagttcttatgag

SEQ ID NO: 140390 - RNA, 22 nt, synthetic construct
  source 1..22: mol_type = other RNA
ggagaccagttaggaagccact

SEQ ID NO: 140391 - RNA, 22 nt, synthetic construct
  source 1..22: mol_type = other RNA
ggagacccatactcagccccct

SEQ ID NO: 140392 - RNA, 22 nt, synthetic construct
  source 1..22: mol_type = other RNA
ggagaccgtggggggagggagg

SEQ ID NO: 140393 - RNA, 22 nt, synthetic construct
  source 1..22: mol_type = other RNA
ggagacctactaaaagttgaca

SEQ ID NO: 140394 - RNA, 22 nt, synthetic construct
  source 1..22: mol_type = other RNA
ggagacggcgagcttgatcttt

SEQ ID NO: 140395 - RNA, 22 nt, synthetic construct
  source 1..22: mol_type = other RNA
ggagactagtacactgttgatt

SEQ ID NO: 140396 - RNA, 22 nt, synthetic construct
  source 1..22: mol_type = other RNA
ggagactatcgttatatcctca

SEQ ID NO: 140397 - RNA, 22 nt, synthetic construct
  source 1..22: mol_type = other RNA
ggagactgataaacttcagttt

SEQ ID NO: 140398 - RNA, 22 nt, synthetic construct
  source 1..22: mol_type = other RNA
ggagactgtgcaatgtgaaaaa

SEQ ID NO: 140399 - RNA, 22 nt, synthetic construct
  source 1..22: mol_type = other RNA
ggagactttcactgctcagtcc

SEQ ID NO: 140400 - RNA, 22 nt, synthetic construct
  source 1..22: mol_type = other RNA
ggagagaaaaacaaaacaaagt

SEQ ID NO: 140401 - RNA, 22 nt, synthetic construct
  source 1..22: mol_type = other RNA
ggagagaaaccttggtgtgctt

SEQ ID NO: 140402 - RNA, 22 nt, synthetic construct
  source 1..22: mol_type = other RNA
ggagagaagagggggcataaca

SEQ ID NO: 140403 - RNA, 22 nt, synthetic construct
  source 1..22: mol_type = other RNA
ggagagagaaactttacacttt

SEQ ID NO: 140404 - RNA, 22 nt, synthetic construct
  source 1..22: mol_type = other RNA
ggagagatgcctatgaaatctt

SEQ ID NO: 140405 - RNA, 22 nt, synthetic construct
  source 1..22: mol_type = other RNA
ggagagatggtagtcaacactt

SEQ ID NO: 140406 - RNA, 22 nt, synthetic construct
  source 1..22: mol_type = other RNA
ggagagcactggtttcagtaca

SEQ ID NO: 140407 - RNA, 22 nt, synthetic construct
  source 1..22: mol_type = other RNA
ggagagcgacagctacggagga

SEQ ID NO: 140408 - RNA, 22 nt, synthetic construct
  source 1..22: mol_type = other RNA
ggagaggagcgccctggcattg

SEQ ID NO: 140409 - RNA, 22 nt, synthetic construct
  source 1..22: mol_type = other RNA
ggagaggcaaaggccgctcttg

SEQ ID NO: 140410 - RNA, 22 nt, synthetic construct
  source 1..22: mol_type = other RNA
ggagaggcatgccgggacaaga

SEQ ID NO: 140411 - RNA, 22 nt, synthetic construct
  source 1..22: mol_type = other RNA
ggagaggcctcatgtattttcc

SEQ ID NO: 140412 - RNA, 22 nt, synthetic construct
  source 1..22: mol_type = other RNA
ggagagggagctctgtcttgat

SEQ ID NO: 140413 - RNA, 22 nt, synthetic construct
  source 1..22: mol_type = other RNA
ggagaggtgaactattagagct

SEQ ID NO: 140414 - RNA, 22 nt, synthetic construct
  source 1..22: mol_type = other RNA
ggagagtcgcttgaacctgaaa

SEQ ID NO: 140415 - RNA, 22 nt, synthetic construct
  source 1..22: mol_type = other RNA
ggagagtgggcccagcagaagg

SEQ ID NO: 140416 - RNA, 22 nt, synthetic construct
  source 1..22: mol_type = other RNA
ggagataaagagcaggtggaag

SEQ ID NO: 140417 - RNA, 22 nt, synthetic construct
  source 1..22: mol_type = other RNA
ggagataaattacccaaagact

SEQ ID NO: 140418 - RNA, 22 nt, synthetic construct
  source 1..22: mol_type = other RNA
ggagataccttgaaaggatact

SEQ ID NO: 140419 - RNA, 22 nt, synthetic construct
  source 1..22: mol_type = other RNA
ggagatactggccatgttttat

SEQ ID NO: 140420 - RNA, 22 nt, synthetic construct
  source 1..22: mol_type = other RNA
ggagatacttgattacaagggt

SEQ ID NO: 140421 - RNA, 22 nt, synthetic construct
  source 1..22: mol_type = other RNA
ggagatatacaggaagagacta

SEQ ID NO: 140422 - RNA, 22 nt, synthetic construct
  source 1..22: mol_type = other RNA
ggagatatttcgcctagataag

SEQ ID NO: 140423 - RNA, 22 nt, synthetic construct
  source 1..22: mol_type = other RNA
ggagatggacactgcagatgaa

SEQ ID NO: 140424 - RNA, 22 nt, synthetic construct
  source 1..22: mol_type = other RNA
ggagatggcacataccatggaa

SEQ ID NO: 140425 - RNA, 22 nt, synthetic construct
  source 1..22: mol_type = other RNA
ggagatggggacttgctctctt

SEQ ID NO: 140426 - RNA, 22 nt, synthetic construct
  source 1..22: mol_type = other RNA
ggagatgtgtaattgtaccttg

SEQ ID NO: 140427 - RNA, 22 nt, synthetic construct
  source 1..22: mol_type = other RNA
ggagattaaggctggaggatgg

SEQ ID NO: 140428 - RNA, 22 nt, synthetic construct
  source 1..22: mol_type = other RNA
ggagcaagcatgagtatctggt

SEQ ID NO: 140429 - RNA, 22 nt, synthetic construct
  source 1..22: mol_type = other RNA
ggagcactgtgagccactaaaa

SEQ ID NO: 140430 - RNA, 22 nt, synthetic construct
  source 1..22: mol_type = other RNA
ggagcagggtgggcccttaatc

SEQ ID NO: 140431 - RNA, 22 nt, synthetic construct
  source 1..22: mol_type = other RNA
ggagcagtgtgaataggaaagt

SEQ ID NO: 140432 - RNA, 22 nt, synthetic construct
  source 1..22: mol_type = other RNA
ggagcagttactcctgagcaag

SEQ ID NO: 140433 - RNA, 22 nt, synthetic construct
  source 1..22: mol_type = other RNA
ggagcatagcttgaaccaggga

SEQ ID NO: 140434 - RNA, 22 nt, synthetic construct
  source 1..22: mol_type = other RNA
ggagcatatatactctgagaca

SEQ ID NO: 140435 - RNA, 22 nt, synthetic construct
  source 1..22: mol_type = other RNA
ggagcatcttcccatgaacatg

SEQ ID NO: 140436 - RNA, 22 nt, synthetic construct
  source 1..22: mol_type = other RNA
ggagcatgcacacaggagaact

SEQ ID NO: 140437 - RNA, 22 nt, synthetic construct
  source 1..22: mol_type = other RNA
ggagccaaacatcatgatttaa

SEQ ID NO: 140438 - RNA, 22 nt, synthetic construct
  source 1..22: mol_type = other RNA
ggagccaaacttgaaccttcct

SEQ ID NO: 140439 - RNA, 22 nt, synthetic construct
  source 1..22: mol_type = other RNA
ggagccaagtaaaagcaacctc

SEQ ID NO: 140440 - RNA, 22 nt, synthetic construct
  source 1..22: mol_type = other RNA
ggagcccaagcacactttcctt

SEQ ID NO: 140441 - RNA, 22 nt, synthetic construct
  source 1..22: mol_type = other RNA
ggagcccaccaccatgcctggc

SEQ ID NO: 140442 - RNA, 22 nt, synthetic construct
  source 1..22: mol_type = other RNA
ggagccctccaggatccagtct

SEQ ID NO: 140443 - RNA, 22 nt, synthetic construct
  source 1..22: mol_type = other RNA
ggagccctgctgtggccgaggg

SEQ ID NO: 140444 - RNA, 22 nt, synthetic construct
  source 1..22: mol_type = other RNA
ggagcctagtcatccactgcac

SEQ ID NO: 140445 - RNA, 22 nt, synthetic construct
  source 1..22: mol_type = other RNA
ggagcctgaggacactagcaat

SEQ ID NO: 140446 - RNA, 22 nt, synthetic construct
  source 1..22: mol_type = other RNA
ggagcctgctctgcagagactg

SEQ ID NO: 140447 - RNA, 22 nt, synthetic construct
  source 1..22: mol_type = other RNA
ggagccttgctgttgtaatgtt

SEQ ID NO: 140448 - RNA, 22 nt, synthetic construct
  source 1..22: mol_type = other RNA
ggagcgccacgtgaagatggag

SEQ ID NO: 140449 - RNA, 22 nt, synthetic construct
  source 1..22: mol_type = other RNA
ggagcgccctggcattgtcccg

SEQ ID NO: 140450 - RNA, 22 nt, synthetic construct
  source 1..22: mol_type = other RNA
ggagcgggcagccttggaggag

SEQ ID NO: 140451 - RNA, 22 nt, synthetic construct
  source 1..22: mol_type = other RNA
ggagcggtgtcttattgttttg

SEQ ID NO: 140452 - RNA, 22 nt, synthetic construct
  source 1..22: mol_type = other RNA
ggagctagaacagaataaaaag

SEQ ID NO: 140453 - RNA, 22 nt, synthetic construct
  source 1..22: mol_type = other RNA
ggagctagagggtaagaccaaa

SEQ ID NO: 140454 - RNA, 22 nt, synthetic construct
  source 1..22: mol_type = other RNA
ggagctataatttatctggatt

SEQ ID NO: 140455 - RNA, 22 nt, synthetic construct
  source 1..22: mol_type = other RNA
ggagctcactgcagcctcaacc

SEQ ID NO: 140456 - RNA, 22 nt, synthetic construct
  source 1..22: mol_type = other RNA
ggagctctgtcttgatgataga

SEQ ID NO: 140457 - RNA, 22 nt, synthetic construct
  source 1..22: mol_type = other RNA
ggagctgagaccacagacgtgc

SEQ ID NO: 140458 - RNA, 22 nt, synthetic construct
  source 1..22: mol_type = other RNA
ggagctgtatttttgctcacac

SEQ ID NO: 140459 - RNA, 22 nt, synthetic construct
  source 1..22: mol_type = other RNA
ggagcttatcaggcttgagtct

SEQ ID NO: 140460 - RNA, 22 nt, synthetic construct
  source 1..22: mol_type = other RNA
ggagctttcattattaccaggt

SEQ ID NO: 140461 - RNA, 22 nt, synthetic construct
  source 1..22: mol_type = other RNA
ggagcttttgaaactgagcatc

SEQ ID NO: 140462 - RNA, 22 nt, synthetic construct
  source 1..22: mol_type = other RNA
ggaggaaaaaacagttgctatt

SEQ ID NO: 140463 - RNA, 22 nt, synthetic construct
  source 1..22: mol_type = other RNA
ggaggaaaataatttgcaacag

SEQ ID NO: 140464 - RNA, 22 nt, synthetic construct
  source 1..22: mol_type = other RNA
ggaggaactaattgataaaact

SEQ ID NO: 140465 - RNA, 22 nt, synthetic construct
  source 1..22: mol_type = other RNA
ggaggaagagatagtctcttcc

SEQ ID NO: 140466 - RNA, 22 nt, synthetic construct
  source 1..22: mol_type = other RNA
ggaggaatccttcagtcagttc

SEQ ID NO: 140467 - RNA, 22 nt, synthetic construct
  source 1..22: mol_type = other RNA
ggaggagaaggccttccacgga

SEQ ID NO: 140468 - RNA, 22 nt, synthetic construct
  source 1..22: mol_type = other RNA
ggaggagccaagtaaaagcaac

SEQ ID NO: 140469 - RNA, 22 nt, synthetic construct
  source 1..22: mol_type = other RNA
ggaggagccctgctgtggccga

SEQ ID NO: 140470 - RNA, 22 nt, synthetic construct
  source 1..22: mol_type = other RNA
ggaggaggagggtgcagcctct

SEQ ID NO: 140471 - RNA, 22 nt, synthetic construct
  source 1..22: mol_type = other RNA
ggaggagggtgcagcctctaat

SEQ ID NO: 140472 - RNA, 22 nt, synthetic construct
  source 1..22: mol_type = other RNA
ggaggagggttagattatatgg

SEQ ID NO: 140473 - RNA, 22 nt, synthetic construct
  source 1..22: mol_type = other RNA
ggaggaggtcatactggagcag

SEQ ID NO: 140474 - RNA, 22 nt, synthetic construct
  source 1..22: mol_type = other RNA
ggaggataatatctggactgaa

SEQ ID NO: 140475 - RNA, 22 nt, synthetic construct
  source 1..22: mol_type = other RNA
ggaggatgaggggctgagcctt

SEQ ID NO: 140476 - RNA, 22 nt, synthetic construct
  source 1..22: mol_type = other RNA
ggaggatggcttgagcccaggg

SEQ ID NO: 140477 - RNA, 22 nt, synthetic construct
  source 1..22: mol_type = other RNA
ggaggattgtttgaggctggga

SEQ ID NO: 140478 - RNA, 22 nt, synthetic construct
  source 1..22: mol_type = other RNA
ggaggcaaaggttgagacaaga

SEQ ID NO: 140479 - RNA, 22 nt, synthetic construct
  source 1..22: mol_type = other RNA
ggaggcaatgttgattttgagg

SEQ ID NO: 140480 - RNA, 22 nt, synthetic construct
  source 1..22: mol_type = other RNA
ggaggcacctgaacccaggagg

SEQ ID NO: 140481 - RNA, 22 nt, synthetic construct
  source 1..22: mol_type = other RNA
ggaggcagtaccattccccttg

SEQ ID NO: 140482 - RNA, 22 nt, synthetic construct
  source 1..22: mol_type = other RNA
ggaggccatcttcatttctaag

SEQ ID NO: 140483 - RNA, 22 nt, synthetic construct
  source 1..22: mol_type = other RNA
ggaggcctcagaattaatataa

SEQ ID NO: 140484 - RNA, 22 nt, synthetic construct
  source 1..22: mol_type = other RNA
ggaggcggaggttgcggtgacg

SEQ ID NO: 140485 - RNA, 22 nt, synthetic construct
  source 1..22: mol_type = other RNA
ggaggctagaagtcccagttca

SEQ ID NO: 140486 - RNA, 22 nt, synthetic construct
  source 1..22: mol_type = other RNA
ggaggctattaactttgaaatc

SEQ ID NO: 140487 - RNA, 22 nt, synthetic construct
  source 1..22: mol_type = other RNA
ggaggctgaggcaggagaactg

SEQ ID NO: 140488 - RNA, 22 nt, synthetic construct
  source 1..22: mol_type = other RNA
ggaggctgaggcaggaggcacc

SEQ ID NO: 140489 - RNA, 22 nt, synthetic construct
  source 1..22: mol_type = other RNA
ggaggctgaggcggaaggattg

SEQ ID NO: 140490 - RNA, 22 nt, synthetic construct
  source 1..22: mol_type = other RNA
ggaggctgaggctggggaattg

SEQ ID NO: 140491 - RNA, 22 nt, synthetic construct
  source 1..22: mol_type = other RNA
ggagggaaaatgtttattttat

SEQ ID NO: 140492 - RNA, 22 nt, synthetic construct
  source 1..22: mol_type = other RNA
ggagggactgaaaccagtgggt

SEQ ID NO: 140493 - RNA, 22 nt, synthetic construct
  source 1..22: mol_type = other RNA
ggagggagagggagctctgtct

SEQ ID NO: 140494 - RNA, 22 nt, synthetic construct
  source 1..22: mol_type = other RNA
ggagggaggattgtttgaggct

SEQ ID NO: 140495 - RNA, 22 nt, synthetic construct
  source 1..22: mol_type = other RNA
ggagggatgcattctagaaagg

SEQ ID NO: 140496 - RNA, 22 nt, synthetic construct
  source 1..22: mol_type = other RNA
ggagggatgctggagtgtggca

SEQ ID NO: 140497 - RNA, 22 nt, synthetic construct
  source 1..22: mol_type = other RNA
ggagggccagaggagggatgca

SEQ ID NO: 140498 - RNA, 22 nt, synthetic construct
  source 1..22: mol_type = other RNA
ggagggctcccagtgcccacct

SEQ ID NO: 140499 - RNA, 22 nt, synthetic construct
  source 1..22: mol_type = other RNA
ggaggggcaggaaaggtgggga

SEQ ID NO: 140500 - RNA, 22 nt, synthetic construct
  source 1..22: mol_type = other RNA
ggaggggccagttgagagagaa

SEQ ID NO: 140501 - RNA, 22 nt, synthetic construct
  source 1..22: mol_type = other RNA
ggagggggagggagagggagct

SEQ ID NO: 140502 - RNA, 22 nt, synthetic construct
  source 1..22: mol_type = other RNA
ggagggggctgaggattggaga

SEQ ID NO: 140503 - RNA, 22 nt, synthetic construct
  source 1..22: mol_type = other RNA
ggaggggtattcagggggctaa

SEQ ID NO: 140504 - RNA, 22 nt, synthetic construct
  source 1..22: mol_type = other RNA
ggaggggtccccagcatccact

SEQ ID NO: 140505 - RNA, 22 nt, synthetic construct
  source 1..22: mol_type = other RNA
ggagggtgcagcctctaatcag

SEQ ID NO: 140506 - RNA, 22 nt, synthetic construct
  source 1..22: mol_type = other RNA
ggagggtgtgatcaggaaagat

SEQ ID NO: 140507 - RNA, 22 nt, synthetic construct
  source 1..22: mol_type = other RNA
ggagggttagattatatggtct

SEQ ID NO: 140508 - RNA, 22 nt, synthetic construct
  source 1..22: mol_type = other RNA
ggaggtaatactataaggaaat

SEQ ID NO: 140509 - RNA, 22 nt, synthetic construct
  source 1..22: mol_type = other RNA
ggaggtaggcttagatgagccc

SEQ ID NO: 140510 - RNA, 22 nt, synthetic construct
  source 1..22: mol_type = other RNA
ggaggtcatactggagcagggt

SEQ ID NO: 140511 - RNA, 22 nt, synthetic construct
  source 1..22: mol_type = other RNA
ggaggtcgggctgcctcagccg

SEQ ID NO: 140512 - RNA, 22 nt, synthetic construct
  source 1..22: mol_type = other RNA
ggaggtctaagagataactaat

SEQ ID NO: 140513 - RNA, 22 nt, synthetic construct
  source 1..22: mol_type = other RNA
ggaggtgcacattccaagagag

SEQ ID NO: 140514 - RNA, 22 nt, synthetic construct
  source 1..22: mol_type = other RNA
ggaggtggaactctgtcatggt

SEQ ID NO: 140515 - RNA, 22 nt, synthetic construct
  source 1..22: mol_type = other RNA
ggaggttgaagctctagtgagc

SEQ ID NO: 140516 - RNA, 22 nt, synthetic construct
  source 1..22: mol_type = other RNA
ggaggttgaggctgcagtgagc

SEQ ID NO: 140517 - RNA, 22 nt, synthetic construct
  source 1..22: mol_type = other RNA
ggaggttgcggtgacgtgagat

SEQ ID NO: 140518 - RNA, 22 nt, synthetic construct
  source 1..22: mol_type = other RNA
ggaggtttgcactggcacagca

SEQ ID NO: 140519 - RNA, 22 nt, synthetic construct
  source 1..22: mol_type = other RNA
ggaggtttttgattactgactc

SEQ ID NO: 140520 - RNA, 22 nt, synthetic construct
  source 1..22: mol_type = other RNA
ggagtaacagacctctgaagag

SEQ ID NO: 140521 - RNA, 22 nt, synthetic construct
  source 1..22: mol_type = other RNA
ggagtaactgctcctctgactt

SEQ ID NO: 140522 - RNA, 22 nt, synthetic construct
  source 1..22: mol_type = other RNA
ggagtacagtgcataccaccac

SEQ ID NO: 140523 - RNA, 22 nt, synthetic construct
  source 1..22: mol_type = other RNA
ggagtactatgcagcaacggaa

SEQ ID NO: 140524 - RNA, 22 nt, synthetic construct
  source 1..22: mol_type = other RNA
ggagtagctgggattacacaca

SEQ ID NO: 140525 - RNA, 22 nt, synthetic construct
  source 1..22: mol_type = other RNA
ggagtattctagttctagctct

SEQ ID NO: 140526 - RNA, 22 nt, synthetic construct
  source 1..22: mol_type = other RNA
ggagtcaactaatcaaacatac

SEQ ID NO: 140527 - RNA, 22 nt, synthetic construct
  source 1..22: mol_type = other RNA
ggagtcacagtgaattctgact

SEQ ID NO: 140528 - RNA, 22 nt, synthetic construct
  source 1..22: mol_type = other RNA
ggagtcacttgacaaaaattaa

SEQ ID NO: 140529 - RNA, 22 nt, synthetic construct
  source 1..22: mol_type = other RNA
ggagtcagtagaggccgagggt

SEQ ID NO: 140530 - RNA, 22 nt, synthetic construct
  source 1..22: mol_type = other RNA
ggagtccaaccaatcgcagggc

SEQ ID NO: 140531 - RNA, 22 nt, synthetic construct
  source 1..22: mol_type = other RNA
ggagtccagtcctgctaacacc

SEQ ID NO: 140532 - RNA, 22 nt, synthetic construct
  source 1..22: mol_type = other RNA
ggagtccctgctttcagttctt

SEQ ID NO: 140533 - RNA, 22 nt, synthetic construct
  source 1..22: mol_type = other RNA
ggagtccgcggctgggctttct

SEQ ID NO: 140534 - RNA, 22 nt, synthetic construct
  source 1..22: mol_type = other RNA
ggagtcctgtcagtttctgatt

SEQ ID NO: 140535 - RNA, 22 nt, synthetic construct
  source 1..22: mol_type = other RNA
ggagtctatttctgaacaaata

SEQ ID NO: 140536 - RNA, 22 nt, synthetic construct
  source 1..22: mol_type = other RNA
ggagtctgcccatcctatctaa

SEQ ID NO: 140537 - RNA, 22 nt, synthetic construct
  source 1..22: mol_type = other RNA
ggagtgacttaagcaacagaaa

SEQ ID NO: 140538 - RNA, 22 nt, synthetic construct
  source 1..22: mol_type = other RNA
ggagtgagaggactgcctggtc

SEQ ID NO: 140539 - RNA, 22 nt, synthetic construct
  source 1..22: mol_type = other RNA
ggagtgcaatggtgggatctct

SEQ ID NO: 140540 - RNA, 22 nt, synthetic construct
  source 1..22: mol_type = other RNA
ggagtgcagtggtgtggtcttg

SEQ ID NO: 140541 - RNA, 22 nt, synthetic construct
  source 1..22: mol_type = other RNA
ggagtgcgagtgtgaacgatgg

SEQ ID NO: 140542 - RNA, 22 nt, synthetic construct
  source 1..22: mol_type = other RNA
ggagtggaggggcaggaaaggt

SEQ ID NO: 140543 - RNA, 22 nt, synthetic construct
  source 1..22: mol_type = other RNA
ggagtggagtggcatgatctca

SEQ ID NO: 140544 - RNA, 22 nt, synthetic construct
  source 1..22: mol_type = other RNA
ggagtggcatgatctcacgtca

SEQ ID NO: 140545 - RNA, 22 nt, synthetic construct
  source 1..22: mol_type = other RNA
ggagtggggcacctaaaaggtt

SEQ ID NO: 140546 - RNA, 22 nt, synthetic construct
  source 1..22: mol_type = other RNA
ggagtggtggatagagagattc

SEQ ID NO: 140547 - RNA, 22 nt, synthetic construct
  source 1..22: mol_type = other RNA
ggagtgtgcccaaggaaggcag

SEQ ID NO: 140548 - RNA, 22 nt, synthetic construct
  source 1..22: mol_type = other RNA
ggagtgtggcaggggctgcatc

SEQ ID NO: 140549 - RNA, 22 nt, synthetic construct
  source 1..22: mol_type = other RNA
ggagtgttttcttcatggacta

SEQ ID NO: 140550 - RNA, 22 nt, synthetic construct
  source 1..22: mol_type = other RNA
ggagttaattccacaaccactg

SEQ ID NO: 140551 - RNA, 22 nt, synthetic construct
  source 1..22: mol_type = other RNA
ggagttaccataaaaccatttt

SEQ ID NO: 140552 - RNA, 22 nt, synthetic construct
  source 1..22: mol_type = other RNA
ggagttacgctgccaaaagcca

SEQ ID NO: 140553 - RNA, 22 nt, synthetic construct
  source 1..22: mol_type = other RNA
ggagttcagctttaaagagaaa

SEQ ID NO: 140554 - RNA, 22 nt, synthetic construct
  source 1..22: mol_type = other RNA
ggagttcagtggtgcaatcacg

SEQ ID NO: 140555 - RNA, 22 nt, synthetic construct
  source 1..22: mol_type = other RNA
ggagttcattagaattcaggac

SEQ ID NO: 140556 - RNA, 22 nt, synthetic construct
  source 1..22: mol_type = other RNA
ggagttcattcgtagcaggttt

SEQ ID NO: 140557 - RNA, 22 nt, synthetic construct
  source 1..22: mol_type = other RNA
ggagttccgatttctcggccgg

SEQ ID NO: 140558 - RNA, 22 nt, synthetic construct
  source 1..22: mol_type = other RNA
ggagttcttatgaggttattca

SEQ ID NO: 140559 - RNA, 22 nt, synthetic construct
  source 1..22: mol_type = other RNA
ggagttgcatcacttgaggtga

SEQ ID NO: 140560 - RNA, 22 nt, synthetic construct
  source 1..22: mol_type = other RNA
ggagttggtgcaaggataaaca

SEQ ID NO: 140561 - RNA, 22 nt, synthetic construct
  source 1..22: mol_type = other RNA
ggagtttgagactgcagtgacc

SEQ ID NO: 140562 - RNA, 22 nt, synthetic construct
  source 1..22: mol_type = other RNA
ggagtttgaggccgcagtgagc

SEQ ID NO: 140563 - RNA, 22 nt, synthetic construct
  source 1..22: mol_type = other RNA
ggagtttgtagctcaaagcata

SEQ ID NO: 140564 - RNA, 22 nt, synthetic construct
  source 1..22: mol_type = other RNA
ggagttttaggaaaatagagtt

SEQ ID NO: 140565 - RNA, 22 nt, synthetic construct
  source 1..22: mol_type = other RNA
ggagttttccccctacacccag

SEQ ID NO: 140566 - RNA, 22 nt, synthetic construct
  source 1..22: mol_type = other RNA
ggagttttgcctctttgctaat

SEQ ID NO: 140567 - RNA, 22 nt, synthetic construct
  source 1..22: mol_type = other RNA
ggataaacaaagagaacaatgg

SEQ ID NO: 140568 - RNA, 22 nt, synthetic construct
  source 1..22: mol_type = other RNA
ggataaatcccacttgatccag

SEQ ID NO: 140569 - RNA, 22 nt, synthetic construct
  source 1..22: mol_type = other RNA
ggataacctagaagaaatgggt

SEQ ID NO: 140570 - RNA, 22 nt, synthetic construct
  source 1..22: mol_type = other RNA
ggataagaataccaaattcacg

SEQ ID NO: 140571 - RNA, 22 nt, synthetic construct
  source 1..22: mol_type = other RNA
ggataaggaagagtttatattc

SEQ ID NO: 140572 - RNA, 22 nt, synthetic construct
  source 1..22: mol_type = other RNA
ggataaggggcagggtggagtc

SEQ ID NO: 140573 - RNA, 22 nt, synthetic construct
  source 1..22: mol_type = other RNA
ggataatatctggactgaaaag

SEQ ID NO: 140574 - RNA, 22 nt, synthetic construct
  source 1..22: mol_type = other RNA
ggataatgctatcattttaaag

SEQ ID NO: 140575 - RNA, 22 nt, synthetic construct
  source 1..22: mol_type = other RNA
ggataatgctatccagaagaga

SEQ ID NO: 140576 - RNA, 22 nt, synthetic construct
  source 1..22: mol_type = other RNA
ggataatgtccagaggaggaag

SEQ ID NO: 140577 - RNA, 22 nt, synthetic construct
  source 1..22: mol_type = other RNA
ggatacaaaaagcacctaccat

SEQ ID NO: 140578 - RNA, 22 nt, synthetic construct
  source 1..22: mol_type = other RNA
ggatacaaggtcaatctgaaaa

SEQ ID NO: 140579 - RNA, 22 nt, synthetic construct
  source 1..22: mol_type = other RNA
ggatacggaaatataacattac

SEQ ID NO: 140580 - RNA, 22 nt, synthetic construct
  source 1..22: mol_type = other RNA
ggatactgagaacagaattttt

SEQ ID NO: 140581 - RNA, 22 nt, synthetic construct
  source 1..22: mol_type = other RNA
ggatacttctaactttagaaca

SEQ ID NO: 140582 - RNA, 22 nt, synthetic construct
  source 1..22: mol_type = other RNA
ggatagaagtgtatcagatgct

SEQ ID NO: 140583 - RNA, 22 nt, synthetic construct
  source 1..22: mol_type = other RNA
ggatagagagattcaagaaacc

SEQ ID NO: 140584 - RNA, 22 nt, synthetic construct
  source 1..22: mol_type = other RNA
ggatagcaacttgcagaagagt

SEQ ID NO: 140585 - RNA, 22 nt, synthetic construct
  source 1..22: mol_type = other RNA
ggatagcattatccctttaaaa

SEQ ID NO: 140586 - RNA, 22 nt, synthetic construct
  source 1..22: mol_type = other RNA
ggatagctattatttgaaaaag

SEQ ID NO: 140587 - RNA, 22 nt, synthetic construct
  source 1..22: mol_type = other RNA
ggatagtgctttttactttgcg

SEQ ID NO: 140588 - RNA, 22 nt, synthetic construct
  source 1..22: mol_type = other RNA
ggatagttaaacatgtaaaaca

SEQ ID NO: 140589 - RNA, 22 nt, synthetic construct
  source 1..22: mol_type = other RNA
ggatagtttctcaacttagcct

SEQ ID NO: 140590 - RNA, 22 nt, synthetic construct
  source 1..22: mol_type = other RNA
ggatataacgatagtctcctat

SEQ ID NO: 140591 - RNA, 22 nt, synthetic construct
  source 1..22: mol_type = other RNA
ggatataagagtgggcaaaaaa

SEQ ID NO: 140592 - RNA, 22 nt, synthetic construct
  source 1..22: mol_type = other RNA
ggatatagctacaatgattttt

SEQ ID NO: 140593 - RNA, 22 nt, synthetic construct
  source 1..22: mol_type = other RNA
ggatatcagaagtgctgacttg

SEQ ID NO: 140594 - RNA, 22 nt, synthetic construct
  source 1..22: mol_type = other RNA
ggatatccaaagataaaggtaa

SEQ ID NO: 140595 - RNA, 22 nt, synthetic construct
  source 1..22: mol_type = other RNA
ggatatccccatttttctcgac

SEQ ID NO: 140596 - RNA, 22 nt, synthetic construct
  source 1..22: mol_type = other RNA
ggatatctgaggtcaggagctc

SEQ ID NO: 140597 - RNA, 22 nt, synthetic construct
  source 1..22: mol_type = other RNA
ggatatctggcctgcaccattt

SEQ ID NO: 140598 - RNA, 22 nt, synthetic construct
  source 1..22: mol_type = other RNA
ggatatgggccaaagacagatc

SEQ ID NO: 140599 - RNA, 22 nt, synthetic construct
  source 1..22: mol_type = other RNA
ggatatgttttctaaaccttaa

SEQ ID NO: 140600 - RNA, 22 nt, synthetic construct
  source 1..22: mol_type = other RNA
ggatattctacagaaaaccctt

SEQ ID NO: 140601 - RNA, 22 nt, synthetic construct
  source 1..22: mol_type = other RNA
ggatattggcttatagtgttct

SEQ ID NO: 140602 - RNA, 22 nt, synthetic construct
  source 1..22: mol_type = other RNA
ggatatttactaagaagtgaaa

SEQ ID NO: 140603 - RNA, 22 nt, synthetic construct
  source 1..22: mol_type = other RNA
ggatatttgcagtagtattgaa

SEQ ID NO: 140604 - RNA, 22 nt, synthetic construct
  source 1..22: mol_type = other RNA
ggatatttggccgggcgcggtg

SEQ ID NO: 140605 - RNA, 22 nt, synthetic construct
  source 1..22: mol_type = other RNA
ggatattttcgtgtactgaaac

SEQ ID NO: 140606 - RNA, 22 nt, synthetic construct
  source 1..22: mol_type = other RNA
ggatcaaaccatgttcatggga

SEQ ID NO: 140607 - RNA, 22 nt, synthetic construct
  source 1..22: mol_type = other RNA
ggatcaaagacctaagcttaag

SEQ ID NO: 140608 - RNA, 22 nt, synthetic construct
  source 1..22: mol_type = other RNA
ggatcaaatctggctgcagggc

SEQ ID NO: 140609 - RNA, 22 nt, synthetic construct
  source 1..22: mol_type = other RNA
ggatcaaggcacagtctgtgct

SEQ ID NO: 140610 - RNA, 22 nt, synthetic construct
  source 1..22: mol_type = other RNA
ggatcacacttgatggtttggg

SEQ ID NO: 140611 - RNA, 22 nt, synthetic construct
  source 1..22: mol_type = other RNA
ggatcacagatacaactctgac

SEQ ID NO: 140612 - RNA, 22 nt, synthetic construct
  source 1..22: mol_type = other RNA
ggatcacaggcgttgagccatc

SEQ ID NO: 140613 - RNA, 22 nt, synthetic construct
  source 1..22: mol_type = other RNA
ggatcaccaaagacttcaggaa

SEQ ID NO: 140614 - RNA, 22 nt, synthetic construct
  source 1..22: mol_type = other RNA
ggatcatatagtaattctgtgc

SEQ ID NO: 140615 - RNA, 22 nt, synthetic construct
  source 1..22: mol_type = other RNA
ggatccagatgtagagaaacag

SEQ ID NO: 140616 - RNA, 22 nt, synthetic construct
  source 1..22: mol_type = other RNA
ggatccaggggaatagaaagtt

SEQ ID NO: 140617 - RNA, 22 nt, synthetic construct
  source 1..22: mol_type = other RNA
ggatccagtctctacccagcac

SEQ ID NO: 140618 - RNA, 22 nt, synthetic construct
  source 1..22: mol_type = other RNA
ggatcccagtcctttgggaggt

SEQ ID NO: 140619 - RNA, 22 nt, synthetic construct
  source 1..22: mol_type = other RNA
ggatcccccagcccctggtgat

SEQ ID NO: 140620 - RNA, 22 nt, synthetic construct
  source 1..22: mol_type = other RNA
ggatcccggaacaggaaaagga

SEQ ID NO: 140621 - RNA, 22 nt, synthetic construct
  source 1..22: mol_type = other RNA
ggatcctaagcatgagatacta

SEQ ID NO: 140622 - RNA, 22 nt, synthetic construct
  source 1..22: mol_type = other RNA
ggatcctggagggctcccagtg

SEQ ID NO: 140623 - RNA, 22 nt, synthetic construct
  source 1..22: mol_type = other RNA
ggatcctgtccaggcgcctgca

SEQ ID NO: 140624 - RNA, 22 nt, synthetic construct
  source 1..22: mol_type = other RNA
ggatcctgtctcagagtatata

SEQ ID NO: 140625 - RNA, 22 nt, synthetic construct
  source 1..22: mol_type = other RNA
ggatcgttagtattttcacata

SEQ ID NO: 140626 - RNA, 22 nt, synthetic construct
  source 1..22: mol_type = other RNA
ggatctctgggctcactgcaac

SEQ ID NO: 140627 - RNA, 22 nt, synthetic construct
  source 1..22: mol_type = other RNA
ggatctgataaattattagctt

SEQ ID NO: 140628 - RNA, 22 nt, synthetic construct
  source 1..22: mol_type = other RNA
ggatctgtcatgtttgaatttt

SEQ ID NO: 140629 - RNA, 22 nt, synthetic construct
  source 1..22: mol_type = other RNA
ggatctgttggtgcttagctgc

SEQ ID NO: 140630 - RNA, 22 nt, synthetic construct
  source 1..22: mol_type = other RNA
ggatcttactgtaagttcctgg

SEQ ID NO: 140631 - RNA, 22 nt, synthetic construct
  source 1..22: mol_type = other RNA
ggatcttatctgctgtcggttt

SEQ ID NO: 140632 - RNA, 22 nt, synthetic construct
  source 1..22: mol_type = other RNA
ggatgaaaaagtactggaaatg

SEQ ID NO: 140633 - RNA, 22 nt, synthetic construct
  source 1..22: mol_type = other RNA
ggatgaacgctaaattaaaggc

SEQ ID NO: 140634 - RNA, 22 nt, synthetic construct
  source 1..22: mol_type = other RNA
ggatgaatacaaaggtgttaag

SEQ ID NO: 140635 - RNA, 22 nt, synthetic construct
  source 1..22: mol_type = other RNA
ggatgaatgcagtggcttccta

SEQ ID NO: 140636 - RNA, 22 nt, synthetic construct
  source 1..22: mol_type = other RNA
ggatgaatgttgtacatttaaa

SEQ ID NO: 140637 - RNA, 22 nt, synthetic construct
  source 1..22: mol_type = other RNA
ggatgaattacaaatgaaagtc

SEQ ID NO: 140638 - RNA, 22 nt, synthetic construct
  source 1..22: mol_type = other RNA
ggatgaccttgacaataaatgg

SEQ ID NO: 140639 - RNA, 22 nt, synthetic construct
  source 1..22: mol_type = other RNA
ggatgactaggctcctgagaac

SEQ ID NO: 140640 - RNA, 22 nt, synthetic construct
  source 1..22: mol_type = other RNA
ggatgactgtcctgaattctaa

SEQ ID NO: 140641 - RNA, 22 nt, synthetic construct
  source 1..22: mol_type = other RNA
ggatgagattaatgtaggtgtc

SEQ ID NO: 140642 - RNA, 22 nt, synthetic construct
  source 1..22: mol_type = other RNA
ggatgaggaagaggaaggttca

SEQ ID NO: 140643 - RNA, 22 nt, synthetic construct
  source 1..22: mol_type = other RNA
ggatgaggggctgagccttcag

SEQ ID NO: 140644 - RNA, 22 nt, synthetic construct
  source 1..22: mol_type = other RNA
ggatgattctaatgtgcaagga

SEQ ID NO: 140645 - RNA, 22 nt, synthetic construct
  source 1..22: mol_type = other RNA
ggatgcaacaaatgttgcagag

SEQ ID NO: 140646 - RNA, 22 nt, synthetic construct
  source 1..22: mol_type = other RNA
ggatgcaagaatggtttaacac

SEQ ID NO: 140647 - RNA, 22 nt, synthetic construct
  source 1..22: mol_type = other RNA
ggatgcacaagacagatgtgct

SEQ ID NO: 140648 - RNA, 22 nt, synthetic construct
  source 1..22: mol_type = other RNA
ggatgcagatttctttttactc

SEQ ID NO: 140649 - RNA, 22 nt, synthetic construct
  source 1..22: mol_type = other RNA
ggatgcagcaaaagcaccactg

SEQ ID NO: 140650 - RNA, 22 nt, synthetic construct
  source 1..22: mol_type = other RNA
ggatgcatgaggcatattattg

SEQ ID NO: 140651 - RNA, 22 nt, synthetic construct
  source 1..22: mol_type = other RNA
ggatgcattctagaaaggaggg

SEQ ID NO: 140652 - RNA, 22 nt, synthetic construct
  source 1..22: mol_type = other RNA
ggatgccggtaatcacagctac

SEQ ID NO: 140653 - RNA, 22 nt, synthetic construct
  source 1..22: mol_type = other RNA
ggatgctcagggtgcgacctcg

SEQ ID NO: 140654 - RNA, 22 nt, synthetic construct
  source 1..22: mol_type = other RNA
ggatgctcagtttcaaaagctc

SEQ ID NO: 140655 - RNA, 22 nt, synthetic construct
  source 1..22: mol_type = other RNA
ggatgctgcgagccccggggga

SEQ ID NO: 140656 - RNA, 22 nt, synthetic construct
  source 1..22: mol_type = other RNA
ggatgctggagtgtggcagggg

SEQ ID NO: 140657 - RNA, 22 nt, synthetic construct
  source 1..22: mol_type = other RNA
ggatgctggggacccctccctg

SEQ ID NO: 140658 - RNA, 22 nt, synthetic construct
  source 1..22: mol_type = other RNA
ggatgctgtctataggcaatga

SEQ ID NO: 140659 - RNA, 22 nt, synthetic construct
  source 1..22: mol_type = other RNA
ggatgcttaaagcgctactcag

SEQ ID NO: 140660 - RNA, 22 nt, synthetic construct
  source 1..22: mol_type = other RNA
ggatggcatgaaatgggtttaa

SEQ ID NO: 140661 - RNA, 22 nt, synthetic construct
  source 1..22: mol_type = other RNA
ggatggccagtcatgtggggac

SEQ ID NO: 140662 - RNA, 22 nt, synthetic construct
  source 1..22: mol_type = other RNA
ggatggctgaaagagaaagaag

SEQ ID NO: 140663 - RNA, 22 nt, synthetic construct
  source 1..22: mol_type = other RNA
ggatggcttgagcccagggggt

SEQ ID NO: 140664 - RNA, 22 nt, synthetic construct
  source 1..22: mol_type = other RNA
ggatgggcagactccttcccct

SEQ ID NO: 140665 - RNA, 22 nt, synthetic construct
  source 1..22: mol_type = other RNA
ggatgggcattccagagggtaa

SEQ ID NO: 140666 - RNA, 22 nt, synthetic construct
  source 1..22: mol_type = other RNA
ggatgggggacgacgtatgcaa

SEQ ID NO: 140667 - RNA, 22 nt, synthetic construct
  source 1..22: mol_type = other RNA
ggatgggtgtagggtttggcag

SEQ ID NO: 140668 - RNA, 22 nt, synthetic construct
  source 1..22: mol_type = other RNA
ggatggtctcaatctcctgatc

SEQ ID NO: 140669 - RNA, 22 nt, synthetic construct
  source 1..22: mol_type = other RNA
ggatggttgcacaatgttgtgg

SEQ ID NO: 140670 - RNA, 22 nt, synthetic construct
  source 1..22: mol_type = other RNA
ggatggtttgattgttccaggg

SEQ ID NO: 140671 - RNA, 22 nt, synthetic construct
  source 1..22: mol_type = other RNA
ggatgtagaaggatatgttttc

SEQ ID NO: 140672 - RNA, 22 nt, synthetic construct
  source 1..22: mol_type = other RNA
ggatgtcaacaaaatactagca

SEQ ID NO: 140673 - RNA, 22 nt, synthetic construct
  source 1..22: mol_type = other RNA
ggatgtcaactgaggcagagta

SEQ ID NO: 140674 - RNA, 22 nt, synthetic construct
  source 1..22: mol_type = other RNA
ggatgtccttaatgccaccgaa

SEQ ID NO: 140675 - RNA, 22 nt, synthetic construct
  source 1..22: mol_type = other RNA
ggatgtctttgggaaggccctg

SEQ ID NO: 140676 - RNA, 22 nt, synthetic construct
  source 1..22: mol_type = other RNA
ggatgtggtgtggcatgtctgt

SEQ ID NO: 140677 - RNA, 22 nt, synthetic construct
  source 1..22: mol_type = other RNA
ggatgtgtacccgtgtgttttg

SEQ ID NO: 140678 - RNA, 22 nt, synthetic construct
  source 1..22: mol_type = other RNA
ggatgtgtatgatcaaagtgaa

SEQ ID NO: 140679 - RNA, 22 nt, synthetic construct
  source 1..22: mol_type = other RNA
ggatgtgtgcacaacacatgca

SEQ ID NO: 140680 - RNA, 22 nt, synthetic construct
  source 1..22: mol_type = other RNA
ggatgttaattagatatgtgat

SEQ ID NO: 140681 - RNA, 22 nt, synthetic construct
  source 1..22: mol_type = other RNA
ggatgttgcctactagccagtg

SEQ ID NO: 140682 - RNA, 22 nt, synthetic construct
  source 1..22: mol_type = other RNA
ggatgttggtgagaacccagtg

SEQ ID NO: 140683 - RNA, 22 nt, synthetic construct
  source 1..22: mol_type = other RNA
ggatgtttctacctttggctac

SEQ ID NO: 140684 - RNA, 22 nt, synthetic construct
  source 1..22: mol_type = other RNA
ggatgtttttagagagatgcct

SEQ ID NO: 140685 - RNA, 22 nt, synthetic construct
  source 1..22: mol_type = other RNA
ggattaaggagatggcacatac

SEQ ID NO: 140686 - RNA, 22 nt, synthetic construct
  source 1..22: mol_type = other RNA
ggattaatctttctgaactcaa

SEQ ID NO: 140687 - RNA, 22 nt, synthetic construct
  source 1..22: mol_type = other RNA
ggattacaatgtaaggtgcacg

SEQ ID NO: 140688 - RNA, 22 nt, synthetic construct
  source 1..22: mol_type = other RNA
ggattacacacacctaccacca

SEQ ID NO: 140689 - RNA, 22 nt, synthetic construct
  source 1..22: mol_type = other RNA
ggattacaggcatgagccactg

SEQ ID NO: 140690 - RNA, 22 nt, synthetic construct
  source 1..22: mol_type = other RNA
ggattacaggcgcacgccatct

SEQ ID NO: 140691 - RNA, 22 nt, synthetic construct
  source 1..22: mol_type = other RNA
ggattagaaagtagattagctt

SEQ ID NO: 140692 - RNA, 22 nt, synthetic construct
  source 1..22: mol_type = other RNA
ggattagcttattctttttcta

SEQ ID NO: 140693 - RNA, 22 nt, synthetic construct
  source 1..22: mol_type = other RNA
ggattagtgttaattcttcctt

SEQ ID NO: 140694 - RNA, 22 nt, synthetic construct
  source 1..22: mol_type = other RNA
ggattatagtggtaaggagcca

SEQ ID NO: 140695 - RNA, 22 nt, synthetic construct
  source 1..22: mol_type = other RNA
ggattatatgttctaaagttag

SEQ ID NO: 140696 - RNA, 22 nt, synthetic construct
  source 1..22: mol_type = other RNA
ggattatggctagaaacttgga

SEQ ID NO: 140697 - RNA, 22 nt, synthetic construct
  source 1..22: mol_type = other RNA
ggattatttggaagagagaagg

SEQ ID NO: 140698 - RNA, 22 nt, synthetic construct
  source 1..22: mol_type = other RNA
ggattccaggtttacaggatat

SEQ ID NO: 140699 - RNA, 22 nt, synthetic construct
  source 1..22: mol_type = other RNA
ggattcccaggtattttgttct

SEQ ID NO: 140700 - RNA, 22 nt, synthetic construct
  source 1..22: mol_type = other RNA
ggattcctccctggagaggcaa

SEQ ID NO: 140701 - RNA, 22 nt, synthetic construct
  source 1..22: mol_type = other RNA
ggattcctttcaaagagacctg

SEQ ID NO: 140702 - RNA, 22 nt, synthetic construct
  source 1..22: mol_type = other RNA
ggattcgattaaaataacacgc

SEQ ID NO: 140703 - RNA, 22 nt, synthetic construct
  source 1..22: mol_type = other RNA
ggattcgggggagagcactggt

SEQ ID NO: 140704 - RNA, 22 nt, synthetic construct
  source 1..22: mol_type = other RNA
ggattctgctactagcaagcta

SEQ ID NO: 140705 - RNA, 22 nt, synthetic construct
  source 1..22: mol_type = other RNA
ggattctggccaaatccctgat

SEQ ID NO: 140706 - RNA, 22 nt, synthetic construct
  source 1..22: mol_type = other RNA
ggattcttgttaagcattttcc

SEQ ID NO: 140707 - RNA, 22 nt, synthetic construct
  source 1..22: mol_type = other RNA
ggattgaatggaaagaaataga

SEQ ID NO: 140708 - RNA, 22 nt, synthetic construct
  source 1..22: mol_type = other RNA
ggattgagggttagatttttcc

SEQ ID NO: 140709 - RNA, 22 nt, synthetic construct
  source 1..22: mol_type = other RNA
ggattgattccagtttctctgc

SEQ ID NO: 140710 - RNA, 22 nt, synthetic construct
  source 1..22: mol_type = other RNA
ggattgcctaacaccagtaaga

SEQ ID NO: 140711 - RNA, 22 nt, synthetic construct
  source 1..22: mol_type = other RNA
ggattgcgattgtttcagtgtg

SEQ ID NO: 140712 - RNA, 22 nt, synthetic construct
  source 1..22: mol_type = other RNA
ggattgctaaactgttccccaa

SEQ ID NO: 140713 - RNA, 22 nt, synthetic construct
  source 1..22: mol_type = other RNA
ggattgctagtgtcctcaggct

SEQ ID NO: 140714 - RNA, 22 nt, synthetic construct
  source 1..22: mol_type = other RNA
ggattggaaaactaggtatttg

SEQ ID NO: 140715 - RNA, 22 nt, synthetic construct
  source 1..22: mol_type = other RNA
ggattggaatgagtccagcttt

SEQ ID NO: 140716 - RNA, 22 nt, synthetic construct
  source 1..22: mol_type = other RNA
ggattggagactgataaacttc

SEQ ID NO: 140717 - RNA, 22 nt, synthetic construct
  source 1..22: mol_type = other RNA
ggattgggaagattggctttag

SEQ ID NO: 140718 - RNA, 22 nt, synthetic construct
  source 1..22: mol_type = other RNA
ggattgtgtgtcgagaaaaatg

SEQ ID NO: 140719 - RNA, 22 nt, synthetic construct
  source 1..22: mol_type = other RNA
ggattgttcatgtctgtgtagt

SEQ ID NO: 140720 - RNA, 22 nt, synthetic construct
  source 1..22: mol_type = other RNA
ggattgtttgaggctgggagta

SEQ ID NO: 140721 - RNA, 22 nt, synthetic construct
  source 1..22: mol_type = other RNA
ggatttaagagaggaagtgacc

SEQ ID NO: 140722 - RNA, 22 nt, synthetic construct
  source 1..22: mol_type = other RNA
ggatttatctttctagattcat

SEQ ID NO: 140723 - RNA, 22 nt, synthetic construct
  source 1..22: mol_type = other RNA
ggatttatttctgggctctcta

SEQ ID NO: 140724 - RNA, 22 nt, synthetic construct
  source 1..22: mol_type = other RNA
ggatttcagtaaatgaaatttg

SEQ ID NO: 140725 - RNA, 22 nt, synthetic construct
  source 1..22: mol_type = other RNA
ggatttcatgaacaattttctc

SEQ ID NO: 140726 - RNA, 22 nt, synthetic construct
  source 1..22: mol_type = other RNA
ggatttgagtaactaaactatt

SEQ ID NO: 140727 - RNA, 22 nt, synthetic construct
  source 1..22: mol_type = other RNA
ggatttgattgggcattaattg

SEQ ID NO: 140728 - RNA, 22 nt, synthetic construct
  source 1..22: mol_type = other RNA
ggatttggccagaatccctttc

SEQ ID NO: 140729 - RNA, 22 nt, synthetic construct
  source 1..22: mol_type = other RNA
ggatttgggaaggatggccagt

SEQ ID NO: 140730 - RNA, 22 nt, synthetic construct
  source 1..22: mol_type = other RNA
ggatttgtttgtgaagatacaa

SEQ ID NO: 140731 - RNA, 22 nt, synthetic construct
  source 1..22: mol_type = other RNA
ggattttcgtatcttttaacag

SEQ ID NO: 140732 - RNA, 22 nt, synthetic construct
  source 1..22: mol_type = other RNA
ggattttctattcattaccagg

SEQ ID NO: 140733 - RNA, 22 nt, synthetic construct
  source 1..22: mol_type = other RNA
ggattttgctgccaagtcagca

SEQ ID NO: 140734 - RNA, 22 nt, synthetic construct
  source 1..22: mol_type = other RNA
ggattttggattgcgattgttt

SEQ ID NO: 140735 - RNA, 22 nt, synthetic construct
  source 1..22: mol_type = other RNA
ggatttttctgtttctgtgaaa

SEQ ID NO: 140736 - RNA, 22 nt, synthetic construct
  source 1..22: mol_type = other RNA
ggatttttgtgtagaggtgaag

SEQ ID NO: 140737 - RNA, 22 nt, synthetic construct
  source 1..22: mol_type = other RNA
ggcaaaaaagtcatgacctgct

SEQ ID NO: 140738 - RNA, 22 nt, synthetic construct
  source 1..22: mol_type = other RNA
ggcaaaaaatgcagtagtaaag

SEQ ID NO: 140739 - RNA, 22 nt, synthetic construct
  source 1..22: mol_type = other RNA
ggcaaaactcctgaacaaaatt

SEQ ID NO: 140740 - RNA, 22 nt, synthetic construct
  source 1..22: mol_type = other RNA
ggcaaaagatgatgaacaaagg

SEQ ID NO: 140741 - RNA, 22 nt, synthetic construct
  source 1..22: mol_type = other RNA
ggcaaaatggagacatctgaga

SEQ ID NO: 140742 - RNA, 22 nt, synthetic construct
  source 1..22: mol_type = other RNA
ggcaaacagactgagccagcaa

SEQ ID NO: 140743 - RNA, 22 nt, synthetic construct
  source 1..22: mol_type = other RNA
ggcaaacagcgccacttaaaaa

SEQ ID NO: 140744 - RNA, 22 nt, synthetic construct
  source 1..22: mol_type = other RNA
ggcaaaccacacagagaacagc

SEQ ID NO: 140745 - RNA, 22 nt, synthetic construct
  source 1..22: mol_type = other RNA
ggcaaacttagaatataaactc

SEQ ID NO: 140746 - RNA, 22 nt, synthetic construct
  source 1..22: mol_type = other RNA
ggcaaaggaaaaaactttttta

SEQ ID NO: 140747 - RNA, 22 nt, synthetic construct
  source 1..22: mol_type = other RNA
ggcaaaggaaaaatctaaccct

SEQ ID NO: 140748 - RNA, 22 nt, synthetic construct
  source 1..22: mol_type = other RNA
ggcaaaggccgctcttgacctt

SEQ ID NO: 140749 - RNA, 22 nt, synthetic construct
  source 1..22: mol_type = other RNA
ggcaaaggttgagacaagacca

SEQ ID NO: 140750 - RNA, 22 nt, synthetic construct
  source 1..22: mol_type = other RNA
ggcaaatctttagtgttgcttg

SEQ ID NO: 140751 - RNA, 22 nt, synthetic construct
  source 1..22: mol_type = other RNA
ggcaaattcatagatcaccagg

SEQ ID NO: 140752 - RNA, 22 nt, synthetic construct
  source 1..22: mol_type = other RNA
ggcaaattgtcagattttcttg

SEQ ID NO: 140753 - RNA, 22 nt, synthetic construct
  source 1..22: mol_type = other RNA
ggcaaatttatgtgaaaagaaa

SEQ ID NO: 140754 - RNA, 22 nt, synthetic construct
  source 1..22: mol_type = other RNA
ggcaacaaaggcgaagcccgcc

SEQ ID NO: 140755 - RNA, 22 nt, synthetic construct
  source 1..22: mol_type = other RNA
ggcaacaatcaacaggtagctg

SEQ ID NO: 140756 - RNA, 22 nt, synthetic construct
  source 1..22: mol_type = other RNA
ggcaacagagacagagaatctg

SEQ ID NO: 140757 - RNA, 22 nt, synthetic construct
  source 1..22: mol_type = other RNA
ggcaacagtcattcaggtctat

SEQ ID NO: 140758 - RNA, 22 nt, synthetic construct
  source 1..22: mol_type = other RNA
ggcaacatccctatgcaataac

SEQ ID NO: 140759 - RNA, 22 nt, synthetic construct
  source 1..22: mol_type = other RNA
ggcaacattttaattccaaatt

SEQ ID NO: 140760 - RNA, 22 nt, synthetic construct
  source 1..22: mol_type = other RNA
ggcaaccttgggagaaaatttt

SEQ ID NO: 140761 - RNA, 22 nt, synthetic construct
  source 1..22: mol_type = other RNA
ggcaagagagcaagactcaaat

SEQ ID NO: 140762 - RNA, 22 nt, synthetic construct
  source 1..22: mol_type = other RNA
ggcaagagagcaagtccccatc

SEQ ID NO: 140763 - RNA, 22 nt, synthetic construct
  source 1..22: mol_type = other RNA
ggcaaggctaacagccaaagaa

SEQ ID NO: 140764 - RNA, 22 nt, synthetic construct
  source 1..22: mol_type = other RNA
ggcaagggactgtcgaagctta

SEQ ID NO: 140765 - RNA, 22 nt, synthetic construct
  source 1..22: mol_type = other RNA
ggcaaggggaatggtactgcct

SEQ ID NO: 140766 - RNA, 22 nt, synthetic construct
  source 1..22: mol_type = other RNA
ggcaagtttccattctcttaat

SEQ ID NO: 140767 - RNA, 22 nt, synthetic construct
  source 1..22: mol_type = other RNA
ggcaatactctcagaaattata

SEQ ID NO: 140768 - RNA, 22 nt, synthetic construct
  source 1..22: mol_type = other RNA
ggcaatatagtgggaccccgtc

SEQ ID NO: 140769 - RNA, 22 nt, synthetic construct
  source 1..22: mol_type = other RNA
ggcaatcaaatggccttctttc

SEQ ID NO: 140770 - RNA, 22 nt, synthetic construct
  source 1..22: mol_type = other RNA
ggcaatccttccgcctcagcct

SEQ ID NO: 140771 - RNA, 22 nt, synthetic construct
  source 1..22: mol_type = other RNA
ggcaatctcagctcattacagt

SEQ ID NO: 140772 - RNA, 22 nt, synthetic construct
  source 1..22: mol_type = other RNA
ggcaatgagtctgacatactgt

SEQ ID NO: 140773 - RNA, 22 nt, synthetic construct
  source 1..22: mol_type = other RNA
ggcaatgctctcttcccccaaa

SEQ ID NO: 140774 - RNA, 22 nt, synthetic construct
  source 1..22: mol_type = other RNA
ggcaatgtaacacagttctagt

SEQ ID NO: 140775 - RNA, 22 nt, synthetic construct
  source 1..22: mol_type = other RNA
ggcaatgtagggaatagacaaa

SEQ ID NO: 140776 - RNA, 22 nt, synthetic construct
  source 1..22: mol_type = other RNA
ggcaatgttgattttgaggcag

SEQ ID NO: 140777 - RNA, 22 nt, synthetic construct
  source 1..22: mol_type = other RNA
ggcaattccataaatgtttgct

SEQ ID NO: 140778 - RNA, 22 nt, synthetic construct
  source 1..22: mol_type = other RNA
ggcaatttagaattctctctca

SEQ ID NO: 140779 - RNA, 22 nt, synthetic construct
  source 1..22: mol_type = other RNA
ggcaatttctcaaaaatttaag

SEQ ID NO: 140780 - RNA, 22 nt, synthetic construct
  source 1..22: mol_type = other RNA
ggcacaatcatagctcactaga

SEQ ID NO: 140781 - RNA, 22 nt, synthetic construct
  source 1..22: mol_type = other RNA
ggcacacgccactgcaggtgtt

SEQ ID NO: 140782 - RNA, 22 nt, synthetic construct
  source 1..22: mol_type = other RNA
ggcacactccccagtggttgtg

SEQ ID NO: 140783 - RNA, 22 nt, synthetic construct
  source 1..22: mol_type = other RNA
ggcacagaattattgattggca

SEQ ID NO: 140784 - RNA, 22 nt, synthetic construct
  source 1..22: mol_type = other RNA
ggcacagcactgttaactgact

SEQ ID NO: 140785 - RNA, 22 nt, synthetic construct
  source 1..22: mol_type = other RNA
ggcacagccagtcagtgatgga

SEQ ID NO: 140786 - RNA, 22 nt, synthetic construct
  source 1..22: mol_type = other RNA
ggcacagctctcatgagtcctg

SEQ ID NO: 140787 - RNA, 22 nt, synthetic construct
  source 1..22: mol_type = other RNA
ggcacaggagagcgacagctac

SEQ ID NO: 140788 - RNA, 22 nt, synthetic construct
  source 1..22: mol_type = other RNA
ggcacagtctgtgcttaaggaa

SEQ ID NO: 140789 - RNA, 22 nt, synthetic construct
  source 1..22: mol_type = other RNA
ggcacatactgcatattgaagc

SEQ ID NO: 140790 - RNA, 22 nt, synthetic construct
  source 1..22: mol_type = other RNA
ggcacattcaagcagaaatgag

SEQ ID NO: 140791 - RNA, 22 nt, synthetic construct
  source 1..22: mol_type = other RNA
ggcaccgcgcccggccgagaaa

SEQ ID NO: 140792 - RNA, 22 nt, synthetic construct
  source 1..22: mol_type = other RNA
ggcaccgtgacagaacaaataa

SEQ ID NO: 140793 - RNA, 22 nt, synthetic construct
  source 1..22: mol_type = other RNA
ggcacctaaaaggttgcttaat

SEQ ID NO: 140794 - RNA, 22 nt, synthetic construct
  source 1..22: mol_type = other RNA
ggcacctgaacccaggaggcaa

SEQ ID NO: 140795 - RNA, 22 nt, synthetic construct
  source 1..22: mol_type = other RNA
ggcaccttcagaagccctgcag

SEQ ID NO: 140796 - RNA, 22 nt, synthetic construct
  source 1..22: mol_type = other RNA
ggcaccttccctactcactgaa

SEQ ID NO: 140797 - RNA, 22 nt, synthetic construct
  source 1..22: mol_type = other RNA
ggcactaacaaagggcctgttc

SEQ ID NO: 140798 - RNA, 22 nt, synthetic construct
  source 1..22: mol_type = other RNA
ggcactgaagccagtccttgtg

SEQ ID NO: 140799 - RNA, 22 nt, synthetic construct
  source 1..22: mol_type = other RNA
ggcactgggagccctccaggat

SEQ ID NO: 140800 - RNA, 22 nt, synthetic construct
  source 1..22: mol_type = other RNA
ggcactgggtccccggaggagg

SEQ ID NO: 140801 - RNA, 22 nt, synthetic construct
  source 1..22: mol_type = other RNA
ggcactgtatggttcttaagat

SEQ ID NO: 140802 - RNA, 22 nt, synthetic construct
  source 1..22: mol_type = other RNA
ggcacttgggatgtttctacct

SEQ ID NO: 140803 - RNA, 22 nt, synthetic construct
  source 1..22: mol_type = other RNA
ggcacttggtaagctgtgagtc

SEQ ID NO: 140804 - RNA, 22 nt, synthetic construct
  source 1..22: mol_type = other RNA
ggcactttcctgataaggggct

SEQ ID NO: 140805 - RNA, 22 nt, synthetic construct
  source 1..22: mol_type = other RNA
ggcagaacacactgctcttcta

SEQ ID NO: 140806 - RNA, 22 nt, synthetic construct
  source 1..22: mol_type = other RNA
ggcagaaccacctgggggagac

SEQ ID NO: 140807 - RNA, 22 nt, synthetic construct
  source 1..22: mol_type = other RNA
ggcagaatgtgacctgtccttg

SEQ ID NO: 140808 - RNA, 22 nt, synthetic construct
  source 1..22: mol_type = other RNA
ggcagaattatagagggcctaa

SEQ ID NO: 140809 - RNA, 22 nt, synthetic construct
  source 1..22: mol_type = other RNA
ggcagactccttcccctggtcg

SEQ ID NO: 140810 - RNA, 22 nt, synthetic construct
  source 1..22: mol_type = other RNA
ggcagagaactgactgaaggat

SEQ ID NO: 140811 - RNA, 22 nt, synthetic construct
  source 1..22: mol_type = other RNA
ggcagagagagtaactggtcca

SEQ ID NO: 140812 - RNA, 22 nt, synthetic construct
  source 1..22: mol_type = other RNA
ggcagagagatggtgggagagg

SEQ ID NO: 140813 - RNA, 22 nt, synthetic construct
  source 1..22: mol_type = other RNA
ggcagagataactgggtgtgca

SEQ ID NO: 140814 - RNA, 22 nt, synthetic construct
  source 1..22: mol_type = other RNA
ggcagaggttgcagtgaagccg

SEQ ID NO: 140815 - RNA, 22 nt, synthetic construct
  source 1..22: mol_type = other RNA
ggcagagtagagaaggctttgt

SEQ ID NO: 140816 - RNA, 22 nt, synthetic construct
  source 1..22: mol_type = other RNA
ggcagatcaattgaccaaacat

SEQ ID NO: 140817 - RNA, 22 nt, synthetic construct
  source 1..22: mol_type = other RNA
ggcagatcacaaggtcagaagt

SEQ ID NO: 140818 - RNA, 22 nt, synthetic construct
  source 1..22: mol_type = other RNA
ggcagatcacgaggtcgagagt

SEQ ID NO: 140819 - RNA, 22 nt, synthetic construct
  source 1..22: mol_type = other RNA
ggcagatgttgcggtgagcaga

SEQ ID NO: 140820 - RNA, 22 nt, synthetic construct
  source 1..22: mol_type = other RNA
ggcagcaaagcaagaaaaagaa

SEQ ID NO: 140821 - RNA, 22 nt, synthetic construct
  source 1..22: mol_type = other RNA
ggcagcaggggctaagtagtgg

SEQ ID NO: 140822 - RNA, 22 nt, synthetic construct
  source 1..22: mol_type = other RNA
ggcagccccgcttcagttggtg

SEQ ID NO: 140823 - RNA, 22 nt, synthetic construct
  source 1..22: mol_type = other RNA
ggcagcccgacctccagcgcta

SEQ ID NO: 140824 - RNA, 22 nt, synthetic construct
  source 1..22: mol_type = other RNA
ggcagccttctctcttccaaat

SEQ ID NO: 140825 - RNA, 22 nt, synthetic construct
  source 1..22: mol_type = other RNA
ggcagccttggaggagccctgc

SEQ ID NO: 140826 - RNA, 22 nt, synthetic construct
  source 1..22: mol_type = other RNA
ggcagcgtaactccatcttcac

SEQ ID NO: 140827 - RNA, 22 nt, synthetic construct
  source 1..22: mol_type = other RNA
ggcagctaagcaccaacagatc

SEQ ID NO: 140828 - RNA, 22 nt, synthetic construct
  source 1..22: mol_type = other RNA
ggcaggaaaggtggggaaggga

SEQ ID NO: 140829 - RNA, 22 nt, synthetic construct
  source 1..22: mol_type = other RNA
ggcaggactgcttgaggccacg

SEQ ID NO: 140830 - RNA, 22 nt, synthetic construct
  source 1..22: mol_type = other RNA
ggcaggagaactgcctggaccc

SEQ ID NO: 140831 - RNA, 22 nt, synthetic construct
  source 1..22: mol_type = other RNA
ggcaggagaatctgggaggtgg

SEQ ID NO: 140832 - RNA, 22 nt, synthetic construct
  source 1..22: mol_type = other RNA
ggcaggagaatggcatgaaccc

SEQ ID NO: 140833 - RNA, 22 nt, synthetic construct
  source 1..22: mol_type = other RNA
ggcaggagagtcgcttgaacct

SEQ ID NO: 140834 - RNA, 22 nt, synthetic construct
  source 1..22: mol_type = other RNA
ggcaggagcagtgtgaatagga

SEQ ID NO: 140835 - RNA, 22 nt, synthetic construct
  source 1..22: mol_type = other RNA
ggcaggagcatagcttgaacca

SEQ ID NO: 140836 - RNA, 22 nt, synthetic construct
  source 1..22: mol_type = other RNA
ggcaggaggcacctgaacccag

SEQ ID NO: 140837 - RNA, 22 nt, synthetic construct
  source 1..22: mol_type = other RNA
ggcaggaggcctcagaattaat

SEQ ID NO: 140838 - RNA, 22 nt, synthetic construct
  source 1..22: mol_type = other RNA
ggcaggcaccttcagaagccct

SEQ ID NO: 140839 - RNA, 22 nt, synthetic construct
  source 1..22: mol_type = other RNA
ggcaggcagatcacgaggtcga

SEQ ID NO: 140840 - RNA, 22 nt, synthetic construct
  source 1..22: mol_type = other RNA
ggcaggcattgtgctcagtggt

SEQ ID NO: 140841 - RNA, 22 nt, synthetic construct
  source 1..22: mol_type = other RNA
ggcagggagagagaaactttac

SEQ ID NO: 140842 - RNA, 22 nt, synthetic construct
  source 1..22: mol_type = other RNA
ggcagggatgctgcgagccccg

SEQ ID NO: 140843 - RNA, 22 nt, synthetic construct
  source 1..22: mol_type = other RNA
ggcagggcttggtggcccacac

SEQ ID NO: 140844 - RNA, 22 nt, synthetic construct
  source 1..22: mol_type = other RNA
ggcaggggctgcatcatggtgg

SEQ ID NO: 140845 - RNA, 22 nt, synthetic construct
  source 1..22: mol_type = other RNA
ggcagggtaggaaggcggtggg

SEQ ID NO: 140846 - RNA, 22 nt, synthetic construct
  source 1..22: mol_type = other RNA
ggcagggtggagtccaaccaat

SEQ ID NO: 140847 - RNA, 22 nt, synthetic construct
  source 1..22: mol_type = other RNA
ggcaggtcacctagcctctctg

SEQ ID NO: 140848 - RNA, 22 nt, synthetic construct
  source 1..22: mol_type = other RNA
ggcaggtggatatctgaggtca

SEQ ID NO: 140849 - RNA, 22 nt, synthetic construct
  source 1..22: mol_type = other RNA
ggcaggtggatcaggagattga

SEQ ID NO: 140850 - RNA, 22 nt, synthetic construct
  source 1..22: mol_type = other RNA
ggcaggtttcaagtgaaccaaa

SEQ ID NO: 140851 - RNA, 22 nt, synthetic construct
  source 1..22: mol_type = other RNA
ggcagtaccattccccttgcca

SEQ ID NO: 140852 - RNA, 22 nt, synthetic construct
  source 1..22: mol_type = other RNA
ggcagtcctctactttcacata

SEQ ID NO: 140853 - RNA, 22 nt, synthetic construct
  source 1..22: mol_type = other RNA
ggcagtcctctcactccaaagc

SEQ ID NO: 140854 - RNA, 22 nt, synthetic construct
  source 1..22: mol_type = other RNA
ggcagtctaggaaaagacttga

SEQ ID NO: 140855 - RNA, 22 nt, synthetic construct
  source 1..22: mol_type = other RNA
ggcagtctagtccatgaagaaa

SEQ ID NO: 140856 - RNA, 22 nt, synthetic construct
  source 1..22: mol_type = other RNA
ggcagttattaagagtgtgctg

SEQ ID NO: 140857 - RNA, 22 nt, synthetic construct
  source 1..22: mol_type = other RNA
ggcagttgagttttcaaccttt

SEQ ID NO: 140858 - RNA, 22 nt, synthetic construct
  source 1..22: mol_type = other RNA
ggcagtttaagaattaaaaaca

SEQ ID NO: 140859 - RNA, 22 nt, synthetic construct
  source 1..22: mol_type = other RNA
ggcataaagacagacatttgga

SEQ ID NO: 140860 - RNA, 22 nt, synthetic construct
  source 1..22: mol_type = other RNA
ggcataacatctatgaagtaat

SEQ ID NO: 140861 - RNA, 22 nt, synthetic construct
  source 1..22: mol_type = other RNA
ggcataagccaccgcactcagc

SEQ ID NO: 140862 - RNA, 22 nt, synthetic construct
  source 1..22: mol_type = other RNA
ggcatacaactgctcataatag

SEQ ID NO: 140863 - RNA, 22 nt, synthetic construct
  source 1..22: mol_type = other RNA
ggcatacaggagttccgatttc

SEQ ID NO: 140864 - RNA, 22 nt, synthetic construct
  source 1..22: mol_type = other RNA
ggcatagggccttctactttaa

SEQ ID NO: 140865 - RNA, 22 nt, synthetic construct
  source 1..22: mol_type = other RNA
ggcatataaactggaaggaaat

SEQ ID NO: 140866 - RNA, 22 nt, synthetic construct
  source 1..22: mol_type = other RNA
ggcatataataagcagaattca

SEQ ID NO: 140867 - RNA, 22 nt, synthetic construct
  source 1..22: mol_type = other RNA
ggcatatgtcactgtaagaata

SEQ ID NO: 140868 - RNA, 22 nt, synthetic construct
  source 1..22: mol_type = other RNA
ggcatattattgtaacttgaat

SEQ ID NO: 140869 - RNA, 22 nt, synthetic construct
  source 1..22: mol_type = other RNA
ggcatcaaagctaccctttctt

SEQ ID NO: 140870 - RNA, 22 nt, synthetic construct
  source 1..22: mol_type = other RNA
ggcatcatactggaaggactca

SEQ ID NO: 140871 - RNA, 22 nt, synthetic construct
  source 1..22: mol_type = other RNA
ggcatcattcataaacacagaa

SEQ ID NO: 140872 - RNA, 22 nt, synthetic construct
  source 1..22: mol_type = other RNA
ggcatcggggcctacagtggtt

SEQ ID NO: 140873 - RNA, 22 nt, synthetic construct
  source 1..22: mol_type = other RNA
ggcatctagttaccactagcaa

SEQ ID NO: 140874 - RNA, 22 nt, synthetic construct
  source 1..22: mol_type = other RNA
ggcatctatttccccattagag

SEQ ID NO: 140875 - RNA, 22 nt, synthetic construct
  source 1..22: mol_type = other RNA
ggcatctctcccttcctgttct

SEQ ID NO: 140876 - RNA, 22 nt, synthetic construct
  source 1..22: mol_type = other RNA
ggcatctctctaaaaacatcca

SEQ ID NO: 140877 - RNA, 22 nt, synthetic construct
  source 1..22: mol_type = other RNA
ggcatctttaagattttttgtt

SEQ ID NO: 140878 - RNA, 22 nt, synthetic construct
  source 1..22: mol_type = other RNA
ggcatctttgttacagcagctc

SEQ ID NO: 140879 - RNA, 22 nt, synthetic construct
  source 1..22: mol_type = other RNA
ggcatgaaatgggtttaaaaga

SEQ ID NO: 140880 - RNA, 22 nt, synthetic construct
  source 1..22: mol_type = other RNA
ggcatgaaattcttgggtgaat

SEQ ID NO: 140881 - RNA, 22 nt, synthetic construct
  source 1..22: mol_type = other RNA
ggcatgaacccaccaggaggcg

SEQ ID NO: 140882 - RNA, 22 nt, synthetic construct
  source 1..22: mol_type = other RNA
ggcatgagccacagggcccagc

SEQ ID NO: 140883 - RNA, 22 nt, synthetic construct
  source 1..22: mol_type = other RNA
ggcatgagccactgcgggccca

SEQ ID NO: 140884 - RNA, 22 nt, synthetic construct
  source 1..22: mol_type = other RNA
ggcatgagtcgccatacctggt

SEQ ID NO: 140885 - RNA, 22 nt, synthetic construct
  source 1..22: mol_type = other RNA
ggcatgatctcacgtcaccgca

SEQ ID NO: 140886 - RNA, 22 nt, synthetic construct
  source 1..22: mol_type = other RNA
ggcatgatggctcaacgcctgt

SEQ ID NO: 140887 - RNA, 22 nt, synthetic construct
  source 1..22: mol_type = other RNA
ggcatgcacggacttggcacag

SEQ ID NO: 140888 - RNA, 22 nt, synthetic construct
  source 1..22: mol_type = other RNA
ggcatgccgggacaagagtctg

SEQ ID NO: 140889 - RNA, 22 nt, synthetic construct
  source 1..22: mol_type = other RNA
ggcatgcctctcccaccatctc

SEQ ID NO: 140890 - RNA, 22 nt, synthetic construct
  source 1..22: mol_type = other RNA
ggcatgcgccatcacacccagt

SEQ ID NO: 140891 - RNA, 22 nt, synthetic construct
  source 1..22: mol_type = other RNA
ggcatgctaactgcagaggtca

SEQ ID NO: 140892 - RNA, 22 nt, synthetic construct
  source 1..22: mol_type = other RNA
ggcatgggggcgcgtgcctatg

SEQ ID NO: 140893 - RNA, 22 nt, synthetic construct
  source 1..22: mol_type = other RNA
ggcatgggtccaagacaggaag

SEQ ID NO: 140894 - RNA, 22 nt, synthetic construct
  source 1..22: mol_type = other RNA
ggcatgtctgtagttacaacta

SEQ ID NO: 140895 - RNA, 22 nt, synthetic construct
  source 1..22: mol_type = other RNA
ggcatgttggatagtttctcaa

SEQ ID NO: 140896 - RNA, 22 nt, synthetic construct
  source 1..22: mol_type = other RNA
ggcattaaggacatccacaaca

SEQ ID NO: 140897 - RNA, 22 nt, synthetic construct
  source 1..22: mol_type = other RNA
ggcattaattgagagctttctt

SEQ ID NO: 140898 - RNA, 22 nt, synthetic construct
  source 1..22: mol_type = other RNA
ggcattagaagttaaattgatt

SEQ ID NO: 140899 - RNA, 22 nt, synthetic construct
  source 1..22: mol_type = other RNA
ggcattagtgaattcacagtag

SEQ ID NO: 140900 - RNA, 22 nt, synthetic construct
  source 1..22: mol_type = other RNA
ggcattccagagggtaacgtga

SEQ ID NO: 140901 - RNA, 22 nt, synthetic construct
  source 1..22: mol_type = other RNA
ggcattccctgtctgggaagtt

SEQ ID NO: 140902 - RNA, 22 nt, synthetic construct
  source 1..22: mol_type = other RNA
ggcattccgtggaaggccttct

SEQ ID NO: 140903 - RNA, 22 nt, synthetic construct
  source 1..22: mol_type = other RNA
ggcattgtcccgggggagggcg

SEQ ID NO: 140904 - RNA, 22 nt, synthetic construct
  source 1..22: mol_type = other RNA
ggcattgtgctcagtggttctg

SEQ ID NO: 140905 - RNA, 22 nt, synthetic construct
  source 1..22: mol_type = other RNA
ggcatttaaaagaacctctgga

SEQ ID NO: 140906 - RNA, 22 nt, synthetic construct
  source 1..22: mol_type = other RNA
ggcatttactgctataaacttc

SEQ ID NO: 140907 - RNA, 22 nt, synthetic construct
  source 1..22: mol_type = other RNA
ggcatttcttacacattaggct

SEQ ID NO: 140908 - RNA, 22 nt, synthetic construct
  source 1..22: mol_type = other RNA
ggcatttgagggttagaagaca

SEQ ID NO: 140909 - RNA, 22 nt, synthetic construct
  source 1..22: mol_type = other RNA
ggcattttcaaggtagaagtac

SEQ ID NO: 140910 - RNA, 22 nt, synthetic construct
  source 1..22: mol_type = other RNA
ggccaaagacagatcttatgga

SEQ ID NO: 140911 - RNA, 22 nt, synthetic construct
  source 1..22: mol_type = other RNA
ggccaaagacttcaacggacat

SEQ ID NO: 140912 - RNA, 22 nt, synthetic construct
  source 1..22: mol_type = other RNA
ggccaaatatccatgttttaat

SEQ ID NO: 140913 - RNA, 22 nt, synthetic construct
  source 1..22: mol_type = other RNA
ggccaaatccctgatcaagttg

SEQ ID NO: 140914 - RNA, 22 nt, synthetic construct
  source 1..22: mol_type = other RNA
ggccaaatgaaaggcgtcgggg

SEQ ID NO: 140915 - RNA, 22 nt, synthetic construct
  source 1..22: mol_type = other RNA
ggccaacagggccactgagagc

SEQ ID NO: 140916 - RNA, 22 nt, synthetic construct
  source 1..22: mol_type = other RNA
ggccaacatcgtaaaacctcat

SEQ ID NO: 140917 - RNA, 22 nt, synthetic construct
  source 1..22: mol_type = other RNA
ggccaaccattactcttctact

SEQ ID NO: 140918 - RNA, 22 nt, synthetic construct
  source 1..22: mol_type = other RNA
ggccaactgtcctctcttgttg

SEQ ID NO: 140919 - RNA, 22 nt, synthetic construct
  source 1..22: mol_type = other RNA
ggccaacttccagcaagacttt

SEQ ID NO: 140920 - RNA, 22 nt, synthetic construct
  source 1..22: mol_type = other RNA
ggccaagagttgctgacttcct

SEQ ID NO: 140921 - RNA, 22 nt, synthetic construct
  source 1..22: mol_type = other RNA
ggccaagatctgtttttcaaaa

SEQ ID NO: 140922 - RNA, 22 nt, synthetic construct
  source 1..22: mol_type = other RNA
ggccaaggagggaggattgttt

SEQ ID NO: 140923 - RNA, 22 nt, synthetic construct
  source 1..22: mol_type = other RNA
ggccaaggcaggactgcttgag

SEQ ID NO: 140924 - RNA, 22 nt, synthetic construct
  source 1..22: mol_type = other RNA
ggccacaaagtccccacatgac

SEQ ID NO: 140925 - RNA, 22 nt, synthetic construct
  source 1..22: mol_type = other RNA
ggccacagcagggctcctccaa

SEQ ID NO: 140926 - RNA, 22 nt, synthetic construct
  source 1..22: mol_type = other RNA
ggccacatgcttccaaaagcag

SEQ ID NO: 140927 - RNA, 22 nt, synthetic construct
  source 1..22: mol_type = other RNA
ggccaccaagccctgccttaaa

SEQ ID NO: 140928 - RNA, 22 nt, synthetic construct
  source 1..22: mol_type = other RNA
ggccactctcatctaaattaag

SEQ ID NO: 140929 - RNA, 22 nt, synthetic construct
  source 1..22: mol_type = other RNA
ggccactgagagctcaggccag

SEQ ID NO: 140930 - RNA, 22 nt, synthetic construct
  source 1..22: mol_type = other RNA
ggccactgattgagtatctggt

SEQ ID NO: 140931 - RNA, 22 nt, synthetic construct
  source 1..22: mol_type = other RNA
ggccactggaaaccttttgtag

SEQ ID NO: 140932 - RNA, 22 nt, synthetic construct
  source 1..22: mol_type = other RNA
ggccagaatccctttcgctaat

SEQ ID NO: 140933 - RNA, 22 nt, synthetic construct
  source 1..22: mol_type = other RNA
ggccagacattttatttataca

SEQ ID NO: 140934 - RNA, 22 nt, synthetic construct
  source 1..22: mol_type = other RNA
ggccagaggagggatgcattct

SEQ ID NO: 140935 - RNA, 22 nt, synthetic construct
  source 1..22: mol_type = other RNA
ggccagagggaatctaggaaac

SEQ ID NO: 140936 - RNA, 22 nt, synthetic construct
  source 1..22: mol_type = other RNA
ggccagatatccataaggaaaa

SEQ ID NO: 140937 - RNA, 22 nt, synthetic construct
  source 1..22: mol_type = other RNA
ggccagcattacttaggcagtt

SEQ ID NO: 140938 - RNA, 22 nt, synthetic construct
  source 1..22: mol_type = other RNA
ggccaggaggaggagggtgcag

SEQ ID NO: 140939 - RNA, 22 nt, synthetic construct
  source 1..22: mol_type = other RNA
ggccaggctggttccaaacttc

SEQ ID NO: 140940 - RNA, 22 nt, synthetic construct
  source 1..22: mol_type = other RNA
ggccagtatctcctttccttcc

SEQ ID NO: 140941 - RNA, 22 nt, synthetic construct
  source 1..22: mol_type = other RNA
ggccagtcatgtggggactttg

SEQ ID NO: 140942 - RNA, 22 nt, synthetic construct
  source 1..22: mol_type = other RNA
ggccagtccctagtgtctccat

SEQ ID NO: 140943 - RNA, 22 nt, synthetic construct
  source 1..22: mol_type = other RNA
ggccagtgaccagtgtgatggg

SEQ ID NO: 140944 - RNA, 22 nt, synthetic construct
  source 1..22: mol_type = other RNA
ggccagtgagtgatgaaaagag

SEQ ID NO: 140945 - RNA, 22 nt, synthetic construct
  source 1..22: mol_type = other RNA
ggccagtgagttcaaatgttaa

SEQ ID NO: 140946 - RNA, 22 nt, synthetic construct
  source 1..22: mol_type = other RNA
ggccagttgagagagaattcta

SEQ ID NO: 140947 - RNA, 22 nt, synthetic construct
  source 1..22: mol_type = other RNA
ggccataaatcaaggtacaata

SEQ ID NO: 140948 - RNA, 22 nt, synthetic construct
  source 1..22: mol_type = other RNA
ggccatccttcccaaatccagg

SEQ ID NO: 140949 - RNA, 22 nt, synthetic construct
  source 1..22: mol_type = other RNA
ggccatctgaattcaagttaca

SEQ ID NO: 140950 - RNA, 22 nt, synthetic construct
  source 1..22: mol_type = other RNA
ggccatcttcatttctaagcca

SEQ ID NO: 140951 - RNA, 22 nt, synthetic construct
  source 1..22: mol_type = other RNA
ggccatgttttatttcttgacc

SEQ ID NO: 140952 - RNA, 22 nt, synthetic construct
  source 1..22: mol_type = other RNA
ggccattctgctatgaaatgtg

SEQ ID NO: 140953 - RNA, 22 nt, synthetic construct
  source 1..22: mol_type = other RNA
ggccatttcatttctgtttttt

SEQ ID NO: 140954 - RNA, 22 nt, synthetic construct
  source 1..22: mol_type = other RNA
ggccatttgattgccagttttc

SEQ ID NO: 140955 - RNA, 22 nt, synthetic construct
  source 1..22: mol_type = other RNA
ggccattttcttttaaatgtat

SEQ ID NO: 140956 - RNA, 22 nt, synthetic construct
  source 1..22: mol_type = other RNA
ggcccaaaaagtttttaaaaat

SEQ ID NO: 140957 - RNA, 22 nt, synthetic construct
  source 1..22: mol_type = other RNA
ggcccaacatgctcttaagtat

SEQ ID NO: 140958 - RNA, 22 nt, synthetic construct
  source 1..22: mol_type = other RNA
ggcccacacctgcaatcacagc

SEQ ID NO: 140959 - RNA, 22 nt, synthetic construct
  source 1..22: mol_type = other RNA
ggcccaccatgatgcagcccct

SEQ ID NO: 140960 - RNA, 22 nt, synthetic construct
  source 1..22: mol_type = other RNA
ggcccaccctgctccagtatga

SEQ ID NO: 140961 - RNA, 22 nt, synthetic construct
  source 1..22: mol_type = other RNA
ggcccactctccccaagtaaac

SEQ ID NO: 140962 - RNA, 22 nt, synthetic construct
  source 1..22: mol_type = other RNA
ggcccagattccttttttatgt

SEQ ID NO: 140963 - RNA, 22 nt, synthetic construct
  source 1..22: mol_type = other RNA
ggcccagcagaaggtgagggac

SEQ ID NO: 140964 - RNA, 22 nt, synthetic construct
  source 1..22: mol_type = other RNA
ggcccagccatcccattactcg

SEQ ID NO: 140965 - RNA, 22 nt, synthetic construct
  source 1..22: mol_type = other RNA
ggcccagcctcaacagcacttt

SEQ ID NO: 140966 - RNA, 22 nt, synthetic construct
  source 1..22: mol_type = other RNA
ggcccagctcttttgtgtcttt

SEQ ID NO: 140967 - RNA, 22 nt, synthetic construct
  source 1..22: mol_type = other RNA
ggcccatatccttttatgtgca

SEQ ID NO: 140968 - RNA, 22 nt, synthetic construct
  source 1..22: mol_type = other RNA
ggcccatgacatgtgttttatt

SEQ ID NO: 140969 - RNA, 22 nt, synthetic construct
  source 1..22: mol_type = other RNA
ggcccattttcgaattagattg

SEQ ID NO: 140970 - RNA, 22 nt, synthetic construct
  source 1..22: mol_type = other RNA
ggccccaaaattaccccattca

SEQ ID NO: 140971 - RNA, 22 nt, synthetic construct
  source 1..22: mol_type = other RNA
ggccccaggggacatagatgaa

SEQ ID NO: 140972 - RNA, 22 nt, synthetic construct
  source 1..22: mol_type = other RNA
ggcccccctgaaaaatgagaaa

SEQ ID NO: 140973 - RNA, 22 nt, synthetic construct
  source 1..22: mol_type = other RNA
ggccccgatgccatgtgttttg

SEQ ID NO: 140974 - RNA, 22 nt, synthetic construct
  source 1..22: mol_type = other RNA
ggcccctccatggaaactacaa

SEQ ID NO: 140975 - RNA, 22 nt, synthetic construct
  source 1..22: mol_type = other RNA
ggccccttgaaagatcatttag

SEQ ID NO: 140976 - RNA, 22 nt, synthetic construct
  source 1..22: mol_type = other RNA
ggcccctttcaagattgtttaa

SEQ ID NO: 140977 - RNA, 22 nt, synthetic construct
  source 1..22: mol_type = other RNA
ggcccgcagtggctcatgcctg

SEQ ID NO: 140978 - RNA, 22 nt, synthetic construct
  source 1..22: mol_type = other RNA
ggcccggggcagagaactgact

SEQ ID NO: 140979 - RNA, 22 nt, synthetic construct
  source 1..22: mol_type = other RNA
ggcccgttatttttatcataac

SEQ ID NO: 140980 - RNA, 22 nt, synthetic construct
  source 1..22: mol_type = other RNA
ggccctaaccccagagattgtc

SEQ ID NO: 140981 - RNA, 22 nt, synthetic construct
  source 1..22: mol_type = other RNA
ggccctatgccttcagtatgaa

SEQ ID NO: 140982 - RNA, 22 nt, synthetic construct
  source 1..22: mol_type = other RNA
ggccctattcaacctataagac

SEQ ID NO: 140983 - RNA, 22 nt, synthetic construct
  source 1..22: mol_type = other RNA
ggccctccatttccctgcttca

SEQ ID NO: 140984 - RNA, 22 nt, synthetic construct
  source 1..22: mol_type = other RNA
ggccctctataattctgccttc

SEQ ID NO: 140985 - RNA, 22 nt, synthetic construct
  source 1..22: mol_type = other RNA
ggccctgagaagtcaaagcctg

SEQ ID NO: 140986 - RNA, 22 nt, synthetic construct
  source 1..22: mol_type = other RNA
ggccctgattgagattagcgaa

SEQ ID NO: 140987 - RNA, 22 nt, synthetic construct
  source 1..22: mol_type = other RNA
ggccctgatttaaagtaggttg

SEQ ID NO: 140988 - RNA, 22 nt, synthetic construct
  source 1..22: mol_type = other RNA
ggccctgccgcttcgcctttct

SEQ ID NO: 140989 - RNA, 22 nt, synthetic construct
  source 1..22: mol_type = other RNA
ggccctgcgattggttggactc

SEQ ID NO: 140990 - RNA, 22 nt, synthetic construct
  source 1..22: mol_type = other RNA
ggccctggtgctttctatctct

SEQ ID NO: 140991 - RNA, 22 nt, synthetic construct
  source 1..22: mol_type = other RNA
ggccctgttggcctggacacac

SEQ ID NO: 140992 - RNA, 22 nt, synthetic construct
  source 1..22: mol_type = other RNA
ggcccttaacttcacctctaca

SEQ ID NO: 140993 - RNA, 22 nt, synthetic construct
  source 1..22: mol_type = other RNA
ggccctttgttagtgccttcag

SEQ ID NO: 140994 - RNA, 22 nt, synthetic construct
  source 1..22: mol_type = other RNA
ggccgaatgtggtggtatgcac

SEQ ID NO: 140995 - RNA, 22 nt, synthetic construct
  source 1..22: mol_type = other RNA
ggccgacccccctacctccctc

SEQ ID NO: 140996 - RNA, 22 nt, synthetic construct
  source 1..22: mol_type = other RNA
ggccgagaaatcggaactcctg

SEQ ID NO: 140997 - RNA, 22 nt, synthetic construct
  source 1..22: mol_type = other RNA
ggccgaggcaggtggatcagga

SEQ ID NO: 140998 - RNA, 22 nt, synthetic construct
  source 1..22: mol_type = other RNA
ggccgaggccagtccctagtgt

SEQ ID NO: 140999 - RNA, 22 nt, synthetic construct
  source 1..22: mol_type = other RNA
ggccgagggagacggcgagctt

SEQ ID NO: 141000 - RNA, 22 nt, synthetic construct
  source 1..22: mol_type = other RNA
ggccgagggttgaacatcaccc

SEQ ID NO: 141001 - RNA, 22 nt, synthetic construct
  source 1..22: mol_type = other RNA
ggccgatgcctgtgcttttctc

SEQ ID NO: 141002 - RNA, 22 nt, synthetic construct
  source 1..22: mol_type = other RNA
ggccgcagtgagccatggctgc

SEQ ID NO: 141003 - RNA, 22 nt, synthetic construct
  source 1..22: mol_type = other RNA
ggccgcccctggagaaagccca

SEQ ID NO: 141004 - RNA, 22 nt, synthetic construct
  source 1..22: mol_type = other RNA
ggccgcgtccacctggcaacaa

SEQ ID NO: 141005 - RNA, 22 nt, synthetic construct
  source 1..22: mol_type = other RNA
ggccgctcttgaccttgtgcat

SEQ ID NO: 141006 - RNA, 22 nt, synthetic construct
  source 1..22: mol_type = other RNA
ggccggagcgggcagccttgga

SEQ ID NO: 141007 - RNA, 22 nt, synthetic construct
  source 1..22: mol_type = other RNA
ggccggaggattgcttgagtgc

SEQ ID NO: 141008 - RNA, 22 nt, synthetic construct
  source 1..22: mol_type = other RNA
ggccgggatttacttctatatg

SEQ ID NO: 141009 - RNA, 22 nt, synthetic construct
  source 1..22: mol_type = other RNA
ggccgggtcgcggacgcgcatt

SEQ ID NO: 141010 - RNA, 22 nt, synthetic construct
  source 1..22: mol_type = other RNA
ggccgtccctattttctacagg

SEQ ID NO: 141011 - RNA, 22 nt, synthetic construct
  source 1..22: mol_type = other RNA
ggcctaaataaaacacatgtca

SEQ ID NO: 141012 - RNA, 22 nt, synthetic construct
  source 1..22: mol_type = other RNA
ggcctaaatcaggatgtctttg

SEQ ID NO: 141013 - RNA, 22 nt, synthetic construct
  source 1..22: mol_type = other RNA
ggcctaagatggaaagtggact

SEQ ID NO: 141014 - RNA, 22 nt, synthetic construct
  source 1..22: mol_type = other RNA
ggcctacagtggttccatttgt

SEQ ID NO: 141015 - RNA, 22 nt, synthetic construct
  source 1..22: mol_type = other RNA
ggcctagaaatcatacacgagt

SEQ ID NO: 141016 - RNA, 22 nt, synthetic construct
  source 1..22: mol_type = other RNA
ggcctaggtgtgataactgata

SEQ ID NO: 141017 - RNA, 22 nt, synthetic construct
  source 1..22: mol_type = other RNA
ggcctattttaggctctgtggt

SEQ ID NO: 141018 - RNA, 22 nt, synthetic construct
  source 1..22: mol_type = other RNA
ggcctcaaatttcatttactga

SEQ ID NO: 141019 - RNA, 22 nt, synthetic construct
  source 1..22: mol_type = other RNA
ggcctcagaattaatataagat

SEQ ID NO: 141020 - RNA, 22 nt, synthetic construct
  source 1..22: mol_type = other RNA
ggcctcagcatgtcttcagagg

SEQ ID NO: 141021 - RNA, 22 nt, synthetic construct
  source 1..22: mol_type = other RNA
ggcctcagcctcccgagtagtt

SEQ ID NO: 141022 - RNA, 22 nt, synthetic construct
  source 1..22: mol_type = other RNA
ggcctcatgtattttcctaacc

SEQ ID NO: 141023 - RNA, 22 nt, synthetic construct
  source 1..22: mol_type = other RNA
ggcctccccaagtgctgtgatt

SEQ ID NO: 141024 - RNA, 22 nt, synthetic construct
  source 1..22: mol_type = other RNA
ggcctccctcactaagtcagaa

SEQ ID NO: 141025 - RNA, 22 nt, synthetic construct
  source 1..22: mol_type = other RNA
ggcctcctgccttcctgacctc

SEQ ID NO: 141026 - RNA, 22 nt, synthetic construct
  source 1..22: mol_type = other RNA
ggcctcgctcttggcttttggc

SEQ ID NO: 141027 - RNA, 22 nt, synthetic construct
  source 1..22: mol_type = other RNA
ggcctcggccaaccattactct

SEQ ID NO: 141028 - RNA, 22 nt, synthetic construct
  source 1..22: mol_type = other RNA
ggcctctactgactcccttttt

SEQ ID NO: 141029 - RNA, 22 nt, synthetic construct
  source 1..22: mol_type = other RNA
ggcctctccccttgacgaagtc

SEQ ID NO: 141030 - RNA, 22 nt, synthetic construct
  source 1..22: mol_type = other RNA
ggcctctgaagacatgctgagg

SEQ ID NO: 141031 - RNA, 22 nt, synthetic construct
  source 1..22: mol_type = other RNA
ggcctctgcggcggctgaggca

SEQ ID NO: 141032 - RNA, 22 nt, synthetic construct
  source 1..22: mol_type = other RNA
ggcctcttcccttgtgcacctc

SEQ ID NO: 141033 - RNA, 22 nt, synthetic construct
  source 1..22: mol_type = other RNA
ggcctgagccgtcggtatgtta

SEQ ID NO: 141034 - RNA, 22 nt, synthetic construct
  source 1..22: mol_type = other RNA
ggcctgagctctcagtggccct

SEQ ID NO: 141035 - RNA, 22 nt, synthetic construct
  source 1..22: mol_type = other RNA
ggcctgatagctgtggaagcac

SEQ ID NO: 141036 - RNA, 22 nt, synthetic construct
  source 1..22: mol_type = other RNA
ggcctgcaccatttattgtcaa

SEQ ID NO: 141037 - RNA, 22 nt, synthetic construct
  source 1..22: mol_type = other RNA
ggcctgcttcattccgcgttta

SEQ ID NO: 141038 - RNA, 22 nt, synthetic construct
  source 1..22: mol_type = other RNA
ggcctgcttttggaagcatgtg

SEQ ID NO: 141039 - RNA, 22 nt, synthetic construct
  source 1..22: mol_type = other RNA
ggcctggaacaggccctttgtt

SEQ ID NO: 141040 - RNA, 22 nt, synthetic construct
  source 1..22: mol_type = other RNA
ggcctggacaacagtgtgagac

SEQ ID NO: 141041 - RNA, 22 nt, synthetic construct
  source 1..22: mol_type = other RNA
ggcctggacacacacagtcctg

SEQ ID NO: 141042 - RNA, 22 nt, synthetic construct
  source 1..22: mol_type = other RNA
ggcctggttagggagactttca

SEQ ID NO: 141043 - RNA, 22 nt, synthetic construct
  source 1..22: mol_type = other RNA
ggcctgttccaggcctcgctct

SEQ ID NO: 141044 - RNA, 22 nt, synthetic construct
  source 1..22: mol_type = other RNA
ggcctgttgtgaggattcgatt

SEQ ID NO: 141045 - RNA, 22 nt, synthetic construct
  source 1..22: mol_type = other RNA
ggccttccacctgctctttatc

SEQ ID NO: 141046 - RNA, 22 nt, synthetic construct
  source 1..22: mol_type = other RNA
ggccttccacggaatgcccctt

SEQ ID NO: 141047 - RNA, 22 nt, synthetic construct
  source 1..22: mol_type = other RNA
ggccttcccaaagacatcctga

SEQ ID NO: 141048 - RNA, 22 nt, synthetic construct
  source 1..22: mol_type = other RNA
ggccttcgaggcatctagttac

SEQ ID NO: 141049 - RNA, 22 nt, synthetic construct
  source 1..22: mol_type = other RNA
ggccttcgcgcgcggcagggat

SEQ ID NO: 141050 - RNA, 22 nt, synthetic construct
  source 1..22: mol_type = other RNA
ggccttctactttaataaatga

SEQ ID NO: 141051 - RNA, 22 nt, synthetic construct
  source 1..22: mol_type = other RNA
ggccttctatatttttacatta

SEQ ID NO: 141052 - RNA, 22 nt, synthetic construct
  source 1..22: mol_type = other RNA
ggccttctcctccaacccattc

SEQ ID NO: 141053 - RNA, 22 nt, synthetic construct
  source 1..22: mol_type = other RNA
ggccttctgaggagctgagacc

SEQ ID NO: 141054 - RNA, 22 nt, synthetic construct
  source 1..22: mol_type = other RNA
ggccttctttctttcaaatgtg

SEQ ID NO: 141055 - RNA, 22 nt, synthetic construct
  source 1..22: mol_type = other RNA
ggccttgaggtgagacagaccc

SEQ ID NO: 141056 - RNA, 22 nt, synthetic construct
  source 1..22: mol_type = other RNA
ggccttgcaagccacattagcc

SEQ ID NO: 141057 - RNA, 22 nt, synthetic construct
  source 1..22: mol_type = other RNA
ggcctttaatcacctcaagtga

SEQ ID NO: 141058 - RNA, 22 nt, synthetic construct
  source 1..22: mol_type = other RNA
ggcctttctgtttgtttgtttt

SEQ ID NO: 141059 - RNA, 22 nt, synthetic construct
  source 1..22: mol_type = other RNA
ggcctttgcctctccagggagg

SEQ ID NO: 141060 - RNA, 22 nt, synthetic construct
  source 1..22: mol_type = other RNA
ggccttttgtcaagctatcaga

SEQ ID NO: 141061 - RNA, 22 nt, synthetic construct
  source 1..22: mol_type = other RNA
ggcgaaatatctccctcacagt

SEQ ID NO: 141062 - RNA, 22 nt, synthetic construct
  source 1..22: mol_type = other RNA
ggcgaaatgtgaacagacagac

SEQ ID NO: 141063 - RNA, 22 nt, synthetic construct
  source 1..22: mol_type = other RNA
ggcgacaagagcagaactccac

SEQ ID NO: 141064 - RNA, 22 nt, synthetic construct
  source 1..22: mol_type = other RNA
ggcgacagagtgaaactctggc

SEQ ID NO: 141065 - RNA, 22 nt, synthetic construct
  source 1..22: mol_type = other RNA
ggcgactcatgcctgtaattct

SEQ ID NO: 141066 - RNA, 22 nt, synthetic construct
  source 1..22: mol_type = other RNA
ggcgagatggcgtgcgcctgta

SEQ ID NO: 141067 - RNA, 22 nt, synthetic construct
  source 1..22: mol_type = other RNA
ggcgagcttgatctttacttcc

SEQ ID NO: 141068 - RNA, 22 nt, synthetic construct
  source 1..22: mol_type = other RNA
ggcgatcttggctcaccacaac

SEQ ID NO: 141069 - RNA, 22 nt, synthetic construct
  source 1..22: mol_type = other RNA
ggcgcacgccatctcgcccagc

SEQ ID NO: 141070 - RNA, 22 nt, synthetic construct
  source 1..22: mol_type = other RNA
ggcgcagacacaccatgacaga

SEQ ID NO: 141071 - RNA, 22 nt, synthetic construct
  source 1..22: mol_type = other RNA
ggcgcagccatggctcactgcg

SEQ ID NO: 141072 - RNA, 22 nt, synthetic construct
  source 1..22: mol_type = other RNA
ggcgcagtgcttagcgctggag

SEQ ID NO: 141073 - RNA, 22 nt, synthetic construct
  source 1..22: mol_type = other RNA
ggcgcctgcattgcatttactt

SEQ ID NO: 141074 - RNA, 22 nt, synthetic construct
  source 1..22: mol_type = other RNA
ggcgcctggacaggatcccgga

SEQ ID NO: 141075 - RNA, 22 nt, synthetic construct
  source 1..22: mol_type = other RNA
ggcgcgtgcctatggtcctagc

SEQ ID NO: 141076 - RNA, 22 nt, synthetic construct
  source 1..22: mol_type = other RNA
ggcgcgtgcctgcaatcgcagg

SEQ ID NO: 141077 - RNA, 22 nt, synthetic construct
  source 1..22: mol_type = other RNA
ggcgctccctctgtgtgcatgc

SEQ ID NO: 141078 - RNA, 22 nt, synthetic construct
  source 1..22: mol_type = other RNA
ggcgctcctctcccgccggagt

SEQ ID NO: 141079 - RNA, 22 nt, synthetic construct
  source 1..22: mol_type = other RNA
ggcgctgtttgcctgcgtccgt

SEQ ID NO: 141080 - RNA, 22 nt, synthetic construct
  source 1..22: mol_type = other RNA
ggcggaaggattgcctaacacc

SEQ ID NO: 141081 - RNA, 22 nt, synthetic construct
  source 1..22: mol_type = other RNA
ggcggaagttgcagtgagccca

SEQ ID NO: 141082 - RNA, 22 nt, synthetic construct
  source 1..22: mol_type = other RNA
ggcggaatgcagtggcgtgatc

SEQ ID NO: 141083 - RNA, 22 nt, synthetic construct
  source 1..22: mol_type = other RNA
ggcggaggttgcggtgacgtga

SEQ ID NO: 141084 - RNA, 22 nt, synthetic construct
  source 1..22: mol_type = other RNA
ggcggatgccggtaatcacagc

SEQ ID NO: 141085 - RNA, 22 nt, synthetic construct
  source 1..22: mol_type = other RNA
ggcggctgaggcagcccgacct

SEQ ID NO: 141086 - RNA, 22 nt, synthetic construct
  source 1..22: mol_type = other RNA
ggcggctggatcgcttgaggtc

SEQ ID NO: 141087 - RNA, 22 nt, synthetic construct
  source 1..22: mol_type = other RNA
ggcggctttgtggagtggaggg

SEQ ID NO: 141088 - RNA, 22 nt, synthetic construct
  source 1..22: mol_type = other RNA
ggcgggcttcgcctttgttgcc

SEQ ID NO: 141089 - RNA, 22 nt, synthetic construct
  source 1..22: mol_type = other RNA
ggcggtggggacagctcaatta

SEQ ID NO: 141090 - RNA, 22 nt, synthetic construct
  source 1..22: mol_type = other RNA
ggcgtacatgtagatatgggag

SEQ ID NO: 141091 - RNA, 22 nt, synthetic construct
  source 1..22: mol_type = other RNA
ggcgtagtatctcatgcttagg

SEQ ID NO: 141092 - RNA, 22 nt, synthetic construct
  source 1..22: mol_type = other RNA
ggcgtgagccaccacgtccggt

SEQ ID NO: 141093 - RNA, 22 nt, synthetic construct
  source 1..22: mol_type = other RNA
ggcgtgagccaccactcccggc

SEQ ID NO: 141094 - RNA, 22 nt, synthetic construct
  source 1..22: mol_type = other RNA
ggcgtgagccaccgcgcctggt

SEQ ID NO: 141095 - RNA, 22 nt, synthetic construct
  source 1..22: mol_type = other RNA
ggcgtgagccacctcatccggt

SEQ ID NO: 141096 - RNA, 22 nt, synthetic construct
  source 1..22: mol_type = other RNA
ggcgtgagccatcgcgcccagc

SEQ ID NO: 141097 - RNA, 22 nt, synthetic construct
  source 1..22: mol_type = other RNA
ggcgtgagcctccacacctggc

SEQ ID NO: 141098 - RNA, 22 nt, synthetic construct
  source 1..22: mol_type = other RNA
ggcgtggagcggtgtcttattg

SEQ ID NO: 141099 - RNA, 22 nt, synthetic construct
  source 1..22: mol_type = other RNA
ggcgtgggggctcacatctgta

SEQ ID NO: 141100 - RNA, 22 nt, synthetic construct
  source 1..22: mol_type = other RNA
ggcgtggtggcggatgccggta

SEQ ID NO: 141101 - RNA, 22 nt, synthetic construct
  source 1..22: mol_type = other RNA
ggcgtgtaaactgttggaaaaa

SEQ ID NO: 141102 - RNA, 22 nt, synthetic construct
  source 1..22: mol_type = other RNA
ggcgtgtgcccaggctgactta

SEQ ID NO: 141103 - RNA, 22 nt, synthetic construct
  source 1..22: mol_type = other RNA
ggcgttgagccatcatgcctgg

SEQ ID NO: 141104 - RNA, 22 nt, synthetic construct
  source 1..22: mol_type = other RNA
ggcgtttcgccatgttggccaa

SEQ ID NO: 141105 - RNA, 22 nt, synthetic construct
  source 1..22: mol_type = other RNA
ggctaaaacatacatgagaaat

SEQ ID NO: 141106 - RNA, 22 nt, synthetic construct
  source 1..22: mol_type = other RNA
ggctaaaagaccgcaagagttc

SEQ ID NO: 141107 - RNA, 22 nt, synthetic construct
  source 1..22: mol_type = other RNA
ggctaaatgctcacatttagtt

SEQ ID NO: 141108 - RNA, 22 nt, synthetic construct
  source 1..22: mol_type = other RNA
ggctaacaatcaaatttaacac

SEQ ID NO: 141109 - RNA, 22 nt, synthetic construct
  source 1..22: mol_type = other RNA
ggctaacagccaaagaaattgg

SEQ ID NO: 141110 - RNA, 22 nt, synthetic construct
  source 1..22: mol_type = other RNA
ggctaagatgaggtctcagcct

SEQ ID NO: 141111 - RNA, 22 nt, synthetic construct
  source 1..22: mol_type = other RNA
ggctaagcatgtaacttgctta

SEQ ID NO: 141112 - RNA, 22 nt, synthetic construct
  source 1..22: mol_type = other RNA
ggctaaggtggagtggtggata

SEQ ID NO: 141113 - RNA, 22 nt, synthetic construct
  source 1..22: mol_type = other RNA
ggctaagtagtggcagccccgc

SEQ ID NO: 141114 - RNA, 22 nt, synthetic construct
  source 1..22: mol_type = other RNA
ggctaagttgagaaactatcca

SEQ ID NO: 141115 - RNA, 22 nt, synthetic construct
  source 1..22: mol_type = other RNA
ggctaatgtggcttgcaaggcc

SEQ ID NO: 141116 - RNA, 22 nt, synthetic construct
  source 1..22: mol_type = other RNA
ggctaatgtgtgttccagacaa

SEQ ID NO: 141117 - RNA, 22 nt, synthetic construct
  source 1..22: mol_type = other RNA
ggctaatttttaaatgttttgc

SEQ ID NO: 141118 - RNA, 22 nt, synthetic construct
  source 1..22: mol_type = other RNA
ggctaattttttctgtaatgtt

SEQ ID NO: 141119 - RNA, 22 nt, synthetic construct
  source 1..22: mol_type = other RNA
ggctacaccctgggaaagcctg

SEQ ID NO: 141120 - RNA, 22 nt, synthetic construct
  source 1..22: mol_type = other RNA
ggctactgtaaacaatgctgct

SEQ ID NO: 141121 - RNA, 22 nt, synthetic construct
  source 1..22: mol_type = other RNA
ggctagaaacttggattgtgtg

SEQ ID NO: 141122 - RNA, 22 nt, synthetic construct
  source 1..22: mol_type = other RNA
ggctagaagcatctgatacact

SEQ ID NO: 141123 - RNA, 22 nt, synthetic construct
  source 1..22: mol_type = other RNA
ggctagaagtcccagttcaagg

SEQ ID NO: 141124 - RNA, 22 nt, synthetic construct
  source 1..22: mol_type = other RNA
ggctagacggaaaaacattcta

SEQ ID NO: 141125 - RNA, 22 nt, synthetic construct
  source 1..22: mol_type = other RNA
ggctagactaagaaaaacagaa

SEQ ID NO: 141126 - RNA, 22 nt, synthetic construct
  source 1..22: mol_type = other RNA
ggctagagccaggaagtcagca

SEQ ID NO: 141127 - RNA, 22 nt, synthetic construct
  source 1..22: mol_type = other RNA
ggctagagctcacacgagaagg

SEQ ID NO: 141128 - RNA, 22 nt, synthetic construct
  source 1..22: mol_type = other RNA
ggctagcacagaggcaacagtc

SEQ ID NO: 141129 - RNA, 22 nt, synthetic construct
  source 1..22: mol_type = other RNA
ggctaggatttcagtaaatgaa

SEQ ID NO: 141130 - RNA, 22 nt, synthetic construct
  source 1..22: mol_type = other RNA
ggctagggaagcagttgatgca

SEQ ID NO: 141131 - RNA, 22 nt, synthetic construct
  source 1..22: mol_type = other RNA
ggctaggtgacctgccagagtt

SEQ ID NO: 141132 - RNA, 22 nt, synthetic construct
  source 1..22: mol_type = other RNA
ggctagtaggcaacatccctat

SEQ ID NO: 141133 - RNA, 22 nt, synthetic construct
  source 1..22: mol_type = other RNA
ggctagtgtgttgactgacata

SEQ ID NO: 141134 - RNA, 22 nt, synthetic construct
  source 1..22: mol_type = other RNA
ggctataaccacgagtaatgga

SEQ ID NO: 141135 - RNA, 22 nt, synthetic construct
  source 1..22: mol_type = other RNA
ggctatctttactttcagctca

SEQ ID NO: 141136 - RNA, 22 nt, synthetic construct
  source 1..22: mol_type = other RNA
ggctattaactttgaaatcaga

SEQ ID NO: 141137 - RNA, 22 nt, synthetic construct
  source 1..22: mol_type = other RNA
ggctattaagtattgcattgaa

SEQ ID NO: 141138 - RNA, 22 nt, synthetic construct
  source 1..22: mol_type = other RNA
ggctattagttaaccttctggg

SEQ ID NO: 141139 - RNA, 22 nt, synthetic construct
  source 1..22: mol_type = other RNA
ggctattgtcagtaattctgca

SEQ ID NO: 141140 - RNA, 22 nt, synthetic construct
  source 1..22: mol_type = other RNA
ggctattgttttgcaagattaa

SEQ ID NO: 141141 - RNA, 22 nt, synthetic construct
  source 1..22: mol_type = other RNA
ggctcaacgcctgtgatcccag

SEQ ID NO: 141142 - RNA, 22 nt, synthetic construct
  source 1..22: mol_type = other RNA
ggctcaagccatcctccagcct

SEQ ID NO: 141143 - RNA, 22 nt, synthetic construct
  source 1..22: mol_type = other RNA
ggctcaagtaagtgaaatcata

SEQ ID NO: 141144 - RNA, 22 nt, synthetic construct
  source 1..22: mol_type = other RNA
ggctcaatacctgaaaagtgta

SEQ ID NO: 141145 - RNA, 22 nt, synthetic construct
  source 1..22: mol_type = other RNA
ggctcaatggttaagactgctg

SEQ ID NO: 141146 - RNA, 22 nt, synthetic construct
  source 1..22: mol_type = other RNA
ggctcacagtgctccatagctt

SEQ ID NO: 141147 - RNA, 22 nt, synthetic construct
  source 1..22: mol_type = other RNA
ggctcacattgtatttctgtta

SEQ ID NO: 141148 - RNA, 22 nt, synthetic construct
  source 1..22: mol_type = other RNA
ggctcactcatttccgttgctg

SEQ ID NO: 141149 - RNA, 22 nt, synthetic construct
  source 1..22: mol_type = other RNA
ggctcagaaacaacaacaacaa

SEQ ID NO: 141150 - RNA, 22 nt, synthetic construct
  source 1..22: mol_type = other RNA
ggctcagcccctcatcctccgt

SEQ ID NO: 141151 - RNA, 22 nt, synthetic construct
  source 1..22: mol_type = other RNA
ggctcaggcctgttgtgaggat

SEQ ID NO: 141152 - RNA, 22 nt, synthetic construct
  source 1..22: mol_type = other RNA
ggctcagtctgtttgccatctt

SEQ ID NO: 141153 - RNA, 22 nt, synthetic construct
  source 1..22: mol_type = other RNA
ggctcatacttgctttattact

SEQ ID NO: 141154 - RNA, 22 nt, synthetic construct
  source 1..22: mol_type = other RNA
ggctcatctaagcctacctccc

SEQ ID NO: 141155 - RNA, 22 nt, synthetic construct
  source 1..22: mol_type = other RNA
ggctccacttgggtggaagctg

SEQ ID NO: 141156 - RNA, 22 nt, synthetic construct
  source 1..22: mol_type = other RNA
ggctccaggtagaatgaaaatt

SEQ ID NO: 141157 - RNA, 22 nt, synthetic construct
  source 1..22: mol_type = other RNA
ggctcccagtgcccacctgaca

SEQ ID NO: 141158 - RNA, 22 nt, synthetic construct
  source 1..22: mol_type = other RNA
ggctcccatgattcaaaatgtg

SEQ ID NO: 141159 - RNA, 22 nt, synthetic construct
  source 1..22: mol_type = other RNA
ggctcccttccagcgtgtgcat

SEQ ID NO: 141160 - RNA, 22 nt, synthetic construct
  source 1..22: mol_type = other RNA
ggctcctccaaggctgcccgct

SEQ ID NO: 141161 - RNA, 22 nt, synthetic construct
  source 1..22: mol_type = other RNA
ggctcctcccggctaagatgag

SEQ ID NO: 141162 - RNA, 22 nt, synthetic construct
  source 1..22: mol_type = other RNA
ggctcctgagaaccggaacttg

SEQ ID NO: 141163 - RNA, 22 nt, synthetic construct
  source 1..22: mol_type = other RNA
ggctcctgcagacatgcacgag

SEQ ID NO: 141164 - RNA, 22 nt, synthetic construct
  source 1..22: mol_type = other RNA
ggctccttaccactataatcca

SEQ ID NO: 141165 - RNA, 22 nt, synthetic construct
  source 1..22: mol_type = other RNA
ggctcgcagcatccctgccgcg

SEQ ID NO: 141166 - RNA, 22 nt, synthetic construct
  source 1..22: mol_type = other RNA
ggctctaatgcaagagttaaaa

SEQ ID NO: 141167 - RNA, 22 nt, synthetic construct
  source 1..22: mol_type = other RNA
ggctctagcccagcttccggga

SEQ ID NO: 141168 - RNA, 22 nt, synthetic construct
  source 1..22: mol_type = other RNA
ggctctctattccaaatgtctg

SEQ ID NO: 141169 - RNA, 22 nt, synthetic construct
  source 1..22: mol_type = other RNA
ggctctcttcaccaactgaagc

SEQ ID NO: 141170 - RNA, 22 nt, synthetic construct
  source 1..22: mol_type = other RNA
ggctctgggtcagaatcgtgat

SEQ ID NO: 141171 - RNA, 22 nt, synthetic construct
  source 1..22: mol_type = other RNA
ggctctgtcacccttgtaatca

SEQ ID NO: 141172 - RNA, 22 nt, synthetic construct
  source 1..22: mol_type = other RNA
ggctctgtgctgagatggtcag

SEQ ID NO: 141173 - RNA, 22 nt, synthetic construct
  source 1..22: mol_type = other RNA
ggctctgtggtttcttgaatct

SEQ ID NO: 141174 - RNA, 22 nt, synthetic construct
  source 1..22: mol_type = other RNA
ggctcttagaaaatatatactg

SEQ ID NO: 141175 - RNA, 22 nt, synthetic construct
  source 1..22: mol_type = other RNA
ggctctttccactctctggctg

SEQ ID NO: 141176 - RNA, 22 nt, synthetic construct
  source 1..22: mol_type = other RNA
ggctgaaaaacacctcagttaa

SEQ ID NO: 141177 - RNA, 22 nt, synthetic construct
  source 1..22: mol_type = other RNA
ggctgaaagagaaagaagtaat

SEQ ID NO: 141178 - RNA, 22 nt, synthetic construct
  source 1..22: mol_type = other RNA
ggctgaaatgctgtaactgact

SEQ ID NO: 141179 - RNA, 22 nt, synthetic construct
  source 1..22: mol_type = other RNA
ggctgaacaatattccatttta

SEQ ID NO: 141180 - RNA, 22 nt, synthetic construct
  source 1..22: mol_type = other RNA
ggctgaactgctgacagattaa

SEQ ID NO: 141181 - RNA, 22 nt, synthetic construct
  source 1..22: mol_type = other RNA
ggctgaagcaggctttttaccc

SEQ ID NO: 141182 - RNA, 22 nt, synthetic construct
  source 1..22: mol_type = other RNA
ggctgaagggaggaaaaaacag

SEQ ID NO: 141183 - RNA, 22 nt, synthetic construct
  source 1..22: mol_type = other RNA
ggctgacatgtgtaaaacatct

SEQ ID NO: 141184 - RNA, 22 nt, synthetic construct
  source 1..22: mol_type = other RNA
ggctgacctggtactctatgat

SEQ ID NO: 141185 - RNA, 22 nt, synthetic construct
  source 1..22: mol_type = other RNA
ggctgacttagagggcttcatg

SEQ ID NO: 141186 - RNA, 22 nt, synthetic construct
  source 1..22: mol_type = other RNA
ggctgagacctcatcttagccg

SEQ ID NO: 141187 - RNA, 22 nt, synthetic construct
  source 1..22: mol_type = other RNA
ggctgagccttcagaactcttc

SEQ ID NO: 141188 - RNA, 22 nt, synthetic construct
  source 1..22: mol_type = other RNA
ggctgaggattggagactgata

SEQ ID NO: 141189 - RNA, 22 nt, synthetic construct
  source 1..22: mol_type = other RNA
ggctgaggcagcccgacctcca

SEQ ID NO: 141190 - RNA, 22 nt, synthetic construct
  source 1..22: mol_type = other RNA
ggctgaggcaggagaactgcct

SEQ ID NO: 141191 - RNA, 22 nt, synthetic construct
  source 1..22: mol_type = other RNA
ggctgaggcaggagcatagctt

SEQ ID NO: 141192 - RNA, 22 nt, synthetic construct
  source 1..22: mol_type = other RNA
ggctgaggcaggaggcacctga

SEQ ID NO: 141193 - RNA, 22 nt, synthetic construct
  source 1..22: mol_type = other RNA
ggctgaggccggaggattgctt

SEQ ID NO: 141194 - RNA, 22 nt, synthetic construct
  source 1..22: mol_type = other RNA
ggctgaggcggaaggattgcct

SEQ ID NO: 141195 - RNA, 22 nt, synthetic construct
  source 1..22: mol_type = other RNA
ggctgaggcggctggatcgctt

SEQ ID NO: 141196 - RNA, 22 nt, synthetic construct
  source 1..22: mol_type = other RNA
ggctgaggctggggaattgcat

SEQ ID NO: 141197 - RNA, 22 nt, synthetic construct
  source 1..22: mol_type = other RNA
ggctgagtatgggtctccattt

SEQ ID NO: 141198 - RNA, 22 nt, synthetic construct
  source 1..22: mol_type = other RNA
ggctgattataaccttgaactt

SEQ ID NO: 141199 - RNA, 22 nt, synthetic construct
  source 1..22: mol_type = other RNA
ggctgcaagcactggtaaggaa

SEQ ID NO: 141200 - RNA, 22 nt, synthetic construct
  source 1..22: mol_type = other RNA
ggctgcaattgcgcagaactgg

SEQ ID NO: 141201 - RNA, 22 nt, synthetic construct
  source 1..22: mol_type = other RNA
ggctgcaccattttttcaccag

SEQ ID NO: 141202 - RNA, 22 nt, synthetic construct
  source 1..22: mol_type = other RNA
ggctgcaccctcctcctcctgg

SEQ ID NO: 141203 - RNA, 22 nt, synthetic construct
  source 1..22: mol_type = other RNA
ggctgcagggcttctgaaggtg

SEQ ID NO: 141204 - RNA, 22 nt, synthetic construct
  source 1..22: mol_type = other RNA
ggctgcagtgagctccagcctg

SEQ ID NO: 141205 - RNA, 22 nt, synthetic construct
  source 1..22: mol_type = other RNA
ggctgcatcatggtgggccttg

SEQ ID NO: 141206 - RNA, 22 nt, synthetic construct
  source 1..22: mol_type = other RNA
ggctgccactacttagcccctg

SEQ ID NO: 141207 - RNA, 22 nt, synthetic construct
  source 1..22: mol_type = other RNA
ggctgccagcaccagatactca

SEQ ID NO: 141208 - RNA, 22 nt, synthetic construct
  source 1..22: mol_type = other RNA
ggctgcctcagccgccgcagag

SEQ ID NO: 141209 - RNA, 22 nt, synthetic construct
  source 1..22: mol_type = other RNA
ggctgcgccactgcactccagc

SEQ ID NO: 141210 - RNA, 22 nt, synthetic construct
  source 1..22: mol_type = other RNA
ggctggaaataatttccctcag

SEQ ID NO: 141211 - RNA, 22 nt, synthetic construct
  source 1..22: mol_type = other RNA
ggctggaagaattttaagccta

SEQ ID NO: 141212 - RNA, 22 nt, synthetic construct
  source 1..22: mol_type = other RNA
ggctggaatggtgaagaatgtg

SEQ ID NO: 141213 - RNA, 22 nt, synthetic construct
  source 1..22: mol_type = other RNA
ggctggacataagggtctgttt

SEQ ID NO: 141214 - RNA, 22 nt, synthetic construct
  source 1..22: mol_type = other RNA
ggctggagctcactgcagcctc

SEQ ID NO: 141215 - RNA, 22 nt, synthetic construct
  source 1..22: mol_type = other RNA
ggctggaggatggcttgagccc

SEQ ID NO: 141216 - RNA, 22 nt, synthetic construct
  source 1..22: mol_type = other RNA
ggctggagtgcaatggtgggat

SEQ ID NO: 141217 - RNA, 22 nt, synthetic construct
  source 1..22: mol_type = other RNA
ggctggagtggagtggcatgat

SEQ ID NO: 141218 - RNA, 22 nt, synthetic construct
  source 1..22: mol_type = other RNA
ggctggatcgcttgaggtcagg

SEQ ID NO: 141219 - RNA, 22 nt, synthetic construct
  source 1..22: mol_type = other RNA
ggctggcactttcctgataagg

SEQ ID NO: 141220 - RNA, 22 nt, synthetic construct
  source 1..22: mol_type = other RNA
ggctggctctttccactctctg

SEQ ID NO: 141221 - RNA, 22 nt, synthetic construct
  source 1..22: mol_type = other RNA
ggctgggagcttatcaggcttg

SEQ ID NO: 141222 - RNA, 22 nt, synthetic construct
  source 1..22: mol_type = other RNA
ggctgggagtacaagaccagcc

SEQ ID NO: 141223 - RNA, 22 nt, synthetic construct
  source 1..22: mol_type = other RNA
ggctgggctttctccaggggcg

SEQ ID NO: 141224 - RNA, 22 nt, synthetic construct
  source 1..22: mol_type = other RNA
ggctggggaattgcatgagact

SEQ ID NO: 141225 - RNA, 22 nt, synthetic construct
  source 1..22: mol_type = other RNA
ggctgggggatccaggggaata

SEQ ID NO: 141226 - RNA, 22 nt, synthetic construct
  source 1..22: mol_type = other RNA
ggctggtctcaaactccaagtc

SEQ ID NO: 141227 - RNA, 22 nt, synthetic construct
  source 1..22: mol_type = other RNA
ggctggtcttgtactcccagcc

SEQ ID NO: 141228 - RNA, 22 nt, synthetic construct
  source 1..22: mol_type = other RNA
ggctggttccaaacttctgacc

SEQ ID NO: 141229 - RNA, 22 nt, synthetic construct
  source 1..22: mol_type = other RNA
ggctgtactaagcctatgtaag

SEQ ID NO: 141230 - RNA, 22 nt, synthetic construct
  source 1..22: mol_type = other RNA
ggctgtattgtaggaaagcctg

SEQ ID NO: 141231 - RNA, 22 nt, synthetic construct
  source 1..22: mol_type = other RNA
ggctgtcaaaaatgtgtctagt

SEQ ID NO: 141232 - RNA, 22 nt, synthetic construct
  source 1..22: mol_type = other RNA
ggctgtcccaaatgcaccaaca

SEQ ID NO: 141233 - RNA, 22 nt, synthetic construct
  source 1..22: mol_type = other RNA
ggctgtctccaacgctttttat

SEQ ID NO: 141234 - RNA, 22 nt, synthetic construct
  source 1..22: mol_type = other RNA
ggctgtgccaactctggcaggt

SEQ ID NO: 141235 - RNA, 22 nt, synthetic construct
  source 1..22: mol_type = other RNA
ggctgttaccatttgaccttcc

SEQ ID NO: 141236 - RNA, 22 nt, synthetic construct
  source 1..22: mol_type = other RNA
ggctgttagccttgccattctc

SEQ ID NO: 141237 - RNA, 22 nt, synthetic construct
  source 1..22: mol_type = other RNA
ggctgttaggtattattttcac

SEQ ID NO: 141238 - RNA, 22 nt, synthetic construct
  source 1..22: mol_type = other RNA
ggctgttattagagttgtaaca

SEQ ID NO: 141239 - RNA, 22 nt, synthetic construct
  source 1..22: mol_type = other RNA
ggctgttcaatttagaaaatgc

SEQ ID NO: 141240 - RNA, 22 nt, synthetic construct
  source 1..22: mol_type = other RNA
ggctgttcccagataacagtgg

SEQ ID NO: 141241 - RNA, 22 nt, synthetic construct
  source 1..22: mol_type = other RNA
ggctgtttgagatctttcttat

SEQ ID NO: 141242 - RNA, 22 nt, synthetic construct
  source 1..22: mol_type = other RNA
ggcttaaaattcttccagcctg

SEQ ID NO: 141243 - RNA, 22 nt, synthetic construct
  source 1..22: mol_type = other RNA
ggcttaacacctttgtattcat

SEQ ID NO: 141244 - RNA, 22 nt, synthetic construct
  source 1..22: mol_type = other RNA
ggcttaacatttgaactcactg

SEQ ID NO: 141245 - RNA, 22 nt, synthetic construct
  source 1..22: mol_type = other RNA
ggcttaaggaaataaatatgta

SEQ ID NO: 141246 - RNA, 22 nt, synthetic construct
  source 1..22: mol_type = other RNA
ggcttaatgcatataaaaacaa

SEQ ID NO: 141247 - RNA, 22 nt, synthetic construct
  source 1..22: mol_type = other RNA
ggcttactgcaacctccgtttt

SEQ ID NO: 141248 - RNA, 22 nt, synthetic construct
  source 1..22: mol_type = other RNA
ggcttagaaatgaagatggcct

SEQ ID NO: 141249 - RNA, 22 nt, synthetic construct
  source 1..22: mol_type = other RNA
ggcttagataggatgggcagac

SEQ ID NO: 141250 - RNA, 22 nt, synthetic construct
  source 1..22: mol_type = other RNA
ggcttagatgagcccaggagtt

SEQ ID NO: 141251 - RNA, 22 nt, synthetic construct
  source 1..22: mol_type = other RNA
ggcttaggatcaccaaagactt

SEQ ID NO: 141252 - RNA, 22 nt, synthetic construct
  source 1..22: mol_type = other RNA
ggcttagtacagccatcaacct

SEQ ID NO: 141253 - RNA, 22 nt, synthetic construct
  source 1..22: mol_type = other RNA
ggcttatcagatggtgatacct

SEQ ID NO: 141254 - RNA, 22 nt, synthetic construct
  source 1..22: mol_type = other RNA
ggcttcaatatgcagtatgtgc

SEQ ID NO: 141255 - RNA, 22 nt, synthetic construct
  source 1..22: mol_type = other RNA
ggcttcactttcgtcatctata

SEQ ID NO: 141256 - RNA, 22 nt, synthetic construct
  source 1..22: mol_type = other RNA
ggcttcagtgccaacacatggg

SEQ ID NO: 141257 - RNA, 22 nt, synthetic construct
  source 1..22: mol_type = other RNA
ggcttcatgctgggagaccagg

SEQ ID NO: 141258 - RNA, 22 nt, synthetic construct
  source 1..22: mol_type = other RNA
ggcttcatgggtggaaattaaa

SEQ ID NO: 141259 - RNA, 22 nt, synthetic construct
  source 1..22: mol_type = other RNA
ggcttcctaactggtctccttt

SEQ ID NO: 141260 - RNA, 22 nt, synthetic construct
  source 1..22: mol_type = other RNA
ggcttcgagttctgggagttca

SEQ ID NO: 141261 - RNA, 22 nt, synthetic construct
  source 1..22: mol_type = other RNA
ggcttcgcctttgttgccaggt

SEQ ID NO: 141262 - RNA, 22 nt, synthetic construct
  source 1..22: mol_type = other RNA
ggcttctcaaactgtgtgcttg

SEQ ID NO: 141263 - RNA, 22 nt, synthetic construct
  source 1..22: mol_type = other RNA
ggcttctgaaggtgcctgccat

SEQ ID NO: 141264 - RNA, 22 nt, synthetic construct
  source 1..22: mol_type = other RNA
ggcttgaacccgaggtgcacaa

SEQ ID NO: 141265 - RNA, 22 nt, synthetic construct
  source 1..22: mol_type = other RNA
ggcttgagcccagggggtcgag

SEQ ID NO: 141266 - RNA, 22 nt, synthetic construct
  source 1..22: mol_type = other RNA
ggcttgagtctgtgctctgtat

SEQ ID NO: 141267 - RNA, 22 nt, synthetic construct
  source 1..22: mol_type = other RNA
ggcttgatctagtaaatataaa

SEQ ID NO: 141268 - RNA, 22 nt, synthetic construct
  source 1..22: mol_type = other RNA
ggcttgattagcttcctcagga

SEQ ID NO: 141269 - RNA, 22 nt, synthetic construct
  source 1..22: mol_type = other RNA
ggcttgcaaggcccaccatgat

SEQ ID NO: 141270 - RNA, 22 nt, synthetic construct
  source 1..22: mol_type = other RNA
ggcttgctttggctagaagcat

SEQ ID NO: 141271 - RNA, 22 nt, synthetic construct
  source 1..22: mol_type = other RNA
ggcttggaaaacaaattgcatc

SEQ ID NO: 141272 - RNA, 22 nt, synthetic construct
  source 1..22: mol_type = other RNA
ggcttggggaacagtttagcaa

SEQ ID NO: 141273 - RNA, 22 nt, synthetic construct
  source 1..22: mol_type = other RNA
ggcttgggtgacctcatgtaac

SEQ ID NO: 141274 - RNA, 22 nt, synthetic construct
  source 1..22: mol_type = other RNA
ggcttggtatgcatcttgaact

SEQ ID NO: 141275 - RNA, 22 nt, synthetic construct
  source 1..22: mol_type = other RNA
ggcttggtggcccacacctgca

SEQ ID NO: 141276 - RNA, 22 nt, synthetic construct
  source 1..22: mol_type = other RNA
ggcttggttggaaaagaaagct

SEQ ID NO: 141277 - RNA, 22 nt, synthetic construct
  source 1..22: mol_type = other RNA
ggcttgtgacatcaagggtggt

SEQ ID NO: 141278 - RNA, 22 nt, synthetic construct
  source 1..22: mol_type = other RNA
ggcttgtgcatcagaattccat

SEQ ID NO: 141279 - RNA, 22 nt, synthetic construct
  source 1..22: mol_type = other RNA
ggcttgtggctacaccctggga

SEQ ID NO: 141280 - RNA, 22 nt, synthetic construct
  source 1..22: mol_type = other RNA
ggctttaagcagaaagttacta

SEQ ID NO: 141281 - RNA, 22 nt, synthetic construct
  source 1..22: mol_type = other RNA
ggctttaaggcgcagacacacc

SEQ ID NO: 141282 - RNA, 22 nt, synthetic construct
  source 1..22: mol_type = other RNA
ggctttactgtattaggatgtg

SEQ ID NO: 141283 - RNA, 22 nt, synthetic construct
  source 1..22: mol_type = other RNA
ggctttagatggtaaaacaaat

SEQ ID NO: 141284 - RNA, 22 nt, synthetic construct
  source 1..22: mol_type = other RNA
ggctttagatttatcaatagca

SEQ ID NO: 141285 - RNA, 22 nt, synthetic construct
  source 1..22: mol_type = other RNA
ggctttatgagacacacgagta

SEQ ID NO: 141286 - RNA, 22 nt, synthetic construct
  source 1..22: mol_type = other RNA
ggctttcaatagtgggtagaag

SEQ ID NO: 141287 - RNA, 22 nt, synthetic construct
  source 1..22: mol_type = other RNA
ggctttcccagggtgtagccac

SEQ ID NO: 141288 - RNA, 22 nt, synthetic construct
  source 1..22: mol_type = other RNA
ggctttcgtatggaagatggga

SEQ ID NO: 141289 - RNA, 22 nt, synthetic construct
  source 1..22: mol_type = other RNA
ggctttctccaggggcggcccc

SEQ ID NO: 141290 - RNA, 22 nt, synthetic construct
  source 1..22: mol_type = other RNA
ggctttctgtgtaatactgtag

SEQ ID NO: 141291 - RNA, 22 nt, synthetic construct
  source 1..22: mol_type = other RNA
ggctttgacttctcagggcctg

SEQ ID NO: 141292 - RNA, 22 nt, synthetic construct
  source 1..22: mol_type = other RNA
ggctttgagaaaggtttcttca

SEQ ID NO: 141293 - RNA, 22 nt, synthetic construct
  source 1..22: mol_type = other RNA
ggctttgtgaagggaggtaggc

SEQ ID NO: 141294 - RNA, 22 nt, synthetic construct
  source 1..22: mol_type = other RNA
ggctttgtggagtggaggggca

SEQ ID NO: 141295 - RNA, 22 nt, synthetic construct
  source 1..22: mol_type = other RNA
ggctttgtgttggtgtttctga

SEQ ID NO: 141296 - RNA, 22 nt, synthetic construct
  source 1..22: mol_type = other RNA
ggcttttattggtaatgttata

SEQ ID NO: 141297 - RNA, 22 nt, synthetic construct
  source 1..22: mol_type = other RNA
ggcttttcatagtcatcattat

SEQ ID NO: 141298 - RNA, 22 nt, synthetic construct
  source 1..22: mol_type = other RNA
ggcttttcatatacgtatttat

SEQ ID NO: 141299 - RNA, 22 nt, synthetic construct
  source 1..22: mol_type = other RNA
ggcttttgaacactctgcaatt

SEQ ID NO: 141300 - RNA, 22 nt, synthetic construct
  source 1..22: mol_type = other RNA
ggcttttgagtgtaaggtgttt

SEQ ID NO: 141301 - RNA, 22 nt, synthetic construct
  source 1..22: mol_type = other RNA
ggcttttggattttctttctaa

SEQ ID NO: 141302 - RNA, 22 nt, synthetic construct
  source 1..22: mol_type = other RNA
ggcttttggcagcgtaactcca

SEQ ID NO: 141303 - RNA, 22 nt, synthetic construct
  source 1..22: mol_type = other RNA
ggctttttacccggagaggtga

SEQ ID NO: 141304 - RNA, 22 nt, synthetic construct
  source 1..22: mol_type = other RNA
ggctttttacgatgaaattgac

SEQ ID NO: 141305 - RNA, 22 nt, synthetic construct
  source 1..22: mol_type = other RNA
ggctttttatatttccgatgat

SEQ ID NO: 141306 - RNA, 22 nt, synthetic construct
  source 1..22: mol_type = other RNA
gggaaaacaattacttgagagc

SEQ ID NO: 141307 - RNA, 22 nt, synthetic construct
  source 1..22: mol_type = other RNA
gggaaaacacccttgaaaattt

SEQ ID NO: 141308 - RNA, 22 nt, synthetic construct
  source 1..22: mol_type = other RNA
gggaaaactacatgtaaaaact

SEQ ID NO: 141309 - RNA, 22 nt, synthetic construct
  source 1..22: mol_type = other RNA
gggaaaactccaagtgtaaaaa

SEQ ID NO: 141310 - RNA, 22 nt, synthetic construct
  source 1..22: mol_type = other RNA
gggaaaaggatttgtttgtgaa

SEQ ID NO: 141311 - RNA, 22 nt, synthetic construct
  source 1..22: mol_type = other RNA
gggaaaatctctgacttcattc

SEQ ID NO: 141312 - RNA, 22 nt, synthetic construct
  source 1..22: mol_type = other RNA
gggaaaatcttggaacttttat

SEQ ID NO: 141313 - RNA, 22 nt, synthetic construct
  source 1..22: mol_type = other RNA
gggaaaattgacatttttcaaa

SEQ ID NO: 141314 - RNA, 22 nt, synthetic construct
  source 1..22: mol_type = other RNA
gggaaacactcataccaggttt

SEQ ID NO: 141315 - RNA, 22 nt, synthetic construct
  source 1..22: mol_type = other RNA
gggaaacagggttacagtatag

SEQ ID NO: 141316 - RNA, 22 nt, synthetic construct
  source 1..22: mol_type = other RNA
gggaaaccttactgtaatattg

SEQ ID NO: 141317 - RNA, 22 nt, synthetic construct
  source 1..22: mol_type = other RNA
gggaaactgtttttgcaattta

SEQ ID NO: 141318 - RNA, 22 nt, synthetic construct
  source 1..22: mol_type = other RNA
gggaaagacaggtagacatgag

SEQ ID NO: 141319 - RNA, 22 nt, synthetic construct
  source 1..22: mol_type = other RNA
gggaaagcctggctttagatgg

SEQ ID NO: 141320 - RNA, 22 nt, synthetic construct
  source 1..22: mol_type = other RNA
gggaaaggatgaccttgacaat

SEQ ID NO: 141321 - RNA, 22 nt, synthetic construct
  source 1..22: mol_type = other RNA
gggaaagtattcccaagatcat

SEQ ID NO: 141322 - RNA, 22 nt, synthetic construct
  source 1..22: mol_type = other RNA
gggaaatagatgcctagaaagg

SEQ ID NO: 141323 - RNA, 22 nt, synthetic construct
  source 1..22: mol_type = other RNA
gggaaatatgaaccacactgac

SEQ ID NO: 141324 - RNA, 22 nt, synthetic construct
  source 1..22: mol_type = other RNA
gggaaatcattcaggacactgg

SEQ ID NO: 141325 - RNA, 22 nt, synthetic construct
  source 1..22: mol_type = other RNA
gggaaatggagggccagaggag

SEQ ID NO: 141326 - RNA, 22 nt, synthetic construct
  source 1..22: mol_type = other RNA
gggaaattagatgatgttttga

SEQ ID NO: 141327 - RNA, 22 nt, synthetic construct
  source 1..22: mol_type = other RNA
gggaaattatttccagccttta

SEQ ID NO: 141328 - RNA, 22 nt, synthetic construct
  source 1..22: mol_type = other RNA
gggaacactaagaagatggttg

SEQ ID NO: 141329 - RNA, 22 nt, synthetic construct
  source 1..22: mol_type = other RNA
gggaacagcaggggaaggcttc

SEQ ID NO: 141330 - RNA, 22 nt, synthetic construct
  source 1..22: mol_type = other RNA
gggaacagcccctagcatgcag

SEQ ID NO: 141331 - RNA, 22 nt, synthetic construct
  source 1..22: mol_type = other RNA
gggaacagtttagcaatccaag

SEQ ID NO: 141332 - RNA, 22 nt, synthetic construct
  source 1..22: mol_type = other RNA
gggaacatgacatgtatttttt

SEQ ID NO: 141333 - RNA, 22 nt, synthetic construct
  source 1..22: mol_type = other RNA
gggaacattttcattttaactg

SEQ ID NO: 141334 - RNA, 22 nt, synthetic construct
  source 1..22: mol_type = other RNA
gggaaccgtaacttcttttctt

SEQ ID NO: 141335 - RNA, 22 nt, synthetic construct
  source 1..22: mol_type = other RNA
gggaactcttgtagtatttttg

SEQ ID NO: 141336 - RNA, 22 nt, synthetic construct
  source 1..22: mol_type = other RNA
gggaagaaaaaataaaggcttt

SEQ ID NO: 141337 - RNA, 22 nt, synthetic construct
  source 1..22: mol_type = other RNA
gggaagagagcattgcctttat

SEQ ID NO: 141338 - RNA, 22 nt, synthetic construct
  source 1..22: mol_type = other RNA
gggaagagctaagatgctattc

SEQ ID NO: 141339 - RNA, 22 nt, synthetic construct
  source 1..22: mol_type = other RNA
gggaagaggccacaaagtcccc

SEQ ID NO: 141340 - RNA, 22 nt, synthetic construct
  source 1..22: mol_type = other RNA
gggaagatagtactgaccatct

SEQ ID NO: 141341 - RNA, 22 nt, synthetic construct
  source 1..22: mol_type = other RNA
gggaagatgctccctctatggc

SEQ ID NO: 141342 - RNA, 22 nt, synthetic construct
  source 1..22: mol_type = other RNA
gggaagattggctttagattta

SEQ ID NO: 141343 - RNA, 22 nt, synthetic construct
  source 1..22: mol_type = other RNA
gggaagcaaaggattcggggga

SEQ ID NO: 141344 - RNA, 22 nt, synthetic construct
  source 1..22: mol_type = other RNA
gggaagcaggaactcatattag

SEQ ID NO: 141345 - RNA, 22 nt, synthetic construct
  source 1..22: mol_type = other RNA
gggaagcagttgatgcaatttg

SEQ ID NO: 141346 - RNA, 22 nt, synthetic construct
  source 1..22: mol_type = other RNA
gggaagcttttcatatacagat

SEQ ID NO: 141347 - RNA, 22 nt, synthetic construct
  source 1..22: mol_type = other RNA
gggaaggaattttcaggactca

SEQ ID NO: 141348 - RNA, 22 nt, synthetic construct
  source 1..22: mol_type = other RNA
gggaaggagtctgcccatccta

SEQ ID NO: 141349 - RNA, 22 nt, synthetic construct
  source 1..22: mol_type = other RNA
gggaaggatggccagtcatgtg

SEQ ID NO: 141350 - RNA, 22 nt, synthetic construct
  source 1..22: mol_type = other RNA
gggaaggccctgattgagatta

SEQ ID NO: 141351 - RNA, 22 nt, synthetic construct
  source 1..22: mol_type = other RNA
gggaaggctgcaagcactggta

SEQ ID NO: 141352 - RNA, 22 nt, synthetic construct
  source 1..22: mol_type = other RNA
gggaaggcttcgagttctggga

SEQ ID NO: 141353 - RNA, 22 nt, synthetic construct
  source 1..22: mol_type = other RNA
gggaaggtgcccgcgaaggcgt

SEQ ID NO: 141354 - RNA, 22 nt, synthetic construct
  source 1..22: mol_type = other RNA
gggaagtaaagatcaagctcgc

SEQ ID NO: 141355 - RNA, 22 nt, synthetic construct
  source 1..22: mol_type = other RNA
gggaagtactgagtcaaaacca

SEQ ID NO: 141356 - RNA, 22 nt, synthetic construct
  source 1..22: mol_type = other RNA
gggaagtggagtgcgagtgtga

SEQ ID NO: 141357 - RNA, 22 nt, synthetic construct
  source 1..22: mol_type = other RNA
gggaagttatgtagctgggatg

SEQ ID NO: 141358 - RNA, 22 nt, synthetic construct
  source 1..22: mol_type = other RNA
gggaagttttttcaaaatatac

SEQ ID NO: 141359 - RNA, 22 nt, synthetic construct
  source 1..22: mol_type = other RNA
gggaataagattttaggtcatt

SEQ ID NO: 141360 - RNA, 22 nt, synthetic construct
  source 1..22: mol_type = other RNA
gggaatactttcccatctctag

SEQ ID NO: 141361 - RNA, 22 nt, synthetic construct
  source 1..22: mol_type = other RNA
gggaatagaaagttagtgtcta

SEQ ID NO: 141362 - RNA, 22 nt, synthetic construct
  source 1..22: mol_type = other RNA
gggaatagacaaagacaagttc

SEQ ID NO: 141363 - RNA, 22 nt, synthetic construct
  source 1..22: mol_type = other RNA
gggaatcatgcagtacttgtct

SEQ ID NO: 141364 - RNA, 22 nt, synthetic construct
  source 1..22: mol_type = other RNA
gggaatctactcttttgttttt

SEQ ID NO: 141365 - RNA, 22 nt, synthetic construct
  source 1..22: mol_type = other RNA
gggaatctaggaaacactgctc

SEQ ID NO: 141366 - RNA, 22 nt, synthetic construct
  source 1..22: mol_type = other RNA
gggaatgcatatatctgtctgg

SEQ ID NO: 141367 - RNA, 22 nt, synthetic construct
  source 1..22: mol_type = other RNA
gggaatgcccctgtagcagaca

SEQ ID NO: 141368 - RNA, 22 nt, synthetic construct
  source 1..22: mol_type = other RNA
gggaatgctcataattaaagag

SEQ ID NO: 141369 - RNA, 22 nt, synthetic construct
  source 1..22: mol_type = other RNA
gggaatggggagctagagggta

SEQ ID NO: 141370 - RNA, 22 nt, synthetic construct
  source 1..22: mol_type = other RNA
gggaatggtactgcctccacag

SEQ ID NO: 141371 - RNA, 22 nt, synthetic construct
  source 1..22: mol_type = other RNA
gggaatgtggtcacactttttg

SEQ ID NO: 141372 - RNA, 22 nt, synthetic construct
  source 1..22: mol_type = other RNA
gggaattcagtcaccaaacgtt

SEQ ID NO: 141373 - RNA, 22 nt, synthetic construct
  source 1..22: mol_type = other RNA
gggaattgcatgagacttggag

SEQ ID NO: 141374 - RNA, 22 nt, synthetic construct
  source 1..22: mol_type = other RNA
gggaatttgttttaccatctaa

SEQ ID NO: 141375 - RNA, 22 nt, synthetic construct
  source 1..22: mol_type = other RNA
gggaattttactgatcttttct

SEQ ID NO: 141376 - RNA, 22 nt, synthetic construct
  source 1..22: mol_type = other RNA
gggaatttttcttacctaagca

SEQ ID NO: 141377 - RNA, 22 nt, synthetic construct
  source 1..22: mol_type = other RNA
gggacaagagtctgcagaccaa

SEQ ID NO: 141378 - RNA, 22 nt, synthetic construct
  source 1..22: mol_type = other RNA
gggacaagtgggtggatgggtg

SEQ ID NO: 141379 - RNA, 22 nt, synthetic construct
  source 1..22: mol_type = other RNA
gggacaatgccagggcgctcct

SEQ ID NO: 141380 - RNA, 22 nt, synthetic construct
  source 1..22: mol_type = other RNA
gggacagctcaattaagcaacc

SEQ ID NO: 141381 - RNA, 22 nt, synthetic construct
  source 1..22: mol_type = other RNA
gggacatagatgaaactaaatg

SEQ ID NO: 141382 - RNA, 22 nt, synthetic construct
  source 1..22: mol_type = other RNA
gggacatgaaggaaggattgga

SEQ ID NO: 141383 - RNA, 22 nt, synthetic construct
  source 1..22: mol_type = other RNA
gggacatgctctgataggataa

SEQ ID NO: 141384 - RNA, 22 nt, synthetic construct
  source 1..22: mol_type = other RNA
gggaccccgtctctgcaaaaaa

SEQ ID NO: 141385 - RNA, 22 nt, synthetic construct
  source 1..22: mol_type = other RNA
gggacccctccctgctttaaaa

SEQ ID NO: 141386 - RNA, 22 nt, synthetic construct
  source 1..22: mol_type = other RNA
gggacgaatgcatgggaggtaa

SEQ ID NO: 141387 - RNA, 22 nt, synthetic construct
  source 1..22: mol_type = other RNA
gggacgacgtatgcaacttact

SEQ ID NO: 141388 - RNA, 22 nt, synthetic construct
  source 1..22: mol_type = other RNA
gggacggggttttgccatgttg

SEQ ID NO: 141389 - RNA, 22 nt, synthetic construct
  source 1..22: mol_type = other RNA
gggactaacagggtctacaaaa

SEQ ID NO: 141390 - RNA, 22 nt, synthetic construct
  source 1..22: mol_type = other RNA
gggactacaggtgtgaaccacg

SEQ ID NO: 141391 - RNA, 22 nt, synthetic construct
  source 1..22: mol_type = other RNA
gggactcccatatctacatgta

SEQ ID NO: 141392 - RNA, 22 nt, synthetic construct
  source 1..22: mol_type = other RNA
gggactctaaactagttcaacc

SEQ ID NO: 141393 - RNA, 22 nt, synthetic construct
  source 1..22: mol_type = other RNA
gggactcttatggctataacca

SEQ ID NO: 141394 - RNA, 22 nt, synthetic construct
  source 1..22: mol_type = other RNA
gggactgaaaccagtgggtcag

SEQ ID NO: 141395 - RNA, 22 nt, synthetic construct
  source 1..22: mol_type = other RNA
gggactgagacagtattgtgct

SEQ ID NO: 141396 - RNA, 22 nt, synthetic construct
  source 1..22: mol_type = other RNA
gggactgagcagtgaaagtctc

SEQ ID NO: 141397 - RNA, 22 nt, synthetic construct
  source 1..22: mol_type = other RNA
gggactgatgaagaacctgttc

SEQ ID NO: 141398 - RNA, 22 nt, synthetic construct
  source 1..22: mol_type = other RNA
gggactgcaacagatctgagaa

SEQ ID NO: 141399 - RNA, 22 nt, synthetic construct
  source 1..22: mol_type = other RNA
gggactggagaacagtaaagtc

SEQ ID NO: 141400 - RNA, 22 nt, synthetic construct
  source 1..22: mol_type = other RNA
gggactggcctcggccaaccat

SEQ ID NO: 141401 - RNA, 22 nt, synthetic construct
  source 1..22: mol_type = other RNA
gggactgtcgaagcttaattta

SEQ ID NO: 141402 - RNA, 22 nt, synthetic construct
  source 1..22: mol_type = other RNA
gggacttatggagataaattac

SEQ ID NO: 141403 - RNA, 22 nt, synthetic construct
  source 1..22: mol_type = other RNA
gggacttcactagtgggtcggg

SEQ ID NO: 141404 - RNA, 22 nt, synthetic construct
  source 1..22: mol_type = other RNA
gggacttctagcctccagaaaa

SEQ ID NO: 141405 - RNA, 22 nt, synthetic construct
  source 1..22: mol_type = other RNA
gggacttgctctcttgcccaag

SEQ ID NO: 141406 - RNA, 22 nt, synthetic construct
  source 1..22: mol_type = other RNA
gggacttggaagtgaagtcaag

SEQ ID NO: 141407 - RNA, 22 nt, synthetic construct
  source 1..22: mol_type = other RNA
gggactttgatgttttacattt

SEQ ID NO: 141408 - RNA, 22 nt, synthetic construct
  source 1..22: mol_type = other RNA
gggactttgtggcctcttccct

SEQ ID NO: 141409 - RNA, 22 nt, synthetic construct
  source 1..22: mol_type = other RNA
gggagaaagaccaagagtgtgg

SEQ ID NO: 141410 - RNA, 22 nt, synthetic construct
  source 1..22: mol_type = other RNA
gggagaaagctaatttggaatt

SEQ ID NO: 141411 - RNA, 22 nt, synthetic construct
  source 1..22: mol_type = other RNA
gggagaacccaggaacagattc

SEQ ID NO: 141412 - RNA, 22 nt, synthetic construct
  source 1..22: mol_type = other RNA
gggagaagaaataaacgacacc

SEQ ID NO: 141413 - RNA, 22 nt, synthetic construct
  source 1..22: mol_type = other RNA
gggagaatggcaaggctaacag

SEQ ID NO: 141414 - RNA, 22 nt, synthetic construct
  source 1..22: mol_type = other RNA
gggagaattggtagtcaatgca

SEQ ID NO: 141415 - RNA, 22 nt, synthetic construct
  source 1..22: mol_type = other RNA
gggagaccaggagttcttatga

SEQ ID NO: 141416 - RNA, 22 nt, synthetic construct
  source 1..22: mol_type = other RNA
gggagaccgtggggggagggag

SEQ ID NO: 141417 - RNA, 22 nt, synthetic construct
  source 1..22: mol_type = other RNA
gggagacggcgagcttgatctt

SEQ ID NO: 141418 - RNA, 22 nt, synthetic construct
  source 1..22: mol_type = other RNA
gggagactgtgcaatgtgaaaa

SEQ ID NO: 141419 - RNA, 22 nt, synthetic construct
  source 1..22: mol_type = other RNA
gggagactttcactgctcagtc

SEQ ID NO: 141420 - RNA, 22 nt, synthetic construct
  source 1..22: mol_type = other RNA
gggagagagaaactttacactt

SEQ ID NO: 141421 - RNA, 22 nt, synthetic construct
  source 1..22: mol_type = other RNA
gggagagatgcctatgaaatct

SEQ ID NO: 141422 - RNA, 22 nt, synthetic construct
  source 1..22: mol_type = other RNA
gggagagcactggtttcagtac

SEQ ID NO: 141423 - RNA, 22 nt, synthetic construct
  source 1..22: mol_type = other RNA
gggagaggagcgccctggcatt

SEQ ID NO: 141424 - RNA, 22 nt, synthetic construct
  source 1..22: mol_type = other RNA
gggagaggcatgccgggacaag

SEQ ID NO: 141425 - RNA, 22 nt, synthetic construct
  source 1..22: mol_type = other RNA
gggagaggcctcatgtattttc

SEQ ID NO: 141426 - RNA, 22 nt, synthetic construct
  source 1..22: mol_type = other RNA
gggagagggagctctgtcttga

SEQ ID NO: 141427 - RNA, 22 nt, synthetic construct
  source 1..22: mol_type = other RNA
gggagagtgggcccagcagaag

SEQ ID NO: 141428 - RNA, 22 nt, synthetic construct
  source 1..22: mol_type = other RNA
gggagataccttgaaaggatac

SEQ ID NO: 141429 - RNA, 22 nt, synthetic construct
  source 1..22: mol_type = other RNA
gggagatacttgattacaaggg

SEQ ID NO: 141430 - RNA, 22 nt, synthetic construct
  source 1..22: mol_type = other RNA
gggagatatttcgcctagataa

SEQ ID NO: 141431 - RNA, 22 nt, synthetic construct
  source 1..22: mol_type = other RNA
gggagatggacactgcagatga

SEQ ID NO: 141432 - RNA, 22 nt, synthetic construct
  source 1..22: mol_type = other RNA
gggagatgtgtaattgtacctt

SEQ ID NO: 141433 - RNA, 22 nt, synthetic construct
  source 1..22: mol_type = other RNA
gggagcatatatactctgagac

SEQ ID NO: 141434 - RNA, 22 nt, synthetic construct
  source 1..22: mol_type = other RNA
gggagcatcttcccatgaacat

SEQ ID NO: 141435 - RNA, 22 nt, synthetic construct
  source 1..22: mol_type = other RNA
gggagcatgcacacaggagaac

SEQ ID NO: 141436 - RNA, 22 nt, synthetic construct
  source 1..22: mol_type = other RNA
gggagccaaacttgaaccttcc

SEQ ID NO: 141437 - RNA, 22 nt, synthetic construct
  source 1..22: mol_type = other RNA
gggagcccaagcacactttcct

SEQ ID NO: 141438 - RNA, 22 nt, synthetic construct
  source 1..22: mol_type = other RNA
gggagccctccaggatccagtc

SEQ ID NO: 141439 - RNA, 22 nt, synthetic construct
  source 1..22: mol_type = other RNA
gggagcgccacgtgaagatgga

SEQ ID NO: 141440 - RNA, 22 nt, synthetic construct
  source 1..22: mol_type = other RNA
gggagctagagggtaagaccaa

SEQ ID NO: 141441 - RNA, 22 nt, synthetic construct
  source 1..22: mol_type = other RNA
gggagctctgtcttgatgatag

SEQ ID NO: 141442 - RNA, 22 nt, synthetic construct
  source 1..22: mol_type = other RNA
gggagcttatcaggcttgagtc

SEQ ID NO: 141443 - RNA, 22 nt, synthetic construct
  source 1..22: mol_type = other RNA
gggagctttcattattaccagg

SEQ ID NO: 141444 - RNA, 22 nt, synthetic construct
  source 1..22: mol_type = other RNA
gggagcttttgaaactgagcat

SEQ ID NO: 141445 - RNA, 22 nt, synthetic construct
  source 1..22: mol_type = other RNA
gggaggaaaaaacagttgctat

SEQ ID NO: 141446 - RNA, 22 nt, synthetic construct
  source 1..22: mol_type = other RNA
gggaggaatccttcagtcagtt

SEQ ID NO: 141447 - RNA, 22 nt, synthetic construct
  source 1..22: mol_type = other RNA
gggaggagccaagtaaaagcaa

SEQ ID NO: 141448 - RNA, 22 nt, synthetic construct
  source 1..22: mol_type = other RNA
gggaggaggtcatactggagca

SEQ ID NO: 141449 - RNA, 22 nt, synthetic construct
  source 1..22: mol_type = other RNA
gggaggattgtttgaggctggg

SEQ ID NO: 141450 - RNA, 22 nt, synthetic construct
  source 1..22: mol_type = other RNA
gggaggcagatgttgcggtgag

SEQ ID NO: 141451 - RNA, 22 nt, synthetic construct
  source 1..22: mol_type = other RNA
gggaggccatcttcatttctaa

SEQ ID NO: 141452 - RNA, 22 nt, synthetic construct
  source 1..22: mol_type = other RNA
gggaggcggaggttgcggtgac

SEQ ID NO: 141453 - RNA, 22 nt, synthetic construct
  source 1..22: mol_type = other RNA
gggaggctgaggcaggtggata

SEQ ID NO: 141454 - RNA, 22 nt, synthetic construct
  source 1..22: mol_type = other RNA
gggaggctgaggcggaaggatt

SEQ ID NO: 141455 - RNA, 22 nt, synthetic construct
  source 1..22: mol_type = other RNA
gggaggctgaggctggggaatt

SEQ ID NO: 141456 - RNA, 22 nt, synthetic construct
  source 1..22: mol_type = other RNA
gggagggagagggagctctgtc

SEQ ID NO: 141457 - RNA, 22 nt, synthetic construct
  source 1..22: mol_type = other RNA
gggagggggagggagagggagc

SEQ ID NO: 141458 - RNA, 22 nt, synthetic construct
  source 1..22: mol_type = other RNA
gggagggggctgaggattggag

SEQ ID NO: 141459 - RNA, 22 nt, synthetic construct
  source 1..22: mol_type = other RNA
gggaggggtattcagggggcta

SEQ ID NO: 141460 - RNA, 22 nt, synthetic construct
  source 1..22: mol_type = other RNA
gggaggggtccccagcatccac

SEQ ID NO: 141461 - RNA, 22 nt, synthetic construct
  source 1..22: mol_type = other RNA
gggaggtaatactataaggaaa

SEQ ID NO: 141462 - RNA, 22 nt, synthetic construct
  source 1..22: mol_type = other RNA
gggaggtaggcttagatgagcc

SEQ ID NO: 141463 - RNA, 22 nt, synthetic construct
  source 1..22: mol_type = other RNA
gggaggttgaggctgcagtgag

SEQ ID NO: 141464 - RNA, 22 nt, synthetic construct
  source 1..22: mol_type = other RNA
gggagtaacagacctctgaaga

SEQ ID NO: 141465 - RNA, 22 nt, synthetic construct
  source 1..22: mol_type = other RNA
gggagtacaagaccagcctggg

SEQ ID NO: 141466 - RNA, 22 nt, synthetic construct
  source 1..22: mol_type = other RNA
gggagtcagtagaggccgaggg

SEQ ID NO: 141467 - RNA, 22 nt, synthetic construct
  source 1..22: mol_type = other RNA
gggagtccctgctttcagttct

SEQ ID NO: 141468 - RNA, 22 nt, synthetic construct
  source 1..22: mol_type = other RNA
gggagtctatttctgaacaaat

SEQ ID NO: 141469 - RNA, 22 nt, synthetic construct
  source 1..22: mol_type = other RNA
gggagtgtgcccaaggaaggca

SEQ ID NO: 141470 - RNA, 22 nt, synthetic construct
  source 1..22: mol_type = other RNA
gggagttcattagaattcagga

SEQ ID NO: 141471 - RNA, 22 nt, synthetic construct
  source 1..22: mol_type = other RNA
gggagttttaggaaaatagagt

SEQ ID NO: 141472 - RNA, 22 nt, synthetic construct
  source 1..22: mol_type = other RNA
gggataaatcccacttgatcca

SEQ ID NO: 141473 - RNA, 22 nt, synthetic construct
  source 1..22: mol_type = other RNA
gggataagaataccaaattcac

SEQ ID NO: 141474 - RNA, 22 nt, synthetic construct
  source 1..22: mol_type = other RNA
gggataatgagtttaattcttt

SEQ ID NO: 141475 - RNA, 22 nt, synthetic construct
  source 1..22: mol_type = other RNA
gggataatgctatcattttaaa

SEQ ID NO: 141476 - RNA, 22 nt, synthetic construct
  source 1..22: mol_type = other RNA
gggataatgctatccagaagag

SEQ ID NO: 141477 - RNA, 22 nt, synthetic construct
  source 1..22: mol_type = other RNA
gggatacttctaactttagaac

SEQ ID NO: 141478 - RNA, 22 nt, synthetic construct
  source 1..22: mol_type = other RNA
gggatatagctacaatgatttt

SEQ ID NO: 141479 - RNA, 22 nt, synthetic construct
  source 1..22: mol_type = other RNA
gggatatccaaagataaaggta

SEQ ID NO: 141480 - RNA, 22 nt, synthetic construct
  source 1..22: mol_type = other RNA
gggatatctaacataatcaaat

SEQ ID NO: 141481 - RNA, 22 nt, synthetic construct
  source 1..22: mol_type = other RNA
gggatattggcttatagtgttc

SEQ ID NO: 141482 - RNA, 22 nt, synthetic construct
  source 1..22: mol_type = other RNA
gggatattttcgtgtactgaaa

SEQ ID NO: 141483 - RNA, 22 nt, synthetic construct
  source 1..22: mol_type = other RNA
gggatcaaaccatgttcatggg

SEQ ID NO: 141484 - RNA, 22 nt, synthetic construct
  source 1..22: mol_type = other RNA
gggatcacacttgatggtttgg

SEQ ID NO: 141485 - RNA, 22 nt, synthetic construct
  source 1..22: mol_type = other RNA
gggatcacagatacaactctga

SEQ ID NO: 141486 - RNA, 22 nt, synthetic construct
  source 1..22: mol_type = other RNA
gggatcacaggcgttgagccat

SEQ ID NO: 141487 - RNA, 22 nt, synthetic construct
  source 1..22: mol_type = other RNA
gggatccaggggaatagaaagt

SEQ ID NO: 141488 - RNA, 22 nt, synthetic construct
  source 1..22: mol_type = other RNA
gggatcctaagcatgagatact

SEQ ID NO: 141489 - RNA, 22 nt, synthetic construct
  source 1..22: mol_type = other RNA
gggatcctgtccaggcgcctgc

SEQ ID NO: 141490 - RNA, 22 nt, synthetic construct
  source 1..22: mol_type = other RNA
gggatctctgggctcactgcaa

SEQ ID NO: 141491 - RNA, 22 nt, synthetic construct
  source 1..22: mol_type = other RNA
gggatctgataaattattagct

SEQ ID NO: 141492 - RNA, 22 nt, synthetic construct
  source 1..22: mol_type = other RNA
gggatctgtcatgtttgaattt

SEQ ID NO: 141493 - RNA, 22 nt, synthetic construct
  source 1..22: mol_type = other RNA
gggatgaatgttgtacatttaa

SEQ ID NO: 141494 - RNA, 22 nt, synthetic construct
  source 1..22: mol_type = other RNA
gggatgaggaagaggaaggttc

SEQ ID NO: 141495 - RNA, 22 nt, synthetic construct
  source 1..22: mol_type = other RNA
gggatgcaacaaatgttgcaga

SEQ ID NO: 141496 - RNA, 22 nt, synthetic construct
  source 1..22: mol_type = other RNA
gggatgcaagaatggtttaaca

SEQ ID NO: 141497 - RNA, 22 nt, synthetic construct
  source 1..22: mol_type = other RNA
gggatgcagcaaaagcaccact

SEQ ID NO: 141498 - RNA, 22 nt, synthetic construct
  source 1..22: mol_type = other RNA
gggatgcattctagaaaggagg

SEQ ID NO: 141499 - RNA, 22 nt, synthetic construct
  source 1..22: mol_type = other RNA
gggatgctcagggtgcgacctc

SEQ ID NO: 141500 - RNA, 22 nt, synthetic construct
  source 1..22: mol_type = other RNA
gggatgctcagtttcaaaagct

SEQ ID NO: 141501 - RNA, 22 nt, synthetic construct
  source 1..22: mol_type = other RNA
gggatgctggagtgtggcaggg

SEQ ID NO: 141502 - RNA, 22 nt, synthetic construct
  source 1..22: mol_type = other RNA
gggatgctgtctataggcaatg

SEQ ID NO: 141503 - RNA, 22 nt, synthetic construct
  source 1..22: mol_type = other RNA
gggatgcttaaagcgctactca

SEQ ID NO: 141504 - RNA, 22 nt, synthetic construct
  source 1..22: mol_type = other RNA
gggatggctgaaagagaaagaa

SEQ ID NO: 141505 - RNA, 22 nt, synthetic construct
  source 1..22: mol_type = other RNA
gggatgggggacgacgtatgca

SEQ ID NO: 141506 - RNA, 22 nt, synthetic construct
  source 1..22: mol_type = other RNA
gggatggttgcacaatgttgtg

SEQ ID NO: 141507 - RNA, 22 nt, synthetic construct
  source 1..22: mol_type = other RNA
gggatgtagaaggatatgtttt

SEQ ID NO: 141508 - RNA, 22 nt, synthetic construct
  source 1..22: mol_type = other RNA
gggatgttgcctactagccagt

SEQ ID NO: 141509 - RNA, 22 nt, synthetic construct
  source 1..22: mol_type = other RNA
gggatgtttctacctttggcta

SEQ ID NO: 141510 - RNA, 22 nt, synthetic construct
  source 1..22: mol_type = other RNA
gggattacacacacctaccacc

SEQ ID NO: 141511 - RNA, 22 nt, synthetic construct
  source 1..22: mol_type = other RNA
gggattacaggcgcacgccatc

SEQ ID NO: 141512 - RNA, 22 nt, synthetic construct
  source 1..22: mol_type = other RNA
gggattagcttattctttttct

SEQ ID NO: 141513 - RNA, 22 nt, synthetic construct
  source 1..22: mol_type = other RNA
gggattatttggaagagagaag

SEQ ID NO: 141514 - RNA, 22 nt, synthetic construct
  source 1..22: mol_type = other RNA
gggattctgctactagcaagct

SEQ ID NO: 141515 - RNA, 22 nt, synthetic construct
  source 1..22: mol_type = other RNA
gggattctggccaaatccctga

SEQ ID NO: 141516 - RNA, 22 nt, synthetic construct
  source 1..22: mol_type = other RNA
gggattgagggttagatttttc

SEQ ID NO: 141517 - RNA, 22 nt, synthetic construct
  source 1..22: mol_type = other RNA
gggatttacttctatatgtaaa

SEQ ID NO: 141518 - RNA, 22 nt, synthetic construct
  source 1..22: mol_type = other RNA
gggatttcatgaacaattttct

SEQ ID NO: 141519 - RNA, 22 nt, synthetic construct
  source 1..22: mol_type = other RNA
gggatttggccagaatcccttt

SEQ ID NO: 141520 - RNA, 22 nt, synthetic construct
  source 1..22: mol_type = other RNA
gggattttgctgccaagtcagc

SEQ ID NO: 141521 - RNA, 22 nt, synthetic construct
  source 1..22: mol_type = other RNA
gggcaaaaaagtcatgacctgc

SEQ ID NO: 141522 - RNA, 22 nt, synthetic construct
  source 1..22: mol_type = other RNA
gggcaacagagacagagaatct

SEQ ID NO: 141523 - RNA, 22 nt, synthetic construct
  source 1..22: mol_type = other RNA
gggcaagagagcaagtccccat

SEQ ID NO: 141524 - RNA, 22 nt, synthetic construct
  source 1..22: mol_type = other RNA
gggcaatatagtgggaccccgt

SEQ ID NO: 141525 - RNA, 22 nt, synthetic construct
  source 1..22: mol_type = other RNA
gggcaatctcagctcattacag

SEQ ID NO: 141526 - RNA, 22 nt, synthetic construct
  source 1..22: mol_type = other RNA
gggcacacgccactgcaggtgt

SEQ ID NO: 141527 - RNA, 22 nt, synthetic construct
  source 1..22: mol_type = other RNA
gggcacactccccagtggttgt

SEQ ID NO: 141528 - RNA, 22 nt, synthetic construct
  source 1..22: mol_type = other RNA
gggcaccgtgacagaacaaata

SEQ ID NO: 141529 - RNA, 22 nt, synthetic construct
  source 1..22: mol_type = other RNA
gggcacctaaaaggttgcttaa

SEQ ID NO: 141530 - RNA, 22 nt, synthetic construct
  source 1..22: mol_type = other RNA
gggcaccttccctactcactga

SEQ ID NO: 141531 - RNA, 22 nt, synthetic construct
  source 1..22: mol_type = other RNA
gggcactgggagccctccagga

SEQ ID NO: 141532 - RNA, 22 nt, synthetic construct
  source 1..22: mol_type = other RNA
gggcactgggtccccggaggag

SEQ ID NO: 141533 - RNA, 22 nt, synthetic construct
  source 1..22: mol_type = other RNA
gggcacttgggatgtttctacc

SEQ ID NO: 141534 - RNA, 22 nt, synthetic construct
  source 1..22: mol_type = other RNA
gggcagactccttcccctggtc

SEQ ID NO: 141535 - RNA, 22 nt, synthetic construct
  source 1..22: mol_type = other RNA
gggcagagaactgactgaagga

SEQ ID NO: 141536 - RNA, 22 nt, synthetic construct
  source 1..22: mol_type = other RNA
gggcagagataactgggtgtgc

SEQ ID NO: 141537 - RNA, 22 nt, synthetic construct
  source 1..22: mol_type = other RNA
gggcagcaaagcaagaaaaaga

SEQ ID NO: 141538 - RNA, 22 nt, synthetic construct
  source 1..22: mol_type = other RNA
gggcagccttggaggagccctg

SEQ ID NO: 141539 - RNA, 22 nt, synthetic construct
  source 1..22: mol_type = other RNA
gggcaggaaaggtggggaaggg

SEQ ID NO: 141540 - RNA, 22 nt, synthetic construct
  source 1..22: mol_type = other RNA
gggcagggagagagaaacttta

SEQ ID NO: 141541 - RNA, 22 nt, synthetic construct
  source 1..22: mol_type = other RNA
gggcagggtggagtccaaccaa

SEQ ID NO: 141542 - RNA, 22 nt, synthetic construct
  source 1..22: mol_type = other RNA
gggcataacatctatgaagtaa

SEQ ID NO: 141543 - RNA, 22 nt, synthetic construct
  source 1..22: mol_type = other RNA
gggcatcaaagctaccctttct

SEQ ID NO: 141544 - RNA, 22 nt, synthetic construct
  source 1..22: mol_type = other RNA
gggcatgggtccaagacaggaa

SEQ ID NO: 141545 - RNA, 22 nt, synthetic construct
  source 1..22: mol_type = other RNA
gggcattaattgagagctttct

SEQ ID NO: 141546 - RNA, 22 nt, synthetic construct
  source 1..22: mol_type = other RNA
gggcattagaagttaaattgat

SEQ ID NO: 141547 - RNA, 22 nt, synthetic construct
  source 1..22: mol_type = other RNA
gggcattccagagggtaacgtg

SEQ ID NO: 141548 - RNA, 22 nt, synthetic construct
  source 1..22: mol_type = other RNA
gggcattccctgtctgggaagt

SEQ ID NO: 141549 - RNA, 22 nt, synthetic construct
  source 1..22: mol_type = other RNA
gggcattccgtggaaggccttc

SEQ ID NO: 141550 - RNA, 22 nt, synthetic construct
  source 1..22: mol_type = other RNA
gggcattttcaaggtagaagta

SEQ ID NO: 141551 - RNA, 22 nt, synthetic construct
  source 1..22: mol_type = other RNA
gggccaaagacagatcttatgg

SEQ ID NO: 141552 - RNA, 22 nt, synthetic construct
  source 1..22: mol_type = other RNA
gggccaaagacttcaacggaca

SEQ ID NO: 141553 - RNA, 22 nt, synthetic construct
  source 1..22: mol_type = other RNA
gggccaacttccagcaagactt

SEQ ID NO: 141554 - RNA, 22 nt, synthetic construct
  source 1..22: mol_type = other RNA
gggccaccaagccctgccttaa

SEQ ID NO: 141555 - RNA, 22 nt, synthetic construct
  source 1..22: mol_type = other RNA
gggccactgagagctcaggcca

SEQ ID NO: 141556 - RNA, 22 nt, synthetic construct
  source 1..22: mol_type = other RNA
gggccactggaaaccttttgta

SEQ ID NO: 141557 - RNA, 22 nt, synthetic construct
  source 1..22: mol_type = other RNA
gggccagaggagggatgcattc

SEQ ID NO: 141558 - RNA, 22 nt, synthetic construct
  source 1..22: mol_type = other RNA
gggccagttgagagagaattct

SEQ ID NO: 141559 - RNA, 22 nt, synthetic construct
  source 1..22: mol_type = other RNA
gggccatctgaattcaagttac

SEQ ID NO: 141560 - RNA, 22 nt, synthetic construct
  source 1..22: mol_type = other RNA
gggccattctgctatgaaatgt

SEQ ID NO: 141561 - RNA, 22 nt, synthetic construct
  source 1..22: mol_type = other RNA
gggccatttcatttctgttttt

SEQ ID NO: 141562 - RNA, 22 nt, synthetic construct
  source 1..22: mol_type = other RNA
gggcccaccctgctccagtatg

SEQ ID NO: 141563 - RNA, 22 nt, synthetic construct
  source 1..22: mol_type = other RNA
gggcccactctccccaagtaaa

SEQ ID NO: 141564 - RNA, 22 nt, synthetic construct
  source 1..22: mol_type = other RNA
gggcccagcagaaggtgaggga

SEQ ID NO: 141565 - RNA, 22 nt, synthetic construct
  source 1..22: mol_type = other RNA
gggcccagcctcaacagcactt

SEQ ID NO: 141566 - RNA, 22 nt, synthetic construct
  source 1..22: mol_type = other RNA
gggcccagctcttttgtgtctt

SEQ ID NO: 141567 - RNA, 22 nt, synthetic construct
  source 1..22: mol_type = other RNA
gggcccgcagtggctcatgcct

SEQ ID NO: 141568 - RNA, 22 nt, synthetic construct
  source 1..22: mol_type = other RNA
gggccgcccctggagaaagccc

SEQ ID NO: 141569 - RNA, 22 nt, synthetic construct
  source 1..22: mol_type = other RNA
gggccgcgtccacctggcaaca

SEQ ID NO: 141570 - RNA, 22 nt, synthetic construct
  source 1..22: mol_type = other RNA
gggcctaaataaaacacatgtc

SEQ ID NO: 141571 - RNA, 22 nt, synthetic construct
  source 1..22: mol_type = other RNA
gggcctacagtggttccatttg

SEQ ID NO: 141572 - RNA, 22 nt, synthetic construct
  source 1..22: mol_type = other RNA
gggcctagaaatcatacacgag

SEQ ID NO: 141573 - RNA, 22 nt, synthetic construct
  source 1..22: mol_type = other RNA
gggcctcaaatttcatttactg

SEQ ID NO: 141574 - RNA, 22 nt, synthetic construct
  source 1..22: mol_type = other RNA
gggcctcagcatgtcttcagag

SEQ ID NO: 141575 - RNA, 22 nt, synthetic construct
  source 1..22: mol_type = other RNA
gggcctctgaagacatgctgag

SEQ ID NO: 141576 - RNA, 22 nt, synthetic construct
  source 1..22: mol_type = other RNA
gggcctgcttttggaagcatgt

SEQ ID NO: 141577 - RNA, 22 nt, synthetic construct
  source 1..22: mol_type = other RNA
gggcctggttagggagactttc

SEQ ID NO: 141578 - RNA, 22 nt, synthetic construct
  source 1..22: mol_type = other RNA
gggcctgttccaggcctcgctc

SEQ ID NO: 141579 - RNA, 22 nt, synthetic construct
  source 1..22: mol_type = other RNA
gggccttcccaaagacatcctg

SEQ ID NO: 141580 - RNA, 22 nt, synthetic construct
  source 1..22: mol_type = other RNA
gggccttctactttaataaatg

SEQ ID NO: 141581 - RNA, 22 nt, synthetic construct
  source 1..22: mol_type = other RNA
gggccttgcaagccacattagc

SEQ ID NO: 141582 - RNA, 22 nt, synthetic construct
  source 1..22: mol_type = other RNA
gggcctttaatcacctcaagtg

SEQ ID NO: 141583 - RNA, 22 nt, synthetic construct
  source 1..22: mol_type = other RNA
gggcctttctgtttgtttgttt

SEQ ID NO: 141584 - RNA, 22 nt, synthetic construct
  source 1..22: mol_type = other RNA
gggccttttgtcaagctatcag

SEQ ID NO: 141585 - RNA, 22 nt, synthetic construct
  source 1..22: mol_type = other RNA
gggcgacaagagcagaactcca

SEQ ID NO: 141586 - RNA, 22 nt, synthetic construct
  source 1..22: mol_type = other RNA
gggcgacagagtgaaactctgg

SEQ ID NO: 141587 - RNA, 22 nt, synthetic construct
  source 1..22: mol_type = other RNA
gggcgagatggcgtgcgcctgt

SEQ ID NO: 141588 - RNA, 22 nt, synthetic construct
  source 1..22: mol_type = other RNA
gggcgatcttggctcaccacaa

SEQ ID NO: 141589 - RNA, 22 nt, synthetic construct
  source 1..22: mol_type = other RNA
gggcgcgtgcctatggtcctag

SEQ ID NO: 141590 - RNA, 22 nt, synthetic construct
  source 1..22: mol_type = other RNA
gggcgtagtggctcacacctat

SEQ ID NO: 141591 - RNA, 22 nt, synthetic construct
  source 1..22: mol_type = other RNA
gggcgtggagcggtgtcttatt

SEQ ID NO: 141592 - RNA, 22 nt, synthetic construct
  source 1..22: mol_type = other RNA
gggcgtgggggctcacatctgt

SEQ ID NO: 141593 - RNA, 22 nt, synthetic construct
  source 1..22: mol_type = other RNA
gggctaaatgctcacatttagt

SEQ ID NO: 141594 - RNA, 22 nt, synthetic construct
  source 1..22: mol_type = other RNA
gggctaaggtggagtggtggat

SEQ ID NO: 141595 - RNA, 22 nt, synthetic construct
  source 1..22: mol_type = other RNA
gggctaagtagtggcagccccg

SEQ ID NO: 141596 - RNA, 22 nt, synthetic construct
  source 1..22: mol_type = other RNA
gggctagagccaggaagtcagc

SEQ ID NO: 141597 - RNA, 22 nt, synthetic construct
  source 1..22: mol_type = other RNA
gggctaggatttcagtaaatga

SEQ ID NO: 141598 - RNA, 22 nt, synthetic construct
  source 1..22: mol_type = other RNA
gggctagggaagcagttgatgc

SEQ ID NO: 141599 - RNA, 22 nt, synthetic construct
  source 1..22: mol_type = other RNA
gggctatctttactttcagctc

SEQ ID NO: 141600 - RNA, 22 nt, synthetic construct
  source 1..22: mol_type = other RNA
gggctattaagtattgcattga

SEQ ID NO: 141601 - RNA, 22 nt, synthetic construct
  source 1..22: mol_type = other RNA
gggctattgttttgcaagatta

SEQ ID NO: 141602 - RNA, 22 nt, synthetic construct
  source 1..22: mol_type = other RNA
gggctcaagccatcctccagcc

SEQ ID NO: 141603 - RNA, 22 nt, synthetic construct
  source 1..22: mol_type = other RNA
gggctcaagtaagtgaaatcat

SEQ ID NO: 141604 - RNA, 22 nt, synthetic construct
  source 1..22: mol_type = other RNA
gggctcactgcaacttccgcct

SEQ ID NO: 141605 - RNA, 22 nt, synthetic construct
  source 1..22: mol_type = other RNA
gggctcatctaagcctacctcc

SEQ ID NO: 141606 - RNA, 22 nt, synthetic construct
  source 1..22: mol_type = other RNA
gggctcccagtgcccacctgac

SEQ ID NO: 141607 - RNA, 22 nt, synthetic construct
  source 1..22: mol_type = other RNA
gggctcccttccagcgtgtgca

SEQ ID NO: 141608 - RNA, 22 nt, synthetic construct
  source 1..22: mol_type = other RNA
gggctcctccaaggctgcccgc

SEQ ID NO: 141609 - RNA, 22 nt, synthetic construct
  source 1..22: mol_type = other RNA
gggctcgcagcatccctgccgc

SEQ ID NO: 141610 - RNA, 22 nt, synthetic construct
  source 1..22: mol_type = other RNA
gggctctaatgcaagagttaaa

SEQ ID NO: 141611 - RNA, 22 nt, synthetic construct
  source 1..22: mol_type = other RNA
gggctctctattccaaatgtct

SEQ ID NO: 141612 - RNA, 22 nt, synthetic construct
  source 1..22: mol_type = other RNA
gggctgaaaaacacctcagtta

SEQ ID NO: 141613 - RNA, 22 nt, synthetic construct
  source 1..22: mol_type = other RNA
gggctgagccttcagaactctt

SEQ ID NO: 141614 - RNA, 22 nt, synthetic construct
  source 1..22: mol_type = other RNA
gggctgaggattggagactgat

SEQ ID NO: 141615 - RNA, 22 nt, synthetic construct
  source 1..22: mol_type = other RNA
gggctgagtatgggtctccatt

SEQ ID NO: 141616 - RNA, 22 nt, synthetic construct
  source 1..22: mol_type = other RNA
gggctgcatcatggtgggcctt

SEQ ID NO: 141617 - RNA, 22 nt, synthetic construct
  source 1..22: mol_type = other RNA
gggctgccactacttagcccct

SEQ ID NO: 141618 - RNA, 22 nt, synthetic construct
  source 1..22: mol_type = other RNA
gggctgcctcagccgccgcaga

SEQ ID NO: 141619 - RNA, 22 nt, synthetic construct
  source 1..22: mol_type = other RNA
gggctggacataagggtctgtt

SEQ ID NO: 141620 - RNA, 22 nt, synthetic construct
  source 1..22: mol_type = other RNA
gggctgggggatccaggggaat

SEQ ID NO: 141621 - RNA, 22 nt, synthetic construct
  source 1..22: mol_type = other RNA
gggctgttcccagataacagtg

SEQ ID NO: 141622 - RNA, 22 nt, synthetic construct
  source 1..22: mol_type = other RNA
gggcttaacatttgaactcact

SEQ ID NO: 141623 - RNA, 22 nt, synthetic construct
  source 1..22: mol_type = other RNA
gggcttatcagatggtgatacc

SEQ ID NO: 141624 - RNA, 22 nt, synthetic construct
  source 1..22: mol_type = other RNA
gggcttcactttcgtcatctat

SEQ ID NO: 141625 - RNA, 22 nt, synthetic construct
  source 1..22: mol_type = other RNA
gggcttcatgctgggagaccag

SEQ ID NO: 141626 - RNA, 22 nt, synthetic construct
  source 1..22: mol_type = other RNA
gggcttcgcctttgttgccagg

SEQ ID NO: 141627 - RNA, 22 nt, synthetic construct
  source 1..22: mol_type = other RNA
gggcttctgaaggtgcctgcca

SEQ ID NO: 141628 - RNA, 22 nt, synthetic construct
  source 1..22: mol_type = other RNA
gggcttgaacccgaggtgcaca

SEQ ID NO: 141629 - RNA, 22 nt, synthetic construct
  source 1..22: mol_type = other RNA
gggcttgatctagtaaatataa

SEQ ID NO: 141630 - RNA, 22 nt, synthetic construct
  source 1..22: mol_type = other RNA
gggcttggtatgcatcttgaac

SEQ ID NO: 141631 - RNA, 22 nt, synthetic construct
  source 1..22: mol_type = other RNA
gggcttggtggcccacacctgc

SEQ ID NO: 141632 - RNA, 22 nt, synthetic construct
  source 1..22: mol_type = other RNA
gggcttggttggaaaagaaagc

SEQ ID NO: 141633 - RNA, 22 nt, synthetic construct
  source 1..22: mol_type = other RNA
gggctttactgtattaggatgt

SEQ ID NO: 141634 - RNA, 22 nt, synthetic construct
  source 1..22: mol_type = other RNA
gggctttcaatagtgggtagaa

SEQ ID NO: 141635 - RNA, 22 nt, synthetic construct
  source 1..22: mol_type = other RNA
gggctttctccaggggcggccc

SEQ ID NO: 141636 - RNA, 22 nt, synthetic construct
  source 1..22: mol_type = other RNA
gggctttgagaaaggtttcttc

SEQ ID NO: 141637 - RNA, 22 nt, synthetic construct
  source 1..22: mol_type = other RNA
gggctttgtgaagggaggtagg

SEQ ID NO: 141638 - RNA, 22 nt, synthetic construct
  source 1..22: mol_type = other RNA
gggcttttcatatacgtattta

SEQ ID NO: 141639 - RNA, 22 nt, synthetic construct
  source 1..22: mol_type = other RNA
gggcttttgaacactctgcaat

SEQ ID NO: 141640 - RNA, 22 nt, synthetic construct
  source 1..22: mol_type = other RNA
ggggaaaaaaccataaaatttt

SEQ ID NO: 141641 - RNA, 22 nt, synthetic construct
  source 1..22: mol_type = other RNA
ggggaaaacacccttgaaaatt

SEQ ID NO: 141642 - RNA, 22 nt, synthetic construct
  source 1..22: mol_type = other RNA
ggggaaaactccaagtgtaaaa

SEQ ID NO: 141643 - RNA, 22 nt, synthetic construct
  source 1..22: mol_type = other RNA
ggggaaaattgacatttttcaa

SEQ ID NO: 141644 - RNA, 22 nt, synthetic construct
  source 1..22: mol_type = other RNA
ggggaaatagatgcctagaaag

SEQ ID NO: 141645 - RNA, 22 nt, synthetic construct
  source 1..22: mol_type = other RNA
ggggaacagtttagcaatccaa

SEQ ID NO: 141646 - RNA, 22 nt, synthetic construct
  source 1..22: mol_type = other RNA
ggggaactcttgtagtattttt

SEQ ID NO: 141647 - RNA, 22 nt, synthetic construct
  source 1..22: mol_type = other RNA
ggggaagagagcattgccttta

SEQ ID NO: 141648 - RNA, 22 nt, synthetic construct
  source 1..22: mol_type = other RNA
ggggaagcaggaactcatatta

SEQ ID NO: 141649 - RNA, 22 nt, synthetic construct
  source 1..22: mol_type = other RNA
ggggaagcttttcatatacaga

SEQ ID NO: 141650 - RNA, 22 nt, synthetic construct
  source 1..22: mol_type = other RNA
ggggaaggaattttcaggactc

SEQ ID NO: 141651 - RNA, 22 nt, synthetic construct
  source 1..22: mol_type = other RNA
ggggaaggagtctgcccatcct

SEQ ID NO: 141652 - RNA, 22 nt, synthetic construct
  source 1..22: mol_type = other RNA
ggggaaggcttcgagttctggg

SEQ ID NO: 141653 - RNA, 22 nt, synthetic construct
  source 1..22: mol_type = other RNA
ggggaataagattttaggtcat

SEQ ID NO: 141654 - RNA, 22 nt, synthetic construct
  source 1..22: mol_type = other RNA
ggggaatagaaagttagtgtct

SEQ ID NO: 141655 - RNA, 22 nt, synthetic construct
  source 1..22: mol_type = other RNA
ggggaatcatgcagtacttgtc

SEQ ID NO: 141656 - RNA, 22 nt, synthetic construct
  source 1..22: mol_type = other RNA
ggggaatctactcttttgtttt

SEQ ID NO: 141657 - RNA, 22 nt, synthetic construct
  source 1..22: mol_type = other RNA
ggggaatgctcataattaaaga

SEQ ID NO: 141658 - RNA, 22 nt, synthetic construct
  source 1..22: mol_type = other RNA
ggggaatggtactgcctccaca

SEQ ID NO: 141659 - RNA, 22 nt, synthetic construct
  source 1..22: mol_type = other RNA
ggggaattgcatgagacttgga

SEQ ID NO: 141660 - RNA, 22 nt, synthetic construct
  source 1..22: mol_type = other RNA
ggggacagctcaattaagcaac

SEQ ID NO: 141661 - RNA, 22 nt, synthetic construct
  source 1..22: mol_type = other RNA
ggggacatagatgaaactaaat

SEQ ID NO: 141662 - RNA, 22 nt, synthetic construct
  source 1..22: mol_type = other RNA
ggggacatgaaggaaggattgg

SEQ ID NO: 141663 - RNA, 22 nt, synthetic construct
  source 1..22: mol_type = other RNA
ggggacatgctctgataggata

SEQ ID NO: 141664 - RNA, 22 nt, synthetic construct
  source 1..22: mol_type = other RNA
ggggacccctccctgctttaaa

SEQ ID NO: 141665 - RNA, 22 nt, synthetic construct
  source 1..22: mol_type = other RNA
ggggacgacgtatgcaacttac

SEQ ID NO: 141666 - RNA, 22 nt, synthetic construct
  source 1..22: mol_type = other RNA
ggggactaacagggtctacaaa

SEQ ID NO: 141667 - RNA, 22 nt, synthetic construct
  source 1..22: mol_type = other RNA
ggggactcttatggctataacc

SEQ ID NO: 141668 - RNA, 22 nt, synthetic construct
  source 1..22: mol_type = other RNA
ggggactgcaacagatctgaga

SEQ ID NO: 141669 - RNA, 22 nt, synthetic construct
  source 1..22: mol_type = other RNA
ggggacttgctctcttgcccaa

SEQ ID NO: 141670 - RNA, 22 nt, synthetic construct
  source 1..22: mol_type = other RNA
ggggactttgatgttttacatt

SEQ ID NO: 141671 - RNA, 22 nt, synthetic construct
  source 1..22: mol_type = other RNA
ggggactttgtggcctcttccc

SEQ ID NO: 141672 - RNA, 22 nt, synthetic construct
  source 1..22: mol_type = other RNA
ggggagactgtgcaatgtgaaa

SEQ ID NO: 141673 - RNA, 22 nt, synthetic construct
  source 1..22: mol_type = other RNA
ggggagagcactggtttcagta

SEQ ID NO: 141674 - RNA, 22 nt, synthetic construct
  source 1..22: mol_type = other RNA
ggggagaggcctcatgtatttt

SEQ ID NO: 141675 - RNA, 22 nt, synthetic construct
  source 1..22: mol_type = other RNA
ggggagagtgggcccagcagaa

SEQ ID NO: 141676 - RNA, 22 nt, synthetic construct
  source 1..22: mol_type = other RNA
ggggagataccttgaaaggata

SEQ ID NO: 141677 - RNA, 22 nt, synthetic construct
  source 1..22: mol_type = other RNA
ggggagctagagggtaagacca

SEQ ID NO: 141678 - RNA, 22 nt, synthetic construct
  source 1..22: mol_type = other RNA
ggggagcttttgaaactgagca

SEQ ID NO: 141679 - RNA, 22 nt, synthetic construct
  source 1..22: mol_type = other RNA
ggggaggccaaggcaggactgc

SEQ ID NO: 141680 - RNA, 22 nt, synthetic construct
  source 1..22: mol_type = other RNA
ggggagggagagggagctctgt

SEQ ID NO: 141681 - RNA, 22 nt, synthetic construct
  source 1..22: mol_type = other RNA
ggggagggggagggagagggag

SEQ ID NO: 141682 - RNA, 22 nt, synthetic construct
  source 1..22: mol_type = other RNA
ggggagtgtgcccaaggaaggc

SEQ ID NO: 141683 - RNA, 22 nt, synthetic construct
  source 1..22: mol_type = other RNA
ggggagttttaggaaaatagag

SEQ ID NO: 141684 - RNA, 22 nt, synthetic construct
  source 1..22: mol_type = other RNA
ggggatatccaaagataaaggt

SEQ ID NO: 141685 - RNA, 22 nt, synthetic construct
  source 1..22: mol_type = other RNA
ggggatccaggggaatagaaag

SEQ ID NO: 141686 - RNA, 22 nt, synthetic construct
  source 1..22: mol_type = other RNA
ggggatgcaacaaatgttgcag

SEQ ID NO: 141687 - RNA, 22 nt, synthetic construct
  source 1..22: mol_type = other RNA
ggggatgctcagggtgcgacct

SEQ ID NO: 141688 - RNA, 22 nt, synthetic construct
  source 1..22: mol_type = other RNA
ggggatgctgtctataggcaat

SEQ ID NO: 141689 - RNA, 22 nt, synthetic construct
  source 1..22: mol_type = other RNA
ggggatgggggacgacgtatgc

SEQ ID NO: 141690 - RNA, 22 nt, synthetic construct
  source 1..22: mol_type = other RNA
ggggatggttgcacaatgttgt

SEQ ID NO: 141691 - RNA, 22 nt, synthetic construct
  source 1..22: mol_type = other RNA
ggggatgtagaaggatatgttt

SEQ ID NO: 141692 - RNA, 22 nt, synthetic construct
  source 1..22: mol_type = other RNA
ggggattctgctactagcaagc

SEQ ID NO: 141693 - RNA, 22 nt, synthetic construct
  source 1..22: mol_type = other RNA
ggggattgagggttagattttt

SEQ ID NO: 141694 - RNA, 22 nt, synthetic construct
  source 1..22: mol_type = other RNA
ggggatttcatgaacaattttc

SEQ ID NO: 141695 - RNA, 22 nt, synthetic construct
  source 1..22: mol_type = other RNA
ggggcaatctcagctcattaca

SEQ ID NO: 141696 - RNA, 22 nt, synthetic construct
  source 1..22: mol_type = other RNA
ggggcacctaaaaggttgctta

SEQ ID NO: 141697 - RNA, 22 nt, synthetic construct
  source 1..22: mol_type = other RNA
ggggcactgggtccccggagga

SEQ ID NO: 141698 - RNA, 22 nt, synthetic construct
  source 1..22: mol_type = other RNA
ggggcagagaactgactgaagg

SEQ ID NO: 141699 - RNA, 22 nt, synthetic construct
  source 1..22: mol_type = other RNA
ggggcagcaaagcaagaaaaag

SEQ ID NO: 141700 - RNA, 22 nt, synthetic construct
  source 1..22: mol_type = other RNA
ggggcaggaaaggtggggaagg

SEQ ID NO: 141701 - RNA, 22 nt, synthetic construct
  source 1..22: mol_type = other RNA
ggggcagggtggagtccaacca

SEQ ID NO: 141702 - RNA, 22 nt, synthetic construct
  source 1..22: mol_type = other RNA
ggggcataacatctatgaagta

SEQ ID NO: 141703 - RNA, 22 nt, synthetic construct
  source 1..22: mol_type = other RNA
ggggcatcaaagctaccctttc

SEQ ID NO: 141704 - RNA, 22 nt, synthetic construct
  source 1..22: mol_type = other RNA
ggggcattccctgtctgggaag

SEQ ID NO: 141705 - RNA, 22 nt, synthetic construct
  source 1..22: mol_type = other RNA
ggggcattccgtggaaggcctt

SEQ ID NO: 141706 - RNA, 22 nt, synthetic construct
  source 1..22: mol_type = other RNA
ggggccactggaaaccttttgt

SEQ ID NO: 141707 - RNA, 22 nt, synthetic construct
  source 1..22: mol_type = other RNA
ggggccaggtgtggaggctcac

SEQ ID NO: 141708 - RNA, 22 nt, synthetic construct
  source 1..22: mol_type = other RNA
ggggccagttgagagagaattc

SEQ ID NO: 141709 - RNA, 22 nt, synthetic construct
  source 1..22: mol_type = other RNA
ggggccatctgaattcaagtta

SEQ ID NO: 141710 - RNA, 22 nt, synthetic construct
  source 1..22: mol_type = other RNA
ggggccgcccctggagaaagcc

SEQ ID NO: 141711 - RNA, 22 nt, synthetic construct
  source 1..22: mol_type = other RNA
ggggccgcgtccacctggcaac

SEQ ID NO: 141712 - RNA, 22 nt, synthetic construct
  source 1..22: mol_type = other RNA
ggggcctacagtggttccattt

SEQ ID NO: 141713 - RNA, 22 nt, synthetic construct
  source 1..22: mol_type = other RNA
ggggcctcagcatgtcttcaga

SEQ ID NO: 141714 - RNA, 22 nt, synthetic construct
  source 1..22: mol_type = other RNA
ggggccttttgtcaagctatca

SEQ ID NO: 141715 - RNA, 22 nt, synthetic construct
  source 1..22: mol_type = other RNA
ggggcgatcttggctcaccaca

SEQ ID NO: 141716 - RNA, 22 nt, synthetic construct
  source 1..22: mol_type = other RNA
ggggcgcgtgcctatggtccta

SEQ ID NO: 141717 - RNA, 22 nt, synthetic construct
  source 1..22: mol_type = other RNA
ggggctaaatgctcacatttag

SEQ ID NO: 141718 - RNA, 22 nt, synthetic construct
  source 1..22: mol_type = other RNA
ggggctaagtagtggcagcccc

SEQ ID NO: 141719 - RNA, 22 nt, synthetic construct
  source 1..22: mol_type = other RNA
ggggctaggatttcagtaaatg

SEQ ID NO: 141720 - RNA, 22 nt, synthetic construct
  source 1..22: mol_type = other RNA
ggggctatctttactttcagct

SEQ ID NO: 141721 - RNA, 22 nt, synthetic construct
  source 1..22: mol_type = other RNA
ggggctcaagtaagtgaaatca

SEQ ID NO: 141722 - RNA, 22 nt, synthetic construct
  source 1..22: mol_type = other RNA
ggggctcgcagcatccctgccg

SEQ ID NO: 141723 - RNA, 22 nt, synthetic construct
  source 1..22: mol_type = other RNA
ggggctctaatgcaagagttaa

SEQ ID NO: 141724 - RNA, 22 nt, synthetic construct
  source 1..22: mol_type = other RNA
ggggctgagccttcagaactct

SEQ ID NO: 141725 - RNA, 22 nt, synthetic construct
  source 1..22: mol_type = other RNA
ggggctgaggattggagactga

SEQ ID NO: 141726 - RNA, 22 nt, synthetic construct
  source 1..22: mol_type = other RNA
ggggctgagtatgggtctccat

SEQ ID NO: 141727 - RNA, 22 nt, synthetic construct
  source 1..22: mol_type = other RNA
ggggctgcatcatggtgggcct

SEQ ID NO: 141728 - RNA, 22 nt, synthetic construct
  source 1..22: mol_type = other RNA
ggggctgccactacttagcccc

SEQ ID NO: 141729 - RNA, 22 nt, synthetic construct
  source 1..22: mol_type = other RNA
ggggctggacataagggtctgt

SEQ ID NO: 141730 - RNA, 22 nt, synthetic construct
  source 1..22: mol_type = other RNA
ggggctgggggatccaggggaa

SEQ ID NO: 141731 - RNA, 22 nt, synthetic construct
  source 1..22: mol_type = other RNA
ggggctgttcccagataacagt

SEQ ID NO: 141732 - RNA, 22 nt, synthetic construct
  source 1..22: mol_type = other RNA
ggggcttgaacccgaggtgcac

SEQ ID NO: 141733 - RNA, 22 nt, synthetic construct
  source 1..22: mol_type = other RNA
ggggctttactgtattaggatg

SEQ ID NO: 141734 - RNA, 22 nt, synthetic construct
  source 1..22: mol_type = other RNA
ggggcttttgaacactctgcaa

SEQ ID NO: 141735 - RNA, 22 nt, synthetic construct
  source 1..22: mol_type = other RNA
gggggaaaaaaccataaaattt

SEQ ID NO: 141736 - RNA, 22 nt, synthetic construct
  source 1..22: mol_type = other RNA
gggggaaaacacccttgaaaat

SEQ ID NO: 141737 - RNA, 22 nt, synthetic construct
  source 1..22: mol_type = other RNA
gggggaaaactccaagtgtaaa

SEQ ID NO: 141738 - RNA, 22 nt, synthetic construct
  source 1..22: mol_type = other RNA
gggggaaaattgacatttttca

SEQ ID NO: 141739 - RNA, 22 nt, synthetic construct
  source 1..22: mol_type = other RNA
gggggaagagagcattgccttt

SEQ ID NO: 141740 - RNA, 22 nt, synthetic construct
  source 1..22: mol_type = other RNA
gggggaagcaggaactcatatt

SEQ ID NO: 141741 - RNA, 22 nt, synthetic construct
  source 1..22: mol_type = other RNA
gggggaagcttttcatatacag

SEQ ID NO: 141742 - RNA, 22 nt, synthetic construct
  source 1..22: mol_type = other RNA
gggggaatctactcttttgttt

SEQ ID NO: 141743 - RNA, 22 nt, synthetic construct
  source 1..22: mol_type = other RNA
gggggacgacgtatgcaactta

SEQ ID NO: 141744 - RNA, 22 nt, synthetic construct
  source 1..22: mol_type = other RNA
gggggagactgtgcaatgtgaa

SEQ ID NO: 141745 - RNA, 22 nt, synthetic construct
  source 1..22: mol_type = other RNA
gggggagagcactggtttcagt

SEQ ID NO: 141746 - RNA, 22 nt, synthetic construct
  source 1..22: mol_type = other RNA
gggggagggagagggagctctg

SEQ ID NO: 141747 - RNA, 22 nt, synthetic construct
  source 1..22: mol_type = other RNA
gggggagggggagggagaggga

SEQ ID NO: 141748 - RNA, 22 nt, synthetic construct
  source 1..22: mol_type = other RNA
gggggatccaggggaatagaaa

SEQ ID NO: 141749 - RNA, 22 nt, synthetic construct
  source 1..22: mol_type = other RNA
gggggatgtagaaggatatgtt

SEQ ID NO: 141750 - RNA, 22 nt, synthetic construct
  source 1..22: mol_type = other RNA
gggggcataacatctatgaagt

SEQ ID NO: 141751 - RNA, 22 nt, synthetic construct
  source 1..22: mol_type = other RNA
gggggcatcaaagctacccttt

SEQ ID NO: 141752 - RNA, 22 nt, synthetic construct
  source 1..22: mol_type = other RNA
gggggccactggaaaccttttg

SEQ ID NO: 141753 - RNA, 22 nt, synthetic construct
  source 1..22: mol_type = other RNA
gggggcgcgtgcctatggtcct

SEQ ID NO: 141754 - RNA, 22 nt, synthetic construct
  source 1..22: mol_type = other RNA
gggggctaaatgctcacattta

SEQ ID NO: 141755 - RNA, 22 nt, synthetic construct
  source 1..22: mol_type = other RNA
gggggctcacatctgtaatctc

SEQ ID NO: 141756 - RNA, 22 nt, synthetic construct
  source 1..22: mol_type = other RNA
gggggctgaggattggagactg

SEQ ID NO: 141757 - RNA, 22 nt, synthetic construct
  source 1..22: mol_type = other RNA
gggggctgagtatgggtctcca

SEQ ID NO: 141758 - RNA, 22 nt, synthetic construct
  source 1..22: mol_type = other RNA
gggggctggacataagggtctg

SEQ ID NO: 141759 - RNA, 22 nt, synthetic construct
  source 1..22: mol_type = other RNA
ggggggaaaaaaccataaaatt

SEQ ID NO: 141760 - RNA, 22 nt, synthetic construct
  source 1..22: mol_type = other RNA
ggggggaaaacacccttgaaaa

SEQ ID NO: 141761 - RNA, 22 nt, synthetic construct
  source 1..22: mol_type = other RNA
ggggggaagcttttcatataca

SEQ ID NO: 141762 - RNA, 22 nt, synthetic construct
  source 1..22: mol_type = other RNA
ggggggatgtagaaggatatgt

SEQ ID NO: 141763 - RNA, 22 nt, synthetic construct
  source 1..22: mol_type = other RNA
ggggggccactggaaacctttt

SEQ ID NO: 141764 - RNA, 22 nt, synthetic construct
  source 1..22: mol_type = other RNA
ggggggtttgttttttgttttg

SEQ ID NO: 141765 - RNA, 22 nt, synthetic construct
  source 1..22: mol_type = other RNA
gggggtaagattgtggtccaga

SEQ ID NO: 141766 - RNA, 22 nt, synthetic construct
  source 1..22: mol_type = other RNA
gggggtatggagacactaggga

SEQ ID NO: 141767 - RNA, 22 nt, synthetic construct
  source 1..22: mol_type = other RNA
gggggtcgagactgtaatgagc

SEQ ID NO: 141768 - RNA, 22 nt, synthetic construct
  source 1..22: mol_type = other RNA
gggggtttgttttttgttttgg

SEQ ID NO: 141769 - RNA, 22 nt, synthetic construct
  source 1..22: mol_type = other RNA
ggggtaaaggggatgggggacg

SEQ ID NO: 141770 - RNA, 22 nt, synthetic construct
  source 1..22: mol_type = other RNA
ggggtaaatctttgtacagtaa

SEQ ID NO: 141771 - RNA, 22 nt, synthetic construct
  source 1..22: mol_type = other RNA
ggggtaaatggtttctccttct

SEQ ID NO: 141772 - RNA, 22 nt, synthetic construct
  source 1..22: mol_type = other RNA
ggggtaagattgtggtccagaa

SEQ ID NO: 141773 - RNA, 22 nt, synthetic construct
  source 1..22: mol_type = other RNA
ggggtaattttggggccatctg

SEQ ID NO: 141774 - RNA, 22 nt, synthetic construct
  source 1..22: mol_type = other RNA
ggggtatggagacactagggac

SEQ ID NO: 141775 - RNA, 22 nt, synthetic construct
  source 1..22: mol_type = other RNA
ggggtatgtttgattagttgac

SEQ ID NO: 141776 - RNA, 22 nt, synthetic construct
  source 1..22: mol_type = other RNA
ggggtattcagggggctaaatg

SEQ ID NO: 141777 - RNA, 22 nt, synthetic construct
  source 1..22: mol_type = other RNA
ggggtccccagcatccactagg

SEQ ID NO: 141778 - RNA, 22 nt, synthetic construct
  source 1..22: mol_type = other RNA
ggggtcgagactgtaatgagct

SEQ ID NO: 141779 - RNA, 22 nt, synthetic construct
  source 1..22: mol_type = other RNA
ggggtcttagttctgcttccac

SEQ ID NO: 141780 - RNA, 22 nt, synthetic construct
  source 1..22: mol_type = other RNA
ggggtcttatgctggtgggctt

SEQ ID NO: 141781 - RNA, 22 nt, synthetic construct
  source 1..22: mol_type = other RNA
ggggtggggggatgtagaagga

SEQ ID NO: 141782 - RNA, 22 nt, synthetic construct
  source 1..22: mol_type = other RNA
ggggttagggcctagaaatcat

SEQ ID NO: 141783 - RNA, 22 nt, synthetic construct
  source 1..22: mol_type = other RNA
ggggttcaaaccacctaactac

SEQ ID NO: 141784 - RNA, 22 nt, synthetic construct
  source 1..22: mol_type = other RNA
ggggtttcagcacaatactgtc

SEQ ID NO: 141785 - RNA, 22 nt, synthetic construct
  source 1..22: mol_type = other RNA
ggggtttccttacctttatctt

SEQ ID NO: 141786 - RNA, 22 nt, synthetic construct
  source 1..22: mol_type = other RNA
ggggtttgtccatgttggtcag

SEQ ID NO: 141787 - RNA, 22 nt, synthetic construct
  source 1..22: mol_type = other RNA
ggggtttgttttttgttttggt

SEQ ID NO: 141788 - RNA, 22 nt, synthetic construct
  source 1..22: mol_type = other RNA
ggggtttttatggttttaagtc

SEQ ID NO: 141789 - RNA, 22 nt, synthetic construct
  source 1..22: mol_type = other RNA
gggtaaaaagcctgcttcagcc

SEQ ID NO: 141790 - RNA, 22 nt, synthetic construct
  source 1..22: mol_type = other RNA
gggtaaaaataatcaactattc

SEQ ID NO: 141791 - RNA, 22 nt, synthetic construct
  source 1..22: mol_type = other RNA
gggtaaaatagtcaagtaacag

SEQ ID NO: 141792 - RNA, 22 nt, synthetic construct
  source 1..22: mol_type = other RNA
gggtaaacaagactcaacatgt

SEQ ID NO: 141793 - RNA, 22 nt, synthetic construct
  source 1..22: mol_type = other RNA
gggtaaacagaattaaacaatc

SEQ ID NO: 141794 - RNA, 22 nt, synthetic construct
  source 1..22: mol_type = other RNA
gggtaaaggggatgggggacga

SEQ ID NO: 141795 - RNA, 22 nt, synthetic construct
  source 1..22: mol_type = other RNA
gggtaaagtcaattctagttaa

SEQ ID NO: 141796 - RNA, 22 nt, synthetic construct
  source 1..22: mol_type = other RNA
gggtaaatctttgtacagtaat

SEQ ID NO: 141797 - RNA, 22 nt, synthetic construct
  source 1..22: mol_type = other RNA
gggtaaatggtttctccttctg

SEQ ID NO: 141798 - RNA, 22 nt, synthetic construct
  source 1..22: mol_type = other RNA
gggtaaatttctaaaaacgtgc

SEQ ID NO: 141799 - RNA, 22 nt, synthetic construct
  source 1..22: mol_type = other RNA
gggtaacgtgagctggaagtaa

SEQ ID NO: 141800 - RNA, 22 nt, synthetic construct
  source 1..22: mol_type = other RNA
gggtaagaaaattgtacaattt

SEQ ID NO: 141801 - RNA, 22 nt, synthetic construct
  source 1..22: mol_type = other RNA
gggtaagaaaggagttcagctt

SEQ ID NO: 141802 - RNA, 22 nt, synthetic construct
  source 1..22: mol_type = other RNA
gggtaagaccaaaatggagacc

SEQ ID NO: 141803 - RNA, 22 nt, synthetic construct
  source 1..22: mol_type = other RNA
gggtaagattccgtctcaaaaa

SEQ ID NO: 141804 - RNA, 22 nt, synthetic construct
  source 1..22: mol_type = other RNA
gggtaagattgtggtccagaaa

SEQ ID NO: 141805 - RNA, 22 nt, synthetic construct
  source 1..22: mol_type = other RNA
gggtaatgctggcttcatgggt

SEQ ID NO: 141806 - RNA, 22 nt, synthetic construct
  source 1..22: mol_type = other RNA
gggtaatttatctccataagtc

SEQ ID NO: 141807 - RNA, 22 nt, synthetic construct
  source 1..22: mol_type = other RNA
gggtaattttggggccatctga

SEQ ID NO: 141808 - RNA, 22 nt, synthetic construct
  source 1..22: mol_type = other RNA
gggtacacatcctaatacagta

SEQ ID NO: 141809 - RNA, 22 nt, synthetic construct
  source 1..22: mol_type = other RNA
gggtacagaactgctaatggtc

SEQ ID NO: 141810 - RNA, 22 nt, synthetic construct
  source 1..22: mol_type = other RNA
gggtacagggtttctgtttgga

SEQ ID NO: 141811 - RNA, 22 nt, synthetic construct
  source 1..22: mol_type = other RNA
gggtagaagcagcaagggtggc

SEQ ID NO: 141812 - RNA, 22 nt, synthetic construct
  source 1..22: mol_type = other RNA
gggtagactgtaaaaattttct

SEQ ID NO: 141813 - RNA, 22 nt, synthetic construct
  source 1..22: mol_type = other RNA
gggtagagactggatcctggag

SEQ ID NO: 141814 - RNA, 22 nt, synthetic construct
  source 1..22: mol_type = other RNA
gggtagagcactttcgtatttt

SEQ ID NO: 141815 - RNA, 22 nt, synthetic construct
  source 1..22: mol_type = other RNA
gggtagctttgatgcccccacc

SEQ ID NO: 141816 - RNA, 22 nt, synthetic construct
  source 1..22: mol_type = other RNA
gggtagcttttcctgctgtcgt

SEQ ID NO: 141817 - RNA, 22 nt, synthetic construct
  source 1..22: mol_type = other RNA
gggtaggaaaagacttctcaaa

SEQ ID NO: 141818 - RNA, 22 nt, synthetic construct
  source 1..22: mol_type = other RNA
gggtaggaagctgatcaaggaa

SEQ ID NO: 141819 - RNA, 22 nt, synthetic construct
  source 1..22: mol_type = other RNA
gggtaggaaggcggtggggaca

SEQ ID NO: 141820 - RNA, 22 nt, synthetic construct
  source 1..22: mol_type = other RNA
gggtataaatgatgagctactg

SEQ ID NO: 141821 - RNA, 22 nt, synthetic construct
  source 1..22: mol_type = other RNA
gggtatacagcaaaagaattaa

SEQ ID NO: 141822 - RNA, 22 nt, synthetic construct
  source 1..22: mol_type = other RNA
gggtatatacaatattacagta

SEQ ID NO: 141823 - RNA, 22 nt, synthetic construct
  source 1..22: mol_type = other RNA
gggtatcatattatttttgtcc

SEQ ID NO: 141824 - RNA, 22 nt, synthetic construct
  source 1..22: mol_type = other RNA
gggtatggagacactagggact

SEQ ID NO: 141825 - RNA, 22 nt, synthetic construct
  source 1..22: mol_type = other RNA
gggtatgtttgattagttgact

SEQ ID NO: 141826 - RNA, 22 nt, synthetic construct
  source 1..22: mol_type = other RNA
gggtattcagggggctaaatgc

SEQ ID NO: 141827 - RNA, 22 nt, synthetic construct
  source 1..22: mol_type = other RNA
gggtattttgttgttgttgttt

SEQ ID NO: 141828 - RNA, 22 nt, synthetic construct
  source 1..22: mol_type = other RNA
gggtcaacaaactaactagaaa

SEQ ID NO: 141829 - RNA, 22 nt, synthetic construct
  source 1..22: mol_type = other RNA
gggtcaaccactaaggtcaaca

SEQ ID NO: 141830 - RNA, 22 nt, synthetic construct
  source 1..22: mol_type = other RNA
gggtcactattaaccatatggt

SEQ ID NO: 141831 - RNA, 22 nt, synthetic construct
  source 1..22: mol_type = other RNA
gggtcacttcctctcttaaatc

SEQ ID NO: 141832 - RNA, 22 nt, synthetic construct
  source 1..22: mol_type = other RNA
gggtcagaatcgtgatagtctt

SEQ ID NO: 141833 - RNA, 22 nt, synthetic construct
  source 1..22: mol_type = other RNA
gggtcagaattttattttcttc

SEQ ID NO: 141834 - RNA, 22 nt, synthetic construct
  source 1..22: mol_type = other RNA
gggtcagctagtgtgtctgact

SEQ ID NO: 141835 - RNA, 22 nt, synthetic construct
  source 1..22: mol_type = other RNA
gggtcatgcacacgctggaagg

SEQ ID NO: 141836 - RNA, 22 nt, synthetic construct
  source 1..22: mol_type = other RNA
gggtccaagacaggaagaatta

SEQ ID NO: 141837 - RNA, 22 nt, synthetic construct
  source 1..22: mol_type = other RNA
gggtccagcttcactcttctgc

SEQ ID NO: 141838 - RNA, 22 nt, synthetic construct
  source 1..22: mol_type = other RNA
gggtccaggcagttctcctgcc

SEQ ID NO: 141839 - RNA, 22 nt, synthetic construct
  source 1..22: mol_type = other RNA
gggtccccagcatccactaggg

SEQ ID NO: 141840 - RNA, 22 nt, synthetic construct
  source 1..22: mol_type = other RNA
gggtcgagactgtaatgagctg

SEQ ID NO: 141841 - RNA, 22 nt, synthetic construct
  source 1..22: mol_type = other RNA
gggtcgcggacgcgcatttttt

SEQ ID NO: 141842 - RNA, 22 nt, synthetic construct
  source 1..22: mol_type = other RNA
gggtcgggtgtcagaaaccatc

SEQ ID NO: 141843 - RNA, 22 nt, synthetic construct
  source 1..22: mol_type = other RNA
gggtctacaaaaggtttccagt

SEQ ID NO: 141844 - RNA, 22 nt, synthetic construct
  source 1..22: mol_type = other RNA
gggtctatagtttaattggggg

SEQ ID NO: 141845 - RNA, 22 nt, synthetic construct
  source 1..22: mol_type = other RNA
gggtctcactcttaccaaggct

SEQ ID NO: 141846 - RNA, 22 nt, synthetic construct
  source 1..22: mol_type = other RNA
gggtctccattttggtcttacc

SEQ ID NO: 141847 - RNA, 22 nt, synthetic construct
  source 1..22: mol_type = other RNA
gggtctggtatctaccaaaaaa

SEQ ID NO: 141848 - RNA, 22 nt, synthetic construct
  source 1..22: mol_type = other RNA
gggtctgtctcacctcaaggcc

SEQ ID NO: 141849 - RNA, 22 nt, synthetic construct
  source 1..22: mol_type = other RNA
gggtctgttttacatgtttaac

SEQ ID NO: 141850 - RNA, 22 nt, synthetic construct
  source 1..22: mol_type = other RNA
gggtcttagttctgcttccaca

SEQ ID NO: 141851 - RNA, 22 nt, synthetic construct
  source 1..22: mol_type = other RNA
gggtcttataggttgaataggg

SEQ ID NO: 141852 - RNA, 22 nt, synthetic construct
  source 1..22: mol_type = other RNA
gggtcttatgctggtgggcttt

SEQ ID NO: 141853 - RNA, 22 nt, synthetic construct
  source 1..22: mol_type = other RNA
gggtcttgctctgtcacccacg

SEQ ID NO: 141854 - RNA, 22 nt, synthetic construct
  source 1..22: mol_type = other RNA
gggtgaaacttgaatactcgtg

SEQ ID NO: 141855 - RNA, 22 nt, synthetic construct
  source 1..22: mol_type = other RNA
gggtgaataacccatatctttg

SEQ ID NO: 141856 - RNA, 22 nt, synthetic construct
  source 1..22: mol_type = other RNA
gggtgacagagagagacctttc

SEQ ID NO: 141857 - RNA, 22 nt, synthetic construct
  source 1..22: mol_type = other RNA
gggtgacagagccgagcagaag

SEQ ID NO: 141858 - RNA, 22 nt, synthetic construct
  source 1..22: mol_type = other RNA
gggtgacctcatgtaactaatt

SEQ ID NO: 141859 - RNA, 22 nt, synthetic construct
  source 1..22: mol_type = other RNA
gggtgactagtgtgaatgagga

SEQ ID NO: 141860 - RNA, 22 nt, synthetic construct
  source 1..22: mol_type = other RNA
gggtgagaccaccacacttgct

SEQ ID NO: 141861 - RNA, 22 nt, synthetic construct
  source 1..22: mol_type = other RNA
gggtgataaaaaggagggaaaa

SEQ ID NO: 141862 - RNA, 22 nt, synthetic construct
  source 1..22: mol_type = other RNA
gggtgatatctgtaagtcatca

SEQ ID NO: 141863 - RNA, 22 nt, synthetic construct
  source 1..22: mol_type = other RNA
gggtgatgttcaaccctcggcc

SEQ ID NO: 141864 - RNA, 22 nt, synthetic construct
  source 1..22: mol_type = other RNA
gggtgcagcctctaatcaggtt

SEQ ID NO: 141865 - RNA, 22 nt, synthetic construct
  source 1..22: mol_type = other RNA
gggtgcgacctcgaagcacaac

SEQ ID NO: 141866 - RNA, 22 nt, synthetic construct
  source 1..22: mol_type = other RNA
gggtgcgttgaccgctttcgtg

SEQ ID NO: 141867 - RNA, 22 nt, synthetic construct
  source 1..22: mol_type = other RNA
gggtgctactcaaagtttagtt

SEQ ID NO: 141868 - RNA, 22 nt, synthetic construct
  source 1..22: mol_type = other RNA
gggtgctgatcaggaaagaccg

SEQ ID NO: 141869 - RNA, 22 nt, synthetic construct
  source 1..22: mol_type = other RNA
gggtggaaattaaacacaccct

SEQ ID NO: 141870 - RNA, 22 nt, synthetic construct
  source 1..22: mol_type = other RNA
gggtggaagctgtccttctcgt

SEQ ID NO: 141871 - RNA, 22 nt, synthetic construct
  source 1..22: mol_type = other RNA
gggtggagtccaaccaatcgca

SEQ ID NO: 141872 - RNA, 22 nt, synthetic construct
  source 1..22: mol_type = other RNA
gggtggatgggtgtagggtttg

SEQ ID NO: 141873 - RNA, 22 nt, synthetic construct
  source 1..22: mol_type = other RNA
gggtggctggcactttcctgat

SEQ ID NO: 141874 - RNA, 22 nt, synthetic construct
  source 1..22: mol_type = other RNA
gggtgggggcatcaaagctacc

SEQ ID NO: 141875 - RNA, 22 nt, synthetic construct
  source 1..22: mol_type = other RNA
gggtggggggatgtagaaggat

SEQ ID NO: 141876 - RNA, 22 nt, synthetic construct
  source 1..22: mol_type = other RNA
gggtggtagggagggggctgag

SEQ ID NO: 141877 - RNA, 22 nt, synthetic construct
  source 1..22: mol_type = other RNA
gggtggtgctggactggaggga

SEQ ID NO: 141878 - RNA, 22 nt, synthetic construct
  source 1..22: mol_type = other RNA
gggtgtaaaaggctaatttttt

SEQ ID NO: 141879 - RNA, 22 nt, synthetic construct
  source 1..22: mol_type = other RNA
gggtgtagccacaagccacatg

SEQ ID NO: 141880 - RNA, 22 nt, synthetic construct
  source 1..22: mol_type = other RNA
gggtgtagggggaaaactccaa

SEQ ID NO: 141881 - RNA, 22 nt, synthetic construct
  source 1..22: mol_type = other RNA
gggtgtagggtttggcagttta

SEQ ID NO: 141882 - RNA, 22 nt, synthetic construct
  source 1..22: mol_type = other RNA
gggtgtcagaaaccatcgttca

SEQ ID NO: 141883 - RNA, 22 nt, synthetic construct
  source 1..22: mol_type = other RNA
gggtgtcagaattccatcagtg

SEQ ID NO: 141884 - RNA, 22 nt, synthetic construct
  source 1..22: mol_type = other RNA
gggtgtgatcaggaaagatgaa

SEQ ID NO: 141885 - RNA, 22 nt, synthetic construct
  source 1..22: mol_type = other RNA
gggtgtgcacgtttgctttgga

SEQ ID NO: 141886 - RNA, 22 nt, synthetic construct
  source 1..22: mol_type = other RNA
gggtgtgtgaatggaaaattca

SEQ ID NO: 141887 - RNA, 22 nt, synthetic construct
  source 1..22: mol_type = other RNA
gggtgtgtttaatttccaccca

SEQ ID NO: 141888 - RNA, 22 nt, synthetic construct
  source 1..22: mol_type = other RNA
gggtgttttcccccctaaaaca

SEQ ID NO: 141889 - RNA, 22 nt, synthetic construct
  source 1..22: mol_type = other RNA
gggttaaaagttagctggcaaa

SEQ ID NO: 141890 - RNA, 22 nt, synthetic construct
  source 1..22: mol_type = other RNA
gggttacagtataggggaactc

SEQ ID NO: 141891 - RNA, 22 nt, synthetic construct
  source 1..22: mol_type = other RNA
gggttagaagacaatactgtta

SEQ ID NO: 141892 - RNA, 22 nt, synthetic construct
  source 1..22: mol_type = other RNA
gggttagattatatggtctacc

SEQ ID NO: 141893 - RNA, 22 nt, synthetic construct
  source 1..22: mol_type = other RNA
gggttagatttttcctttgcct

SEQ ID NO: 141894 - RNA, 22 nt, synthetic construct
  source 1..22: mol_type = other RNA
gggttagggcctagaaatcata

SEQ ID NO: 141895 - RNA, 22 nt, synthetic construct
  source 1..22: mol_type = other RNA
gggttatacacacataaggggg

SEQ ID NO: 141896 - RNA, 22 nt, synthetic construct
  source 1..22: mol_type = other RNA
gggttattaacataccgacggc

SEQ ID NO: 141897 - RNA, 22 nt, synthetic construct
  source 1..22: mol_type = other RNA
gggttattcacccaagaatttc

SEQ ID NO: 141898 - RNA, 22 nt, synthetic construct
  source 1..22: mol_type = other RNA
gggttcaaaccacctaactact

SEQ ID NO: 141899 - RNA, 22 nt, synthetic construct
  source 1..22: mol_type = other RNA
gggttcaagccccagttctgcg

SEQ ID NO: 141900 - RNA, 22 nt, synthetic construct
  source 1..22: mol_type = other RNA
gggttcaattatgtggaaaaaa

SEQ ID NO: 141901 - RNA, 22 nt, synthetic construct
  source 1..22: mol_type = other RNA
gggttcaggtgcctcctgcctc

SEQ ID NO: 141902 - RNA, 22 nt, synthetic construct
  source 1..22: mol_type = other RNA
gggttctcaccaacatccacag

SEQ ID NO: 141903 - RNA, 22 nt, synthetic construct
  source 1..22: mol_type = other RNA
gggttctcccttctattccatt

SEQ ID NO: 141904 - RNA, 22 nt, synthetic construct
  source 1..22: mol_type = other RNA
gggttcttggaaattagaaatg

SEQ ID NO: 141905 - RNA, 22 nt, synthetic construct
  source 1..22: mol_type = other RNA
gggttgaacatcacccagctcg

SEQ ID NO: 141906 - RNA, 22 nt, synthetic construct
  source 1..22: mol_type = other RNA
gggttgatttttaatgagataa

SEQ ID NO: 141907 - RNA, 22 nt, synthetic construct
  source 1..22: mol_type = other RNA
gggttggaggagaaggccttcc

SEQ ID NO: 141908 - RNA, 22 nt, synthetic construct
  source 1..22: mol_type = other RNA
gggttggggtatgtttgattag

SEQ ID NO: 141909 - RNA, 22 nt, synthetic construct
  source 1..22: mol_type = other RNA
gggttggtgcttccttctctta

SEQ ID NO: 141910 - RNA, 22 nt, synthetic construct
  source 1..22: mol_type = other RNA
gggtttaaaagagtgcacattc

SEQ ID NO: 141911 - RNA, 22 nt, synthetic construct
  source 1..22: mol_type = other RNA
gggtttaactgaggtgtttttc

SEQ ID NO: 141912 - RNA, 22 nt, synthetic construct
  source 1..22: mol_type = other RNA
gggtttcagcacaatactgtct

SEQ ID NO: 141913 - RNA, 22 nt, synthetic construct
  source 1..22: mol_type = other RNA
gggtttcagtgagtagggaagg

SEQ ID NO: 141914 - RNA, 22 nt, synthetic construct
  source 1..22: mol_type = other RNA
gggtttcctcggtctacggacg

SEQ ID NO: 141915 - RNA, 22 nt, synthetic construct
  source 1..22: mol_type = other RNA
gggtttccttacctttatcttt

SEQ ID NO: 141916 - RNA, 22 nt, synthetic construct
  source 1..22: mol_type = other RNA
gggtttctgtttggatgaaaaa

SEQ ID NO: 141917 - RNA, 22 nt, synthetic construct
  source 1..22: mol_type = other RNA
gggtttgagtttccagaaaact

SEQ ID NO: 141918 - RNA, 22 nt, synthetic construct
  source 1..22: mol_type = other RNA
gggtttggcagtttaagaatta

SEQ ID NO: 141919 - RNA, 22 nt, synthetic construct
  source 1..22: mol_type = other RNA
gggtttgttttttgttttggtc

SEQ ID NO: 141920 - RNA, 22 nt, synthetic construct
  source 1..22: mol_type = other RNA
gggttttaatataaaaattccg

SEQ ID NO: 141921 - RNA, 22 nt, synthetic construct
  source 1..22: mol_type = other RNA
gggttttctgtagaatatccaa

SEQ ID NO: 141922 - RNA, 22 nt, synthetic construct
  source 1..22: mol_type = other RNA
gggttttggtatgttgtgtttt

SEQ ID NO: 141923 - RNA, 22 nt, synthetic construct
  source 1..22: mol_type = other RNA
gggttttgttttgttttttcac

SEQ ID NO: 141924 - RNA, 22 nt, synthetic construct
  source 1..22: mol_type = other RNA
ggtaaaaagcctgcttcagcct

SEQ ID NO: 141925 - RNA, 22 nt, synthetic construct
  source 1..22: mol_type = other RNA
ggtaaaaagtgcttctagtaac

SEQ ID NO: 141926 - RNA, 22 nt, synthetic construct
  source 1..22: mol_type = other RNA
ggtaaaaataatcaactattcc

SEQ ID NO: 141927 - RNA, 22 nt, synthetic construct
  source 1..22: mol_type = other RNA
ggtaaaacaaattccctctaca

SEQ ID NO: 141928 - RNA, 22 nt, synthetic construct
  source 1..22: mol_type = other RNA
ggtaaaatagtcaagtaacagt

SEQ ID NO: 141929 - RNA, 22 nt, synthetic construct
  source 1..22: mol_type = other RNA
ggtaaaatcactaattcaagtg

SEQ ID NO: 141930 - RNA, 22 nt, synthetic construct
  source 1..22: mol_type = other RNA
ggtaaaatgtggcaaatttatg

SEQ ID NO: 141931 - RNA, 22 nt, synthetic construct
  source 1..22: mol_type = other RNA
ggtaaacaagactcaacatgtg

SEQ ID NO: 141932 - RNA, 22 nt, synthetic construct
  source 1..22: mol_type = other RNA
ggtaaacagaattaaacaatct

SEQ ID NO: 141933 - RNA, 22 nt, synthetic construct
  source 1..22: mol_type = other RNA
ggtaaacagcagtcttaaccat

SEQ ID NO: 141934 - RNA, 22 nt, synthetic construct
  source 1..22: mol_type = other RNA
ggtaaaggggatgggggacgac

SEQ ID NO: 141935 - RNA, 22 nt, synthetic construct
  source 1..22: mol_type = other RNA
ggtaaagtcaattctagttaat

SEQ ID NO: 141936 - RNA, 22 nt, synthetic construct
  source 1..22: mol_type = other RNA
ggtaaatctttgtacagtaatt

SEQ ID NO: 141937 - RNA, 22 nt, synthetic construct
  source 1..22: mol_type = other RNA
ggtaaatggtttctccttctgc

SEQ ID NO: 141938 - RNA, 22 nt, synthetic construct
  source 1..22: mol_type = other RNA
ggtaaattggtcctggaaaaag

SEQ ID NO: 141939 - RNA, 22 nt, synthetic construct
  source 1..22: mol_type = other RNA
ggtaaatttctaaaaacgtgca

SEQ ID NO: 141940 - RNA, 22 nt, synthetic construct
  source 1..22: mol_type = other RNA
ggtaacagccaaataaaacaca

SEQ ID NO: 141941 - RNA, 22 nt, synthetic construct
  source 1..22: mol_type = other RNA
ggtaacgtgagctggaagtaag

SEQ ID NO: 141942 - RNA, 22 nt, synthetic construct
  source 1..22: mol_type = other RNA
ggtaactagatgcctcgaaggc

SEQ ID NO: 141943 - RNA, 22 nt, synthetic construct
  source 1..22: mol_type = other RNA
ggtaactcctgttctttggagc

SEQ ID NO: 141944 - RNA, 22 nt, synthetic construct
  source 1..22: mol_type = other RNA
ggtaactgatgtgaggatctgt

SEQ ID NO: 141945 - RNA, 22 nt, synthetic construct
  source 1..22: mol_type = other RNA
ggtaagaaaaattccctcagca

SEQ ID NO: 141946 - RNA, 22 nt, synthetic construct
  source 1..22: mol_type = other RNA
ggtaagaaaggagttcagcttt

SEQ ID NO: 141947 - RNA, 22 nt, synthetic construct
  source 1..22: mol_type = other RNA
ggtaagaacacttaacatgaga

SEQ ID NO: 141948 - RNA, 22 nt, synthetic construct
  source 1..22: mol_type = other RNA
ggtaagaacttgtctttgtcta

SEQ ID NO: 141949 - RNA, 22 nt, synthetic construct
  source 1..22: mol_type = other RNA
ggtaagaatgtcaagctgtttg

SEQ ID NO: 141950 - RNA, 22 nt, synthetic construct
  source 1..22: mol_type = other RNA
ggtaagaccaaaatggagaccc

SEQ ID NO: 141951 - RNA, 22 nt, synthetic construct
  source 1..22: mol_type = other RNA
ggtaagattccgtctcaaaaaa

SEQ ID NO: 141952 - RNA, 22 nt, synthetic construct
  source 1..22: mol_type = other RNA
ggtaagattgtggtccagaaaa

SEQ ID NO: 141953 - RNA, 22 nt, synthetic construct
  source 1..22: mol_type = other RNA
ggtaagctgtgagtccttccag

SEQ ID NO: 141954 - RNA, 22 nt, synthetic construct
  source 1..22: mol_type = other RNA
ggtaaggaaacagagttttcca

SEQ ID NO: 141955 - RNA, 22 nt, synthetic construct
  source 1..22: mol_type = other RNA
ggtaaggaaaccccagggatat

SEQ ID NO: 141956 - RNA, 22 nt, synthetic construct
  source 1..22: mol_type = other RNA
ggtaaggactgaagtcctttct

SEQ ID NO: 141957 - RNA, 22 nt, synthetic construct
  source 1..22: mol_type = other RNA
ggtaaggagccaaacatcatga

SEQ ID NO: 141958 - RNA, 22 nt, synthetic construct
  source 1..22: mol_type = other RNA
ggtaagggtccagcttcactct

SEQ ID NO: 141959 - RNA, 22 nt, synthetic construct
  source 1..22: mol_type = other RNA
ggtaataatgaaagctcccaat

SEQ ID NO: 141960 - RNA, 22 nt, synthetic construct
  source 1..22: mol_type = other RNA
ggtaatacagtctgatttactt

SEQ ID NO: 141961 - RNA, 22 nt, synthetic construct
  source 1..22: mol_type = other RNA
ggtaatactataaggaaataca

SEQ ID NO: 141962 - RNA, 22 nt, synthetic construct
  source 1..22: mol_type = other RNA
ggtaatactctagtggtgctta

SEQ ID NO: 141963 - RNA, 22 nt, synthetic construct
  source 1..22: mol_type = other RNA
ggtaatcacagctactcagggg

SEQ ID NO: 141964 - RNA, 22 nt, synthetic construct
  source 1..22: mol_type = other RNA
ggtaatctagtttatctcatta

SEQ ID NO: 141965 - RNA, 22 nt, synthetic construct
  source 1..22: mol_type = other RNA
ggtaatgaatagaaaatcctta

SEQ ID NO: 141966 - RNA, 22 nt, synthetic construct
  source 1..22: mol_type = other RNA
ggtaatgacaataataactaca

SEQ ID NO: 141967 - RNA, 22 nt, synthetic construct
  source 1..22: mol_type = other RNA
ggtaatgctggcttcatgggtg

SEQ ID NO: 141968 - RNA, 22 nt, synthetic construct
  source 1..22: mol_type = other RNA
ggtaatgggaaagacaggtaga

SEQ ID NO: 141969 - RNA, 22 nt, synthetic construct
  source 1..22: mol_type = other RNA
ggtaatgttatatttccgtatc

SEQ ID NO: 141970 - RNA, 22 nt, synthetic construct
  source 1..22: mol_type = other RNA
ggtaattggttcgtttgaggct

SEQ ID NO: 141971 - RNA, 22 nt, synthetic construct
  source 1..22: mol_type = other RNA
ggtaatttatctccataagtcc

SEQ ID NO: 141972 - RNA, 22 nt, synthetic construct
  source 1..22: mol_type = other RNA
ggtaatttgtccatctggatta

SEQ ID NO: 141973 - RNA, 22 nt, synthetic construct
  source 1..22: mol_type = other RNA
ggtaattttggggccatctgaa

SEQ ID NO: 141974 - RNA, 22 nt, synthetic construct
  source 1..22: mol_type = other RNA
ggtacaattacacatctcccat

SEQ ID NO: 141975 - RNA, 22 nt, synthetic construct
  source 1..22: mol_type = other RNA
ggtacacatcctaatacagtaa

SEQ ID NO: 141976 - RNA, 22 nt, synthetic construct
  source 1..22: mol_type = other RNA
ggtacagaactgctaatggtcc

SEQ ID NO: 141977 - RNA, 22 nt, synthetic construct
  source 1..22: mol_type = other RNA
ggtacagggtttctgtttggat

SEQ ID NO: 141978 - RNA, 22 nt, synthetic construct
  source 1..22: mol_type = other RNA
ggtaccaaagcagaaatacaga

SEQ ID NO: 141979 - RNA, 22 nt, synthetic construct
  source 1..22: mol_type = other RNA
ggtacgacgctcttgttcaaaa

SEQ ID NO: 141980 - RNA, 22 nt, synthetic construct
  source 1..22: mol_type = other RNA
ggtactcaacgacaatctctgg

SEQ ID NO: 141981 - RNA, 22 nt, synthetic construct
  source 1..22: mol_type = other RNA
ggtactctatgatatatacttt

SEQ ID NO: 141982 - RNA, 22 nt, synthetic construct
  source 1..22: mol_type = other RNA
ggtactgcctccacaggctttg

SEQ ID NO: 141983 - RNA, 22 nt, synthetic construct
  source 1..22: mol_type = other RNA
ggtactggtaccaaagcagaaa

SEQ ID NO: 141984 - RNA, 22 nt, synthetic construct
  source 1..22: mol_type = other RNA
ggtagaaacatcccaagtgccc

SEQ ID NO: 141985 - RNA, 22 nt, synthetic construct
  source 1..22: mol_type = other RNA
ggtagaagataatgttagaatt

SEQ ID NO: 141986 - RNA, 22 nt, synthetic construct
  source 1..22: mol_type = other RNA
ggtagaagcagcaagggtggct

SEQ ID NO: 141987 - RNA, 22 nt, synthetic construct
  source 1..22: mol_type = other RNA
ggtagaagtacaaacattacag

SEQ ID NO: 141988 - RNA, 22 nt, synthetic construct
  source 1..22: mol_type = other RNA
ggtagaatgaaaatttttgtct

SEQ ID NO: 141989 - RNA, 22 nt, synthetic construct
  source 1..22: mol_type = other RNA
ggtagacatgagtaaaaagaaa

SEQ ID NO: 141990 - RNA, 22 nt, synthetic construct
  source 1..22: mol_type = other RNA
ggtagacatgtgccatgttggt

SEQ ID NO: 141991 - RNA, 22 nt, synthetic construct
  source 1..22: mol_type = other RNA
ggtagaccatataatctaaccc

SEQ ID NO: 141992 - RNA, 22 nt, synthetic construct
  source 1..22: mol_type = other RNA
ggtagactgtaaaaattttctc

SEQ ID NO: 141993 - RNA, 22 nt, synthetic construct
  source 1..22: mol_type = other RNA
ggtagagactggatcctggagg

SEQ ID NO: 141994 - RNA, 22 nt, synthetic construct
  source 1..22: mol_type = other RNA
ggtagagcactttcgtattttt

SEQ ID NO: 141995 - RNA, 22 nt, synthetic construct
  source 1..22: mol_type = other RNA
ggtagaggattccaggtttaca

SEQ ID NO: 141996 - RNA, 22 nt, synthetic construct
  source 1..22: mol_type = other RNA
ggtagataccagaccctttatc

SEQ ID NO: 141997 - RNA, 22 nt, synthetic construct
  source 1..22: mol_type = other RNA
ggtagatttctgcatagagatc

SEQ ID NO: 141998 - RNA, 22 nt, synthetic construct
  source 1..22: mol_type = other RNA
ggtagcacaactagtaagtaaa

SEQ ID NO: 141999 - RNA, 22 nt, synthetic construct
  source 1..22: mol_type = other RNA
ggtagctgctttttaaaaatta

SEQ ID NO: 142000 - RNA, 22 nt, synthetic construct
  source 1..22: mol_type = other RNA
ggtagcttgggctaaggtggag

SEQ ID NO: 142001 - RNA, 22 nt, synthetic construct
  source 1..22: mol_type = other RNA
ggtagctttgatgcccccaccc

SEQ ID NO: 142002 - RNA, 22 nt, synthetic construct
  source 1..22: mol_type = other RNA
ggtagcttttcctgctgtcgtt

SEQ ID NO: 142003 - RNA, 22 nt, synthetic construct
  source 1..22: mol_type = other RNA
ggtaggaaaagacttctcaaac

SEQ ID NO: 142004 - RNA, 22 nt, synthetic construct
  source 1..22: mol_type = other RNA
ggtaggaagctgatcaaggaag

SEQ ID NO: 142005 - RNA, 22 nt, synthetic construct
  source 1..22: mol_type = other RNA
ggtaggaaggcggtggggacag

SEQ ID NO: 142006 - RNA, 22 nt, synthetic construct
  source 1..22: mol_type = other RNA
ggtaggagggtgtgatcaggaa

SEQ ID NO: 142007 - RNA, 22 nt, synthetic construct
  source 1..22: mol_type = other RNA
ggtaggccaaggcgggaggatc

SEQ ID NO: 142008 - RNA, 22 nt, synthetic construct
  source 1..22: mol_type = other RNA
ggtaggcttagatgagcccagg

SEQ ID NO: 142009 - RNA, 22 nt, synthetic construct
  source 1..22: mol_type = other RNA
ggtagggagggggctgaggatt

SEQ ID NO: 142010 - RNA, 22 nt, synthetic construct
  source 1..22: mol_type = other RNA
ggtagggaggggtattcagggg

SEQ ID NO: 142011 - RNA, 22 nt, synthetic construct
  source 1..22: mol_type = other RNA
ggtagggataagaataccaaat

SEQ ID NO: 142012 - RNA, 22 nt, synthetic construct
  source 1..22: mol_type = other RNA
ggtagggttggggtatgtttga

SEQ ID NO: 142013 - RNA, 22 nt, synthetic construct
  source 1..22: mol_type = other RNA
ggtaggtgctttttgtatcctg

SEQ ID NO: 142014 - RNA, 22 nt, synthetic construct
  source 1..22: mol_type = other RNA
ggtaggtgtgtgtaatcccagc

SEQ ID NO: 142015 - RNA, 22 nt, synthetic construct
  source 1..22: mol_type = other RNA
ggtagtaaggatcgttagtatt

SEQ ID NO: 142016 - RNA, 22 nt, synthetic construct
  source 1..22: mol_type = other RNA
ggtagtacatattcattgtaag

SEQ ID NO: 142017 - RNA, 22 nt, synthetic construct
  source 1..22: mol_type = other RNA
ggtagtcaacacttttccagtc

SEQ ID NO: 142018 - RNA, 22 nt, synthetic construct
  source 1..22: mol_type = other RNA
ggtagtcaatgcaatgcgtgtg

SEQ ID NO: 142019 - RNA, 22 nt, synthetic construct
  source 1..22: mol_type = other RNA
ggtagtcttgtcataacagtat

SEQ ID NO: 142020 - RNA, 22 nt, synthetic construct
  source 1..22: mol_type = other RNA
ggtagttacacaagtgtttcat

SEQ ID NO: 142021 - RNA, 22 nt, synthetic construct
  source 1..22: mol_type = other RNA
ggtagtttctttgaacttatat

SEQ ID NO: 142022 - RNA, 22 nt, synthetic construct
  source 1..22: mol_type = other RNA
ggtagtttgcacgtttttagaa

SEQ ID NO: 142023 - RNA, 22 nt, synthetic construct
  source 1..22: mol_type = other RNA
ggtataaaggatgcacaagaca

SEQ ID NO: 142024 - RNA, 22 nt, synthetic construct
  source 1..22: mol_type = other RNA
ggtataaagtttccgttttgca

SEQ ID NO: 142025 - RNA, 22 nt, synthetic construct
  source 1..22: mol_type = other RNA
ggtataaatgatgagctactgc

SEQ ID NO: 142026 - RNA, 22 nt, synthetic construct
  source 1..22: mol_type = other RNA
ggtatacagcaaaagaattaaa

SEQ ID NO: 142027 - RNA, 22 nt, synthetic construct
  source 1..22: mol_type = other RNA
ggtatatttctgtaaacatgaa

SEQ ID NO: 142028 - RNA, 22 nt, synthetic construct
  source 1..22: mol_type = other RNA
ggtatcaattgtaatgtctcct

SEQ ID NO: 142029 - RNA, 22 nt, synthetic construct
  source 1..22: mol_type = other RNA
ggtatcacagtgaggacgctga

SEQ ID NO: 142030 - RNA, 22 nt, synthetic construct
  source 1..22: mol_type = other RNA
ggtatcaccatctgataagccc

SEQ ID NO: 142031 - RNA, 22 nt, synthetic construct
  source 1..22: mol_type = other RNA
ggtatcactttttgtatttcct

SEQ ID NO: 142032 - RNA, 22 nt, synthetic construct
  source 1..22: mol_type = other RNA
ggtatcatattatttttgtcct

SEQ ID NO: 142033 - RNA, 22 nt, synthetic construct
  source 1..22: mol_type = other RNA
ggtatcatcggaaatataaaaa

SEQ ID NO: 142034 - RNA, 22 nt, synthetic construct
  source 1..22: mol_type = other RNA
ggtatcatttccaagattgaaa

SEQ ID NO: 142035 - RNA, 22 nt, synthetic construct
  source 1..22: mol_type = other RNA
ggtatctaccaaaaaactacga

SEQ ID NO: 142036 - RNA, 22 nt, synthetic construct
  source 1..22: mol_type = other RNA
ggtatctccccaaagatattag

SEQ ID NO: 142037 - RNA, 22 nt, synthetic construct
  source 1..22: mol_type = other RNA
ggtatgagtgtttcccttaaaa

SEQ ID NO: 142038 - RNA, 22 nt, synthetic construct
  source 1..22: mol_type = other RNA
ggtatgcactgtactcctagat

SEQ ID NO: 142039 - RNA, 22 nt, synthetic construct
  source 1..22: mol_type = other RNA
ggtatgcatcttgaactaagtg

SEQ ID NO: 142040 - RNA, 22 nt, synthetic construct
  source 1..22: mol_type = other RNA
ggtatggagacactagggactg

SEQ ID NO: 142041 - RNA, 22 nt, synthetic construct
  source 1..22: mol_type = other RNA
ggtatggcgactcatgcctgta

SEQ ID NO: 142042 - RNA, 22 nt, synthetic construct
  source 1..22: mol_type = other RNA
ggtatgggagatgtgtaattgt

SEQ ID NO: 142043 - RNA, 22 nt, synthetic construct
  source 1..22: mol_type = other RNA
ggtatgtacccaatggattata

SEQ ID NO: 142044 - RNA, 22 nt, synthetic construct
  source 1..22: mol_type = other RNA
ggtatgtgccatctccttaatc

SEQ ID NO: 142045 - RNA, 22 nt, synthetic construct
  source 1..22: mol_type = other RNA
ggtatgttaataaccctgtttt

SEQ ID NO: 142046 - RNA, 22 nt, synthetic construct
  source 1..22: mol_type = other RNA
ggtatgttgtgttttcattcgt

SEQ ID NO: 142047 - RNA, 22 nt, synthetic construct
  source 1..22: mol_type = other RNA
ggtatgtttgattagttgactc

SEQ ID NO: 142048 - RNA, 22 nt, synthetic construct
  source 1..22: mol_type = other RNA
ggtattattttcacagacagta

SEQ ID NO: 142049 - RNA, 22 nt, synthetic construct
  source 1..22: mol_type = other RNA
ggtattcagggggctaaatgct

SEQ ID NO: 142050 - RNA, 22 nt, synthetic construct
  source 1..22: mol_type = other RNA
ggtattcatgctgtgaatttgg

SEQ ID NO: 142051 - RNA, 22 nt, synthetic construct
  source 1..22: mol_type = other RNA
ggtattctatcatcaagacaga

SEQ ID NO: 142052 - RNA, 22 nt, synthetic construct
  source 1..22: mol_type = other RNA
ggtattctgaactttcaaccta

SEQ ID NO: 142053 - RNA, 22 nt, synthetic construct
  source 1..22: mol_type = other RNA
ggtattcttatccctacctaaa

SEQ ID NO: 142054 - RNA, 22 nt, synthetic construct
  source 1..22: mol_type = other RNA
ggtattgagcctgttccgattt

SEQ ID NO: 142055 - RNA, 22 nt, synthetic construct
  source 1..22: mol_type = other RNA
ggtatttaatctgtcagcagtt

SEQ ID NO: 142056 - RNA, 22 nt, synthetic construct
  source 1..22: mol_type = other RNA
ggtatttctaaatcaacagtgt

SEQ ID NO: 142057 - RNA, 22 nt, synthetic construct
  source 1..22: mol_type = other RNA
ggtatttggggctaggatttca

SEQ ID NO: 142058 - RNA, 22 nt, synthetic construct
  source 1..22: mol_type = other RNA
ggtattttaagattctctttag

SEQ ID NO: 142059 - RNA, 22 nt, synthetic construct
  source 1..22: mol_type = other RNA
ggtattttgttgttgttgtttc

SEQ ID NO: 142060 - RNA, 22 nt, synthetic construct
  source 1..22: mol_type = other RNA
ggtattttttagagacagggtc

SEQ ID NO: 142061 - RNA, 22 nt, synthetic construct
  source 1..22: mol_type = other RNA
ggtcaaaactgtattttctaaa

SEQ ID NO: 142062 - RNA, 22 nt, synthetic construct
  source 1..22: mol_type = other RNA
ggtcaaactcacttattagcaa

SEQ ID NO: 142063 - RNA, 22 nt, synthetic construct
  source 1..22: mol_type = other RNA
ggtcaaatcaatacttcatttc

SEQ ID NO: 142064 - RNA, 22 nt, synthetic construct
  source 1..22: mol_type = other RNA
ggtcaaatggtaacagccaaat

SEQ ID NO: 142065 - RNA, 22 nt, synthetic construct
  source 1..22: mol_type = other RNA
ggtcaacaaactaactagaaaa

SEQ ID NO: 142066 - RNA, 22 nt, synthetic construct
  source 1..22: mol_type = other RNA
ggtcaacacatcagcgctaagt

SEQ ID NO: 142067 - RNA, 22 nt, synthetic construct
  source 1..22: mol_type = other RNA
ggtcaacagggtaagattccgt

SEQ ID NO: 142068 - RNA, 22 nt, synthetic construct
  source 1..22: mol_type = other RNA
ggtcaacatgaaaagatactca

SEQ ID NO: 142069 - RNA, 22 nt, synthetic construct
  source 1..22: mol_type = other RNA
ggtcaaccactaaggtcaacac

SEQ ID NO: 142070 - RNA, 22 nt, synthetic construct
  source 1..22: mol_type = other RNA
ggtcaacgcacccagagcgggt

SEQ ID NO: 142071 - RNA, 22 nt, synthetic construct
  source 1..22: mol_type = other RNA
ggtcaagaaataaaacatggcc

SEQ ID NO: 142072 - RNA, 22 nt, synthetic construct
  source 1..22: mol_type = other RNA
ggtcaagagagattaaataact

SEQ ID NO: 142073 - RNA, 22 nt, synthetic construct
  source 1..22: mol_type = other RNA
ggtcaagagcggcctttgcctc

SEQ ID NO: 142074 - RNA, 22 nt, synthetic construct
  source 1..22: mol_type = other RNA
ggtcaatctaggaggtctaaga

SEQ ID NO: 142075 - RNA, 22 nt, synthetic construct
  source 1..22: mol_type = other RNA
ggtcaatctgaaaaatatcaat

SEQ ID NO: 142076 - RNA, 22 nt, synthetic construct
  source 1..22: mol_type = other RNA
ggtcaattgatctgccaggaca

SEQ ID NO: 142077 - RNA, 22 nt, synthetic construct
  source 1..22: mol_type = other RNA
ggtcaatttcatcgtaaaaagc

SEQ ID NO: 142078 - RNA, 22 nt, synthetic construct
  source 1..22: mol_type = other RNA
ggtcacaaacacaaaacaaatg

SEQ ID NO: 142079 - RNA, 22 nt, synthetic construct
  source 1..22: mol_type = other RNA
ggtcacactttttgtgagtttt

SEQ ID NO: 142080 - RNA, 22 nt, synthetic construct
  source 1..22: mol_type = other RNA
ggtcacattcagaggtatttgg

SEQ ID NO: 142081 - RNA, 22 nt, synthetic construct
  source 1..22: mol_type = other RNA
ggtcacattctgcctgcagact

SEQ ID NO: 142082 - RNA, 22 nt, synthetic construct
  source 1..22: mol_type = other RNA
ggtcacccaagccacagcgtgg

SEQ ID NO: 142083 - RNA, 22 nt, synthetic construct
  source 1..22: mol_type = other RNA
ggtcacctagcctctctgggct

SEQ ID NO: 142084 - RNA, 22 nt, synthetic construct
  source 1..22: mol_type = other RNA
ggtcactattaaccatatggtt

SEQ ID NO: 142085 - RNA, 22 nt, synthetic construct
  source 1..22: mol_type = other RNA
ggtcactgcagtctcaaactcc

SEQ ID NO: 142086 - RNA, 22 nt, synthetic construct
  source 1..22: mol_type = other RNA
ggtcactgctgatgtaagtggg

SEQ ID NO: 142087 - RNA, 22 nt, synthetic construct
  source 1..22: mol_type = other RNA
ggtcactggccactgattgagt

SEQ ID NO: 142088 - RNA, 22 nt, synthetic construct
  source 1..22: mol_type = other RNA
ggtcactgtttggacagtaaaa

SEQ ID NO: 142089 - RNA, 22 nt, synthetic construct
  source 1..22: mol_type = other RNA
ggtcacttcctctcttaaatcc

SEQ ID NO: 142090 - RNA, 22 nt, synthetic construct
  source 1..22: mol_type = other RNA
ggtcagaaaaatggaatatttt

SEQ ID NO: 142091 - RNA, 22 nt, synthetic construct
  source 1..22: mol_type = other RNA
ggtcagaagtttggaaccagcc

SEQ ID NO: 142092 - RNA, 22 nt, synthetic construct
  source 1..22: mol_type = other RNA
ggtcagaatacaaaaatgacac

SEQ ID NO: 142093 - RNA, 22 nt, synthetic construct
  source 1..22: mol_type = other RNA
ggtcagaatcgtgatagtcttc

SEQ ID NO: 142094 - RNA, 22 nt, synthetic construct
  source 1..22: mol_type = other RNA
ggtcagaattttattttcttca

SEQ ID NO: 142095 - RNA, 22 nt, synthetic construct
  source 1..22: mol_type = other RNA
ggtcagagttgtatctgtgatc

SEQ ID NO: 142096 - RNA, 22 nt, synthetic construct
  source 1..22: mol_type = other RNA
ggtcagccagaggaagcttata

SEQ ID NO: 142097 - RNA, 22 nt, synthetic construct
  source 1..22: mol_type = other RNA
ggtcagctagtgtgtctgacta

SEQ ID NO: 142098 - RNA, 22 nt, synthetic construct
  source 1..22: mol_type = other RNA
ggtcaggaaggcaggaggcctc

SEQ ID NO: 142099 - RNA, 22 nt, synthetic construct
  source 1..22: mol_type = other RNA
ggtcagtactatcttccctaaa

SEQ ID NO: 142100 - RNA, 22 nt, synthetic construct
  source 1..22: mol_type = other RNA
ggtcagtagtacagtgagtaga

SEQ ID NO: 142101 - RNA, 22 nt, synthetic construct
  source 1..22: mol_type = other RNA
ggtcatcctttcccttctgctc

SEQ ID NO: 142102 - RNA, 22 nt, synthetic construct
  source 1..22: mol_type = other RNA
ggtcatgacttttttgcccact

SEQ ID NO: 142103 - RNA, 22 nt, synthetic construct
  source 1..22: mol_type = other RNA
ggtcatgcacacgctggaaggg

SEQ ID NO: 142104 - RNA, 22 nt, synthetic construct
  source 1..22: mol_type = other RNA
ggtcattacatattttgtaacg

SEQ ID NO: 142105 - RNA, 22 nt, synthetic construct
  source 1..22: mol_type = other RNA
ggtcattctggagtgttttctt

SEQ ID NO: 142106 - RNA, 22 nt, synthetic construct
  source 1..22: mol_type = other RNA
ggtcatttttcacttcttattg

SEQ ID NO: 142107 - RNA, 22 nt, synthetic construct
  source 1..22: mol_type = other RNA
ggtccaagacaggaagaattat

SEQ ID NO: 142108 - RNA, 22 nt, synthetic construct
  source 1..22: mol_type = other RNA
ggtccacagaggctttttatat

SEQ ID NO: 142109 - RNA, 22 nt, synthetic construct
  source 1..22: mol_type = other RNA
ggtccagatgaagcagggaaat

SEQ ID NO: 142110 - RNA, 22 nt, synthetic construct
  source 1..22: mol_type = other RNA
ggtccagcttcactcttctgca

SEQ ID NO: 142111 - RNA, 22 nt, synthetic construct
  source 1..22: mol_type = other RNA
ggtccccagcatccactagggg

SEQ ID NO: 142112 - RNA, 22 nt, synthetic construct
  source 1..22: mol_type = other RNA
ggtccctacaaaggacatgaac

SEQ ID NO: 142113 - RNA, 22 nt, synthetic construct
  source 1..22: mol_type = other RNA
ggtccctgctactcaggagatt

SEQ ID NO: 142114 - RNA, 22 nt, synthetic construct
  source 1..22: mol_type = other RNA
ggtccggctctgcggcgggtct

SEQ ID NO: 142115 - RNA, 22 nt, synthetic construct
  source 1..22: mol_type = other RNA
ggtcctgaactcgtggcctcaa

SEQ ID NO: 142116 - RNA, 22 nt, synthetic construct
  source 1..22: mol_type = other RNA
ggtcctgagctttccttagttc

SEQ ID NO: 142117 - RNA, 22 nt, synthetic construct
  source 1..22: mol_type = other RNA
ggtcctgagggctttgtgaagg

SEQ ID NO: 142118 - RNA, 22 nt, synthetic construct
  source 1..22: mol_type = other RNA
ggtcctgcatatgtttttatta

SEQ ID NO: 142119 - RNA, 22 nt, synthetic construct
  source 1..22: mol_type = other RNA
ggtcctggaaaaagaccataat

SEQ ID NO: 142120 - RNA, 22 nt, synthetic construct
  source 1..22: mol_type = other RNA
ggtccttaaatttctaaggttc

SEQ ID NO: 142121 - RNA, 22 nt, synthetic construct
  source 1..22: mol_type = other RNA
ggtccttgctgaagaataactg

SEQ ID NO: 142122 - RNA, 22 nt, synthetic construct
  source 1..22: mol_type = other RNA
ggtccttttttactgacttttc

SEQ ID NO: 142123 - RNA, 22 nt, synthetic construct
  source 1..22: mol_type = other RNA
ggtcgaaaacctgaaatggctt

SEQ ID NO: 142124 - RNA, 22 nt, synthetic construct
  source 1..22: mol_type = other RNA
ggtcgagactgtaatgagctga

SEQ ID NO: 142125 - RNA, 22 nt, synthetic construct
  source 1..22: mol_type = other RNA
ggtcgagctgggtgatgttcaa

SEQ ID NO: 142126 - RNA, 22 nt, synthetic construct
  source 1..22: mol_type = other RNA
ggtcgcaccctgagcatccccg

SEQ ID NO: 142127 - RNA, 22 nt, synthetic construct
  source 1..22: mol_type = other RNA
ggtcgcggacgcgcatttttta

SEQ ID NO: 142128 - RNA, 22 nt, synthetic construct
  source 1..22: mol_type = other RNA
ggtcggaaggaatgtgcttcct

SEQ ID NO: 142129 - RNA, 22 nt, synthetic construct
  source 1..22: mol_type = other RNA
ggtcgggtgtcagaaaccatcg

SEQ ID NO: 142130 - RNA, 22 nt, synthetic construct
  source 1..22: mol_type = other RNA
ggtcgttggatttatctttcta

SEQ ID NO: 142131 - RNA, 22 nt, synthetic construct
  source 1..22: mol_type = other RNA
ggtcgtttcagattgcttgaga

SEQ ID NO: 142132 - RNA, 22 nt, synthetic construct
  source 1..22: mol_type = other RNA
ggtctaagagataactaatgag

SEQ ID NO: 142133 - RNA, 22 nt, synthetic construct
  source 1..22: mol_type = other RNA
ggtctacaaaaggtttccagtg

SEQ ID NO: 142134 - RNA, 22 nt, synthetic construct
  source 1..22: mol_type = other RNA
ggtctaccatgttgttcttttc

SEQ ID NO: 142135 - RNA, 22 nt, synthetic construct
  source 1..22: mol_type = other RNA
ggtctacggacgcaggcaaaca

SEQ ID NO: 142136 - RNA, 22 nt, synthetic construct
  source 1..22: mol_type = other RNA
ggtctaggctaatgtgtgttcc

SEQ ID NO: 142137 - RNA, 22 nt, synthetic construct
  source 1..22: mol_type = other RNA
ggtctagtgtgcatgtgttgtg

SEQ ID NO: 142138 - RNA, 22 nt, synthetic construct
  source 1..22: mol_type = other RNA
ggtctatagtttaattggggga

SEQ ID NO: 142139 - RNA, 22 nt, synthetic construct
  source 1..22: mol_type = other RNA
ggtctatctcattataacataa

SEQ ID NO: 142140 - RNA, 22 nt, synthetic construct
  source 1..22: mol_type = other RNA
ggtctatgtgacagaatgcatc

SEQ ID NO: 142141 - RNA, 22 nt, synthetic construct
  source 1..22: mol_type = other RNA
ggtctcaaaacaaacaaacaga

SEQ ID NO: 142142 - RNA, 22 nt, synthetic construct
  source 1..22: mol_type = other RNA
ggtctcaaaatttaaagttagt

SEQ ID NO: 142143 - RNA, 22 nt, synthetic construct
  source 1..22: mol_type = other RNA
ggtctcaaactccaagtctcat

SEQ ID NO: 142144 - RNA, 22 nt, synthetic construct
  source 1..22: mol_type = other RNA
ggtctcaatctcctgatccacc

SEQ ID NO: 142145 - RNA, 22 nt, synthetic construct
  source 1..22: mol_type = other RNA
ggtctcacactgttgtccaggc

SEQ ID NO: 142146 - RNA, 22 nt, synthetic construct
  source 1..22: mol_type = other RNA
ggtctcaccctcaggactctgc

SEQ ID NO: 142147 - RNA, 22 nt, synthetic construct
  source 1..22: mol_type = other RNA
ggtctcactcttaccaaggctg

SEQ ID NO: 142148 - RNA, 22 nt, synthetic construct
  source 1..22: mol_type = other RNA
ggtctcagccttttctgatttg

SEQ ID NO: 142149 - RNA, 22 nt, synthetic construct
  source 1..22: mol_type = other RNA
ggtctcagctcctcagaaggcc

SEQ ID NO: 142150 - RNA, 22 nt, synthetic construct
  source 1..22: mol_type = other RNA
ggtctcattcactagacacatt

SEQ ID NO: 142151 - RNA, 22 nt, synthetic construct
  source 1..22: mol_type = other RNA
ggtctccattttggtcttaccc

SEQ ID NO: 142152 - RNA, 22 nt, synthetic construct
  source 1..22: mol_type = other RNA
ggtctcccagcatgaagccctc

SEQ ID NO: 142153 - RNA, 22 nt, synthetic construct
  source 1..22: mol_type = other RNA
ggtctccttgtatggagactag

SEQ ID NO: 142154 - RNA, 22 nt, synthetic construct
  source 1..22: mol_type = other RNA
ggtctcctttctatacttcatc

SEQ ID NO: 142155 - RNA, 22 nt, synthetic construct
  source 1..22: mol_type = other RNA
ggtctcgaactctcgacctcgt

SEQ ID NO: 142156 - RNA, 22 nt, synthetic construct
  source 1..22: mol_type = other RNA
ggtctcgagctcctgacctcag

SEQ ID NO: 142157 - RNA, 22 nt, synthetic construct
  source 1..22: mol_type = other RNA
ggtctctctgaaattagctaag

SEQ ID NO: 142158 - RNA, 22 nt, synthetic construct
  source 1..22: mol_type = other RNA
ggtctcttcgagggggctgagt

SEQ ID NO: 142159 - RNA, 22 nt, synthetic construct
  source 1..22: mol_type = other RNA
ggtctctttgaaaggaatccgg

SEQ ID NO: 142160 - RNA, 22 nt, synthetic construct
  source 1..22: mol_type = other RNA
ggtctgcagactcttgtcccgg

SEQ ID NO: 142161 - RNA, 22 nt, synthetic construct
  source 1..22: mol_type = other RNA
ggtctggaatgtgtagttctgg

SEQ ID NO: 142162 - RNA, 22 nt, synthetic construct
  source 1..22: mol_type = other RNA
ggtctgggtgatatctgtaagt

SEQ ID NO: 142163 - RNA, 22 nt, synthetic construct
  source 1..22: mol_type = other RNA
ggtctggtatctaccaaaaaac

SEQ ID NO: 142164 - RNA, 22 nt, synthetic construct
  source 1..22: mol_type = other RNA
ggtctgtaagtcagttaacagt

SEQ ID NO: 142165 - RNA, 22 nt, synthetic construct
  source 1..22: mol_type = other RNA
ggtctgtatttctgctttggta

SEQ ID NO: 142166 - RNA, 22 nt, synthetic construct
  source 1..22: mol_type = other RNA
ggtctgtctcacctcaaggcca

SEQ ID NO: 142167 - RNA, 22 nt, synthetic construct
  source 1..22: mol_type = other RNA
ggtctgtctttcagtatgtgtc

SEQ ID NO: 142168 - RNA, 22 nt, synthetic construct
  source 1..22: mol_type = other RNA
ggtctgttactcccgatttcag

SEQ ID NO: 142169 - RNA, 22 nt, synthetic construct
  source 1..22: mol_type = other RNA
ggtctgttttacatgtttaact

SEQ ID NO: 142170 - RNA, 22 nt, synthetic construct
  source 1..22: mol_type = other RNA
ggtcttaagagactctcaagaa

SEQ ID NO: 142171 - RNA, 22 nt, synthetic construct
  source 1..22: mol_type = other RNA
ggtcttaccctctagctcccca

SEQ ID NO: 142172 - RNA, 22 nt, synthetic construct
  source 1..22: mol_type = other RNA
ggtcttagttctgcttccacat

SEQ ID NO: 142173 - RNA, 22 nt, synthetic construct
  source 1..22: mol_type = other RNA
ggtcttataggttgaatagggc

SEQ ID NO: 142174 - RNA, 22 nt, synthetic construct
  source 1..22: mol_type = other RNA
ggtcttatgctggtgggctttg

SEQ ID NO: 142175 - RNA, 22 nt, synthetic construct
  source 1..22: mol_type = other RNA
ggtcttcaacctcaactttagg

SEQ ID NO: 142176 - RNA, 22 nt, synthetic construct
  source 1..22: mol_type = other RNA
ggtcttctagctttcagcactg

SEQ ID NO: 142177 - RNA, 22 nt, synthetic construct
  source 1..22: mol_type = other RNA
ggtcttgctctgtcacccacgt

SEQ ID NO: 142178 - RNA, 22 nt, synthetic construct
  source 1..22: mol_type = other RNA
ggtcttgtactcccagcctcaa

SEQ ID NO: 142179 - RNA, 22 nt, synthetic construct
  source 1..22: mol_type = other RNA
ggtcttgtctcaacctttgcct

SEQ ID NO: 142180 - RNA, 22 nt, synthetic construct
  source 1..22: mol_type = other RNA
ggtctttaaaagaaagctctca

SEQ ID NO: 142181 - RNA, 22 nt, synthetic construct
  source 1..22: mol_type = other RNA
ggtctttcctgatcagcaccct

SEQ ID NO: 142182 - RNA, 22 nt, synthetic construct
  source 1..22: mol_type = other RNA
ggtctttctcccaggtcagtag

SEQ ID NO: 142183 - RNA, 22 nt, synthetic construct
  source 1..22: mol_type = other RNA
ggtctttgatccattttgagtt

SEQ ID NO: 142184 - RNA, 22 nt, synthetic construct
  source 1..22: mol_type = other RNA
ggtcttttagccaacaaccata

SEQ ID NO: 142185 - RNA, 22 nt, synthetic construct
  source 1..22: mol_type = other RNA
ggtctttttccaggaccaattt

SEQ ID NO: 142186 - RNA, 22 nt, synthetic construct
  source 1..22: mol_type = other RNA
ggtgaaaaaatggtgcagccac

SEQ ID NO: 142187 - RNA, 22 nt, synthetic construct
  source 1..22: mol_type = other RNA
ggtgaaacttgaatactcgtgt

SEQ ID NO: 142188 - RNA, 22 nt, synthetic construct
  source 1..22: mol_type = other RNA
ggtgaactattagagcttttat

SEQ ID NO: 142189 - RNA, 22 nt, synthetic construct
  source 1..22: mol_type = other RNA
ggtgaactgggtgtagggggaa

SEQ ID NO: 142190 - RNA, 22 nt, synthetic construct
  source 1..22: mol_type = other RNA
ggtgaagaaccgactgaaagga

SEQ ID NO: 142191 - RNA, 22 nt, synthetic construct
  source 1..22: mol_type = other RNA
ggtgaagaatgtgaaaaatttg

SEQ ID NO: 142192 - RNA, 22 nt, synthetic construct
  source 1..22: mol_type = other RNA
ggtgaagagagcctgtggtctc

SEQ ID NO: 142193 - RNA, 22 nt, synthetic construct
  source 1..22: mol_type = other RNA
ggtgaaggttcatgaacataaa

SEQ ID NO: 142194 - RNA, 22 nt, synthetic construct
  source 1..22: mol_type = other RNA
ggtgaagttaagggccatttca

SEQ ID NO: 142195 - RNA, 22 nt, synthetic construct
  source 1..22: mol_type = other RNA
ggtgaataacccatatctttgc

SEQ ID NO: 142196 - RNA, 22 nt, synthetic construct
  source 1..22: mol_type = other RNA
ggtgaatctgagtaaagggtaa

SEQ ID NO: 142197 - RNA, 22 nt, synthetic construct
  source 1..22: mol_type = other RNA
ggtgaattttattcttttagag

SEQ ID NO: 142198 - RNA, 22 nt, synthetic construct
  source 1..22: mol_type = other RNA
ggtgacagagagagacctttct

SEQ ID NO: 142199 - RNA, 22 nt, synthetic construct
  source 1..22: mol_type = other RNA
ggtgacagagccgagcagaagg

SEQ ID NO: 142200 - RNA, 22 nt, synthetic construct
  source 1..22: mol_type = other RNA
ggtgacctcatgtaactaatta

SEQ ID NO: 142201 - RNA, 22 nt, synthetic construct
  source 1..22: mol_type = other RNA
ggtgacctgccagagttggcac

SEQ ID NO: 142202 - RNA, 22 nt, synthetic construct
  source 1..22: mol_type = other RNA
ggtgacgtgagatcatgccact

SEQ ID NO: 142203 - RNA, 22 nt, synthetic construct
  source 1..22: mol_type = other RNA
ggtgactagtgtgaatgaggag

SEQ ID NO: 142204 - RNA, 22 nt, synthetic construct
  source 1..22: mol_type = other RNA
ggtgactgaattcccacaaaat

SEQ ID NO: 142205 - RNA, 22 nt, synthetic construct
  source 1..22: mol_type = other RNA
ggtgagaacccagtgtctgcta

SEQ ID NO: 142206 - RNA, 22 nt, synthetic construct
  source 1..22: mol_type = other RNA
ggtgagacagaccctggcttgt

SEQ ID NO: 142207 - RNA, 22 nt, synthetic construct
  source 1..22: mol_type = other RNA
ggtgagaccaccacacttgctt

SEQ ID NO: 142208 - RNA, 22 nt, synthetic construct
  source 1..22: mol_type = other RNA
ggtgagctttttctttttaaac

SEQ ID NO: 142209 - RNA, 22 nt, synthetic construct
  source 1..22: mol_type = other RNA
ggtgaggacatggagacagtga

SEQ ID NO: 142210 - RNA, 22 nt, synthetic construct
  source 1..22: mol_type = other RNA
ggtgagggactgagcagtgaaa

SEQ ID NO: 142211 - RNA, 22 nt, synthetic construct
  source 1..22: mol_type = other RNA
ggtgagtgagatgggaagaaaa

SEQ ID NO: 142212 - RNA, 22 nt, synthetic construct
  source 1..22: mol_type = other RNA
ggtgagtggactgtgagggaga

SEQ ID NO: 142213 - RNA, 22 nt, synthetic construct
  source 1..22: mol_type = other RNA
ggtgagtggatcatttgaggtc

SEQ ID NO: 142214 - RNA, 22 nt, synthetic construct
  source 1..22: mol_type = other RNA
ggtgataaaaaggagggaaaat

SEQ ID NO: 142215 - RNA, 22 nt, synthetic construct
  source 1..22: mol_type = other RNA
ggtgataactggtgcttttttg

SEQ ID NO: 142216 - RNA, 22 nt, synthetic construct
  source 1..22: mol_type = other RNA
ggtgatacctcttactaaaaag

SEQ ID NO: 142217 - RNA, 22 nt, synthetic construct
  source 1..22: mol_type = other RNA
ggtgatatctgtaagtcatcaa

SEQ ID NO: 142218 - RNA, 22 nt, synthetic construct
  source 1..22: mol_type = other RNA
ggtgatcctaagccatctaatt

SEQ ID NO: 142219 - RNA, 22 nt, synthetic construct
  source 1..22: mol_type = other RNA
ggtgatctatgaatttgcctat

SEQ ID NO: 142220 - RNA, 22 nt, synthetic construct
  source 1..22: mol_type = other RNA
ggtgatgctaacgtgcttgctc

SEQ ID NO: 142221 - RNA, 22 nt, synthetic construct
  source 1..22: mol_type = other RNA
ggtgatgttcaaccctcggcct

SEQ ID NO: 142222 - RNA, 22 nt, synthetic construct
  source 1..22: mol_type = other RNA
ggtgattaaaggccctgattta

SEQ ID NO: 142223 - RNA, 22 nt, synthetic construct
  source 1..22: mol_type = other RNA
ggtgattaaagttatttctaag

SEQ ID NO: 142224 - RNA, 22 nt, synthetic construct
  source 1..22: mol_type = other RNA
ggtgattcagagtgctgggtag

SEQ ID NO: 142225 - RNA, 22 nt, synthetic construct
  source 1..22: mol_type = other RNA
ggtgcaaggataaacaaagaga

SEQ ID NO: 142226 - RNA, 22 nt, synthetic construct
  source 1..22: mol_type = other RNA
ggtgcaatcacggctgattata

SEQ ID NO: 142227 - RNA, 22 nt, synthetic construct
  source 1..22: mol_type = other RNA
ggtgcaatgataggtcactgca

SEQ ID NO: 142228 - RNA, 22 nt, synthetic construct
  source 1..22: mol_type = other RNA
ggtgcacaagggaagaggccac

SEQ ID NO: 142229 - RNA, 22 nt, synthetic construct
  source 1..22: mol_type = other RNA
ggtgcacacaacactcagatat

SEQ ID NO: 142230 - RNA, 22 nt, synthetic construct
  source 1..22: mol_type = other RNA
ggtgcacattccaagagaggaa

SEQ ID NO: 142231 - RNA, 22 nt, synthetic construct
  source 1..22: mol_type = other RNA
ggtgcacgctgtgaatgtgagg

SEQ ID NO: 142232 - RNA, 22 nt, synthetic construct
  source 1..22: mol_type = other RNA
ggtgcagccactatagaaaata

SEQ ID NO: 142233 - RNA, 22 nt, synthetic construct
  source 1..22: mol_type = other RNA
ggtgcagcctctaatcaggttg

SEQ ID NO: 142234 - RNA, 22 nt, synthetic construct
  source 1..22: mol_type = other RNA
ggtgcaggccagatatccataa

SEQ ID NO: 142235 - RNA, 22 nt, synthetic construct
  source 1..22: mol_type = other RNA
ggtgcatttgggacagcctagt

SEQ ID NO: 142236 - RNA, 22 nt, synthetic construct
  source 1..22: mol_type = other RNA
ggtgccccactccacacacgaa

SEQ ID NO: 142237 - RNA, 22 nt, synthetic construct
  source 1..22: mol_type = other RNA
ggtgcccgcgaaggcgtgtaaa

SEQ ID NO: 142238 - RNA, 22 nt, synthetic construct
  source 1..22: mol_type = other RNA
ggtgccctacatatggcaattc

SEQ ID NO: 142239 - RNA, 22 nt, synthetic construct
  source 1..22: mol_type = other RNA
ggtgccgcgcgagggagcgtac

SEQ ID NO: 142240 - RNA, 22 nt, synthetic construct
  source 1..22: mol_type = other RNA
ggtgcctcctgcctcagcctcc

SEQ ID NO: 142241 - RNA, 22 nt, synthetic construct
  source 1..22: mol_type = other RNA
ggtgcctgccatagagggagca

SEQ ID NO: 142242 - RNA, 22 nt, synthetic construct
  source 1..22: mol_type = other RNA
ggtgcgacctcgaagcacaacc

SEQ ID NO: 142243 - RNA, 22 nt, synthetic construct
  source 1..22: mol_type = other RNA
ggtgcgggattatttggaagag

SEQ ID NO: 142244 - RNA, 22 nt, synthetic construct
  source 1..22: mol_type = other RNA
ggtgcgttgaccgctttcgtga

SEQ ID NO: 142245 - RNA, 22 nt, synthetic construct
  source 1..22: mol_type = other RNA
ggtgctaattgtttgttgggtt

SEQ ID NO: 142246 - RNA, 22 nt, synthetic construct
  source 1..22: mol_type = other RNA
ggtgctactcaaagtttagtta

SEQ ID NO: 142247 - RNA, 22 nt, synthetic construct
  source 1..22: mol_type = other RNA
ggtgctgataaatggcttttta

SEQ ID NO: 142248 - RNA, 22 nt, synthetic construct
  source 1..22: mol_type = other RNA
ggtgctgatcaggaaagaccgg

SEQ ID NO: 142249 - RNA, 22 nt, synthetic construct
  source 1..22: mol_type = other RNA
ggtgctgatttaaaattttgct

SEQ ID NO: 142250 - RNA, 22 nt, synthetic construct
  source 1..22: mol_type = other RNA
ggtgctgcacgtctgtggtctc

SEQ ID NO: 142251 - RNA, 22 nt, synthetic construct
  source 1..22: mol_type = other RNA
ggtgctggactggagggatgct

SEQ ID NO: 142252 - RNA, 22 nt, synthetic construct
  source 1..22: mol_type = other RNA
ggtgctggcagccttctctctt

SEQ ID NO: 142253 - RNA, 22 nt, synthetic construct
  source 1..22: mol_type = other RNA
ggtgctggcttcaatatgcagt

SEQ ID NO: 142254 - RNA, 22 nt, synthetic construct
  source 1..22: mol_type = other RNA
ggtgctgttgtattttacacca

SEQ ID NO: 142255 - RNA, 22 nt, synthetic construct
  source 1..22: mol_type = other RNA
ggtgcttaattcaaacaaatca

SEQ ID NO: 142256 - RNA, 22 nt, synthetic construct
  source 1..22: mol_type = other RNA
ggtgcttacagactgattaatt

SEQ ID NO: 142257 - RNA, 22 nt, synthetic construct
  source 1..22: mol_type = other RNA
ggtgcttagctgcctcttcctg

SEQ ID NO: 142258 - RNA, 22 nt, synthetic construct
  source 1..22: mol_type = other RNA
ggtgcttccttctcttatacta

SEQ ID NO: 142259 - RNA, 22 nt, synthetic construct
  source 1..22: mol_type = other RNA
ggtgcttgaactgctggtctgg

SEQ ID NO: 142260 - RNA, 22 nt, synthetic construct
  source 1..22: mol_type = other RNA
ggtgctttctatctctcagatc

SEQ ID NO: 142261 - RNA, 22 nt, synthetic construct
  source 1..22: mol_type = other RNA
ggtgcttttgctgcatcccaag

SEQ ID NO: 142262 - RNA, 22 nt, synthetic construct
  source 1..22: mol_type = other RNA
ggtgctttttgtatcctgtttg

SEQ ID NO: 142263 - RNA, 22 nt, synthetic construct
  source 1..22: mol_type = other RNA
ggtgcttttttggtgtttttct

SEQ ID NO: 142264 - RNA, 22 nt, synthetic construct
  source 1..22: mol_type = other RNA
ggtggaaattaaacacaccctt

SEQ ID NO: 142265 - RNA, 22 nt, synthetic construct
  source 1..22: mol_type = other RNA
ggtggaactctgtcatggtgtg

SEQ ID NO: 142266 - RNA, 22 nt, synthetic construct
  source 1..22: mol_type = other RNA
ggtggaagctgtccttctcgtg

SEQ ID NO: 142267 - RNA, 22 nt, synthetic construct
  source 1..22: mol_type = other RNA
ggtggaaggcctgatagctgtg

SEQ ID NO: 142268 - RNA, 22 nt, synthetic construct
  source 1..22: mol_type = other RNA
ggtggacaaaaaacgcggcact

SEQ ID NO: 142269 - RNA, 22 nt, synthetic construct
  source 1..22: mol_type = other RNA
ggtggagtattctagttctagc

SEQ ID NO: 142270 - RNA, 22 nt, synthetic construct
  source 1..22: mol_type = other RNA
ggtggagtccaaccaatcgcag

SEQ ID NO: 142271 - RNA, 22 nt, synthetic construct
  source 1..22: mol_type = other RNA
ggtggagtggtggatagagaga

SEQ ID NO: 142272 - RNA, 22 nt, synthetic construct
  source 1..22: mol_type = other RNA
ggtggagttctgctcttgtcgc

SEQ ID NO: 142273 - RNA, 22 nt, synthetic construct
  source 1..22: mol_type = other RNA
ggtggatagagagattcaagaa

SEQ ID NO: 142274 - RNA, 22 nt, synthetic construct
  source 1..22: mol_type = other RNA
ggtggatatctgaggtcaggag

SEQ ID NO: 142275 - RNA, 22 nt, synthetic construct
  source 1..22: mol_type = other RNA
ggtggatgggtgtagggtttgg

SEQ ID NO: 142276 - RNA, 22 nt, synthetic construct
  source 1..22: mol_type = other RNA
ggtggcattaaggacatccaca

SEQ ID NO: 142277 - RNA, 22 nt, synthetic construct
  source 1..22: mol_type = other RNA
ggtggcccacacctgcaatcac

SEQ ID NO: 142278 - RNA, 22 nt, synthetic construct
  source 1..22: mol_type = other RNA
ggtggcggatgccggtaatcac

SEQ ID NO: 142279 - RNA, 22 nt, synthetic construct
  source 1..22: mol_type = other RNA
ggtggctggcactttcctgata

SEQ ID NO: 142280 - RNA, 22 nt, synthetic construct
  source 1..22: mol_type = other RNA
ggtgggagaggcatgccgggac

SEQ ID NO: 142281 - RNA, 22 nt, synthetic construct
  source 1..22: mol_type = other RNA
ggtgggatctctgggctcactg

SEQ ID NO: 142282 - RNA, 22 nt, synthetic construct
  source 1..22: mol_type = other RNA
ggtgggcactgggagccctcca

SEQ ID NO: 142283 - RNA, 22 nt, synthetic construct
  source 1..22: mol_type = other RNA
ggtgggccttgcaagccacatt

SEQ ID NO: 142284 - RNA, 22 nt, synthetic construct
  source 1..22: mol_type = other RNA
ggtgggctttgagaaaggtttc

SEQ ID NO: 142285 - RNA, 22 nt, synthetic construct
  source 1..22: mol_type = other RNA
ggtggggacagctcaattaagc

SEQ ID NO: 142286 - RNA, 22 nt, synthetic construct
  source 1..22: mol_type = other RNA
ggtgggggcatcaaagctaccc

SEQ ID NO: 142287 - RNA, 22 nt, synthetic construct
  source 1..22: mol_type = other RNA
ggtggggggatgtagaaggata

SEQ ID NO: 142288 - RNA, 22 nt, synthetic construct
  source 1..22: mol_type = other RNA
ggtggtaactgatgtgaggatc

SEQ ID NO: 142289 - RNA, 22 nt, synthetic construct
  source 1..22: mol_type = other RNA
ggtggtagggagggggctgagg

SEQ ID NO: 142290 - RNA, 22 nt, synthetic construct
  source 1..22: mol_type = other RNA
ggtggtaggtgtgtgtaatccc

SEQ ID NO: 142291 - RNA, 22 nt, synthetic construct
  source 1..22: mol_type = other RNA
ggtggtagtaaggatcgttagt

SEQ ID NO: 142292 - RNA, 22 nt, synthetic construct
  source 1..22: mol_type = other RNA
ggtggtatgcactgtactccta

SEQ ID NO: 142293 - RNA, 22 nt, synthetic construct
  source 1..22: mol_type = other RNA
ggtggtatgggagatgtgtaat

SEQ ID NO: 142294 - RNA, 22 nt, synthetic construct
  source 1..22: mol_type = other RNA
ggtggtatttaatctgtcagca

SEQ ID NO: 142295 - RNA, 22 nt, synthetic construct
  source 1..22: mol_type = other RNA
ggtggtctcaccctcaggactc

SEQ ID NO: 142296 - RNA, 22 nt, synthetic construct
  source 1..22: mol_type = other RNA
ggtggtgctggactggagggat

SEQ ID NO: 142297 - RNA, 22 nt, synthetic construct
  source 1..22: mol_type = other RNA
ggtggttctgcctaatctctag

SEQ ID NO: 142298 - RNA, 22 nt, synthetic construct
  source 1..22: mol_type = other RNA
ggtggtttgaaccccagaaggt

SEQ ID NO: 142299 - RNA, 22 nt, synthetic construct
  source 1..22: mol_type = other RNA
ggtgtaaaaggctaattttttc

SEQ ID NO: 142300 - RNA, 22 nt, synthetic construct
  source 1..22: mol_type = other RNA
ggtgtaaaatacaacagcacct

SEQ ID NO: 142301 - RNA, 22 nt, synthetic construct
  source 1..22: mol_type = other RNA
ggtgtaagagattaattcagtc

SEQ ID NO: 142302 - RNA, 22 nt, synthetic construct
  source 1..22: mol_type = other RNA
ggtgtacaattaggctgtttga

SEQ ID NO: 142303 - RNA, 22 nt, synthetic construct
  source 1..22: mol_type = other RNA
ggtgtagccacaagccacatgt

SEQ ID NO: 142304 - RNA, 22 nt, synthetic construct
  source 1..22: mol_type = other RNA
ggtgtagggggaaaactccaag

SEQ ID NO: 142305 - RNA, 22 nt, synthetic construct
  source 1..22: mol_type = other RNA
ggtgtagggtttggcagtttaa

SEQ ID NO: 142306 - RNA, 22 nt, synthetic construct
  source 1..22: mol_type = other RNA
ggtgtagtggtgtgtgactgta

SEQ ID NO: 142307 - RNA, 22 nt, synthetic construct
  source 1..22: mol_type = other RNA
ggtgtatgatcttattaatgtg

SEQ ID NO: 142308 - RNA, 22 nt, synthetic construct
  source 1..22: mol_type = other RNA
ggtgtcactggatagaagtgta

SEQ ID NO: 142309 - RNA, 22 nt, synthetic construct
  source 1..22: mol_type = other RNA
ggtgtcagaaaccatcgttcac

SEQ ID NO: 142310 - RNA, 22 nt, synthetic construct
  source 1..22: mol_type = other RNA
ggtgtcagaattccatcagtgg

SEQ ID NO: 142311 - RNA, 22 nt, synthetic construct
  source 1..22: mol_type = other RNA
ggtgtcatttttaagaaatcgt

SEQ ID NO: 142312 - RNA, 22 nt, synthetic construct
  source 1..22: mol_type = other RNA
ggtgtccttctgagaaggcgaa

SEQ ID NO: 142313 - RNA, 22 nt, synthetic construct
  source 1..22: mol_type = other RNA
ggtgtcgtttatttcttctccc

SEQ ID NO: 142314 - RNA, 22 nt, synthetic construct
  source 1..22: mol_type = other RNA
ggtgtctcatttaataactaaa

SEQ ID NO: 142315 - RNA, 22 nt, synthetic construct
  source 1..22: mol_type = other RNA
ggtgtctgatgtgtgtctctgc

SEQ ID NO: 142316 - RNA, 22 nt, synthetic construct
  source 1..22: mol_type = other RNA
ggtgtcttattgttttgatttg

SEQ ID NO: 142317 - RNA, 22 nt, synthetic construct
  source 1..22: mol_type = other RNA
ggtgtgaaccacgcatctggtc

SEQ ID NO: 142318 - RNA, 22 nt, synthetic construct
  source 1..22: mol_type = other RNA
ggtgtgaagttgggcttaacat

SEQ ID NO: 142319 - RNA, 22 nt, synthetic construct
  source 1..22: mol_type = other RNA
ggtgtgagattgatagatcata

SEQ ID NO: 142320 - RNA, 22 nt, synthetic construct
  source 1..22: mol_type = other RNA
ggtgtgagccaccgtgccgggc

SEQ ID NO: 142321 - RNA, 22 nt, synthetic construct
  source 1..22: mol_type = other RNA
ggtgtgagccactacgcccggc

SEQ ID NO: 142322 - RNA, 22 nt, synthetic construct
  source 1..22: mol_type = other RNA
ggtgtgataactgatatgaggg

SEQ ID NO: 142323 - RNA, 22 nt, synthetic construct
  source 1..22: mol_type = other RNA
ggtgtgatcaggaaagatgaag

SEQ ID NO: 142324 - RNA, 22 nt, synthetic construct
  source 1..22: mol_type = other RNA
ggtgtgatctctgctcaccgca

SEQ ID NO: 142325 - RNA, 22 nt, synthetic construct
  source 1..22: mol_type = other RNA
ggtgtgatggcgcatgcctgtg

SEQ ID NO: 142326 - RNA, 22 nt, synthetic construct
  source 1..22: mol_type = other RNA
ggtgtgcacgtttgctttggag

SEQ ID NO: 142327 - RNA, 22 nt, synthetic construct
  source 1..22: mol_type = other RNA
ggtgtgctcttttcatcactca

SEQ ID NO: 142328 - RNA, 22 nt, synthetic construct
  source 1..22: mol_type = other RNA
ggtgtgcttctgataggaatat

SEQ ID NO: 142329 - RNA, 22 nt, synthetic construct
  source 1..22: mol_type = other RNA
ggtgtggcatgtctgtagttac

SEQ ID NO: 142330 - RNA, 22 nt, synthetic construct
  source 1..22: mol_type = other RNA
ggtgtgggccaccaagccctgc

SEQ ID NO: 142331 - RNA, 22 nt, synthetic construct
  source 1..22: mol_type = other RNA
ggtgtggtcttgtctcaacctt

SEQ ID NO: 142332 - RNA, 22 nt, synthetic construct
  source 1..22: mol_type = other RNA
ggtgtggtgctgcacgtctgtg

SEQ ID NO: 142333 - RNA, 22 nt, synthetic construct
  source 1..22: mol_type = other RNA
ggtgtgtaaacactgttctgcg

SEQ ID NO: 142334 - RNA, 22 nt, synthetic construct
  source 1..22: mol_type = other RNA
ggtgtgtctgcgccttaaagcc

SEQ ID NO: 142335 - RNA, 22 nt, synthetic construct
  source 1..22: mol_type = other RNA
ggtgtgtgaatggaaaattcaa

SEQ ID NO: 142336 - RNA, 22 nt, synthetic construct
  source 1..22: mol_type = other RNA
ggtgtgtgactgtagtccctgc

SEQ ID NO: 142337 - RNA, 22 nt, synthetic construct
  source 1..22: mol_type = other RNA
ggtgtgtgcaaaggattagaaa

SEQ ID NO: 142338 - RNA, 22 nt, synthetic construct
  source 1..22: mol_type = other RNA
ggtgtgtgtaatcccagctact

SEQ ID NO: 142339 - RNA, 22 nt, synthetic construct
  source 1..22: mol_type = other RNA
ggtgtgtgttccttcctacaca

SEQ ID NO: 142340 - RNA, 22 nt, synthetic construct
  source 1..22: mol_type = other RNA
ggtgtgtttaatttccacccat

SEQ ID NO: 142341 - RNA, 22 nt, synthetic construct
  source 1..22: mol_type = other RNA
ggtgttaagccgttccatcaga

SEQ ID NO: 142342 - RNA, 22 nt, synthetic construct
  source 1..22: mol_type = other RNA
ggtgttagcaggactggactcc

SEQ ID NO: 142343 - RNA, 22 nt, synthetic construct
  source 1..22: mol_type = other RNA
ggtgttaggcaatccttccgcc

SEQ ID NO: 142344 - RNA, 22 nt, synthetic construct
  source 1..22: mol_type = other RNA
ggtgttatttgttctgtcacgg

SEQ ID NO: 142345 - RNA, 22 nt, synthetic construct
  source 1..22: mol_type = other RNA
ggtgttcctgaagtctttggtg

SEQ ID NO: 142346 - RNA, 22 nt, synthetic construct
  source 1..22: mol_type = other RNA
ggtgttgactgaattaatctct

SEQ ID NO: 142347 - RNA, 22 nt, synthetic construct
  source 1..22: mol_type = other RNA
ggtgttgcttgctctacaaacc

SEQ ID NO: 142348 - RNA, 22 nt, synthetic construct
  source 1..22: mol_type = other RNA
ggtgttggtgcatttgggacag

SEQ ID NO: 142349 - RNA, 22 nt, synthetic construct
  source 1..22: mol_type = other RNA
ggtgtttctgacaggtggtatg

SEQ ID NO: 142350 - RNA, 22 nt, synthetic construct
  source 1..22: mol_type = other RNA
ggtgtttggtgaattttattct

SEQ ID NO: 142351 - RNA, 22 nt, synthetic construct
  source 1..22: mol_type = other RNA
ggtgttttcccccctaaaacac

SEQ ID NO: 142352 - RNA, 22 nt, synthetic construct
  source 1..22: mol_type = other RNA
ggtgtttttcagccctgataga

SEQ ID NO: 142353 - RNA, 22 nt, synthetic construct
  source 1..22: mol_type = other RNA
ggtgtttttctaggtagtttct

SEQ ID NO: 142354 - RNA, 22 nt, synthetic construct
  source 1..22: mol_type = other RNA
ggtgttttttccttctttgggg

SEQ ID NO: 142355 - RNA, 22 nt, synthetic construct
  source 1..22: mol_type = other RNA
ggttaaaaccacaaacatgaat

SEQ ID NO: 142356 - RNA, 22 nt, synthetic construct
  source 1..22: mol_type = other RNA
ggttaaaagttagctggcaaaa

SEQ ID NO: 142357 - RNA, 22 nt, synthetic construct
  source 1..22: mol_type = other RNA
ggttaaacttggtctgggtgat

SEQ ID NO: 142358 - RNA, 22 nt, synthetic construct
  source 1..22: mol_type = other RNA
ggttaaagcaacaggaagaggc

SEQ ID NO: 142359 - RNA, 22 nt, synthetic construct
  source 1..22: mol_type = other RNA
ggttaactaatagccagtgcag

SEQ ID NO: 142360 - RNA, 22 nt, synthetic construct
  source 1..22: mol_type = other RNA
ggttaagactgctgtttaccaa

SEQ ID NO: 142361 - RNA, 22 nt, synthetic construct
  source 1..22: mol_type = other RNA
ggttaagggaagagctaagatg

SEQ ID NO: 142362 - RNA, 22 nt, synthetic construct
  source 1..22: mol_type = other RNA
ggttaatagtgaccctttgaag

SEQ ID NO: 142363 - RNA, 22 nt, synthetic construct
  source 1..22: mol_type = other RNA
ggttacagtataggggaactct

SEQ ID NO: 142364 - RNA, 22 nt, synthetic construct
  source 1..22: mol_type = other RNA
ggttacgtactaggtatcacag

SEQ ID NO: 142365 - RNA, 22 nt, synthetic construct
  source 1..22: mol_type = other RNA
ggttagaagacaatactgttat

SEQ ID NO: 142366 - RNA, 22 nt, synthetic construct
  source 1..22: mol_type = other RNA
ggttagactgcacataaaagga

SEQ ID NO: 142367 - RNA, 22 nt, synthetic construct
  source 1..22: mol_type = other RNA
ggttagattatatggtctacca

SEQ ID NO: 142368 - RNA, 22 nt, synthetic construct
  source 1..22: mol_type = other RNA
ggttagatttttcctttgccta

SEQ ID NO: 142369 - RNA, 22 nt, synthetic construct
  source 1..22: mol_type = other RNA
ggttaggaaaatacatgaggcc

SEQ ID NO: 142370 - RNA, 22 nt, synthetic construct
  source 1..22: mol_type = other RNA
ggttagggagactttcactgct

SEQ ID NO: 142371 - RNA, 22 nt, synthetic construct
  source 1..22: mol_type = other RNA
ggttagggcctagaaatcatac

SEQ ID NO: 142372 - RNA, 22 nt, synthetic construct
  source 1..22: mol_type = other RNA
ggttagtgttgtttttaaacaa

SEQ ID NO: 142373 - RNA, 22 nt, synthetic construct
  source 1..22: mol_type = other RNA
ggttataatcagccgtgattgc

SEQ ID NO: 142374 - RNA, 22 nt, synthetic construct
  source 1..22: mol_type = other RNA
ggttatacacacataaggggga

SEQ ID NO: 142375 - RNA, 22 nt, synthetic construct
  source 1..22: mol_type = other RNA
ggttatagccataagagtcccc

SEQ ID NO: 142376 - RNA, 22 nt, synthetic construct
  source 1..22: mol_type = other RNA
ggttatccaattttttggcata

SEQ ID NO: 142377 - RNA, 22 nt, synthetic construct
  source 1..22: mol_type = other RNA
ggttatctgttttcttactgat

SEQ ID NO: 142378 - RNA, 22 nt, synthetic construct
  source 1..22: mol_type = other RNA
ggttatgcgaatttacttttaa

SEQ ID NO: 142379 - RNA, 22 nt, synthetic construct
  source 1..22: mol_type = other RNA
ggttattaacataccgacggct

SEQ ID NO: 142380 - RNA, 22 nt, synthetic construct
  source 1..22: mol_type = other RNA
ggttattaagataatgctgttc

SEQ ID NO: 142381 - RNA, 22 nt, synthetic construct
  source 1..22: mol_type = other RNA
ggttattcaaaacaaaacacat

SEQ ID NO: 142382 - RNA, 22 nt, synthetic construct
  source 1..22: mol_type = other RNA
ggttattcacccaagaatttca

SEQ ID NO: 142383 - RNA, 22 nt, synthetic construct
  source 1..22: mol_type = other RNA
ggttattcatgtttgtggtttt

SEQ ID NO: 142384 - RNA, 22 nt, synthetic construct
  source 1..22: mol_type = other RNA
ggttattgagtctgtagggtga

SEQ ID NO: 142385 - RNA, 22 nt, synthetic construct
  source 1..22: mol_type = other RNA
ggttcaaaccacctaactacta

SEQ ID NO: 142386 - RNA, 22 nt, synthetic construct
  source 1..22: mol_type = other RNA
ggttcaagccccagttctgcgc

SEQ ID NO: 142387 - RNA, 22 nt, synthetic construct
  source 1..22: mol_type = other RNA
ggttcaagtttggctcccatga

SEQ ID NO: 142388 - RNA, 22 nt, synthetic construct
  source 1..22: mol_type = other RNA
ggttcacaaattagaacaaatt

SEQ ID NO: 142389 - RNA, 22 nt, synthetic construct
  source 1..22: mol_type = other RNA
ggttcacacctgtagtcccagc

SEQ ID NO: 142390 - RNA, 22 nt, synthetic construct
  source 1..22: mol_type = other RNA
ggttcacttgaaacctgccatg

SEQ ID NO: 142391 - RNA, 22 nt, synthetic construct
  source 1..22: mol_type = other RNA
ggttcaggtgcctcctgcctca

SEQ ID NO: 142392 - RNA, 22 nt, synthetic construct
  source 1..22: mol_type = other RNA
ggttcataatatatcacaactt

SEQ ID NO: 142393 - RNA, 22 nt, synthetic construct
  source 1..22: mol_type = other RNA
ggttcatatttcccttttggat

SEQ ID NO: 142394 - RNA, 22 nt, synthetic construct
  source 1..22: mol_type = other RNA
ggttcatccatgttgttgaatg

SEQ ID NO: 142395 - RNA, 22 nt, synthetic construct
  source 1..22: mol_type = other RNA
ggttcatgaacataaatttgtt

SEQ ID NO: 142396 - RNA, 22 nt, synthetic construct
  source 1..22: mol_type = other RNA
ggttcatgtgtgcttacacaca

SEQ ID NO: 142397 - RNA, 22 nt, synthetic construct
  source 1..22: mol_type = other RNA
ggttcatttcaggaatgcaaag

SEQ ID NO: 142398 - RNA, 22 nt, synthetic construct
  source 1..22: mol_type = other RNA
ggttcattttaataagcttcga

SEQ ID NO: 142399 - RNA, 22 nt, synthetic construct
  source 1..22: mol_type = other RNA
ggttccaaacttctgaccttgt

SEQ ID NO: 142400 - RNA, 22 nt, synthetic construct
  source 1..22: mol_type = other RNA
ggttccatttgttttgtgtttg

SEQ ID NO: 142401 - RNA, 22 nt, synthetic construct
  source 1..22: mol_type = other RNA
ggttccctgtagagatttttat

SEQ ID NO: 142402 - RNA, 22 nt, synthetic construct
  source 1..22: mol_type = other RNA
ggttcctagaaaatttaatact

SEQ ID NO: 142403 - RNA, 22 nt, synthetic construct
  source 1..22: mol_type = other RNA
ggttcgtttgaggcttttcata

SEQ ID NO: 142404 - RNA, 22 nt, synthetic construct
  source 1..22: mol_type = other RNA
ggttctcaccaacatccacagc

SEQ ID NO: 142405 - RNA, 22 nt, synthetic construct
  source 1..22: mol_type = other RNA
ggttctcaggagcctagtcatc

SEQ ID NO: 142406 - RNA, 22 nt, synthetic construct
  source 1..22: mol_type = other RNA
ggttctcccttctattccattg

SEQ ID NO: 142407 - RNA, 22 nt, synthetic construct
  source 1..22: mol_type = other RNA
ggttctgcctaatctctaggct

SEQ ID NO: 142408 - RNA, 22 nt, synthetic construct
  source 1..22: mol_type = other RNA
ggttctgcgtgttattttaatc

SEQ ID NO: 142409 - RNA, 22 nt, synthetic construct
  source 1..22: mol_type = other RNA
ggttctgctatgctgaaaggca

SEQ ID NO: 142410 - RNA, 22 nt, synthetic construct
  source 1..22: mol_type = other RNA
ggttctgtgctagatgctaaac

SEQ ID NO: 142411 - RNA, 22 nt, synthetic construct
  source 1..22: mol_type = other RNA
ggttcttcaccgtgcaactaga

SEQ ID NO: 142412 - RNA, 22 nt, synthetic construct
  source 1..22: mol_type = other RNA
ggttcttcatcagtccctgtgt

SEQ ID NO: 142413 - RNA, 22 nt, synthetic construct
  source 1..22: mol_type = other RNA
ggttcttggaaattagaaatgt

SEQ ID NO: 142414 - RNA, 22 nt, synthetic construct
  source 1..22: mol_type = other RNA
ggttcttttaaatgccaatttg

SEQ ID NO: 142415 - RNA, 22 nt, synthetic construct
  source 1..22: mol_type = other RNA
ggttgaaaactcaactgcctct

SEQ ID NO: 142416 - RNA, 22 nt, synthetic construct
  source 1..22: mol_type = other RNA
ggttgaaagttcagaataccag

SEQ ID NO: 142417 - RNA, 22 nt, synthetic construct
  source 1..22: mol_type = other RNA
ggttgaacatcacccagctcga

SEQ ID NO: 142418 - RNA, 22 nt, synthetic construct
  source 1..22: mol_type = other RNA
ggttgaagaaagtaggaattaa

SEQ ID NO: 142419 - RNA, 22 nt, synthetic construct
  source 1..22: mol_type = other RNA
ggttgaagacctgcagtctgca

SEQ ID NO: 142420 - RNA, 22 nt, synthetic construct
  source 1..22: mol_type = other RNA
ggttgaagctctagtgagctat

SEQ ID NO: 142421 - RNA, 22 nt, synthetic construct
  source 1..22: mol_type = other RNA
ggttgaatagggcctcaaattt

SEQ ID NO: 142422 - RNA, 22 nt, synthetic construct
  source 1..22: mol_type = other RNA
ggttgacccataaactgaacat

SEQ ID NO: 142423 - RNA, 22 nt, synthetic construct
  source 1..22: mol_type = other RNA
ggttgagacaagaccacaccac

SEQ ID NO: 142424 - RNA, 22 nt, synthetic construct
  source 1..22: mol_type = other RNA
ggttgagacttagatttattta

SEQ ID NO: 142425 - RNA, 22 nt, synthetic construct
  source 1..22: mol_type = other RNA
ggttgaggctgcagtgagctcc

SEQ ID NO: 142426 - RNA, 22 nt, synthetic construct
  source 1..22: mol_type = other RNA
ggttgagttcatgtcctttgta

SEQ ID NO: 142427 - RNA, 22 nt, synthetic construct
  source 1..22: mol_type = other RNA
ggttgatactagtttagtgcag

SEQ ID NO: 142428 - RNA, 22 nt, synthetic construct
  source 1..22: mol_type = other RNA
ggttgatggctgtactaagcct

SEQ ID NO: 142429 - RNA, 22 nt, synthetic construct
  source 1..22: mol_type = other RNA
ggttgcacaatgttgtggatgt

SEQ ID NO: 142430 - RNA, 22 nt, synthetic construct
  source 1..22: mol_type = other RNA
ggttgcattaatgcttcatatt

SEQ ID NO: 142431 - RNA, 22 nt, synthetic construct
  source 1..22: mol_type = other RNA
ggttgcggtgacgtgagatcat

SEQ ID NO: 142432 - RNA, 22 nt, synthetic construct
  source 1..22: mol_type = other RNA
ggttgcttaattgagctgtccc

SEQ ID NO: 142433 - RNA, 22 nt, synthetic construct
  source 1..22: mol_type = other RNA
ggttgcttttacttggctcctc

SEQ ID NO: 142434 - RNA, 22 nt, synthetic construct
  source 1..22: mol_type = other RNA
ggttggaaaacttttaactgaa

SEQ ID NO: 142435 - RNA, 22 nt, synthetic construct
  source 1..22: mol_type = other RNA
ggttggaaaagaaagctgtgga

SEQ ID NO: 142436 - RNA, 22 nt, synthetic construct
  source 1..22: mol_type = other RNA
ggttggaagtttctggaagttt

SEQ ID NO: 142437 - RNA, 22 nt, synthetic construct
  source 1..22: mol_type = other RNA
ggttggactccaccctgcccct

SEQ ID NO: 142438 - RNA, 22 nt, synthetic construct
  source 1..22: mol_type = other RNA
ggttggaggagaaggccttcca

SEQ ID NO: 142439 - RNA, 22 nt, synthetic construct
  source 1..22: mol_type = other RNA
ggttggccgaggccagtcccta

SEQ ID NO: 142440 - RNA, 22 nt, synthetic construct
  source 1..22: mol_type = other RNA
ggttgggcttatcagatggtga

SEQ ID NO: 142441 - RNA, 22 nt, synthetic construct
  source 1..22: mol_type = other RNA
ggttgggggctgggtcggccga

SEQ ID NO: 142442 - RNA, 22 nt, synthetic construct
  source 1..22: mol_type = other RNA
ggttggggtatgtttgattagt

SEQ ID NO: 142443 - RNA, 22 nt, synthetic construct
  source 1..22: mol_type = other RNA
ggttggtgcttccttctcttat

SEQ ID NO: 142444 - RNA, 22 nt, synthetic construct
  source 1..22: mol_type = other RNA
ggttgtatagcagtaaaatgaa

SEQ ID NO: 142445 - RNA, 22 nt, synthetic construct
  source 1..22: mol_type = other RNA
ggttgtgcttcgaggtcgcacc

SEQ ID NO: 142446 - RNA, 22 nt, synthetic construct
  source 1..22: mol_type = other RNA
ggttgtggaattaactccaggg

SEQ ID NO: 142447 - RNA, 22 nt, synthetic construct
  source 1..22: mol_type = other RNA
ggttgttcttggttaatattac

SEQ ID NO: 142448 - RNA, 22 nt, synthetic construct
  source 1..22: mol_type = other RNA
ggttgttggctaaaagaccgca

SEQ ID NO: 142449 - RNA, 22 nt, synthetic construct
  source 1..22: mol_type = other RNA
ggttgtttccatgtcttggcta

SEQ ID NO: 142450 - RNA, 22 nt, synthetic construct
  source 1..22: mol_type = other RNA
ggtttaaaagagtgcacattcc

SEQ ID NO: 142451 - RNA, 22 nt, synthetic construct
  source 1..22: mol_type = other RNA
ggtttaacacatacaaaccaaa

SEQ ID NO: 142452 - RNA, 22 nt, synthetic construct
  source 1..22: mol_type = other RNA
ggtttaactgaggtgtttttca

SEQ ID NO: 142453 - RNA, 22 nt, synthetic construct
  source 1..22: mol_type = other RNA
ggtttaaggtaagggtccagct

SEQ ID NO: 142454 - RNA, 22 nt, synthetic construct
  source 1..22: mol_type = other RNA
ggtttaataaatactagtagga

SEQ ID NO: 142455 - RNA, 22 nt, synthetic construct
  source 1..22: mol_type = other RNA
ggtttacaatggttcataatat

SEQ ID NO: 142456 - RNA, 22 nt, synthetic construct
  source 1..22: mol_type = other RNA
ggtttacaggatatcagaagtg

SEQ ID NO: 142457 - RNA, 22 nt, synthetic construct
  source 1..22: mol_type = other RNA
ggtttactccaagaaggctagc

SEQ ID NO: 142458 - RNA, 22 nt, synthetic construct
  source 1..22: mol_type = other RNA
ggtttacttggggagagtgggc

SEQ ID NO: 142459 - RNA, 22 nt, synthetic construct
  source 1..22: mol_type = other RNA
ggtttagaaaacatatccttct

SEQ ID NO: 142460 - RNA, 22 nt, synthetic construct
  source 1..22: mol_type = other RNA
ggtttaggaagcacattccttc

SEQ ID NO: 142461 - RNA, 22 nt, synthetic construct
  source 1..22: mol_type = other RNA
ggtttaggctgtctccaacgct

SEQ ID NO: 142462 - RNA, 22 nt, synthetic construct
  source 1..22: mol_type = other RNA
ggtttaggtttttcttgtgggt

SEQ ID NO: 142463 - RNA, 22 nt, synthetic construct
  source 1..22: mol_type = other RNA
ggtttattcatataatggagta

SEQ ID NO: 142464 - RNA, 22 nt, synthetic construct
  source 1..22: mol_type = other RNA
ggtttattttctgcatttggtt

SEQ ID NO: 142465 - RNA, 22 nt, synthetic construct
  source 1..22: mol_type = other RNA
ggtttcaagtgaaccaaaaacc

SEQ ID NO: 142466 - RNA, 22 nt, synthetic construct
  source 1..22: mol_type = other RNA
ggtttcacacgcattgcattga

SEQ ID NO: 142467 - RNA, 22 nt, synthetic construct
  source 1..22: mol_type = other RNA
ggtttcagcacaatactgtctc

SEQ ID NO: 142468 - RNA, 22 nt, synthetic construct
  source 1..22: mol_type = other RNA
ggtttcagtacacgaaaatatc

SEQ ID NO: 142469 - RNA, 22 nt, synthetic construct
  source 1..22: mol_type = other RNA
ggtttcagtccctcctttctag

SEQ ID NO: 142470 - RNA, 22 nt, synthetic construct
  source 1..22: mol_type = other RNA
ggtttcagtgagtagggaaggt

SEQ ID NO: 142471 - RNA, 22 nt, synthetic construct
  source 1..22: mol_type = other RNA
ggtttcataaaatgatggcaac

SEQ ID NO: 142472 - RNA, 22 nt, synthetic construct
  source 1..22: mol_type = other RNA
ggtttccagtggcccccctgaa

SEQ ID NO: 142473 - RNA, 22 nt, synthetic construct
  source 1..22: mol_type = other RNA
ggtttccctggggaataagatt

SEQ ID NO: 142474 - RNA, 22 nt, synthetic construct
  source 1..22: mol_type = other RNA
ggtttcctcggtctacggacgc

SEQ ID NO: 142475 - RNA, 22 nt, synthetic construct
  source 1..22: mol_type = other RNA
ggtttccttacctttatctttg

SEQ ID NO: 142476 - RNA, 22 nt, synthetic construct
  source 1..22: mol_type = other RNA
ggtttctcatttttcagggggg

SEQ ID NO: 142477 - RNA, 22 nt, synthetic construct
  source 1..22: mol_type = other RNA
ggtttctccttctgcaggctga

SEQ ID NO: 142478 - RNA, 22 nt, synthetic construct
  source 1..22: mol_type = other RNA
ggtttctctccaaggtacaatt

SEQ ID NO: 142479 - RNA, 22 nt, synthetic construct
  source 1..22: mol_type = other RNA
ggtttctgacacccgacccact

SEQ ID NO: 142480 - RNA, 22 nt, synthetic construct
  source 1..22: mol_type = other RNA
ggtttctgcatacttagctaat

SEQ ID NO: 142481 - RNA, 22 nt, synthetic construct
  source 1..22: mol_type = other RNA
ggtttctgtttggatgaaaaag

SEQ ID NO: 142482 - RNA, 22 nt, synthetic construct
  source 1..22: mol_type = other RNA
ggtttcttcaagatactgcact

SEQ ID NO: 142483 - RNA, 22 nt, synthetic construct
  source 1..22: mol_type = other RNA
ggtttcttcactcttaaaagga

SEQ ID NO: 142484 - RNA, 22 nt, synthetic construct
  source 1..22: mol_type = other RNA
ggtttcttgaatctctctatcc

SEQ ID NO: 142485 - RNA, 22 nt, synthetic construct
  source 1..22: mol_type = other RNA
ggtttgaaatgatcttttgtag

SEQ ID NO: 142486 - RNA, 22 nt, synthetic construct
  source 1..22: mol_type = other RNA
ggtttgaaccccagaaggttaa

SEQ ID NO: 142487 - RNA, 22 nt, synthetic construct
  source 1..22: mol_type = other RNA
ggtttgaagcttcacttctctg

SEQ ID NO: 142488 - RNA, 22 nt, synthetic construct
  source 1..22: mol_type = other RNA
ggtttgagtttccagaaaactg

SEQ ID NO: 142489 - RNA, 22 nt, synthetic construct
  source 1..22: mol_type = other RNA
ggtttgatcccactagtggaag

SEQ ID NO: 142490 - RNA, 22 nt, synthetic construct
  source 1..22: mol_type = other RNA
ggtttgattgttccagggggga

SEQ ID NO: 142491 - RNA, 22 nt, synthetic construct
  source 1..22: mol_type = other RNA
ggtttgcaaaaattttgttcag

SEQ ID NO: 142492 - RNA, 22 nt, synthetic construct
  source 1..22: mol_type = other RNA
ggtttgcactggcacagcactg

SEQ ID NO: 142493 - RNA, 22 nt, synthetic construct
  source 1..22: mol_type = other RNA
ggtttgccttttcactcttagt

SEQ ID NO: 142494 - RNA, 22 nt, synthetic construct
  source 1..22: mol_type = other RNA
ggtttgctttggagtcacagtg

SEQ ID NO: 142495 - RNA, 22 nt, synthetic construct
  source 1..22: mol_type = other RNA
ggtttggagtttgtagctcaaa

SEQ ID NO: 142496 - RNA, 22 nt, synthetic construct
  source 1..22: mol_type = other RNA
ggtttggcagtttaagaattaa

SEQ ID NO: 142497 - RNA, 22 nt, synthetic construct
  source 1..22: mol_type = other RNA
ggtttggggcttttgaacactc

SEQ ID NO: 142498 - RNA, 22 nt, synthetic construct
  source 1..22: mol_type = other RNA
ggtttgtagagcaagcaacacc

SEQ ID NO: 142499 - RNA, 22 nt, synthetic construct
  source 1..22: mol_type = other RNA
ggtttgtatgtgttaaaccatt

SEQ ID NO: 142500 - RNA, 22 nt, synthetic construct
  source 1..22: mol_type = other RNA
ggtttgtgcttggatattctac

SEQ ID NO: 142501 - RNA, 22 nt, synthetic construct
  source 1..22: mol_type = other RNA
ggtttgtgtgtttgtgaaaaat

SEQ ID NO: 142502 - RNA, 22 nt, synthetic construct
  source 1..22: mol_type = other RNA
ggtttgttttttgttttggtca

SEQ ID NO: 142503 - RNA, 22 nt, synthetic construct
  source 1..22: mol_type = other RNA
ggttttaacctcttgaagtcag

SEQ ID NO: 142504 - RNA, 22 nt, synthetic construct
  source 1..22: mol_type = other RNA
ggttttaatataaaaattccgc

SEQ ID NO: 142505 - RNA, 22 nt, synthetic construct
  source 1..22: mol_type = other RNA
ggttttaatgggcattagaagt

SEQ ID NO: 142506 - RNA, 22 nt, synthetic construct
  source 1..22: mol_type = other RNA
ggttttactactgtactgttta

SEQ ID NO: 142507 - RNA, 22 nt, synthetic construct
  source 1..22: mol_type = other RNA
ggttttatctctctcaagcaat

SEQ ID NO: 142508 - RNA, 22 nt, synthetic construct
  source 1..22: mol_type = other RNA
ggttttatggtaactcctgttc

SEQ ID NO: 142509 - RNA, 22 nt, synthetic construct
  source 1..22: mol_type = other RNA
ggttttcctactaacaagaaag

SEQ ID NO: 142510 - RNA, 22 nt, synthetic construct
  source 1..22: mol_type = other RNA
ggttttcctgatggacattctg

SEQ ID NO: 142511 - RNA, 22 nt, synthetic construct
  source 1..22: mol_type = other RNA
ggttttcgaccaagttactaga

SEQ ID NO: 142512 - RNA, 22 nt, synthetic construct
  source 1..22: mol_type = other RNA
ggttttctagttagtttgttga

SEQ ID NO: 142513 - RNA, 22 nt, synthetic construct
  source 1..22: mol_type = other RNA
ggttttctggaggctagaagtc

SEQ ID NO: 142514 - RNA, 22 nt, synthetic construct
  source 1..22: mol_type = other RNA
ggttttctgtagaatatccaag

SEQ ID NO: 142515 - RNA, 22 nt, synthetic construct
  source 1..22: mol_type = other RNA
ggttttgactcagtacttccct

SEQ ID NO: 142516 - RNA, 22 nt, synthetic construct
  source 1..22: mol_type = other RNA
ggttttgatcatcgcattacga

SEQ ID NO: 142517 - RNA, 22 nt, synthetic construct
  source 1..22: mol_type = other RNA
ggttttggtaatgggaaagaca

SEQ ID NO: 142518 - RNA, 22 nt, synthetic construct
  source 1..22: mol_type = other RNA
ggttttggtatgttgtgttttc

SEQ ID NO: 142519 - RNA, 22 nt, synthetic construct
  source 1..22: mol_type = other RNA
ggttttgttttgttttttcaca

SEQ ID NO: 142520 - RNA, 22 nt, synthetic construct
  source 1..22: mol_type = other RNA
ggtttttaaaagatgcattctg

SEQ ID NO: 142521 - RNA, 22 nt, synthetic construct
  source 1..22: mol_type = other RNA
ggtttttatggaataatggaac

SEQ ID NO: 142522 - RNA, 22 nt, synthetic construct
  source 1..22: mol_type = other RNA
ggtttttattttatgtacacgt

SEQ ID NO: 142523 - RNA, 22 nt, synthetic construct
  source 1..22: mol_type = other RNA
ggtttttcttgtgggtattttg

SEQ ID NO: 142524 - RNA, 22 nt, synthetic construct
  source 1..22: mol_type = other RNA
ggtttttgaacaagagcgtcgt

SEQ ID NO: 142525 - RNA, 22 nt, synthetic construct
  source 1..22: mol_type = other RNA
ggtttttgattactgactcaat

SEQ ID NO: 142526 - RNA, 22 nt, synthetic construct
  source 1..22: mol_type = other RNA
ggtttttggttcacttgaaacc

SEQ ID NO: 142527 - RNA, 22 nt, synthetic construct
  source 1..22: mol_type = other RNA
ggttttttcattttactgctat

SEQ ID NO: 142528 - RNA, 22 nt, synthetic construct
  source 1..22: mol_type = other RNA
ggttttttcccccctggaacaa

SEQ ID NO: 142529 - RNA, 22 nt, synthetic construct
  source 1..22: mol_type = other RNA
gtaaaaaaggaccatctgttaa

SEQ ID NO: 142530 - RNA, 22 nt, synthetic construct
  source 1..22: mol_type = other RNA
gtaaaaactgtttggctgggag

SEQ ID NO: 142531 - RNA, 22 nt, synthetic construct
  source 1..22: mol_type = other RNA
gtaaaaagaaatctgcatccaa

SEQ ID NO: 142532 - RNA, 22 nt, synthetic construct
  source 1..22: mol_type = other RNA
gtaaaaagcactatccacattt

SEQ ID NO: 142533 - RNA, 22 nt, synthetic construct
  source 1..22: mol_type = other RNA
gtaaaaagccatttatcagcac

SEQ ID NO: 142534 - RNA, 22 nt, synthetic construct
  source 1..22: mol_type = other RNA
gtaaaaagcctgcttcagccta

SEQ ID NO: 142535 - RNA, 22 nt, synthetic construct
  source 1..22: mol_type = other RNA
gtaaaaagtgcttctagtaact

SEQ ID NO: 142536 - RNA, 22 nt, synthetic construct
  source 1..22: mol_type = other RNA
gtaaaaatatagaaggccagag

SEQ ID NO: 142537 - RNA, 22 nt, synthetic construct
  source 1..22: mol_type = other RNA
gtaaaaattttctcccaaggtt

SEQ ID NO: 142538 - RNA, 22 nt, synthetic construct
  source 1..22: mol_type = other RNA
gtaaaacaaattccctctacaa

SEQ ID NO: 142539 - RNA, 22 nt, synthetic construct
  source 1..22: mol_type = other RNA
gtaaaacagacccttatgtcca

SEQ ID NO: 142540 - RNA, 22 nt, synthetic construct
  source 1..22: mol_type = other RNA
gtaaaacatcaaagtcccctgt

SEQ ID NO: 142541 - RNA, 22 nt, synthetic construct
  source 1..22: mol_type = other RNA
gtaaaacatctggaaggaaaca

SEQ ID NO: 142542 - RNA, 22 nt, synthetic construct
  source 1..22: mol_type = other RNA
gtaaaaccaaatgtggatagtg

SEQ ID NO: 142543 - RNA, 22 nt, synthetic construct
  source 1..22: mol_type = other RNA
gtaaaagaagatgcagttgctt

SEQ ID NO: 142544 - RNA, 22 nt, synthetic construct
  source 1..22: mol_type = other RNA
gtaaaagcaacctcatttgcag

SEQ ID NO: 142545 - RNA, 22 nt, synthetic construct
  source 1..22: mol_type = other RNA
gtaaaagctaatctactttcta

SEQ ID NO: 142546 - RNA, 22 nt, synthetic construct
  source 1..22: mol_type = other RNA
gtaaaaggctaattttttctgt

SEQ ID NO: 142547 - RNA, 22 nt, synthetic construct
  source 1..22: mol_type = other RNA
gtaaaatacaacagcacctttt

SEQ ID NO: 142548 - RNA, 22 nt, synthetic construct
  source 1..22: mol_type = other RNA
gtaaaatagtcaagtaacagtt

SEQ ID NO: 142549 - RNA, 22 nt, synthetic construct
  source 1..22: mol_type = other RNA
gtaaaatcactaattcaagtgt

SEQ ID NO: 142550 - RNA, 22 nt, synthetic construct
  source 1..22: mol_type = other RNA
gtaaaatcggaacaggctcaat

SEQ ID NO: 142551 - RNA, 22 nt, synthetic construct
  source 1..22: mol_type = other RNA
gtaaaatgtggcaaatttatgt

SEQ ID NO: 142552 - RNA, 22 nt, synthetic construct
  source 1..22: mol_type = other RNA
gtaaaattcccttcagtgtagt

SEQ ID NO: 142553 - RNA, 22 nt, synthetic construct
  source 1..22: mol_type = other RNA
gtaaacaactgactctaaagtc

SEQ ID NO: 142554 - RNA, 22 nt, synthetic construct
  source 1..22: mol_type = other RNA
gtaaacaagactcaacatgtgt

SEQ ID NO: 142555 - RNA, 22 nt, synthetic construct
  source 1..22: mol_type = other RNA
gtaaacaatgctgctatgaaaa

SEQ ID NO: 142556 - RNA, 22 nt, synthetic construct
  source 1..22: mol_type = other RNA
gtaaacactgttctgcgtggtt

SEQ ID NO: 142557 - RNA, 22 nt, synthetic construct
  source 1..22: mol_type = other RNA
gtaaacagcagtcttaaccatt

SEQ ID NO: 142558 - RNA, 22 nt, synthetic construct
  source 1..22: mol_type = other RNA
gtaaacagcatactgtggatat

SEQ ID NO: 142559 - RNA, 22 nt, synthetic construct
  source 1..22: mol_type = other RNA
gtaaacatgaacaagttacaaa

SEQ ID NO: 142560 - RNA, 22 nt, synthetic construct
  source 1..22: mol_type = other RNA
gtaaaccatatggttaatagtg

SEQ ID NO: 142561 - RNA, 22 nt, synthetic construct
  source 1..22: mol_type = other RNA
gtaaacctcaagtcttttccta

SEQ ID NO: 142562 - RNA, 22 nt, synthetic construct
  source 1..22: mol_type = other RNA
gtaaacctggaatcctctacca

SEQ ID NO: 142563 - RNA, 22 nt, synthetic construct
  source 1..22: mol_type = other RNA
gtaaactgttggaaaaatcgtc

SEQ ID NO: 142564 - RNA, 22 nt, synthetic construct
  source 1..22: mol_type = other RNA
gtaaagatagccccttatcagg

SEQ ID NO: 142565 - RNA, 22 nt, synthetic construct
  source 1..22: mol_type = other RNA
gtaaagatcaagctcgccgtct

SEQ ID NO: 142566 - RNA, 22 nt, synthetic construct
  source 1..22: mol_type = other RNA
gtaaagcaaatgtgactagaag

SEQ ID NO: 142567 - RNA, 22 nt, synthetic construct
  source 1..22: mol_type = other RNA
gtaaagccccattgtacacata

SEQ ID NO: 142568 - RNA, 22 nt, synthetic construct
  source 1..22: mol_type = other RNA
gtaaaggggatgggggacgacg

SEQ ID NO: 142569 - RNA, 22 nt, synthetic construct
  source 1..22: mol_type = other RNA
gtaaagggtaagaaaattgtac

SEQ ID NO: 142570 - RNA, 22 nt, synthetic construct
  source 1..22: mol_type = other RNA
gtaaagtaatcaagtgaaatga

SEQ ID NO: 142571 - RNA, 22 nt, synthetic construct
  source 1..22: mol_type = other RNA
gtaaagtcactgtggaaaacag

SEQ ID NO: 142572 - RNA, 22 nt, synthetic construct
  source 1..22: mol_type = other RNA
gtaaagtttctctctccctgcc

SEQ ID NO: 142573 - RNA, 22 nt, synthetic construct
  source 1..22: mol_type = other RNA
gtaaatatactgactagtggct

SEQ ID NO: 142574 - RNA, 22 nt, synthetic construct
  source 1..22: mol_type = other RNA
gtaaatatattctaaacctgag

SEQ ID NO: 142575 - RNA, 22 nt, synthetic construct
  source 1..22: mol_type = other RNA
gtaaatatccgaaagaactgaa

SEQ ID NO: 142576 - RNA, 22 nt, synthetic construct
  source 1..22: mol_type = other RNA
gtaaatatttaacaccatggca

SEQ ID NO: 142577 - RNA, 22 nt, synthetic construct
  source 1..22: mol_type = other RNA
gtaaatcagactgtattaccag

SEQ ID NO: 142578 - RNA, 22 nt, synthetic construct
  source 1..22: mol_type = other RNA
gtaaatcccggccaggtgcggt

SEQ ID NO: 142579 - RNA, 22 nt, synthetic construct
  source 1..22: mol_type = other RNA
gtaaatctttggtgaaggttca

SEQ ID NO: 142580 - RNA, 22 nt, synthetic construct
  source 1..22: mol_type = other RNA
gtaaatctttgtacagtaattg

SEQ ID NO: 142581 - RNA, 22 nt, synthetic construct
  source 1..22: mol_type = other RNA
gtaaatgaaacacttgtgtaac

SEQ ID NO: 142582 - RNA, 22 nt, synthetic construct
  source 1..22: mol_type = other RNA
gtaaatgaaatttgaggcccta

SEQ ID NO: 142583 - RNA, 22 nt, synthetic construct
  source 1..22: mol_type = other RNA
gtaaatgcaatgcaggcgcctg

SEQ ID NO: 142584 - RNA, 22 nt, synthetic construct
  source 1..22: mol_type = other RNA
gtaaatggtttctccttctgca

SEQ ID NO: 142585 - RNA, 22 nt, synthetic construct
  source 1..22: mol_type = other RNA
gtaaattcctaactcaagagtt

SEQ ID NO: 142586 - RNA, 22 nt, synthetic construct
  source 1..22: mol_type = other RNA
gtaaattcgcataaccaaatta

SEQ ID NO: 142587 - RNA, 22 nt, synthetic construct
  source 1..22: mol_type = other RNA
gtaaattctgccacattcaaca

SEQ ID NO: 142588 - RNA, 22 nt, synthetic construct
  source 1..22: mol_type = other RNA
gtaaattggtcctggaaaaaga

SEQ ID NO: 142589 - RNA, 22 nt, synthetic construct
  source 1..22: mol_type = other RNA
gtaaatttctaaaaacgtgcaa

SEQ ID NO: 142590 - RNA, 22 nt, synthetic construct
  source 1..22: mol_type = other RNA
gtaacaaagatgccacaaatgg

SEQ ID NO: 142591 - RNA, 22 nt, synthetic construct
  source 1..22: mol_type = other RNA
gtaacaaataagaagattgagt

SEQ ID NO: 142592 - RNA, 22 nt, synthetic construct
  source 1..22: mol_type = other RNA
gtaacacagttctagttctaat

SEQ ID NO: 142593 - RNA, 22 nt, synthetic construct
  source 1..22: mol_type = other RNA
gtaacacatatttatcaacaca

SEQ ID NO: 142594 - RNA, 22 nt, synthetic construct
  source 1..22: mol_type = other RNA
gtaacactcagaagtactactc

SEQ ID NO: 142595 - RNA, 22 nt, synthetic construct
  source 1..22: mol_type = other RNA
gtaacagacctctgaagagtct

SEQ ID NO: 142596 - RNA, 22 nt, synthetic construct
  source 1..22: mol_type = other RNA
gtaacagaggcatgcacggact

SEQ ID NO: 142597 - RNA, 22 nt, synthetic construct
  source 1..22: mol_type = other RNA
gtaacagccaaataaaacacaa

SEQ ID NO: 142598 - RNA, 22 nt, synthetic construct
  source 1..22: mol_type = other RNA
gtaacagttcaatactactgca

SEQ ID NO: 142599 - RNA, 22 nt, synthetic construct
  source 1..22: mol_type = other RNA
gtaacatacacatcagattttg

SEQ ID NO: 142600 - RNA, 22 nt, synthetic construct
  source 1..22: mol_type = other RNA
gtaacatgtggaacataatctt

SEQ ID NO: 142601 - RNA, 22 nt, synthetic construct
  source 1..22: mol_type = other RNA
gtaacatgttagattaggaaac

SEQ ID NO: 142602 - RNA, 22 nt, synthetic construct
  source 1..22: mol_type = other RNA
gtaacattacaacagcaaggct

SEQ ID NO: 142603 - RNA, 22 nt, synthetic construct
  source 1..22: mol_type = other RNA
gtaaccctgtttcccttaatgt

SEQ ID NO: 142604 - RNA, 22 nt, synthetic construct
  source 1..22: mol_type = other RNA
gtaacctaaagttgaggttgaa

SEQ ID NO: 142605 - RNA, 22 nt, synthetic construct
  source 1..22: mol_type = other RNA
gtaacctccacctcccagattc

SEQ ID NO: 142606 - RNA, 22 nt, synthetic construct
  source 1..22: mol_type = other RNA
gtaacgtgagctggaagtaagg

SEQ ID NO: 142607 - RNA, 22 nt, synthetic construct
  source 1..22: mol_type = other RNA
gtaactaaactattgtatgaac

SEQ ID NO: 142608 - RNA, 22 nt, synthetic construct
  source 1..22: mol_type = other RNA
gtaactaattactgtttcttag

SEQ ID NO: 142609 - RNA, 22 nt, synthetic construct
  source 1..22: mol_type = other RNA
gtaactacagacatgccacacc

SEQ ID NO: 142610 - RNA, 22 nt, synthetic construct
  source 1..22: mol_type = other RNA
gtaactaccactgaggtcaaga

SEQ ID NO: 142611 - RNA, 22 nt, synthetic construct
  source 1..22: mol_type = other RNA
gtaactagatgcctcgaaggcc

SEQ ID NO: 142612 - RNA, 22 nt, synthetic construct
  source 1..22: mol_type = other RNA
gtaactccatcttcacgtggcg

SEQ ID NO: 142613 - RNA, 22 nt, synthetic construct
  source 1..22: mol_type = other RNA
gtaactcctgttctttggagct

SEQ ID NO: 142614 - RNA, 22 nt, synthetic construct
  source 1..22: mol_type = other RNA
gtaactcttgagttaggaattt

SEQ ID NO: 142615 - RNA, 22 nt, synthetic construct
  source 1..22: mol_type = other RNA
gtaactgacttcaagaggttaa

SEQ ID NO: 142616 - RNA, 22 nt, synthetic construct
  source 1..22: mol_type = other RNA
gtaactgatgtgaggatctgtt

SEQ ID NO: 142617 - RNA, 22 nt, synthetic construct
  source 1..22: mol_type = other RNA
gtaactgctcctctgactttat

SEQ ID NO: 142618 - RNA, 22 nt, synthetic construct
  source 1..22: mol_type = other RNA
gtaactggtccagatgaagcag

SEQ ID NO: 142619 - RNA, 22 nt, synthetic construct
  source 1..22: mol_type = other RNA
gtaactgtcatcagcgtcctca

SEQ ID NO: 142620 - RNA, 22 nt, synthetic construct
  source 1..22: mol_type = other RNA
gtaactgttggcaaggatgtgg

SEQ ID NO: 142621 - RNA, 22 nt, synthetic construct
  source 1..22: mol_type = other RNA
gtaacttgaattcagatggccc

SEQ ID NO: 142622 - RNA, 22 nt, synthetic construct
  source 1..22: mol_type = other RNA
gtaacttgcttaggctgaagca

SEQ ID NO: 142623 - RNA, 22 nt, synthetic construct
  source 1..22: mol_type = other RNA
gtaacttggtcgaaaacctgaa

SEQ ID NO: 142624 - RNA, 22 nt, synthetic construct
  source 1..22: mol_type = other RNA
gtaacttgttcatgtttacaga

SEQ ID NO: 142625 - RNA, 22 nt, synthetic construct
  source 1..22: mol_type = other RNA
gtaactttctgcttaaagcctc

SEQ ID NO: 142626 - RNA, 22 nt, synthetic construct
  source 1..22: mol_type = other RNA
gtaagaaaaattccctcagcaa

SEQ ID NO: 142627 - RNA, 22 nt, synthetic construct
  source 1..22: mol_type = other RNA
gtaagaaaacagataacctaga

SEQ ID NO: 142628 - RNA, 22 nt, synthetic construct
  source 1..22: mol_type = other RNA
gtaagaaaggagttcagcttta

SEQ ID NO: 142629 - RNA, 22 nt, synthetic construct
  source 1..22: mol_type = other RNA
gtaagaacacttaacatgagat

SEQ ID NO: 142630 - RNA, 22 nt, synthetic construct
  source 1..22: mol_type = other RNA
gtaagaacttgtctttgtctat

SEQ ID NO: 142631 - RNA, 22 nt, synthetic construct
  source 1..22: mol_type = other RNA
gtaagaatgtcaagctgtttga

SEQ ID NO: 142632 - RNA, 22 nt, synthetic construct
  source 1..22: mol_type = other RNA
gtaagacaatgtctttggctct

SEQ ID NO: 142633 - RNA, 22 nt, synthetic construct
  source 1..22: mol_type = other RNA
gtaagaccaaaatggagaccca

SEQ ID NO: 142634 - RNA, 22 nt, synthetic construct
  source 1..22: mol_type = other RNA
gtaagagattaattcagtcaac

SEQ ID NO: 142635 - RNA, 22 nt, synthetic construct
  source 1..22: mol_type = other RNA
gtaagaggtatcaccatctgat

SEQ ID NO: 142636 - RNA, 22 nt, synthetic construct
  source 1..22: mol_type = other RNA
gtaagatcctggattgctagtg

SEQ ID NO: 142637 - RNA, 22 nt, synthetic construct
  source 1..22: mol_type = other RNA
gtaagattccgtctcaaaaaat

SEQ ID NO: 142638 - RNA, 22 nt, synthetic construct
  source 1..22: mol_type = other RNA
gtaagattctgtctctacaaaa

SEQ ID NO: 142639 - RNA, 22 nt, synthetic construct
  source 1..22: mol_type = other RNA
gtaagattgtggtccagaaaaa

SEQ ID NO: 142640 - RNA, 22 nt, synthetic construct
  source 1..22: mol_type = other RNA
gtaagcaactgcatcttctttt

SEQ ID NO: 142641 - RNA, 22 nt, synthetic construct
  source 1..22: mol_type = other RNA
gtaagcacacatgaacctgcat

SEQ ID NO: 142642 - RNA, 22 nt, synthetic construct
  source 1..22: mol_type = other RNA
gtaagcacctgtataaataaaa

SEQ ID NO: 142643 - RNA, 22 nt, synthetic construct
  source 1..22: mol_type = other RNA
gtaagctgaactctgtggagtc

SEQ ID NO: 142644 - RNA, 22 nt, synthetic construct
  source 1..22: mol_type = other RNA
gtaagctggtaatacagtctga

SEQ ID NO: 142645 - RNA, 22 nt, synthetic construct
  source 1..22: mol_type = other RNA
gtaagctgtgagtccttccagt

SEQ ID NO: 142646 - RNA, 22 nt, synthetic construct
  source 1..22: mol_type = other RNA
gtaaggaaacagagttttccaa

SEQ ID NO: 142647 - RNA, 22 nt, synthetic construct
  source 1..22: mol_type = other RNA
gtaaggaaaccccagggatatt

SEQ ID NO: 142648 - RNA, 22 nt, synthetic construct
  source 1..22: mol_type = other RNA
gtaaggactgaagtcctttctt

SEQ ID NO: 142649 - RNA, 22 nt, synthetic construct
  source 1..22: mol_type = other RNA
gtaaggagccaaacatcatgat

SEQ ID NO: 142650 - RNA, 22 nt, synthetic construct
  source 1..22: mol_type = other RNA
gtaaggatcgttagtattttca

SEQ ID NO: 142651 - RNA, 22 nt, synthetic construct
  source 1..22: mol_type = other RNA
gtaaggattttctattcattac

SEQ ID NO: 142652 - RNA, 22 nt, synthetic construct
  source 1..22: mol_type = other RNA
gtaagggtaaacagaattaaac

SEQ ID NO: 142653 - RNA, 22 nt, synthetic construct
  source 1..22: mol_type = other RNA
gtaagggtacagaactgctaat

SEQ ID NO: 142654 - RNA, 22 nt, synthetic construct
  source 1..22: mol_type = other RNA
gtaagggtccagcttcactctt

SEQ ID NO: 142655 - RNA, 22 nt, synthetic construct
  source 1..22: mol_type = other RNA
gtaaggtgcacgctgtgaatgt

SEQ ID NO: 142656 - RNA, 22 nt, synthetic construct
  source 1..22: mol_type = other RNA
gtaaggtgtttggtgaatttta

SEQ ID NO: 142657 - RNA, 22 nt, synthetic construct
  source 1..22: mol_type = other RNA
gtaaggtttccctggggaataa

SEQ ID NO: 142658 - RNA, 22 nt, synthetic construct
  source 1..22: mol_type = other RNA
gtaagtaaaatcggaacaggct

SEQ ID NO: 142659 - RNA, 22 nt, synthetic construct
  source 1..22: mol_type = other RNA
gtaagtcagttaacagtgctgt

SEQ ID NO: 142660 - RNA, 22 nt, synthetic construct
  source 1..22: mol_type = other RNA
gtaagtcatcaaaggaaggaat

SEQ ID NO: 142661 - RNA, 22 nt, synthetic construct
  source 1..22: mol_type = other RNA
gtaagtgggaggaggtcatact

SEQ ID NO: 142662 - RNA, 22 nt, synthetic construct
  source 1..22: mol_type = other RNA
gtaagtgtgagcaaaaatacag

SEQ ID NO: 142663 - RNA, 22 nt, synthetic construct
  source 1..22: mol_type = other RNA
gtaagttcctggactgtgatga

SEQ ID NO: 142664 - RNA, 22 nt, synthetic construct
  source 1..22: mol_type = other RNA
gtaagttgcatacgtcgtcccc

SEQ ID NO: 142665 - RNA, 22 nt, synthetic construct
  source 1..22: mol_type = other RNA
gtaagttggattcccaggtatt

SEQ ID NO: 142666 - RNA, 22 nt, synthetic construct
  source 1..22: mol_type = other RNA
gtaagttgtgtcatttttgtat

SEQ ID NO: 142667 - RNA, 22 nt, synthetic construct
  source 1..22: mol_type = other RNA
gtaataaagcaagtatgagcca

SEQ ID NO: 142668 - RNA, 22 nt, synthetic construct
  source 1..22: mol_type = other RNA
gtaataaaggcaatgctctctt

SEQ ID NO: 142669 - RNA, 22 nt, synthetic construct
  source 1..22: mol_type = other RNA
gtaataacttggagaacttaaa

SEQ ID NO: 142670 - RNA, 22 nt, synthetic construct
  source 1..22: mol_type = other RNA
gtaataatgaaagctcccaatg

SEQ ID NO: 142671 - RNA, 22 nt, synthetic construct
  source 1..22: mol_type = other RNA
gtaatacagtctgatttacttt

SEQ ID NO: 142672 - RNA, 22 nt, synthetic construct
  source 1..22: mol_type = other RNA
gtaatactctagtggtgcttaa

SEQ ID NO: 142673 - RNA, 22 nt, synthetic construct
  source 1..22: mol_type = other RNA
gtaatactgtagaatgtttttc

SEQ ID NO: 142674 - RNA, 22 nt, synthetic construct
  source 1..22: mol_type = other RNA
gtaatatacttgtcaagttctg

SEQ ID NO: 142675 - RNA, 22 nt, synthetic construct
  source 1..22: mol_type = other RNA
gtaatattaaccaagaacaacc

SEQ ID NO: 142676 - RNA, 22 nt, synthetic construct
  source 1..22: mol_type = other RNA
gtaatattgtatatacccttct

SEQ ID NO: 142677 - RNA, 22 nt, synthetic construct
  source 1..22: mol_type = other RNA
gtaatcaaaaacctcccaacag

SEQ ID NO: 142678 - RNA, 22 nt, synthetic construct
  source 1..22: mol_type = other RNA
gtaatcaaacagtgtgatattg

SEQ ID NO: 142679 - RNA, 22 nt, synthetic construct
  source 1..22: mol_type = other RNA
gtaatcaagtatctccctgtgc

SEQ ID NO: 142680 - RNA, 22 nt, synthetic construct
  source 1..22: mol_type = other RNA
gtaatcaagtgaaatgatcttt

SEQ ID NO: 142681 - RNA, 22 nt, synthetic construct
  source 1..22: mol_type = other RNA
gtaatcacagtacgcttttatg

SEQ ID NO: 142682 - RNA, 22 nt, synthetic construct
  source 1..22: mol_type = other RNA
gtaatcctgtttctctacatct

SEQ ID NO: 142683 - RNA, 22 nt, synthetic construct
  source 1..22: mol_type = other RNA
gtaatctaaggattatggctag

SEQ ID NO: 142684 - RNA, 22 nt, synthetic construct
  source 1..22: mol_type = other RNA
gtaatctcatggaagttattta

SEQ ID NO: 142685 - RNA, 22 nt, synthetic construct
  source 1..22: mol_type = other RNA
gtaatcttgctaaacatgtata

SEQ ID NO: 142686 - RNA, 22 nt, synthetic construct
  source 1..22: mol_type = other RNA
gtaatgaaaattagctggatgt

SEQ ID NO: 142687 - RNA, 22 nt, synthetic construct
  source 1..22: mol_type = other RNA
gtaatgaatagaaaatccttac

SEQ ID NO: 142688 - RNA, 22 nt, synthetic construct
  source 1..22: mol_type = other RNA
gtaatgacaataataactacac

SEQ ID NO: 142689 - RNA, 22 nt, synthetic construct
  source 1..22: mol_type = other RNA
gtaatgacctggaaattattca

SEQ ID NO: 142690 - RNA, 22 nt, synthetic construct
  source 1..22: mol_type = other RNA
gtaatgagctgagattgcccca

SEQ ID NO: 142691 - RNA, 22 nt, synthetic construct
  source 1..22: mol_type = other RNA
gtaatgcgatgatcaaaaccag

SEQ ID NO: 142692 - RNA, 22 nt, synthetic construct
  source 1..22: mol_type = other RNA
gtaatgctggccagtgagttca

SEQ ID NO: 142693 - RNA, 22 nt, synthetic construct
  source 1..22: mol_type = other RNA
gtaatgctggcttcatgggtgg

SEQ ID NO: 142694 - RNA, 22 nt, synthetic construct
  source 1..22: mol_type = other RNA
gtaatggatcaaggcacagtct

SEQ ID NO: 142695 - RNA, 22 nt, synthetic construct
  source 1..22: mol_type = other RNA
gtaatggatgtttttagagaga

SEQ ID NO: 142696 - RNA, 22 nt, synthetic construct
  source 1..22: mol_type = other RNA
gtaatgggaaagacaggtagac

SEQ ID NO: 142697 - RNA, 22 nt, synthetic construct
  source 1..22: mol_type = other RNA
gtaatggttggccgaggccagt

SEQ ID NO: 142698 - RNA, 22 nt, synthetic construct
  source 1..22: mol_type = other RNA
gtaatgtctcctctttcatatc

SEQ ID NO: 142699 - RNA, 22 nt, synthetic construct
  source 1..22: mol_type = other RNA
gtaatgttacttctcagctata

SEQ ID NO: 142700 - RNA, 22 nt, synthetic construct
  source 1..22: mol_type = other RNA
gtaatgttatatttccgtatcc

SEQ ID NO: 142701 - RNA, 22 nt, synthetic construct
  source 1..22: mol_type = other RNA
gtaatgtttgtacttctacctt

SEQ ID NO: 142702 - RNA, 22 nt, synthetic construct
  source 1..22: mol_type = other RNA
gtaattacaggggactttgatg

SEQ ID NO: 142703 - RNA, 22 nt, synthetic construct
  source 1..22: mol_type = other RNA
gtaattacatacttcaaagggt

SEQ ID NO: 142704 - RNA, 22 nt, synthetic construct
  source 1..22: mol_type = other RNA
gtaattagttacatgaggtcac

SEQ ID NO: 142705 - RNA, 22 nt, synthetic construct
  source 1..22: mol_type = other RNA
gtaattcatcctactagtattt

SEQ ID NO: 142706 - RNA, 22 nt, synthetic construct
  source 1..22: mol_type = other RNA
gtaattctccactttcatgatt

SEQ ID NO: 142707 - RNA, 22 nt, synthetic construct
  source 1..22: mol_type = other RNA
gtaattctgcagtgaacatggg

SEQ ID NO: 142708 - RNA, 22 nt, synthetic construct
  source 1..22: mol_type = other RNA
gtaattgggatctgataaatta

SEQ ID NO: 142709 - RNA, 22 nt, synthetic construct
  source 1..22: mol_type = other RNA
gtaattggttcgtttgaggctt

SEQ ID NO: 142710 - RNA, 22 nt, synthetic construct
  source 1..22: mol_type = other RNA
gtaattgtaccttggagagaaa

SEQ ID NO: 142711 - RNA, 22 nt, synthetic construct
  source 1..22: mol_type = other RNA
gtaattgtagtttccatggagg

SEQ ID NO: 142712 - RNA, 22 nt, synthetic construct
  source 1..22: mol_type = other RNA
gtaattgttttcccttttgtag

SEQ ID NO: 142713 - RNA, 22 nt, synthetic construct
  source 1..22: mol_type = other RNA
gtaatttatctccataagtccc

SEQ ID NO: 142714 - RNA, 22 nt, synthetic construct
  source 1..22: mol_type = other RNA
gtaatttgtccatctggattat

SEQ ID NO: 142715 - RNA, 22 nt, synthetic construct
  source 1..22: mol_type = other RNA
gtaattttggggccatctgaat

SEQ ID NO: 142716 - RNA, 22 nt, synthetic construct
  source 1..22: mol_type = other RNA
gtaatttttaaaagagcgaaga

SEQ ID NO: 142717 - RNA, 22 nt, synthetic construct
  source 1..22: mol_type = other RNA
gtacaaaagtgctgttgaggct

SEQ ID NO: 142718 - RNA, 22 nt, synthetic construct
  source 1..22: mol_type = other RNA
gtacaaagatttacccctactt

SEQ ID NO: 142719 - RNA, 22 nt, synthetic construct
  source 1..22: mol_type = other RNA
gtacaacattcatccctctaaa

SEQ ID NO: 142720 - RNA, 22 nt, synthetic construct
  source 1..22: mol_type = other RNA
gtacaactaataattgcttttg

SEQ ID NO: 142721 - RNA, 22 nt, synthetic construct
  source 1..22: mol_type = other RNA
gtacaaggctagagctcacacg

SEQ ID NO: 142722 - RNA, 22 nt, synthetic construct
  source 1..22: mol_type = other RNA
gtacaatgaattagcaatgcga

SEQ ID NO: 142723 - RNA, 22 nt, synthetic construct
  source 1..22: mol_type = other RNA
gtacaatggggctttactgtat

SEQ ID NO: 142724 - RNA, 22 nt, synthetic construct
  source 1..22: mol_type = other RNA
gtacaattacacatctcccata

SEQ ID NO: 142725 - RNA, 22 nt, synthetic construct
  source 1..22: mol_type = other RNA
gtacaattaggctgtttgagat

SEQ ID NO: 142726 - RNA, 22 nt, synthetic construct
  source 1..22: mol_type = other RNA
gtacaattcggtggcattaagg

SEQ ID NO: 142727 - RNA, 22 nt, synthetic construct
  source 1..22: mol_type = other RNA
gtacaattttcttaccctttac

SEQ ID NO: 142728 - RNA, 22 nt, synthetic construct
  source 1..22: mol_type = other RNA
gtacacatcctaatacagtaaa

SEQ ID NO: 142729 - RNA, 22 nt, synthetic construct
  source 1..22: mol_type = other RNA
gtacacctcaaactagaaaaag

SEQ ID NO: 142730 - RNA, 22 nt, synthetic construct
  source 1..22: mol_type = other RNA
gtacacgaaaatatccctgggg

SEQ ID NO: 142731 - RNA, 22 nt, synthetic construct
  source 1..22: mol_type = other RNA
gtacacgtcttgtcaataattt

SEQ ID NO: 142732 - RNA, 22 nt, synthetic construct
  source 1..22: mol_type = other RNA
gtacactgttgatttagaaata

SEQ ID NO: 142733 - RNA, 22 nt, synthetic construct
  source 1..22: mol_type = other RNA
gtacagaactgctaatggtcct

SEQ ID NO: 142734 - RNA, 22 nt, synthetic construct
  source 1..22: mol_type = other RNA
gtacagataaccaataagaagt

SEQ ID NO: 142735 - RNA, 22 nt, synthetic construct
  source 1..22: mol_type = other RNA
gtacagccatcaacctaatgaa

SEQ ID NO: 142736 - RNA, 22 nt, synthetic construct
  source 1..22: mol_type = other RNA
gtacagggtttctgtttggatg

SEQ ID NO: 142737 - RNA, 22 nt, synthetic construct
  source 1..22: mol_type = other RNA
gtacagtaattgtagtttccat

SEQ ID NO: 142738 - RNA, 22 nt, synthetic construct
  source 1..22: mol_type = other RNA
gtacagtagtaaaaccaaatgt

SEQ ID NO: 142739 - RNA, 22 nt, synthetic construct
  source 1..22: mol_type = other RNA
gtacagtgagtagaagagtaat

SEQ ID NO: 142740 - RNA, 22 nt, synthetic construct
  source 1..22: mol_type = other RNA
gtacagtgcataccaccacatt

SEQ ID NO: 142741 - RNA, 22 nt, synthetic construct
  source 1..22: mol_type = other RNA
gtacagtggcacgattttggct

SEQ ID NO: 142742 - RNA, 22 nt, synthetic construct
  source 1..22: mol_type = other RNA
gtacagtttaaaagtaaattcg

SEQ ID NO: 142743 - RNA, 22 nt, synthetic construct
  source 1..22: mol_type = other RNA
gtacatctcaattcagaagcta

SEQ ID NO: 142744 - RNA, 22 nt, synthetic construct
  source 1..22: mol_type = other RNA
gtacatgaaatactcaaactat

SEQ ID NO: 142745 - RNA, 22 nt, synthetic construct
  source 1..22: mol_type = other RNA
gtacatgaagtcctcaatcatg

SEQ ID NO: 142746 - RNA, 22 nt, synthetic construct
  source 1..22: mol_type = other RNA
gtacatgacctatctattaaca

SEQ ID NO: 142747 - RNA, 22 nt, synthetic construct
  source 1..22: mol_type = other RNA
gtacatgtagatatgggagtcc

SEQ ID NO: 142748 - RNA, 22 nt, synthetic construct
  source 1..22: mol_type = other RNA
gtacatttaaaattgcagagtg

SEQ ID NO: 142749 - RNA, 22 nt, synthetic construct
  source 1..22: mol_type = other RNA
gtacattttaccatatacacaa

SEQ ID NO: 142750 - RNA, 22 nt, synthetic construct
  source 1..22: mol_type = other RNA
gtaccaaaagtcctgttctttt

SEQ ID NO: 142751 - RNA, 22 nt, synthetic construct
  source 1..22: mol_type = other RNA
gtaccaaagcagaaatacagac

SEQ ID NO: 142752 - RNA, 22 nt, synthetic construct
  source 1..22: mol_type = other RNA
gtaccaggtcagccagaggaag

SEQ ID NO: 142753 - RNA, 22 nt, synthetic construct
  source 1..22: mol_type = other RNA
gtaccattccccttgccaaggc

SEQ ID NO: 142754 - RNA, 22 nt, synthetic construct
  source 1..22: mol_type = other RNA
gtacccaatggattataaatca

SEQ ID NO: 142755 - RNA, 22 nt, synthetic construct
  source 1..22: mol_type = other RNA
gtacccattagacactaacttt

SEQ ID NO: 142756 - RNA, 22 nt, synthetic construct
  source 1..22: mol_type = other RNA
gtacccgtgtgttttgttgttg

SEQ ID NO: 142757 - RNA, 22 nt, synthetic construct
  source 1..22: mol_type = other RNA
gtacccttacgcgtggatgtgt

SEQ ID NO: 142758 - RNA, 22 nt, synthetic construct
  source 1..22: mol_type = other RNA
gtacctctgggatgctcagttt

SEQ ID NO: 142759 - RNA, 22 nt, synthetic construct
  source 1..22: mol_type = other RNA
gtaccttgatttatggcctaag

SEQ ID NO: 142760 - RNA, 22 nt, synthetic construct
  source 1..22: mol_type = other RNA
gtaccttggagagaaaccttgg

SEQ ID NO: 142761 - RNA, 22 nt, synthetic construct
  source 1..22: mol_type = other RNA
gtacctttcgctatcagtagtt

SEQ ID NO: 142762 - RNA, 22 nt, synthetic construct
  source 1..22: mol_type = other RNA
gtacgacgctcttgttcaaaaa

SEQ ID NO: 142763 - RNA, 22 nt, synthetic construct
  source 1..22: mol_type = other RNA
gtacgccaattttcatagcagc

SEQ ID NO: 142764 - RNA, 22 nt, synthetic construct
  source 1..22: mol_type = other RNA
gtacgctccctcgcgcggcacc

SEQ ID NO: 142765 - RNA, 22 nt, synthetic construct
  source 1..22: mol_type = other RNA
gtacgcttttatgttataatga

SEQ ID NO: 142766 - RNA, 22 nt, synthetic construct
  source 1..22: mol_type = other RNA
gtacgtaacctaaagttgaggt

SEQ ID NO: 142767 - RNA, 22 nt, synthetic construct
  source 1..22: mol_type = other RNA
gtacgtgcagagcaggggtggg

SEQ ID NO: 142768 - RNA, 22 nt, synthetic construct
  source 1..22: mol_type = other RNA
gtactaagcctatgtaagacaa

SEQ ID NO: 142769 - RNA, 22 nt, synthetic construct
  source 1..22: mol_type = other RNA
gtactacctatagaattcttct

SEQ ID NO: 142770 - RNA, 22 nt, synthetic construct
  source 1..22: mol_type = other RNA
gtactactgacctgggagaaag

SEQ ID NO: 142771 - RNA, 22 nt, synthetic construct
  source 1..22: mol_type = other RNA
gtactacttgtcaggtgggcac

SEQ ID NO: 142772 - RNA, 22 nt, synthetic construct
  source 1..22: mol_type = other RNA
gtactaggtatcacagtgagga

SEQ ID NO: 142773 - RNA, 22 nt, synthetic construct
  source 1..22: mol_type = other RNA
gtactagtcagcacactcttaa

SEQ ID NO: 142774 - RNA, 22 nt, synthetic construct
  source 1..22: mol_type = other RNA
gtactagtctccatacaaggag

SEQ ID NO: 142775 - RNA, 22 nt, synthetic construct
  source 1..22: mol_type = other RNA
gtactatcttccctaaagagaa

SEQ ID NO: 142776 - RNA, 22 nt, synthetic construct
  source 1..22: mol_type = other RNA
gtactatgcagcaacggaaatg

SEQ ID NO: 142777 - RNA, 22 nt, synthetic construct
  source 1..22: mol_type = other RNA
gtactcaacgacaatctctggg

SEQ ID NO: 142778 - RNA, 22 nt, synthetic construct
  source 1..22: mol_type = other RNA
gtactccagcctgggcgacaag

SEQ ID NO: 142779 - RNA, 22 nt, synthetic construct
  source 1..22: mol_type = other RNA
gtactccattatatgaataaac

SEQ ID NO: 142780 - RNA, 22 nt, synthetic construct
  source 1..22: mol_type = other RNA
gtactcccagcctcaaacaatc

SEQ ID NO: 142781 - RNA, 22 nt, synthetic construct
  source 1..22: mol_type = other RNA
gtactcctagatactcgggagg

SEQ ID NO: 142782 - RNA, 22 nt, synthetic construct
  source 1..22: mol_type = other RNA
gtactctatgatatatactttg

SEQ ID NO: 142783 - RNA, 22 nt, synthetic construct
  source 1..22: mol_type = other RNA
gtactgaaaccagtgctctccc

SEQ ID NO: 142784 - RNA, 22 nt, synthetic construct
  source 1..22: mol_type = other RNA
gtactgaccatctcagcacaga

SEQ ID NO: 142785 - RNA, 22 nt, synthetic construct
  source 1..22: mol_type = other RNA
gtactgagtcaaaaccaaagaa

SEQ ID NO: 142786 - RNA, 22 nt, synthetic construct
  source 1..22: mol_type = other RNA
gtactgcatgattccccttata

SEQ ID NO: 142787 - RNA, 22 nt, synthetic construct
  source 1..22: mol_type = other RNA
gtactgcctccacaggctttga

SEQ ID NO: 142788 - RNA, 22 nt, synthetic construct
  source 1..22: mol_type = other RNA
gtactggaaatggacagcgggg

SEQ ID NO: 142789 - RNA, 22 nt, synthetic construct
  source 1..22: mol_type = other RNA
gtactggaagtgtaacatacac

SEQ ID NO: 142790 - RNA, 22 nt, synthetic construct
  source 1..22: mol_type = other RNA
gtactggtaccaaagcagaaat

SEQ ID NO: 142791 - RNA, 22 nt, synthetic construct
  source 1..22: mol_type = other RNA
gtactgtgattacaattccttt

SEQ ID NO: 142792 - RNA, 22 nt, synthetic construct
  source 1..22: mol_type = other RNA
gtactgtgtggcttctcaaact

SEQ ID NO: 142793 - RNA, 22 nt, synthetic construct
  source 1..22: mol_type = other RNA
gtactgtttagcatctagcaca

SEQ ID NO: 142794 - RNA, 22 nt, synthetic construct
  source 1..22: mol_type = other RNA
gtacttcaaggttcacaaatta

SEQ ID NO: 142795 - RNA, 22 nt, synthetic construct
  source 1..22: mol_type = other RNA
gtacttcagcgcttgaacaaat

SEQ ID NO: 142796 - RNA, 22 nt, synthetic construct
  source 1..22: mol_type = other RNA
gtacttccctctttctcaactt

SEQ ID NO: 142797 - RNA, 22 nt, synthetic construct
  source 1..22: mol_type = other RNA
gtacttctaccttgaaaatgcc

SEQ ID NO: 142798 - RNA, 22 nt, synthetic construct
  source 1..22: mol_type = other RNA
gtacttctgagtgttacttgaa

SEQ ID NO: 142799 - RNA, 22 nt, synthetic construct
  source 1..22: mol_type = other RNA
gtacttgacacaaaggactgga

SEQ ID NO: 142800 - RNA, 22 nt, synthetic construct
  source 1..22: mol_type = other RNA
gtacttgtctttttgtgacttg

SEQ ID NO: 142801 - RNA, 22 nt, synthetic construct
  source 1..22: mol_type = other RNA
gtactttttcatccaaacagaa

SEQ ID NO: 142802 - RNA, 22 nt, synthetic construct
  source 1..22: mol_type = other RNA
gtagaaaatagggacggccttc

SEQ ID NO: 142803 - RNA, 22 nt, synthetic construct
  source 1..22: mol_type = other RNA
gtagaaacatcccaagtgccca

SEQ ID NO: 142804 - RNA, 22 nt, synthetic construct
  source 1..22: mol_type = other RNA
gtagaaagcaggttcattttaa

SEQ ID NO: 142805 - RNA, 22 nt, synthetic construct
  source 1..22: mol_type = other RNA
gtagaaatcttccagaaggaga

SEQ ID NO: 142806 - RNA, 22 nt, synthetic construct
  source 1..22: mol_type = other RNA
gtagaaatgtggagataaagag

SEQ ID NO: 142807 - RNA, 22 nt, synthetic construct
  source 1..22: mol_type = other RNA
gtagaagactcagcagttttaa

SEQ ID NO: 142808 - RNA, 22 nt, synthetic construct
  source 1..22: mol_type = other RNA
gtagaagagtaatggttggccg

SEQ ID NO: 142809 - RNA, 22 nt, synthetic construct
  source 1..22: mol_type = other RNA
gtagaagataatgttagaattc

SEQ ID NO: 142810 - RNA, 22 nt, synthetic construct
  source 1..22: mol_type = other RNA
gtagaagcagcaagggtggctg

SEQ ID NO: 142811 - RNA, 22 nt, synthetic construct
  source 1..22: mol_type = other RNA
gtagaaggatatgttttctaaa

SEQ ID NO: 142812 - RNA, 22 nt, synthetic construct
  source 1..22: mol_type = other RNA
gtagaaggccctatgccttcag

SEQ ID NO: 142813 - RNA, 22 nt, synthetic construct
  source 1..22: mol_type = other RNA
gtagaaggtcaatctaggaggt

SEQ ID NO: 142814 - RNA, 22 nt, synthetic construct
  source 1..22: mol_type = other RNA
gtagaagtacaaacattacaga

SEQ ID NO: 142815 - RNA, 22 nt, synthetic construct
  source 1..22: mol_type = other RNA
gtagaatatccaagcacaaacc

SEQ ID NO: 142816 - RNA, 22 nt, synthetic construct
  source 1..22: mol_type = other RNA
gtagaatgaaaatttttgtctg

SEQ ID NO: 142817 - RNA, 22 nt, synthetic construct
  source 1..22: mol_type = other RNA
gtagaatgtttttccgtctagc

SEQ ID NO: 142818 - RNA, 22 nt, synthetic construct
  source 1..22: mol_type = other RNA
gtagacatgagtaaaaagaaat

SEQ ID NO: 142819 - RNA, 22 nt, synthetic construct
  source 1..22: mol_type = other RNA
gtagaccatataatctaaccct

SEQ ID NO: 142820 - RNA, 22 nt, synthetic construct
  source 1..22: mol_type = other RNA
gtagaccctgttagtcccctag

SEQ ID NO: 142821 - RNA, 22 nt, synthetic construct
  source 1..22: mol_type = other RNA
gtagaccgaggaaacccgctct

SEQ ID NO: 142822 - RNA, 22 nt, synthetic construct
  source 1..22: mol_type = other RNA
gtagactgtaaaaattttctcc

SEQ ID NO: 142823 - RNA, 22 nt, synthetic construct
  source 1..22: mol_type = other RNA
gtagagaaaatgttatacagca

SEQ ID NO: 142824 - RNA, 22 nt, synthetic construct
  source 1..22: mol_type = other RNA
gtagagaaacaggattacaatg

SEQ ID NO: 142825 - RNA, 22 nt, synthetic construct
  source 1..22: mol_type = other RNA
gtagagaaggctttgtgttggt

SEQ ID NO: 142826 - RNA, 22 nt, synthetic construct
  source 1..22: mol_type = other RNA
gtagagacagaatcttactggt

SEQ ID NO: 142827 - RNA, 22 nt, synthetic construct
  source 1..22: mol_type = other RNA
gtagagactggatcctggaggg

SEQ ID NO: 142828 - RNA, 22 nt, synthetic construct
  source 1..22: mol_type = other RNA
gtagagatgaggttttacgatg

SEQ ID NO: 142829 - RNA, 22 nt, synthetic construct
  source 1..22: mol_type = other RNA
gtagagcaagcaacaccagata

SEQ ID NO: 142830 - RNA, 22 nt, synthetic construct
  source 1..22: mol_type = other RNA
gtagagcactttcgtatttttg

SEQ ID NO: 142831 - RNA, 22 nt, synthetic construct
  source 1..22: mol_type = other RNA
gtagaggactgcctattttgta

SEQ ID NO: 142832 - RNA, 22 nt, synthetic construct
  source 1..22: mol_type = other RNA
gtagaggaggagggttagatta

SEQ ID NO: 142833 - RNA, 22 nt, synthetic construct
  source 1..22: mol_type = other RNA
gtagaggattccaggtttacag

SEQ ID NO: 142834 - RNA, 22 nt, synthetic construct
  source 1..22: mol_type = other RNA
gtagaggcagttgagttttcaa

SEQ ID NO: 142835 - RNA, 22 nt, synthetic construct
  source 1..22: mol_type = other RNA
gtagaggccgagggttgaacat

SEQ ID NO: 142836 - RNA, 22 nt, synthetic construct
  source 1..22: mol_type = other RNA
gtagagggaatttgttttacca

SEQ ID NO: 142837 - RNA, 22 nt, synthetic construct
  source 1..22: mol_type = other RNA
gtagaggtgaagttaagggcca

SEQ ID NO: 142838 - RNA, 22 nt, synthetic construct
  source 1..22: mol_type = other RNA
gtagataaacgttaactatttc

SEQ ID NO: 142839 - RNA, 22 nt, synthetic construct
  source 1..22: mol_type = other RNA
gtagataccagaccctttatcg

SEQ ID NO: 142840 - RNA, 22 nt, synthetic construct
  source 1..22: mol_type = other RNA
gtagatatgggagtccctgctt

SEQ ID NO: 142841 - RNA, 22 nt, synthetic construct
  source 1..22: mol_type = other RNA
gtagatattttctgtcattctg

SEQ ID NO: 142842 - RNA, 22 nt, synthetic construct
  source 1..22: mol_type = other RNA
gtagatcaagtatttcctatga

SEQ ID NO: 142843 - RNA, 22 nt, synthetic construct
  source 1..22: mol_type = other RNA
gtagatcctgaggaagctaatc

SEQ ID NO: 142844 - RNA, 22 nt, synthetic construct
  source 1..22: mol_type = other RNA
gtagattagcttttacgaggac

SEQ ID NO: 142845 - RNA, 22 nt, synthetic construct
  source 1..22: mol_type = other RNA
gtagattcccccttatgtgtgt

SEQ ID NO: 142846 - RNA, 22 nt, synthetic construct
  source 1..22: mol_type = other RNA
gtagattgggcttttcatatac

SEQ ID NO: 142847 - RNA, 22 nt, synthetic construct
  source 1..22: mol_type = other RNA
gtagattgttttaggtagtctt

SEQ ID NO: 142848 - RNA, 22 nt, synthetic construct
  source 1..22: mol_type = other RNA
gtagatttctgcatagagatct

SEQ ID NO: 142849 - RNA, 22 nt, synthetic construct
  source 1..22: mol_type = other RNA
gtagcacaactagtaagtaaaa

SEQ ID NO: 142850 - RNA, 22 nt, synthetic construct
  source 1..22: mol_type = other RNA
gtagcaccctatttatgttgca

SEQ ID NO: 142851 - RNA, 22 nt, synthetic construct
  source 1..22: mol_type = other RNA
gtagcagaatccccaaataaca

SEQ ID NO: 142852 - RNA, 22 nt, synthetic construct
  source 1..22: mol_type = other RNA
gtagcagacactgggttctcac

SEQ ID NO: 142853 - RNA, 22 nt, synthetic construct
  source 1..22: mol_type = other RNA
gtagcagggaccacaggcatgc

SEQ ID NO: 142854 - RNA, 22 nt, synthetic construct
  source 1..22: mol_type = other RNA
gtagcagggactacagtcacac

SEQ ID NO: 142855 - RNA, 22 nt, synthetic construct
  source 1..22: mol_type = other RNA
gtagcaggtttaggaagcacat

SEQ ID NO: 142856 - RNA, 22 nt, synthetic construct
  source 1..22: mol_type = other RNA
gtagcattgaagtatagtttga

SEQ ID NO: 142857 - RNA, 22 nt, synthetic construct
  source 1..22: mol_type = other RNA
gtagccaaaggtagaaacatcc

SEQ ID NO: 142858 - RNA, 22 nt, synthetic construct
  source 1..22: mol_type = other RNA
gtagccacaagccacatgtggt

SEQ ID NO: 142859 - RNA, 22 nt, synthetic construct
  source 1..22: mol_type = other RNA
gtagcgctttaagcatcccata

SEQ ID NO: 142860 - RNA, 22 nt, synthetic construct
  source 1..22: mol_type = other RNA
gtagcgggaaaaaataatatga

SEQ ID NO: 142861 - RNA, 22 nt, synthetic construct
  source 1..22: mol_type = other RNA
gtagctaatatctttggggaga

SEQ ID NO: 142862 - RNA, 22 nt, synthetic construct
  source 1..22: mol_type = other RNA
gtagctaggaccataggcacgc

SEQ ID NO: 142863 - RNA, 22 nt, synthetic construct
  source 1..22: mol_type = other RNA
gtagctatatcccaaattggca

SEQ ID NO: 142864 - RNA, 22 nt, synthetic construct
  source 1..22: mol_type = other RNA
gtagctcaaagcatatgaatct

SEQ ID NO: 142865 - RNA, 22 nt, synthetic construct
  source 1..22: mol_type = other RNA
gtagctcatcatttatacccaa

SEQ ID NO: 142866 - RNA, 22 nt, synthetic construct
  source 1..22: mol_type = other RNA
gtagctgggatcacaggcgttg

SEQ ID NO: 142867 - RNA, 22 nt, synthetic construct
  source 1..22: mol_type = other RNA
gtagctgggatggctgaaagag

SEQ ID NO: 142868 - RNA, 22 nt, synthetic construct
  source 1..22: mol_type = other RNA
gtagctgggattacacacacct

SEQ ID NO: 142869 - RNA, 22 nt, synthetic construct
  source 1..22: mol_type = other RNA
gtagctgtcgctctcctgtgcc

SEQ ID NO: 142870 - RNA, 22 nt, synthetic construct
  source 1..22: mol_type = other RNA
gtagctgtctttaatgtaaaaa

SEQ ID NO: 142871 - RNA, 22 nt, synthetic construct
  source 1..22: mol_type = other RNA
gtagctgtgattaccggcatcc

SEQ ID NO: 142872 - RNA, 22 nt, synthetic construct
  source 1..22: mol_type = other RNA
gtagctgtggctcactcatttc

SEQ ID NO: 142873 - RNA, 22 nt, synthetic construct
  source 1..22: mol_type = other RNA
gtagctgttgaattgttgcgcg

SEQ ID NO: 142874 - RNA, 22 nt, synthetic construct
  source 1..22: mol_type = other RNA
gtagcttcaatgagggcagaga

SEQ ID NO: 142875 - RNA, 22 nt, synthetic construct
  source 1..22: mol_type = other RNA
gtagcttcacgtgcattcatac

SEQ ID NO: 142876 - RNA, 22 nt, synthetic construct
  source 1..22: mol_type = other RNA
gtagcttgggctaaggtggagt

SEQ ID NO: 142877 - RNA, 22 nt, synthetic construct
  source 1..22: mol_type = other RNA
gtagctttgatgcccccaccct

SEQ ID NO: 142878 - RNA, 22 nt, synthetic construct
  source 1..22: mol_type = other RNA
gtagcttttcctgctgtcgttt

SEQ ID NO: 142879 - RNA, 22 nt, synthetic construct
  source 1..22: mol_type = other RNA
gtaggaaaaccatgtcatgtat

SEQ ID NO: 142880 - RNA, 22 nt, synthetic construct
  source 1..22: mol_type = other RNA
gtaggaaaagacttctcaaaca

SEQ ID NO: 142881 - RNA, 22 nt, synthetic construct
  source 1..22: mol_type = other RNA
gtaggaaactttgcattcctga

SEQ ID NO: 142882 - RNA, 22 nt, synthetic construct
  source 1..22: mol_type = other RNA
gtaggaaagcctgtgacagtat

SEQ ID NO: 142883 - RNA, 22 nt, synthetic construct
  source 1..22: mol_type = other RNA
gtaggaagctgatcaaggaagc

SEQ ID NO: 142884 - RNA, 22 nt, synthetic construct
  source 1..22: mol_type = other RNA
gtaggaaggaacacacacctat

SEQ ID NO: 142885 - RNA, 22 nt, synthetic construct
  source 1..22: mol_type = other RNA
gtaggaaggcggtggggacagc

SEQ ID NO: 142886 - RNA, 22 nt, synthetic construct
  source 1..22: mol_type = other RNA
gtaggaattaaacatttctgaa

SEQ ID NO: 142887 - RNA, 22 nt, synthetic construct
  source 1..22: mol_type = other RNA
gtaggagggtgtgatcaggaaa

SEQ ID NO: 142888 - RNA, 22 nt, synthetic construct
  source 1..22: mol_type = other RNA
gtaggatgaattacaaatgaaa

SEQ ID NO: 142889 - RNA, 22 nt, synthetic construct
  source 1..22: mol_type = other RNA
gtaggcaacatccctatgcaat

SEQ ID NO: 142890 - RNA, 22 nt, synthetic construct
  source 1..22: mol_type = other RNA
gtaggcacattcaagcagaaat

SEQ ID NO: 142891 - RNA, 22 nt, synthetic construct
  source 1..22: mol_type = other RNA
gtaggccaaggcgggaggatca

SEQ ID NO: 142892 - RNA, 22 nt, synthetic construct
  source 1..22: mol_type = other RNA
gtaggccccgatgccatgtgtt

SEQ ID NO: 142893 - RNA, 22 nt, synthetic construct
  source 1..22: mol_type = other RNA
gtaggcttagataggatgggca

SEQ ID NO: 142894 - RNA, 22 nt, synthetic construct
  source 1..22: mol_type = other RNA
gtaggcttagatgagcccagga

SEQ ID NO: 142895 - RNA, 22 nt, synthetic construct
  source 1..22: mol_type = other RNA
gtagggaaggtgcccgcgaagg

SEQ ID NO: 142896 - RNA, 22 nt, synthetic construct
  source 1..22: mol_type = other RNA
gtagggaatagacaaagacaag

SEQ ID NO: 142897 - RNA, 22 nt, synthetic construct
  source 1..22: mol_type = other RNA
gtagggacggggttttgccatg

SEQ ID NO: 142898 - RNA, 22 nt, synthetic construct
  source 1..22: mol_type = other RNA
gtagggagggggctgaggattg

SEQ ID NO: 142899 - RNA, 22 nt, synthetic construct
  source 1..22: mol_type = other RNA
gtagggaggggtattcaggggg

SEQ ID NO: 142900 - RNA, 22 nt, synthetic construct
  source 1..22: mol_type = other RNA
gtagggataagaataccaaatt

SEQ ID NO: 142901 - RNA, 22 nt, synthetic construct
  source 1..22: mol_type = other RNA
gtagggcaccgtgacagaacaa

SEQ ID NO: 142902 - RNA, 22 nt, synthetic construct
  source 1..22: mol_type = other RNA
gtagggggaaaactccaagtgt

SEQ ID NO: 142903 - RNA, 22 nt, synthetic construct
  source 1..22: mol_type = other RNA
gtaggggtaaatctttgtacag

SEQ ID NO: 142904 - RNA, 22 nt, synthetic construct
  source 1..22: mol_type = other RNA
gtagggtgactagtgtgaatga

SEQ ID NO: 142905 - RNA, 22 nt, synthetic construct
  source 1..22: mol_type = other RNA
gtagggttggggtatgtttgat

SEQ ID NO: 142906 - RNA, 22 nt, synthetic construct
  source 1..22: mol_type = other RNA
gtagggtttggcagtttaagaa

SEQ ID NO: 142907 - RNA, 22 nt, synthetic construct
  source 1..22: mol_type = other RNA
gtaggtctccttgtatggagac

SEQ ID NO: 142908 - RNA, 22 nt, synthetic construct
  source 1..22: mol_type = other RNA
gtaggtgctttttgtatcctgt

SEQ ID NO: 142909 - RNA, 22 nt, synthetic construct
  source 1..22: mol_type = other RNA
gtaggtgtctcatttaataact

SEQ ID NO: 142910 - RNA, 22 nt, synthetic construct
  source 1..22: mol_type = other RNA
gtaggtgtctgatgtgtgtctc

SEQ ID NO: 142911 - RNA, 22 nt, synthetic construct
  source 1..22: mol_type = other RNA
gtaggtgtgtgtaatcccagct

SEQ ID NO: 142912 - RNA, 22 nt, synthetic construct
  source 1..22: mol_type = other RNA
gtaggttgagacttagatttat

SEQ ID NO: 142913 - RNA, 22 nt, synthetic construct
  source 1..22: mol_type = other RNA
gtagtaaaaccaaatgtggata

SEQ ID NO: 142914 - RNA, 22 nt, synthetic construct
  source 1..22: mol_type = other RNA
gtagtaaagcaaatgtgactag

SEQ ID NO: 142915 - RNA, 22 nt, synthetic construct
  source 1..22: mol_type = other RNA
gtagtaaatatttaacaccatg

SEQ ID NO: 142916 - RNA, 22 nt, synthetic construct
  source 1..22: mol_type = other RNA
gtagtaaggatcgttagtattt

SEQ ID NO: 142917 - RNA, 22 nt, synthetic construct
  source 1..22: mol_type = other RNA
gtagtaagttgtgtcatttttg

SEQ ID NO: 142918 - RNA, 22 nt, synthetic construct
  source 1..22: mol_type = other RNA
gtagtacaaaagtgctgttgag

SEQ ID NO: 142919 - RNA, 22 nt, synthetic construct
  source 1..22: mol_type = other RNA
gtagtacagtgagtagaagagt

SEQ ID NO: 142920 - RNA, 22 nt, synthetic construct
  source 1..22: mol_type = other RNA
gtagtacatattcattgtaaga

SEQ ID NO: 142921 - RNA, 22 nt, synthetic construct
  source 1..22: mol_type = other RNA
gtagtacttctgagtgttactt

SEQ ID NO: 142922 - RNA, 22 nt, synthetic construct
  source 1..22: mol_type = other RNA
gtagtatctcatgcttaggatc

SEQ ID NO: 142923 - RNA, 22 nt, synthetic construct
  source 1..22: mol_type = other RNA
gtagtattgaactgttacttga

SEQ ID NO: 142924 - RNA, 22 nt, synthetic construct
  source 1..22: mol_type = other RNA
gtagtcaacacttttccagtct

SEQ ID NO: 142925 - RNA, 22 nt, synthetic construct
  source 1..22: mol_type = other RNA
gtagtcaatgcaatgcgtgtga

SEQ ID NO: 142926 - RNA, 22 nt, synthetic construct
  source 1..22: mol_type = other RNA
gtagtcagacacactagctgac

SEQ ID NO: 142927 - RNA, 22 nt, synthetic construct
  source 1..22: mol_type = other RNA
gtagtcagtgaagatgctgaac

SEQ ID NO: 142928 - RNA, 22 nt, synthetic construct
  source 1..22: mol_type = other RNA
gtagtcttgtcataacagtatt

SEQ ID NO: 142929 - RNA, 22 nt, synthetic construct
  source 1..22: mol_type = other RNA
gtagtgagccaaaatcgtgcca

SEQ ID NO: 142930 - RNA, 22 nt, synthetic construct
  source 1..22: mol_type = other RNA
gtagtgattcacttttgagttc

SEQ ID NO: 142931 - RNA, 22 nt, synthetic construct
  source 1..22: mol_type = other RNA
gtagtggcagccccgcttcagt

SEQ ID NO: 142932 - RNA, 22 nt, synthetic construct
  source 1..22: mol_type = other RNA
gtagtggtgtgtgactgtagtc

SEQ ID NO: 142933 - RNA, 22 nt, synthetic construct
  source 1..22: mol_type = other RNA
gtagtgtcttaatcctattttg

SEQ ID NO: 142934 - RNA, 22 nt, synthetic construct
  source 1..22: mol_type = other RNA
gtagttacaactactcgggagg

SEQ ID NO: 142935 - RNA, 22 nt, synthetic construct
  source 1..22: mol_type = other RNA
gtagttacacaagtgtttcatt

SEQ ID NO: 142936 - RNA, 22 nt, synthetic construct
  source 1..22: mol_type = other RNA
gtagttaggtggtttgaacccc

SEQ ID NO: 142937 - RNA, 22 nt, synthetic construct
  source 1..22: mol_type = other RNA
gtagttattattgtcattacct

SEQ ID NO: 142938 - RNA, 22 nt, synthetic construct
  source 1..22: mol_type = other RNA
gtagttcagtttttctttcttt

SEQ ID NO: 142939 - RNA, 22 nt, synthetic construct
  source 1..22: mol_type = other RNA
gtagttcatcagcataaataaa

SEQ ID NO: 142940 - RNA, 22 nt, synthetic construct
  source 1..22: mol_type = other RNA
gtagttcatgttagcataattc

SEQ ID NO: 142941 - RNA, 22 nt, synthetic construct
  source 1..22: mol_type = other RNA
gtagttctggtgtcgtttattt

SEQ ID NO: 142942 - RNA, 22 nt, synthetic construct
  source 1..22: mol_type = other RNA
gtagttgctcagaaaattttct

SEQ ID NO: 142943 - RNA, 22 nt, synthetic construct
  source 1..22: mol_type = other RNA
gtagttgtaactacagacatgc

SEQ ID NO: 142944 - RNA, 22 nt, synthetic construct
  source 1..22: mol_type = other RNA
gtagtttccatggaggggccag

SEQ ID NO: 142945 - RNA, 22 nt, synthetic construct
  source 1..22: mol_type = other RNA
gtagtttgcacgtttttagaaa

SEQ ID NO: 142946 - RNA, 22 nt, synthetic construct
  source 1..22: mol_type = other RNA
gtagtttgctagtggtaactag

SEQ ID NO: 142947 - RNA, 22 nt, synthetic construct
  source 1..22: mol_type = other RNA
gtagttttccctgtgtatgtgt

SEQ ID NO: 142948 - RNA, 22 nt, synthetic construct
  source 1..22: mol_type = other RNA
gtagttttggtgtcatttttaa

SEQ ID NO: 142949 - RNA, 22 nt, synthetic construct
  source 1..22: mol_type = other RNA
gtagttttttggtagataccag

SEQ ID NO: 142950 - RNA, 22 nt, synthetic construct
  source 1..22: mol_type = other RNA
gtataaaggatgcacaagacag

SEQ ID NO: 142951 - RNA, 22 nt, synthetic construct
  source 1..22: mol_type = other RNA
gtataaagtttccgttttgcaa

SEQ ID NO: 142952 - RNA, 22 nt, synthetic construct
  source 1..22: mol_type = other RNA
gtataaataaaatgtctggccg

SEQ ID NO: 142953 - RNA, 22 nt, synthetic construct
  source 1..22: mol_type = other RNA
gtataaatgaggtatcatttcc

SEQ ID NO: 142954 - RNA, 22 nt, synthetic construct
  source 1..22: mol_type = other RNA
gtataaatgatgagctactgca

SEQ ID NO: 142955 - RNA, 22 nt, synthetic construct
  source 1..22: mol_type = other RNA
gtataaatgttcagtttatggg

SEQ ID NO: 142956 - RNA, 22 nt, synthetic construct
  source 1..22: mol_type = other RNA
gtataaattactgtctgtgaaa

SEQ ID NO: 142957 - RNA, 22 nt, synthetic construct
  source 1..22: mol_type = other RNA
gtataacattttctctacagtt

SEQ ID NO: 142958 - RNA, 22 nt, synthetic construct
  source 1..22: mol_type = other RNA
gtataacccgttttttccttca

SEQ ID NO: 142959 - RNA, 22 nt, synthetic construct
  source 1..22: mol_type = other RNA
gtataagagaaggaagcaccaa

SEQ ID NO: 142960 - RNA, 22 nt, synthetic construct
  source 1..22: mol_type = other RNA
gtatacagcaaaagaattaaac

SEQ ID NO: 142961 - RNA, 22 nt, synthetic construct
  source 1..22: mol_type = other RNA
gtatacatgtttagcaagatta

SEQ ID NO: 142962 - RNA, 22 nt, synthetic construct
  source 1..22: mol_type = other RNA
gtatacccaggtgtgagattga

SEQ ID NO: 142963 - RNA, 22 nt, synthetic construct
  source 1..22: mol_type = other RNA
gtatactgggtgtgatggcgca

SEQ ID NO: 142964 - RNA, 22 nt, synthetic construct
  source 1..22: mol_type = other RNA
gtatagaaaggagaccagttag

SEQ ID NO: 142965 - RNA, 22 nt, synthetic construct
  source 1..22: mol_type = other RNA
gtataggggaactcttgtagta

SEQ ID NO: 142966 - RNA, 22 nt, synthetic construct
  source 1..22: mol_type = other RNA
gtatatacccttctgttaatag

SEQ ID NO: 142967 - RNA, 22 nt, synthetic construct
  source 1..22: mol_type = other RNA
gtatatatcatagagtaccagg

SEQ ID NO: 142968 - RNA, 22 nt, synthetic construct
  source 1..22: mol_type = other RNA
gtatatatgctccctaaataca

SEQ ID NO: 142969 - RNA, 22 nt, synthetic construct
  source 1..22: mol_type = other RNA
gtatatattttctaagagccaa

SEQ ID NO: 142970 - RNA, 22 nt, synthetic construct
  source 1..22: mol_type = other RNA
gtatatctccttttaagagtga

SEQ ID NO: 142971 - RNA, 22 nt, synthetic construct
  source 1..22: mol_type = other RNA
gtatatgaaaagcccaatctac

SEQ ID NO: 142972 - RNA, 22 nt, synthetic construct
  source 1..22: mol_type = other RNA
gtatatgaaaagcttcccccct

SEQ ID NO: 142973 - RNA, 22 nt, synthetic construct
  source 1..22: mol_type = other RNA
gtatatgctgtttttgaaaaga

SEQ ID NO: 142974 - RNA, 22 nt, synthetic construct
  source 1..22: mol_type = other RNA
gtatatggtttaaggtaagggt

SEQ ID NO: 142975 - RNA, 22 nt, synthetic construct
  source 1..22: mol_type = other RNA
gtatattcatagtagctgttga

SEQ ID NO: 142976 - RNA, 22 nt, synthetic construct
  source 1..22: mol_type = other RNA
gtatattctgtgaattgtgaca

SEQ ID NO: 142977 - RNA, 22 nt, synthetic construct
  source 1..22: mol_type = other RNA
gtatatttactgcttgctgcac

SEQ ID NO: 142978 - RNA, 22 nt, synthetic construct
  source 1..22: mol_type = other RNA
gtatatttctgtaaacatgaac

SEQ ID NO: 142979 - RNA, 22 nt, synthetic construct
  source 1..22: mol_type = other RNA
gtatattttcaaggcttgtgca

SEQ ID NO: 142980 - RNA, 22 nt, synthetic construct
  source 1..22: mol_type = other RNA
gtatattttgaaaaaacttccc

SEQ ID NO: 142981 - RNA, 22 nt, synthetic construct
  source 1..22: mol_type = other RNA
gtatcaacctgcaggtatttct

SEQ ID NO: 142982 - RNA, 22 nt, synthetic construct
  source 1..22: mol_type = other RNA
gtatcacagtgaggacgctgat

SEQ ID NO: 142983 - RNA, 22 nt, synthetic construct
  source 1..22: mol_type = other RNA
gtatcaccatctgataagccca

SEQ ID NO: 142984 - RNA, 22 nt, synthetic construct
  source 1..22: mol_type = other RNA
gtatcactttttgtatttcctt

SEQ ID NO: 142985 - RNA, 22 nt, synthetic construct
  source 1..22: mol_type = other RNA
gtatcagatgcttctagccaaa

SEQ ID NO: 142986 - RNA, 22 nt, synthetic construct
  source 1..22: mol_type = other RNA
gtatcatcggaaatataaaaag

SEQ ID NO: 142987 - RNA, 22 nt, synthetic construct
  source 1..22: mol_type = other RNA
gtatcatttccaagattgaaaa

SEQ ID NO: 142988 - RNA, 22 nt, synthetic construct
  source 1..22: mol_type = other RNA
gtatccagtaatcttgctaaac

SEQ ID NO: 142989 - RNA, 22 nt, synthetic construct
  source 1..22: mol_type = other RNA
gtatccagtggttttttgtttt

SEQ ID NO: 142990 - RNA, 22 nt, synthetic construct
  source 1..22: mol_type = other RNA
gtatcccagatggggattgagg

SEQ ID NO: 142991 - RNA, 22 nt, synthetic construct
  source 1..22: mol_type = other RNA
gtatcctgagacttaggcaaag

SEQ ID NO: 142992 - RNA, 22 nt, synthetic construct
  source 1..22: mol_type = other RNA
gtatcctgtttgagaagtcttt

SEQ ID NO: 142993 - RNA, 22 nt, synthetic construct
  source 1..22: mol_type = other RNA
gtatcctttcaaggtatctccc

SEQ ID NO: 142994 - RNA, 22 nt, synthetic construct
  source 1..22: mol_type = other RNA
gtatcgtgagactattatgagc

SEQ ID NO: 142995 - RNA, 22 nt, synthetic construct
  source 1..22: mol_type = other RNA
gtatctaccaaaaaactacgag

SEQ ID NO: 142996 - RNA, 22 nt, synthetic construct
  source 1..22: mol_type = other RNA
gtatctaggagtacagtgcata

SEQ ID NO: 142997 - RNA, 22 nt, synthetic construct
  source 1..22: mol_type = other RNA
gtatctcagtcataatttgtgt

SEQ ID NO: 142998 - RNA, 22 nt, synthetic construct
  source 1..22: mol_type = other RNA
gtatctcatgcttaggatccca

SEQ ID NO: 142999 - RNA, 22 nt, synthetic construct
  source 1..22: mol_type = other RNA
gtatctccccaaagatattagc

SEQ ID NO: 143000 - RNA, 22 nt, synthetic construct
  source 1..22: mol_type = other RNA
gtatctccctgtgcgtgaatct

SEQ ID NO: 143001 - RNA, 22 nt, synthetic construct
  source 1..22: mol_type = other RNA
gtatctcctttccttccttgct

SEQ ID NO: 143002 - RNA, 22 nt, synthetic construct
  source 1..22: mol_type = other RNA
gtatctcggtcattctggagtg

SEQ ID NO: 143003 - RNA, 22 nt, synthetic construct
  source 1..22: mol_type = other RNA
gtatctgggaaaaaataagaaa

SEQ ID NO: 143004 - RNA, 22 nt, synthetic construct
  source 1..22: mol_type = other RNA
gtatctggtgctggcagccttc

SEQ ID NO: 143005 - RNA, 22 nt, synthetic construct
  source 1..22: mol_type = other RNA
gtatctggtgttgcttgctcta

SEQ ID NO: 143006 - RNA, 22 nt, synthetic construct
  source 1..22: mol_type = other RNA
gtatctgtgatccctgatatgt

SEQ ID NO: 143007 - RNA, 22 nt, synthetic construct
  source 1..22: mol_type = other RNA
gtatcttcacaaacaaatcctt

SEQ ID NO: 143008 - RNA, 22 nt, synthetic construct
  source 1..22: mol_type = other RNA
gtatcttgaagaaaccaagagc

SEQ ID NO: 143009 - RNA, 22 nt, synthetic construct
  source 1..22: mol_type = other RNA
gtatcttttaacagatggtcct

SEQ ID NO: 143010 - RNA, 22 nt, synthetic construct
  source 1..22: mol_type = other RNA
gtatcttttcagtccagatatt

SEQ ID NO: 143011 - RNA, 22 nt, synthetic construct
  source 1..22: mol_type = other RNA
gtatcttttcatgttgaccatt

SEQ ID NO: 143012 - RNA, 22 nt, synthetic construct
  source 1..22: mol_type = other RNA
gtatctttttcagcagcagaga

SEQ ID NO: 143013 - RNA, 22 nt, synthetic construct
  source 1..22: mol_type = other RNA
gtatgaacattttgagttattg

SEQ ID NO: 143014 - RNA, 22 nt, synthetic construct
  source 1..22: mol_type = other RNA
gtatgaatgcacgtgaagctac

SEQ ID NO: 143015 - RNA, 22 nt, synthetic construct
  source 1..22: mol_type = other RNA
gtatgacctcctcccacttaca

SEQ ID NO: 143016 - RNA, 22 nt, synthetic construct
  source 1..22: mol_type = other RNA
gtatgagaaatgtctggtttgc

SEQ ID NO: 143017 - RNA, 22 nt, synthetic construct
  source 1..22: mol_type = other RNA
gtatgagaagactggaaaagtg

SEQ ID NO: 143018 - RNA, 22 nt, synthetic construct
  source 1..22: mol_type = other RNA
gtatgagccactagtcagtata

SEQ ID NO: 143019 - RNA, 22 nt, synthetic construct
  source 1..22: mol_type = other RNA
gtatgagtcttccgtctcaaga

SEQ ID NO: 143020 - RNA, 22 nt, synthetic construct
  source 1..22: mol_type = other RNA
gtatgagtgtttcccttaaaag

SEQ ID NO: 143021 - RNA, 22 nt, synthetic construct
  source 1..22: mol_type = other RNA
gtatgatcaaagtgaaaggcaa

SEQ ID NO: 143022 - RNA, 22 nt, synthetic construct
  source 1..22: mol_type = other RNA
gtatgatcttattaatgtgttg

SEQ ID NO: 143023 - RNA, 22 nt, synthetic construct
  source 1..22: mol_type = other RNA
gtatgatgccactcaaaactga

SEQ ID NO: 143024 - RNA, 22 nt, synthetic construct
  source 1..22: mol_type = other RNA
gtatgatttctaggccctaacc

SEQ ID NO: 143025 - RNA, 22 nt, synthetic construct
  source 1..22: mol_type = other RNA
gtatgattttctaggaaacttt

SEQ ID NO: 143026 - RNA, 22 nt, synthetic construct
  source 1..22: mol_type = other RNA
gtatgcaacttactctcaaata

SEQ ID NO: 143027 - RNA, 22 nt, synthetic construct
  source 1..22: mol_type = other RNA
gtatgcacaaataattaacact

SEQ ID NO: 143028 - RNA, 22 nt, synthetic construct
  source 1..22: mol_type = other RNA
gtatgcactgtactcctagata

SEQ ID NO: 143029 - RNA, 22 nt, synthetic construct
  source 1..22: mol_type = other RNA
gtatgcagaaaccagttgtaat

SEQ ID NO: 143030 - RNA, 22 nt, synthetic construct
  source 1..22: mol_type = other RNA
gtatgcagggaaatcattcagg

SEQ ID NO: 143031 - RNA, 22 nt, synthetic construct
  source 1..22: mol_type = other RNA
gtatgcatagatcacaaggact

SEQ ID NO: 143032 - RNA, 22 nt, synthetic construct
  source 1..22: mol_type = other RNA
gtatgcatagcagggtcatgca

SEQ ID NO: 143033 - RNA, 22 nt, synthetic construct
  source 1..22: mol_type = other RNA
gtatgcatcttgaactaagtgt

SEQ ID NO: 143034 - RNA, 22 nt, synthetic construct
  source 1..22: mol_type = other RNA
gtatgccgctggtgaaaaaatg

SEQ ID NO: 143035 - RNA, 22 nt, synthetic construct
  source 1..22: mol_type = other RNA
gtatgcggggtttcagcacaat

SEQ ID NO: 143036 - RNA, 22 nt, synthetic construct
  source 1..22: mol_type = other RNA
gtatgctgtttacattagagaa

SEQ ID NO: 143037 - RNA, 22 nt, synthetic construct
  source 1..22: mol_type = other RNA
gtatggaagatgggacttcact

SEQ ID NO: 143038 - RNA, 22 nt, synthetic construct
  source 1..22: mol_type = other RNA
gtatggagacactagggactgg

SEQ ID NO: 143039 - RNA, 22 nt, synthetic construct
  source 1..22: mol_type = other RNA
gtatggagactagtacactgtt

SEQ ID NO: 143040 - RNA, 22 nt, synthetic construct
  source 1..22: mol_type = other RNA
gtatggcgactcatgcctgtaa

SEQ ID NO: 143041 - RNA, 22 nt, synthetic construct
  source 1..22: mol_type = other RNA
gtatgggagatgtgtaattgta

SEQ ID NO: 143042 - RNA, 22 nt, synthetic construct
  source 1..22: mol_type = other RNA
gtatgggtctccattttggtct

SEQ ID NO: 143043 - RNA, 22 nt, synthetic construct
  source 1..22: mol_type = other RNA
gtatggttcttaagatgatata

SEQ ID NO: 143044 - RNA, 22 nt, synthetic construct
  source 1..22: mol_type = other RNA
gtatggttgaagaaagtaggaa

SEQ ID NO: 143045 - RNA, 22 nt, synthetic construct
  source 1..22: mol_type = other RNA
gtatgtaattacaggggacttt

SEQ ID NO: 143046 - RNA, 22 nt, synthetic construct
  source 1..22: mol_type = other RNA
gtatgtacccaatggattataa

SEQ ID NO: 143047 - RNA, 22 nt, synthetic construct
  source 1..22: mol_type = other RNA
gtatgtaggaaactttgcattc

SEQ ID NO: 143048 - RNA, 22 nt, synthetic construct
  source 1..22: mol_type = other RNA
gtatgtcagactcattgcctat

SEQ ID NO: 143049 - RNA, 22 nt, synthetic construct
  source 1..22: mol_type = other RNA
gtatgtgccatctccttaatcc

SEQ ID NO: 143050 - RNA, 22 nt, synthetic construct
  source 1..22: mol_type = other RNA
gtatgtggctcacattgtattt

SEQ ID NO: 143051 - RNA, 22 nt, synthetic construct
  source 1..22: mol_type = other RNA
gtatgtgtagtcagtgaagatg

SEQ ID NO: 143052 - RNA, 22 nt, synthetic construct
  source 1..22: mol_type = other RNA
gtatgtgtctctgacatgagag

SEQ ID NO: 143053 - RNA, 22 nt, synthetic construct
  source 1..22: mol_type = other RNA
gtatgtgttaaaccattcttgc

SEQ ID NO: 143054 - RNA, 22 nt, synthetic construct
  source 1..22: mol_type = other RNA
gtatgttaataaccctgttttg

SEQ ID NO: 143055 - RNA, 22 nt, synthetic construct
  source 1..22: mol_type = other RNA
gtatgttacacttccagtacat

SEQ ID NO: 143056 - RNA, 22 nt, synthetic construct
  source 1..22: mol_type = other RNA
gtatgttgtgttttcattcgtt

SEQ ID NO: 143057 - RNA, 22 nt, synthetic construct
  source 1..22: mol_type = other RNA
gtatgtttctcattcttctcta

SEQ ID NO: 143058 - RNA, 22 nt, synthetic construct
  source 1..22: mol_type = other RNA
gtatgtttgattagttgactcc

SEQ ID NO: 143059 - RNA, 22 nt, synthetic construct
  source 1..22: mol_type = other RNA
gtattaaaagcacaagcacaga

SEQ ID NO: 143060 - RNA, 22 nt, synthetic construct
  source 1..22: mol_type = other RNA
gtattaaattttctaggaacca

SEQ ID NO: 143061 - RNA, 22 nt, synthetic construct
  source 1..22: mol_type = other RNA
gtattacacagaaagcctcttc

SEQ ID NO: 143062 - RNA, 22 nt, synthetic construct
  source 1..22: mol_type = other RNA
gtattaccagcttacagcagat

SEQ ID NO: 143063 - RNA, 22 nt, synthetic construct
  source 1..22: mol_type = other RNA
gtattacctatgaataggtgtg

SEQ ID NO: 143064 - RNA, 22 nt, synthetic construct
  source 1..22: mol_type = other RNA
gtattacctcccatgcattcgt

SEQ ID NO: 143065 - RNA, 22 nt, synthetic construct
  source 1..22: mol_type = other RNA
gtattaggatgtgtacccgtgt

SEQ ID NO: 143066 - RNA, 22 nt, synthetic construct
  source 1..22: mol_type = other RNA
gtattattctaaacacacgggc

SEQ ID NO: 143067 - RNA, 22 nt, synthetic construct
  source 1..22: mol_type = other RNA
gtattatttctgtcatctgaat

SEQ ID NO: 143068 - RNA, 22 nt, synthetic construct
  source 1..22: mol_type = other RNA
gtattattttcacagacagtaa

SEQ ID NO: 143069 - RNA, 22 nt, synthetic construct
  source 1..22: mol_type = other RNA
gtattcaagtttcaccctgcga

SEQ ID NO: 143070 - RNA, 22 nt, synthetic construct
  source 1..22: mol_type = other RNA
gtattcaggacagattaaaatc

SEQ ID NO: 143071 - RNA, 22 nt, synthetic construct
  source 1..22: mol_type = other RNA
gtattcagggggctaaatgctc

SEQ ID NO: 143072 - RNA, 22 nt, synthetic construct
  source 1..22: mol_type = other RNA
gtattcatccagtttaaagctt

SEQ ID NO: 143073 - RNA, 22 nt, synthetic construct
  source 1..22: mol_type = other RNA
gtattcatgctgtgaatttgga

SEQ ID NO: 143074 - RNA, 22 nt, synthetic construct
  source 1..22: mol_type = other RNA
gtattccatggtatgtgccatc

SEQ ID NO: 143075 - RNA, 22 nt, synthetic construct
  source 1..22: mol_type = other RNA
gtattcccaagatcataagctt

SEQ ID NO: 143076 - RNA, 22 nt, synthetic construct
  source 1..22: mol_type = other RNA
gtattctagttctagctctgtc

SEQ ID NO: 143077 - RNA, 22 nt, synthetic construct
  source 1..22: mol_type = other RNA
gtattctatcatcaagacagag

SEQ ID NO: 143078 - RNA, 22 nt, synthetic construct
  source 1..22: mol_type = other RNA
gtattctgaactttcaacctaa

SEQ ID NO: 143079 - RNA, 22 nt, synthetic construct
  source 1..22: mol_type = other RNA
gtattctgacctaaagttttaa

SEQ ID NO: 143080 - RNA, 22 nt, synthetic construct
  source 1..22: mol_type = other RNA
gtattcttatccctacctaaaa

SEQ ID NO: 143081 - RNA, 22 nt, synthetic construct
  source 1..22: mol_type = other RNA
gtattgaactgttacttgacta

SEQ ID NO: 143082 - RNA, 22 nt, synthetic construct
  source 1..22: mol_type = other RNA
gtattgagcctgttccgatttt

SEQ ID NO: 143083 - RNA, 22 nt, synthetic construct
  source 1..22: mol_type = other RNA
gtattgagtgtagctgtggctc

SEQ ID NO: 143084 - RNA, 22 nt, synthetic construct
  source 1..22: mol_type = other RNA
gtattgatttgaccatgggaca

SEQ ID NO: 143085 - RNA, 22 nt, synthetic construct
  source 1..22: mol_type = other RNA
gtattgcaaactaagtggtatt

SEQ ID NO: 143086 - RNA, 22 nt, synthetic construct
  source 1..22: mol_type = other RNA
gtattgcattgaatctgtagat

SEQ ID NO: 143087 - RNA, 22 nt, synthetic construct
  source 1..22: mol_type = other RNA
gtattgccaggtttgtgcttgg

SEQ ID NO: 143088 - RNA, 22 nt, synthetic construct
  source 1..22: mol_type = other RNA
gtattgtaccttgatttatggc

SEQ ID NO: 143089 - RNA, 22 nt, synthetic construct
  source 1..22: mol_type = other RNA
gtattgtaggaaagcctgtgac

SEQ ID NO: 143090 - RNA, 22 nt, synthetic construct
  source 1..22: mol_type = other RNA
gtattgtcttctaaccctcaaa

SEQ ID NO: 143091 - RNA, 22 nt, synthetic construct
  source 1..22: mol_type = other RNA
gtattgtgctgaaaccccgcat

SEQ ID NO: 143092 - RNA, 22 nt, synthetic construct
  source 1..22: mol_type = other RNA
gtattgttaactgtagagaaaa

SEQ ID NO: 143093 - RNA, 22 nt, synthetic construct
  source 1..22: mol_type = other RNA
gtatttaatctgtcagcagttc

SEQ ID NO: 143094 - RNA, 22 nt, synthetic construct
  source 1..22: mol_type = other RNA
gtatttagggagcatatatact

SEQ ID NO: 143095 - RNA, 22 nt, synthetic construct
  source 1..22: mol_type = other RNA
gtatttagtatattttcaaggc

SEQ ID NO: 143096 - RNA, 22 nt, synthetic construct
  source 1..22: mol_type = other RNA
gtatttatcatgtcttcttgga

SEQ ID NO: 143097 - RNA, 22 nt, synthetic construct
  source 1..22: mol_type = other RNA
gtatttccacgggtaaaaataa

SEQ ID NO: 143098 - RNA, 22 nt, synthetic construct
  source 1..22: mol_type = other RNA
gtatttcctatgaaaatttagc

SEQ ID NO: 143099 - RNA, 22 nt, synthetic construct
  source 1..22: mol_type = other RNA
gtatttccttatagtattacct

SEQ ID NO: 143100 - RNA, 22 nt, synthetic construct
  source 1..22: mol_type = other RNA
gtatttctaaatcaacagtgta

SEQ ID NO: 143101 - RNA, 22 nt, synthetic construct
  source 1..22: mol_type = other RNA
gtatttctcatctgtcactttc

SEQ ID NO: 143102 - RNA, 22 nt, synthetic construct
  source 1..22: mol_type = other RNA
gtatttctgctttggtaccagt

SEQ ID NO: 143103 - RNA, 22 nt, synthetic construct
  source 1..22: mol_type = other RNA
gtatttctgttagatggtgctg

SEQ ID NO: 143104 - RNA, 22 nt, synthetic construct
  source 1..22: mol_type = other RNA
gtatttggggctaggatttcag

SEQ ID NO: 143105 - RNA, 22 nt, synthetic construct
  source 1..22: mol_type = other RNA
gtattttaagattctctttagg

SEQ ID NO: 143106 - RNA, 22 nt, synthetic construct
  source 1..22: mol_type = other RNA
gtattttacaccatgcaggttc

SEQ ID NO: 143107 - RNA, 22 nt, synthetic construct
  source 1..22: mol_type = other RNA
gtattttcctaaccactgttat

SEQ ID NO: 143108 - RNA, 22 nt, synthetic construct
  source 1..22: mol_type = other RNA
gtattttgttgacatcctttgc

SEQ ID NO: 143109 - RNA, 22 nt, synthetic construct
  source 1..22: mol_type = other RNA
gtattttgttgttgttgtttct

SEQ ID NO: 143110 - RNA, 22 nt, synthetic construct
  source 1..22: mol_type = other RNA
gtatttttagtagagatgaggt

SEQ ID NO: 143111 - RNA, 22 nt, synthetic construct
  source 1..22: mol_type = other RNA
gtatttttcacaaacacacaaa

SEQ ID NO: 143112 - RNA, 22 nt, synthetic construct
  source 1..22: mol_type = other RNA
gtatttttgctcacacttacta

SEQ ID NO: 143113 - RNA, 22 nt, synthetic construct
  source 1..22: mol_type = other RNA
gtcaaaaagagaacacacaatt

SEQ ID NO: 143114 - RNA, 22 nt, synthetic construct
  source 1..22: mol_type = other RNA
gtcaaaaatgtgtctagtgaat

SEQ ID NO: 143115 - RNA, 22 nt, synthetic construct
  source 1..22: mol_type = other RNA
gtcaaaaccaaagaaaggggaa

SEQ ID NO: 143116 - RNA, 22 nt, synthetic construct
  source 1..22: mol_type = other RNA
gtcaaaagatgctggtggagta

SEQ ID NO: 143117 - RNA, 22 nt, synthetic construct
  source 1..22: mol_type = other RNA
gtcaaactcacttattagcaaa

SEQ ID NO: 143118 - RNA, 22 nt, synthetic construct
  source 1..22: mol_type = other RNA
gtcaaagcctgtggaggcagta

SEQ ID NO: 143119 - RNA, 22 nt, synthetic construct
  source 1..22: mol_type = other RNA
gtcaaatcaatacttcatttcc

SEQ ID NO: 143120 - RNA, 22 nt, synthetic construct
  source 1..22: mol_type = other RNA
gtcaaatggtaacagccaaata

SEQ ID NO: 143121 - RNA, 22 nt, synthetic construct
  source 1..22: mol_type = other RNA
gtcaaatttttcacattcttca

SEQ ID NO: 143122 - RNA, 22 nt, synthetic construct
  source 1..22: mol_type = other RNA
gtcaacaaaatactagcaaact

SEQ ID NO: 143123 - RNA, 22 nt, synthetic construct
  source 1..22: mol_type = other RNA
gtcaacaaactaactagaaaac

SEQ ID NO: 143124 - RNA, 22 nt, synthetic construct
  source 1..22: mol_type = other RNA
gtcaacacactagccactgggt

SEQ ID NO: 143125 - RNA, 22 nt, synthetic construct
  source 1..22: mol_type = other RNA
gtcaacacatcagcgctaagtg

SEQ ID NO: 143126 - RNA, 22 nt, synthetic construct
  source 1..22: mol_type = other RNA
gtcaacaccaagcaacactaaa

SEQ ID NO: 143127 - RNA, 22 nt, synthetic construct
  source 1..22: mol_type = other RNA
gtcaacacttttccagtcttct

SEQ ID NO: 143128 - RNA, 22 nt, synthetic construct
  source 1..22: mol_type = other RNA
gtcaacagggtaagattccgtc

SEQ ID NO: 143129 - RNA, 22 nt, synthetic construct
  source 1..22: mol_type = other RNA
gtcaacatgaaaagatactcaa

SEQ ID NO: 143130 - RNA, 22 nt, synthetic construct
  source 1..22: mol_type = other RNA
gtcaacattaagggaaacaggg

SEQ ID NO: 143131 - RNA, 22 nt, synthetic construct
  source 1..22: mol_type = other RNA
gtcaaccactaaggtcaacaca

SEQ ID NO: 143132 - RNA, 22 nt, synthetic construct
  source 1..22: mol_type = other RNA
gtcaacgcacccagagcgggtt

SEQ ID NO: 143133 - RNA, 22 nt, synthetic construct
  source 1..22: mol_type = other RNA
gtcaactaatcaaacatacccc

SEQ ID NO: 143134 - RNA, 22 nt, synthetic construct
  source 1..22: mol_type = other RNA
gtcaactgaggcagagtagaga

SEQ ID NO: 143135 - RNA, 22 nt, synthetic construct
  source 1..22: mol_type = other RNA
gtcaacttttagtaggtctcct

SEQ ID NO: 143136 - RNA, 22 nt, synthetic construct
  source 1..22: mol_type = other RNA
gtcaagaaataaaacatggcca

SEQ ID NO: 143137 - RNA, 22 nt, synthetic construct
  source 1..22: mol_type = other RNA
gtcaagaatgaagtcagagatt

SEQ ID NO: 143138 - RNA, 22 nt, synthetic construct
  source 1..22: mol_type = other RNA
gtcaagagagattaaataactt

SEQ ID NO: 143139 - RNA, 22 nt, synthetic construct
  source 1..22: mol_type = other RNA
gtcaagagcggcctttgcctct

SEQ ID NO: 143140 - RNA, 22 nt, synthetic construct
  source 1..22: mol_type = other RNA
gtcaagatgaatctgcaactat

SEQ ID NO: 143141 - RNA, 22 nt, synthetic construct
  source 1..22: mol_type = other RNA
gtcaagctatcagaattttatt

SEQ ID NO: 143142 - RNA, 22 nt, synthetic construct
  source 1..22: mol_type = other RNA
gtcaagctgtttgagctgaaag

SEQ ID NO: 143143 - RNA, 22 nt, synthetic construct
  source 1..22: mol_type = other RNA
gtcaaggggagaggcctcatgt

SEQ ID NO: 143144 - RNA, 22 nt, synthetic construct
  source 1..22: mol_type = other RNA
gtcaaggtcatcctttcccttc

SEQ ID NO: 143145 - RNA, 22 nt, synthetic construct
  source 1..22: mol_type = other RNA
gtcaagtaacagttcaatacta

SEQ ID NO: 143146 - RNA, 22 nt, synthetic construct
  source 1..22: mol_type = other RNA
gtcaagtacaactaataattgc

SEQ ID NO: 143147 - RNA, 22 nt, synthetic construct
  source 1..22: mol_type = other RNA
gtcaagtgactccaagcacaca

SEQ ID NO: 143148 - RNA, 22 nt, synthetic construct
  source 1..22: mol_type = other RNA
gtcaagttctgatttcaaagtt

SEQ ID NO: 143149 - RNA, 22 nt, synthetic construct
  source 1..22: mol_type = other RNA
gtcaataatttggatgaacgct

SEQ ID NO: 143150 - RNA, 22 nt, synthetic construct
  source 1..22: mol_type = other RNA
gtcaatctaggaggtctaagag

SEQ ID NO: 143151 - RNA, 22 nt, synthetic construct
  source 1..22: mol_type = other RNA
gtcaatgcaatgcgtgtgaaac

SEQ ID NO: 143152 - RNA, 22 nt, synthetic construct
  source 1..22: mol_type = other RNA
gtcaatggggaactttattttt

SEQ ID NO: 143153 - RNA, 22 nt, synthetic construct
  source 1..22: mol_type = other RNA
gtcaattctagttaataaaggt

SEQ ID NO: 143154 - RNA, 22 nt, synthetic construct
  source 1..22: mol_type = other RNA
gtcaattgatctgccaggacaa

SEQ ID NO: 143155 - RNA, 22 nt, synthetic construct
  source 1..22: mol_type = other RNA
gtcaatttcagatctctgacat

SEQ ID NO: 143156 - RNA, 22 nt, synthetic construct
  source 1..22: mol_type = other RNA
gtcaatttcatcgtaaaaagcc

SEQ ID NO: 143157 - RNA, 22 nt, synthetic construct
  source 1..22: mol_type = other RNA
gtcaattttcccccaattaaac

SEQ ID NO: 143158 - RNA, 22 nt, synthetic construct
  source 1..22: mol_type = other RNA
gtcacaaaaagacaagtactgc

SEQ ID NO: 143159 - RNA, 22 nt, synthetic construct
  source 1..22: mol_type = other RNA
gtcacaaaatgtggatgcatga

SEQ ID NO: 143160 - RNA, 22 nt, synthetic construct
  source 1..22: mol_type = other RNA
gtcacaaacacaaaacaaatgg

SEQ ID NO: 143161 - RNA, 22 nt, synthetic construct
  source 1..22: mol_type = other RNA
gtcacaaagctttaaactggat

SEQ ID NO: 143162 - RNA, 22 nt, synthetic construct
  source 1..22: mol_type = other RNA
gtcacaagccagggtctgtctc

SEQ ID NO: 143163 - RNA, 22 nt, synthetic construct
  source 1..22: mol_type = other RNA
gtcacaattcacagaatatact

SEQ ID NO: 143164 - RNA, 22 nt, synthetic construct
  source 1..22: mol_type = other RNA
gtcacacaccactacacccggc

SEQ ID NO: 143165 - RNA, 22 nt, synthetic construct
  source 1..22: mol_type = other RNA
gtcacacggaaaacattatttt

SEQ ID NO: 143166 - RNA, 22 nt, synthetic construct
  source 1..22: mol_type = other RNA
gtcacactttttgtgagtttta

SEQ ID NO: 143167 - RNA, 22 nt, synthetic construct
  source 1..22: mol_type = other RNA
gtcacaggctttcctacaatac

SEQ ID NO: 143168 - RNA, 22 nt, synthetic construct
  source 1..22: mol_type = other RNA
gtcacagtgaattctgacttag

SEQ ID NO: 143169 - RNA, 22 nt, synthetic construct
  source 1..22: mol_type = other RNA
gtcacatagaagcgctcttcaa

SEQ ID NO: 143170 - RNA, 22 nt, synthetic construct
  source 1..22: mol_type = other RNA
gtcacatagacctgaatgactg

SEQ ID NO: 143171 - RNA, 22 nt, synthetic construct
  source 1..22: mol_type = other RNA
gtcacattcagaggtatttggg

SEQ ID NO: 143172 - RNA, 22 nt, synthetic construct
  source 1..22: mol_type = other RNA
gtcacattctagtgatgggaga

SEQ ID NO: 143173 - RNA, 22 nt, synthetic construct
  source 1..22: mol_type = other RNA
gtcacattctgcctgcagactg

SEQ ID NO: 143174 - RNA, 22 nt, synthetic construct
  source 1..22: mol_type = other RNA
gtcacatttgaaagaaagaagg

SEQ ID NO: 143175 - RNA, 22 nt, synthetic construct
  source 1..22: mol_type = other RNA
gtcacatttgctttactactgc

SEQ ID NO: 143176 - RNA, 22 nt, synthetic construct
  source 1..22: mol_type = other RNA
gtcacattttcttatctaggcg

SEQ ID NO: 143177 - RNA, 22 nt, synthetic construct
  source 1..22: mol_type = other RNA
gtcaccaaacgtttagatgaat

SEQ ID NO: 143178 - RNA, 22 nt, synthetic construct
  source 1..22: mol_type = other RNA
gtcaccaggctggaatgcagcg

SEQ ID NO: 143179 - RNA, 22 nt, synthetic construct
  source 1..22: mol_type = other RNA
gtcacccaagccacagcgtgga

SEQ ID NO: 143180 - RNA, 22 nt, synthetic construct
  source 1..22: mol_type = other RNA
gtcacccacgtggagtgcaatg

SEQ ID NO: 143181 - RNA, 22 nt, synthetic construct
  source 1..22: mol_type = other RNA
gtcaccctacagactcaataac

SEQ ID NO: 143182 - RNA, 22 nt, synthetic construct
  source 1..22: mol_type = other RNA
gtcacccttgtaatcaagtatc

SEQ ID NO: 143183 - RNA, 22 nt, synthetic construct
  source 1..22: mol_type = other RNA
gtcaccgcaacctccgcctccc

SEQ ID NO: 143184 - RNA, 22 nt, synthetic construct
  source 1..22: mol_type = other RNA
gtcacctagcctctctgggctt

SEQ ID NO: 143185 - RNA, 22 nt, synthetic construct
  source 1..22: mol_type = other RNA
gtcacggtgccctacatatggc

SEQ ID NO: 143186 - RNA, 22 nt, synthetic construct
  source 1..22: mol_type = other RNA
gtcactaaaaatcagattaagc

SEQ ID NO: 143187 - RNA, 22 nt, synthetic construct
  source 1..22: mol_type = other RNA
gtcactattaaccatatggttt

SEQ ID NO: 143188 - RNA, 22 nt, synthetic construct
  source 1..22: mol_type = other RNA
gtcactccatttgtggcatctt

SEQ ID NO: 143189 - RNA, 22 nt, synthetic construct
  source 1..22: mol_type = other RNA
gtcactctctttaggaagcttc

SEQ ID NO: 143190 - RNA, 22 nt, synthetic construct
  source 1..22: mol_type = other RNA
gtcactgacacaggctgaaggg

SEQ ID NO: 143191 - RNA, 22 nt, synthetic construct
  source 1..22: mol_type = other RNA
gtcactgcagtctcaaactcct

SEQ ID NO: 143192 - RNA, 22 nt, synthetic construct
  source 1..22: mol_type = other RNA
gtcactgctgatgtaagtggga

SEQ ID NO: 143193 - RNA, 22 nt, synthetic construct
  source 1..22: mol_type = other RNA
gtcactggatagaagtgtatca

SEQ ID NO: 143194 - RNA, 22 nt, synthetic construct
  source 1..22: mol_type = other RNA
gtcactggccactgattgagta

SEQ ID NO: 143195 - RNA, 22 nt, synthetic construct
  source 1..22: mol_type = other RNA
gtcactgtaagaataatgtctt

SEQ ID NO: 143196 - RNA, 22 nt, synthetic construct
  source 1..22: mol_type = other RNA
gtcactgtggaaaacagtttgg

SEQ ID NO: 143197 - RNA, 22 nt, synthetic construct
  source 1..22: mol_type = other RNA
gtcactgtttggacagtaaaaa

SEQ ID NO: 143198 - RNA, 22 nt, synthetic construct
  source 1..22: mol_type = other RNA
gtcacttcctctcttaaatccg

SEQ ID NO: 143199 - RNA, 22 nt, synthetic construct
  source 1..22: mol_type = other RNA
gtcactttcctattcacactgc

SEQ ID NO: 143200 - RNA, 22 nt, synthetic construct
  source 1..22: mol_type = other RNA
gtcactttttattctgttctag

SEQ ID NO: 143201 - RNA, 22 nt, synthetic construct
  source 1..22: mol_type = other RNA
gtcagaaaagatcagtaaaatt

SEQ ID NO: 143202 - RNA, 22 nt, synthetic construct
  source 1..22: mol_type = other RNA
gtcagaaacaccaacacaaagc

SEQ ID NO: 143203 - RNA, 22 nt, synthetic construct
  source 1..22: mol_type = other RNA
gtcagaaaccatcgttcacact

SEQ ID NO: 143204 - RNA, 22 nt, synthetic construct
  source 1..22: mol_type = other RNA
gtcagaagtttggaaccagcct

SEQ ID NO: 143205 - RNA, 22 nt, synthetic construct
  source 1..22: mol_type = other RNA
gtcagaatacaaaaatgacaca

SEQ ID NO: 143206 - RNA, 22 nt, synthetic construct
  source 1..22: mol_type = other RNA
gtcagaatcgtgatagtcttcc

SEQ ID NO: 143207 - RNA, 22 nt, synthetic construct
  source 1..22: mol_type = other RNA
gtcagaattagaaagctggact

SEQ ID NO: 143208 - RNA, 22 nt, synthetic construct
  source 1..22: mol_type = other RNA
gtcagaattcactgtgactcca

SEQ ID NO: 143209 - RNA, 22 nt, synthetic construct
  source 1..22: mol_type = other RNA
gtcagaattccatcagtggttg

SEQ ID NO: 143210 - RNA, 22 nt, synthetic construct
  source 1..22: mol_type = other RNA
gtcagacacactagctgaccca

SEQ ID NO: 143211 - RNA, 22 nt, synthetic construct
  source 1..22: mol_type = other RNA
gtcagactaagacactagctat

SEQ ID NO: 143212 - RNA, 22 nt, synthetic construct
  source 1..22: mol_type = other RNA
gtcagactcattgcctatagac

SEQ ID NO: 143213 - RNA, 22 nt, synthetic construct
  source 1..22: mol_type = other RNA
gtcagagacacatactgaaaga

SEQ ID NO: 143214 - RNA, 22 nt, synthetic construct
  source 1..22: mol_type = other RNA
gtcagagatctgaaattgactt

SEQ ID NO: 143215 - RNA, 22 nt, synthetic construct
  source 1..22: mol_type = other RNA
gtcagagattttcccaaagata

SEQ ID NO: 143216 - RNA, 22 nt, synthetic construct
  source 1..22: mol_type = other RNA
gtcagagcagcactgatgtgta

SEQ ID NO: 143217 - RNA, 22 nt, synthetic construct
  source 1..22: mol_type = other RNA
gtcagaggagcagttactcctg

SEQ ID NO: 143218 - RNA, 22 nt, synthetic construct
  source 1..22: mol_type = other RNA
gtcagagttgtatctgtgatcc

SEQ ID NO: 143219 - RNA, 22 nt, synthetic construct
  source 1..22: mol_type = other RNA
gtcagatggtaaattggtcctg

SEQ ID NO: 143220 - RNA, 22 nt, synthetic construct
  source 1..22: mol_type = other RNA
gtcagattttcttgttataagc

SEQ ID NO: 143221 - RNA, 22 nt, synthetic construct
  source 1..22: mol_type = other RNA
gtcagcaactcttggccatttt

SEQ ID NO: 143222 - RNA, 22 nt, synthetic construct
  source 1..22: mol_type = other RNA
gtcagcacactcttaataactg

SEQ ID NO: 143223 - RNA, 22 nt, synthetic construct
  source 1..22: mol_type = other RNA
gtcagcacttctgatatcctgt

SEQ ID NO: 143224 - RNA, 22 nt, synthetic construct
  source 1..22: mol_type = other RNA
gtcagcagttcagcctgcagaa

SEQ ID NO: 143225 - RNA, 22 nt, synthetic construct
  source 1..22: mol_type = other RNA
gtcagccacaagacataagcat

SEQ ID NO: 143226 - RNA, 22 nt, synthetic construct
  source 1..22: mol_type = other RNA
gtcagccagaggaagcttataa

SEQ ID NO: 143227 - RNA, 22 nt, synthetic construct
  source 1..22: mol_type = other RNA
gtcagcctgggcacacgccact

SEQ ID NO: 143228 - RNA, 22 nt, synthetic construct
  source 1..22: mol_type = other RNA
gtcagctaattttctaatcttc

SEQ ID NO: 143229 - RNA, 22 nt, synthetic construct
  source 1..22: mol_type = other RNA
gtcagctaggcgtagtatctca

SEQ ID NO: 143230 - RNA, 22 nt, synthetic construct
  source 1..22: mol_type = other RNA
gtcagctagtgtgtctgactac

SEQ ID NO: 143231 - RNA, 22 nt, synthetic construct
  source 1..22: mol_type = other RNA
gtcaggaaggcaggaggcctca

SEQ ID NO: 143232 - RNA, 22 nt, synthetic construct
  source 1..22: mol_type = other RNA
gtcaggcaagggactgtcgaag

SEQ ID NO: 143233 - RNA, 22 nt, synthetic construct
  source 1..22: mol_type = other RNA
gtcaggcatgctaactgcagag

SEQ ID NO: 143234 - RNA, 22 nt, synthetic construct
  source 1..22: mol_type = other RNA
gtcaggtgggcactgggagccc

SEQ ID NO: 143235 - RNA, 22 nt, synthetic construct
  source 1..22: mol_type = other RNA
gtcagtaaaaaaggaccatctg

SEQ ID NO: 143236 - RNA, 22 nt, synthetic construct
  source 1..22: mol_type = other RNA
gtcagtaatcaaaaacctccca

SEQ ID NO: 143237 - RNA, 22 nt, synthetic construct
  source 1..22: mol_type = other RNA
gtcagtaattctgcagtgaaca

SEQ ID NO: 143238 - RNA, 22 nt, synthetic construct
  source 1..22: mol_type = other RNA
gtcagtactatcttccctaaag

SEQ ID NO: 143239 - RNA, 22 nt, synthetic construct
  source 1..22: mol_type = other RNA
gtcagtagaggccgagggttga

SEQ ID NO: 143240 - RNA, 22 nt, synthetic construct
  source 1..22: mol_type = other RNA
gtcagtagtacagtgagtagaa

SEQ ID NO: 143241 - RNA, 22 nt, synthetic construct
  source 1..22: mol_type = other RNA
gtcagtatatttactgcttgct

SEQ ID NO: 143242 - RNA, 22 nt, synthetic construct
  source 1..22: mol_type = other RNA
gtcagtcaacacactagccact

SEQ ID NO: 143243 - RNA, 22 nt, synthetic construct
  source 1..22: mol_type = other RNA
gtcagtgaagatgctgaacttg

SEQ ID NO: 143244 - RNA, 22 nt, synthetic construct
  source 1..22: mol_type = other RNA
gtcagtgacagttctgtgaatt

SEQ ID NO: 143245 - RNA, 22 nt, synthetic construct
  source 1..22: mol_type = other RNA
gtcagtgatggaggtggaactc

SEQ ID NO: 143246 - RNA, 22 nt, synthetic construct
  source 1..22: mol_type = other RNA
gtcagtgggactggagaacagt

SEQ ID NO: 143247 - RNA, 22 nt, synthetic construct
  source 1..22: mol_type = other RNA
gtcagtgtggttcatatttccc

SEQ ID NO: 143248 - RNA, 22 nt, synthetic construct
  source 1..22: mol_type = other RNA
gtcagttaacagtgctgtgcca

SEQ ID NO: 143249 - RNA, 22 nt, synthetic construct
  source 1..22: mol_type = other RNA
gtcagttacagcatttcagcca

SEQ ID NO: 143250 - RNA, 22 nt, synthetic construct
  source 1..22: mol_type = other RNA
gtcagttctctgccccgggcct

SEQ ID NO: 143251 - RNA, 22 nt, synthetic construct
  source 1..22: mol_type = other RNA
gtcagttgtttacttgggtata

SEQ ID NO: 143252 - RNA, 22 nt, synthetic construct
  source 1..22: mol_type = other RNA
gtcagtttctgatttatctttc

SEQ ID NO: 143253 - RNA, 22 nt, synthetic construct
  source 1..22: mol_type = other RNA
gtcataaacataactttgaaga

SEQ ID NO: 143254 - RNA, 22 nt, synthetic construct
  source 1..22: mol_type = other RNA
gtcataacagtattgtcttcta

SEQ ID NO: 143255 - RNA, 22 nt, synthetic construct
  source 1..22: mol_type = other RNA
gtcataatttgtgtcctttttt

SEQ ID NO: 143256 - RNA, 22 nt, synthetic construct
  source 1..22: mol_type = other RNA
gtcatagcagtgggaagtggag

SEQ ID NO: 143257 - RNA, 22 nt, synthetic construct
  source 1..22: mol_type = other RNA
gtcatattggattaagggccca

SEQ ID NO: 143258 - RNA, 22 nt, synthetic construct
  source 1..22: mol_type = other RNA
gtcatcaaaggaaggaatttta

SEQ ID NO: 143259 - RNA, 22 nt, synthetic construct
  source 1..22: mol_type = other RNA
gtcatcacagtccaggaactta

SEQ ID NO: 143260 - RNA, 22 nt, synthetic construct
  source 1..22: mol_type = other RNA
gtcatcagcgtcctcactgtga

SEQ ID NO: 143261 - RNA, 22 nt, synthetic construct
  source 1..22: mol_type = other RNA
gtcatcattattagcaaacatt

SEQ ID NO: 143262 - RNA, 22 nt, synthetic construct
  source 1..22: mol_type = other RNA
gtcatccactgcacagtatgcg

SEQ ID NO: 143263 - RNA, 22 nt, synthetic construct
  source 1..22: mol_type = other RNA
gtcatcctcaacaagagaggac

SEQ ID NO: 143264 - RNA, 22 nt, synthetic construct
  source 1..22: mol_type = other RNA
gtcatcctttcccttctgctcg

SEQ ID NO: 143265 - RNA, 22 nt, synthetic construct
  source 1..22: mol_type = other RNA
gtcatctataaggtaatgacaa

SEQ ID NO: 143266 - RNA, 22 nt, synthetic construct
  source 1..22: mol_type = other RNA
gtcatctgaatcaataagaatg

SEQ ID NO: 143267 - RNA, 22 nt, synthetic construct
  source 1..22: mol_type = other RNA
gtcatctggtcctgagctttcc

SEQ ID NO: 143268 - RNA, 22 nt, synthetic construct
  source 1..22: mol_type = other RNA
gtcatcttctctctctgcttca

SEQ ID NO: 143269 - RNA, 22 nt, synthetic construct
  source 1..22: mol_type = other RNA
gtcatgaatgaatgttgagttt

SEQ ID NO: 143270 - RNA, 22 nt, synthetic construct
  source 1..22: mol_type = other RNA
gtcatgacctgctttcttgggg

SEQ ID NO: 143271 - RNA, 22 nt, synthetic construct
  source 1..22: mol_type = other RNA
gtcatgacttttttgcccactc

SEQ ID NO: 143272 - RNA, 22 nt, synthetic construct
  source 1..22: mol_type = other RNA
gtcatgcacacgctggaaggga

SEQ ID NO: 143273 - RNA, 22 nt, synthetic construct
  source 1..22: mol_type = other RNA
gtcatgggccgggcgtagtggc

SEQ ID NO: 143274 - RNA, 22 nt, synthetic construct
  source 1..22: mol_type = other RNA
gtcatggtgtgtctgcgcctta

SEQ ID NO: 143275 - RNA, 22 nt, synthetic construct
  source 1..22: mol_type = other RNA
gtcatgtatatgctgtttttga

SEQ ID NO: 143276 - RNA, 22 nt, synthetic construct
  source 1..22: mol_type = other RNA
gtcatgtcaaatttttcacatt

SEQ ID NO: 143277 - RNA, 22 nt, synthetic construct
  source 1..22: mol_type = other RNA
gtcatgtggggactttgtggcc

SEQ ID NO: 143278 - RNA, 22 nt, synthetic construct
  source 1..22: mol_type = other RNA
gtcatgttcccggattggaaaa

SEQ ID NO: 143279 - RNA, 22 nt, synthetic construct
  source 1..22: mol_type = other RNA
gtcatgtttgaattttccattc

SEQ ID NO: 143280 - RNA, 22 nt, synthetic construct
  source 1..22: mol_type = other RNA
gtcattacatattttgtaacgt

SEQ ID NO: 143281 - RNA, 22 nt, synthetic construct
  source 1..22: mol_type = other RNA
gtcattaccttatagatgacga

SEQ ID NO: 143282 - RNA, 22 nt, synthetic construct
  source 1..22: mol_type = other RNA
gtcattcaggtctatgtgacag

SEQ ID NO: 143283 - RNA, 22 nt, synthetic construct
  source 1..22: mol_type = other RNA
gtcattccgctaaacattttat

SEQ ID NO: 143284 - RNA, 22 nt, synthetic construct
  source 1..22: mol_type = other RNA
gtcattctgcagtttgtgtttt

SEQ ID NO: 143285 - RNA, 22 nt, synthetic construct
  source 1..22: mol_type = other RNA
gtcattctggagtgttttcttc

SEQ ID NO: 143286 - RNA, 22 nt, synthetic construct
  source 1..22: mol_type = other RNA
gtcattgaaactcaatgttggt

SEQ ID NO: 143287 - RNA, 22 nt, synthetic construct
  source 1..22: mol_type = other RNA
gtcatttctgcttagtcttctc

SEQ ID NO: 143288 - RNA, 22 nt, synthetic construct
  source 1..22: mol_type = other RNA
gtcatttgagcccaggaggttg

SEQ ID NO: 143289 - RNA, 22 nt, synthetic construct
  source 1..22: mol_type = other RNA
gtcatttgatcttttttatgct

SEQ ID NO: 143290 - RNA, 22 nt, synthetic construct
  source 1..22: mol_type = other RNA
gtcatttttaagaaatcgttgt

SEQ ID NO: 143291 - RNA, 22 nt, synthetic construct
  source 1..22: mol_type = other RNA
gtcatttttcacttcttattgg

SEQ ID NO: 143292 - RNA, 22 nt, synthetic construct
  source 1..22: mol_type = other RNA
gtcatttttgtattctgaccta

SEQ ID NO: 143293 - RNA, 22 nt, synthetic construct
  source 1..22: mol_type = other RNA
gtccaaacagtgaccacagttt

SEQ ID NO: 143294 - RNA, 22 nt, synthetic construct
  source 1..22: mol_type = other RNA
gtccaacaagggttggtgcttc

SEQ ID NO: 143295 - RNA, 22 nt, synthetic construct
  source 1..22: mol_type = other RNA
gtccaacatggcaaaaccccgt

SEQ ID NO: 143296 - RNA, 22 nt, synthetic construct
  source 1..22: mol_type = other RNA
gtccaaccaatcgcagggccat

SEQ ID NO: 143297 - RNA, 22 nt, synthetic construct
  source 1..22: mol_type = other RNA
gtccaagacaggaagaattatt

SEQ ID NO: 143298 - RNA, 22 nt, synthetic construct
  source 1..22: mol_type = other RNA
gtccaagtatttctcatctgtc

SEQ ID NO: 143299 - RNA, 22 nt, synthetic construct
  source 1..22: mol_type = other RNA
gtccaatttctttggctgttag

SEQ ID NO: 143300 - RNA, 22 nt, synthetic construct
  source 1..22: mol_type = other RNA
gtccacacaatggtcagagttg

SEQ ID NO: 143301 - RNA, 22 nt, synthetic construct
  source 1..22: mol_type = other RNA
gtccacagaggctttttatatt

SEQ ID NO: 143302 - RNA, 22 nt, synthetic construct
  source 1..22: mol_type = other RNA
gtccacagatctttttgtgtat

SEQ ID NO: 143303 - RNA, 22 nt, synthetic construct
  source 1..22: mol_type = other RNA
gtccaccagacaaaaatagagg

SEQ ID NO: 143304 - RNA, 22 nt, synthetic construct
  source 1..22: mol_type = other RNA
gtccacctggcaacaaaggcga

SEQ ID NO: 143305 - RNA, 22 nt, synthetic construct
  source 1..22: mol_type = other RNA
gtccactcacctgtcatgtcaa

SEQ ID NO: 143306 - RNA, 22 nt, synthetic construct
  source 1..22: mol_type = other RNA
gtccactgtcagtgggactgga

SEQ ID NO: 143307 - RNA, 22 nt, synthetic construct
  source 1..22: mol_type = other RNA
gtccactttccatcttaggcca

SEQ ID NO: 143308 - RNA, 22 nt, synthetic construct
  source 1..22: mol_type = other RNA
gtccagaggaggaagagatagt

SEQ ID NO: 143309 - RNA, 22 nt, synthetic construct
  source 1..22: mol_type = other RNA
gtccagaggtgagctttttctt

SEQ ID NO: 143310 - RNA, 22 nt, synthetic construct
  source 1..22: mol_type = other RNA
gtccagatattatcctccaatg

SEQ ID NO: 143311 - RNA, 22 nt, synthetic construct
  source 1..22: mol_type = other RNA
gtccagatgaagcagggaaatg

SEQ ID NO: 143312 - RNA, 22 nt, synthetic construct
  source 1..22: mol_type = other RNA
gtccagcaccacccttgatgtc

SEQ ID NO: 143313 - RNA, 22 nt, synthetic construct
  source 1..22: mol_type = other RNA
gtccagcccccagttttgttga

SEQ ID NO: 143314 - RNA, 22 nt, synthetic construct
  source 1..22: mol_type = other RNA
gtccagcttcactcttctgcaa

SEQ ID NO: 143315 - RNA, 22 nt, synthetic construct
  source 1..22: mol_type = other RNA
gtccagctttctaattctgaca

SEQ ID NO: 143316 - RNA, 22 nt, synthetic construct
  source 1..22: mol_type = other RNA
gtccaggaacttacagtaagat

SEQ ID NO: 143317 - RNA, 22 nt, synthetic construct
  source 1..22: mol_type = other RNA
gtccaggccaacagggccactg

SEQ ID NO: 143318 - RNA, 22 nt, synthetic construct
  source 1..22: mol_type = other RNA
gtccaggcgcctgcattgcatt

SEQ ID NO: 143319 - RNA, 22 nt, synthetic construct
  source 1..22: mol_type = other RNA
gtccagtcctgctaacaccttg

SEQ ID NO: 143320 - RNA, 22 nt, synthetic construct
  source 1..22: mol_type = other RNA
gtccatagttaatgtgtgaaga

SEQ ID NO: 143321 - RNA, 22 nt, synthetic construct
  source 1..22: mol_type = other RNA
gtccatcaacagcagaacaaac

SEQ ID NO: 143322 - RNA, 22 nt, synthetic construct
  source 1..22: mol_type = other RNA
gtccatcaggaaaaccagttta

SEQ ID NO: 143323 - RNA, 22 nt, synthetic construct
  source 1..22: mol_type = other RNA
gtccatcgagagatgaatggat

SEQ ID NO: 143324 - RNA, 22 nt, synthetic construct
  source 1..22: mol_type = other RNA
gtccatctcccatcactagaat

SEQ ID NO: 143325 - RNA, 22 nt, synthetic construct
  source 1..22: mol_type = other RNA
gtccatctggattatagtggta

SEQ ID NO: 143326 - RNA, 22 nt, synthetic construct
  source 1..22: mol_type = other RNA
gtccatgaaacttatttccagg

SEQ ID NO: 143327 - RNA, 22 nt, synthetic construct
  source 1..22: mol_type = other RNA
gtccatgaagaaaacactccag

SEQ ID NO: 143328 - RNA, 22 nt, synthetic construct
  source 1..22: mol_type = other RNA
gtccatttccagtactttttca

SEQ ID NO: 143329 - RNA, 22 nt, synthetic construct
  source 1..22: mol_type = other RNA
gtccatttccttaagcacagac

SEQ ID NO: 143330 - RNA, 22 nt, synthetic construct
  source 1..22: mol_type = other RNA
gtcccaaatgcaccaacacctg

SEQ ID NO: 143331 - RNA, 22 nt, synthetic construct
  source 1..22: mol_type = other RNA
gtcccaaatgggagcatgcaca

SEQ ID NO: 143332 - RNA, 22 nt, synthetic construct
  source 1..22: mol_type = other RNA
gtcccactgacagtggacaaag

SEQ ID NO: 143333 - RNA, 22 nt, synthetic construct
  source 1..22: mol_type = other RNA
gtcccagttcaaggtgttagca

SEQ ID NO: 143334 - RNA, 22 nt, synthetic construct
  source 1..22: mol_type = other RNA
gtcccatcttccatacgaaagc

SEQ ID NO: 143335 - RNA, 22 nt, synthetic construct
  source 1..22: mol_type = other RNA
gtcccatggtcaaatcaatact

SEQ ID NO: 143336 - RNA, 22 nt, synthetic construct
  source 1..22: mol_type = other RNA
gtccccaactgcaaaactttct

SEQ ID NO: 143337 - RNA, 22 nt, synthetic construct
  source 1..22: mol_type = other RNA
gtccccacatgactggccatcc

SEQ ID NO: 143338 - RNA, 22 nt, synthetic construct
  source 1..22: mol_type = other RNA
gtccccaccgccttcctaccct

SEQ ID NO: 143339 - RNA, 22 nt, synthetic construct
  source 1..22: mol_type = other RNA
gtccccagcatccactagggga

SEQ ID NO: 143340 - RNA, 22 nt, synthetic construct
  source 1..22: mol_type = other RNA
gtcccccatcccctttacccct

SEQ ID NO: 143341 - RNA, 22 nt, synthetic construct
  source 1..22: mol_type = other RNA
gtccccggtctttcctgatcag

SEQ ID NO: 143342 - RNA, 22 nt, synthetic construct
  source 1..22: mol_type = other RNA
gtcccctagtggatgctgggga

SEQ ID NO: 143343 - RNA, 22 nt, synthetic construct
  source 1..22: mol_type = other RNA
gtcccctggagttaattccaca

SEQ ID NO: 143344 - RNA, 22 nt, synthetic construct
  source 1..22: mol_type = other RNA
gtcccctggggcctcagcatgt

SEQ ID NO: 143345 - RNA, 22 nt, synthetic construct
  source 1..22: mol_type = other RNA
gtcccctgtaattacatacttc

SEQ ID NO: 143346 - RNA, 22 nt, synthetic construct
  source 1..22: mol_type = other RNA
gtcccctgtccaagtatttctc

SEQ ID NO: 143347 - RNA, 22 nt, synthetic construct
  source 1..22: mol_type = other RNA
gtcccggaagctgggctagagc

SEQ ID NO: 143348 - RNA, 22 nt, synthetic construct
  source 1..22: mol_type = other RNA
gtcccggcatgcctctcccacc

SEQ ID NO: 143349 - RNA, 22 nt, synthetic construct
  source 1..22: mol_type = other RNA
gtccctaaacactgtagttcag

SEQ ID NO: 143350 - RNA, 22 nt, synthetic construct
  source 1..22: mol_type = other RNA
gtccctaacagtctcgtgaatt

SEQ ID NO: 143351 - RNA, 22 nt, synthetic construct
  source 1..22: mol_type = other RNA
gtccctagtgtctccatacccc

SEQ ID NO: 143352 - RNA, 22 nt, synthetic construct
  source 1..22: mol_type = other RNA
gtccctattttctacaggtata

SEQ ID NO: 143353 - RNA, 22 nt, synthetic construct
  source 1..22: mol_type = other RNA
gtccctcaccttctgctgggcc

SEQ ID NO: 143354 - RNA, 22 nt, synthetic construct
  source 1..22: mol_type = other RNA
gtccctcctttctagaatgcat

SEQ ID NO: 143355 - RNA, 22 nt, synthetic construct
  source 1..22: mol_type = other RNA
gtccctgctactcaggagatta

SEQ ID NO: 143356 - RNA, 22 nt, synthetic construct
  source 1..22: mol_type = other RNA
gtccctgctacttgtggggctg

SEQ ID NO: 143357 - RNA, 22 nt, synthetic construct
  source 1..22: mol_type = other RNA
gtccctgcttggcgcagtgctt

SEQ ID NO: 143358 - RNA, 22 nt, synthetic construct
  source 1..22: mol_type = other RNA
gtccctgctttcagttctttcg

SEQ ID NO: 143359 - RNA, 22 nt, synthetic construct
  source 1..22: mol_type = other RNA
gtcccttgcctgacagcaaata

SEQ ID NO: 143360 - RNA, 22 nt, synthetic construct
  source 1..22: mol_type = other RNA
gtccgcggctgggctttctcca

SEQ ID NO: 143361 - RNA, 22 nt, synthetic construct
  source 1..22: mol_type = other RNA
gtccggctctgcggcgggtctg

SEQ ID NO: 143362 - RNA, 22 nt, synthetic construct
  source 1..22: mol_type = other RNA
gtccggtcgttggatttatctt

SEQ ID NO: 143363 - RNA, 22 nt, synthetic construct
  source 1..22: mol_type = other RNA
gtccgtagaccgaggaaacccg

SEQ ID NO: 143364 - RNA, 22 nt, synthetic construct
  source 1..22: mol_type = other RNA
gtccgtgcatgcctctgttaca

SEQ ID NO: 143365 - RNA, 22 nt, synthetic construct
  source 1..22: mol_type = other RNA
gtccgttgaagtctttggccca

SEQ ID NO: 143366 - RNA, 22 nt, synthetic construct
  source 1..22: mol_type = other RNA
gtcctaaaattccttcctttga

SEQ ID NO: 143367 - RNA, 22 nt, synthetic construct
  source 1..22: mol_type = other RNA
gtcctcaatcatgtcaagaatg

SEQ ID NO: 143368 - RNA, 22 nt, synthetic construct
  source 1..22: mol_type = other RNA
gtcctcacctcacattcacagc

SEQ ID NO: 143369 - RNA, 22 nt, synthetic construct
  source 1..22: mol_type = other RNA
gtcctcactgtgatacctagta

SEQ ID NO: 143370 - RNA, 22 nt, synthetic construct
  source 1..22: mol_type = other RNA
gtcctcaggctccaggtagaat

SEQ ID NO: 143371 - RNA, 22 nt, synthetic construct
  source 1..22: mol_type = other RNA
gtcctcgtaaaagctaatctac

SEQ ID NO: 143372 - RNA, 22 nt, synthetic construct
  source 1..22: mol_type = other RNA
gtcctctactttcacataaggt

SEQ ID NO: 143373 - RNA, 22 nt, synthetic construct
  source 1..22: mol_type = other RNA
gtcctctcactccaaagcaaac

SEQ ID NO: 143374 - RNA, 22 nt, synthetic construct
  source 1..22: mol_type = other RNA
gtcctctcttgttgaggatgac

SEQ ID NO: 143375 - RNA, 22 nt, synthetic construct
  source 1..22: mol_type = other RNA
gtcctcttcgggtgtcagaatt

SEQ ID NO: 143376 - RNA, 22 nt, synthetic construct
  source 1..22: mol_type = other RNA
gtcctgaaaattccttcccctt

SEQ ID NO: 143377 - RNA, 22 nt, synthetic construct
  source 1..22: mol_type = other RNA
gtcctgaactcgtggcctcaag

SEQ ID NO: 143378 - RNA, 22 nt, synthetic construct
  source 1..22: mol_type = other RNA
gtcctgaatactattcctattg

SEQ ID NO: 143379 - RNA, 22 nt, synthetic construct
  source 1..22: mol_type = other RNA
gtcctgaatgatttccctgcat

SEQ ID NO: 143380 - RNA, 22 nt, synthetic construct
  source 1..22: mol_type = other RNA
gtcctgaattctaacattatct

SEQ ID NO: 143381 - RNA, 22 nt, synthetic construct
  source 1..22: mol_type = other RNA
gtcctgaattctaatgaactcc

SEQ ID NO: 143382 - RNA, 22 nt, synthetic construct
  source 1..22: mol_type = other RNA
gtcctgagctttccttagttcg

SEQ ID NO: 143383 - RNA, 22 nt, synthetic construct
  source 1..22: mol_type = other RNA
gtcctgagggctttgtgaaggg

SEQ ID NO: 143384 - RNA, 22 nt, synthetic construct
  source 1..22: mol_type = other RNA
gtcctgagggtgagaccaccac

SEQ ID NO: 143385 - RNA, 22 nt, synthetic construct
  source 1..22: mol_type = other RNA
gtcctgcatatgtttttattag

SEQ ID NO: 143386 - RNA, 22 nt, synthetic construct
  source 1..22: mol_type = other RNA
gtcctgccttggcctccccaag

SEQ ID NO: 143387 - RNA, 22 nt, synthetic construct
  source 1..22: mol_type = other RNA
gtcctgctaacaccttgaactg

SEQ ID NO: 143388 - RNA, 22 nt, synthetic construct
  source 1..22: mol_type = other RNA
gtcctggaaaaagaccataata

SEQ ID NO: 143389 - RNA, 22 nt, synthetic construct
  source 1..22: mol_type = other RNA
gtcctggcagatcaattgacca

SEQ ID NO: 143390 - RNA, 22 nt, synthetic construct
  source 1..22: mol_type = other RNA
gtcctgtcagtgtggttcatat

SEQ ID NO: 143391 - RNA, 22 nt, synthetic construct
  source 1..22: mol_type = other RNA
gtcctgtcagtttctgatttat

SEQ ID NO: 143392 - RNA, 22 nt, synthetic construct
  source 1..22: mol_type = other RNA
gtcctgtgtttctgctattctc

SEQ ID NO: 143393 - RNA, 22 nt, synthetic construct
  source 1..22: mol_type = other RNA
gtcctgttcttttgtaatctaa

SEQ ID NO: 143394 - RNA, 22 nt, synthetic construct
  source 1..22: mol_type = other RNA
gtccttaaatttctaaggttct

SEQ ID NO: 143395 - RNA, 22 nt, synthetic construct
  source 1..22: mol_type = other RNA
gtccttaatgccaccgaattgt

SEQ ID NO: 143396 - RNA, 22 nt, synthetic construct
  source 1..22: mol_type = other RNA
gtccttaccactgaagtgttga

SEQ ID NO: 143397 - RNA, 22 nt, synthetic construct
  source 1..22: mol_type = other RNA
gtccttccagtatgatgccact

SEQ ID NO: 143398 - RNA, 22 nt, synthetic construct
  source 1..22: mol_type = other RNA
gtccttctcgtgtgagctctag

SEQ ID NO: 143399 - RNA, 22 nt, synthetic construct
  source 1..22: mol_type = other RNA
gtccttctgagaaggcgaaatg

SEQ ID NO: 143400 - RNA, 22 nt, synthetic construct
  source 1..22: mol_type = other RNA
gtccttgctgaagaataactgt

SEQ ID NO: 143401 - RNA, 22 nt, synthetic construct
  source 1..22: mol_type = other RNA
gtccttggattgctaaactgtt

SEQ ID NO: 143402 - RNA, 22 nt, synthetic construct
  source 1..22: mol_type = other RNA
gtccttgtgatctatgcatact

SEQ ID NO: 143403 - RNA, 22 nt, synthetic construct
  source 1..22: mol_type = other RNA
gtccttgtgttttatttggctg

SEQ ID NO: 143404 - RNA, 22 nt, synthetic construct
  source 1..22: mol_type = other RNA
gtcctttccagaggttctttta

SEQ ID NO: 143405 - RNA, 22 nt, synthetic construct
  source 1..22: mol_type = other RNA
gtcctttcttggtctgcagact

SEQ ID NO: 143406 - RNA, 22 nt, synthetic construct
  source 1..22: mol_type = other RNA
gtcctttgatgcacaaaagttt

SEQ ID NO: 143407 - RNA, 22 nt, synthetic construct
  source 1..22: mol_type = other RNA
gtcctttgggaggtcaaggcag

SEQ ID NO: 143408 - RNA, 22 nt, synthetic construct
  source 1..22: mol_type = other RNA
gtcctttgtgtcaagtacaact

SEQ ID NO: 143409 - RNA, 22 nt, synthetic construct
  source 1..22: mol_type = other RNA
gtccttttcctgttccgggatc

SEQ ID NO: 143410 - RNA, 22 nt, synthetic construct
  source 1..22: mol_type = other RNA
gtccttttgagtttggtgtatt

SEQ ID NO: 143411 - RNA, 22 nt, synthetic construct
  source 1..22: mol_type = other RNA
gtccttttttactgacttttcc

SEQ ID NO: 143412 - RNA, 22 nt, synthetic construct
  source 1..22: mol_type = other RNA
gtcgaaaacctgaaatggctta

SEQ ID NO: 143413 - RNA, 22 nt, synthetic construct
  source 1..22: mol_type = other RNA
gtcgaagcttaatttagatgag

SEQ ID NO: 143414 - RNA, 22 nt, synthetic construct
  source 1..22: mol_type = other RNA
gtcgagaaaaatggggatatcc

SEQ ID NO: 143415 - RNA, 22 nt, synthetic construct
  source 1..22: mol_type = other RNA
gtcgagactgtaatgagctgag

SEQ ID NO: 143416 - RNA, 22 nt, synthetic construct
  source 1..22: mol_type = other RNA
gtcgagctgggtgatgttcaac

SEQ ID NO: 143417 - RNA, 22 nt, synthetic construct
  source 1..22: mol_type = other RNA
gtcgcaccctgagcatccccgc

SEQ ID NO: 143418 - RNA, 22 nt, synthetic construct
  source 1..22: mol_type = other RNA
gtcgcatgaaaacagctaggtg

SEQ ID NO: 143419 - RNA, 22 nt, synthetic construct
  source 1..22: mol_type = other RNA
gtcgccatacctggtccttaaa

SEQ ID NO: 143420 - RNA, 22 nt, synthetic construct
  source 1..22: mol_type = other RNA
gtcgcccaggcggaatgcagtg

SEQ ID NO: 143421 - RNA, 22 nt, synthetic construct
  source 1..22: mol_type = other RNA
gtcgcccaggctggagctcact

SEQ ID NO: 143422 - RNA, 22 nt, synthetic construct
  source 1..22: mol_type = other RNA
gtcgcggacgcgcattttttaa

SEQ ID NO: 143423 - RNA, 22 nt, synthetic construct
  source 1..22: mol_type = other RNA
gtcgctctcctgtgccaagtcc

SEQ ID NO: 143424 - RNA, 22 nt, synthetic construct
  source 1..22: mol_type = other RNA
gtcgcttgaacctgaaaaacgg

SEQ ID NO: 143425 - RNA, 22 nt, synthetic construct
  source 1..22: mol_type = other RNA
gtcggaaggaatgtgcttccta

SEQ ID NO: 143426 - RNA, 22 nt, synthetic construct
  source 1..22: mol_type = other RNA
gtcgggtgtcagaaaccatcgt

SEQ ID NO: 143427 - RNA, 22 nt, synthetic construct
  source 1..22: mol_type = other RNA
gtcggtatgttaataaccctgt

SEQ ID NO: 143428 - RNA, 22 nt, synthetic construct
  source 1..22: mol_type = other RNA
gtcggttcttcaccgtgcaact

SEQ ID NO: 143429 - RNA, 22 nt, synthetic construct
  source 1..22: mol_type = other RNA
gtcggttttctagttagtttgt

SEQ ID NO: 143430 - RNA, 22 nt, synthetic construct
  source 1..22: mol_type = other RNA
gtcgtacctttcgctatcagta

SEQ ID NO: 143431 - RNA, 22 nt, synthetic construct
  source 1..22: mol_type = other RNA
gtcgtcccccatcccctttacc

SEQ ID NO: 143432 - RNA, 22 nt, synthetic construct
  source 1..22: mol_type = other RNA
gtcgttgagtacctctgggatg

SEQ ID NO: 143433 - RNA, 22 nt, synthetic construct
  source 1..22: mol_type = other RNA
gtcgttggatttatctttctag

SEQ ID NO: 143434 - RNA, 22 nt, synthetic construct
  source 1..22: mol_type = other RNA
gtcgtttatgcatttattagta

SEQ ID NO: 143435 - RNA, 22 nt, synthetic construct
  source 1..22: mol_type = other RNA
gtcgtttatttcttctccctct

SEQ ID NO: 143436 - RNA, 22 nt, synthetic construct
  source 1..22: mol_type = other RNA
gtcgtttcagattgcttgagag

SEQ ID NO: 143437 - RNA, 22 nt, synthetic construct
  source 1..22: mol_type = other RNA
gtctaaccattaacagctcaga

SEQ ID NO: 143438 - RNA, 22 nt, synthetic construct
  source 1..22: mol_type = other RNA
gtctaagagataactaatgaga

SEQ ID NO: 143439 - RNA, 22 nt, synthetic construct
  source 1..22: mol_type = other RNA
gtctaatgggtacagggtttct

SEQ ID NO: 143440 - RNA, 22 nt, synthetic construct
  source 1..22: mol_type = other RNA
gtctaattttttagtcttgtct

SEQ ID NO: 143441 - RNA, 22 nt, synthetic construct
  source 1..22: mol_type = other RNA
gtctacaaaaggtttccagtgg

SEQ ID NO: 143442 - RNA, 22 nt, synthetic construct
  source 1..22: mol_type = other RNA
gtctaccatgttgttcttttca

SEQ ID NO: 143443 - RNA, 22 nt, synthetic construct
  source 1..22: mol_type = other RNA
gtctacctgtctttcccattac

SEQ ID NO: 143444 - RNA, 22 nt, synthetic construct
  source 1..22: mol_type = other RNA
gtctacggacgcaggcaaacag

SEQ ID NO: 143445 - RNA, 22 nt, synthetic construct
  source 1..22: mol_type = other RNA
gtctagccaagggtttgtcaat

SEQ ID NO: 143446 - RNA, 22 nt, synthetic construct
  source 1..22: mol_type = other RNA
gtctagccacttcctattagaa

SEQ ID NO: 143447 - RNA, 22 nt, synthetic construct
  source 1..22: mol_type = other RNA
gtctaggaaaagacttgaggtt

SEQ ID NO: 143448 - RNA, 22 nt, synthetic construct
  source 1..22: mol_type = other RNA
gtctaggctaatgtgtgttcca

SEQ ID NO: 143449 - RNA, 22 nt, synthetic construct
  source 1..22: mol_type = other RNA
gtctagtccatgaagaaaacac

SEQ ID NO: 143450 - RNA, 22 nt, synthetic construct
  source 1..22: mol_type = other RNA
gtctagtgaatgagaccaaatg

SEQ ID NO: 143451 - RNA, 22 nt, synthetic construct
  source 1..22: mol_type = other RNA
gtctagtgtgcatgtgttgtgc

SEQ ID NO: 143452 - RNA, 22 nt, synthetic construct
  source 1..22: mol_type = other RNA
gtctataggcaatgagtctgac

SEQ ID NO: 143453 - RNA, 22 nt, synthetic construct
  source 1..22: mol_type = other RNA
gtctatagtttaattgggggaa

SEQ ID NO: 143454 - RNA, 22 nt, synthetic construct
  source 1..22: mol_type = other RNA
gtctatctttgggaaaatctct

SEQ ID NO: 143455 - RNA, 22 nt, synthetic construct
  source 1..22: mol_type = other RNA
gtctatgctcttggtttcttca

SEQ ID NO: 143456 - RNA, 22 nt, synthetic construct
  source 1..22: mol_type = other RNA
gtctatgtgacagaatgcatct

SEQ ID NO: 143457 - RNA, 22 nt, synthetic construct
  source 1..22: mol_type = other RNA
gtctattccctacattgccttc

SEQ ID NO: 143458 - RNA, 22 nt, synthetic construct
  source 1..22: mol_type = other RNA
gtctatttctgaacaaatatca

SEQ ID NO: 143459 - RNA, 22 nt, synthetic construct
  source 1..22: mol_type = other RNA
gtctcaaaacaaacaaacagaa

SEQ ID NO: 143460 - RNA, 22 nt, synthetic construct
  source 1..22: mol_type = other RNA
gtctcaaaatttaaagttagtg

SEQ ID NO: 143461 - RNA, 22 nt, synthetic construct
  source 1..22: mol_type = other RNA
gtctcaaactccaagtctcatg

SEQ ID NO: 143462 - RNA, 22 nt, synthetic construct
  source 1..22: mol_type = other RNA
gtctcaacctactttaaatcag

SEQ ID NO: 143463 - RNA, 22 nt, synthetic construct
  source 1..22: mol_type = other RNA
gtctcaacctttgcctcctggg

SEQ ID NO: 143464 - RNA, 22 nt, synthetic construct
  source 1..22: mol_type = other RNA
gtctcaagattgtgtgatttca

SEQ ID NO: 143465 - RNA, 22 nt, synthetic construct
  source 1..22: mol_type = other RNA
gtctcaatctcctgatccacct

SEQ ID NO: 143466 - RNA, 22 nt, synthetic construct
  source 1..22: mol_type = other RNA
gtctcacactgttgtccaggcc

SEQ ID NO: 143467 - RNA, 22 nt, synthetic construct
  source 1..22: mol_type = other RNA
gtctcaccctcaggactctgct

SEQ ID NO: 143468 - RNA, 22 nt, synthetic construct
  source 1..22: mol_type = other RNA
gtctcacctcaaggccaactgt

SEQ ID NO: 143469 - RNA, 22 nt, synthetic construct
  source 1..22: mol_type = other RNA
gtctcacgatactttttatttt

SEQ ID NO: 143470 - RNA, 22 nt, synthetic construct
  source 1..22: mol_type = other RNA
gtctcactcttaccaaggctgg

SEQ ID NO: 143471 - RNA, 22 nt, synthetic construct
  source 1..22: mol_type = other RNA
gtctcagagtatatatgctccc

SEQ ID NO: 143472 - RNA, 22 nt, synthetic construct
  source 1..22: mol_type = other RNA
gtctcagatgtctccattttgc

SEQ ID NO: 143473 - RNA, 22 nt, synthetic construct
  source 1..22: mol_type = other RNA
gtctcagccttttctgatttgc

SEQ ID NO: 143474 - RNA, 22 nt, synthetic construct
  source 1..22: mol_type = other RNA
gtctcagctcctcagaaggcca

SEQ ID NO: 143475 - RNA, 22 nt, synthetic construct
  source 1..22: mol_type = other RNA
gtctcagtcccaaatgggagca

SEQ ID NO: 143476 - RNA, 22 nt, synthetic construct
  source 1..22: mol_type = other RNA
gtctcataaagccggattcctt

SEQ ID NO: 143477 - RNA, 22 nt, synthetic construct
  source 1..22: mol_type = other RNA
gtctcatctgtcaaaaagagaa

SEQ ID NO: 143478 - RNA, 22 nt, synthetic construct
  source 1..22: mol_type = other RNA
gtctcatgcaattccccagcct

SEQ ID NO: 143479 - RNA, 22 nt, synthetic construct
  source 1..22: mol_type = other RNA
gtctcattcactagacacattt

SEQ ID NO: 143480 - RNA, 22 nt, synthetic construct
  source 1..22: mol_type = other RNA
gtctcattgtggatgagattaa

SEQ ID NO: 143481 - RNA, 22 nt, synthetic construct
  source 1..22: mol_type = other RNA
gtctccaacgctttttatggaa

SEQ ID NO: 143482 - RNA, 22 nt, synthetic construct
  source 1..22: mol_type = other RNA
gtctccaatcctcagccccctc

SEQ ID NO: 143483 - RNA, 22 nt, synthetic construct
  source 1..22: mol_type = other RNA
gtctccatacaaggagacctac

SEQ ID NO: 143484 - RNA, 22 nt, synthetic construct
  source 1..22: mol_type = other RNA
gtctccataccccctggaaata

SEQ ID NO: 143485 - RNA, 22 nt, synthetic construct
  source 1..22: mol_type = other RNA
gtctccatgtcctcacctcaca

SEQ ID NO: 143486 - RNA, 22 nt, synthetic construct
  source 1..22: mol_type = other RNA
gtctccattttgccagctaact

SEQ ID NO: 143487 - RNA, 22 nt, synthetic construct
  source 1..22: mol_type = other RNA
gtctccattttggtcttaccct

SEQ ID NO: 143488 - RNA, 22 nt, synthetic construct
  source 1..22: mol_type = other RNA
gtctcccagcatgaagccctct

SEQ ID NO: 143489 - RNA, 22 nt, synthetic construct
  source 1..22: mol_type = other RNA
gtctcccccaggtggttctgcc

SEQ ID NO: 143490 - RNA, 22 nt, synthetic construct
  source 1..22: mol_type = other RNA
gtctccctaaccaggcccgggg

SEQ ID NO: 143491 - RNA, 22 nt, synthetic construct
  source 1..22: mol_type = other RNA
gtctccctcggccacagcaggg

SEQ ID NO: 143492 - RNA, 22 nt, synthetic construct
  source 1..22: mol_type = other RNA
gtctcctatattgtcaatgggg

SEQ ID NO: 143493 - RNA, 22 nt, synthetic construct
  source 1..22: mol_type = other RNA
gtctcctctttcatatctgatt

SEQ ID NO: 143494 - RNA, 22 nt, synthetic construct
  source 1..22: mol_type = other RNA
gtctccttgtatggagactagt

SEQ ID NO: 143495 - RNA, 22 nt, synthetic construct
  source 1..22: mol_type = other RNA
gtctcctttctatacttcatct

SEQ ID NO: 143496 - RNA, 22 nt, synthetic construct
  source 1..22: mol_type = other RNA
gtctcgaaaaggaatggaattc

SEQ ID NO: 143497 - RNA, 22 nt, synthetic construct
  source 1..22: mol_type = other RNA
gtctcgaactctcgacctcgtg

SEQ ID NO: 143498 - RNA, 22 nt, synthetic construct
  source 1..22: mol_type = other RNA
gtctcgaccccctgggctcaag

SEQ ID NO: 143499 - RNA, 22 nt, synthetic construct
  source 1..22: mol_type = other RNA
gtctcgagctcctgacctcaga

SEQ ID NO: 143500 - RNA, 22 nt, synthetic construct
  source 1..22: mol_type = other RNA
gtctcgctctgtcgcccaggcg

SEQ ID NO: 143501 - RNA, 22 nt, synthetic construct
  source 1..22: mol_type = other RNA
gtctcggatttaagagaggaag

SEQ ID NO: 143502 - RNA, 22 nt, synthetic construct
  source 1..22: mol_type = other RNA
gtctcgtgaatttggtattctt

SEQ ID NO: 143503 - RNA, 22 nt, synthetic construct
  source 1..22: mol_type = other RNA
gtctctacccagcactctgaat

SEQ ID NO: 143504 - RNA, 22 nt, synthetic construct
  source 1..22: mol_type = other RNA
gtctctctgaaattagctaagt

SEQ ID NO: 143505 - RNA, 22 nt, synthetic construct
  source 1..22: mol_type = other RNA
gtctctgacatgagagctaagg

SEQ ID NO: 143506 - RNA, 22 nt, synthetic construct
  source 1..22: mol_type = other RNA
gtctctgcaaaaaatgtttgtt

SEQ ID NO: 143507 - RNA, 22 nt, synthetic construct
  source 1..22: mol_type = other RNA
gtctctgcaacatttgttgcat

SEQ ID NO: 143508 - RNA, 22 nt, synthetic construct
  source 1..22: mol_type = other RNA
gtctctgcagagcaggctccac

SEQ ID NO: 143509 - RNA, 22 nt, synthetic construct
  source 1..22: mol_type = other RNA
gtctctgctcactgcaaccttt

SEQ ID NO: 143510 - RNA, 22 nt, synthetic construct
  source 1..22: mol_type = other RNA
gtctctgctctcaagtaattgt

SEQ ID NO: 143511 - RNA, 22 nt, synthetic construct
  source 1..22: mol_type = other RNA
gtctctggaaggctaagcatgt

SEQ ID NO: 143512 - RNA, 22 nt, synthetic construct
  source 1..22: mol_type = other RNA
gtctcttaagaccacaaggatt

SEQ ID NO: 143513 - RNA, 22 nt, synthetic construct
  source 1..22: mol_type = other RNA
gtctcttcctgtatatctcctt

SEQ ID NO: 143514 - RNA, 22 nt, synthetic construct
  source 1..22: mol_type = other RNA
gtctcttcgagggggctgagta

SEQ ID NO: 143515 - RNA, 22 nt, synthetic construct
  source 1..22: mol_type = other RNA
gtctctttgaaaggaatccggc

SEQ ID NO: 143516 - RNA, 22 nt, synthetic construct
  source 1..22: mol_type = other RNA
gtctgaaagcttctgagcagtg

SEQ ID NO: 143517 - RNA, 22 nt, synthetic construct
  source 1..22: mol_type = other RNA
gtctgacatactgtcacaggct

SEQ ID NO: 143518 - RNA, 22 nt, synthetic construct
  source 1..22: mol_type = other RNA
gtctgactacactgaagggaat

SEQ ID NO: 143519 - RNA, 22 nt, synthetic construct
  source 1..22: mol_type = other RNA
gtctgacttctctcagagggaa

SEQ ID NO: 143520 - RNA, 22 nt, synthetic construct
  source 1..22: mol_type = other RNA
gtctgatgtgtgtctctgctct

SEQ ID NO: 143521 - RNA, 22 nt, synthetic construct
  source 1..22: mol_type = other RNA
gtctgcaagcagatctgctgta

SEQ ID NO: 143522 - RNA, 22 nt, synthetic construct
  source 1..22: mol_type = other RNA
gtctgcagaccaagaaaggact

SEQ ID NO: 143523 - RNA, 22 nt, synthetic construct
  source 1..22: mol_type = other RNA
gtctgcagactcttgtcccggc

SEQ ID NO: 143524 - RNA, 22 nt, synthetic construct
  source 1..22: mol_type = other RNA
gtctgcaggagccttgctgttg

SEQ ID NO: 143525 - RNA, 22 nt, synthetic construct
  source 1..22: mol_type = other RNA
gtctgcaggcagaatgtgacct

SEQ ID NO: 143526 - RNA, 22 nt, synthetic construct
  source 1..22: mol_type = other RNA
gtctgcccatcctatctaagcc

SEQ ID NO: 143527 - RNA, 22 nt, synthetic construct
  source 1..22: mol_type = other RNA
gtctgcgccttaaagccacact

SEQ ID NO: 143528 - RNA, 22 nt, synthetic construct
  source 1..22: mol_type = other RNA
gtctgctacaggggcattccct

SEQ ID NO: 143529 - RNA, 22 nt, synthetic construct
  source 1..22: mol_type = other RNA
gtctggaacacacattagccta

SEQ ID NO: 143530 - RNA, 22 nt, synthetic construct
  source 1..22: mol_type = other RNA
gtctggaatgtgtagttctggt

SEQ ID NO: 143531 - RNA, 22 nt, synthetic construct
  source 1..22: mol_type = other RNA
gtctggattgattccagtttct

SEQ ID NO: 143532 - RNA, 22 nt, synthetic construct
  source 1..22: mol_type = other RNA
gtctgggaagttatgtagctgg

SEQ ID NO: 143533 - RNA, 22 nt, synthetic construct
  source 1..22: mol_type = other RNA
gtctgggataatgagtttaatt

SEQ ID NO: 143534 - RNA, 22 nt, synthetic construct
  source 1..22: mol_type = other RNA
gtctgggtgatatctgtaagtc

SEQ ID NO: 143535 - RNA, 22 nt, synthetic construct
  source 1..22: mol_type = other RNA
gtctggtatctaccaaaaaact

SEQ ID NO: 143536 - RNA, 22 nt, synthetic construct
  source 1..22: mol_type = other RNA
gtctggtggacaaaaaacgcgg

SEQ ID NO: 143537 - RNA, 22 nt, synthetic construct
  source 1..22: mol_type = other RNA
gtctggtttgctttggagtcac

SEQ ID NO: 143538 - RNA, 22 nt, synthetic construct
  source 1..22: mol_type = other RNA
gtctgtaagcacctgtataaat

SEQ ID NO: 143539 - RNA, 22 nt, synthetic construct
  source 1..22: mol_type = other RNA
gtctgtaagtcagttaacagtg

SEQ ID NO: 143540 - RNA, 22 nt, synthetic construct
  source 1..22: mol_type = other RNA
gtctgtagcttcacgtgcattc

SEQ ID NO: 143541 - RNA, 22 nt, synthetic construct
  source 1..22: mol_type = other RNA
gtctgtagggtgactagtgtga

SEQ ID NO: 143542 - RNA, 22 nt, synthetic construct
  source 1..22: mol_type = other RNA
gtctgtagttacaactactcgg

SEQ ID NO: 143543 - RNA, 22 nt, synthetic construct
  source 1..22: mol_type = other RNA
gtctgtatttctgctttggtac

SEQ ID NO: 143544 - RNA, 22 nt, synthetic construct
  source 1..22: mol_type = other RNA
gtctgtcctcgtaaaagctaat

SEQ ID NO: 143545 - RNA, 22 nt, synthetic construct
  source 1..22: mol_type = other RNA
gtctgtctcacctcaaggccaa

SEQ ID NO: 143546 - RNA, 22 nt, synthetic construct
  source 1..22: mol_type = other RNA
gtctgtctgttcacatttcgcc

SEQ ID NO: 143547 - RNA, 22 nt, synthetic construct
  source 1..22: mol_type = other RNA
gtctgtctttcagtatgtgtct

SEQ ID NO: 143548 - RNA, 22 nt, synthetic construct
  source 1..22: mol_type = other RNA
gtctgtgaaaataatacctaac

SEQ ID NO: 143549 - RNA, 22 nt, synthetic construct
  source 1..22: mol_type = other RNA
gtctgtgatgtagaggcagttg

SEQ ID NO: 143550 - RNA, 22 nt, synthetic construct
  source 1..22: mol_type = other RNA
gtctgtgattatcagggatatt

SEQ ID NO: 143551 - RNA, 22 nt, synthetic construct
  source 1..22: mol_type = other RNA
gtctgtgctctgtatttaatct

SEQ ID NO: 143552 - RNA, 22 nt, synthetic construct
  source 1..22: mol_type = other RNA
gtctgtgcttaaggaaatggac

SEQ ID NO: 143553 - RNA, 22 nt, synthetic construct
  source 1..22: mol_type = other RNA
gtctgtggtctcagctcctcag

SEQ ID NO: 143554 - RNA, 22 nt, synthetic construct
  source 1..22: mol_type = other RNA
gtctgtgtagttcatcagcata

SEQ ID NO: 143555 - RNA, 22 nt, synthetic construct
  source 1..22: mol_type = other RNA
gtctgttactcccgatttcagt

SEQ ID NO: 143556 - RNA, 22 nt, synthetic construct
  source 1..22: mol_type = other RNA
gtctgttcacatttcgccttct

SEQ ID NO: 143557 - RNA, 22 nt, synthetic construct
  source 1..22: mol_type = other RNA
gtctgtttgccatcttcaagat

SEQ ID NO: 143558 - RNA, 22 nt, synthetic construct
  source 1..22: mol_type = other RNA
gtctgttttacatgtttaacta

SEQ ID NO: 143559 - RNA, 22 nt, synthetic construct
  source 1..22: mol_type = other RNA
gtcttaaccattgagccaaaga

SEQ ID NO: 143560 - RNA, 22 nt, synthetic construct
  source 1..22: mol_type = other RNA
gtcttaagaaggaaaagaacac

SEQ ID NO: 143561 - RNA, 22 nt, synthetic construct
  source 1..22: mol_type = other RNA
gtcttaagagactctcaagaag

SEQ ID NO: 143562 - RNA, 22 nt, synthetic construct
  source 1..22: mol_type = other RNA
gtcttacataggcttagtacag

SEQ ID NO: 143563 - RNA, 22 nt, synthetic construct
  source 1..22: mol_type = other RNA
gtcttaccctctagctccccat

SEQ ID NO: 143564 - RNA, 22 nt, synthetic construct
  source 1..22: mol_type = other RNA
gtcttagctcttaagcttaggt

SEQ ID NO: 143565 - RNA, 22 nt, synthetic construct
  source 1..22: mol_type = other RNA
gtcttagtctgacttctctcag

SEQ ID NO: 143566 - RNA, 22 nt, synthetic construct
  source 1..22: mol_type = other RNA
gtcttagttctgcttccacatt

SEQ ID NO: 143567 - RNA, 22 nt, synthetic construct
  source 1..22: mol_type = other RNA
gtcttataggttgaatagggcc

SEQ ID NO: 143568 - RNA, 22 nt, synthetic construct
  source 1..22: mol_type = other RNA
gtcttatgctggtgggctttga

SEQ ID NO: 143569 - RNA, 22 nt, synthetic construct
  source 1..22: mol_type = other RNA
gtcttattgttttgatttgcat

SEQ ID NO: 143570 - RNA, 22 nt, synthetic construct
  source 1..22: mol_type = other RNA
gtcttcaacctcaactttaggt

SEQ ID NO: 143571 - RNA, 22 nt, synthetic construct
  source 1..22: mol_type = other RNA
gtcttcagaggccctggtgctt

SEQ ID NO: 143572 - RNA, 22 nt, synthetic construct
  source 1..22: mol_type = other RNA
gtcttcaggtctctctgaaatt

SEQ ID NO: 143573 - RNA, 22 nt, synthetic construct
  source 1..22: mol_type = other RNA
gtcttccaaaatattgaagagg

SEQ ID NO: 143574 - RNA, 22 nt, synthetic construct
  source 1..22: mol_type = other RNA
gtcttccaattgcagaaaaata

SEQ ID NO: 143575 - RNA, 22 nt, synthetic construct
  source 1..22: mol_type = other RNA
gtcttccattttagatcaagtc

SEQ ID NO: 143576 - RNA, 22 nt, synthetic construct
  source 1..22: mol_type = other RNA
gtcttccgtctcaagattgtgt

SEQ ID NO: 143577 - RNA, 22 nt, synthetic construct
  source 1..22: mol_type = other RNA
gtcttctaaccctcaaatgcca

SEQ ID NO: 143578 - RNA, 22 nt, synthetic construct
  source 1..22: mol_type = other RNA
gtcttctacaatggttgaacta

SEQ ID NO: 143579 - RNA, 22 nt, synthetic construct
  source 1..22: mol_type = other RNA
gtcttctactgtgaattcacta

SEQ ID NO: 143580 - RNA, 22 nt, synthetic construct
  source 1..22: mol_type = other RNA
gtcttctagctttcagcactgc

SEQ ID NO: 143581 - RNA, 22 nt, synthetic construct
  source 1..22: mol_type = other RNA
gtcttctcagatctgttgcagt

SEQ ID NO: 143582 - RNA, 22 nt, synthetic construct
  source 1..22: mol_type = other RNA
gtcttctcatacagattttatt

SEQ ID NO: 143583 - RNA, 22 nt, synthetic construct
  source 1..22: mol_type = other RNA
gtcttctgtttttcttagtcta

SEQ ID NO: 143584 - RNA, 22 nt, synthetic construct
  source 1..22: mol_type = other RNA
gtcttcttctaagctaagagtt

SEQ ID NO: 143585 - RNA, 22 nt, synthetic construct
  source 1..22: mol_type = other RNA
gtcttcttggattttcttcatt

SEQ ID NO: 143586 - RNA, 22 nt, synthetic construct
  source 1..22: mol_type = other RNA
gtcttgaatagcatcttagctc

SEQ ID NO: 143587 - RNA, 22 nt, synthetic construct
  source 1..22: mol_type = other RNA
gtcttgatgatagaataccact

SEQ ID NO: 143588 - RNA, 22 nt, synthetic construct
  source 1..22: mol_type = other RNA
gtcttgctctgtcacccacgtg

SEQ ID NO: 143589 - RNA, 22 nt, synthetic construct
  source 1..22: mol_type = other RNA
gtcttgctggaagttggcccaa

SEQ ID NO: 143590 - RNA, 22 nt, synthetic construct
  source 1..22: mol_type = other RNA
gtcttggacccatgcccatgtg

SEQ ID NO: 143591 - RNA, 22 nt, synthetic construct
  source 1..22: mol_type = other RNA
gtcttggctattgtcagtaatt

SEQ ID NO: 143592 - RNA, 22 nt, synthetic construct
  source 1..22: mol_type = other RNA
gtcttggtagtttgcacgtttt

SEQ ID NO: 143593 - RNA, 22 nt, synthetic construct
  source 1..22: mol_type = other RNA
gtcttggtgtgctcttttcatc

SEQ ID NO: 143594 - RNA, 22 nt, synthetic construct
  source 1..22: mol_type = other RNA
gtcttgtactcccagcctcaaa

SEQ ID NO: 143595 - RNA, 22 nt, synthetic construct
  source 1..22: mol_type = other RNA
gtcttgtcaataatttggatga

SEQ ID NO: 143596 - RNA, 22 nt, synthetic construct
  source 1..22: mol_type = other RNA
gtcttgtcataacagtattgtc

SEQ ID NO: 143597 - RNA, 22 nt, synthetic construct
  source 1..22: mol_type = other RNA
gtcttgtctcaacctttgcctc

SEQ ID NO: 143598 - RNA, 22 nt, synthetic construct
  source 1..22: mol_type = other RNA
gtcttgtcttttctttttcttt

SEQ ID NO: 143599 - RNA, 22 nt, synthetic construct
  source 1..22: mol_type = other RNA
gtcttgtgcatcctttatacct

SEQ ID NO: 143600 - RNA, 22 nt, synthetic construct
  source 1..22: mol_type = other RNA
gtcttgtggctgacatgtgtaa

SEQ ID NO: 143601 - RNA, 22 nt, synthetic construct
  source 1..22: mol_type = other RNA
gtcttgtttacccagtgtgttt

SEQ ID NO: 143602 - RNA, 22 nt, synthetic construct
  source 1..22: mol_type = other RNA
gtctttaaaagaaagctctcaa

SEQ ID NO: 143603 - RNA, 22 nt, synthetic construct
  source 1..22: mol_type = other RNA
gtctttatgccaatatcacact

SEQ ID NO: 143604 - RNA, 22 nt, synthetic construct
  source 1..22: mol_type = other RNA
gtctttcagtatgtgtctctga

SEQ ID NO: 143605 - RNA, 22 nt, synthetic construct
  source 1..22: mol_type = other RNA
gtctttcccattaccaaaacct

SEQ ID NO: 143606 - RNA, 22 nt, synthetic construct
  source 1..22: mol_type = other RNA
gtctttcctgatcagcaccctc

SEQ ID NO: 143607 - RNA, 22 nt, synthetic construct
  source 1..22: mol_type = other RNA
gtctttctcccaggtcagtagt

SEQ ID NO: 143608 - RNA, 22 nt, synthetic construct
  source 1..22: mol_type = other RNA
gtctttgatccattttgagttc

SEQ ID NO: 143609 - RNA, 22 nt, synthetic construct
  source 1..22: mol_type = other RNA
gtctttggcccatatcctttta

SEQ ID NO: 143610 - RNA, 22 nt, synthetic construct
  source 1..22: mol_type = other RNA
gtctttggcccattttcgaatt

SEQ ID NO: 143611 - RNA, 22 nt, synthetic construct
  source 1..22: mol_type = other RNA
gtctttggctcttagaaaatat

SEQ ID NO: 143612 - RNA, 22 nt, synthetic construct
  source 1..22: mol_type = other RNA
gtctttgggaaggccctgattg

SEQ ID NO: 143613 - RNA, 22 nt, synthetic construct
  source 1..22: mol_type = other RNA
gtctttgggtaatttatctcca

SEQ ID NO: 143614 - RNA, 22 nt, synthetic construct
  source 1..22: mol_type = other RNA
gtctttggtgatcctaagccat

SEQ ID NO: 143615 - RNA, 22 nt, synthetic construct
  source 1..22: mol_type = other RNA
gtctttgtctattccctacatt

SEQ ID NO: 143616 - RNA, 22 nt, synthetic construct
  source 1..22: mol_type = other RNA
gtcttttaacttgctttgaatt

SEQ ID NO: 143617 - RNA, 22 nt, synthetic construct
  source 1..22: mol_type = other RNA
gtcttttagccaacaaccataa

SEQ ID NO: 143618 - RNA, 22 nt, synthetic construct
  source 1..22: mol_type = other RNA
gtcttttcctaccctgaggata

SEQ ID NO: 143619 - RNA, 22 nt, synthetic construct
  source 1..22: mol_type = other RNA
gtcttttcctagactgccaggt

SEQ ID NO: 143620 - RNA, 22 nt, synthetic construct
  source 1..22: mol_type = other RNA
gtcttttctatctgaacatttt

SEQ ID NO: 143621 - RNA, 22 nt, synthetic construct
  source 1..22: mol_type = other RNA
gtcttttgaagaagttcttaat

SEQ ID NO: 143622 - RNA, 22 nt, synthetic construct
  source 1..22: mol_type = other RNA
gtctttttacacttggagtttt

SEQ ID NO: 143623 - RNA, 22 nt, synthetic construct
  source 1..22: mol_type = other RNA
gtctttttatattatgtgcaag

SEQ ID NO: 143624 - RNA, 22 nt, synthetic construct
  source 1..22: mol_type = other RNA
gtctttttccaggaccaattta

SEQ ID NO: 143625 - RNA, 22 nt, synthetic construct
  source 1..22: mol_type = other RNA
gtctttttgtgacttgtttatt

SEQ ID NO: 143626 - RNA, 22 nt, synthetic construct
  source 1..22: mol_type = other RNA
gtgaaaaaacaaaacaaaaccc

SEQ ID NO: 143627 - RNA, 22 nt, synthetic construct
  source 1..22: mol_type = other RNA
gtgaaaaaatggtgcagccact

SEQ ID NO: 143628 - RNA, 22 nt, synthetic construct
  source 1..22: mol_type = other RNA
gtgaaaaatgacctaaaatctt

SEQ ID NO: 143629 - RNA, 22 nt, synthetic construct
  source 1..22: mol_type = other RNA
gtgaaaaatttgacatgacagg

SEQ ID NO: 143630 - RNA, 22 nt, synthetic construct
  source 1..22: mol_type = other RNA
gtgaaaacacaaactgcagaat

SEQ ID NO: 143631 - RNA, 22 nt, synthetic construct
  source 1..22: mol_type = other RNA
gtgaaaactaaggtcaagagag

SEQ ID NO: 143632 - RNA, 22 nt, synthetic construct
  source 1..22: mol_type = other RNA
gtgaaaagaaaaaggttaaggg

SEQ ID NO: 143633 - RNA, 22 nt, synthetic construct
  source 1..22: mol_type = other RNA
gtgaaaagaaacaagtgaaatt

SEQ ID NO: 143634 - RNA, 22 nt, synthetic construct
  source 1..22: mol_type = other RNA
gtgaaaaggcaaaccacacaga

SEQ ID NO: 143635 - RNA, 22 nt, synthetic construct
  source 1..22: mol_type = other RNA
gtgaaaataatacctaacagcc

SEQ ID NO: 143636 - RNA, 22 nt, synthetic construct
  source 1..22: mol_type = other RNA
gtgaaaatactaacgatcctta

SEQ ID NO: 143637 - RNA, 22 nt, synthetic construct
  source 1..22: mol_type = other RNA
gtgaaaatcattttggcaaatt

SEQ ID NO: 143638 - RNA, 22 nt, synthetic construct
  source 1..22: mol_type = other RNA
gtgaaacaataaatttctgttg

SEQ ID NO: 143639 - RNA, 22 nt, synthetic construct
  source 1..22: mol_type = other RNA
gtgaaaccaagcaagtaaaaga

SEQ ID NO: 143640 - RNA, 22 nt, synthetic construct
  source 1..22: mol_type = other RNA
gtgaaactctggctcagaaaca

SEQ ID NO: 143641 - RNA, 22 nt, synthetic construct
  source 1..22: mol_type = other RNA
gtgaaacttgaatactcgtgtg

SEQ ID NO: 143642 - RNA, 22 nt, synthetic construct
  source 1..22: mol_type = other RNA
gtgaaaggcaaaggaaaaaact

SEQ ID NO: 143643 - RNA, 22 nt, synthetic construct
  source 1..22: mol_type = other RNA
gtgaaagtagaggactgcctat

SEQ ID NO: 143644 - RNA, 22 nt, synthetic construct
  source 1..22: mol_type = other RNA
gtgaaagtattaaaagcacaag

SEQ ID NO: 143645 - RNA, 22 nt, synthetic construct
  source 1..22: mol_type = other RNA
gtgaaagtctccctaaccaggc

SEQ ID NO: 143646 - RNA, 22 nt, synthetic construct
  source 1..22: mol_type = other RNA
gtgaaatagttggtcagaaaaa

SEQ ID NO: 143647 - RNA, 22 nt, synthetic construct
  source 1..22: mol_type = other RNA
gtgaaatataatgttatgaagc

SEQ ID NO: 143648 - RNA, 22 nt, synthetic construct
  source 1..22: mol_type = other RNA
gtgaaatcataaaatatgtcct

SEQ ID NO: 143649 - RNA, 22 nt, synthetic construct
  source 1..22: mol_type = other RNA
gtgaaatgatctttgaataaag

SEQ ID NO: 143650 - RNA, 22 nt, synthetic construct
  source 1..22: mol_type = other RNA
gtgaaatgatttcaagtaacac

SEQ ID NO: 143651 - RNA, 22 nt, synthetic construct
  source 1..22: mol_type = other RNA
gtgaacagacagacatgcatgc

SEQ ID NO: 143652 - RNA, 22 nt, synthetic construct
  source 1..22: mol_type = other RNA
gtgaacaggcaaccttgggaga

SEQ ID NO: 143653 - RNA, 22 nt, synthetic construct
  source 1..22: mol_type = other RNA
gtgaacatgggaatgcatatat

SEQ ID NO: 143654 - RNA, 22 nt, synthetic construct
  source 1..22: mol_type = other RNA
gtgaaccaaaaaccacatttca

SEQ ID NO: 143655 - RNA, 22 nt, synthetic construct
  source 1..22: mol_type = other RNA
gtgaaccacgcatctggtctat

SEQ ID NO: 143656 - RNA, 22 nt, synthetic construct
  source 1..22: mol_type = other RNA
gtgaaccttgaagtacttcagc

SEQ ID NO: 143657 - RNA, 22 nt, synthetic construct
  source 1..22: mol_type = other RNA
gtgaacgatggtttctgacacc

SEQ ID NO: 143658 - RNA, 22 nt, synthetic construct
  source 1..22: mol_type = other RNA
gtgaactattagagcttttatt

SEQ ID NO: 143659 - RNA, 22 nt, synthetic construct
  source 1..22: mol_type = other RNA
gtgaactccagtctgggcaaca

SEQ ID NO: 143660 - RNA, 22 nt, synthetic construct
  source 1..22: mol_type = other RNA
gtgaactgggtgtagggggaaa

SEQ ID NO: 143661 - RNA, 22 nt, synthetic construct
  source 1..22: mol_type = other RNA
gtgaagaaacctttctcaaagc

SEQ ID NO: 143662 - RNA, 22 nt, synthetic construct
  source 1..22: mol_type = other RNA
gtgaagaaccgactgaaaggaa

SEQ ID NO: 143663 - RNA, 22 nt, synthetic construct
  source 1..22: mol_type = other RNA
gtgaagaaggaatgtgcactct

SEQ ID NO: 143664 - RNA, 22 nt, synthetic construct
  source 1..22: mol_type = other RNA
gtgaagaatgtgaaaaatttga

SEQ ID NO: 143665 - RNA, 22 nt, synthetic construct
  source 1..22: mol_type = other RNA
gtgaagagagcctgtggtctct

SEQ ID NO: 143666 - RNA, 22 nt, synthetic construct
  source 1..22: mol_type = other RNA
gtgaagatgctgaacttgtcac

SEQ ID NO: 143667 - RNA, 22 nt, synthetic construct
  source 1..22: mol_type = other RNA
gtgaagatggagttacgctgcc

SEQ ID NO: 143668 - RNA, 22 nt, synthetic construct
  source 1..22: mol_type = other RNA
gtgaagattaagcacatctgtc

SEQ ID NO: 143669 - RNA, 22 nt, synthetic construct
  source 1..22: mol_type = other RNA
gtgaagcagagagagaagatga

SEQ ID NO: 143670 - RNA, 22 nt, synthetic construct
  source 1..22: mol_type = other RNA
gtgaagcccagagaggctaggt

SEQ ID NO: 143671 - RNA, 22 nt, synthetic construct
  source 1..22: mol_type = other RNA
gtgaagctacagactaatatga

SEQ ID NO: 143672 - RNA, 22 nt, synthetic construct
  source 1..22: mol_type = other RNA
gtgaagctggacccttacctta

SEQ ID NO: 143673 - RNA, 22 nt, synthetic construct
  source 1..22: mol_type = other RNA
gtgaagcttcaaaccactatct

SEQ ID NO: 143674 - RNA, 22 nt, synthetic construct
  source 1..22: mol_type = other RNA
gtgaagggaggtaggcttagat

SEQ ID NO: 143675 - RNA, 22 nt, synthetic construct
  source 1..22: mol_type = other RNA
gtgaaggttcatgaacataaat

SEQ ID NO: 143676 - RNA, 22 nt, synthetic construct
  source 1..22: mol_type = other RNA
gtgaagtcaagatgaatctgca

SEQ ID NO: 143677 - RNA, 22 nt, synthetic construct
  source 1..22: mol_type = other RNA
gtgaagtcaatttcagatctct

SEQ ID NO: 143678 - RNA, 22 nt, synthetic construct
  source 1..22: mol_type = other RNA
gtgaagtcatctggtcctgagc

SEQ ID NO: 143679 - RNA, 22 nt, synthetic construct
  source 1..22: mol_type = other RNA
gtgaagtcccatcttccatacg

SEQ ID NO: 143680 - RNA, 22 nt, synthetic construct
  source 1..22: mol_type = other RNA
gtgaagttaagggccatttcat

SEQ ID NO: 143681 - RNA, 22 nt, synthetic construct
  source 1..22: mol_type = other RNA
gtgaagttgggcttaacatttg

SEQ ID NO: 143682 - RNA, 22 nt, synthetic construct
  source 1..22: mol_type = other RNA
gtgaataacccatatctttgct

SEQ ID NO: 143683 - RNA, 22 nt, synthetic construct
  source 1..22: mol_type = other RNA
gtgaataggaaagtgacagatg

SEQ ID NO: 143684 - RNA, 22 nt, synthetic construct
  source 1..22: mol_type = other RNA
gtgaatatagctaagaaacagt

SEQ ID NO: 143685 - RNA, 22 nt, synthetic construct
  source 1..22: mol_type = other RNA
gtgaatatcatttgaatgatgc

SEQ ID NO: 143686 - RNA, 22 nt, synthetic construct
  source 1..22: mol_type = other RNA
gtgaatcactacagcatattag

SEQ ID NO: 143687 - RNA, 22 nt, synthetic construct
  source 1..22: mol_type = other RNA
gtgaatctgagtaaagggtaag

SEQ ID NO: 143688 - RNA, 22 nt, synthetic construct
  source 1..22: mol_type = other RNA
gtgaatctgttcctgggttctc

SEQ ID NO: 143689 - RNA, 22 nt, synthetic construct
  source 1..22: mol_type = other RNA
gtgaatgagaccaaatgcataa

SEQ ID NO: 143690 - RNA, 22 nt, synthetic construct
  source 1..22: mol_type = other RNA
gtgaatgaggagtgaatttttc

SEQ ID NO: 143691 - RNA, 22 nt, synthetic construct
  source 1..22: mol_type = other RNA
gtgaatggaaaattcaaacatg

SEQ ID NO: 143692 - RNA, 22 nt, synthetic construct
  source 1..22: mol_type = other RNA
gtgaatggggtaattttggggc

SEQ ID NO: 143693 - RNA, 22 nt, synthetic construct
  source 1..22: mol_type = other RNA
gtgaatgtgaggtgaggacatg

SEQ ID NO: 143694 - RNA, 22 nt, synthetic construct
  source 1..22: mol_type = other RNA
gtgaattagatggcttaggatc

SEQ ID NO: 143695 - RNA, 22 nt, synthetic construct
  source 1..22: mol_type = other RNA
gtgaattcacagtagaagactc

SEQ ID NO: 143696 - RNA, 22 nt, synthetic construct
  source 1..22: mol_type = other RNA
gtgaattcactaatgcctcaaa

SEQ ID NO: 143697 - RNA, 22 nt, synthetic construct
  source 1..22: mol_type = other RNA
gtgaattctgacttagtgaggg

SEQ ID NO: 143698 - RNA, 22 nt, synthetic construct
  source 1..22: mol_type = other RNA
gtgaattgataaaagtcattga

SEQ ID NO: 143699 - RNA, 22 nt, synthetic construct
  source 1..22: mol_type = other RNA
gtgaattgtgacagttctattt

SEQ ID NO: 143700 - RNA, 22 nt, synthetic construct
  source 1..22: mol_type = other RNA
gtgaatttggatttgagtaact

SEQ ID NO: 143701 - RNA, 22 nt, synthetic construct
  source 1..22: mol_type = other RNA
gtgaatttggtattcttatccc

SEQ ID NO: 143702 - RNA, 22 nt, synthetic construct
  source 1..22: mol_type = other RNA
gtgacaaaaagtaggggtaaat

SEQ ID NO: 143703 - RNA, 22 nt, synthetic construct
  source 1..22: mol_type = other RNA
gtgacaaacacttttcaaacac

SEQ ID NO: 143704 - RNA, 22 nt, synthetic construct
  source 1..22: mol_type = other RNA
gtgacaagttcagcatcttcac

SEQ ID NO: 143705 - RNA, 22 nt, synthetic construct
  source 1..22: mol_type = other RNA
gtgacacctgaggggtcttatg

SEQ ID NO: 143706 - RNA, 22 nt, synthetic construct
  source 1..22: mol_type = other RNA
gtgacagaacaaactcaagttc

SEQ ID NO: 143707 - RNA, 22 nt, synthetic construct
  source 1..22: mol_type = other RNA
gtgacagaacaaataacaccat

SEQ ID NO: 143708 - RNA, 22 nt, synthetic construct
  source 1..22: mol_type = other RNA
gtgacagaatgcatcttttaaa

SEQ ID NO: 143709 - RNA, 22 nt, synthetic construct
  source 1..22: mol_type = other RNA
gtgacagagagagacctttctt

SEQ ID NO: 143710 - RNA, 22 nt, synthetic construct
  source 1..22: mol_type = other RNA
gtgacagagccgagcagaaggg

SEQ ID NO: 143711 - RNA, 22 nt, synthetic construct
  source 1..22: mol_type = other RNA
gtgacagatgagaaatacttgg

SEQ ID NO: 143712 - RNA, 22 nt, synthetic construct
  source 1..22: mol_type = other RNA
gtgacagctgagtagcgcttta

SEQ ID NO: 143713 - RNA, 22 nt, synthetic construct
  source 1..22: mol_type = other RNA
gtgacagtatgtcagactcatt

SEQ ID NO: 143714 - RNA, 22 nt, synthetic construct
  source 1..22: mol_type = other RNA
gtgacagttctatttctttcca

SEQ ID NO: 143715 - RNA, 22 nt, synthetic construct
  source 1..22: mol_type = other RNA
gtgacagttctgtgaatttgat

SEQ ID NO: 143716 - RNA, 22 nt, synthetic construct
  source 1..22: mol_type = other RNA
gtgacatatgccggctgttagg

SEQ ID NO: 143717 - RNA, 22 nt, synthetic construct
  source 1..22: mol_type = other RNA
gtgacatcaagggtggtgctgg

SEQ ID NO: 143718 - RNA, 22 nt, synthetic construct
  source 1..22: mol_type = other RNA
gtgacattagtggtggtagtaa

SEQ ID NO: 143719 - RNA, 22 nt, synthetic construct
  source 1..22: mol_type = other RNA
gtgaccacagtttgaaacttta

SEQ ID NO: 143720 - RNA, 22 nt, synthetic construct
  source 1..22: mol_type = other RNA
gtgaccacattcccaaatgtct

SEQ ID NO: 143721 - RNA, 22 nt, synthetic construct
  source 1..22: mol_type = other RNA
gtgaccagatcaaacgtgcttt

SEQ ID NO: 143722 - RNA, 22 nt, synthetic construct
  source 1..22: mol_type = other RNA
gtgaccagtgtgatgggggtaa

SEQ ID NO: 143723 - RNA, 22 nt, synthetic construct
  source 1..22: mol_type = other RNA
gtgaccctgagtccagaggtga

SEQ ID NO: 143724 - RNA, 22 nt, synthetic construct
  source 1..22: mol_type = other RNA
gtgaccctttgaagtatgtaat

SEQ ID NO: 143725 - RNA, 22 nt, synthetic construct
  source 1..22: mol_type = other RNA
gtgacctcatgtaactaattac

SEQ ID NO: 143726 - RNA, 22 nt, synthetic construct
  source 1..22: mol_type = other RNA
gtgacctgccagagttggcaca

SEQ ID NO: 143727 - RNA, 22 nt, synthetic construct
  source 1..22: mol_type = other RNA
gtgacctgtccttgtgttttat

SEQ ID NO: 143728 - RNA, 22 nt, synthetic construct
  source 1..22: mol_type = other RNA
gtgacgtgagatcatgccactc

SEQ ID NO: 143729 - RNA, 22 nt, synthetic construct
  source 1..22: mol_type = other RNA
gtgactagaagaaatgttaaca

SEQ ID NO: 143730 - RNA, 22 nt, synthetic construct
  source 1..22: mol_type = other RNA
gtgactagtgtgaatgaggagt

SEQ ID NO: 143731 - RNA, 22 nt, synthetic construct
  source 1..22: mol_type = other RNA
gtgactccaaagcaaaccagac

SEQ ID NO: 143732 - RNA, 22 nt, synthetic construct
  source 1..22: mol_type = other RNA
gtgactccaagcacacagtttg

SEQ ID NO: 143733 - RNA, 22 nt, synthetic construct
  source 1..22: mol_type = other RNA
gtgactgaattcccacaaaata

SEQ ID NO: 143734 - RNA, 22 nt, synthetic construct
  source 1..22: mol_type = other RNA
gtgactggcttaatgcatataa

SEQ ID NO: 143735 - RNA, 22 nt, synthetic construct
  source 1..22: mol_type = other RNA
gtgactgtagtccctgctactt

SEQ ID NO: 143736 - RNA, 22 nt, synthetic construct
  source 1..22: mol_type = other RNA
gtgactgtgagggtaagaaagg

SEQ ID NO: 143737 - RNA, 22 nt, synthetic construct
  source 1..22: mol_type = other RNA
gtgacttaagcaacagaaattt

SEQ ID NO: 143738 - RNA, 22 nt, synthetic construct
  source 1..22: mol_type = other RNA
gtgacttcgtcaaggggagagg

SEQ ID NO: 143739 - RNA, 22 nt, synthetic construct
  source 1..22: mol_type = other RNA
gtgacttctggatgtgtatgat

SEQ ID NO: 143740 - RNA, 22 nt, synthetic construct
  source 1..22: mol_type = other RNA
gtgacttgtttattttacttag

SEQ ID NO: 143741 - RNA, 22 nt, synthetic construct
  source 1..22: mol_type = other RNA
gtgactttactgttctccagtc

SEQ ID NO: 143742 - RNA, 22 nt, synthetic construct
  source 1..22: mol_type = other RNA
gtgagaacccagtgtctgctac

SEQ ID NO: 143743 - RNA, 22 nt, synthetic construct
  source 1..22: mol_type = other RNA
gtgagacagaccctggcttgtg

SEQ ID NO: 143744 - RNA, 22 nt, synthetic construct
  source 1..22: mol_type = other RNA
gtgagaccaccacacttgcttg

SEQ ID NO: 143745 - RNA, 22 nt, synthetic construct
  source 1..22: mol_type = other RNA
gtgagactattatgagcagttg

SEQ ID NO: 143746 - RNA, 22 nt, synthetic construct
  source 1..22: mol_type = other RNA
gtgagactccaactcaaaaaag

SEQ ID NO: 143747 - RNA, 22 nt, synthetic construct
  source 1..22: mol_type = other RNA
gtgagaggactgcctggtcctg

SEQ ID NO: 143748 - RNA, 22 nt, synthetic construct
  source 1..22: mol_type = other RNA
gtgagatcatgccactccactc

SEQ ID NO: 143749 - RNA, 22 nt, synthetic construct
  source 1..22: mol_type = other RNA
gtgagatgggaagaaaaaataa

SEQ ID NO: 143750 - RNA, 22 nt, synthetic construct
  source 1..22: mol_type = other RNA
gtgagattgatagatcatatga

SEQ ID NO: 143751 - RNA, 22 nt, synthetic construct
  source 1..22: mol_type = other RNA
gtgagcaaaaatacagctccaa

SEQ ID NO: 143752 - RNA, 22 nt, synthetic construct
  source 1..22: mol_type = other RNA
gtgagcagaaggaggaaaataa

SEQ ID NO: 143753 - RNA, 22 nt, synthetic construct
  source 1..22: mol_type = other RNA
gtgagcatgctgcaactgagaa

SEQ ID NO: 143754 - RNA, 22 nt, synthetic construct
  source 1..22: mol_type = other RNA
gtgagcatttagccccctgaat

SEQ ID NO: 143755 - RNA, 22 nt, synthetic construct
  source 1..22: mol_type = other RNA
gtgagccacagctacactcaat

SEQ ID NO: 143756 - RNA, 22 nt, synthetic construct
  source 1..22: mol_type = other RNA
gtgagccacatacatagtatta

SEQ ID NO: 143757 - RNA, 22 nt, synthetic construct
  source 1..22: mol_type = other RNA
gtgagccaccacgtccggtcgt

SEQ ID NO: 143758 - RNA, 22 nt, synthetic construct
  source 1..22: mol_type = other RNA
gtgagccaccactcccggccgt

SEQ ID NO: 143759 - RNA, 22 nt, synthetic construct
  source 1..22: mol_type = other RNA
gtgagccaccgcacctggccgg

SEQ ID NO: 143760 - RNA, 22 nt, synthetic construct
  source 1..22: mol_type = other RNA
gtgagccaccgcgcccggccaa

SEQ ID NO: 143761 - RNA, 22 nt, synthetic construct
  source 1..22: mol_type = other RNA
gtgagccaccgcgcctggtgat

SEQ ID NO: 143762 - RNA, 22 nt, synthetic construct
  source 1..22: mol_type = other RNA
gtgagccaccgtgccgggcttg

SEQ ID NO: 143763 - RNA, 22 nt, synthetic construct
  source 1..22: mol_type = other RNA
gtgagccacctcatccggtctc

SEQ ID NO: 143764 - RNA, 22 nt, synthetic construct
  source 1..22: mol_type = other RNA
gtgagccactaaaacaggaagt

SEQ ID NO: 143765 - RNA, 22 nt, synthetic construct
  source 1..22: mol_type = other RNA
gtgagccactacgcccggccca

SEQ ID NO: 143766 - RNA, 22 nt, synthetic construct
  source 1..22: mol_type = other RNA
gtgagccatcgcgcccagcccg

SEQ ID NO: 143767 - RNA, 22 nt, synthetic construct
  source 1..22: mol_type = other RNA
gtgagcccagagatcccaccat

SEQ ID NO: 143768 - RNA, 22 nt, synthetic construct
  source 1..22: mol_type = other RNA
gtgagcctccacacctggcccc

SEQ ID NO: 143769 - RNA, 22 nt, synthetic construct
  source 1..22: mol_type = other RNA
gtgagctccagcctgggcgaca

SEQ ID NO: 143770 - RNA, 22 nt, synthetic construct
  source 1..22: mol_type = other RNA
gtgagctctagccttgtactgt

SEQ ID NO: 143771 - RNA, 22 nt, synthetic construct
  source 1..22: mol_type = other RNA
gtgagctggaagtaaggatttt

SEQ ID NO: 143772 - RNA, 22 nt, synthetic construct
  source 1..22: mol_type = other RNA
gtgagctttttctttttaaaca

SEQ ID NO: 143773 - RNA, 22 nt, synthetic construct
  source 1..22: mol_type = other RNA
gtgaggacatggagacagtgag

SEQ ID NO: 143774 - RNA, 22 nt, synthetic construct
  source 1..22: mol_type = other RNA
gtgaggacgctgatgacagtta

SEQ ID NO: 143775 - RNA, 22 nt, synthetic construct
  source 1..22: mol_type = other RNA
gtgaggatctgttggtgcttag

SEQ ID NO: 143776 - RNA, 22 nt, synthetic construct
  source 1..22: mol_type = other RNA
gtgaggattcgattaaaataac

SEQ ID NO: 143777 - RNA, 22 nt, synthetic construct
  source 1..22: mol_type = other RNA
gtgagggactgagcagtgaaag

SEQ ID NO: 143778 - RNA, 22 nt, synthetic construct
  source 1..22: mol_type = other RNA
gtgagggagatatttcgcctag

SEQ ID NO: 143779 - RNA, 22 nt, synthetic construct
  source 1..22: mol_type = other RNA
gtgagggaggccatcttcattt

SEQ ID NO: 143780 - RNA, 22 nt, synthetic construct
  source 1..22: mol_type = other RNA
gtgagggtaagaaaggagttca

SEQ ID NO: 143781 - RNA, 22 nt, synthetic construct
  source 1..22: mol_type = other RNA
gtgagggtttcagtgagtaggg

SEQ ID NO: 143782 - RNA, 22 nt, synthetic construct
  source 1..22: mol_type = other RNA
gtgaggtgaggacatggagaca

SEQ ID NO: 143783 - RNA, 22 nt, synthetic construct
  source 1..22: mol_type = other RNA
gtgagtagaagagtaatggttg

SEQ ID NO: 143784 - RNA, 22 nt, synthetic construct
  source 1..22: mol_type = other RNA
gtgagtagggaaggtgcccgcg

SEQ ID NO: 143785 - RNA, 22 nt, synthetic construct
  source 1..22: mol_type = other RNA
gtgagtccttccagtatgatgc

SEQ ID NO: 143786 - RNA, 22 nt, synthetic construct
  source 1..22: mol_type = other RNA
gtgagtgagatgggaagaaaaa

SEQ ID NO: 143787 - RNA, 22 nt, synthetic construct
  source 1..22: mol_type = other RNA
gtgagtgatgaaaagagcacac

SEQ ID NO: 143788 - RNA, 22 nt, synthetic construct
  source 1..22: mol_type = other RNA
gtgagtggactgtgagggagat

SEQ ID NO: 143789 - RNA, 22 nt, synthetic construct
  source 1..22: mol_type = other RNA
gtgagtggatcatttgaggtca

SEQ ID NO: 143790 - RNA, 22 nt, synthetic construct
  source 1..22: mol_type = other RNA
gtgagttcaaatgttaagccca

SEQ ID NO: 143791 - RNA, 22 nt, synthetic construct
  source 1..22: mol_type = other RNA
gtgagtttgacctgtaattttt

SEQ ID NO: 143792 - RNA, 22 nt, synthetic construct
  source 1..22: mol_type = other RNA
gtgagttttaactcttgcatta

SEQ ID NO: 143793 - RNA, 22 nt, synthetic construct
  source 1..22: mol_type = other RNA
gtgataaaaaggagggaaaatg

SEQ ID NO: 143794 - RNA, 22 nt, synthetic construct
  source 1..22: mol_type = other RNA
gtgataactgatatgagggatg

SEQ ID NO: 143795 - RNA, 22 nt, synthetic construct
  source 1..22: mol_type = other RNA
gtgataactggtgcttttttgg

SEQ ID NO: 143796 - RNA, 22 nt, synthetic construct
  source 1..22: mol_type = other RNA
gtgataccataaagtcagagga

SEQ ID NO: 143797 - RNA, 22 nt, synthetic construct
  source 1..22: mol_type = other RNA
gtgatacctagtacgtaaccta

SEQ ID NO: 143798 - RNA, 22 nt, synthetic construct
  source 1..22: mol_type = other RNA
gtgatacctcttactaaaaaga

SEQ ID NO: 143799 - RNA, 22 nt, synthetic construct
  source 1..22: mol_type = other RNA
gtgatagtcttccaattgcaga

SEQ ID NO: 143800 - RNA, 22 nt, synthetic construct
  source 1..22: mol_type = other RNA
gtgatatattatgaaccattgt

SEQ ID NO: 143801 - RNA, 22 nt, synthetic construct
  source 1..22: mol_type = other RNA
gtgatatctgtaagtcatcaaa

SEQ ID NO: 143802 - RNA, 22 nt, synthetic construct
  source 1..22: mol_type = other RNA
gtgatatgccacattttttggt

SEQ ID NO: 143803 - RNA, 22 nt, synthetic construct
  source 1..22: mol_type = other RNA
gtgatattggcataaagacaga

SEQ ID NO: 143804 - RNA, 22 nt, synthetic construct
  source 1..22: mol_type = other RNA
gtgatcagaagagcactatgta

SEQ ID NO: 143805 - RNA, 22 nt, synthetic construct
  source 1..22: mol_type = other RNA
gtgatcaggaaagatgaagtat

SEQ ID NO: 143806 - RNA, 22 nt, synthetic construct
  source 1..22: mol_type = other RNA
gtgatccctgatatgtcgcatg

SEQ ID NO: 143807 - RNA, 22 nt, synthetic construct
  source 1..22: mol_type = other RNA
gtgatcctaagccatctaattc

SEQ ID NO: 143808 - RNA, 22 nt, synthetic construct
  source 1..22: mol_type = other RNA
gtgatcctcctgccttggcctt

SEQ ID NO: 143809 - RNA, 22 nt, synthetic construct
  source 1..22: mol_type = other RNA
gtgatctatgaatttgcctatt

SEQ ID NO: 143810 - RNA, 22 nt, synthetic construct
  source 1..22: mol_type = other RNA
gtgatctatgcatactgcagca

SEQ ID NO: 143811 - RNA, 22 nt, synthetic construct
  source 1..22: mol_type = other RNA
gtgatctctgctcaccgcaaca

SEQ ID NO: 143812 - RNA, 22 nt, synthetic construct
  source 1..22: mol_type = other RNA
gtgatgaaaagagcacaccaag

SEQ ID NO: 143813 - RNA, 22 nt, synthetic construct
  source 1..22: mol_type = other RNA
gtgatgactgtaagctgaactc

SEQ ID NO: 143814 - RNA, 22 nt, synthetic construct
  source 1..22: mol_type = other RNA
gtgatgattttagaaggtaaga

SEQ ID NO: 143815 - RNA, 22 nt, synthetic construct
  source 1..22: mol_type = other RNA
gtgatgcaactcctgggctcat

SEQ ID NO: 143816 - RNA, 22 nt, synthetic construct
  source 1..22: mol_type = other RNA
gtgatgctaacgtgcttgctct

SEQ ID NO: 143817 - RNA, 22 nt, synthetic construct
  source 1..22: mol_type = other RNA
gtgatggaggtggaactctgtc

SEQ ID NO: 143818 - RNA, 22 nt, synthetic construct
  source 1..22: mol_type = other RNA
gtgatggcatcattcataaaca

SEQ ID NO: 143819 - RNA, 22 nt, synthetic construct
  source 1..22: mol_type = other RNA
gtgatggcgcatgcctgtggtc

SEQ ID NO: 143820 - RNA, 22 nt, synthetic construct
  source 1..22: mol_type = other RNA
gtgatgggagatggacactgca

SEQ ID NO: 143821 - RNA, 22 nt, synthetic construct
  source 1..22: mol_type = other RNA
gtgatgggggtaagattgtggt

SEQ ID NO: 143822 - RNA, 22 nt, synthetic construct
  source 1..22: mol_type = other RNA
gtgatgtagaggcagttgagtt

SEQ ID NO: 143823 - RNA, 22 nt, synthetic construct
  source 1..22: mol_type = other RNA
gtgatgtctcagatgtctccat

SEQ ID NO: 143824 - RNA, 22 nt, synthetic construct
  source 1..22: mol_type = other RNA
gtgatgtcttttgaagaagttc

SEQ ID NO: 143825 - RNA, 22 nt, synthetic construct
  source 1..22: mol_type = other RNA
gtgatgttcaaccctcggcctc

SEQ ID NO: 143826 - RNA, 22 nt, synthetic construct
  source 1..22: mol_type = other RNA
gtgatgttgagtatcttttcat

SEQ ID NO: 143827 - RNA, 22 nt, synthetic construct
  source 1..22: mol_type = other RNA
gtgattaaaggccctgatttaa

SEQ ID NO: 143828 - RNA, 22 nt, synthetic construct
  source 1..22: mol_type = other RNA
gtgattacaattcctttctagg

SEQ ID NO: 143829 - RNA, 22 nt, synthetic construct
  source 1..22: mol_type = other RNA
gtgattaccggcatccgccacc

SEQ ID NO: 143830 - RNA, 22 nt, synthetic construct
  source 1..22: mol_type = other RNA
gtgattatcagggatattggct

SEQ ID NO: 143831 - RNA, 22 nt, synthetic construct
  source 1..22: mol_type = other RNA
gtgattcacttttgagttcaga

SEQ ID NO: 143832 - RNA, 22 nt, synthetic construct
  source 1..22: mol_type = other RNA
gtgattcagagtgctgggtaga

SEQ ID NO: 143833 - RNA, 22 nt, synthetic construct
  source 1..22: mol_type = other RNA
gtgattgcaggtgtgggccacc

SEQ ID NO: 143834 - RNA, 22 nt, synthetic construct
  source 1..22: mol_type = other RNA
gtgattggatatttgcagtagt

SEQ ID NO: 143835 - RNA, 22 nt, synthetic construct
  source 1..22: mol_type = other RNA
gtgatttatgtggcatttaaat

SEQ ID NO: 143836 - RNA, 22 nt, synthetic construct
  source 1..22: mol_type = other RNA
gtgatttccagtgtttggtttt

SEQ ID NO: 143837 - RNA, 22 nt, synthetic construct
  source 1..22: mol_type = other RNA
gtgatttgtagatattttctgt

SEQ ID NO: 143838 - RNA, 22 nt, synthetic construct
  source 1..22: mol_type = other RNA
gtgattttaccaaggctaagtt

SEQ ID NO: 143839 - RNA, 22 nt, synthetic construct
  source 1..22: mol_type = other RNA
gtgcaaacctcctggttttgat

SEQ ID NO: 143840 - RNA, 22 nt, synthetic construct
  source 1..22: mol_type = other RNA
gtgcaaactaccaagactgaat

SEQ ID NO: 143841 - RNA, 22 nt, synthetic construct
  source 1..22: mol_type = other RNA
gtgcaaaggattagaaagtaga

SEQ ID NO: 143842 - RNA, 22 nt, synthetic construct
  source 1..22: mol_type = other RNA
gtgcaacataaatagggtgcta

SEQ ID NO: 143843 - RNA, 22 nt, synthetic construct
  source 1..22: mol_type = other RNA
gtgcaaccatccccgctgtcca

SEQ ID NO: 143844 - RNA, 22 nt, synthetic construct
  source 1..22: mol_type = other RNA
gtgcaactagagaaagcatcag

SEQ ID NO: 143845 - RNA, 22 nt, synthetic construct
  source 1..22: mol_type = other RNA
gtgcaaggagagaaaaacaaaa

SEQ ID NO: 143846 - RNA, 22 nt, synthetic construct
  source 1..22: mol_type = other RNA
gtgcaaggataaacaaagagaa

SEQ ID NO: 143847 - RNA, 22 nt, synthetic construct
  source 1..22: mol_type = other RNA
gtgcaatcacggctgattataa

SEQ ID NO: 143848 - RNA, 22 nt, synthetic construct
  source 1..22: mol_type = other RNA
gtgcaatgataggtcactgcag

SEQ ID NO: 143849 - RNA, 22 nt, synthetic construct
  source 1..22: mol_type = other RNA
gtgcaatggggcaatctcagct

SEQ ID NO: 143850 - RNA, 22 nt, synthetic construct
  source 1..22: mol_type = other RNA
gtgcaatggtgggatctctggg

SEQ ID NO: 143851 - RNA, 22 nt, synthetic construct
  source 1..22: mol_type = other RNA
gtgcacaacacatgcacactag

SEQ ID NO: 143852 - RNA, 22 nt, synthetic construct
  source 1..22: mol_type = other RNA
gtgcacaagggaagaggccaca

SEQ ID NO: 143853 - RNA, 22 nt, synthetic construct
  source 1..22: mol_type = other RNA
gtgcacaatgcagtattgttaa

SEQ ID NO: 143854 - RNA, 22 nt, synthetic construct
  source 1..22: mol_type = other RNA
gtgcacacaacactcagatatc

SEQ ID NO: 143855 - RNA, 22 nt, synthetic construct
  source 1..22: mol_type = other RNA
gtgcacacatccacgcgtaagg

SEQ ID NO: 143856 - RNA, 22 nt, synthetic construct
  source 1..22: mol_type = other RNA
gtgcacacccagttatctctgc

SEQ ID NO: 143857 - RNA, 22 nt, synthetic construct
  source 1..22: mol_type = other RNA
gtgcacatgttccctagaactt

SEQ ID NO: 143858 - RNA, 22 nt, synthetic construct
  source 1..22: mol_type = other RNA
gtgcacattccaagagaggaat

SEQ ID NO: 143859 - RNA, 22 nt, synthetic construct
  source 1..22: mol_type = other RNA
gtgcacattccttcttcacaca

SEQ ID NO: 143860 - RNA, 22 nt, synthetic construct
  source 1..22: mol_type = other RNA
gtgcacctaataaaatgtttag

SEQ ID NO: 143861 - RNA, 22 nt, synthetic construct
  source 1..22: mol_type = other RNA
gtgcacctccagtgtcctgaat

SEQ ID NO: 143862 - RNA, 22 nt, synthetic construct
  source 1..22: mol_type = other RNA
gtgcacctcgggttcaagcccc

SEQ ID NO: 143863 - RNA, 22 nt, synthetic construct
  source 1..22: mol_type = other RNA
gtgcaccttacattgtaatcct

SEQ ID NO: 143864 - RNA, 22 nt, synthetic construct
  source 1..22: mol_type = other RNA
gtgcacgctgtgaatgtgaggt

SEQ ID NO: 143865 - RNA, 22 nt, synthetic construct
  source 1..22: mol_type = other RNA
gtgcacgtttgctttggagtga

SEQ ID NO: 143866 - RNA, 22 nt, synthetic construct
  source 1..22: mol_type = other RNA
gtgcactcttttaaacccattt

SEQ ID NO: 143867 - RNA, 22 nt, synthetic construct
  source 1..22: mol_type = other RNA
gtgcacttaaaatttagatctc

SEQ ID NO: 143868 - RNA, 22 nt, synthetic construct
  source 1..22: mol_type = other RNA
gtgcagagcaggggtgggggga

SEQ ID NO: 143869 - RNA, 22 nt, synthetic construct
  source 1..22: mol_type = other RNA
gtgcagcaagcagtaaatatac

SEQ ID NO: 143870 - RNA, 22 nt, synthetic construct
  source 1..22: mol_type = other RNA
gtgcagccactatagaaaatag

SEQ ID NO: 143871 - RNA, 22 nt, synthetic construct
  source 1..22: mol_type = other RNA
gtgcagcctctaatcaggttgg

SEQ ID NO: 143872 - RNA, 22 nt, synthetic construct
  source 1..22: mol_type = other RNA
gtgcaggaaacttccagaaact

SEQ ID NO: 143873 - RNA, 22 nt, synthetic construct
  source 1..22: mol_type = other RNA
gtgcaggagtttgagactgcag

SEQ ID NO: 143874 - RNA, 22 nt, synthetic construct
  source 1..22: mol_type = other RNA
gtgcaggccagatatccataag

SEQ ID NO: 143875 - RNA, 22 nt, synthetic construct
  source 1..22: mol_type = other RNA
gtgcaggtttgttacacaggta

SEQ ID NO: 143876 - RNA, 22 nt, synthetic construct
  source 1..22: mol_type = other RNA
gtgcagtatcttgaagaaacca

SEQ ID NO: 143877 - RNA, 22 nt, synthetic construct
  source 1..22: mol_type = other RNA
gtgcagtatgtaggaaactttg

SEQ ID NO: 143878 - RNA, 22 nt, synthetic construct
  source 1..22: mol_type = other RNA
gtgcagtctaaccattaacagc

SEQ ID NO: 143879 - RNA, 22 nt, synthetic construct
  source 1..22: mol_type = other RNA
gtgcagtggatgactaggctcc

SEQ ID NO: 143880 - RNA, 22 nt, synthetic construct
  source 1..22: mol_type = other RNA
gtgcagtggtgtggtcttgtct

SEQ ID NO: 143881 - RNA, 22 nt, synthetic construct
  source 1..22: mol_type = other RNA
gtgcataccaccacattcggcc

SEQ ID NO: 143882 - RNA, 22 nt, synthetic construct
  source 1..22: mol_type = other RNA
gtgcatactgtgatgattttag

SEQ ID NO: 143883 - RNA, 22 nt, synthetic construct
  source 1..22: mol_type = other RNA
gtgcatatataccacattttgt

SEQ ID NO: 143884 - RNA, 22 nt, synthetic construct
  source 1..22: mol_type = other RNA
gtgcatcaaaggacactattga

SEQ ID NO: 143885 - RNA, 22 nt, synthetic construct
  source 1..22: mol_type = other RNA
gtgcatcagaattccattcctt

SEQ ID NO: 143886 - RNA, 22 nt, synthetic construct
  source 1..22: mol_type = other RNA
gtgcatcctttataccttttaa

SEQ ID NO: 143887 - RNA, 22 nt, synthetic construct
  source 1..22: mol_type = other RNA
gtgcatgaccctgctatgcata

SEQ ID NO: 143888 - RNA, 22 nt, synthetic construct
  source 1..22: mol_type = other RNA
gtgcatgcatgtctgtctgttc

SEQ ID NO: 143889 - RNA, 22 nt, synthetic construct
  source 1..22: mol_type = other RNA
gtgcatgcctctgttacagctc

SEQ ID NO: 143890 - RNA, 22 nt, synthetic construct
  source 1..22: mol_type = other RNA
gtgcatgctcccatttgggact

SEQ ID NO: 143891 - RNA, 22 nt, synthetic construct
  source 1..22: mol_type = other RNA
gtgcatgtctgcaggagccttg

SEQ ID NO: 143892 - RNA, 22 nt, synthetic construct
  source 1..22: mol_type = other RNA
gtgcatgtgcaggaaacttcca

SEQ ID NO: 143893 - RNA, 22 nt, synthetic construct
  source 1..22: mol_type = other RNA
gtgcatgtgttgtgcacacatc

SEQ ID NO: 143894 - RNA, 22 nt, synthetic construct
  source 1..22: mol_type = other RNA
gtgcattattgtaattatcaac

SEQ ID NO: 143895 - RNA, 22 nt, synthetic construct
  source 1..22: mol_type = other RNA
gtgcattcatactgaaggcata

SEQ ID NO: 143896 - RNA, 22 nt, synthetic construct
  source 1..22: mol_type = other RNA
gtgcatttcggctctgtgctga

SEQ ID NO: 143897 - RNA, 22 nt, synthetic construct
  source 1..22: mol_type = other RNA
gtgcatttgggacagcctagtt

SEQ ID NO: 143898 - RNA, 22 nt, synthetic construct
  source 1..22: mol_type = other RNA
gtgccaacacatggggcattaa

SEQ ID NO: 143899 - RNA, 22 nt, synthetic construct
  source 1..22: mol_type = other RNA
gtgccaactctggcaggtcacc

SEQ ID NO: 143900 - RNA, 22 nt, synthetic construct
  source 1..22: mol_type = other RNA
gtgccaagcaacttgatcaggg

SEQ ID NO: 143901 - RNA, 22 nt, synthetic construct
  source 1..22: mol_type = other RNA
gtgccaagtccgtgcatgcctc

SEQ ID NO: 143902 - RNA, 22 nt, synthetic construct
  source 1..22: mol_type = other RNA
gtgccagccacccttgctgctt

SEQ ID NO: 143903 - RNA, 22 nt, synthetic construct
  source 1..22: mol_type = other RNA
gtgccagtgaactccagtctgg

SEQ ID NO: 143904 - RNA, 22 nt, synthetic construct
  source 1..22: mol_type = other RNA
gtgccagtgcaaacctcctggt

SEQ ID NO: 143905 - RNA, 22 nt, synthetic construct
  source 1..22: mol_type = other RNA
gtgccatctccttaatccagtc

SEQ ID NO: 143906 - RNA, 22 nt, synthetic construct
  source 1..22: mol_type = other RNA
gtgcccaaggaaggcagggtag

SEQ ID NO: 143907 - RNA, 22 nt, synthetic construct
  source 1..22: mol_type = other RNA
gtgcccacctgacaagtagtac

SEQ ID NO: 143908 - RNA, 22 nt, synthetic construct
  source 1..22: mol_type = other RNA
gtgcccaggctgacttagaggg

SEQ ID NO: 143909 - RNA, 22 nt, synthetic construct
  source 1..22: mol_type = other RNA
gtgcccattaacagatgaatga

SEQ ID NO: 143910 - RNA, 22 nt, synthetic construct
  source 1..22: mol_type = other RNA
gtgccccactccacacacgaag

SEQ ID NO: 143911 - RNA, 22 nt, synthetic construct
  source 1..22: mol_type = other RNA
gtgcccgcgaaggcgtgtaaac

SEQ ID NO: 143912 - RNA, 22 nt, synthetic construct
  source 1..22: mol_type = other RNA
gtgcccggccagacattttatt

SEQ ID NO: 143913 - RNA, 22 nt, synthetic construct
  source 1..22: mol_type = other RNA
gtgccctacatatggcaattcc

SEQ ID NO: 143914 - RNA, 22 nt, synthetic construct
  source 1..22: mol_type = other RNA
gtgccgaggcagagagagtaac

SEQ ID NO: 143915 - RNA, 22 nt, synthetic construct
  source 1..22: mol_type = other RNA
gtgccgcgcgagggagcgtacg

SEQ ID NO: 143916 - RNA, 22 nt, synthetic construct
  source 1..22: mol_type = other RNA
gtgccgcgttttttgtccacca

SEQ ID NO: 143917 - RNA, 22 nt, synthetic construct
  source 1..22: mol_type = other RNA
gtgccgggcttggtatgcatct

SEQ ID NO: 143918 - RNA, 22 nt, synthetic construct
  source 1..22: mol_type = other RNA
gtgcctacatagtccactttcc

SEQ ID NO: 143919 - RNA, 22 nt, synthetic construct
  source 1..22: mol_type = other RNA
gtgcctcctgcctcagcctcct

SEQ ID NO: 143920 - RNA, 22 nt, synthetic construct
  source 1..22: mol_type = other RNA
gtgcctgccatagagggagcat

SEQ ID NO: 143921 - RNA, 22 nt, synthetic construct
  source 1..22: mol_type = other RNA
gtgccttcagaaggagtccagt

SEQ ID NO: 143922 - RNA, 22 nt, synthetic construct
  source 1..22: mol_type = other RNA
gtgccttcagctatggtgttat

SEQ ID NO: 143923 - RNA, 22 nt, synthetic construct
  source 1..22: mol_type = other RNA
gtgccttgatccattacatcaa

SEQ ID NO: 143924 - RNA, 22 nt, synthetic construct
  source 1..22: mol_type = other RNA
gtgcgacctcgaagcacaacca

SEQ ID NO: 143925 - RNA, 22 nt, synthetic construct
  source 1..22: mol_type = other RNA
gtgcgagtgtgaacgatggttt

SEQ ID NO: 143926 - RNA, 22 nt, synthetic construct
  source 1..22: mol_type = other RNA
gtgcgggattatttggaagaga

SEQ ID NO: 143927 - RNA, 22 nt, synthetic construct
  source 1..22: mol_type = other RNA
gtgcgtgaatctgttcctgggt

SEQ ID NO: 143928 - RNA, 22 nt, synthetic construct
  source 1..22: mol_type = other RNA
gtgcgttgaccgctttcgtgag

SEQ ID NO: 143929 - RNA, 22 nt, synthetic construct
  source 1..22: mol_type = other RNA
gtgctaattgtttgttgggttt

SEQ ID NO: 143930 - RNA, 22 nt, synthetic construct
  source 1..22: mol_type = other RNA
gtgctacctcaaattgtgtgtt

SEQ ID NO: 143931 - RNA, 22 nt, synthetic construct
  source 1..22: mol_type = other RNA
gtgctactcaaagtttagttat

SEQ ID NO: 143932 - RNA, 22 nt, synthetic construct
  source 1..22: mol_type = other RNA
gtgctagatgctaaacagtaca

SEQ ID NO: 143933 - RNA, 22 nt, synthetic construct
  source 1..22: mol_type = other RNA
gtgctagccttcttggagtaaa

SEQ ID NO: 143934 - RNA, 22 nt, synthetic construct
  source 1..22: mol_type = other RNA
gtgctcagtggttctgcgtgtt

SEQ ID NO: 143935 - RNA, 22 nt, synthetic construct
  source 1..22: mol_type = other RNA
gtgctccatagcttcctaagaa

SEQ ID NO: 143936 - RNA, 22 nt, synthetic construct
  source 1..22: mol_type = other RNA
gtgctctaccctttccaaattc

SEQ ID NO: 143937 - RNA, 22 nt, synthetic construct
  source 1..22: mol_type = other RNA
gtgctctcccccgaatcctttg

SEQ ID NO: 143938 - RNA, 22 nt, synthetic construct
  source 1..22: mol_type = other RNA
gtgctctgtatttaatctttta

SEQ ID NO: 143939 - RNA, 22 nt, synthetic construct
  source 1..22: mol_type = other RNA
gtgctcttctgatcacagaagt

SEQ ID NO: 143940 - RNA, 22 nt, synthetic construct
  source 1..22: mol_type = other RNA
gtgctcttttcatcactcactg

SEQ ID NO: 143941 - RNA, 22 nt, synthetic construct
  source 1..22: mol_type = other RNA
gtgctgaaaccccgcatactgt

SEQ ID NO: 143942 - RNA, 22 nt, synthetic construct
  source 1..22: mol_type = other RNA
gtgctgaaagctagaagacctc

SEQ ID NO: 143943 - RNA, 22 nt, synthetic construct
  source 1..22: mol_type = other RNA
gtgctgactagtacgtgcagag

SEQ ID NO: 143944 - RNA, 22 nt, synthetic construct
  source 1..22: mol_type = other RNA
gtgctgagatggtcagtactat

SEQ ID NO: 143945 - RNA, 22 nt, synthetic construct
  source 1..22: mol_type = other RNA
gtgctgagattacagatgtgag

SEQ ID NO: 143946 - RNA, 22 nt, synthetic construct
  source 1..22: mol_type = other RNA
gtgctgataaatggctttttac

SEQ ID NO: 143947 - RNA, 22 nt, synthetic construct
  source 1..22: mol_type = other RNA
gtgctgatcaggaaagaccggg

SEQ ID NO: 143948 - RNA, 22 nt, synthetic construct
  source 1..22: mol_type = other RNA
gtgctgatttaaaattttgctt

SEQ ID NO: 143949 - RNA, 22 nt, synthetic construct
  source 1..22: mol_type = other RNA
gtgctgcacgtctgtggtctca

SEQ ID NO: 143950 - RNA, 22 nt, synthetic construct
  source 1..22: mol_type = other RNA
gtgctgcagtatgcatagatca

SEQ ID NO: 143951 - RNA, 22 nt, synthetic construct
  source 1..22: mol_type = other RNA
gtgctgctctgacgtttaaatg

SEQ ID NO: 143952 - RNA, 22 nt, synthetic construct
  source 1..22: mol_type = other RNA
gtgctggactggagggatgctg

SEQ ID NO: 143953 - RNA, 22 nt, synthetic construct
  source 1..22: mol_type = other RNA
gtgctggcagccttctctcttc

SEQ ID NO: 143954 - RNA, 22 nt, synthetic construct
  source 1..22: mol_type = other RNA
gtgctggcttcaatatgcagta

SEQ ID NO: 143955 - RNA, 22 nt, synthetic construct
  source 1..22: mol_type = other RNA
gtgctgggctagggaagcagtt

SEQ ID NO: 143956 - RNA, 22 nt, synthetic construct
  source 1..22: mol_type = other RNA
gtgctgggtagagactggatcc

SEQ ID NO: 143957 - RNA, 22 nt, synthetic construct
  source 1..22: mol_type = other RNA
gtgctgtccatttccttaagca

SEQ ID NO: 143958 - RNA, 22 nt, synthetic construct
  source 1..22: mol_type = other RNA
gtgctgtgattgcaggtgtggg

SEQ ID NO: 143959 - RNA, 22 nt, synthetic construct
  source 1..22: mol_type = other RNA
gtgctgtgccagtgcaaacctc

SEQ ID NO: 143960 - RNA, 22 nt, synthetic construct
  source 1..22: mol_type = other RNA
gtgctgttgaggctgggccctg

SEQ ID NO: 143961 - RNA, 22 nt, synthetic construct
  source 1..22: mol_type = other RNA
gtgctgttgtattttacaccat

SEQ ID NO: 143962 - RNA, 22 nt, synthetic construct
  source 1..22: mol_type = other RNA
gtgcttaaggaaatggacagca

SEQ ID NO: 143963 - RNA, 22 nt, synthetic construct
  source 1..22: mol_type = other RNA
gtgcttaatcttcacacttagt

SEQ ID NO: 143964 - RNA, 22 nt, synthetic construct
  source 1..22: mol_type = other RNA
gtgcttaattcaaacaaatcat

SEQ ID NO: 143965 - RNA, 22 nt, synthetic construct
  source 1..22: mol_type = other RNA
gtgcttacacacacgtttatat

SEQ ID NO: 143966 - RNA, 22 nt, synthetic construct
  source 1..22: mol_type = other RNA
gtgcttacagactgattaattt

SEQ ID NO: 143967 - RNA, 22 nt, synthetic construct
  source 1..22: mol_type = other RNA
gtgcttagcgctggaggtcggg

SEQ ID NO: 143968 - RNA, 22 nt, synthetic construct
  source 1..22: mol_type = other RNA
gtgcttagctgcctcttcctgt

SEQ ID NO: 143969 - RNA, 22 nt, synthetic construct
  source 1..22: mol_type = other RNA
gtgcttccacagctatcaggcc

SEQ ID NO: 143970 - RNA, 22 nt, synthetic construct
  source 1..22: mol_type = other RNA
gtgcttcctaaacctgctacga

SEQ ID NO: 143971 - RNA, 22 nt, synthetic construct
  source 1..22: mol_type = other RNA
gtgcttccttctcttatactag

SEQ ID NO: 143972 - RNA, 22 nt, synthetic construct
  source 1..22: mol_type = other RNA
gtgcttcgaggtcgcaccctga

SEQ ID NO: 143973 - RNA, 22 nt, synthetic construct
  source 1..22: mol_type = other RNA
gtgcttctagtaacttggtcga

SEQ ID NO: 143974 - RNA, 22 nt, synthetic construct
  source 1..22: mol_type = other RNA
gtgcttctgataggaatatcgt

SEQ ID NO: 143975 - RNA, 22 nt, synthetic construct
  source 1..22: mol_type = other RNA
gtgcttgaactgctggtctgga

SEQ ID NO: 143976 - RNA, 22 nt, synthetic construct
  source 1..22: mol_type = other RNA
gtgcttgcagccttccctgaac

SEQ ID NO: 143977 - RNA, 22 nt, synthetic construct
  source 1..22: mol_type = other RNA
gtgcttgctctgcggcaggcat

SEQ ID NO: 143978 - RNA, 22 nt, synthetic construct
  source 1..22: mol_type = other RNA
gtgcttggagtcacttgacaaa

SEQ ID NO: 143979 - RNA, 22 nt, synthetic construct
  source 1..22: mol_type = other RNA
gtgcttggatattctacagaaa

SEQ ID NO: 143980 - RNA, 22 nt, synthetic construct
  source 1..22: mol_type = other RNA
gtgcttgggctcccttccagcg

SEQ ID NO: 143981 - RNA, 22 nt, synthetic construct
  source 1..22: mol_type = other RNA
gtgcttgtctctctctttctct

SEQ ID NO: 143982 - RNA, 22 nt, synthetic construct
  source 1..22: mol_type = other RNA
gtgcttgtgcttttaatacttt

SEQ ID NO: 143983 - RNA, 22 nt, synthetic construct
  source 1..22: mol_type = other RNA
gtgctttccttattgagaagca

SEQ ID NO: 143984 - RNA, 22 nt, synthetic construct
  source 1..22: mol_type = other RNA
gtgctttctatctctcagatct

SEQ ID NO: 143985 - RNA, 22 nt, synthetic construct
  source 1..22: mol_type = other RNA
gtgctttctcaacactgtgttc

SEQ ID NO: 143986 - RNA, 22 nt, synthetic construct
  source 1..22: mol_type = other RNA
gtgcttttaatactttcacact

SEQ ID NO: 143987 - RNA, 22 nt, synthetic construct
  source 1..22: mol_type = other RNA
gtgcttttctcgtgcatgtctg

SEQ ID NO: 143988 - RNA, 22 nt, synthetic construct
  source 1..22: mol_type = other RNA
gtgcttttgctgcatcccaagg

SEQ ID NO: 143989 - RNA, 22 nt, synthetic construct
  source 1..22: mol_type = other RNA
gtgctttttactttgcgaaaca

SEQ ID NO: 143990 - RNA, 22 nt, synthetic construct
  source 1..22: mol_type = other RNA
gtgctttttgtatcctgtttga

SEQ ID NO: 143991 - RNA, 22 nt, synthetic construct
  source 1..22: mol_type = other RNA
gtgcttttttggtgtttttcta

SEQ ID NO: 143992 - RNA, 22 nt, synthetic construct
  source 1..22: mol_type = other RNA
gtggaaaaactgcagcaattat

SEQ ID NO: 143993 - RNA, 22 nt, synthetic construct
  source 1..22: mol_type = other RNA
gtggaaaaatataggaacatat

SEQ ID NO: 143994 - RNA, 22 nt, synthetic construct
  source 1..22: mol_type = other RNA
gtggaaaatgtatgattttcta

SEQ ID NO: 143995 - RNA, 22 nt, synthetic construct
  source 1..22: mol_type = other RNA
gtggaaacaactcaaacgtcca

SEQ ID NO: 143996 - RNA, 22 nt, synthetic construct
  source 1..22: mol_type = other RNA
gtggaaagagccagcctgatga

SEQ ID NO: 143997 - RNA, 22 nt, synthetic construct
  source 1..22: mol_type = other RNA
gtggaaatacttgaacattctg

SEQ ID NO: 143998 - RNA, 22 nt, synthetic construct
  source 1..22: mol_type = other RNA
gtggaaattaaacacacccttg

SEQ ID NO: 143999 - RNA, 22 nt, synthetic construct
  source 1..22: mol_type = other RNA
gtggaacataatctttggtgct

SEQ ID NO: 144000 - RNA, 22 nt, synthetic construct
  source 1..22: mol_type = other RNA
gtggaactctgtcatggtgtgt

SEQ ID NO: 144001 - RNA, 22 nt, synthetic construct
  source 1..22: mol_type = other RNA
gtggaagaatcaggtctctttg

SEQ ID NO: 144002 - RNA, 22 nt, synthetic construct
  source 1..22: mol_type = other RNA
gtggaagcacagtctctgcaga

SEQ ID NO: 144003 - RNA, 22 nt, synthetic construct
  source 1..22: mol_type = other RNA
gtggaagcagaactaagacccc

SEQ ID NO: 144004 - RNA, 22 nt, synthetic construct
  source 1..22: mol_type = other RNA
gtggaagctgtccttctcgtgt

SEQ ID NO: 144005 - RNA, 22 nt, synthetic construct
  source 1..22: mol_type = other RNA
gtggaaggcctgatagctgtgg

SEQ ID NO: 144006 - RNA, 22 nt, synthetic construct
  source 1..22: mol_type = other RNA
gtggaaggccttctcctccaac

SEQ ID NO: 144007 - RNA, 22 nt, synthetic construct
  source 1..22: mol_type = other RNA
gtggaatcattccgtatatatt

SEQ ID NO: 144008 - RNA, 22 nt, synthetic construct
  source 1..22: mol_type = other RNA
gtggaatggtcaatttcatcgt

SEQ ID NO: 144009 - RNA, 22 nt, synthetic construct
  source 1..22: mol_type = other RNA
gtggaattaactccaggggaca

SEQ ID NO: 144010 - RNA, 22 nt, synthetic construct
  source 1..22: mol_type = other RNA
gtggacaaaaaacgcggcactt

SEQ ID NO: 144011 - RNA, 22 nt, synthetic construct
  source 1..22: mol_type = other RNA
gtggacacactgaaacaatcgc

SEQ ID NO: 144012 - RNA, 22 nt, synthetic construct
  source 1..22: mol_type = other RNA
gtggaccatgttttaggagtca

SEQ ID NO: 144013 - RNA, 22 nt, synthetic construct
  source 1..22: mol_type = other RNA
gtggactatgtaggcacattca

SEQ ID NO: 144014 - RNA, 22 nt, synthetic construct
  source 1..22: mol_type = other RNA
gtggactgtgagggagatattt

SEQ ID NO: 144015 - RNA, 22 nt, synthetic construct
  source 1..22: mol_type = other RNA
gtggactttaggctgttcaatt

SEQ ID NO: 144016 - RNA, 22 nt, synthetic construct
  source 1..22: mol_type = other RNA
gtggagaattactaaaattcca

SEQ ID NO: 144017 - RNA, 22 nt, synthetic construct
  source 1..22: mol_type = other RNA
gtggagataaagagcaggtgga

SEQ ID NO: 144018 - RNA, 22 nt, synthetic construct
  source 1..22: mol_type = other RNA
gtggagatggggacttgctctc

SEQ ID NO: 144019 - RNA, 22 nt, synthetic construct
  source 1..22: mol_type = other RNA
gtggagcctgctctgcagagac

SEQ ID NO: 144020 - RNA, 22 nt, synthetic construct
  source 1..22: mol_type = other RNA
gtggagcggtgtcttattgttt

SEQ ID NO: 144021 - RNA, 22 nt, synthetic construct
  source 1..22: mol_type = other RNA
gtggaggcagtaccattcccct

SEQ ID NO: 144022 - RNA, 22 nt, synthetic construct
  source 1..22: mol_type = other RNA
gtggaggggcaggaaaggtggg

SEQ ID NO: 144023 - RNA, 22 nt, synthetic construct
  source 1..22: mol_type = other RNA
gtggagtattctagttctagct

SEQ ID NO: 144024 - RNA, 22 nt, synthetic construct
  source 1..22: mol_type = other RNA
gtggagtccaaccaatcgcagg

SEQ ID NO: 144025 - RNA, 22 nt, synthetic construct
  source 1..22: mol_type = other RNA
gtggagtcctgtcagtttctga

SEQ ID NO: 144026 - RNA, 22 nt, synthetic construct
  source 1..22: mol_type = other RNA
gtggagtgcgagtgtgaacgat

SEQ ID NO: 144027 - RNA, 22 nt, synthetic construct
  source 1..22: mol_type = other RNA
gtggagtggaggggcaggaaag

SEQ ID NO: 144028 - RNA, 22 nt, synthetic construct
  source 1..22: mol_type = other RNA
gtggagtggcatgatctcacgt

SEQ ID NO: 144029 - RNA, 22 nt, synthetic construct
  source 1..22: mol_type = other RNA
gtggagtggggcacctaaaagg

SEQ ID NO: 144030 - RNA, 22 nt, synthetic construct
  source 1..22: mol_type = other RNA
gtggagtggtggatagagagat

SEQ ID NO: 144031 - RNA, 22 nt, synthetic construct
  source 1..22: mol_type = other RNA
gtggagttctgctcttgtcgcc

SEQ ID NO: 144032 - RNA, 22 nt, synthetic construct
  source 1..22: mol_type = other RNA
gtggagttggtgcaaggataaa

SEQ ID NO: 144033 - RNA, 22 nt, synthetic construct
  source 1..22: mol_type = other RNA
gtggatagagagattcaagaaa

SEQ ID NO: 144034 - RNA, 22 nt, synthetic construct
  source 1..22: mol_type = other RNA
gtggatagtgctttttactttg

SEQ ID NO: 144035 - RNA, 22 nt, synthetic construct
  source 1..22: mol_type = other RNA
gtggatatctgaggtcaggagc

SEQ ID NO: 144036 - RNA, 22 nt, synthetic construct
  source 1..22: mol_type = other RNA
gtggatgactaggctcctgaga

SEQ ID NO: 144037 - RNA, 22 nt, synthetic construct
  source 1..22: mol_type = other RNA
gtggatgagattaatgtaggtg

SEQ ID NO: 144038 - RNA, 22 nt, synthetic construct
  source 1..22: mol_type = other RNA
gtggatgcatgaggcatattat

SEQ ID NO: 144039 - RNA, 22 nt, synthetic construct
  source 1..22: mol_type = other RNA
gtggatgctggggacccctccc

SEQ ID NO: 144040 - RNA, 22 nt, synthetic construct
  source 1..22: mol_type = other RNA
gtggatgggtgtagggtttggc

SEQ ID NO: 144041 - RNA, 22 nt, synthetic construct
  source 1..22: mol_type = other RNA
gtggatgtccttaatgccaccg

SEQ ID NO: 144042 - RNA, 22 nt, synthetic construct
  source 1..22: mol_type = other RNA
gtggatgtgtgcacaacacatg

SEQ ID NO: 144043 - RNA, 22 nt, synthetic construct
  source 1..22: mol_type = other RNA
gtggatgttggtgagaacccag

SEQ ID NO: 144044 - RNA, 22 nt, synthetic construct
  source 1..22: mol_type = other RNA
gtggcaaatttatgtgaaaaga

SEQ ID NO: 144045 - RNA, 22 nt, synthetic construct
  source 1..22: mol_type = other RNA
gtggcacaatcatagctcacta

SEQ ID NO: 144046 - RNA, 22 nt, synthetic construct
  source 1..22: mol_type = other RNA
gtggcagccccgcttcagttgg

SEQ ID NO: 144047 - RNA, 22 nt, synthetic construct
  source 1..22: mol_type = other RNA
gtggcaggggctgcatcatggt

SEQ ID NO: 144048 - RNA, 22 nt, synthetic construct
  source 1..22: mol_type = other RNA
gtggcatcatactggaaggact

SEQ ID NO: 144049 - RNA, 22 nt, synthetic construct
  source 1..22: mol_type = other RNA
gtggcatctttgttacagcagc

SEQ ID NO: 144050 - RNA, 22 nt, synthetic construct
  source 1..22: mol_type = other RNA
gtggcatgatctcacgtcaccg

SEQ ID NO: 144051 - RNA, 22 nt, synthetic construct
  source 1..22: mol_type = other RNA
gtggcatgtctgtagttacaac

SEQ ID NO: 144052 - RNA, 22 nt, synthetic construct
  source 1..22: mol_type = other RNA
gtggcattaaggacatccacaa

SEQ ID NO: 144053 - RNA, 22 nt, synthetic construct
  source 1..22: mol_type = other RNA
gtggcatttcttacacattagg

SEQ ID NO: 144054 - RNA, 22 nt, synthetic construct
  source 1..22: mol_type = other RNA
gtggccaggaggaggagggtgc

SEQ ID NO: 144055 - RNA, 22 nt, synthetic construct
  source 1..22: mol_type = other RNA
gtggccagtgaccagtgtgatg

SEQ ID NO: 144056 - RNA, 22 nt, synthetic construct
  source 1..22: mol_type = other RNA
gtggcccacacctgcaatcaca

SEQ ID NO: 144057 - RNA, 22 nt, synthetic construct
  source 1..22: mol_type = other RNA
gtggcccccctgaaaaatgaga

SEQ ID NO: 144058 - RNA, 22 nt, synthetic construct
  source 1..22: mol_type = other RNA
gtggccctgttggcctggacac

SEQ ID NO: 144059 - RNA, 22 nt, synthetic construct
  source 1..22: mol_type = other RNA
gtggccgagggagacggcgagc

SEQ ID NO: 144060 - RNA, 22 nt, synthetic construct
  source 1..22: mol_type = other RNA
gtggcctaaatcaggatgtctt

SEQ ID NO: 144061 - RNA, 22 nt, synthetic construct
  source 1..22: mol_type = other RNA
gtggcctcaagcagtcctgcct

SEQ ID NO: 144062 - RNA, 22 nt, synthetic construct
  source 1..22: mol_type = other RNA
gtggcctcttcccttgtgcacc

SEQ ID NO: 144063 - RNA, 22 nt, synthetic construct
  source 1..22: mol_type = other RNA
gtggcgcagccatggctcactg

SEQ ID NO: 144064 - RNA, 22 nt, synthetic construct
  source 1..22: mol_type = other RNA
gtggcgctccctctgtgtgcat

SEQ ID NO: 144065 - RNA, 22 nt, synthetic construct
  source 1..22: mol_type = other RNA
gtggcgctgtttgcctgcgtcc

SEQ ID NO: 144066 - RNA, 22 nt, synthetic construct
  source 1..22: mol_type = other RNA
gtggcggatgccggtaatcaca

SEQ ID NO: 144067 - RNA, 22 nt, synthetic construct
  source 1..22: mol_type = other RNA
gtggcgtgtgcccaggctgact

SEQ ID NO: 144068 - RNA, 22 nt, synthetic construct
  source 1..22: mol_type = other RNA
gtggctaacaatcaaatttaac

SEQ ID NO: 144069 - RNA, 22 nt, synthetic construct
  source 1..22: mol_type = other RNA
gtggctaatgtggcttgcaagg

SEQ ID NO: 144070 - RNA, 22 nt, synthetic construct
  source 1..22: mol_type = other RNA
gtggctacaccctgggaaagcc

SEQ ID NO: 144071 - RNA, 22 nt, synthetic construct
  source 1..22: mol_type = other RNA
gtggctagacggaaaaacattc

SEQ ID NO: 144072 - RNA, 22 nt, synthetic construct
  source 1..22: mol_type = other RNA
gtggctagtgtgttgactgaca

SEQ ID NO: 144073 - RNA, 22 nt, synthetic construct
  source 1..22: mol_type = other RNA
gtggctcacagtgctccatagc

SEQ ID NO: 144074 - RNA, 22 nt, synthetic construct
  source 1..22: mol_type = other RNA
gtggctcacattgtatttctgt

SEQ ID NO: 144075 - RNA, 22 nt, synthetic construct
  source 1..22: mol_type = other RNA
gtggctcactcatttccgttgc

SEQ ID NO: 144076 - RNA, 22 nt, synthetic construct
  source 1..22: mol_type = other RNA
gtggctcatacttgctttatta

SEQ ID NO: 144077 - RNA, 22 nt, synthetic construct
  source 1..22: mol_type = other RNA
gtggctgacatgtgtaaaacat

SEQ ID NO: 144078 - RNA, 22 nt, synthetic construct
  source 1..22: mol_type = other RNA
gtggctgcaccattttttcacc

SEQ ID NO: 144079 - RNA, 22 nt, synthetic construct
  source 1..22: mol_type = other RNA
gtggctggcactttcctgataa

SEQ ID NO: 144080 - RNA, 22 nt, synthetic construct
  source 1..22: mol_type = other RNA
gtggctgtcaaaaatgtgtcta

SEQ ID NO: 144081 - RNA, 22 nt, synthetic construct
  source 1..22: mol_type = other RNA
gtggcttcctaactggtctcct

SEQ ID NO: 144082 - RNA, 22 nt, synthetic construct
  source 1..22: mol_type = other RNA
gtggcttctcaaactgtgtgct

SEQ ID NO: 144083 - RNA, 22 nt, synthetic construct
  source 1..22: mol_type = other RNA
gtggcttgcaaggcccaccatg

SEQ ID NO: 144084 - RNA, 22 nt, synthetic construct
  source 1..22: mol_type = other RNA
gtggcttgggtgacctcatgta

SEQ ID NO: 144085 - RNA, 22 nt, synthetic construct
  source 1..22: mol_type = other RNA
gtggcttgtggctacaccctgg

SEQ ID NO: 144086 - RNA, 22 nt, synthetic construct
  source 1..22: mol_type = other RNA
gtggctttaaggcgcagacaca

SEQ ID NO: 144087 - RNA, 22 nt, synthetic construct
  source 1..22: mol_type = other RNA
gtgggaagcaaaggattcgggg

SEQ ID NO: 144088 - RNA, 22 nt, synthetic construct
  source 1..22: mol_type = other RNA
gtgggaagtggagtgcgagtgt

SEQ ID NO: 144089 - RNA, 22 nt, synthetic construct
  source 1..22: mol_type = other RNA
gtgggaattcagtcaccaaacg

SEQ ID NO: 144090 - RNA, 22 nt, synthetic construct
  source 1..22: mol_type = other RNA
gtgggaccccgtctctgcaaaa

SEQ ID NO: 144091 - RNA, 22 nt, synthetic construct
  source 1..22: mol_type = other RNA
gtgggactggagaacagtaaag

SEQ ID NO: 144092 - RNA, 22 nt, synthetic construct
  source 1..22: mol_type = other RNA
gtgggagaggcatgccgggaca

SEQ ID NO: 144093 - RNA, 22 nt, synthetic construct
  source 1..22: mol_type = other RNA
gtgggaggaggtcatactggag

SEQ ID NO: 144094 - RNA, 22 nt, synthetic construct
  source 1..22: mol_type = other RNA
gtgggatcaaaccatgttcatg

SEQ ID NO: 144095 - RNA, 22 nt, synthetic construct
  source 1..22: mol_type = other RNA
gtgggatctctgggctcactgc

SEQ ID NO: 144096 - RNA, 22 nt, synthetic construct
  source 1..22: mol_type = other RNA
gtgggcaaaaaagtcatgacct

SEQ ID NO: 144097 - RNA, 22 nt, synthetic construct
  source 1..22: mol_type = other RNA
gtgggcaacacaatgagacccc

SEQ ID NO: 144098 - RNA, 22 nt, synthetic construct
  source 1..22: mol_type = other RNA
gtgggcactgggagccctccag

SEQ ID NO: 144099 - RNA, 22 nt, synthetic construct
  source 1..22: mol_type = other RNA
gtgggccaccaagccctgcctt

SEQ ID NO: 144100 - RNA, 22 nt, synthetic construct
  source 1..22: mol_type = other RNA
gtgggcccagcagaaggtgagg

SEQ ID NO: 144101 - RNA, 22 nt, synthetic construct
  source 1..22: mol_type = other RNA
gtgggccttgcaagccacatta

SEQ ID NO: 144102 - RNA, 22 nt, synthetic construct
  source 1..22: mol_type = other RNA
gtgggctttgagaaaggtttct

SEQ ID NO: 144103 - RNA, 22 nt, synthetic construct
  source 1..22: mol_type = other RNA
gtggggaatgctcataattaaa

SEQ ID NO: 144104 - RNA, 22 nt, synthetic construct
  source 1..22: mol_type = other RNA
gtggggacagctcaattaagca

SEQ ID NO: 144105 - RNA, 22 nt, synthetic construct
  source 1..22: mol_type = other RNA
gtggggactttgtggcctcttc

SEQ ID NO: 144106 - RNA, 22 nt, synthetic construct
  source 1..22: mol_type = other RNA
gtggggcacctaaaaggttgct

SEQ ID NO: 144107 - RNA, 22 nt, synthetic construct
  source 1..22: mol_type = other RNA
gtgggggcatcaaagctaccct

SEQ ID NO: 144108 - RNA, 22 nt, synthetic construct
  source 1..22: mol_type = other RNA
gtgggggctcacatctgtaatc

SEQ ID NO: 144109 - RNA, 22 nt, synthetic construct
  source 1..22: mol_type = other RNA
gtggggggatgtagaaggatat

SEQ ID NO: 144110 - RNA, 22 nt, synthetic construct
  source 1..22: mol_type = other RNA
gtgggtagaagcagcaagggtg

SEQ ID NO: 144111 - RNA, 22 nt, synthetic construct
  source 1..22: mol_type = other RNA
gtgggtattttgttgttgttgt

SEQ ID NO: 144112 - RNA, 22 nt, synthetic construct
  source 1..22: mol_type = other RNA
gtgggtcagctagtgtgtctga

SEQ ID NO: 144113 - RNA, 22 nt, synthetic construct
  source 1..22: mol_type = other RNA
gtgggtcgggtgtcagaaacca

SEQ ID NO: 144114 - RNA, 22 nt, synthetic construct
  source 1..22: mol_type = other RNA
gtgggtggatgggtgtagggtt

SEQ ID NO: 144115 - RNA, 22 nt, synthetic construct
  source 1..22: mol_type = other RNA
gtgggttaaaagttagctggca

SEQ ID NO: 144116 - RNA, 22 nt, synthetic construct
  source 1..22: mol_type = other RNA
gtgggttcaattatgtggaaaa

SEQ ID NO: 144117 - RNA, 22 nt, synthetic construct
  source 1..22: mol_type = other RNA
gtggtaactagatgcctcgaag

SEQ ID NO: 144118 - RNA, 22 nt, synthetic construct
  source 1..22: mol_type = other RNA
gtggtaactgatgtgaggatct

SEQ ID NO: 144119 - RNA, 22 nt, synthetic construct
  source 1..22: mol_type = other RNA
gtggtaaggactgaagtccttt

SEQ ID NO: 144120 - RNA, 22 nt, synthetic construct
  source 1..22: mol_type = other RNA
gtggtaaggagccaaacatcat

SEQ ID NO: 144121 - RNA, 22 nt, synthetic construct
  source 1..22: mol_type = other RNA
gtggtagggagggggctgagga

SEQ ID NO: 144122 - RNA, 22 nt, synthetic construct
  source 1..22: mol_type = other RNA
gtggtaggtgtgtgtaatccca

SEQ ID NO: 144123 - RNA, 22 nt, synthetic construct
  source 1..22: mol_type = other RNA
gtggtagtaaggatcgttagta

SEQ ID NO: 144124 - RNA, 22 nt, synthetic construct
  source 1..22: mol_type = other RNA
gtggtagttacacaagtgtttc

SEQ ID NO: 144125 - RNA, 22 nt, synthetic construct
  source 1..22: mol_type = other RNA
gtggtatgcactgtactcctag

SEQ ID NO: 144126 - RNA, 22 nt, synthetic construct
  source 1..22: mol_type = other RNA
gtggtatgggagatgtgtaatt

SEQ ID NO: 144127 - RNA, 22 nt, synthetic construct
  source 1..22: mol_type = other RNA
gtggtattctatcatcaagaca

SEQ ID NO: 144128 - RNA, 22 nt, synthetic construct
  source 1..22: mol_type = other RNA
gtggtatttaatctgtcagcag

SEQ ID NO: 144129 - RNA, 22 nt, synthetic construct
  source 1..22: mol_type = other RNA
gtggtcacactttttgtgagtt

SEQ ID NO: 144130 - RNA, 22 nt, synthetic construct
  source 1..22: mol_type = other RNA
gtggtcactgtttggacagtaa

SEQ ID NO: 144131 - RNA, 22 nt, synthetic construct
  source 1..22: mol_type = other RNA
gtggtccctgctactcaggaga

SEQ ID NO: 144132 - RNA, 22 nt, synthetic construct
  source 1..22: mol_type = other RNA
gtggtctcaccctcaggactct

SEQ ID NO: 144133 - RNA, 22 nt, synthetic construct
  source 1..22: mol_type = other RNA
gtggtctcagctcctcagaagg

SEQ ID NO: 144134 - RNA, 22 nt, synthetic construct
  source 1..22: mol_type = other RNA
gtggtctcttcgagggggctga

SEQ ID NO: 144135 - RNA, 22 nt, synthetic construct
  source 1..22: mol_type = other RNA
gtggtcttaagagactctcaag

SEQ ID NO: 144136 - RNA, 22 nt, synthetic construct
  source 1..22: mol_type = other RNA
gtggtcttgtctcaacctttgc

SEQ ID NO: 144137 - RNA, 22 nt, synthetic construct
  source 1..22: mol_type = other RNA
gtggtgcaatcacggctgatta

SEQ ID NO: 144138 - RNA, 22 nt, synthetic construct
  source 1..22: mol_type = other RNA
gtggtgcaatgataggtcactg

SEQ ID NO: 144139 - RNA, 22 nt, synthetic construct
  source 1..22: mol_type = other RNA
gtggtgctgcacgtctgtggtc

SEQ ID NO: 144140 - RNA, 22 nt, synthetic construct
  source 1..22: mol_type = other RNA
gtggtgctggactggagggatg

SEQ ID NO: 144141 - RNA, 22 nt, synthetic construct
  source 1..22: mol_type = other RNA
gtggtgcttaattcaaacaaat

SEQ ID NO: 144142 - RNA, 22 nt, synthetic construct
  source 1..22: mol_type = other RNA
gtggtgcttgaactgctggtct

SEQ ID NO: 144143 - RNA, 22 nt, synthetic construct
  source 1..22: mol_type = other RNA
gtggtgcttttgctgcatccca

SEQ ID NO: 144144 - RNA, 22 nt, synthetic construct
  source 1..22: mol_type = other RNA
gtggtggatagagagattcaag

SEQ ID NO: 144145 - RNA, 22 nt, synthetic construct
  source 1..22: mol_type = other RNA
gtggtggcggatgccggtaatc

SEQ ID NO: 144146 - RNA, 22 nt, synthetic construct
  source 1..22: mol_type = other RNA
gtggtggtagtaaggatcgtta

SEQ ID NO: 144147 - RNA, 22 nt, synthetic construct
  source 1..22: mol_type = other RNA
gtggtggtatgcactgtactcc

SEQ ID NO: 144148 - RNA, 22 nt, synthetic construct
  source 1..22: mol_type = other RNA
gtggtggtctcaccctcaggac

SEQ ID NO: 144149 - RNA, 22 nt, synthetic construct
  source 1..22: mol_type = other RNA
gtggtgtggcatgtctgtagtt

SEQ ID NO: 144150 - RNA, 22 nt, synthetic construct
  source 1..22: mol_type = other RNA
gtggtgtggtcttgtctcaacc

SEQ ID NO: 144151 - RNA, 22 nt, synthetic construct
  source 1..22: mol_type = other RNA
gtggtgtgtgactgtagtccct

SEQ ID NO: 144152 - RNA, 22 nt, synthetic construct
  source 1..22: mol_type = other RNA
gtggttaggaaaatacatgagg

SEQ ID NO: 144153 - RNA, 22 nt, synthetic construct
  source 1..22: mol_type = other RNA
gtggttatagccataagagtcc

SEQ ID NO: 144154 - RNA, 22 nt, synthetic construct
  source 1..22: mol_type = other RNA
gtggttattgagtctgtagggt

SEQ ID NO: 144155 - RNA, 22 nt, synthetic construct
  source 1..22: mol_type = other RNA
gtggttcacacctgtagtccca

SEQ ID NO: 144156 - RNA, 22 nt, synthetic construct
  source 1..22: mol_type = other RNA
gtggttcatatttcccttttgg

SEQ ID NO: 144157 - RNA, 22 nt, synthetic construct
  source 1..22: mol_type = other RNA
gtggttccatttgttttgtgtt

SEQ ID NO: 144158 - RNA, 22 nt, synthetic construct
  source 1..22: mol_type = other RNA
gtggttctgcctaatctctagg

SEQ ID NO: 144159 - RNA, 22 nt, synthetic construct
  source 1..22: mol_type = other RNA
gtggttctgcgtgttattttaa

SEQ ID NO: 144160 - RNA, 22 nt, synthetic construct
  source 1..22: mol_type = other RNA
gtggttgacccataaactgaac

SEQ ID NO: 144161 - RNA, 22 nt, synthetic construct
  source 1..22: mol_type = other RNA
gtggttggaaaacttttaactg

SEQ ID NO: 144162 - RNA, 22 nt, synthetic construct
  source 1..22: mol_type = other RNA
gtggttgtgcttcgaggtcgca

SEQ ID NO: 144163 - RNA, 22 nt, synthetic construct
  source 1..22: mol_type = other RNA
gtggttgtggaattaactccag

SEQ ID NO: 144164 - RNA, 22 nt, synthetic construct
  source 1..22: mol_type = other RNA
gtggtttattcatataatggag

SEQ ID NO: 144165 - RNA, 22 nt, synthetic construct
  source 1..22: mol_type = other RNA
gtggtttcttgaatctctctat

SEQ ID NO: 144166 - RNA, 22 nt, synthetic construct
  source 1..22: mol_type = other RNA
gtggtttgaaccccagaaggtt

SEQ ID NO: 144167 - RNA, 22 nt, synthetic construct
  source 1..22: mol_type = other RNA
gtggtttgaagcttcacttctc

SEQ ID NO: 144168 - RNA, 22 nt, synthetic construct
  source 1..22: mol_type = other RNA
gtggtttgccttttcactctta

SEQ ID NO: 144169 - RNA, 22 nt, synthetic construct
  source 1..22: mol_type = other RNA
gtggttttaacctcttgaagtc

SEQ ID NO: 144170 - RNA, 22 nt, synthetic construct
  source 1..22: mol_type = other RNA
gtggtttttggttcacttgaaa

SEQ ID NO: 144171 - RNA, 22 nt, synthetic construct
  source 1..22: mol_type = other RNA
gtgtaaaacatctggaaggaaa

SEQ ID NO: 144172 - RNA, 22 nt, synthetic construct
  source 1..22: mol_type = other RNA
gtgtaaaaggctaattttttct

SEQ ID NO: 144173 - RNA, 22 nt, synthetic construct
  source 1..22: mol_type = other RNA
gtgtaaaatacaacagcacctt

SEQ ID NO: 144174 - RNA, 22 nt, synthetic construct
  source 1..22: mol_type = other RNA
gtgtaaacactgttctgcgtgg

SEQ ID NO: 144175 - RNA, 22 nt, synthetic construct
  source 1..22: mol_type = other RNA
gtgtaaactgttggaaaaatcg

SEQ ID NO: 144176 - RNA, 22 nt, synthetic construct
  source 1..22: mol_type = other RNA
gtgtaaagtttctctctccctg

SEQ ID NO: 144177 - RNA, 22 nt, synthetic construct
  source 1..22: mol_type = other RNA
gtgtaacatacacatcagattt

SEQ ID NO: 144178 - RNA, 22 nt, synthetic construct
  source 1..22: mol_type = other RNA
gtgtaactaccactgaggtcaa

SEQ ID NO: 144179 - RNA, 22 nt, synthetic construct
  source 1..22: mol_type = other RNA
gtgtaagaaatgccacattttt

SEQ ID NO: 144180 - RNA, 22 nt, synthetic construct
  source 1..22: mol_type = other RNA
gtgtaagagattaattcagtca

SEQ ID NO: 144181 - RNA, 22 nt, synthetic construct
  source 1..22: mol_type = other RNA
gtgtaagcacacatgaacctgc

SEQ ID NO: 144182 - RNA, 22 nt, synthetic construct
  source 1..22: mol_type = other RNA
gtgtaaggtgtttggtgaattt

SEQ ID NO: 144183 - RNA, 22 nt, synthetic construct
  source 1..22: mol_type = other RNA
gtgtaatactgtagaatgtttt

SEQ ID NO: 144184 - RNA, 22 nt, synthetic construct
  source 1..22: mol_type = other RNA
gtgtaattgtaccttggagaga

SEQ ID NO: 144185 - RNA, 22 nt, synthetic construct
  source 1..22: mol_type = other RNA
gtgtacaatggggctttactgt

SEQ ID NO: 144186 - RNA, 22 nt, synthetic construct
  source 1..22: mol_type = other RNA
gtgtacaattaggctgtttgag

SEQ ID NO: 144187 - RNA, 22 nt, synthetic construct
  source 1..22: mol_type = other RNA
gtgtacaattcggtggcattaa

SEQ ID NO: 144188 - RNA, 22 nt, synthetic construct
  source 1..22: mol_type = other RNA
gtgtaccaaaagtcctgttctt

SEQ ID NO: 144189 - RNA, 22 nt, synthetic construct
  source 1..22: mol_type = other RNA
gtgtacccgtgtgttttgttgt

SEQ ID NO: 144190 - RNA, 22 nt, synthetic construct
  source 1..22: mol_type = other RNA
gtgtactagtctccatacaagg

SEQ ID NO: 144191 - RNA, 22 nt, synthetic construct
  source 1..22: mol_type = other RNA
gtgtactgaaaccagtgctctc

SEQ ID NO: 144192 - RNA, 22 nt, synthetic construct
  source 1..22: mol_type = other RNA
gtgtagaaatgtggagataaag

SEQ ID NO: 144193 - RNA, 22 nt, synthetic construct
  source 1..22: mol_type = other RNA
gtgtagaggtgaagttaagggc

SEQ ID NO: 144194 - RNA, 22 nt, synthetic construct
  source 1..22: mol_type = other RNA
gtgtagccacaagccacatgtg

SEQ ID NO: 144195 - RNA, 22 nt, synthetic construct
  source 1..22: mol_type = other RNA
gtgtagcgggaaaaaataatat

SEQ ID NO: 144196 - RNA, 22 nt, synthetic construct
  source 1..22: mol_type = other RNA
gtgtagctgtggctcactcatt

SEQ ID NO: 144197 - RNA, 22 nt, synthetic construct
  source 1..22: mol_type = other RNA
gtgtaggaaggaacacacacct

SEQ ID NO: 144198 - RNA, 22 nt, synthetic construct
  source 1..22: mol_type = other RNA
gtgtagggggaaaactccaagt

SEQ ID NO: 144199 - RNA, 22 nt, synthetic construct
  source 1..22: mol_type = other RNA
gtgtagggtttggcagtttaag

SEQ ID NO: 144200 - RNA, 22 nt, synthetic construct
  source 1..22: mol_type = other RNA
gtgtagtcagacacactagctg

SEQ ID NO: 144201 - RNA, 22 nt, synthetic construct
  source 1..22: mol_type = other RNA
gtgtagtcagtgaagatgctga

SEQ ID NO: 144202 - RNA, 22 nt, synthetic construct
  source 1..22: mol_type = other RNA
gtgtagtggtgtgtgactgtag

SEQ ID NO: 144203 - RNA, 22 nt, synthetic construct
  source 1..22: mol_type = other RNA
gtgtagttattattgtcattac

SEQ ID NO: 144204 - RNA, 22 nt, synthetic construct
  source 1..22: mol_type = other RNA
gtgtagttcatcagcataaata

SEQ ID NO: 144205 - RNA, 22 nt, synthetic construct
  source 1..22: mol_type = other RNA
gtgtagttctggtgtcgtttat

SEQ ID NO: 144206 - RNA, 22 nt, synthetic construct
  source 1..22: mol_type = other RNA
gtgtataacccgttttttcctt

SEQ ID NO: 144207 - RNA, 22 nt, synthetic construct
  source 1..22: mol_type = other RNA
gtgtatactgggtgtgatggcg

SEQ ID NO: 144208 - RNA, 22 nt, synthetic construct
  source 1..22: mol_type = other RNA
gtgtatatggtaaaatgtacat

SEQ ID NO: 144209 - RNA, 22 nt, synthetic construct
  source 1..22: mol_type = other RNA
gtgtatcagatgcttctagcca

SEQ ID NO: 144210 - RNA, 22 nt, synthetic construct
  source 1..22: mol_type = other RNA
gtgtatgatcaaagtgaaaggc

SEQ ID NO: 144211 - RNA, 22 nt, synthetic construct
  source 1..22: mol_type = other RNA
gtgtatgatcttattaatgtgt

SEQ ID NO: 144212 - RNA, 22 nt, synthetic construct
  source 1..22: mol_type = other RNA
gtgtatgatttctaggccctaa

SEQ ID NO: 144213 - RNA, 22 nt, synthetic construct
  source 1..22: mol_type = other RNA
gtgtatgcagggaaatcattca

SEQ ID NO: 144214 - RNA, 22 nt, synthetic construct
  source 1..22: mol_type = other RNA
gtgtatgtgtagtcagtgaaga

SEQ ID NO: 144215 - RNA, 22 nt, synthetic construct
  source 1..22: mol_type = other RNA
gtgtatgttacacttccagtac

SEQ ID NO: 144216 - RNA, 22 nt, synthetic construct
  source 1..22: mol_type = other RNA
gtgtattattctaaacacacgg

SEQ ID NO: 144217 - RNA, 22 nt, synthetic construct
  source 1..22: mol_type = other RNA
gtgtattgagtgtagctgtggc

SEQ ID NO: 144218 - RNA, 22 nt, synthetic construct
  source 1..22: mol_type = other RNA
gtgtattgtaccttgatttatg

SEQ ID NO: 144219 - RNA, 22 nt, synthetic construct
  source 1..22: mol_type = other RNA
gtgtatttagggagcatatata

SEQ ID NO: 144220 - RNA, 22 nt, synthetic construct
  source 1..22: mol_type = other RNA
gtgtatttttagtagggacggg

SEQ ID NO: 144221 - RNA, 22 nt, synthetic construct
  source 1..22: mol_type = other RNA
gtgtcaagtacaactaataatt

SEQ ID NO: 144222 - RNA, 22 nt, synthetic construct
  source 1..22: mol_type = other RNA
gtgtcactggatagaagtgtat

SEQ ID NO: 144223 - RNA, 22 nt, synthetic construct
  source 1..22: mol_type = other RNA
gtgtcagaaaccatcgttcaca

SEQ ID NO: 144224 - RNA, 22 nt, synthetic construct
  source 1..22: mol_type = other RNA
gtgtcagaattccatcagtggt

SEQ ID NO: 144225 - RNA, 22 nt, synthetic construct
  source 1..22: mol_type = other RNA
gtgtcagtgacagttctgtgaa

SEQ ID NO: 144226 - RNA, 22 nt, synthetic construct
  source 1..22: mol_type = other RNA
gtgtcatttttaagaaatcgtt

SEQ ID NO: 144227 - RNA, 22 nt, synthetic construct
  source 1..22: mol_type = other RNA
gtgtcatttttgtattctgacc

SEQ ID NO: 144228 - RNA, 22 nt, synthetic construct
  source 1..22: mol_type = other RNA
gtgtccacacaatggtcagagt

SEQ ID NO: 144229 - RNA, 22 nt, synthetic construct
  source 1..22: mol_type = other RNA
gtgtccaggccaacagggccac

SEQ ID NO: 144230 - RNA, 22 nt, synthetic construct
  source 1..22: mol_type = other RNA
gtgtccatctcccatcactaga

SEQ ID NO: 144231 - RNA, 22 nt, synthetic construct
  source 1..22: mol_type = other RNA
gtgtcctcaggctccaggtaga

SEQ ID NO: 144232 - RNA, 22 nt, synthetic construct
  source 1..22: mol_type = other RNA
gtgtcctgaatgatttccctgc

SEQ ID NO: 144233 - RNA, 22 nt, synthetic construct
  source 1..22: mol_type = other RNA
gtgtccttctgagaaggcgaaa

SEQ ID NO: 144234 - RNA, 22 nt, synthetic construct
  source 1..22: mol_type = other RNA
gtgtcctttgatgcacaaaagt

SEQ ID NO: 144235 - RNA, 22 nt, synthetic construct
  source 1..22: mol_type = other RNA
gtgtcgagaaaaatggggatat

SEQ ID NO: 144236 - RNA, 22 nt, synthetic construct
  source 1..22: mol_type = other RNA
gtgtcgtttatttcttctccct

SEQ ID NO: 144237 - RNA, 22 nt, synthetic construct
  source 1..22: mol_type = other RNA
gtgtctaatgggtacagggttt

SEQ ID NO: 144238 - RNA, 22 nt, synthetic construct
  source 1..22: mol_type = other RNA
gtgtctagtgaatgagaccaaa

SEQ ID NO: 144239 - RNA, 22 nt, synthetic construct
  source 1..22: mol_type = other RNA
gtgtctcataaagccggattcc

SEQ ID NO: 144240 - RNA, 22 nt, synthetic construct
  source 1..22: mol_type = other RNA
gtgtctcatttaataactaaac

SEQ ID NO: 144241 - RNA, 22 nt, synthetic construct
  source 1..22: mol_type = other RNA
gtgtctccataccccctggaaa

SEQ ID NO: 144242 - RNA, 22 nt, synthetic construct
  source 1..22: mol_type = other RNA
gtgtctctgacatgagagctaa

SEQ ID NO: 144243 - RNA, 22 nt, synthetic construct
  source 1..22: mol_type = other RNA
gtgtctctgctctcaagtaatt

SEQ ID NO: 144244 - RNA, 22 nt, synthetic construct
  source 1..22: mol_type = other RNA
gtgtctgactacactgaaggga

SEQ ID NO: 144245 - RNA, 22 nt, synthetic construct
  source 1..22: mol_type = other RNA
gtgtctgatgtgtgtctctgct

SEQ ID NO: 144246 - RNA, 22 nt, synthetic construct
  source 1..22: mol_type = other RNA
gtgtctgcgccttaaagccaca

SEQ ID NO: 144247 - RNA, 22 nt, synthetic construct
  source 1..22: mol_type = other RNA
gtgtctgctacaggggcattcc

SEQ ID NO: 144248 - RNA, 22 nt, synthetic construct
  source 1..22: mol_type = other RNA
gtgtcttaatcctattttgtta

SEQ ID NO: 144249 - RNA, 22 nt, synthetic construct
  source 1..22: mol_type = other RNA
gtgtcttagtctgacttctctc

SEQ ID NO: 144250 - RNA, 22 nt, synthetic construct
  source 1..22: mol_type = other RNA
gtgtcttattgttttgatttgc

SEQ ID NO: 144251 - RNA, 22 nt, synthetic construct
  source 1..22: mol_type = other RNA
gtgtcttctgtttttcttagtc

SEQ ID NO: 144252 - RNA, 22 nt, synthetic construct
  source 1..22: mol_type = other RNA
gtgtctttttatattatgtgca

SEQ ID NO: 144253 - RNA, 22 nt, synthetic construct
  source 1..22: mol_type = other RNA
gtgtgaaaccaagcaagtaaaa

SEQ ID NO: 144254 - RNA, 22 nt, synthetic construct
  source 1..22: mol_type = other RNA
gtgtgaaagtattaaaagcaca

SEQ ID NO: 144255 - RNA, 22 nt, synthetic construct
  source 1..22: mol_type = other RNA
gtgtgaaccacgcatctggtct

SEQ ID NO: 144256 - RNA, 22 nt, synthetic construct
  source 1..22: mol_type = other RNA
gtgtgaacgatggtttctgaca

SEQ ID NO: 144257 - RNA, 22 nt, synthetic construct
  source 1..22: mol_type = other RNA
gtgtgaagaaggaatgtgcact

SEQ ID NO: 144258 - RNA, 22 nt, synthetic construct
  source 1..22: mol_type = other RNA
gtgtgaagattaagcacatctg

SEQ ID NO: 144259 - RNA, 22 nt, synthetic construct
  source 1..22: mol_type = other RNA
gtgtgaagttgggcttaacatt

SEQ ID NO: 144260 - RNA, 22 nt, synthetic construct
  source 1..22: mol_type = other RNA
gtgtgaataggaaagtgacaga

SEQ ID NO: 144261 - RNA, 22 nt, synthetic construct
  source 1..22: mol_type = other RNA
gtgtgaatgaggagtgaatttt

SEQ ID NO: 144262 - RNA, 22 nt, synthetic construct
  source 1..22: mol_type = other RNA
gtgtgaatggaaaattcaaaca

SEQ ID NO: 144263 - RNA, 22 nt, synthetic construct
  source 1..22: mol_type = other RNA
gtgtgacaaaaagtaggggtaa

SEQ ID NO: 144264 - RNA, 22 nt, synthetic construct
  source 1..22: mol_type = other RNA
gtgtgaccacattcccaaatgt

SEQ ID NO: 144265 - RNA, 22 nt, synthetic construct
  source 1..22: mol_type = other RNA
gtgtgactgtagtccctgctac

SEQ ID NO: 144266 - RNA, 22 nt, synthetic construct
  source 1..22: mol_type = other RNA
gtgtgagattgatagatcatat

SEQ ID NO: 144267 - RNA, 22 nt, synthetic construct
  source 1..22: mol_type = other RNA
gtgtgagcaaaaatacagctcc

SEQ ID NO: 144268 - RNA, 22 nt, synthetic construct
  source 1..22: mol_type = other RNA
gtgtgagccacagtgcctggcc

SEQ ID NO: 144269 - RNA, 22 nt, synthetic construct
  source 1..22: mol_type = other RNA
gtgtgagccaccgtgccgggct

SEQ ID NO: 144270 - RNA, 22 nt, synthetic construct
  source 1..22: mol_type = other RNA
gtgtgagccactacgcccggcc

SEQ ID NO: 144271 - RNA, 22 nt, synthetic construct
  source 1..22: mol_type = other RNA
gtgtgagctctagccttgtact

SEQ ID NO: 144272 - RNA, 22 nt, synthetic construct
  source 1..22: mol_type = other RNA
gtgtgataactgatatgaggga

SEQ ID NO: 144273 - RNA, 22 nt, synthetic construct
  source 1..22: mol_type = other RNA
gtgtgatattggcataaagaca

SEQ ID NO: 144274 - RNA, 22 nt, synthetic construct
  source 1..22: mol_type = other RNA
gtgtgatcaggaaagatgaagt

SEQ ID NO: 144275 - RNA, 22 nt, synthetic construct
  source 1..22: mol_type = other RNA
gtgtgatctctgctcaccgcaa

SEQ ID NO: 144276 - RNA, 22 nt, synthetic construct
  source 1..22: mol_type = other RNA
gtgtgatggcgcatgcctgtgg

SEQ ID NO: 144277 - RNA, 22 nt, synthetic construct
  source 1..22: mol_type = other RNA
gtgtgatgggggtaagattgtg

SEQ ID NO: 144278 - RNA, 22 nt, synthetic construct
  source 1..22: mol_type = other RNA
gtgtgcaaaggattagaaagta

SEQ ID NO: 144279 - RNA, 22 nt, synthetic construct
  source 1..22: mol_type = other RNA
gtgtgcacaacacatgcacact

SEQ ID NO: 144280 - RNA, 22 nt, synthetic construct
  source 1..22: mol_type = other RNA
gtgtgcacctaataaaatgttt

SEQ ID NO: 144281 - RNA, 22 nt, synthetic construct
  source 1..22: mol_type = other RNA
gtgtgcacgtttgctttggagt

SEQ ID NO: 144282 - RNA, 22 nt, synthetic construct
  source 1..22: mol_type = other RNA
gtgtgcatgaccctgctatgca

SEQ ID NO: 144283 - RNA, 22 nt, synthetic construct
  source 1..22: mol_type = other RNA
gtgtgcatgcatgtctgtctgt

SEQ ID NO: 144284 - RNA, 22 nt, synthetic construct
  source 1..22: mol_type = other RNA
gtgtgcatgctcccatttggga

SEQ ID NO: 144285 - RNA, 22 nt, synthetic construct
  source 1..22: mol_type = other RNA
gtgtgcatgtgttgtgcacaca

SEQ ID NO: 144286 - RNA, 22 nt, synthetic construct
  source 1..22: mol_type = other RNA
gtgtgcccaaggaaggcagggt

SEQ ID NO: 144287 - RNA, 22 nt, synthetic construct
  source 1..22: mol_type = other RNA
gtgtgcccaggctgacttagag

SEQ ID NO: 144288 - RNA, 22 nt, synthetic construct
  source 1..22: mol_type = other RNA
gtgtgctcttttcatcactcac

SEQ ID NO: 144289 - RNA, 22 nt, synthetic construct
  source 1..22: mol_type = other RNA
gtgtgctgactagtacgtgcag

SEQ ID NO: 144290 - RNA, 22 nt, synthetic construct
  source 1..22: mol_type = other RNA
gtgtgcttacacacacgtttat

SEQ ID NO: 144291 - RNA, 22 nt, synthetic construct
  source 1..22: mol_type = other RNA
gtgtgcttctgataggaatatc

SEQ ID NO: 144292 - RNA, 22 nt, synthetic construct
  source 1..22: mol_type = other RNA
gtgtgcttggagtcacttgaca

SEQ ID NO: 144293 - RNA, 22 nt, synthetic construct
  source 1..22: mol_type = other RNA
gtgtgcttgggctcccttccag

SEQ ID NO: 144294 - RNA, 22 nt, synthetic construct
  source 1..22: mol_type = other RNA
gtgtggacacactgaaacaatc

SEQ ID NO: 144295 - RNA, 22 nt, synthetic construct
  source 1..22: mol_type = other RNA
gtgtggagtggggcacctaaaa

SEQ ID NO: 144296 - RNA, 22 nt, synthetic construct
  source 1..22: mol_type = other RNA
gtgtggcaggggctgcatcatg

SEQ ID NO: 144297 - RNA, 22 nt, synthetic construct
  source 1..22: mol_type = other RNA
gtgtggcatgtctgtagttaca

SEQ ID NO: 144298 - RNA, 22 nt, synthetic construct
  source 1..22: mol_type = other RNA
gtgtggcttctcaaactgtgtg

SEQ ID NO: 144299 - RNA, 22 nt, synthetic construct
  source 1..22: mol_type = other RNA
gtgtggctttaaggcgcagaca

SEQ ID NO: 144300 - RNA, 22 nt, synthetic construct
  source 1..22: mol_type = other RNA
gtgtgggccaccaagccctgcc

SEQ ID NO: 144301 - RNA, 22 nt, synthetic construct
  source 1..22: mol_type = other RNA
gtgtggtcttgtctcaaccttt

SEQ ID NO: 144302 - RNA, 22 nt, synthetic construct
  source 1..22: mol_type = other RNA
gtgtggtgctgcacgtctgtgg

SEQ ID NO: 144303 - RNA, 22 nt, synthetic construct
  source 1..22: mol_type = other RNA
gtgtggtggtctcaccctcagg

SEQ ID NO: 144304 - RNA, 22 nt, synthetic construct
  source 1..22: mol_type = other RNA
gtgtggttcatatttccctttt

SEQ ID NO: 144305 - RNA, 22 nt, synthetic construct
  source 1..22: mol_type = other RNA
gtgtggtttgccttttcactct

SEQ ID NO: 144306 - RNA, 22 nt, synthetic construct
  source 1..22: mol_type = other RNA
gtgtgtaaacactgttctgcgt

SEQ ID NO: 144307 - RNA, 22 nt, synthetic construct
  source 1..22: mol_type = other RNA
gtgtgtaagcacacatgaacct

SEQ ID NO: 144308 - RNA, 22 nt, synthetic construct
  source 1..22: mol_type = other RNA
gtgtgtataacccgttttttcc

SEQ ID NO: 144309 - RNA, 22 nt, synthetic construct
  source 1..22: mol_type = other RNA
gtgtgtccacacaatggtcaga

SEQ ID NO: 144310 - RNA, 22 nt, synthetic construct
  source 1..22: mol_type = other RNA
gtgtgtccaggccaacagggcc

SEQ ID NO: 144311 - RNA, 22 nt, synthetic construct
  source 1..22: mol_type = other RNA
gtgtgtcgagaaaaatggggat

SEQ ID NO: 144312 - RNA, 22 nt, synthetic construct
  source 1..22: mol_type = other RNA
gtgtgtctcataaagccggatt

SEQ ID NO: 144313 - RNA, 22 nt, synthetic construct
  source 1..22: mol_type = other RNA
gtgtgtctctgctctcaagtaa

SEQ ID NO: 144314 - RNA, 22 nt, synthetic construct
  source 1..22: mol_type = other RNA
gtgtgtctgactacactgaagg

SEQ ID NO: 144315 - RNA, 22 nt, synthetic construct
  source 1..22: mol_type = other RNA
gtgtgtctgcgccttaaagcca

SEQ ID NO: 144316 - RNA, 22 nt, synthetic construct
  source 1..22: mol_type = other RNA
gtgtgtgaatggaaaattcaaa

SEQ ID NO: 144317 - RNA, 22 nt, synthetic construct
  source 1..22: mol_type = other RNA
gtgtgtgactgtagtccctgct

SEQ ID NO: 144318 - RNA, 22 nt, synthetic construct
  source 1..22: mol_type = other RNA
gtgtgtgcaaaggattagaaag

SEQ ID NO: 144319 - RNA, 22 nt, synthetic construct
  source 1..22: mol_type = other RNA
gtgtgtggagtggggcacctaa

SEQ ID NO: 144320 - RNA, 22 nt, synthetic construct
  source 1..22: mol_type = other RNA
gtgtgtgtaagcacacatgaac

SEQ ID NO: 144321 - RNA, 22 nt, synthetic construct
  source 1..22: mol_type = other RNA
gtgtgtgtccaggccaacaggg

SEQ ID NO: 144322 - RNA, 22 nt, synthetic construct
  source 1..22: mol_type = other RNA
gtgtgtgttccttcctacacat

SEQ ID NO: 144323 - RNA, 22 nt, synthetic construct
  source 1..22: mol_type = other RNA
gtgtgttaaatttgattgttag

SEQ ID NO: 144324 - RNA, 22 nt, synthetic construct
  source 1..22: mol_type = other RNA
gtgtgttccagacaaaaatttt

SEQ ID NO: 144325 - RNA, 22 nt, synthetic construct
  source 1..22: mol_type = other RNA
gtgtgttccttcctacacatat

SEQ ID NO: 144326 - RNA, 22 nt, synthetic construct
  source 1..22: mol_type = other RNA
gtgtgttctctttttgacagat

SEQ ID NO: 144327 - RNA, 22 nt, synthetic construct
  source 1..22: mol_type = other RNA
gtgtgttctgccttgaggtgat

SEQ ID NO: 144328 - RNA, 22 nt, synthetic construct
  source 1..22: mol_type = other RNA
gtgtgttgactgacataactgt

SEQ ID NO: 144329 - RNA, 22 nt, synthetic construct
  source 1..22: mol_type = other RNA
gtgtgtttaatttccacccatg

SEQ ID NO: 144330 - RNA, 22 nt, synthetic construct
  source 1..22: mol_type = other RNA
gtgtgtttagaataatacactt

SEQ ID NO: 144331 - RNA, 22 nt, synthetic construct
  source 1..22: mol_type = other RNA
gtgtgtttcgcaaagtaaaaag

SEQ ID NO: 144332 - RNA, 22 nt, synthetic construct
  source 1..22: mol_type = other RNA
gtgtgtttgtgaaaaatacaat

SEQ ID NO: 144333 - RNA, 22 nt, synthetic construct
  source 1..22: mol_type = other RNA
gtgtgtttgtttgctagagctg

SEQ ID NO: 144334 - RNA, 22 nt, synthetic construct
  source 1..22: mol_type = other RNA
gtgtgttttgttgttgttgttg

SEQ ID NO: 144335 - RNA, 22 nt, synthetic construct
  source 1..22: mol_type = other RNA
gtgtgtttttgtaaatgaaaca

SEQ ID NO: 144336 - RNA, 22 nt, synthetic construct
  source 1..22: mol_type = other RNA
gtgttaaaccattcttgcatcc

SEQ ID NO: 144337 - RNA, 22 nt, synthetic construct
  source 1..22: mol_type = other RNA
gtgttaaatttgattgttagcc

SEQ ID NO: 144338 - RNA, 22 nt, synthetic construct
  source 1..22: mol_type = other RNA
gtgttaagccgttccatcagag

SEQ ID NO: 144339 - RNA, 22 nt, synthetic construct
  source 1..22: mol_type = other RNA
gtgttaattatttgtgcatact

SEQ ID NO: 144340 - RNA, 22 nt, synthetic construct
  source 1..22: mol_type = other RNA
gtgttaattcttccttaatgtt

SEQ ID NO: 144341 - RNA, 22 nt, synthetic construct
  source 1..22: mol_type = other RNA
gtgttacaactctaataacagc

SEQ ID NO: 144342 - RNA, 22 nt, synthetic construct
  source 1..22: mol_type = other RNA
gtgttacattgccttcgcaggg

SEQ ID NO: 144343 - RNA, 22 nt, synthetic construct
  source 1..22: mol_type = other RNA
gtgttacttgaaatcatttcac

SEQ ID NO: 144344 - RNA, 22 nt, synthetic construct
  source 1..22: mol_type = other RNA
gtgttagaattacaggcatgag

SEQ ID NO: 144345 - RNA, 22 nt, synthetic construct
  source 1..22: mol_type = other RNA
gtgttagcaggactggactcct

SEQ ID NO: 144346 - RNA, 22 nt, synthetic construct
  source 1..22: mol_type = other RNA
gtgttaggcaatccttccgcct

SEQ ID NO: 144347 - RNA, 22 nt, synthetic construct
  source 1..22: mol_type = other RNA
gtgttatttgttctgtcacggt

SEQ ID NO: 144348 - RNA, 22 nt, synthetic construct
  source 1..22: mol_type = other RNA
gtgttattttaatcgaatcctc

SEQ ID NO: 144349 - RNA, 22 nt, synthetic construct
  source 1..22: mol_type = other RNA
gtgttcaaaagccccaaaccat

SEQ ID NO: 144350 - RNA, 22 nt, synthetic construct
  source 1..22: mol_type = other RNA
gtgttccagacaaaaattttca

SEQ ID NO: 144351 - RNA, 22 nt, synthetic construct
  source 1..22: mol_type = other RNA
gtgttcccttcttaaatgtgaa

SEQ ID NO: 144352 - RNA, 22 nt, synthetic construct
  source 1..22: mol_type = other RNA
gtgttcctgaagtctttggtga

SEQ ID NO: 144353 - RNA, 22 nt, synthetic construct
  source 1..22: mol_type = other RNA
gtgttccttcctacacatatct

SEQ ID NO: 144354 - RNA, 22 nt, synthetic construct
  source 1..22: mol_type = other RNA
gtgttctctttttgacagatga

SEQ ID NO: 144355 - RNA, 22 nt, synthetic construct
  source 1..22: mol_type = other RNA
gtgttctgccttgaggtgattc

SEQ ID NO: 144356 - RNA, 22 nt, synthetic construct
  source 1..22: mol_type = other RNA
gtgttctgtgtttatgaatgat

SEQ ID NO: 144357 - RNA, 22 nt, synthetic construct
  source 1..22: mol_type = other RNA
gtgttcttttccttcttaagac

SEQ ID NO: 144358 - RNA, 22 nt, synthetic construct
  source 1..22: mol_type = other RNA
gtgttgaccttagtggttgacc

SEQ ID NO: 144359 - RNA, 22 nt, synthetic construct
  source 1..22: mol_type = other RNA
gtgttgactaccatctctccaa

SEQ ID NO: 144360 - RNA, 22 nt, synthetic construct
  source 1..22: mol_type = other RNA
gtgttgactgaattaatctctt

SEQ ID NO: 144361 - RNA, 22 nt, synthetic construct
  source 1..22: mol_type = other RNA
gtgttgactgacataactgtaa

SEQ ID NO: 144362 - RNA, 22 nt, synthetic construct
  source 1..22: mol_type = other RNA
gtgttgagaaagcacataaaaa

SEQ ID NO: 144363 - RNA, 22 nt, synthetic construct
  source 1..22: mol_type = other RNA
gtgttgagaggctttaagcaga

SEQ ID NO: 144364 - RNA, 22 nt, synthetic construct
  source 1..22: mol_type = other RNA
gtgttgataaatatgtgttaca

SEQ ID NO: 144365 - RNA, 22 nt, synthetic construct
  source 1..22: mol_type = other RNA
gtgttgcccacgctggtctcaa

SEQ ID NO: 144366 - RNA, 22 nt, synthetic construct
  source 1..22: mol_type = other RNA
gtgttgcttgctctacaaacct

SEQ ID NO: 144367 - RNA, 22 nt, synthetic construct
  source 1..22: mol_type = other RNA
gtgttgcttggtgttgactgaa

SEQ ID NO: 144368 - RNA, 22 nt, synthetic construct
  source 1..22: mol_type = other RNA
gtgttggcactgaagccagtcc

SEQ ID NO: 144369 - RNA, 22 nt, synthetic construct
  source 1..22: mol_type = other RNA
gtgttggtgcatttgggacagc

SEQ ID NO: 144370 - RNA, 22 nt, synthetic construct
  source 1..22: mol_type = other RNA
gtgttggtgtttctgacaggtg

SEQ ID NO: 144371 - RNA, 22 nt, synthetic construct
  source 1..22: mol_type = other RNA
gtgttgtctgattcagtttgct

SEQ ID NO: 144372 - RNA, 22 nt, synthetic construct
  source 1..22: mol_type = other RNA
gtgttgtgcacacatccacgcg

SEQ ID NO: 144373 - RNA, 22 nt, synthetic construct
  source 1..22: mol_type = other RNA
gtgttgtgtgcacctaataaaa

SEQ ID NO: 144374 - RNA, 22 nt, synthetic construct
  source 1..22: mol_type = other RNA
gtgttgtttttaaacaatagga

SEQ ID NO: 144375 - RNA, 22 nt, synthetic construct
  source 1..22: mol_type = other RNA
gtgtttaatttccacccatgaa

SEQ ID NO: 144376 - RNA, 22 nt, synthetic construct
  source 1..22: mol_type = other RNA
gtgtttacacacctgaaattct

SEQ ID NO: 144377 - RNA, 22 nt, synthetic construct
  source 1..22: mol_type = other RNA
gtgtttaggatataagagtggg

SEQ ID NO: 144378 - RNA, 22 nt, synthetic construct
  source 1..22: mol_type = other RNA
gtgtttagggacgaatgcatgg

SEQ ID NO: 144379 - RNA, 22 nt, synthetic construct
  source 1..22: mol_type = other RNA
gtgtttatgaatgatgccatca

SEQ ID NO: 144380 - RNA, 22 nt, synthetic construct
  source 1..22: mol_type = other RNA
gtgtttcatttacaaaaacaca

SEQ ID NO: 144381 - RNA, 22 nt, synthetic construct
  source 1..22: mol_type = other RNA
gtgtttcccttaaaaggaacta

SEQ ID NO: 144382 - RNA, 22 nt, synthetic construct
  source 1..22: mol_type = other RNA
gtgtttcctagattccctctgg

SEQ ID NO: 144383 - RNA, 22 nt, synthetic construct
  source 1..22: mol_type = other RNA
gtgtttccttccagatgtttta

SEQ ID NO: 144384 - RNA, 22 nt, synthetic construct
  source 1..22: mol_type = other RNA
gtgtttcgcaaagtaaaaagca

SEQ ID NO: 144385 - RNA, 22 nt, synthetic construct
  source 1..22: mol_type = other RNA
gtgtttctgacaggtggtatgg

SEQ ID NO: 144386 - RNA, 22 nt, synthetic construct
  source 1..22: mol_type = other RNA
gtgtttctgctattctctttct

SEQ ID NO: 144387 - RNA, 22 nt, synthetic construct
  source 1..22: mol_type = other RNA
gtgtttgaaaagtgtttgtcac

SEQ ID NO: 144388 - RNA, 22 nt, synthetic construct
  source 1..22: mol_type = other RNA
gtgtttggtgaattttattctt

SEQ ID NO: 144389 - RNA, 22 nt, synthetic construct
  source 1..22: mol_type = other RNA
gtgtttggtttttatggaataa

SEQ ID NO: 144390 - RNA, 22 nt, synthetic construct
  source 1..22: mol_type = other RNA
gtgtttgtcacatagaagcgct

SEQ ID NO: 144391 - RNA, 22 nt, synthetic construct
  source 1..22: mol_type = other RNA
gtgtttgtgaaaaatacaattg

SEQ ID NO: 144392 - RNA, 22 nt, synthetic construct
  source 1..22: mol_type = other RNA
gtgtttgtgaccagatcaaacg

SEQ ID NO: 144393 - RNA, 22 nt, synthetic construct
  source 1..22: mol_type = other RNA
gtgtttgtttgctagagctgct

SEQ ID NO: 144394 - RNA, 22 nt, synthetic construct
  source 1..22: mol_type = other RNA
gtgttttaaagcagggaggggt

SEQ ID NO: 144395 - RNA, 22 nt, synthetic construct
  source 1..22: mol_type = other RNA
gtgttttaggggggaaaacacc

SEQ ID NO: 144396 - RNA, 22 nt, synthetic construct
  source 1..22: mol_type = other RNA
gtgttttatttaggccctctat

SEQ ID NO: 144397 - RNA, 22 nt, synthetic construct
  source 1..22: mol_type = other RNA
gtgttttatttggctgttacca

SEQ ID NO: 144398 - RNA, 22 nt, synthetic construct
  source 1..22: mol_type = other RNA
gtgttttcactctcaatagtgt

SEQ ID NO: 144399 - RNA, 22 nt, synthetic construct
  source 1..22: mol_type = other RNA
gtgttttcattcgttcaaaaca

SEQ ID NO: 144400 - RNA, 22 nt, synthetic construct
  source 1..22: mol_type = other RNA
gtgttttcccccctaaaacact

SEQ ID NO: 144401 - RNA, 22 nt, synthetic construct
  source 1..22: mol_type = other RNA
gtgttttcttcatggactagac

SEQ ID NO: 144402 - RNA, 22 nt, synthetic construct
  source 1..22: mol_type = other RNA
gtgttttgatagttgcagattc

SEQ ID NO: 144403 - RNA, 22 nt, synthetic construct
  source 1..22: mol_type = other RNA
gtgttttgttgttgttgttgtt

SEQ ID NO: 144404 - RNA, 22 nt, synthetic construct
  source 1..22: mol_type = other RNA
gtgttttgttttgaataacctc

SEQ ID NO: 144405 - RNA, 22 nt, synthetic construct
  source 1..22: mol_type = other RNA
gtgtttttcagccctgatagat

SEQ ID NO: 144406 - RNA, 22 nt, synthetic construct
  source 1..22: mol_type = other RNA
gtgtttttctaggtagtttctt

SEQ ID NO: 144407 - RNA, 22 nt, synthetic construct
  source 1..22: mol_type = other RNA
gtgtttttgaattctgcttatt

SEQ ID NO: 144408 - RNA, 22 nt, synthetic construct
  source 1..22: mol_type = other RNA
gtgtttttgtaaatgaaacact

SEQ ID NO: 144409 - RNA, 22 nt, synthetic construct
  source 1..22: mol_type = other RNA
gtgttttttccttctttggggg

SEQ ID NO: 144410 - RNA, 22 nt, synthetic construct
  source 1..22: mol_type = other RNA
gttaaaaaatcaaaagaccaag

SEQ ID NO: 144411 - RNA, 22 nt, synthetic construct
  source 1..22: mol_type = other RNA
gttaaaaacttaagtatctcag

SEQ ID NO: 144412 - RNA, 22 nt, synthetic construct
  source 1..22: mol_type = other RNA
gttaaaaacttaagtatctcgg

SEQ ID NO: 144413 - RNA, 22 nt, synthetic construct
  source 1..22: mol_type = other RNA
gttaaaaccacaaacatgaata

SEQ ID NO: 144414 - RNA, 22 nt, synthetic construct
  source 1..22: mol_type = other RNA
gttaaaactcacaaaaagtgtg

SEQ ID NO: 144415 - RNA, 22 nt, synthetic construct
  source 1..22: mol_type = other RNA
gttaaaacttgtagaggaggag

SEQ ID NO: 144416 - RNA, 22 nt, synthetic construct
  source 1..22: mol_type = other RNA
gttaaaagacatctttcctgtg

SEQ ID NO: 144417 - RNA, 22 nt, synthetic construct
  source 1..22: mol_type = other RNA
gttaaaagatacgaaaatccta

SEQ ID NO: 144418 - RNA, 22 nt, synthetic construct
  source 1..22: mol_type = other RNA
gttaaaagttagctggcaaaat

SEQ ID NO: 144419 - RNA, 22 nt, synthetic construct
  source 1..22: mol_type = other RNA
gttaaaagttttccaaccactg

SEQ ID NO: 144420 - RNA, 22 nt, synthetic construct
  source 1..22: mol_type = other RNA
gttaaaatgaaaatgttccctc

SEQ ID NO: 144421 - RNA, 22 nt, synthetic construct
  source 1..22: mol_type = other RNA
gttaaacatgtaaaacagaccc

SEQ ID NO: 144422 - RNA, 22 nt, synthetic construct
  source 1..22: mol_type = other RNA
gttaaacccaacaaacaattag

SEQ ID NO: 144423 - RNA, 22 nt, synthetic construct
  source 1..22: mol_type = other RNA
gttaaacttggtctgggtgata

SEQ ID NO: 144424 - RNA, 22 nt, synthetic construct
  source 1..22: mol_type = other RNA
gttaaacttttgtgcatcaaag

SEQ ID NO: 144425 - RNA, 22 nt, synthetic construct
  source 1..22: mol_type = other RNA
gttaaagcaacaggaagaggca

SEQ ID NO: 144426 - RNA, 22 nt, synthetic construct
  source 1..22: mol_type = other RNA
gttaaaggaaaagagatctagt

SEQ ID NO: 144427 - RNA, 22 nt, synthetic construct
  source 1..22: mol_type = other RNA
gttaaatgaaggaaaaaacggg

SEQ ID NO: 144428 - RNA, 22 nt, synthetic construct
  source 1..22: mol_type = other RNA
gttaaatttcattaggttgatg

SEQ ID NO: 144429 - RNA, 22 nt, synthetic construct
  source 1..22: mol_type = other RNA
gttaaatttgattgttagccac

SEQ ID NO: 144430 - RNA, 22 nt, synthetic construct
  source 1..22: mol_type = other RNA
gttaacaatactgcattgtgca

SEQ ID NO: 144431 - RNA, 22 nt, synthetic construct
  source 1..22: mol_type = other RNA
gttaacaattggtgaatctgag

SEQ ID NO: 144432 - RNA, 22 nt, synthetic construct
  source 1..22: mol_type = other RNA
gttaacagtgctgtgccagtgc

SEQ ID NO: 144433 - RNA, 22 nt, synthetic construct
  source 1..22: mol_type = other RNA
gttaacatttcttctagtcaca

SEQ ID NO: 144434 - RNA, 22 nt, synthetic construct
  source 1..22: mol_type = other RNA
gttaaccttctggggttcaaac

SEQ ID NO: 144435 - RNA, 22 nt, synthetic construct
  source 1..22: mol_type = other RNA
gttaacgtatgaataaactaac

SEQ ID NO: 144436 - RNA, 22 nt, synthetic construct
  source 1..22: mol_type = other RNA
gttaacgtttatctacagagga

SEQ ID NO: 144437 - RNA, 22 nt, synthetic construct
  source 1..22: mol_type = other RNA
gttaactaatagccagtgcagc

SEQ ID NO: 144438 - RNA, 22 nt, synthetic construct
  source 1..22: mol_type = other RNA
gttaactatttctctttaaagc

SEQ ID NO: 144439 - RNA, 22 nt, synthetic construct
  source 1..22: mol_type = other RNA
gttaactgaaatcgggagtaac

SEQ ID NO: 144440 - RNA, 22 nt, synthetic construct
  source 1..22: mol_type = other RNA
gttaactgacttacagacctta

SEQ ID NO: 144441 - RNA, 22 nt, synthetic construct
  source 1..22: mol_type = other RNA
gttaactgtagagaaaatgtta

SEQ ID NO: 144442 - RNA, 22 nt, synthetic construct
  source 1..22: mol_type = other RNA
gttaactgtattgcaaactaag

SEQ ID NO: 144443 - RNA, 22 nt, synthetic construct
  source 1..22: mol_type = other RNA
gttaacttattggaaaactctg

SEQ ID NO: 144444 - RNA, 22 nt, synthetic construct
  source 1..22: mol_type = other RNA
gttaagactgctgtttaccaag

SEQ ID NO: 144445 - RNA, 22 nt, synthetic construct
  source 1..22: mol_type = other RNA
gttaagattcaacaaaactggg

SEQ ID NO: 144446 - RNA, 22 nt, synthetic construct
  source 1..22: mol_type = other RNA
gttaagcattttccggttgtat

SEQ ID NO: 144447 - RNA, 22 nt, synthetic construct
  source 1..22: mol_type = other RNA
gttaagcccaacttcacaccat

SEQ ID NO: 144448 - RNA, 22 nt, synthetic construct
  source 1..22: mol_type = other RNA
gttaagccgttccatcagagag

SEQ ID NO: 144449 - RNA, 22 nt, synthetic construct
  source 1..22: mol_type = other RNA
gttaagggaagagctaagatgc

SEQ ID NO: 144450 - RNA, 22 nt, synthetic construct
  source 1..22: mol_type = other RNA
gttaagggccatttcatttctg

SEQ ID NO: 144451 - RNA, 22 nt, synthetic construct
  source 1..22: mol_type = other RNA
gttaagtctgaaagcttctgag

SEQ ID NO: 144452 - RNA, 22 nt, synthetic construct
  source 1..22: mol_type = other RNA
gttaagtgtttgaaaagtgttt

SEQ ID NO: 144453 - RNA, 22 nt, synthetic construct
  source 1..22: mol_type = other RNA
gttaataaaggtgctaattgtt

SEQ ID NO: 144454 - RNA, 22 nt, synthetic construct
  source 1..22: mol_type = other RNA
gttaataaccctgttttgtaga

SEQ ID NO: 144455 - RNA, 22 nt, synthetic construct
  source 1..22: mol_type = other RNA
gttaatacttgtgtagcgggaa

SEQ ID NO: 144456 - RNA, 22 nt, synthetic construct
  source 1..22: mol_type = other RNA
gttaatagataggtcatgtaca

SEQ ID NO: 144457 - RNA, 22 nt, synthetic construct
  source 1..22: mol_type = other RNA
gttaatagcctcctaagttttg

SEQ ID NO: 144458 - RNA, 22 nt, synthetic construct
  source 1..22: mol_type = other RNA
gttaatagtgaccctttgaagt

SEQ ID NO: 144459 - RNA, 22 nt, synthetic construct
  source 1..22: mol_type = other RNA
gttaatattgtaggtgtctcat

SEQ ID NO: 144460 - RNA, 22 nt, synthetic construct
  source 1..22: mol_type = other RNA
gttaatgggcacttgggatgtt

SEQ ID NO: 144461 - RNA, 22 nt, synthetic construct
  source 1..22: mol_type = other RNA
gttaatggttagactgcacata

SEQ ID NO: 144462 - RNA, 22 nt, synthetic construct
  source 1..22: mol_type = other RNA
gttaatgtgatatgccacattt

SEQ ID NO: 144463 - RNA, 22 nt, synthetic construct
  source 1..22: mol_type = other RNA
gttaatgtgtgaagaaggaatg

SEQ ID NO: 144464 - RNA, 22 nt, synthetic construct
  source 1..22: mol_type = other RNA
gttaattatttgtgcatactgt

SEQ ID NO: 144465 - RNA, 22 nt, synthetic construct
  source 1..22: mol_type = other RNA
gttaattccacaaccactgggg

SEQ ID NO: 144466 - RNA, 22 nt, synthetic construct
  source 1..22: mol_type = other RNA
gttacaaaatatgtaatgacct

SEQ ID NO: 144467 - RNA, 22 nt, synthetic construct
  source 1..22: mol_type = other RNA
gttacaaacatatgcatgttat

SEQ ID NO: 144468 - RNA, 22 nt, synthetic construct
  source 1..22: mol_type = other RNA
gttacaactactcgggaggctg

SEQ ID NO: 144469 - RNA, 22 nt, synthetic construct
  source 1..22: mol_type = other RNA
gttacaactctaataacagcct

SEQ ID NO: 144470 - RNA, 22 nt, synthetic construct
  source 1..22: mol_type = other RNA
gttacaaggattgaatggaaag

SEQ ID NO: 144471 - RNA, 22 nt, synthetic construct
  source 1..22: mol_type = other RNA
gttacaataatatgcctcatgc

SEQ ID NO: 144472 - RNA, 22 nt, synthetic construct
  source 1..22: mol_type = other RNA
gttacacaagtgtttcatttac

SEQ ID NO: 144473 - RNA, 22 nt, synthetic construct
  source 1..22: mol_type = other RNA
gttacacaggtagacatgtgcc

SEQ ID NO: 144474 - RNA, 22 nt, synthetic construct
  source 1..22: mol_type = other RNA
gttacacttccagtacatctca

SEQ ID NO: 144475 - RNA, 22 nt, synthetic construct
  source 1..22: mol_type = other RNA
gttacagcagctctagcaaaca

SEQ ID NO: 144476 - RNA, 22 nt, synthetic construct
  source 1..22: mol_type = other RNA
gttacagcatttcagccaaagc

SEQ ID NO: 144477 - RNA, 22 nt, synthetic construct
  source 1..22: mol_type = other RNA
gttacagctcttctcagttgca

SEQ ID NO: 144478 - RNA, 22 nt, synthetic construct
  source 1..22: mol_type = other RNA
gttacagtataggggaactctt

SEQ ID NO: 144479 - RNA, 22 nt, synthetic construct
  source 1..22: mol_type = other RNA
gttacatgaggtcacccaagcc

SEQ ID NO: 144480 - RNA, 22 nt, synthetic construct
  source 1..22: mol_type = other RNA
gttacatgcttagccttccaga

SEQ ID NO: 144481 - RNA, 22 nt, synthetic construct
  source 1..22: mol_type = other RNA
gttacatggttctgtgctagat

SEQ ID NO: 144482 - RNA, 22 nt, synthetic construct
  source 1..22: mol_type = other RNA
gttacattgccttcgcagggtg

SEQ ID NO: 144483 - RNA, 22 nt, synthetic construct
  source 1..22: mol_type = other RNA
gttaccaccaagaaaaagcaga

SEQ ID NO: 144484 - RNA, 22 nt, synthetic construct
  source 1..22: mol_type = other RNA
gttaccactagcaaactactga

SEQ ID NO: 144485 - RNA, 22 nt, synthetic construct
  source 1..22: mol_type = other RNA
gttaccataaaaccatttttca

SEQ ID NO: 144486 - RNA, 22 nt, synthetic construct
  source 1..22: mol_type = other RNA
gttaccatttgaccttccttgt

SEQ ID NO: 144487 - RNA, 22 nt, synthetic construct
  source 1..22: mol_type = other RNA
gttaccctctggaatgcccatc

SEQ ID NO: 144488 - RNA, 22 nt, synthetic construct
  source 1..22: mol_type = other RNA
gttacgctgccaaaagccaaga

SEQ ID NO: 144489 - RNA, 22 nt, synthetic construct
  source 1..22: mol_type = other RNA
gttacggttccctgtagagatt

SEQ ID NO: 144490 - RNA, 22 nt, synthetic construct
  source 1..22: mol_type = other RNA
gttacgtactaggtatcacagt

SEQ ID NO: 144491 - RNA, 22 nt, synthetic construct
  source 1..22: mol_type = other RNA
gttactagaagcactttttacc

SEQ ID NO: 144492 - RNA, 22 nt, synthetic construct
  source 1..22: mol_type = other RNA
gttactattttcataacaaagc

SEQ ID NO: 144493 - RNA, 22 nt, synthetic construct
  source 1..22: mol_type = other RNA
gttactcaaatccaaattcaca

SEQ ID NO: 144494 - RNA, 22 nt, synthetic construct
  source 1..22: mol_type = other RNA
gttactcattatggttgttggc

SEQ ID NO: 144495 - RNA, 22 nt, synthetic construct
  source 1..22: mol_type = other RNA
gttactcccgatttcagttaac

SEQ ID NO: 144496 - RNA, 22 nt, synthetic construct
  source 1..22: mol_type = other RNA
gttactcctgagcaaggaagga

SEQ ID NO: 144497 - RNA, 22 nt, synthetic construct
  source 1..22: mol_type = other RNA
gttactctctctgcctcggcac

SEQ ID NO: 144498 - RNA, 22 nt, synthetic construct
  source 1..22: mol_type = other RNA
gttactgatctgctcaagtttt

SEQ ID NO: 144499 - RNA, 22 nt, synthetic construct
  source 1..22: mol_type = other RNA
gttactgattagaaggattgtt

SEQ ID NO: 144500 - RNA, 22 nt, synthetic construct
  source 1..22: mol_type = other RNA
gttacttctcagctatagcttc

SEQ ID NO: 144501 - RNA, 22 nt, synthetic construct
  source 1..22: mol_type = other RNA
gttacttctggaaagttcaaat

SEQ ID NO: 144502 - RNA, 22 nt, synthetic construct
  source 1..22: mol_type = other RNA
gttacttgaaatcatttcactc

SEQ ID NO: 144503 - RNA, 22 nt, synthetic construct
  source 1..22: mol_type = other RNA
gttacttgactattttaccctc

SEQ ID NO: 144504 - RNA, 22 nt, synthetic construct
  source 1..22: mol_type = other RNA
gttagaacaattttgaatgtgt

SEQ ID NO: 144505 - RNA, 22 nt, synthetic construct
  source 1..22: mol_type = other RNA
gttagaagacaatactgttatg

SEQ ID NO: 144506 - RNA, 22 nt, synthetic construct
  source 1..22: mol_type = other RNA
gttagaagtatcccagatgggg

SEQ ID NO: 144507 - RNA, 22 nt, synthetic construct
  source 1..22: mol_type = other RNA
gttagaattacaggcatgagtc

SEQ ID NO: 144508 - RNA, 22 nt, synthetic construct
  source 1..22: mol_type = other RNA
gttagaattcaggacagttatt

SEQ ID NO: 144509 - RNA, 22 nt, synthetic construct
  source 1..22: mol_type = other RNA
gttagaattttgcttttgcttt

SEQ ID NO: 144510 - RNA, 22 nt, synthetic construct
  source 1..22: mol_type = other RNA
gttagactgcacataaaaggat

SEQ ID NO: 144511 - RNA, 22 nt, synthetic construct
  source 1..22: mol_type = other RNA
gttagaggctgtattgtaggaa

SEQ ID NO: 144512 - RNA, 22 nt, synthetic construct
  source 1..22: mol_type = other RNA
gttagatatcccatataagggg

SEQ ID NO: 144513 - RNA, 22 nt, synthetic construct
  source 1..22: mol_type = other RNA
gttagatctgggataatgctat

SEQ ID NO: 144514 - RNA, 22 nt, synthetic construct
  source 1..22: mol_type = other RNA
gttagatggtgctgatttaaaa

SEQ ID NO: 144515 - RNA, 22 nt, synthetic construct
  source 1..22: mol_type = other RNA
gttagattaggaaacagattga

SEQ ID NO: 144516 - RNA, 22 nt, synthetic construct
  source 1..22: mol_type = other RNA
gttagattatatggtctaccat

SEQ ID NO: 144517 - RNA, 22 nt, synthetic construct
  source 1..22: mol_type = other RNA
gttagatttttcctttgcctaa

SEQ ID NO: 144518 - RNA, 22 nt, synthetic construct
  source 1..22: mol_type = other RNA
gttagcaggactggactccttc

SEQ ID NO: 144519 - RNA, 22 nt, synthetic construct
  source 1..22: mol_type = other RNA
gttagcataattcgaaataatc

SEQ ID NO: 144520 - RNA, 22 nt, synthetic construct
  source 1..22: mol_type = other RNA
gttagcatcaccatcatcatca

SEQ ID NO: 144521 - RNA, 22 nt, synthetic construct
  source 1..22: mol_type = other RNA
gttagcatgcctgacaaagtat

SEQ ID NO: 144522 - RNA, 22 nt, synthetic construct
  source 1..22: mol_type = other RNA
gttagccacagcgttgttcagt

SEQ ID NO: 144523 - RNA, 22 nt, synthetic construct
  source 1..22: mol_type = other RNA
gttagccttgccattctcccag

SEQ ID NO: 144524 - RNA, 22 nt, synthetic construct
  source 1..22: mol_type = other RNA
gttagctggcaaaatggagaca

SEQ ID NO: 144525 - RNA, 22 nt, synthetic construct
  source 1..22: mol_type = other RNA
gttaggaaaatacatgaggcct

SEQ ID NO: 144526 - RNA, 22 nt, synthetic construct
  source 1..22: mol_type = other RNA
gttaggaagccactgcattcat

SEQ ID NO: 144527 - RNA, 22 nt, synthetic construct
  source 1..22: mol_type = other RNA
gttaggaatttacatttccatt

SEQ ID NO: 144528 - RNA, 22 nt, synthetic construct
  source 1..22: mol_type = other RNA
gttaggcaatccttccgcctca

SEQ ID NO: 144529 - RNA, 22 nt, synthetic construct
  source 1..22: mol_type = other RNA
gttagggacttatggagataaa

SEQ ID NO: 144530 - RNA, 22 nt, synthetic construct
  source 1..22: mol_type = other RNA
gttagggagactttcactgctc

SEQ ID NO: 144531 - RNA, 22 nt, synthetic construct
  source 1..22: mol_type = other RNA
gttagggcctagaaatcataca

SEQ ID NO: 144532 - RNA, 22 nt, synthetic construct
  source 1..22: mol_type = other RNA
gttaggtattattttcacagac

SEQ ID NO: 144533 - RNA, 22 nt, synthetic construct
  source 1..22: mol_type = other RNA
gttaggtgctggcttcaatatg

SEQ ID NO: 144534 - RNA, 22 nt, synthetic construct
  source 1..22: mol_type = other RNA
gttaggtggtttgaaccccaga

SEQ ID NO: 144535 - RNA, 22 nt, synthetic construct
  source 1..22: mol_type = other RNA
gttaggttgaaagttcagaata

SEQ ID NO: 144536 - RNA, 22 nt, synthetic construct
  source 1..22: mol_type = other RNA
gttagtaggaaaaccatgtcat

SEQ ID NO: 144537 - RNA, 22 nt, synthetic construct
  source 1..22: mol_type = other RNA
gttagtcccctagtggatgctg

SEQ ID NO: 144538 - RNA, 22 nt, synthetic construct
  source 1..22: mol_type = other RNA
gttagtgaagcagagagagaag

SEQ ID NO: 144539 - RNA, 22 nt, synthetic construct
  source 1..22: mol_type = other RNA
gttagtgccttcagaaggagtc

SEQ ID NO: 144540 - RNA, 22 nt, synthetic construct
  source 1..22: mol_type = other RNA
gttagtgtctaatgggtacagg

SEQ ID NO: 144541 - RNA, 22 nt, synthetic construct
  source 1..22: mol_type = other RNA
gttagtttattcatacgttaac

SEQ ID NO: 144542 - RNA, 22 nt, synthetic construct
  source 1..22: mol_type = other RNA
gttagtttgttgacccaatcat

SEQ ID NO: 144543 - RNA, 22 nt, synthetic construct
  source 1..22: mol_type = other RNA
gttataagcaaagatatgggtt

SEQ ID NO: 144544 - RNA, 22 nt, synthetic construct
  source 1..22: mol_type = other RNA
gttataatcagccgtgattgca

SEQ ID NO: 144545 - RNA, 22 nt, synthetic construct
  source 1..22: mol_type = other RNA
gttataatgagatagaccagat

SEQ ID NO: 144546 - RNA, 22 nt, synthetic construct
  source 1..22: mol_type = other RNA
gttatacacacataagggggaa

SEQ ID NO: 144547 - RNA, 22 nt, synthetic construct
  source 1..22: mol_type = other RNA
gttatacagcaaatctctagaa

SEQ ID NO: 144548 - RNA, 22 nt, synthetic construct
  source 1..22: mol_type = other RNA
gttatagccataagagtcccca

SEQ ID NO: 144549 - RNA, 22 nt, synthetic construct
  source 1..22: mol_type = other RNA
gttatatccagattgatatctg

SEQ ID NO: 144550 - RNA, 22 nt, synthetic construct
  source 1..22: mol_type = other RNA
gttatatcctcagggtaggaaa

SEQ ID NO: 144551 - RNA, 22 nt, synthetic construct
  source 1..22: mol_type = other RNA
gttatatttccgtatccagtgg

SEQ ID NO: 144552 - RNA, 22 nt, synthetic construct
  source 1..22: mol_type = other RNA
gttatcacacctaggcctattt

SEQ ID NO: 144553 - RNA, 22 nt, synthetic construct
  source 1..22: mol_type = other RNA
gttatcaccatgtgcttatcaa

SEQ ID NO: 144554 - RNA, 22 nt, synthetic construct
  source 1..22: mol_type = other RNA
gttatccaattttttggcatac

SEQ ID NO: 144555 - RNA, 22 nt, synthetic construct
  source 1..22: mol_type = other RNA
gttatctctgccctcattgaag

SEQ ID NO: 144556 - RNA, 22 nt, synthetic construct
  source 1..22: mol_type = other RNA
gttatctcttagacctcctaga

SEQ ID NO: 144557 - RNA, 22 nt, synthetic construct
  source 1..22: mol_type = other RNA
gttatctgaacgtctttaaatt

SEQ ID NO: 144558 - RNA, 22 nt, synthetic construct
  source 1..22: mol_type = other RNA
gttatctgggaacagcccctag

SEQ ID NO: 144559 - RNA, 22 nt, synthetic construct
  source 1..22: mol_type = other RNA
gttatctgttttcttactgatt

SEQ ID NO: 144560 - RNA, 22 nt, synthetic construct
  source 1..22: mol_type = other RNA
gttatgaagcttttctcctaag

SEQ ID NO: 144561 - RNA, 22 nt, synthetic construct
  source 1..22: mol_type = other RNA
gttatgacaagactacctaaaa

SEQ ID NO: 144562 - RNA, 22 nt, synthetic construct
  source 1..22: mol_type = other RNA
gttatgataaaaataacgggcc

SEQ ID NO: 144563 - RNA, 22 nt, synthetic construct
  source 1..22: mol_type = other RNA
gttatgcaagatgtcaacatta

SEQ ID NO: 144564 - RNA, 22 nt, synthetic construct
  source 1..22: mol_type = other RNA
gttatgccccctcttctctcct

SEQ ID NO: 144565 - RNA, 22 nt, synthetic construct
  source 1..22: mol_type = other RNA
gttatggtaggtgctttttgta

SEQ ID NO: 144566 - RNA, 22 nt, synthetic construct
  source 1..22: mol_type = other RNA
gttatgtagctgggatggctga

SEQ ID NO: 144567 - RNA, 22 nt, synthetic construct
  source 1..22: mol_type = other RNA
gttatgtcagtcaacacactag

SEQ ID NO: 144568 - RNA, 22 nt, synthetic construct
  source 1..22: mol_type = other RNA
gttattaaatgagacacctaca

SEQ ID NO: 144569 - RNA, 22 nt, synthetic construct
  source 1..22: mol_type = other RNA
gttattaacataccgacggctc

SEQ ID NO: 144570 - RNA, 22 nt, synthetic construct
  source 1..22: mol_type = other RNA
gttattaagagtgtgctgacta

SEQ ID NO: 144571 - RNA, 22 nt, synthetic construct
  source 1..22: mol_type = other RNA
gttattaagataatgctgttct

SEQ ID NO: 144572 - RNA, 22 nt, synthetic construct
  source 1..22: mol_type = other RNA
gttattagagttgtaacacata

SEQ ID NO: 144573 - RNA, 22 nt, synthetic construct
  source 1..22: mol_type = other RNA
gttattagggtaatgctggctt

SEQ ID NO: 144574 - RNA, 22 nt, synthetic construct
  source 1..22: mol_type = other RNA
gttattcaaaacaaaacacatg

SEQ ID NO: 144575 - RNA, 22 nt, synthetic construct
  source 1..22: mol_type = other RNA
gttattcacccaagaatttcat

SEQ ID NO: 144576 - RNA, 22 nt, synthetic construct
  source 1..22: mol_type = other RNA
gttattcatgtttgtggtttta

SEQ ID NO: 144577 - RNA, 22 nt, synthetic construct
  source 1..22: mol_type = other RNA
gttattcttcagcaaggaccat

SEQ ID NO: 144578 - RNA, 22 nt, synthetic construct
  source 1..22: mol_type = other RNA
gttattgagtctgtagggtgac

SEQ ID NO: 144579 - RNA, 22 nt, synthetic construct
  source 1..22: mol_type = other RNA
gttattgcatagggatgttgcc

SEQ ID NO: 144580 - RNA, 22 nt, synthetic construct
  source 1..22: mol_type = other RNA
gttatttaatctctcttgacct

SEQ ID NO: 144581 - RNA, 22 nt, synthetic construct
  source 1..22: mol_type = other RNA
gttatttggggattctgctact

SEQ ID NO: 144582 - RNA, 22 nt, synthetic construct
  source 1..22: mol_type = other RNA
gttatttgttctgtcacggtgc

SEQ ID NO: 144583 - RNA, 22 nt, synthetic construct
  source 1..22: mol_type = other RNA
gttattttaatcgaatcctcac

SEQ ID NO: 144584 - RNA, 22 nt, synthetic construct
  source 1..22: mol_type = other RNA
gttattttcatggttttaatgg

SEQ ID NO: 144585 - RNA, 22 nt, synthetic construct
  source 1..22: mol_type = other RNA
gttcaaaaaccttttttaagga

SEQ ID NO: 144586 - RNA, 22 nt, synthetic construct
  source 1..22: mol_type = other RNA
gttcaaaacatcatctaatttc

SEQ ID NO: 144587 - RNA, 22 nt, synthetic construct
  source 1..22: mol_type = other RNA
gttcaaaagccccaaaccatca

SEQ ID NO: 144588 - RNA, 22 nt, synthetic construct
  source 1..22: mol_type = other RNA
gttcaaaatacagtgtttttga

SEQ ID NO: 144589 - RNA, 22 nt, synthetic construct
  source 1..22: mol_type = other RNA
gttcaaaccacctaactactaa

SEQ ID NO: 144590 - RNA, 22 nt, synthetic construct
  source 1..22: mol_type = other RNA
gttcaaagaaactacctagaaa

SEQ ID NO: 144591 - RNA, 22 nt, synthetic construct
  source 1..22: mol_type = other RNA
gttcaaatgaggcttttattgg

SEQ ID NO: 144592 - RNA, 22 nt, synthetic construct
  source 1..22: mol_type = other RNA
gttcaaatgttaagcccaactt

SEQ ID NO: 144593 - RNA, 22 nt, synthetic construct
  source 1..22: mol_type = other RNA
gttcaaccctcggcctctactg

SEQ ID NO: 144594 - RNA, 22 nt, synthetic construct
  source 1..22: mol_type = other RNA
gttcaagatgcataccaagccc

SEQ ID NO: 144595 - RNA, 22 nt, synthetic construct
  source 1..22: mol_type = other RNA
gttcaagcaccacttcgagaag

SEQ ID NO: 144596 - RNA, 22 nt, synthetic construct
  source 1..22: mol_type = other RNA
gttcaagccccagttctgcgca

SEQ ID NO: 144597 - RNA, 22 nt, synthetic construct
  source 1..22: mol_type = other RNA
gttcaagcgctgaagtacttca

SEQ ID NO: 144598 - RNA, 22 nt, synthetic construct
  source 1..22: mol_type = other RNA
gttcaaggtgttagcaggactg

SEQ ID NO: 144599 - RNA, 22 nt, synthetic construct
  source 1..22: mol_type = other RNA
gttcaaggtgttcctgaagtct

SEQ ID NO: 144600 - RNA, 22 nt, synthetic construct
  source 1..22: mol_type = other RNA
gttcaaggttataatcagccgt

SEQ ID NO: 144601 - RNA, 22 nt, synthetic construct
  source 1..22: mol_type = other RNA
gttcaagtatttccacgggtaa

SEQ ID NO: 144602 - RNA, 22 nt, synthetic construct
  source 1..22: mol_type = other RNA
gttcaagtttggctcccatgat

SEQ ID NO: 144603 - RNA, 22 nt, synthetic construct
  source 1..22: mol_type = other RNA
gttcaatactactgcaaatatc

SEQ ID NO: 144604 - RNA, 22 nt, synthetic construct
  source 1..22: mol_type = other RNA
gttcacacctgtagtcccagct

SEQ ID NO: 144605 - RNA, 22 nt, synthetic construct
  source 1..22: mol_type = other RNA
gttcacactcgcactccacttc

SEQ ID NO: 144606 - RNA, 22 nt, synthetic construct
  source 1..22: mol_type = other RNA
gttcacatttcgccttctcaga

SEQ ID NO: 144607 - RNA, 22 nt, synthetic construct
  source 1..22: mol_type = other RNA
gttcaccagtttctaattagaa

SEQ ID NO: 144608 - RNA, 22 nt, synthetic construct
  source 1..22: mol_type = other RNA
gttcacctctccgggtaaaaag

SEQ ID NO: 144609 - RNA, 22 nt, synthetic construct
  source 1..22: mol_type = other RNA
gttcactgcagaattactgaca

SEQ ID NO: 144610 - RNA, 22 nt, synthetic construct
  source 1..22: mol_type = other RNA
gttcacttgaaacctgccatgg

SEQ ID NO: 144611 - RNA, 22 nt, synthetic construct
  source 1..22: mol_type = other RNA
gttcagaaagattaatccttgt

SEQ ID NO: 144612 - RNA, 22 nt, synthetic construct
  source 1..22: mol_type = other RNA
gttcagaaatagactcccaact

SEQ ID NO: 144613 - RNA, 22 nt, synthetic construct
  source 1..22: mol_type = other RNA
gttcagaataccagagattggg

SEQ ID NO: 144614 - RNA, 22 nt, synthetic construct
  source 1..22: mol_type = other RNA
gttcagataacaaagggttctt

SEQ ID NO: 144615 - RNA, 22 nt, synthetic construct
  source 1..22: mol_type = other RNA
gttcagatagaaaagacaatag

SEQ ID NO: 144616 - RNA, 22 nt, synthetic construct
  source 1..22: mol_type = other RNA
gttcagatagaattaaatgaag

SEQ ID NO: 144617 - RNA, 22 nt, synthetic construct
  source 1..22: mol_type = other RNA
gttcagcatcttcactgactac

SEQ ID NO: 144618 - RNA, 22 nt, synthetic construct
  source 1..22: mol_type = other RNA
gttcagcctgcagaaggagaaa

SEQ ID NO: 144619 - RNA, 22 nt, synthetic construct
  source 1..22: mol_type = other RNA
gttcagcttacagtcatcacag

SEQ ID NO: 144620 - RNA, 22 nt, synthetic construct
  source 1..22: mol_type = other RNA
gttcagctttaaagagaaatag

SEQ ID NO: 144621 - RNA, 22 nt, synthetic construct
  source 1..22: mol_type = other RNA
gttcaggaccagcttgggcaag

SEQ ID NO: 144622 - RNA, 22 nt, synthetic construct
  source 1..22: mol_type = other RNA
gttcaggagttttgcctctttg

SEQ ID NO: 144623 - RNA, 22 nt, synthetic construct
  source 1..22: mol_type = other RNA
gttcagggaaggctgcaagcac

SEQ ID NO: 144624 - RNA, 22 nt, synthetic construct
  source 1..22: mol_type = other RNA
gttcaggtgcctcctgcctcag

SEQ ID NO: 144625 - RNA, 22 nt, synthetic construct
  source 1..22: mol_type = other RNA
gttcagtggtgcaatcacggct

SEQ ID NO: 144626 - RNA, 22 nt, synthetic construct
  source 1..22: mol_type = other RNA
gttcagttgaaaagtatggttg

SEQ ID NO: 144627 - RNA, 22 nt, synthetic construct
  source 1..22: mol_type = other RNA
gttcagtttagtaaatctttgg

SEQ ID NO: 144628 - RNA, 22 nt, synthetic construct
  source 1..22: mol_type = other RNA
gttcagtttatgggtcaaccac

SEQ ID NO: 144629 - RNA, 22 nt, synthetic construct
  source 1..22: mol_type = other RNA
gttcagttttgtatatggttta

SEQ ID NO: 144630 - RNA, 22 nt, synthetic construct
  source 1..22: mol_type = other RNA
gttcataatatatcacaacttg

SEQ ID NO: 144631 - RNA, 22 nt, synthetic construct
  source 1..22: mol_type = other RNA
gttcatacaatagtttagttac

SEQ ID NO: 144632 - RNA, 22 nt, synthetic construct
  source 1..22: mol_type = other RNA
gttcatatttcccttttggatg

SEQ ID NO: 144633 - RNA, 22 nt, synthetic construct
  source 1..22: mol_type = other RNA
gttcatcatcttttgcctggat

SEQ ID NO: 144634 - RNA, 22 nt, synthetic construct
  source 1..22: mol_type = other RNA
gttcatccaaattattgacaag

SEQ ID NO: 144635 - RNA, 22 nt, synthetic construct
  source 1..22: mol_type = other RNA
gttcatccatgttgttgaatgt

SEQ ID NO: 144636 - RNA, 22 nt, synthetic construct
  source 1..22: mol_type = other RNA
gttcatgaaatcccctttagtg

SEQ ID NO: 144637 - RNA, 22 nt, synthetic construct
  source 1..22: mol_type = other RNA
gttcatgaacataaatttgttc

SEQ ID NO: 144638 - RNA, 22 nt, synthetic construct
  source 1..22: mol_type = other RNA
gttcatgaaccttcaccaaaga

SEQ ID NO: 144639 - RNA, 22 nt, synthetic construct
  source 1..22: mol_type = other RNA
gttcatgggaagatgctccctc

SEQ ID NO: 144640 - RNA, 22 nt, synthetic construct
  source 1..22: mol_type = other RNA
gttcatgtctgtgtagttcatc

SEQ ID NO: 144641 - RNA, 22 nt, synthetic construct
  source 1..22: mol_type = other RNA
gttcatgtgtgcttacacacac

SEQ ID NO: 144642 - RNA, 22 nt, synthetic construct
  source 1..22: mol_type = other RNA
gttcatgttagcataattcgaa

SEQ ID NO: 144643 - RNA, 22 nt, synthetic construct
  source 1..22: mol_type = other RNA
gttcatgttcaaggtgttcctg

SEQ ID NO: 144644 - RNA, 22 nt, synthetic construct
  source 1..22: mol_type = other RNA
gttcatgtttacagaaatatac

SEQ ID NO: 144645 - RNA, 22 nt, synthetic construct
  source 1..22: mol_type = other RNA
gttcattagaattcaggacagt

SEQ ID NO: 144646 - RNA, 22 nt, synthetic construct
  source 1..22: mol_type = other RNA
gttcattcatctgttaatgggc

SEQ ID NO: 144647 - RNA, 22 nt, synthetic construct
  source 1..22: mol_type = other RNA
gttcattcgtagcaggtttagg

SEQ ID NO: 144648 - RNA, 22 nt, synthetic construct
  source 1..22: mol_type = other RNA
gttcatttcaggaatgcaaagt

SEQ ID NO: 144649 - RNA, 22 nt, synthetic construct
  source 1..22: mol_type = other RNA
gttcatttgagaatttcaggtg

SEQ ID NO: 144650 - RNA, 22 nt, synthetic construct
  source 1..22: mol_type = other RNA
gttcattttaataagcttcgaa

SEQ ID NO: 144651 - RNA, 22 nt, synthetic construct
  source 1..22: mol_type = other RNA
gttccaaacttctgaccttgtg

SEQ ID NO: 144652 - RNA, 22 nt, synthetic construct
  source 1..22: mol_type = other RNA
gttccaactgtataaatgttca

SEQ ID NO: 144653 - RNA, 22 nt, synthetic construct
  source 1..22: mol_type = other RNA
gttccaagattttcccaatctc

SEQ ID NO: 144654 - RNA, 22 nt, synthetic construct
  source 1..22: mol_type = other RNA
gttccacatgttactcattatg

SEQ ID NO: 144655 - RNA, 22 nt, synthetic construct
  source 1..22: mol_type = other RNA
gttccacctccatcactgactg

SEQ ID NO: 144656 - RNA, 22 nt, synthetic construct
  source 1..22: mol_type = other RNA
gttccagacaaaaattttcatt

SEQ ID NO: 144657 - RNA, 22 nt, synthetic construct
  source 1..22: mol_type = other RNA
gttccagcagggtaaagtcaat

SEQ ID NO: 144658 - RNA, 22 nt, synthetic construct
  source 1..22: mol_type = other RNA
gttccaggcctcgctcttggct

SEQ ID NO: 144659 - RNA, 22 nt, synthetic construct
  source 1..22: mol_type = other RNA
gttccaggggggaaaaaaccat

SEQ ID NO: 144660 - RNA, 22 nt, synthetic construct
  source 1..22: mol_type = other RNA
gttccagtcctttgtgtcaagt

SEQ ID NO: 144661 - RNA, 22 nt, synthetic construct
  source 1..22: mol_type = other RNA
gttccatcagagaggcttttta

SEQ ID NO: 144662 - RNA, 22 nt, synthetic construct
  source 1..22: mol_type = other RNA
gttccatcggtctgtatttctg

SEQ ID NO: 144663 - RNA, 22 nt, synthetic construct
  source 1..22: mol_type = other RNA
gttccatctgttatagtgtgaa

SEQ ID NO: 144664 - RNA, 22 nt, synthetic construct
  source 1..22: mol_type = other RNA
gttccattattccataaaaacc

SEQ ID NO: 144665 - RNA, 22 nt, synthetic construct
  source 1..22: mol_type = other RNA
gttccatttgttttgtgtttgt

SEQ ID NO: 144666 - RNA, 22 nt, synthetic construct
  source 1..22: mol_type = other RNA
gttcccaagcaagtgtggtggt

SEQ ID NO: 144667 - RNA, 22 nt, synthetic construct
  source 1..22: mol_type = other RNA
gttcccagataacagtggttag

SEQ ID NO: 144668 - RNA, 22 nt, synthetic construct
  source 1..22: mol_type = other RNA
gttccccaagccaaattaataa

SEQ ID NO: 144669 - RNA, 22 nt, synthetic construct
  source 1..22: mol_type = other RNA
gttccccattgacaatatagga

SEQ ID NO: 144670 - RNA, 22 nt, synthetic construct
  source 1..22: mol_type = other RNA
gttcccctatactgtaaccctg

SEQ ID NO: 144671 - RNA, 22 nt, synthetic construct
  source 1..22: mol_type = other RNA
gttcccggattggaaaactagg

SEQ ID NO: 144672 - RNA, 22 nt, synthetic construct
  source 1..22: mol_type = other RNA
gttccctagaacttaaaatata

SEQ ID NO: 144673 - RNA, 22 nt, synthetic construct
  source 1..22: mol_type = other RNA
gttccctcttcaatattttgga

SEQ ID NO: 144674 - RNA, 22 nt, synthetic construct
  source 1..22: mol_type = other RNA
gttccctgtagagatttttatc

SEQ ID NO: 144675 - RNA, 22 nt, synthetic construct
  source 1..22: mol_type = other RNA
gttcccttcttaaatgtgaatt

SEQ ID NO: 144676 - RNA, 22 nt, synthetic construct
  source 1..22: mol_type = other RNA
gttccgatttctcggccgggcg

SEQ ID NO: 144677 - RNA, 22 nt, synthetic construct
  source 1..22: mol_type = other RNA
gttccgattttacttactagtt

SEQ ID NO: 144678 - RNA, 22 nt, synthetic construct
  source 1..22: mol_type = other RNA
gttccgggatcctgtccaggcg

SEQ ID NO: 144679 - RNA, 22 nt, synthetic construct
  source 1..22: mol_type = other RNA
gttccggttctcaggagcctag

SEQ ID NO: 144680 - RNA, 22 nt, synthetic construct
  source 1..22: mol_type = other RNA
gttcctatatttttccacataa

SEQ ID NO: 144681 - RNA, 22 nt, synthetic construct
  source 1..22: mol_type = other RNA
gttcctccttttgtagagggaa

SEQ ID NO: 144682 - RNA, 22 nt, synthetic construct
  source 1..22: mol_type = other RNA
gttcctgaagtctttggtgatc

SEQ ID NO: 144683 - RNA, 22 nt, synthetic construct
  source 1..22: mol_type = other RNA
gttcctgcttcccccaaagaag

SEQ ID NO: 144684 - RNA, 22 nt, synthetic construct
  source 1..22: mol_type = other RNA
gttcctggactgtgatgactgt

SEQ ID NO: 144685 - RNA, 22 nt, synthetic construct
  source 1..22: mol_type = other RNA
gttcctgggttctcccttctat

SEQ ID NO: 144686 - RNA, 22 nt, synthetic construct
  source 1..22: mol_type = other RNA
gttccttcctacacatatcttt

SEQ ID NO: 144687 - RNA, 22 nt, synthetic construct
  source 1..22: mol_type = other RNA
gttccttttaagggaaacactc

SEQ ID NO: 144688 - RNA, 22 nt, synthetic construct
  source 1..22: mol_type = other RNA
gttcgtttgaggcttttcatag

SEQ ID NO: 144689 - RNA, 22 nt, synthetic construct
  source 1..22: mol_type = other RNA
gttctaaagttagaagtatccc

SEQ ID NO: 144690 - RNA, 22 nt, synthetic construct
  source 1..22: mol_type = other RNA
gttctaataaacgcggaatgaa

SEQ ID NO: 144691 - RNA, 22 nt, synthetic construct
  source 1..22: mol_type = other RNA
gttctaatttctttaaaaccag

SEQ ID NO: 144692 - RNA, 22 nt, synthetic construct
  source 1..22: mol_type = other RNA
gttctaatttgtgaaccttgaa

SEQ ID NO: 144693 - RNA, 22 nt, synthetic construct
  source 1..22: mol_type = other RNA
gttctagagatttgctgtataa

SEQ ID NO: 144694 - RNA, 22 nt, synthetic construct
  source 1..22: mol_type = other RNA
gttctagctcctgggaaaagga

SEQ ID NO: 144695 - RNA, 22 nt, synthetic construct
  source 1..22: mol_type = other RNA
gttctagttctaataaacgcgg

SEQ ID NO: 144696 - RNA, 22 nt, synthetic construct
  source 1..22: mol_type = other RNA
gttctatttctttccattcaat

SEQ ID NO: 144697 - RNA, 22 nt, synthetic construct
  source 1..22: mol_type = other RNA
gttctcaccaacatccacagct

SEQ ID NO: 144698 - RNA, 22 nt, synthetic construct
  source 1..22: mol_type = other RNA
gttctcaggagcctagtcatcc

SEQ ID NO: 144699 - RNA, 22 nt, synthetic construct
  source 1..22: mol_type = other RNA
gttctcaggggtaaaggggatg

SEQ ID NO: 144700 - RNA, 22 nt, synthetic construct
  source 1..22: mol_type = other RNA
gttctcagtatcctttcaaggt

SEQ ID NO: 144701 - RNA, 22 nt, synthetic construct
  source 1..22: mol_type = other RNA
gttctccaagttattacaaaaa

SEQ ID NO: 144702 - RNA, 22 nt, synthetic construct
  source 1..22: mol_type = other RNA
gttctccagtcccactgacagt

SEQ ID NO: 144703 - RNA, 22 nt, synthetic construct
  source 1..22: mol_type = other RNA
gttctcccttctattccattgt

SEQ ID NO: 144704 - RNA, 22 nt, synthetic construct
  source 1..22: mol_type = other RNA
gttctcctgtgtgcatgctccc

SEQ ID NO: 144705 - RNA, 22 nt, synthetic construct
  source 1..22: mol_type = other RNA
gttctcgttcatgttcaaggtg

SEQ ID NO: 144706 - RNA, 22 nt, synthetic construct
  source 1..22: mol_type = other RNA
gttctctgccccgggcctggtt

SEQ ID NO: 144707 - RNA, 22 nt, synthetic construct
  source 1..22: mol_type = other RNA
gttctctgtgtggtttgccttt

SEQ ID NO: 144708 - RNA, 22 nt, synthetic construct
  source 1..22: mol_type = other RNA
gttctctttgtttatccttgca

SEQ ID NO: 144709 - RNA, 22 nt, synthetic construct
  source 1..22: mol_type = other RNA
gttctcttttcctcgttttcaa

SEQ ID NO: 144710 - RNA, 22 nt, synthetic construct
  source 1..22: mol_type = other RNA
gttctctttttgacagatgaga

SEQ ID NO: 144711 - RNA, 22 nt, synthetic construct
  source 1..22: mol_type = other RNA
gttctgaaggctcagcccctca

SEQ ID NO: 144712 - RNA, 22 nt, synthetic construct
  source 1..22: mol_type = other RNA
gttctgatttcaaagttaatag

SEQ ID NO: 144713 - RNA, 22 nt, synthetic construct
  source 1..22: mol_type = other RNA
gttctgcctaatctctaggctt

SEQ ID NO: 144714 - RNA, 22 nt, synthetic construct
  source 1..22: mol_type = other RNA
gttctgccttgaggtgattcag

SEQ ID NO: 144715 - RNA, 22 nt, synthetic construct
  source 1..22: mol_type = other RNA
gttctgcgcaattgcagccaga

SEQ ID NO: 144716 - RNA, 22 nt, synthetic construct
  source 1..22: mol_type = other RNA
gttctgcgtgttattttaatcg

SEQ ID NO: 144717 - RNA, 22 nt, synthetic construct
  source 1..22: mol_type = other RNA
gttctgctatgctgaaaggcat

SEQ ID NO: 144718 - RNA, 22 nt, synthetic construct
  source 1..22: mol_type = other RNA
gttctgctgttgatggacgttt

SEQ ID NO: 144719 - RNA, 22 nt, synthetic construct
  source 1..22: mol_type = other RNA
gttctgcttccacatttctaat

SEQ ID NO: 144720 - RNA, 22 nt, synthetic construct
  source 1..22: mol_type = other RNA
gttctgggagttcattagaatt

SEQ ID NO: 144721 - RNA, 22 nt, synthetic construct
  source 1..22: mol_type = other RNA
gttctggtgtcgtttatttctt

SEQ ID NO: 144722 - RNA, 22 nt, synthetic construct
  source 1..22: mol_type = other RNA
gttctgtacccttacgcgtgga

SEQ ID NO: 144723 - RNA, 22 nt, synthetic construct
  source 1..22: mol_type = other RNA
gttctgtcacatttgaaagaaa

SEQ ID NO: 144724 - RNA, 22 nt, synthetic construct
  source 1..22: mol_type = other RNA
gttctgtcacggtgccctacat

SEQ ID NO: 144725 - RNA, 22 nt, synthetic construct
  source 1..22: mol_type = other RNA
gttctgtgaatttgattatgtt

SEQ ID NO: 144726 - RNA, 22 nt, synthetic construct
  source 1..22: mol_type = other RNA
gttctgtgctagatgctaaaca

SEQ ID NO: 144727 - RNA, 22 nt, synthetic construct
  source 1..22: mol_type = other RNA
gttctgtgtttatgaatgatgc

SEQ ID NO: 144728 - RNA, 22 nt, synthetic construct
  source 1..22: mol_type = other RNA
gttctgttccatcggtctgtat

SEQ ID NO: 144729 - RNA, 22 nt, synthetic construct
  source 1..22: mol_type = other RNA
gttcttaagttaaaacttgtag

SEQ ID NO: 144730 - RNA, 22 nt, synthetic construct
  source 1..22: mol_type = other RNA
gttcttacctcaaaggagagaa

SEQ ID NO: 144731 - RNA, 22 nt, synthetic construct
  source 1..22: mol_type = other RNA
gttcttatgaggttattcaaaa

SEQ ID NO: 144732 - RNA, 22 nt, synthetic construct
  source 1..22: mol_type = other RNA
gttcttcaccgtgcaactagag

SEQ ID NO: 144733 - RNA, 22 nt, synthetic construct
  source 1..22: mol_type = other RNA
gttcttcatcagtccctgtgtt

SEQ ID NO: 144734 - RNA, 22 nt, synthetic construct
  source 1..22: mol_type = other RNA
gttcttggaaattagaaatgtg

SEQ ID NO: 144735 - RNA, 22 nt, synthetic construct
  source 1..22: mol_type = other RNA
gttcttggttaatattacagaa

SEQ ID NO: 144736 - RNA, 22 nt, synthetic construct
  source 1..22: mol_type = other RNA
gttctttatagcatttgaaaac

SEQ ID NO: 144737 - RNA, 22 nt, synthetic construct
  source 1..22: mol_type = other RNA
gttctttatatattctggatgt

SEQ ID NO: 144738 - RNA, 22 nt, synthetic construct
  source 1..22: mol_type = other RNA
gttctttcggatatttactaag

SEQ ID NO: 144739 - RNA, 22 nt, synthetic construct
  source 1..22: mol_type = other RNA
gttctttggagctgtatttttg

SEQ ID NO: 144740 - RNA, 22 nt, synthetic construct
  source 1..22: mol_type = other RNA
gttcttttaaatgccaatttgg

SEQ ID NO: 144741 - RNA, 22 nt, synthetic construct
  source 1..22: mol_type = other RNA
gttcttttcaaaaacagcatat

SEQ ID NO: 144742 - RNA, 22 nt, synthetic construct
  source 1..22: mol_type = other RNA
gttcttttccttcttaagacat

SEQ ID NO: 144743 - RNA, 22 nt, synthetic construct
  source 1..22: mol_type = other RNA
gttcttttgtaatctaaggatt

SEQ ID NO: 144744 - RNA, 22 nt, synthetic construct
  source 1..22: mol_type = other RNA
gttgaaaacgaggaaaagagaa

SEQ ID NO: 144745 - RNA, 22 nt, synthetic construct
  source 1..22: mol_type = other RNA
gttgaaaactcaactgcctcta

SEQ ID NO: 144746 - RNA, 22 nt, synthetic construct
  source 1..22: mol_type = other RNA
gttgaaaagtatggttgaagaa

SEQ ID NO: 144747 - RNA, 22 nt, synthetic construct
  source 1..22: mol_type = other RNA
gttgaaagttcagaataccaga

SEQ ID NO: 144748 - RNA, 22 nt, synthetic construct
  source 1..22: mol_type = other RNA
gttgaacatcacccagctcgac

SEQ ID NO: 144749 - RNA, 22 nt, synthetic construct
  source 1..22: mol_type = other RNA
gttgaagaaagtaggaattaaa

SEQ ID NO: 144750 - RNA, 22 nt, synthetic construct
  source 1..22: mol_type = other RNA
gttgaagacctgcagtctgcag

SEQ ID NO: 144751 - RNA, 22 nt, synthetic construct
  source 1..22: mol_type = other RNA
gttgaagctctagtgagctatg

SEQ ID NO: 144752 - RNA, 22 nt, synthetic construct
  source 1..22: mol_type = other RNA
gttgaagtctttggcccatttt

SEQ ID NO: 144753 - RNA, 22 nt, synthetic construct
  source 1..22: mol_type = other RNA
gttgaatagcaactgttttttc

SEQ ID NO: 144754 - RNA, 22 nt, synthetic construct
  source 1..22: mol_type = other RNA
gttgaatagggcctcaaatttc

SEQ ID NO: 144755 - RNA, 22 nt, synthetic construct
  source 1..22: mol_type = other RNA
gttgaatcttaacatttctcat

SEQ ID NO: 144756 - RNA, 22 nt, synthetic construct
  source 1..22: mol_type = other RNA
gttgaatgtggcagaatttaca

SEQ ID NO: 144757 - RNA, 22 nt, synthetic construct
  source 1..22: mol_type = other RNA
gttgaattgttgcgcgtcaaaa

SEQ ID NO: 144758 - RNA, 22 nt, synthetic construct
  source 1..22: mol_type = other RNA
gttgaattgttggagttcttta

SEQ ID NO: 144759 - RNA, 22 nt, synthetic construct
  source 1..22: mol_type = other RNA
gttgaatttctgtccttggatt

SEQ ID NO: 144760 - RNA, 22 nt, synthetic construct
  source 1..22: mol_type = other RNA
gttgacatcctttaatttgggt

SEQ ID NO: 144761 - RNA, 22 nt, synthetic construct
  source 1..22: mol_type = other RNA
gttgacatcctttgcgtctgtg

SEQ ID NO: 144762 - RNA, 22 nt, synthetic construct
  source 1..22: mol_type = other RNA
gttgacatcttgcataactcgt

SEQ ID NO: 144763 - RNA, 22 nt, synthetic construct
  source 1..22: mol_type = other RNA
gttgaccatttttatatctttg

SEQ ID NO: 144764 - RNA, 22 nt, synthetic construct
  source 1..22: mol_type = other RNA
gttgacccaatcatgttcttta

SEQ ID NO: 144765 - RNA, 22 nt, synthetic construct
  source 1..22: mol_type = other RNA
gttgacccataaactgaacatt

SEQ ID NO: 144766 - RNA, 22 nt, synthetic construct
  source 1..22: mol_type = other RNA
gttgaccgctttcgtgagggtt

SEQ ID NO: 144767 - RNA, 22 nt, synthetic construct
  source 1..22: mol_type = other RNA
gttgaccttagtggttgaccca

SEQ ID NO: 144768 - RNA, 22 nt, synthetic construct
  source 1..22: mol_type = other RNA
gttgactaccatctctccaaca

SEQ ID NO: 144769 - RNA, 22 nt, synthetic construct
  source 1..22: mol_type = other RNA
gttgactcctaaaacatggtcc

SEQ ID NO: 144770 - RNA, 22 nt, synthetic construct
  source 1..22: mol_type = other RNA
gttgactgaattaatctcttac

SEQ ID NO: 144771 - RNA, 22 nt, synthetic construct
  source 1..22: mol_type = other RNA
gttgactgacataactgtaaag

SEQ ID NO: 144772 - RNA, 22 nt, synthetic construct
  source 1..22: mol_type = other RNA
gttgagaaactatccaacatgc

SEQ ID NO: 144773 - RNA, 22 nt, synthetic construct
  source 1..22: mol_type = other RNA
gttgagaaagagggaagtactg

SEQ ID NO: 144774 - RNA, 22 nt, synthetic construct
  source 1..22: mol_type = other RNA
gttgagaaagcacataaaaaag

SEQ ID NO: 144775 - RNA, 22 nt, synthetic construct
  source 1..22: mol_type = other RNA
gttgagacaagaccacaccact

SEQ ID NO: 144776 - RNA, 22 nt, synthetic construct
  source 1..22: mol_type = other RNA
gttgagacttagatttatttag

SEQ ID NO: 144777 - RNA, 22 nt, synthetic construct
  source 1..22: mol_type = other RNA
gttgagagagaattctaaattg

SEQ ID NO: 144778 - RNA, 22 nt, synthetic construct
  source 1..22: mol_type = other RNA
gttgagaggctttaagcagaaa

SEQ ID NO: 144779 - RNA, 22 nt, synthetic construct
  source 1..22: mol_type = other RNA
gttgagccatcatgcctgggta

SEQ ID NO: 144780 - RNA, 22 nt, synthetic construct
  source 1..22: mol_type = other RNA
gttgaggatgactgtcctgaat

SEQ ID NO: 144781 - RNA, 22 nt, synthetic construct
  source 1..22: mol_type = other RNA
gttgaggctgggccctgtggct

SEQ ID NO: 144782 - RNA, 22 nt, synthetic construct
  source 1..22: mol_type = other RNA
gttgaggttgaagacctgcagt

SEQ ID NO: 144783 - RNA, 22 nt, synthetic construct
  source 1..22: mol_type = other RNA
gttgagtacctctgggatgctc

SEQ ID NO: 144784 - RNA, 22 nt, synthetic construct
  source 1..22: mol_type = other RNA
gttgagtatcttttcatgttga

SEQ ID NO: 144785 - RNA, 22 nt, synthetic construct
  source 1..22: mol_type = other RNA
gttgagtcttgtttacccagtg

SEQ ID NO: 144786 - RNA, 22 nt, synthetic construct
  source 1..22: mol_type = other RNA
gttgagttcatgtcctttgtag

SEQ ID NO: 144787 - RNA, 22 nt, synthetic construct
  source 1..22: mol_type = other RNA
gttgagttttcaacctttgttg

SEQ ID NO: 144788 - RNA, 22 nt, synthetic construct
  source 1..22: mol_type = other RNA
gttgataaatatgtgttacaac

SEQ ID NO: 144789 - RNA, 22 nt, synthetic construct
  source 1..22: mol_type = other RNA
gttgataattacaataatgcac

SEQ ID NO: 144790 - RNA, 22 nt, synthetic construct
  source 1..22: mol_type = other RNA
gttgatactagtttagtgcagt

SEQ ID NO: 144791 - RNA, 22 nt, synthetic construct
  source 1..22: mol_type = other RNA
gttgatgcaatttgttttccaa

SEQ ID NO: 144792 - RNA, 22 nt, synthetic construct
  source 1..22: mol_type = other RNA
gttgatggacgtttgagttgtt

SEQ ID NO: 144793 - RNA, 22 nt, synthetic construct
  source 1..22: mol_type = other RNA
gttgatggctgtactaagccta

SEQ ID NO: 144794 - RNA, 22 nt, synthetic construct
  source 1..22: mol_type = other RNA
gttgatgtaatggatcaaggca

SEQ ID NO: 144795 - RNA, 22 nt, synthetic construct
  source 1..22: mol_type = other RNA
gttgattatttttacccaacat

SEQ ID NO: 144796 - RNA, 22 nt, synthetic construct
  source 1..22: mol_type = other RNA
gttgattgttgccatcatttta

SEQ ID NO: 144797 - RNA, 22 nt, synthetic construct
  source 1..22: mol_type = other RNA
gttgatttagaaatacctgcag

SEQ ID NO: 144798 - RNA, 22 nt, synthetic construct
  source 1..22: mol_type = other RNA
gttgattttgaggcagagagat

SEQ ID NO: 144799 - RNA, 22 nt, synthetic construct
  source 1..22: mol_type = other RNA
gttgcaaaaatactacaagagt

SEQ ID NO: 144800 - RNA, 22 nt, synthetic construct
  source 1..22: mol_type = other RNA
gttgcaaattattttcctcctt

SEQ ID NO: 144801 - RNA, 22 nt, synthetic construct
  source 1..22: mol_type = other RNA
gttgcacaaaagtgaaaactaa

SEQ ID NO: 144802 - RNA, 22 nt, synthetic construct
  source 1..22: mol_type = other RNA
gttgcacaatgttgtggatgtc

SEQ ID NO: 144803 - RNA, 22 nt, synthetic construct
  source 1..22: mol_type = other RNA
gttgcacggtgaagaaccgact

SEQ ID NO: 144804 - RNA, 22 nt, synthetic construct
  source 1..22: mol_type = other RNA
gttgcagagactggatagcaac

SEQ ID NO: 144805 - RNA, 22 nt, synthetic construct
  source 1..22: mol_type = other RNA
gttgcagattcatcttgacttc

SEQ ID NO: 144806 - RNA, 22 nt, synthetic construct
  source 1..22: mol_type = other RNA
gttgcagcatgctcactgtctc

SEQ ID NO: 144807 - RNA, 22 nt, synthetic construct
  source 1..22: mol_type = other RNA
gttgcagtccccggtctttcct

SEQ ID NO: 144808 - RNA, 22 nt, synthetic construct
  source 1..22: mol_type = other RNA
gttgcagtgagcccagagatcc

SEQ ID NO: 144809 - RNA, 22 nt, synthetic construct
  source 1..22: mol_type = other RNA
gttgcatacgtcgtcccccatc

SEQ ID NO: 144810 - RNA, 22 nt, synthetic construct
  source 1..22: mol_type = other RNA
gttgcatcacttgaggtgatta

SEQ ID NO: 144811 - RNA, 22 nt, synthetic construct
  source 1..22: mol_type = other RNA
gttgcatccccattcaattgtc

SEQ ID NO: 144812 - RNA, 22 nt, synthetic construct
  source 1..22: mol_type = other RNA
gttgcatgaatttgttttctta

SEQ ID NO: 144813 - RNA, 22 nt, synthetic construct
  source 1..22: mol_type = other RNA
gttgcattaatgcttcatattt

SEQ ID NO: 144814 - RNA, 22 nt, synthetic construct
  source 1..22: mol_type = other RNA
gttgccaatatctatcagggct

SEQ ID NO: 144815 - RNA, 22 nt, synthetic construct
  source 1..22: mol_type = other RNA
gttgccaggtggacgcggcccc

SEQ ID NO: 144816 - RNA, 22 nt, synthetic construct
  source 1..22: mol_type = other RNA
gttgccatcattttatgaaacc

SEQ ID NO: 144817 - RNA, 22 nt, synthetic construct
  source 1..22: mol_type = other RNA
gttgcccagactggagttcact

SEQ ID NO: 144818 - RNA, 22 nt, synthetic construct
  source 1..22: mol_type = other RNA
gttgcctactagccagtgattg

SEQ ID NO: 144819 - RNA, 22 nt, synthetic construct
  source 1..22: mol_type = other RNA
gttgcctctgtgctagccttct

SEQ ID NO: 144820 - RNA, 22 nt, synthetic construct
  source 1..22: mol_type = other RNA
gttgcctgtagttttggtgtca

SEQ ID NO: 144821 - RNA, 22 nt, synthetic construct
  source 1..22: mol_type = other RNA
gttgcgcgtcaaaagatgctgg

SEQ ID NO: 144822 - RNA, 22 nt, synthetic construct
  source 1..22: mol_type = other RNA
gttgcggtgacgtgagatcatg

SEQ ID NO: 144823 - RNA, 22 nt, synthetic construct
  source 1..22: mol_type = other RNA
gttgctatccagtctctgcaac

SEQ ID NO: 144824 - RNA, 22 nt, synthetic construct
  source 1..22: mol_type = other RNA
gttgctattcaacaggtataaa

SEQ ID NO: 144825 - RNA, 22 nt, synthetic construct
  source 1..22: mol_type = other RNA
gttgctattgttgaattgttgg

SEQ ID NO: 144826 - RNA, 22 nt, synthetic construct
  source 1..22: mol_type = other RNA
gttgctcagaaaattttctttt

SEQ ID NO: 144827 - RNA, 22 nt, synthetic construct
  source 1..22: mol_type = other RNA
gttgctgacttcctggctctag

SEQ ID NO: 144828 - RNA, 22 nt, synthetic construct
  source 1..22: mol_type = other RNA
gttgctgcatagtactccatta

SEQ ID NO: 144829 - RNA, 22 nt, synthetic construct
  source 1..22: mol_type = other RNA
gttgcttaagtcactccatttg

SEQ ID NO: 144830 - RNA, 22 nt, synthetic construct
  source 1..22: mol_type = other RNA
gttgcttaattgagctgtcccc

SEQ ID NO: 144831 - RNA, 22 nt, synthetic construct
  source 1..22: mol_type = other RNA
gttgcttactctaatggggaaa

SEQ ID NO: 144832 - RNA, 22 nt, synthetic construct
  source 1..22: mol_type = other RNA
gttgcttgctctacaaaccttc

SEQ ID NO: 144833 - RNA, 22 nt, synthetic construct
  source 1..22: mol_type = other RNA
gttgcttggcacagaattattg

SEQ ID NO: 144834 - RNA, 22 nt, synthetic construct
  source 1..22: mol_type = other RNA
gttgcttggtgttgactgaatt

SEQ ID NO: 144835 - RNA, 22 nt, synthetic construct
  source 1..22: mol_type = other RNA
gttgctttaacctctggtattt

SEQ ID NO: 144836 - RNA, 22 nt, synthetic construct
  source 1..22: mol_type = other RNA
gttgctttgcgaaatagtagtt

SEQ ID NO: 144837 - RNA, 22 nt, synthetic construct
  source 1..22: mol_type = other RNA
gttgcttttacttggctcctcc

SEQ ID NO: 144838 - RNA, 22 nt, synthetic construct
  source 1..22: mol_type = other RNA
gttgctttttcttcttgttttg

SEQ ID NO: 144839 - RNA, 22 nt, synthetic construct
  source 1..22: mol_type = other RNA
gttggaaaaatcgtcctcttcg

SEQ ID NO: 144840 - RNA, 22 nt, synthetic construct
  source 1..22: mol_type = other RNA
gttggaaaacttttaactgaaa

SEQ ID NO: 144841 - RNA, 22 nt, synthetic construct
  source 1..22: mol_type = other RNA
gttggaaaagaaagctgtggat

SEQ ID NO: 144842 - RNA, 22 nt, synthetic construct
  source 1..22: mol_type = other RNA
gttggaactcttgcggtctttt

SEQ ID NO: 144843 - RNA, 22 nt, synthetic construct
  source 1..22: mol_type = other RNA
gttggaagtttctggaagtttc

SEQ ID NO: 144844 - RNA, 22 nt, synthetic construct
  source 1..22: mol_type = other RNA
gttggacagctgggagaaagct

SEQ ID NO: 144845 - RNA, 22 nt, synthetic construct
  source 1..22: mol_type = other RNA
gttggactccaccctgcccctt

SEQ ID NO: 144846 - RNA, 22 nt, synthetic construct
  source 1..22: mol_type = other RNA
gttggagacagcctaaaccatt

SEQ ID NO: 144847 - RNA, 22 nt, synthetic construct
  source 1..22: mol_type = other RNA
gttggagagatggtagtcaaca

SEQ ID NO: 144848 - RNA, 22 nt, synthetic construct
  source 1..22: mol_type = other RNA
gttggaggagaaggccttccac

SEQ ID NO: 144849 - RNA, 22 nt, synthetic construct
  source 1..22: mol_type = other RNA
gttggatagtttctcaacttag

SEQ ID NO: 144850 - RNA, 22 nt, synthetic construct
  source 1..22: mol_type = other RNA
gttggattatatgttctaaagt

SEQ ID NO: 144851 - RNA, 22 nt, synthetic construct
  source 1..22: mol_type = other RNA
gttggattcccaggtattttgt

SEQ ID NO: 144852 - RNA, 22 nt, synthetic construct
  source 1..22: mol_type = other RNA
gttggatttatctttctagatt

SEQ ID NO: 144853 - RNA, 22 nt, synthetic construct
  source 1..22: mol_type = other RNA
gttggcacagccagtcagtgat

SEQ ID NO: 144854 - RNA, 22 nt, synthetic construct
  source 1..22: mol_type = other RNA
gttggcactgaagccagtcctt

SEQ ID NO: 144855 - RNA, 22 nt, synthetic construct
  source 1..22: mol_type = other RNA
gttggcccaacatgctcttaag

SEQ ID NO: 144856 - RNA, 22 nt, synthetic construct
  source 1..22: mol_type = other RNA
gttggccgaggccagtccctag

SEQ ID NO: 144857 - RNA, 22 nt, synthetic construct
  source 1..22: mol_type = other RNA
gttggcctggacacacacagtc

SEQ ID NO: 144858 - RNA, 22 nt, synthetic construct
  source 1..22: mol_type = other RNA
gttggccttgaggtgagacaga

SEQ ID NO: 144859 - RNA, 22 nt, synthetic construct
  source 1..22: mol_type = other RNA
gttggctaaaagaccgcaagag

SEQ ID NO: 144860 - RNA, 22 nt, synthetic construct
  source 1..22: mol_type = other RNA
gttgggaggtttttgattactg

SEQ ID NO: 144861 - RNA, 22 nt, synthetic construct
  source 1..22: mol_type = other RNA
gttgggagtctatttctgaaca

SEQ ID NO: 144862 - RNA, 22 nt, synthetic construct
  source 1..22: mol_type = other RNA
gttgggattacaggcatgagcc

SEQ ID NO: 144863 - RNA, 22 nt, synthetic construct
  source 1..22: mol_type = other RNA
gttgggccaacttccagcaaga

SEQ ID NO: 144864 - RNA, 22 nt, synthetic construct
  source 1..22: mol_type = other RNA
gttgggctattaagtattgcat

SEQ ID NO: 144865 - RNA, 22 nt, synthetic construct
  source 1..22: mol_type = other RNA
gttgggcttaacatttgaactc

SEQ ID NO: 144866 - RNA, 22 nt, synthetic construct
  source 1..22: mol_type = other RNA
gttgggcttatcagatggtgat

SEQ ID NO: 144867 - RNA, 22 nt, synthetic construct
  source 1..22: mol_type = other RNA
gttgggcttggttggaaaagaa

SEQ ID NO: 144868 - RNA, 22 nt, synthetic construct
  source 1..22: mol_type = other RNA
gttggggactcttatggctata

SEQ ID NO: 144869 - RNA, 22 nt, synthetic construct
  source 1..22: mol_type = other RNA
gttgggggctgggtcggccgag

SEQ ID NO: 144870 - RNA, 22 nt, synthetic construct
  source 1..22: mol_type = other RNA
gttggggtatgtttgattagtt

SEQ ID NO: 144871 - RNA, 22 nt, synthetic construct
  source 1..22: mol_type = other RNA
gttgggtaaaaataatcaacta

SEQ ID NO: 144872 - RNA, 22 nt, synthetic construct
  source 1..22: mol_type = other RNA
gttgggtttaactgaggtgttt

SEQ ID NO: 144873 - RNA, 22 nt, synthetic construct
  source 1..22: mol_type = other RNA
gttggtcagaaaaatggaatat

SEQ ID NO: 144874 - RNA, 22 nt, synthetic construct
  source 1..22: mol_type = other RNA
gttggtcctgcatatgttttta

SEQ ID NO: 144875 - RNA, 22 nt, synthetic construct
  source 1..22: mol_type = other RNA
gttggtgaagagagcctgtggt

SEQ ID NO: 144876 - RNA, 22 nt, synthetic construct
  source 1..22: mol_type = other RNA
gttggtgagaacccagtgtctg

SEQ ID NO: 144877 - RNA, 22 nt, synthetic construct
  source 1..22: mol_type = other RNA
gttggtgcaaggataaacaaag

SEQ ID NO: 144878 - RNA, 22 nt, synthetic construct
  source 1..22: mol_type = other RNA
gttggtgcatttgggacagcct

SEQ ID NO: 144879 - RNA, 22 nt, synthetic construct
  source 1..22: mol_type = other RNA
gttggtgcttagctgcctcttc

SEQ ID NO: 144880 - RNA, 22 nt, synthetic construct
  source 1..22: mol_type = other RNA
gttggtgcttccttctcttata

SEQ ID NO: 144881 - RNA, 22 nt, synthetic construct
  source 1..22: mol_type = other RNA
gttggtgtttctgacaggtggt

SEQ ID NO: 144882 - RNA, 22 nt, synthetic construct
  source 1..22: mol_type = other RNA
gttggttagtgttgtttttaaa

SEQ ID NO: 144883 - RNA, 22 nt, synthetic construct
  source 1..22: mol_type = other RNA
gttggtttgtgtgtttgtgaaa

SEQ ID NO: 144884 - RNA, 22 nt, synthetic construct
  source 1..22: mol_type = other RNA
gttgtaacacatatttatcaac

SEQ ID NO: 144885 - RNA, 22 nt, synthetic construct
  source 1..22: mol_type = other RNA
gttgtaactacagacatgccac

SEQ ID NO: 144886 - RNA, 22 nt, synthetic construct
  source 1..22: mol_type = other RNA
gttgtaatgttacttctcagct

SEQ ID NO: 144887 - RNA, 22 nt, synthetic construct
  source 1..22: mol_type = other RNA
gttgtaatttttaaaagagcga

SEQ ID NO: 144888 - RNA, 22 nt, synthetic construct
  source 1..22: mol_type = other RNA
gttgtacatttaaaattgcaga

SEQ ID NO: 144889 - RNA, 22 nt, synthetic construct
  source 1..22: mol_type = other RNA
gttgtacttgacacaaaggact

SEQ ID NO: 144890 - RNA, 22 nt, synthetic construct
  source 1..22: mol_type = other RNA
gttgtatagcagtaaaatgaaa

SEQ ID NO: 144891 - RNA, 22 nt, synthetic construct
  source 1..22: mol_type = other RNA
gttgtatctgtgatccctgata

SEQ ID NO: 144892 - RNA, 22 nt, synthetic construct
  source 1..22: mol_type = other RNA
gttgtatgccaaaaaattggat

SEQ ID NO: 144893 - RNA, 22 nt, synthetic construct
  source 1..22: mol_type = other RNA
gttgtattttacaccatgcagg

SEQ ID NO: 144894 - RNA, 22 nt, synthetic construct
  source 1..22: mol_type = other RNA
gttgtcagaattagaaagctgg

SEQ ID NO: 144895 - RNA, 22 nt, synthetic construct
  source 1..22: mol_type = other RNA
gttgtctgattcagtttgctag

SEQ ID NO: 144896 - RNA, 22 nt, synthetic construct
  source 1..22: mol_type = other RNA
gttgtgaggattcgattaaaat

SEQ ID NO: 144897 - RNA, 22 nt, synthetic construct
  source 1..22: mol_type = other RNA
gttgtgatatattatgaaccat

SEQ ID NO: 144898 - RNA, 22 nt, synthetic construct
  source 1..22: mol_type = other RNA
gttgtgcacacatccacgcgta

SEQ ID NO: 144899 - RNA, 22 nt, synthetic construct
  source 1..22: mol_type = other RNA
gttgtgctacctcaaattgtgt

SEQ ID NO: 144900 - RNA, 22 nt, synthetic construct
  source 1..22: mol_type = other RNA
gttgtgcttcgaggtcgcaccc

SEQ ID NO: 144901 - RNA, 22 nt, synthetic construct
  source 1..22: mol_type = other RNA
gttgtggaattaactccagggg

SEQ ID NO: 144902 - RNA, 22 nt, synthetic construct
  source 1..22: mol_type = other RNA
gttgtggatgtccttaatgcca

SEQ ID NO: 144903 - RNA, 22 nt, synthetic construct
  source 1..22: mol_type = other RNA
gttgtgtagaaatgtggagata

SEQ ID NO: 144904 - RNA, 22 nt, synthetic construct
  source 1..22: mol_type = other RNA
gttgtgtcatttttgtattctg

SEQ ID NO: 144905 - RNA, 22 nt, synthetic construct
  source 1..22: mol_type = other RNA
gttgtgtgcacctaataaaatg

SEQ ID NO: 144906 - RNA, 22 nt, synthetic construct
  source 1..22: mol_type = other RNA
gttgtgtgttaaatttgattgt

SEQ ID NO: 144907 - RNA, 22 nt, synthetic construct
  source 1..22: mol_type = other RNA
gttgtgttttcattcgttcaaa

SEQ ID NO: 144908 - RNA, 22 nt, synthetic construct
  source 1..22: mol_type = other RNA
gttgttcagttgaaaagtatgg

SEQ ID NO: 144909 - RNA, 22 nt, synthetic construct
  source 1..22: mol_type = other RNA
gttgttcttggttaatattaca

SEQ ID NO: 144910 - RNA, 22 nt, synthetic construct
  source 1..22: mol_type = other RNA
gttgttcttttcaaaaacagca

SEQ ID NO: 144911 - RNA, 22 nt, synthetic construct
  source 1..22: mol_type = other RNA
gttgttgaatgtggcagaattt

SEQ ID NO: 144912 - RNA, 22 nt, synthetic construct
  source 1..22: mol_type = other RNA
gttgttggctaaaagaccgcaa

SEQ ID NO: 144913 - RNA, 22 nt, synthetic construct
  source 1..22: mol_type = other RNA
gttgttggtttgtgtgtttgtg

SEQ ID NO: 144914 - RNA, 22 nt, synthetic construct
  source 1..22: mol_type = other RNA
gttgttgttgtttctgagccag

SEQ ID NO: 144915 - RNA, 22 nt, synthetic construct
  source 1..22: mol_type = other RNA
gttgttgttgttttgtttttct

SEQ ID NO: 144916 - RNA, 22 nt, synthetic construct
  source 1..22: mol_type = other RNA
gttgttgtttctgagccagagt

SEQ ID NO: 144917 - RNA, 22 nt, synthetic construct
  source 1..22: mol_type = other RNA
gttgtttacttgggtataaatg

SEQ ID NO: 144918 - RNA, 22 nt, synthetic construct
  source 1..22: mol_type = other RNA
gttgtttccactttgaggttat

SEQ ID NO: 144919 - RNA, 22 nt, synthetic construct
  source 1..22: mol_type = other RNA
gttgtttccatgtcttggctat

SEQ ID NO: 144920 - RNA, 22 nt, synthetic construct
  source 1..22: mol_type = other RNA
gttgtttctgagccagagtttc

SEQ ID NO: 144921 - RNA, 22 nt, synthetic construct
  source 1..22: mol_type = other RNA
gtttaaaaacaacactaaccaa

SEQ ID NO: 144922 - RNA, 22 nt, synthetic construct
  source 1..22: mol_type = other RNA
gtttaaaaagaaaaagctcacc

SEQ ID NO: 144923 - RNA, 22 nt, synthetic construct
  source 1..22: mol_type = other RNA
gtttaaaagagtgcacattcct

SEQ ID NO: 144924 - RNA, 22 nt, synthetic construct
  source 1..22: mol_type = other RNA
gtttaaagctttgtgactgtga

SEQ ID NO: 144925 - RNA, 22 nt, synthetic construct
  source 1..22: mol_type = other RNA
gtttaacacatacaaaccaaaa

SEQ ID NO: 144926 - RNA, 22 nt, synthetic construct
  source 1..22: mol_type = other RNA
gtttaaccaattatgctgagtg

SEQ ID NO: 144927 - RNA, 22 nt, synthetic construct
  source 1..22: mol_type = other RNA
gtttaactatcctatgtgggga

SEQ ID NO: 144928 - RNA, 22 nt, synthetic construct
  source 1..22: mol_type = other RNA
gtttaactgaggtgtttttcag

SEQ ID NO: 144929 - RNA, 22 nt, synthetic construct
  source 1..22: mol_type = other RNA
gtttaactttgatgaattccag

SEQ ID NO: 144930 - RNA, 22 nt, synthetic construct
  source 1..22: mol_type = other RNA
gtttaaggtaagggtccagctt

SEQ ID NO: 144931 - RNA, 22 nt, synthetic construct
  source 1..22: mol_type = other RNA
gtttaattacccaggcatgatg

SEQ ID NO: 144932 - RNA, 22 nt, synthetic construct
  source 1..22: mol_type = other RNA
gtttaattagccgggtgtagtg

SEQ ID NO: 144933 - RNA, 22 nt, synthetic construct
  source 1..22: mol_type = other RNA
gtttaattcctactttcttcaa

SEQ ID NO: 144934 - RNA, 22 nt, synthetic construct
  source 1..22: mol_type = other RNA
gtttaattctgtttacccttac

SEQ ID NO: 144935 - RNA, 22 nt, synthetic construct
  source 1..22: mol_type = other RNA
gtttaattcttttgctgtatac

SEQ ID NO: 144936 - RNA, 22 nt, synthetic construct
  source 1..22: mol_type = other RNA
gtttaattgggggaaaattgac

SEQ ID NO: 144937 - RNA, 22 nt, synthetic construct
  source 1..22: mol_type = other RNA
gtttaatttccacccatgaagc

SEQ ID NO: 144938 - RNA, 22 nt, synthetic construct
  source 1..22: mol_type = other RNA
gtttacacacctgaaattctca

SEQ ID NO: 144939 - RNA, 22 nt, synthetic construct
  source 1..22: mol_type = other RNA
gtttacacgccttcgcgggcac

SEQ ID NO: 144940 - RNA, 22 nt, synthetic construct
  source 1..22: mol_type = other RNA
gtttacactatggcttttgagt

SEQ ID NO: 144941 - RNA, 22 nt, synthetic construct
  source 1..22: mol_type = other RNA
gtttacagaaatataccttatg

SEQ ID NO: 144942 - RNA, 22 nt, synthetic construct
  source 1..22: mol_type = other RNA
gtttacaggatatcagaagtgc

SEQ ID NO: 144943 - RNA, 22 nt, synthetic construct
  source 1..22: mol_type = other RNA
gtttacagtagccaaaggtaga

SEQ ID NO: 144944 - RNA, 22 nt, synthetic construct
  source 1..22: mol_type = other RNA
gtttacattagagaagaatgag

SEQ ID NO: 144945 - RNA, 22 nt, synthetic construct
  source 1..22: mol_type = other RNA
gtttaccaagggtgtgtttaat

SEQ ID NO: 144946 - RNA, 22 nt, synthetic construct
  source 1..22: mol_type = other RNA
gtttacccagtgtgtttgtttg

SEQ ID NO: 144947 - RNA, 22 nt, synthetic construct
  source 1..22: mol_type = other RNA
gtttacccttactaaattttga

SEQ ID NO: 144948 - RNA, 22 nt, synthetic construct
  source 1..22: mol_type = other RNA
gtttactccaagaaggctagca

SEQ ID NO: 144949 - RNA, 22 nt, synthetic construct
  source 1..22: mol_type = other RNA
gtttacttggggagagtgggcc

SEQ ID NO: 144950 - RNA, 22 nt, synthetic construct
  source 1..22: mol_type = other RNA
gtttacttgggtataaatgatg

SEQ ID NO: 144951 - RNA, 22 nt, synthetic construct
  source 1..22: mol_type = other RNA
gtttagaaaacatatccttcta

SEQ ID NO: 144952 - RNA, 22 nt, synthetic construct
  source 1..22: mol_type = other RNA
gtttagcaagattactggatac

SEQ ID NO: 144953 - RNA, 22 nt, synthetic construct
  source 1..22: mol_type = other RNA
gtttagcaatccaaggacagaa

SEQ ID NO: 144954 - RNA, 22 nt, synthetic construct
  source 1..22: mol_type = other RNA
gtttagcatctagcacagaacc

SEQ ID NO: 144955 - RNA, 22 nt, synthetic construct
  source 1..22: mol_type = other RNA
gtttagcggaatgactatagaa

SEQ ID NO: 144956 - RNA, 22 nt, synthetic construct
  source 1..22: mol_type = other RNA
gtttaggaagcacattccttcc

SEQ ID NO: 144957 - RNA, 22 nt, synthetic construct
  source 1..22: mol_type = other RNA
gtttaggatataagagtgggca

SEQ ID NO: 144958 - RNA, 22 nt, synthetic construct
  source 1..22: mol_type = other RNA
gtttaggctgtctccaacgctt

SEQ ID NO: 144959 - RNA, 22 nt, synthetic construct
  source 1..22: mol_type = other RNA
gtttagggacgaatgcatggga

SEQ ID NO: 144960 - RNA, 22 nt, synthetic construct
  source 1..22: mol_type = other RNA
gtttaggtttttcttgtgggta

SEQ ID NO: 144961 - RNA, 22 nt, synthetic construct
  source 1..22: mol_type = other RNA
gtttagtaaatctttggtgaag

SEQ ID NO: 144962 - RNA, 22 nt, synthetic construct
  source 1..22: mol_type = other RNA
gtttagtagaattctccagtga

SEQ ID NO: 144963 - RNA, 22 nt, synthetic construct
  source 1..22: mol_type = other RNA
gtttagtagctgtctttaatgt

SEQ ID NO: 144964 - RNA, 22 nt, synthetic construct
  source 1..22: mol_type = other RNA
gtttagtgcagtatcttgaaga

SEQ ID NO: 144965 - RNA, 22 nt, synthetic construct
  source 1..22: mol_type = other RNA
gtttagttactcaaatccaaat

SEQ ID NO: 144966 - RNA, 22 nt, synthetic construct
  source 1..22: mol_type = other RNA
gtttagttattaaatgagacac

SEQ ID NO: 144967 - RNA, 22 nt, synthetic construct
  source 1..22: mol_type = other RNA
gtttatatgcctagatgattcg

SEQ ID NO: 144968 - RNA, 22 nt, synthetic construct
  source 1..22: mol_type = other RNA
gtttatattctaagtttgccaa

SEQ ID NO: 144969 - RNA, 22 nt, synthetic construct
  source 1..22: mol_type = other RNA
gtttatcagtctccaatcctca

SEQ ID NO: 144970 - RNA, 22 nt, synthetic construct
  source 1..22: mol_type = other RNA
gtttatccttgcaccaactcca

SEQ ID NO: 144971 - RNA, 22 nt, synthetic construct
  source 1..22: mol_type = other RNA
gtttatctacagaggattttgg

SEQ ID NO: 144972 - RNA, 22 nt, synthetic construct
  source 1..22: mol_type = other RNA
gtttatgaatgatgccatcaca

SEQ ID NO: 144973 - RNA, 22 nt, synthetic construct
  source 1..22: mol_type = other RNA
gtttatgggtcaaccactaagg

SEQ ID NO: 144974 - RNA, 22 nt, synthetic construct
  source 1..22: mol_type = other RNA
gtttattagaactagaactgtg

SEQ ID NO: 144975 - RNA, 22 nt, synthetic construct
  source 1..22: mol_type = other RNA
gtttattcatacgttaactgta

SEQ ID NO: 144976 - RNA, 22 nt, synthetic construct
  source 1..22: mol_type = other RNA
gtttattcatataatggagtac

SEQ ID NO: 144977 - RNA, 22 nt, synthetic construct
  source 1..22: mol_type = other RNA
gtttatttagtgaaatagttgg

SEQ ID NO: 144978 - RNA, 22 nt, synthetic construct
  source 1..22: mol_type = other RNA
gtttatttcttctccctcttcg

SEQ ID NO: 144979 - RNA, 22 nt, synthetic construct
  source 1..22: mol_type = other RNA
gtttatttgctgtcaggcaagg

SEQ ID NO: 144980 - RNA, 22 nt, synthetic construct
  source 1..22: mol_type = other RNA
gtttattttctgcatttggttt

SEQ ID NO: 144981 - RNA, 22 nt, synthetic construct
  source 1..22: mol_type = other RNA
gtttcaaaagctccccggatga

SEQ ID NO: 144982 - RNA, 22 nt, synthetic construct
  source 1..22: mol_type = other RNA
gtttcaaactgtggtcactgtt

SEQ ID NO: 144983 - RNA, 22 nt, synthetic construct
  source 1..22: mol_type = other RNA
gtttcaagtgaaccaaaaacca

SEQ ID NO: 144984 - RNA, 22 nt, synthetic construct
  source 1..22: mol_type = other RNA
gtttcaatattaagagtctcat

SEQ ID NO: 144985 - RNA, 22 nt, synthetic construct
  source 1..22: mol_type = other RNA
gtttcacacgcattgcattgac

SEQ ID NO: 144986 - RNA, 22 nt, synthetic construct
  source 1..22: mol_type = other RNA
gtttcaccctgcgaaggcaatg

SEQ ID NO: 144987 - RNA, 22 nt, synthetic construct
  source 1..22: mol_type = other RNA
gtttcactctgtcgcccaggct

SEQ ID NO: 144988 - RNA, 22 nt, synthetic construct
  source 1..22: mol_type = other RNA
gtttcacttcttagtaaatatc

SEQ ID NO: 144989 - RNA, 22 nt, synthetic construct
  source 1..22: mol_type = other RNA
gtttcacttttctggttttctg

SEQ ID NO: 144990 - RNA, 22 nt, synthetic construct
  source 1..22: mol_type = other RNA
gtttcagattgcttgagagaga

SEQ ID NO: 144991 - RNA, 22 nt, synthetic construct
  source 1..22: mol_type = other RNA
gtttcagcacaatactgtctca

SEQ ID NO: 144992 - RNA, 22 nt, synthetic construct
  source 1..22: mol_type = other RNA
gtttcagtacacgaaaatatcc

SEQ ID NO: 144993 - RNA, 22 nt, synthetic construct
  source 1..22: mol_type = other RNA
gtttcagtccctcctttctaga

SEQ ID NO: 144994 - RNA, 22 nt, synthetic construct
  source 1..22: mol_type = other RNA
gtttcagtgagtagggaaggtg

SEQ ID NO: 144995 - RNA, 22 nt, synthetic construct
  source 1..22: mol_type = other RNA
gtttcagtgtgtccacacaatg

SEQ ID NO: 144996 - RNA, 22 nt, synthetic construct
  source 1..22: mol_type = other RNA
gtttcataaaatgatggcaaca

SEQ ID NO: 144997 - RNA, 22 nt, synthetic construct
  source 1..22: mol_type = other RNA
gtttcatctatgtcccctgggg

SEQ ID NO: 144998 - RNA, 22 nt, synthetic construct
  source 1..22: mol_type = other RNA
gtttcatggacttcctatttta

SEQ ID NO: 144999 - RNA, 22 nt, synthetic construct
  source 1..22: mol_type = other RNA
gtttcatttacaaaaacacact

SEQ ID NO: 145000 - RNA, 22 nt, synthetic construct
  source 1..22: mol_type = other RNA
gtttccactttgaggttattaa

SEQ ID NO: 145001 - RNA, 22 nt, synthetic construct
  source 1..22: mol_type = other RNA
gtttccagaaaactggcaatca

SEQ ID NO: 145002 - RNA, 22 nt, synthetic construct
  source 1..22: mol_type = other RNA
gtttccagtggcccccctgaaa

SEQ ID NO: 145003 - RNA, 22 nt, synthetic construct
  source 1..22: mol_type = other RNA
gtttccataaaaagcgttggag

SEQ ID NO: 145004 - RNA, 22 nt, synthetic construct
  source 1..22: mol_type = other RNA
gtttccatggaggggccagttg

SEQ ID NO: 145005 - RNA, 22 nt, synthetic construct
  source 1..22: mol_type = other RNA
gtttccatgtcttggctattgt

SEQ ID NO: 145006 - RNA, 22 nt, synthetic construct
  source 1..22: mol_type = other RNA
gtttccctctgagagaagtcag

SEQ ID NO: 145007 - RNA, 22 nt, synthetic construct
  source 1..22: mol_type = other RNA
gtttccctggggaataagattt

SEQ ID NO: 145008 - RNA, 22 nt, synthetic construct
  source 1..22: mol_type = other RNA
gtttcccttaaaaggaactaat

SEQ ID NO: 145009 - RNA, 22 nt, synthetic construct
  source 1..22: mol_type = other RNA
gtttcccttaatgttgacatct

SEQ ID NO: 145010 - RNA, 22 nt, synthetic construct
  source 1..22: mol_type = other RNA
gtttccgttttgcaagatgcat

SEQ ID NO: 145011 - RNA, 22 nt, synthetic construct
  source 1..22: mol_type = other RNA
gtttcctaatctaacatgttac

SEQ ID NO: 145012 - RNA, 22 nt, synthetic construct
  source 1..22: mol_type = other RNA
gtttcctacatactgcactctc

SEQ ID NO: 145013 - RNA, 22 nt, synthetic construct
  source 1..22: mol_type = other RNA
gtttcctagaaaatcatacatt

SEQ ID NO: 145014 - RNA, 22 nt, synthetic construct
  source 1..22: mol_type = other RNA
gtttcctagattccctctggcc

SEQ ID NO: 145015 - RNA, 22 nt, synthetic construct
  source 1..22: mol_type = other RNA
gtttcctcggtctacggacgca

SEQ ID NO: 145016 - RNA, 22 nt, synthetic construct
  source 1..22: mol_type = other RNA
gtttcctgcacatgcacaaggt

SEQ ID NO: 145017 - RNA, 22 nt, synthetic construct
  source 1..22: mol_type = other RNA
gtttccttaccagtgcttgcag

SEQ ID NO: 145018 - RNA, 22 nt, synthetic construct
  source 1..22: mol_type = other RNA
gtttccttacctttatctttgg

SEQ ID NO: 145019 - RNA, 22 nt, synthetic construct
  source 1..22: mol_type = other RNA
gtttccttccagatgttttaca

SEQ ID NO: 145020 - RNA, 22 nt, synthetic construct
  source 1..22: mol_type = other RNA
gtttcgcaaagtaaaaagcact

SEQ ID NO: 145021 - RNA, 22 nt, synthetic construct
  source 1..22: mol_type = other RNA
gtttctacctttggctactgta

SEQ ID NO: 145022 - RNA, 22 nt, synthetic construct
  source 1..22: mol_type = other RNA
gtttctagccataatccttaga

SEQ ID NO: 145023 - RNA, 22 nt, synthetic construct
  source 1..22: mol_type = other RNA
gtttctcaacttagccttggta

SEQ ID NO: 145024 - RNA, 22 nt, synthetic construct
  source 1..22: mol_type = other RNA
gtttctcattcttctctaatgt

SEQ ID NO: 145025 - RNA, 22 nt, synthetic construct
  source 1..22: mol_type = other RNA
gtttctcatttttcaggggggc

SEQ ID NO: 145026 - RNA, 22 nt, synthetic construct
  source 1..22: mol_type = other RNA
gtttctcctgcatggggagttt

SEQ ID NO: 145027 - RNA, 22 nt, synthetic construct
  source 1..22: mol_type = other RNA
gtttctccttctgcaggctgaa

SEQ ID NO: 145028 - RNA, 22 nt, synthetic construct
  source 1..22: mol_type = other RNA
gtttctctacatctggatcctg

SEQ ID NO: 145029 - RNA, 22 nt, synthetic construct
  source 1..22: mol_type = other RNA
gtttctctccaaggtacaatta

SEQ ID NO: 145030 - RNA, 22 nt, synthetic construct
  source 1..22: mol_type = other RNA
gtttctctctccctgccctgtg

SEQ ID NO: 145031 - RNA, 22 nt, synthetic construct
  source 1..22: mol_type = other RNA
gtttctctgctttttcttggtg

SEQ ID NO: 145032 - RNA, 22 nt, synthetic construct
  source 1..22: mol_type = other RNA
gtttctgacacccgacccacta

SEQ ID NO: 145033 - RNA, 22 nt, synthetic construct
  source 1..22: mol_type = other RNA
gtttctgacaggtggtatggga

SEQ ID NO: 145034 - RNA, 22 nt, synthetic construct
  source 1..22: mol_type = other RNA
gtttctgagccagagtttcact

SEQ ID NO: 145035 - RNA, 22 nt, synthetic construct
  source 1..22: mol_type = other RNA
gtttctgaggtggagttctgct

SEQ ID NO: 145036 - RNA, 22 nt, synthetic construct
  source 1..22: mol_type = other RNA
gtttctgcatacttagctaatt

SEQ ID NO: 145037 - RNA, 22 nt, synthetic construct
  source 1..22: mol_type = other RNA
gtttctgctattctctttctga

SEQ ID NO: 145038 - RNA, 22 nt, synthetic construct
  source 1..22: mol_type = other RNA
gtttctggaagtttcctgcaca

SEQ ID NO: 145039 - RNA, 22 nt, synthetic construct
  source 1..22: mol_type = other RNA
gtttctgtgaaaaaacaaaaca

SEQ ID NO: 145040 - RNA, 22 nt, synthetic construct
  source 1..22: mol_type = other RNA
gtttctgtttggatgaaaaagt

SEQ ID NO: 145041 - RNA, 22 nt, synthetic construct
  source 1..22: mol_type = other RNA
gtttcttagctatattcacttt

SEQ ID NO: 145042 - RNA, 22 nt, synthetic construct
  source 1..22: mol_type = other RNA
gtttcttcaagatactgcacta

SEQ ID NO: 145043 - RNA, 22 nt, synthetic construct
  source 1..22: mol_type = other RNA
gtttcttcactcttaaaaggag

SEQ ID NO: 145044 - RNA, 22 nt, synthetic construct
  source 1..22: mol_type = other RNA
gtttcttgaatctctctatcca

SEQ ID NO: 145045 - RNA, 22 nt, synthetic construct
  source 1..22: mol_type = other RNA
gtttcttttcactctaatatgg

SEQ ID NO: 145046 - RNA, 22 nt, synthetic construct
  source 1..22: mol_type = other RNA
gtttctttttgttttctccttc

SEQ ID NO: 145047 - RNA, 22 nt, synthetic construct
  source 1..22: mol_type = other RNA
gtttgaaaagtgtttgtcacat

SEQ ID NO: 145048 - RNA, 22 nt, synthetic construct
  source 1..22: mol_type = other RNA
gtttgaaactttaagagtatct

SEQ ID NO: 145049 - RNA, 22 nt, synthetic construct
  source 1..22: mol_type = other RNA
gtttgaaatgatcttttgtagt

SEQ ID NO: 145050 - RNA, 22 nt, synthetic construct
  source 1..22: mol_type = other RNA
gtttgaaatttaaagacgttca

SEQ ID NO: 145051 - RNA, 22 nt, synthetic construct
  source 1..22: mol_type = other RNA
gtttgaaccccagaaggttaac

SEQ ID NO: 145052 - RNA, 22 nt, synthetic construct
  source 1..22: mol_type = other RNA
gtttgaagcttcacttctctgc

SEQ ID NO: 145053 - RNA, 22 nt, synthetic construct
  source 1..22: mol_type = other RNA
gtttgaattaagcaccactaga

SEQ ID NO: 145054 - RNA, 22 nt, synthetic construct
  source 1..22: mol_type = other RNA
gtttgaattttccattcacaca

SEQ ID NO: 145055 - RNA, 22 nt, synthetic construct
  source 1..22: mol_type = other RNA
gtttgacctgtaatttttctct

SEQ ID NO: 145056 - RNA, 22 nt, synthetic construct
  source 1..22: mol_type = other RNA
gtttgagaagccacacagtaca

SEQ ID NO: 145057 - RNA, 22 nt, synthetic construct
  source 1..22: mol_type = other RNA
gtttgagaagtcttttcctacc

SEQ ID NO: 145058 - RNA, 22 nt, synthetic construct
  source 1..22: mol_type = other RNA
gtttgagaccagcgtgggcaac

SEQ ID NO: 145059 - RNA, 22 nt, synthetic construct
  source 1..22: mol_type = other RNA
gtttgagactgcagtgacctat

SEQ ID NO: 145060 - RNA, 22 nt, synthetic construct
  source 1..22: mol_type = other RNA
gtttgagctgaaagtaaagata

SEQ ID NO: 145061 - RNA, 22 nt, synthetic construct
  source 1..22: mol_type = other RNA
gtttgaggccgcagtgagccat

SEQ ID NO: 145062 - RNA, 22 nt, synthetic construct
  source 1..22: mol_type = other RNA
gtttgaggctgggagtacaaga

SEQ ID NO: 145063 - RNA, 22 nt, synthetic construct
  source 1..22: mol_type = other RNA
gtttgaggcttttcatagtcat

SEQ ID NO: 145064 - RNA, 22 nt, synthetic construct
  source 1..22: mol_type = other RNA
gtttgaggtgtacaattaggct

SEQ ID NO: 145065 - RNA, 22 nt, synthetic construct
  source 1..22: mol_type = other RNA
gtttgagtatttcatgtacttg

SEQ ID NO: 145066 - RNA, 22 nt, synthetic construct
  source 1..22: mol_type = other RNA
gtttgagttgtttccactttga

SEQ ID NO: 145067 - RNA, 22 nt, synthetic construct
  source 1..22: mol_type = other RNA
gtttgagtttccagaaaactgg

SEQ ID NO: 145068 - RNA, 22 nt, synthetic construct
  source 1..22: mol_type = other RNA
gtttgatcccactagtggaaga

SEQ ID NO: 145069 - RNA, 22 nt, synthetic construct
  source 1..22: mol_type = other RNA
gtttgatctggtcacaaacaca

SEQ ID NO: 145070 - RNA, 22 nt, synthetic construct
  source 1..22: mol_type = other RNA
gtttgattagttgactcctaaa

SEQ ID NO: 145071 - RNA, 22 nt, synthetic construct
  source 1..22: mol_type = other RNA
gtttgattgttccaggggggaa

SEQ ID NO: 145072 - RNA, 22 nt, synthetic construct
  source 1..22: mol_type = other RNA
gtttgcaaaaattttgttcagg

SEQ ID NO: 145073 - RNA, 22 nt, synthetic construct
  source 1..22: mol_type = other RNA
gtttgcaatacagttaacgtat

SEQ ID NO: 145074 - RNA, 22 nt, synthetic construct
  source 1..22: mol_type = other RNA
gtttgcacgtttttagaaattt

SEQ ID NO: 145075 - RNA, 22 nt, synthetic construct
  source 1..22: mol_type = other RNA
gtttgcactggcacagcactgt

SEQ ID NO: 145076 - RNA, 22 nt, synthetic construct
  source 1..22: mol_type = other RNA
gtttgcattacatgaatggaaa

SEQ ID NO: 145077 - RNA, 22 nt, synthetic construct
  source 1..22: mol_type = other RNA
gtttgccaaagattcttgtcat

SEQ ID NO: 145078 - RNA, 22 nt, synthetic construct
  source 1..22: mol_type = other RNA
gtttgccatcttcaagatttca

SEQ ID NO: 145079 - RNA, 22 nt, synthetic construct
  source 1..22: mol_type = other RNA
gtttgcctgcgtccgtagaccg

SEQ ID NO: 145080 - RNA, 22 nt, synthetic construct
  source 1..22: mol_type = other RNA
gtttgccttttcactcttagtg

SEQ ID NO: 145081 - RNA, 22 nt, synthetic construct
  source 1..22: mol_type = other RNA
gtttgctaataatgatgactat

SEQ ID NO: 145082 - RNA, 22 nt, synthetic construct
  source 1..22: mol_type = other RNA
gtttgctagagctgctgtaaca

SEQ ID NO: 145083 - RNA, 22 nt, synthetic construct
  source 1..22: mol_type = other RNA
gtttgctagtattttgttgaca

SEQ ID NO: 145084 - RNA, 22 nt, synthetic construct
  source 1..22: mol_type = other RNA
gtttgctagtggtaactagatg

SEQ ID NO: 145085 - RNA, 22 nt, synthetic construct
  source 1..22: mol_type = other RNA
gtttgctctgcaaatgaggttg

SEQ ID NO: 145086 - RNA, 22 nt, synthetic construct
  source 1..22: mol_type = other RNA
gtttgctttggagtcacagtga

SEQ ID NO: 145087 - RNA, 22 nt, synthetic construct
  source 1..22: mol_type = other RNA
gtttgctttggagtgagaggac

SEQ ID NO: 145088 - RNA, 22 nt, synthetic construct
  source 1..22: mol_type = other RNA
gtttggaaccagcctggccaat

SEQ ID NO: 145089 - RNA, 22 nt, synthetic construct
  source 1..22: mol_type = other RNA
gtttggagtttgtagctcaaag

SEQ ID NO: 145090 - RNA, 22 nt, synthetic construct
  source 1..22: mol_type = other RNA
gtttggatgaaaaagtactgga

SEQ ID NO: 145091 - RNA, 22 nt, synthetic construct
  source 1..22: mol_type = other RNA
gtttggcaatttctcaaaaatt

SEQ ID NO: 145092 - RNA, 22 nt, synthetic construct
  source 1..22: mol_type = other RNA
gtttggcagtttaagaattaaa

SEQ ID NO: 145093 - RNA, 22 nt, synthetic construct
  source 1..22: mol_type = other RNA
gtttggctcccatgattcaaaa

SEQ ID NO: 145094 - RNA, 22 nt, synthetic construct
  source 1..22: mol_type = other RNA
gtttggctccttaccactataa

SEQ ID NO: 145095 - RNA, 22 nt, synthetic construct
  source 1..22: mol_type = other RNA
gtttggctgggagcttatcagg

SEQ ID NO: 145096 - RNA, 22 nt, synthetic construct
  source 1..22: mol_type = other RNA
gtttggggcttttgaacactct

SEQ ID NO: 145097 - RNA, 22 nt, synthetic construct
  source 1..22: mol_type = other RNA
gtttgggtgacagagagagacc

SEQ ID NO: 145098 - RNA, 22 nt, synthetic construct
  source 1..22: mol_type = other RNA
gtttggtagatttctgcataga

SEQ ID NO: 145099 - RNA, 22 nt, synthetic construct
  source 1..22: mol_type = other RNA
gtttggtcaattgatctgccag

SEQ ID NO: 145100 - RNA, 22 nt, synthetic construct
  source 1..22: mol_type = other RNA
gtttggtgactgaattcccaca

SEQ ID NO: 145101 - RNA, 22 nt, synthetic construct
  source 1..22: mol_type = other RNA
gtttggttcatttcaggaatgc

SEQ ID NO: 145102 - RNA, 22 nt, synthetic construct
  source 1..22: mol_type = other RNA
gtttggtttttatggaataatg

SEQ ID NO: 145103 - RNA, 22 nt, synthetic construct
  source 1..22: mol_type = other RNA
gtttgtaacttgttcatgttta

SEQ ID NO: 145104 - RNA, 22 nt, synthetic construct
  source 1..22: mol_type = other RNA
gtttgtacttctaccttgaaaa

SEQ ID NO: 145105 - RNA, 22 nt, synthetic construct
  source 1..22: mol_type = other RNA
gtttgtagagcaagcaacacca

SEQ ID NO: 145106 - RNA, 22 nt, synthetic construct
  source 1..22: mol_type = other RNA
gtttgtagctcaaagcatatga

SEQ ID NO: 145107 - RNA, 22 nt, synthetic construct
  source 1..22: mol_type = other RNA
gtttgtatgtgttaaaccattc

SEQ ID NO: 145108 - RNA, 22 nt, synthetic construct
  source 1..22: mol_type = other RNA
gtttgtcacatagaagcgctct

SEQ ID NO: 145109 - RNA, 22 nt, synthetic construct
  source 1..22: mol_type = other RNA
gtttgtgaagatacaaatagta

SEQ ID NO: 145110 - RNA, 22 nt, synthetic construct
  source 1..22: mol_type = other RNA
gtttgtgaccagatcaaacgtg

SEQ ID NO: 145111 - RNA, 22 nt, synthetic construct
  source 1..22: mol_type = other RNA
gtttgtgcttggatattctaca

SEQ ID NO: 145112 - RNA, 22 nt, synthetic construct
  source 1..22: mol_type = other RNA
gtttgtggttttaacctcttga

SEQ ID NO: 145113 - RNA, 22 nt, synthetic construct
  source 1..22: mol_type = other RNA
gtttgtgtgtttgtgaaaaata

SEQ ID NO: 145114 - RNA, 22 nt, synthetic construct
  source 1..22: mol_type = other RNA
gtttgtgttttcactctcaata

SEQ ID NO: 145115 - RNA, 22 nt, synthetic construct
  source 1..22: mol_type = other RNA
gtttgttagatctgggataatg

SEQ ID NO: 145116 - RNA, 22 nt, synthetic construct
  source 1..22: mol_type = other RNA
gtttgttctgctgttgatggac

SEQ ID NO: 145117 - RNA, 22 nt, synthetic construct
  source 1..22: mol_type = other RNA
gtttgttctgtcacatttgaaa

SEQ ID NO: 145118 - RNA, 22 nt, synthetic construct
  source 1..22: mol_type = other RNA
gtttgttgacccaatcatgttc

SEQ ID NO: 145119 - RNA, 22 nt, synthetic construct
  source 1..22: mol_type = other RNA
gtttgttgggtttaactgaggt

SEQ ID NO: 145120 - RNA, 22 nt, synthetic construct
  source 1..22: mol_type = other RNA
gtttgtttaattagccgggtgt

SEQ ID NO: 145121 - RNA, 22 nt, synthetic construct
  source 1..22: mol_type = other RNA
gtttgtttctgaggtggagttc

SEQ ID NO: 145122 - RNA, 22 nt, synthetic construct
  source 1..22: mol_type = other RNA
gtttgtttgctagagctgctgt

SEQ ID NO: 145123 - RNA, 22 nt, synthetic construct
  source 1..22: mol_type = other RNA
gtttgttttttgttttggtcaa

SEQ ID NO: 145124 - RNA, 22 nt, synthetic construct
  source 1..22: mol_type = other RNA
gttttaaagcagggaggggtcc

SEQ ID NO: 145125 - RNA, 22 nt, synthetic construct
  source 1..22: mol_type = other RNA
gttttaacctcttgaagtcagt

SEQ ID NO: 145126 - RNA, 22 nt, synthetic construct
  source 1..22: mol_type = other RNA
gttttaactcttgcattagagc

SEQ ID NO: 145127 - RNA, 22 nt, synthetic construct
  source 1..22: mol_type = other RNA
gttttaagaaaagaagttacgg

SEQ ID NO: 145128 - RNA, 22 nt, synthetic construct
  source 1..22: mol_type = other RNA
gttttaaggcagggcttggtgg

SEQ ID NO: 145129 - RNA, 22 nt, synthetic construct
  source 1..22: mol_type = other RNA
gttttaatgggcattagaagtt

SEQ ID NO: 145130 - RNA, 22 nt, synthetic construct
  source 1..22: mol_type = other RNA
gttttacacatgtcagccacaa

SEQ ID NO: 145131 - RNA, 22 nt, synthetic construct
  source 1..22: mol_type = other RNA
gttttacatgtttaactatcct

SEQ ID NO: 145132 - RNA, 22 nt, synthetic construct
  source 1..22: mol_type = other RNA
gttttaccatctaaagccaggc

SEQ ID NO: 145133 - RNA, 22 nt, synthetic construct
  source 1..22: mol_type = other RNA
gttttactactgtactgtttag

SEQ ID NO: 145134 - RNA, 22 nt, synthetic construct
  source 1..22: mol_type = other RNA
gttttaggaaaatagagttcca

SEQ ID NO: 145135 - RNA, 22 nt, synthetic construct
  source 1..22: mol_type = other RNA
gttttaggagtcaactaatcaa

SEQ ID NO: 145136 - RNA, 22 nt, synthetic construct
  source 1..22: mol_type = other RNA
gttttaggggggaaaacaccct

SEQ ID NO: 145137 - RNA, 22 nt, synthetic construct
  source 1..22: mol_type = other RNA
gttttaggtagtcttgtcataa

SEQ ID NO: 145138 - RNA, 22 nt, synthetic construct
  source 1..22: mol_type = other RNA
gttttagtggctcacagtgctc

SEQ ID NO: 145139 - RNA, 22 nt, synthetic construct
  source 1..22: mol_type = other RNA
gttttatagtcttagctcttaa

SEQ ID NO: 145140 - RNA, 22 nt, synthetic construct
  source 1..22: mol_type = other RNA
gttttatcaattagttcctcct

SEQ ID NO: 145141 - RNA, 22 nt, synthetic construct
  source 1..22: mol_type = other RNA
gttttatctctctcaagcaatc

SEQ ID NO: 145142 - RNA, 22 nt, synthetic construct
  source 1..22: mol_type = other RNA
gttttatggtaactcctgttct

SEQ ID NO: 145143 - RNA, 22 nt, synthetic construct
  source 1..22: mol_type = other RNA
gttttatttagcccatgtctaa

SEQ ID NO: 145144 - RNA, 22 nt, synthetic construct
  source 1..22: mol_type = other RNA
gttttatttaggccctctataa

SEQ ID NO: 145145 - RNA, 22 nt, synthetic construct
  source 1..22: mol_type = other RNA
gttttatttcttgacctcagtg

SEQ ID NO: 145146 - RNA, 22 nt, synthetic construct
  source 1..22: mol_type = other RNA
gttttatttggctgttaccatt

SEQ ID NO: 145147 - RNA, 22 nt, synthetic construct
  source 1..22: mol_type = other RNA
gttttcaaatgctataaagaac

SEQ ID NO: 145148 - RNA, 22 nt, synthetic construct
  source 1..22: mol_type = other RNA
gttttcaacaaaggttgaaaac

SEQ ID NO: 145149 - RNA, 22 nt, synthetic construct
  source 1..22: mol_type = other RNA
gttttcaacctttgttgaaaac

SEQ ID NO: 145150 - RNA, 22 nt, synthetic construct
  source 1..22: mol_type = other RNA
gttttcactctcaatagtgtcc

SEQ ID NO: 145151 - RNA, 22 nt, synthetic construct
  source 1..22: mol_type = other RNA
gttttcacttttgtgcaacata

SEQ ID NO: 145152 - RNA, 22 nt, synthetic construct
  source 1..22: mol_type = other RNA
gttttcagttgcatgaatttgt

SEQ ID NO: 145153 - RNA, 22 nt, synthetic construct
  source 1..22: mol_type = other RNA
gttttcatgcgacatatcaggg

SEQ ID NO: 145154 - RNA, 22 nt, synthetic construct
  source 1..22: mol_type = other RNA
gttttcattcgttcaaaacatc

SEQ ID NO: 145155 - RNA, 22 nt, synthetic construct
  source 1..22: mol_type = other RNA
gttttcatttattctgttgcaa

SEQ ID NO: 145156 - RNA, 22 nt, synthetic construct
  source 1..22: mol_type = other RNA
gttttccaaccactgaatcaga

SEQ ID NO: 145157 - RNA, 22 nt, synthetic construct
  source 1..22: mol_type = other RNA
gttttccaataagttaactgaa

SEQ ID NO: 145158 - RNA, 22 nt, synthetic construct
  source 1..22: mol_type = other RNA
gttttccaatccgggaacatga

SEQ ID NO: 145159 - RNA, 22 nt, synthetic construct
  source 1..22: mol_type = other RNA
gttttccacagtgactttactg

SEQ ID NO: 145160 - RNA, 22 nt, synthetic construct
  source 1..22: mol_type = other RNA
gttttccaggaaaagcaaatgt

SEQ ID NO: 145161 - RNA, 22 nt, synthetic construct
  source 1..22: mol_type = other RNA
gttttccagtatattcatagta

SEQ ID NO: 145162 - RNA, 22 nt, synthetic construct
  source 1..22: mol_type = other RNA
gttttcccccctaaaacactgg

SEQ ID NO: 145163 - RNA, 22 nt, synthetic construct
  source 1..22: mol_type = other RNA
gttttccccctacacccagttc

SEQ ID NO: 145164 - RNA, 22 nt, synthetic construct
  source 1..22: mol_type = other RNA
gttttccctgtgtatgtgtagt

SEQ ID NO: 145165 - RNA, 22 nt, synthetic construct
  source 1..22: mol_type = other RNA
gttttcccttttgtagctaata

SEQ ID NO: 145166 - RNA, 22 nt, synthetic construct
  source 1..22: mol_type = other RNA
gttttccgtgtgacaaaaagta

SEQ ID NO: 145167 - RNA, 22 nt, synthetic construct
  source 1..22: mol_type = other RNA
gttttcctactaacaagaaagg

SEQ ID NO: 145168 - RNA, 22 nt, synthetic construct
  source 1..22: mol_type = other RNA
gttttcctgatggacattctgc

SEQ ID NO: 145169 - RNA, 22 nt, synthetic construct
  source 1..22: mol_type = other RNA
gttttcctgcctcagccccctg

SEQ ID NO: 145170 - RNA, 22 nt, synthetic construct
  source 1..22: mol_type = other RNA
gttttcgaccaagttactagaa

SEQ ID NO: 145171 - RNA, 22 nt, synthetic construct
  source 1..22: mol_type = other RNA
gttttctaaaccttaaaagagt

SEQ ID NO: 145172 - RNA, 22 nt, synthetic construct
  source 1..22: mol_type = other RNA
gttttctagttagtttgttgac

SEQ ID NO: 145173 - RNA, 22 nt, synthetic construct
  source 1..22: mol_type = other RNA
gttttctccttctggaagattt

SEQ ID NO: 145174 - RNA, 22 nt, synthetic construct
  source 1..22: mol_type = other RNA
gttttctggaaactcaaaccca

SEQ ID NO: 145175 - RNA, 22 nt, synthetic construct
  source 1..22: mol_type = other RNA
gttttctggaggctagaagtcc

SEQ ID NO: 145176 - RNA, 22 nt, synthetic construct
  source 1..22: mol_type = other RNA
gttttctgtagaatatccaagc

SEQ ID NO: 145177 - RNA, 22 nt, synthetic construct
  source 1..22: mol_type = other RNA
gttttcttactgatttatagtg

SEQ ID NO: 145178 - RNA, 22 nt, synthetic construct
  source 1..22: mol_type = other RNA
gttttcttattttttcccagat

SEQ ID NO: 145179 - RNA, 22 nt, synthetic construct
  source 1..22: mol_type = other RNA
gttttcttcatggactagactg

SEQ ID NO: 145180 - RNA, 22 nt, synthetic construct
  source 1..22: mol_type = other RNA
gttttgaacgaatgaaaacaca

SEQ ID NO: 145181 - RNA, 22 nt, synthetic construct
  source 1..22: mol_type = other RNA
gttttgaataacctcataagaa

SEQ ID NO: 145182 - RNA, 22 nt, synthetic construct
  source 1..22: mol_type = other RNA
gttttgaccaaaacaaaaaaca

SEQ ID NO: 145183 - RNA, 22 nt, synthetic construct
  source 1..22: mol_type = other RNA
gttttgactcagtacttccctc

SEQ ID NO: 145184 - RNA, 22 nt, synthetic construct
  source 1..22: mol_type = other RNA
gttttgagaccgagtctcactc

SEQ ID NO: 145185 - RNA, 22 nt, synthetic construct
  source 1..22: mol_type = other RNA
gttttgagtggcatcatactgg

SEQ ID NO: 145186 - RNA, 22 nt, synthetic construct
  source 1..22: mol_type = other RNA
gttttgatagttgcagattcat

SEQ ID NO: 145187 - RNA, 22 nt, synthetic construct
  source 1..22: mol_type = other RNA
gttttgatcatcgcattacgag

SEQ ID NO: 145188 - RNA, 22 nt, synthetic construct
  source 1..22: mol_type = other RNA
gttttgatttgcatttctctaa

SEQ ID NO: 145189 - RNA, 22 nt, synthetic construct
  source 1..22: mol_type = other RNA
gttttgcaagatgcataagttc

SEQ ID NO: 145190 - RNA, 22 nt, synthetic construct
  source 1..22: mol_type = other RNA
gttttgcaagattaatcttgtg

SEQ ID NO: 145191 - RNA, 22 nt, synthetic construct
  source 1..22: mol_type = other RNA
gttttgcagagatgaggtctcg

SEQ ID NO: 145192 - RNA, 22 nt, synthetic construct
  source 1..22: mol_type = other RNA
gttttgcagttggggactctta

SEQ ID NO: 145193 - RNA, 22 nt, synthetic construct
  source 1..22: mol_type = other RNA
gttttgcctctttgctaataag

SEQ ID NO: 145194 - RNA, 22 nt, synthetic construct
  source 1..22: mol_type = other RNA
gttttgcttactgtagcattga

SEQ ID NO: 145195 - RNA, 22 nt, synthetic construct
  source 1..22: mol_type = other RNA
gttttgcttcgaagcttattaa

SEQ ID NO: 145196 - RNA, 22 nt, synthetic construct
  source 1..22: mol_type = other RNA
gttttgggggaagagagcattg

SEQ ID NO: 145197 - RNA, 22 nt, synthetic construct
  source 1..22: mol_type = other RNA
gttttggtaaaatgtggcaaat

SEQ ID NO: 145198 - RNA, 22 nt, synthetic construct
  source 1..22: mol_type = other RNA
gttttggtaatgggaaagacag

SEQ ID NO: 145199 - RNA, 22 nt, synthetic construct
  source 1..22: mol_type = other RNA
gttttggtatgttgtgttttca

SEQ ID NO: 145200 - RNA, 22 nt, synthetic construct
  source 1..22: mol_type = other RNA
gttttggtcaaaactgtatttt

SEQ ID NO: 145201 - RNA, 22 nt, synthetic construct
  source 1..22: mol_type = other RNA
gttttggtgtcatttttaagaa

SEQ ID NO: 145202 - RNA, 22 nt, synthetic construct
  source 1..22: mol_type = other RNA
gttttgtatatggtttaaggta

SEQ ID NO: 145203 - RNA, 22 nt, synthetic construct
  source 1..22: mol_type = other RNA
gttttgtgtttgtgaccagatc

SEQ ID NO: 145204 - RNA, 22 nt, synthetic construct
  source 1..22: mol_type = other RNA
gttttgttctcgttcatgttca

SEQ ID NO: 145205 - RNA, 22 nt, synthetic construct
  source 1..22: mol_type = other RNA
gttttgttgctattgttgaatt

SEQ ID NO: 145206 - RNA, 22 nt, synthetic construct
  source 1..22: mol_type = other RNA
gttttgttttgaataacctcat

SEQ ID NO: 145207 - RNA, 22 nt, synthetic construct
  source 1..22: mol_type = other RNA
gttttgttttgttttttcacag

SEQ ID NO: 145208 - RNA, 22 nt, synthetic construct
  source 1..22: mol_type = other RNA
gttttgtttttctctccttgca

SEQ ID NO: 145209 - RNA, 22 nt, synthetic construct
  source 1..22: mol_type = other RNA
gttttgttttttcacagaaaca

SEQ ID NO: 145210 - RNA, 22 nt, synthetic construct
  source 1..22: mol_type = other RNA
gtttttaaaagatgcattctgt

SEQ ID NO: 145211 - RNA, 22 nt, synthetic construct
  source 1..22: mol_type = other RNA
gtttttaattcttaaactgcca

SEQ ID NO: 145212 - RNA, 22 nt, synthetic construct
  source 1..22: mol_type = other RNA
gtttttacatgtagttttccct

SEQ ID NO: 145213 - RNA, 22 nt, synthetic construct
  source 1..22: mol_type = other RNA
gtttttagagagatgcctgtgc

SEQ ID NO: 145214 - RNA, 22 nt, synthetic construct
  source 1..22: mol_type = other RNA
gtttttatatgcattaagccag

SEQ ID NO: 145215 - RNA, 22 nt, synthetic construct
  source 1..22: mol_type = other RNA
gtttttatggaataatggaact

SEQ ID NO: 145216 - RNA, 22 nt, synthetic construct
  source 1..22: mol_type = other RNA
gtttttattttatgtacacgtc

SEQ ID NO: 145217 - RNA, 22 nt, synthetic construct
  source 1..22: mol_type = other RNA
gtttttcagccctgatagatat

SEQ ID NO: 145218 - RNA, 22 nt, synthetic construct
  source 1..22: mol_type = other RNA
gtttttcaggttcaagcgactc

SEQ ID NO: 145219 - RNA, 22 nt, synthetic construct
  source 1..22: mol_type = other RNA
gtttttccgtctagccacttcc

SEQ ID NO: 145220 - RNA, 22 nt, synthetic construct
  source 1..22: mol_type = other RNA
gtttttctaggtagtttctttg

SEQ ID NO: 145221 - RNA, 22 nt, synthetic construct
  source 1..22: mol_type = other RNA
gtttttctctccttgcacatta

SEQ ID NO: 145222 - RNA, 22 nt, synthetic construct
  source 1..22: mol_type = other RNA
gtttttcttagtctagccaagg

SEQ ID NO: 145223 - RNA, 22 nt, synthetic construct
  source 1..22: mol_type = other RNA
gtttttcttgtgggtattttgt

SEQ ID NO: 145224 - RNA, 22 nt, synthetic construct
  source 1..22: mol_type = other RNA
gtttttcttttttgagttggag

SEQ ID NO: 145225 - RNA, 22 nt, synthetic construct
  source 1..22: mol_type = other RNA
gtttttgaaaagaacaacatgg

SEQ ID NO: 145226 - RNA, 22 nt, synthetic construct
  source 1..22: mol_type = other RNA
gtttttgaacaagagcgtcgta

SEQ ID NO: 145227 - RNA, 22 nt, synthetic construct
  source 1..22: mol_type = other RNA
gtttttgattactgactcaatc

SEQ ID NO: 145228 - RNA, 22 nt, synthetic construct
  source 1..22: mol_type = other RNA
gtttttggttcacttgaaacct

SEQ ID NO: 145229 - RNA, 22 nt, synthetic construct
  source 1..22: mol_type = other RNA
gtttttgtaaatgaaacacttg

SEQ ID NO: 145230 - RNA, 22 nt, synthetic construct
  source 1..22: mol_type = other RNA
gttttttcacagaaacagaaaa

SEQ ID NO: 145231 - RNA, 22 nt, synthetic construct
  source 1..22: mol_type = other RNA
gttttttcccccctggaacaat

SEQ ID NO: 145232 - RNA, 22 nt, synthetic construct
  source 1..22: mol_type = other RNA
gttttttcctcccttcagcctg

SEQ ID NO: 145233 - RNA, 22 nt, synthetic construct
  source 1..22: mol_type = other RNA
gttttttccttctttgggggaa

SEQ ID NO: 145234 - RNA, 22 nt, synthetic construct
  source 1..22: mol_type = other RNA
gttttttcctttgcctttcact

SEQ ID NO: 145235 - RNA, 22 nt, synthetic construct
  source 1..22: mol_type = other RNA
gttttttggtagataccagacc

SEQ ID NO: 145236 - RNA, 22 nt, synthetic construct
  source 1..22: mol_type = other RNA
gttttttgtccaccagacaaaa

SEQ ID NO: 145237 - RNA, 22 nt, synthetic construct
  source 1..22: mol_type = other RNA
gttttttgttttggtcaaaact

SEQ ID NO: 145238 - RNA, 22 nt, synthetic construct
  source 1..22: mol_type = other RNA
taaaaaaggaatctgggccggg

SEQ ID NO: 145239 - RNA, 22 nt, synthetic construct
  source 1..22: mol_type = other RNA
taaaaaaggaccatctgttaaa

SEQ ID NO: 145240 - RNA, 22 nt, synthetic construct
  source 1..22: mol_type = other RNA
taaaaaagttttttcctttgcc

SEQ ID NO: 145241 - RNA, 22 nt, synthetic construct
  source 1..22: mol_type = other RNA
taaaaaataccaaaaaaggtgc

SEQ ID NO: 145242 - RNA, 22 nt, synthetic construct
  source 1..22: mol_type = other RNA
taaaaaatgcgcgtccgcgacc

SEQ ID NO: 145243 - RNA, 22 nt, synthetic construct
  source 1..22: mol_type = other RNA
taaaaacaacactaaccaacat

SEQ ID NO: 145244 - RNA, 22 nt, synthetic construct
  source 1..22: mol_type = other RNA
taaaaacatatgcaggaccaac

SEQ ID NO: 145245 - RNA, 22 nt, synthetic construct
  source 1..22: mol_type = other RNA
taaaaacatccattactcgtgg

SEQ ID NO: 145246 - RNA, 22 nt, synthetic construct
  source 1..22: mol_type = other RNA
taaaaaccaaacactggaaatc

SEQ ID NO: 145247 - RNA, 22 nt, synthetic construct
  source 1..22: mol_type = other RNA
taaaaacctttttgggatctgt

SEQ ID NO: 145248 - RNA, 22 nt, synthetic construct
  source 1..22: mol_type = other RNA
taaaaacgtgcaaactaccaag

SEQ ID NO: 145249 - RNA, 22 nt, synthetic construct
  source 1..22: mol_type = other RNA
taaaaactgagaccggatgagg

SEQ ID NO: 145250 - RNA, 22 nt, synthetic construct
  source 1..22: mol_type = other RNA
taaaaactgtttggctgggagc

SEQ ID NO: 145251 - RNA, 22 nt, synthetic construct
  source 1..22: mol_type = other RNA
taaaaacttaagtatctcagtc

SEQ ID NO: 145252 - RNA, 22 nt, synthetic construct
  source 1..22: mol_type = other RNA
taaaaacttaagtatctcggtc

SEQ ID NO: 145253 - RNA, 22 nt, synthetic construct
  source 1..22: mol_type = other RNA
taaaaactttttgggcctttct

SEQ ID NO: 145254 - RNA, 22 nt, synthetic construct
  source 1..22: mol_type = other RNA
taaaaagaaaaagctcacctct

SEQ ID NO: 145255 - RNA, 22 nt, synthetic construct
  source 1..22: mol_type = other RNA
taaaaagaaaaagttgggcttg

SEQ ID NO: 145256 - RNA, 22 nt, synthetic construct
  source 1..22: mol_type = other RNA
taaaaagaaatctgcatccaaa

SEQ ID NO: 145257 - RNA, 22 nt, synthetic construct
  source 1..22: mol_type = other RNA
taaaaagacacaaaagagctgg

SEQ ID NO: 145258 - RNA, 22 nt, synthetic construct
  source 1..22: mol_type = other RNA
taaaaagcactatccacatttg

SEQ ID NO: 145259 - RNA, 22 nt, synthetic construct
  source 1..22: mol_type = other RNA
taaaaagcagctacctgttgat

SEQ ID NO: 145260 - RNA, 22 nt, synthetic construct
  source 1..22: mol_type = other RNA
taaaaagccatttatcagcacc

SEQ ID NO: 145261 - RNA, 22 nt, synthetic construct
  source 1..22: mol_type = other RNA
taaaaagcctctctgatggaac

SEQ ID NO: 145262 - RNA, 22 nt, synthetic construct
  source 1..22: mol_type = other RNA
taaaaagcctctgtggaccatg

SEQ ID NO: 145263 - RNA, 22 nt, synthetic construct
  source 1..22: mol_type = other RNA
taaaaagcctgcttcagcctaa

SEQ ID NO: 145264 - RNA, 22 nt, synthetic construct
  source 1..22: mol_type = other RNA
taaaaagcgttggagacagcct

SEQ ID NO: 145265 - RNA, 22 nt, synthetic construct
  source 1..22: mol_type = other RNA
taaaaaggagggaaaatgttta

SEQ ID NO: 145266 - RNA, 22 nt, synthetic construct
  source 1..22: mol_type = other RNA
taaaaagggagtcagtagaggc

SEQ ID NO: 145267 - RNA, 22 nt, synthetic construct
  source 1..22: mol_type = other RNA
taaaaaggttgagttcatgtcc

SEQ ID NO: 145268 - RNA, 22 nt, synthetic construct
  source 1..22: mol_type = other RNA
taaaaagtatcgtgagactatt

SEQ ID NO: 145269 - RNA, 22 nt, synthetic construct
  source 1..22: mol_type = other RNA
taaaaagtgacttctggatgtg

SEQ ID NO: 145270 - RNA, 22 nt, synthetic construct
  source 1..22: mol_type = other RNA
taaaaagtgcttctagtaactt

SEQ ID NO: 145271 - RNA, 22 nt, synthetic construct
  source 1..22: mol_type = other RNA
taaaaataaagacttcacgatg

SEQ ID NO: 145272 - RNA, 22 nt, synthetic construct
  source 1..22: mol_type = other RNA
taaaaataacgggccgggcgct

SEQ ID NO: 145273 - RNA, 22 nt, synthetic construct
  source 1..22: mol_type = other RNA
taaaaatatagaaggccagagg

SEQ ID NO: 145274 - RNA, 22 nt, synthetic construct
  source 1..22: mol_type = other RNA
taaaaatctctacagggaaccg

SEQ ID NO: 145275 - RNA, 22 nt, synthetic construct
  source 1..22: mol_type = other RNA
taaaaatgacaccaaaactaca

SEQ ID NO: 145276 - RNA, 22 nt, synthetic construct
  source 1..22: mol_type = other RNA
taaaaatggcacatactgcata

SEQ ID NO: 145277 - RNA, 22 nt, synthetic construct
  source 1..22: mol_type = other RNA
taaaaatggtcaacatgaaaag

SEQ ID NO: 145278 - RNA, 22 nt, synthetic construct
  source 1..22: mol_type = other RNA
taaaaattacaactggtttctg

SEQ ID NO: 145279 - RNA, 22 nt, synthetic construct
  source 1..22: mol_type = other RNA
taaaaattccgctctggtttta

SEQ ID NO: 145280 - RNA, 22 nt, synthetic construct
  source 1..22: mol_type = other RNA
taaaaattttctcccaaggttg

SEQ ID NO: 145281 - RNA, 22 nt, synthetic construct
  source 1..22: mol_type = other RNA
taaaacaaattccctctacaaa

SEQ ID NO: 145282 - RNA, 22 nt, synthetic construct
  source 1..22: mol_type = other RNA
taaaacacaaggacaggtcaca

SEQ ID NO: 145283 - RNA, 22 nt, synthetic construct
  source 1..22: mol_type = other RNA
taaaacacatgtcatgggccgg

SEQ ID NO: 145284 - RNA, 22 nt, synthetic construct
  source 1..22: mol_type = other RNA
taaaacactggaagtaattggg

SEQ ID NO: 145285 - RNA, 22 nt, synthetic construct
  source 1..22: mol_type = other RNA
taaaacactggcaaaaatcatc

SEQ ID NO: 145286 - RNA, 22 nt, synthetic construct
  source 1..22: mol_type = other RNA
taaaacagacccttatgtccag

SEQ ID NO: 145287 - RNA, 22 nt, synthetic construct
  source 1..22: mol_type = other RNA
taaaacaggaagttgagaaaga

SEQ ID NO: 145288 - RNA, 22 nt, synthetic construct
  source 1..22: mol_type = other RNA
taaaacatcaaagtcccctgta

SEQ ID NO: 145289 - RNA, 22 nt, synthetic construct
  source 1..22: mol_type = other RNA
taaaacatctggaaggaaacac

SEQ ID NO: 145290 - RNA, 22 nt, synthetic construct
  source 1..22: mol_type = other RNA
taaaacatggatatttggccgg

SEQ ID NO: 145291 - RNA, 22 nt, synthetic construct
  source 1..22: mol_type = other RNA
taaaacatggccagtatctcct

SEQ ID NO: 145292 - RNA, 22 nt, synthetic construct
  source 1..22: mol_type = other RNA
taaaacatggtccacagaggct

SEQ ID NO: 145293 - RNA, 22 nt, synthetic construct
  source 1..22: mol_type = other RNA
taaaacatgttgtgtagaaatg

SEQ ID NO: 145294 - RNA, 22 nt, synthetic construct
  source 1..22: mol_type = other RNA
taaaaccaaatgtggatagtgc

SEQ ID NO: 145295 - RNA, 22 nt, synthetic construct
  source 1..22: mol_type = other RNA
taaaaccacaaacatgaataac

SEQ ID NO: 145296 - RNA, 22 nt, synthetic construct
  source 1..22: mol_type = other RNA
taaaaccagagcggaattttta

SEQ ID NO: 145297 - RNA, 22 nt, synthetic construct
  source 1..22: mol_type = other RNA
taaaacccatgatctttggaaa

SEQ ID NO: 145298 - RNA, 22 nt, synthetic construct
  source 1..22: mol_type = other RNA
taaaacctggaatgggttggag

SEQ ID NO: 145299 - RNA, 22 nt, synthetic construct
  source 1..22: mol_type = other RNA
taaaacctggtaataatgaaag

SEQ ID NO: 145300 - RNA, 22 nt, synthetic construct
  source 1..22: mol_type = other RNA
taaaactcacaaaaagtgtgac

SEQ ID NO: 145301 - RNA, 22 nt, synthetic construct
  source 1..22: mol_type = other RNA
taaaactccccatgcaggagaa

SEQ ID NO: 145302 - RNA, 22 nt, synthetic construct
  source 1..22: mol_type = other RNA
taaaactcttagcttagaagaa

SEQ ID NO: 145303 - RNA, 22 nt, synthetic construct
  source 1..22: mol_type = other RNA
taaaactgctgagtcttctact

SEQ ID NO: 145304 - RNA, 22 nt, synthetic construct
  source 1..22: mol_type = other RNA
taaaacttgtagaggaggaggg

SEQ ID NO: 145305 - RNA, 22 nt, synthetic construct
  source 1..22: mol_type = other RNA
taaaactttaggtcagaataca

SEQ ID NO: 145306 - RNA, 22 nt, synthetic construct
  source 1..22: mol_type = other RNA
taaaagaaaatggccaagagtt

SEQ ID NO: 145307 - RNA, 22 nt, synthetic construct
  source 1..22: mol_type = other RNA
taaaagaacctctggaaaggac

SEQ ID NO: 145308 - RNA, 22 nt, synthetic construct
  source 1..22: mol_type = other RNA
taaaagaagatgcagttgctta

SEQ ID NO: 145309 - RNA, 22 nt, synthetic construct
  source 1..22: mol_type = other RNA
taaaagacatctttcctgtgat

SEQ ID NO: 145310 - RNA, 22 nt, synthetic construct
  source 1..22: mol_type = other RNA
taaaagaccgcaagagttccaa

SEQ ID NO: 145311 - RNA, 22 nt, synthetic construct
  source 1..22: mol_type = other RNA
taaaagagcgaagagggagaag

SEQ ID NO: 145312 - RNA, 22 nt, synthetic construct
  source 1..22: mol_type = other RNA
taaaagagtgcacattccttct

SEQ ID NO: 145313 - RNA, 22 nt, synthetic construct
  source 1..22: mol_type = other RNA
taaaagatatccacagtatgct

SEQ ID NO: 145314 - RNA, 22 nt, synthetic construct
  source 1..22: mol_type = other RNA
taaaagatgcattctgtcacat

SEQ ID NO: 145315 - RNA, 22 nt, synthetic construct
  source 1..22: mol_type = other RNA
taaaagattaaatacagagcac

SEQ ID NO: 145316 - RNA, 22 nt, synthetic construct
  source 1..22: mol_type = other RNA
taaaagcaacctcatttgcaga

SEQ ID NO: 145317 - RNA, 22 nt, synthetic construct
  source 1..22: mol_type = other RNA
taaaagcacaagcacagagtca

SEQ ID NO: 145318 - RNA, 22 nt, synthetic construct
  source 1..22: mol_type = other RNA
taaaagcctcatttgaactttc

SEQ ID NO: 145319 - RNA, 22 nt, synthetic construct
  source 1..22: mol_type = other RNA
taaaagcgtactgtgattacaa

SEQ ID NO: 145320 - RNA, 22 nt, synthetic construct
  source 1..22: mol_type = other RNA
taaaagctctaatagttcacct

SEQ ID NO: 145321 - RNA, 22 nt, synthetic construct
  source 1..22: mol_type = other RNA
taaaagctggagttatttgtat

SEQ ID NO: 145322 - RNA, 22 nt, synthetic construct
  source 1..22: mol_type = other RNA
taaaagcttatgatcttgggaa

SEQ ID NO: 145323 - RNA, 22 nt, synthetic construct
  source 1..22: mol_type = other RNA
taaaaggaatataaacgtgtgt

SEQ ID NO: 145324 - RNA, 22 nt, synthetic construct
  source 1..22: mol_type = other RNA
taaaaggagatatacaggaaga

SEQ ID NO: 145325 - RNA, 22 nt, synthetic construct
  source 1..22: mol_type = other RNA
taaaaggatatgggccaaagac

SEQ ID NO: 145326 - RNA, 22 nt, synthetic construct
  source 1..22: mol_type = other RNA
taaaaggtataaaggatgcaca

SEQ ID NO: 145327 - RNA, 22 nt, synthetic construct
  source 1..22: mol_type = other RNA
taaaaggttgcttaattgagct

SEQ ID NO: 145328 - RNA, 22 nt, synthetic construct
  source 1..22: mol_type = other RNA
taaaagtaaattcgcataacca

SEQ ID NO: 145329 - RNA, 22 nt, synthetic construct
  source 1..22: mol_type = other RNA
taaaagtcagctaggcgtagta

SEQ ID NO: 145330 - RNA, 22 nt, synthetic construct
  source 1..22: mol_type = other RNA
taaaagtcattgaaactcaatg

SEQ ID NO: 145331 - RNA, 22 nt, synthetic construct
  source 1..22: mol_type = other RNA
taaaagtgctgcagtatgcata

SEQ ID NO: 145332 - RNA, 22 nt, synthetic construct
  source 1..22: mol_type = other RNA
taaaagttacaaggattgaatg

SEQ ID NO: 145333 - RNA, 22 nt, synthetic construct
  source 1..22: mol_type = other RNA
taaaagttagctggcaaaatgg

SEQ ID NO: 145334 - RNA, 22 nt, synthetic construct
  source 1..22: mol_type = other RNA
taaaagttccaagattttccca

SEQ ID NO: 145335 - RNA, 22 nt, synthetic construct
  source 1..22: mol_type = other RNA
taaaagttttccaaccactgaa

SEQ ID NO: 145336 - RNA, 22 nt, synthetic construct
  source 1..22: mol_type = other RNA
taaaataaacattttccctcct

SEQ ID NO: 145337 - RNA, 22 nt, synthetic construct
  source 1..22: mol_type = other RNA
taaaataacacgcagaaccact

SEQ ID NO: 145338 - RNA, 22 nt, synthetic construct
  source 1..22: mol_type = other RNA
taaaatacaacagcaccttttt

SEQ ID NO: 145339 - RNA, 22 nt, synthetic construct
  source 1..22: mol_type = other RNA
taaaataccagaggttaaagca

SEQ ID NO: 145340 - RNA, 22 nt, synthetic construct
  source 1..22: mol_type = other RNA
taaaatagcaggattcttgtta

SEQ ID NO: 145341 - RNA, 22 nt, synthetic construct
  source 1..22: mol_type = other RNA
taaaataggaagtccatgaaac

SEQ ID NO: 145342 - RNA, 22 nt, synthetic construct
  source 1..22: mol_type = other RNA
taaaataggcctaggtgtgata

SEQ ID NO: 145343 - RNA, 22 nt, synthetic construct
  source 1..22: mol_type = other RNA
taaaatagtcaagtaacagttc

SEQ ID NO: 145344 - RNA, 22 nt, synthetic construct
  source 1..22: mol_type = other RNA
taaaatcatcacagtatgcaca

SEQ ID NO: 145345 - RNA, 22 nt, synthetic construct
  source 1..22: mol_type = other RNA
taaaatcggaacaggctcaata

SEQ ID NO: 145346 - RNA, 22 nt, synthetic construct
  source 1..22: mol_type = other RNA
taaaatctgattcagtggttgg

SEQ ID NO: 145347 - RNA, 22 nt, synthetic construct
  source 1..22: mol_type = other RNA
taaaatctgtatgagaagactg

SEQ ID NO: 145348 - RNA, 22 nt, synthetic construct
  source 1..22: mol_type = other RNA
taaaatcttattccccagggaa

SEQ ID NO: 145349 - RNA, 22 nt, synthetic construct
  source 1..22: mol_type = other RNA
taaaatgaaaaattcactcctc

SEQ ID NO: 145350 - RNA, 22 nt, synthetic construct
  source 1..22: mol_type = other RNA
taaaatgaaaatgttccctctt

SEQ ID NO: 145351 - RNA, 22 nt, synthetic construct
  source 1..22: mol_type = other RNA
taaaatgaacctgctttctact

SEQ ID NO: 145352 - RNA, 22 nt, synthetic construct
  source 1..22: mol_type = other RNA
taaaatgagggtaaaatagtca

SEQ ID NO: 145353 - RNA, 22 nt, synthetic construct
  source 1..22: mol_type = other RNA
taaaatgatagcattatcccag

SEQ ID NO: 145354 - RNA, 22 nt, synthetic construct
  source 1..22: mol_type = other RNA
taaaatgatggcaacaatcaac

SEQ ID NO: 145355 - RNA, 22 nt, synthetic construct
  source 1..22: mol_type = other RNA
taaaatgctggaaattttcaag

SEQ ID NO: 145356 - RNA, 22 nt, synthetic construct
  source 1..22: mol_type = other RNA
taaaatggaagactttatggta

SEQ ID NO: 145357 - RNA, 22 nt, synthetic construct
  source 1..22: mol_type = other RNA
taaaatggaatattgttcagcc

SEQ ID NO: 145358 - RNA, 22 nt, synthetic construct
  source 1..22: mol_type = other RNA
taaaatgtggcaaatttatgtg

SEQ ID NO: 145359 - RNA, 22 nt, synthetic construct
  source 1..22: mol_type = other RNA
taaaatgttgccaatatctatc

SEQ ID NO: 145360 - RNA, 22 nt, synthetic construct
  source 1..22: mol_type = other RNA
taaaatgtttagcggaatgact

SEQ ID NO: 145361 - RNA, 22 nt, synthetic construct
  source 1..22: mol_type = other RNA
taaaattcaccaaacaccttac

SEQ ID NO: 145362 - RNA, 22 nt, synthetic construct
  source 1..22: mol_type = other RNA
taaaattcccttcagtgtagtc

SEQ ID NO: 145363 - RNA, 22 nt, synthetic construct
  source 1..22: mol_type = other RNA
taaaattccttcctttgatgac

SEQ ID NO: 145364 - RNA, 22 nt, synthetic construct
  source 1..22: mol_type = other RNA
taaaattctgaccctttattca

SEQ ID NO: 145365 - RNA, 22 nt, synthetic construct
  source 1..22: mol_type = other RNA
taaaattctgatagcttgacaa

SEQ ID NO: 145366 - RNA, 22 nt, synthetic construct
  source 1..22: mol_type = other RNA
taaaattcttccagcctggtaa

SEQ ID NO: 145367 - RNA, 22 nt, synthetic construct
  source 1..22: mol_type = other RNA
taaaattgcagagtgttcaaaa

SEQ ID NO: 145368 - RNA, 22 nt, synthetic construct
  source 1..22: mol_type = other RNA
taaacaaacattttttgcagag

SEQ ID NO: 145369 - RNA, 22 nt, synthetic construct
  source 1..22: mol_type = other RNA
taaacaaagagaacaatggaat

SEQ ID NO: 145370 - RNA, 22 nt, synthetic construct
  source 1..22: mol_type = other RNA
taaacaaatcagatttcaggtg

SEQ ID NO: 145371 - RNA, 22 nt, synthetic construct
  source 1..22: mol_type = other RNA
taaacaactgactctaaagtct

SEQ ID NO: 145372 - RNA, 22 nt, synthetic construct
  source 1..22: mol_type = other RNA
taaacaagactcaacatgtgta

SEQ ID NO: 145373 - RNA, 22 nt, synthetic construct
  source 1..22: mol_type = other RNA
taaacaagtcacaaaaagacaa

SEQ ID NO: 145374 - RNA, 22 nt, synthetic construct
  source 1..22: mol_type = other RNA
taaacaatcttgaaaggggcca

SEQ ID NO: 145375 - RNA, 22 nt, synthetic construct
  source 1..22: mol_type = other RNA
taaacaatgctgctatgaaaat

SEQ ID NO: 145376 - RNA, 22 nt, synthetic construct
  source 1..22: mol_type = other RNA
taaacacacccttggtaaacag

SEQ ID NO: 145377 - RNA, 22 nt, synthetic construct
  source 1..22: mol_type = other RNA
taaacacacgggctgggcgcga

SEQ ID NO: 145378 - RNA, 22 nt, synthetic construct
  source 1..22: mol_type = other RNA
taaacacagaacactaaagggg

SEQ ID NO: 145379 - RNA, 22 nt, synthetic construct
  source 1..22: mol_type = other RNA
taaacactgtagttcagttttt

SEQ ID NO: 145380 - RNA, 22 nt, synthetic construct
  source 1..22: mol_type = other RNA
taaacactgttctgcgtggttt

SEQ ID NO: 145381 - RNA, 22 nt, synthetic construct
  source 1..22: mol_type = other RNA
taaacacttagcatgttgcttt

SEQ ID NO: 145382 - RNA, 22 nt, synthetic construct
  source 1..22: mol_type = other RNA
taaacagcagtcttaaccattg

SEQ ID NO: 145383 - RNA, 22 nt, synthetic construct
  source 1..22: mol_type = other RNA
taaacagcatactgtggatatc

SEQ ID NO: 145384 - RNA, 22 nt, synthetic construct
  source 1..22: mol_type = other RNA
taaacaggtgtaagagattaat

SEQ ID NO: 145385 - RNA, 22 nt, synthetic construct
  source 1..22: mol_type = other RNA
taaacagtacagtagtaaaacc

SEQ ID NO: 145386 - RNA, 22 nt, synthetic construct
  source 1..22: mol_type = other RNA
taaacatgaacaagttacaaac

SEQ ID NO: 145387 - RNA, 22 nt, synthetic construct
  source 1..22: mol_type = other RNA
taaacatgtaaaacagaccctt

SEQ ID NO: 145388 - RNA, 22 nt, synthetic construct
  source 1..22: mol_type = other RNA
taaacattttattaggtgcaca

SEQ ID NO: 145389 - RNA, 22 nt, synthetic construct
  source 1..22: mol_type = other RNA
taaacattttccctccttttta

SEQ ID NO: 145390 - RNA, 22 nt, synthetic construct
  source 1..22: mol_type = other RNA
taaaccaagtttggttcatttc

SEQ ID NO: 145391 - RNA, 22 nt, synthetic construct
  source 1..22: mol_type = other RNA
taaaccacgcagtttgttctgc

SEQ ID NO: 145392 - RNA, 22 nt, synthetic construct
  source 1..22: mol_type = other RNA
taaaccatatacaaaactgaac

SEQ ID NO: 145393 - RNA, 22 nt, synthetic construct
  source 1..22: mol_type = other RNA
taaaccatatggttaatagtga

SEQ ID NO: 145394 - RNA, 22 nt, synthetic construct
  source 1..22: mol_type = other RNA
taaaccattttcaatcttggaa

SEQ ID NO: 145395 - RNA, 22 nt, synthetic construct
  source 1..22: mol_type = other RNA
taaacccaacaaacaattagca

SEQ ID NO: 145396 - RNA, 22 nt, synthetic construct
  source 1..22: mol_type = other RNA
taaacccatttcatgccatcct

SEQ ID NO: 145397 - RNA, 22 nt, synthetic construct
  source 1..22: mol_type = other RNA
taaacctcaagtcttttcctag

SEQ ID NO: 145398 - RNA, 22 nt, synthetic construct
  source 1..22: mol_type = other RNA
taaacctgaggtctttaaaaga

SEQ ID NO: 145399 - RNA, 22 nt, synthetic construct
  source 1..22: mol_type = other RNA
taaacctgctacgaatgaactc

SEQ ID NO: 145400 - RNA, 22 nt, synthetic construct
  source 1..22: mol_type = other RNA
taaacctggaatcctctaccaa

SEQ ID NO: 145401 - RNA, 22 nt, synthetic construct
  source 1..22: mol_type = other RNA
taaacctgtgatttccagtgtt

SEQ ID NO: 145402 - RNA, 22 nt, synthetic construct
  source 1..22: mol_type = other RNA
taaacctgttacatggttctgt

SEQ ID NO: 145403 - RNA, 22 nt, synthetic construct
  source 1..22: mol_type = other RNA
taaaccttaaaagagtgaaatg

SEQ ID NO: 145404 - RNA, 22 nt, synthetic construct
  source 1..22: mol_type = other RNA
taaacgacaccagaactacaca

SEQ ID NO: 145405 - RNA, 22 nt, synthetic construct
  source 1..22: mol_type = other RNA
taaacgacagcaggaaaagcta

SEQ ID NO: 145406 - RNA, 22 nt, synthetic construct
  source 1..22: mol_type = other RNA
taaacgcggaatgaagcaggcc

SEQ ID NO: 145407 - RNA, 22 nt, synthetic construct
  source 1..22: mol_type = other RNA
taaacgtcagagcagcactgat

SEQ ID NO: 145408 - RNA, 22 nt, synthetic construct
  source 1..22: mol_type = other RNA
taaacgtgtgtgtaagcacaca

SEQ ID NO: 145409 - RNA, 22 nt, synthetic construct
  source 1..22: mol_type = other RNA
taaacgtttggtgactgaattc

SEQ ID NO: 145410 - RNA, 22 nt, synthetic construct
  source 1..22: mol_type = other RNA
taaactaacaaagaacaggaag

SEQ ID NO: 145411 - RNA, 22 nt, synthetic construct
  source 1..22: mol_type = other RNA
taaactagattaccttgaagtt

SEQ ID NO: 145412 - RNA, 22 nt, synthetic construct
  source 1..22: mol_type = other RNA
taaactagtatcaacctgcagg

SEQ ID NO: 145413 - RNA, 22 nt, synthetic construct
  source 1..22: mol_type = other RNA
taaactatagacccaaagcaaa

SEQ ID NO: 145414 - RNA, 22 nt, synthetic construct
  source 1..22: mol_type = other RNA
taaactcattatcccagacaga

SEQ ID NO: 145415 - RNA, 22 nt, synthetic construct
  source 1..22: mol_type = other RNA
taaactcttccttatccgataa

SEQ ID NO: 145416 - RNA, 22 nt, synthetic construct
  source 1..22: mol_type = other RNA
taaactgaacgaagtgaaaaaa

SEQ ID NO: 145417 - RNA, 22 nt, synthetic construct
  source 1..22: mol_type = other RNA
taaactgccaaaccctacaccc

SEQ ID NO: 145418 - RNA, 22 nt, synthetic construct
  source 1..22: mol_type = other RNA
taaactggaaggaaataagaag

SEQ ID NO: 145419 - RNA, 22 nt, synthetic construct
  source 1..22: mol_type = other RNA
taaactggaattcatcaaagtt

SEQ ID NO: 145420 - RNA, 22 nt, synthetic construct
  source 1..22: mol_type = other RNA
taaactggatgaatacaaaggt

SEQ ID NO: 145421 - RNA, 22 nt, synthetic construct
  source 1..22: mol_type = other RNA
taaactggttttcctgatggac

SEQ ID NO: 145422 - RNA, 22 nt, synthetic construct
  source 1..22: mol_type = other RNA
taaactgttccccaagccaaat

SEQ ID NO: 145423 - RNA, 22 nt, synthetic construct
  source 1..22: mol_type = other RNA
taaactgttggaaaaatcgtcc

SEQ ID NO: 145424 - RNA, 22 nt, synthetic construct
  source 1..22: mol_type = other RNA
taaacttcaaggtaatctagtt

SEQ ID NO: 145425 - RNA, 22 nt, synthetic construct
  source 1..22: mol_type = other RNA
taaacttcagttttgagtggca

SEQ ID NO: 145426 - RNA, 22 nt, synthetic construct
  source 1..22: mol_type = other RNA
taaacttccctctcagtggtgc

SEQ ID NO: 145427 - RNA, 22 nt, synthetic construct
  source 1..22: mol_type = other RNA
taaacttggtctgggtgatatc

SEQ ID NO: 145428 - RNA, 22 nt, synthetic construct
  source 1..22: mol_type = other RNA
taaactttgagtagcaccctat

SEQ ID NO: 145429 - RNA, 22 nt, synthetic construct
  source 1..22: mol_type = other RNA
taaacttttgtgcatcaaagga

SEQ ID NO: 145430 - RNA, 22 nt, synthetic construct
  source 1..22: mol_type = other RNA
taaagaaaggtctctctctgtc

SEQ ID NO: 145431 - RNA, 22 nt, synthetic construct
  source 1..22: mol_type = other RNA
taaagaaattagaacatctggc

SEQ ID NO: 145432 - RNA, 22 nt, synthetic construct
  source 1..22: mol_type = other RNA
taaagaacatgattgggtcaac

SEQ ID NO: 145433 - RNA, 22 nt, synthetic construct
  source 1..22: mol_type = other RNA
taaagaactccaacaattcaac

SEQ ID NO: 145434 - RNA, 22 nt, synthetic construct
  source 1..22: mol_type = other RNA
taaagacagacatttggaatag

SEQ ID NO: 145435 - RNA, 22 nt, synthetic construct
  source 1..22: mol_type = other RNA
taaagacagctactaaacaaat

SEQ ID NO: 145436 - RNA, 22 nt, synthetic construct
  source 1..22: mol_type = other RNA
taaagacctcaggtttagaata

SEQ ID NO: 145437 - RNA, 22 nt, synthetic construct
  source 1..22: mol_type = other RNA
taaagacgttcagataacaaag

SEQ ID NO: 145438 - RNA, 22 nt, synthetic construct
  source 1..22: mol_type = other RNA
taaagacttcacgatgcttagg

SEQ ID NO: 145439 - RNA, 22 nt, synthetic construct
  source 1..22: mol_type = other RNA
taaagagagtgacagctgagta

SEQ ID NO: 145440 - RNA, 22 nt, synthetic construct
  source 1..22: mol_type = other RNA
taaagagcaggtggaaggcctg

SEQ ID NO: 145441 - RNA, 22 nt, synthetic construct
  source 1..22: mol_type = other RNA
taaagatagccccttatcagga

SEQ ID NO: 145442 - RNA, 22 nt, synthetic construct
  source 1..22: mol_type = other RNA
taaagatatgtgtaggaaggaa

SEQ ID NO: 145443 - RNA, 22 nt, synthetic construct
  source 1..22: mol_type = other RNA
taaagatcaagctcgccgtctc

SEQ ID NO: 145444 - RNA, 22 nt, synthetic construct
  source 1..22: mol_type = other RNA
taaagatgccatttataatagc

SEQ ID NO: 145445 - RNA, 22 nt, synthetic construct
  source 1..22: mol_type = other RNA
taaagcaaatgtgactagaaga

SEQ ID NO: 145446 - RNA, 22 nt, synthetic construct
  source 1..22: mol_type = other RNA
taaagcaacaggaagaggcagc

SEQ ID NO: 145447 - RNA, 22 nt, synthetic construct
  source 1..22: mol_type = other RNA
taaagcaagtatgagccactag

SEQ ID NO: 145448 - RNA, 22 nt, synthetic construct
  source 1..22: mol_type = other RNA
taaagcagggaggggtccccag

SEQ ID NO: 145449 - RNA, 22 nt, synthetic construct
  source 1..22: mol_type = other RNA
taaagccaatcttcccaatcct

SEQ ID NO: 145450 - RNA, 22 nt, synthetic construct
  source 1..22: mol_type = other RNA
taaagccacactcttggtcttt

SEQ ID NO: 145451 - RNA, 22 nt, synthetic construct
  source 1..22: mol_type = other RNA
taaagccaggctttcccagggt

SEQ ID NO: 145452 - RNA, 22 nt, synthetic construct
  source 1..22: mol_type = other RNA
taaagccccattgtacacatat

SEQ ID NO: 145453 - RNA, 22 nt, synthetic construct
  source 1..22: mol_type = other RNA
taaagccggattcctttcaaag

SEQ ID NO: 145454 - RNA, 22 nt, synthetic construct
  source 1..22: mol_type = other RNA
taaagcctctcaacacttcagt

SEQ ID NO: 145455 - RNA, 22 nt, synthetic construct
  source 1..22: mol_type = other RNA
taaagcgctactcagctgtcac

SEQ ID NO: 145456 - RNA, 22 nt, synthetic construct
  source 1..22: mol_type = other RNA
taaagctctaataaaagctgga

SEQ ID NO: 145457 - RNA, 22 nt, synthetic construct
  source 1..22: mol_type = other RNA
taaagctctatggcatttgagg

SEQ ID NO: 145458 - RNA, 22 nt, synthetic construct
  source 1..22: mol_type = other RNA
taaagctgaactcctttcttac

SEQ ID NO: 145459 - RNA, 22 nt, synthetic construct
  source 1..22: mol_type = other RNA
taaagctttgtgactgtgaggg

SEQ ID NO: 145460 - RNA, 22 nt, synthetic construct
  source 1..22: mol_type = other RNA
taaaggaaaagagatctagtga

SEQ ID NO: 145461 - RNA, 22 nt, synthetic construct
  source 1..22: mol_type = other RNA
taaaggatgcacaagacagatg

SEQ ID NO: 145462 - RNA, 22 nt, synthetic construct
  source 1..22: mol_type = other RNA
taaaggatgtcaactgaggcag

SEQ ID NO: 145463 - RNA, 22 nt, synthetic construct
  source 1..22: mol_type = other RNA
taaaggcaatgctctcttcccc

SEQ ID NO: 145464 - RNA, 22 nt, synthetic construct
  source 1..22: mol_type = other RNA
taaaggccctgatttaaagtag

SEQ ID NO: 145465 - RNA, 22 nt, synthetic construct
  source 1..22: mol_type = other RNA
taaaggctggaaataatttccc

SEQ ID NO: 145466 - RNA, 22 nt, synthetic construct
  source 1..22: mol_type = other RNA
taaaggctttcgtatggaagat

SEQ ID NO: 145467 - RNA, 22 nt, synthetic construct
  source 1..22: mol_type = other RNA
taaagggataatgctatccaga

SEQ ID NO: 145468 - RNA, 22 nt, synthetic construct
  source 1..22: mol_type = other RNA
taaaggggatgggggacgacgt

SEQ ID NO: 145469 - RNA, 22 nt, synthetic construct
  source 1..22: mol_type = other RNA
taaaggggatttcatgaacaat

SEQ ID NO: 145470 - RNA, 22 nt, synthetic construct
  source 1..22: mol_type = other RNA
taaagggtaagaaaattgtaca

SEQ ID NO: 145471 - RNA, 22 nt, synthetic construct
  source 1..22: mol_type = other RNA
taaagggtctggtatctaccaa

SEQ ID NO: 145472 - RNA, 22 nt, synthetic construct
  source 1..22: mol_type = other RNA
taaaggtaaggaaaccccaggg

SEQ ID NO: 145473 - RNA, 22 nt, synthetic construct
  source 1..22: mol_type = other RNA
taaaggtgctaattgtttgttg

SEQ ID NO: 145474 - RNA, 22 nt, synthetic construct
  source 1..22: mol_type = other RNA
taaaggtttggagtttgtagct

SEQ ID NO: 145475 - RNA, 22 nt, synthetic construct
  source 1..22: mol_type = other RNA
taaagtagaaggccctatgcct

SEQ ID NO: 145476 - RNA, 22 nt, synthetic construct
  source 1..22: mol_type = other RNA
taaagtaggttgagacttagat

SEQ ID NO: 145477 - RNA, 22 nt, synthetic construct
  source 1..22: mol_type = other RNA
taaagtcactgtggaaaacagt

SEQ ID NO: 145478 - RNA, 22 nt, synthetic construct
  source 1..22: mol_type = other RNA
taaagtcagaggagcagttact

SEQ ID NO: 145479 - RNA, 22 nt, synthetic construct
  source 1..22: mol_type = other RNA
taaagtccacagatctttttgt

SEQ ID NO: 145480 - RNA, 22 nt, synthetic construct
  source 1..22: mol_type = other RNA
taaagtctatgctcttggtttc

SEQ ID NO: 145481 - RNA, 22 nt, synthetic construct
  source 1..22: mol_type = other RNA
taaagtcttccattttagatca

SEQ ID NO: 145482 - RNA, 22 nt, synthetic construct
  source 1..22: mol_type = other RNA
taaagtcttgctggaagttggc

SEQ ID NO: 145483 - RNA, 22 nt, synthetic construct
  source 1..22: mol_type = other RNA
taaagtgtaaagtttctctctc

SEQ ID NO: 145484 - RNA, 22 nt, synthetic construct
  source 1..22: mol_type = other RNA
taaagttagaagtatcccagat

SEQ ID NO: 145485 - RNA, 22 nt, synthetic construct
  source 1..22: mol_type = other RNA
taaagttagtgaagcagagaga

SEQ ID NO: 145486 - RNA, 22 nt, synthetic construct
  source 1..22: mol_type = other RNA
taaagttccccattgacaatat

SEQ ID NO: 145487 - RNA, 22 nt, synthetic construct
  source 1..22: mol_type = other RNA
taaagttgaggttgaagacctg

SEQ ID NO: 145488 - RNA, 22 nt, synthetic construct
  source 1..22: mol_type = other RNA
taaagttggtcctgcatatgtt

SEQ ID NO: 145489 - RNA, 22 nt, synthetic construct
  source 1..22: mol_type = other RNA
taaagtttcaaactgtggtcac

SEQ ID NO: 145490 - RNA, 22 nt, synthetic construct
  source 1..22: mol_type = other RNA
taaagtttccgttttgcaagat

SEQ ID NO: 145491 - RNA, 22 nt, synthetic construct
  source 1..22: mol_type = other RNA
taaagtttctctctccctgccc

SEQ ID NO: 145492 - RNA, 22 nt, synthetic construct
  source 1..22: mol_type = other RNA
taaataaaacacatgtcatggg

SEQ ID NO: 145493 - RNA, 22 nt, synthetic construct
  source 1..22: mol_type = other RNA
taaataaaatgtctggccgggc

SEQ ID NO: 145494 - RNA, 22 nt, synthetic construct
  source 1..22: mol_type = other RNA
taaataaatctaagtctcaacc

SEQ ID NO: 145495 - RNA, 22 nt, synthetic construct
  source 1..22: mol_type = other RNA
taaataacttccatgagattac

SEQ ID NO: 145496 - RNA, 22 nt, synthetic construct
  source 1..22: mol_type = other RNA
taaataagggcattttcaaggt

SEQ ID NO: 145497 - RNA, 22 nt, synthetic construct
  source 1..22: mol_type = other RNA
taaatacacatgttgagtcttg

SEQ ID NO: 145498 - RNA, 22 nt, synthetic construct
  source 1..22: mol_type = other RNA
taaatacaccaaactcaaaagg

SEQ ID NO: 145499 - RNA, 22 nt, synthetic construct
  source 1..22: mol_type = other RNA
taaatacagagcacagactcaa

SEQ ID NO: 145500 - RNA, 22 nt, synthetic construct
  source 1..22: mol_type = other RNA
taaataccacctgaaatctgat

SEQ ID NO: 145501 - RNA, 22 nt, synthetic construct
  source 1..22: mol_type = other RNA
taaatacgtatatgaaaagccc

SEQ ID NO: 145502 - RNA, 22 nt, synthetic construct
  source 1..22: mol_type = other RNA
taaatacgtgtatactgggtgt

SEQ ID NO: 145503 - RNA, 22 nt, synthetic construct
  source 1..22: mol_type = other RNA
taaatagataaggttgttcttg

SEQ ID NO: 145504 - RNA, 22 nt, synthetic construct
  source 1..22: mol_type = other RNA
taaatagggtgctactcaaagt

SEQ ID NO: 145505 - RNA, 22 nt, synthetic construct
  source 1..22: mol_type = other RNA
taaataggtattcatgctgtga

SEQ ID NO: 145506 - RNA, 22 nt, synthetic construct
  source 1..22: mol_type = other RNA
taaatatactgactagtggctc

SEQ ID NO: 145507 - RNA, 22 nt, synthetic construct
  source 1..22: mol_type = other RNA
taaatatattctaaacctgagg

SEQ ID NO: 145508 - RNA, 22 nt, synthetic construct
  source 1..22: mol_type = other RNA
taaatatccgaaagaactgaaa

SEQ ID NO: 145509 - RNA, 22 nt, synthetic construct
  source 1..22: mol_type = other RNA
taaatatttaacaccatggcag

SEQ ID NO: 145510 - RNA, 22 nt, synthetic construct
  source 1..22: mol_type = other RNA
taaatcaacagtgtactagtct

SEQ ID NO: 145511 - RNA, 22 nt, synthetic construct
  source 1..22: mol_type = other RNA
taaatcaaggtacaatacacta

SEQ ID NO: 145512 - RNA, 22 nt, synthetic construct
  source 1..22: mol_type = other RNA
taaatcaatctgtttcctaatc

SEQ ID NO: 145513 - RNA, 22 nt, synthetic construct
  source 1..22: mol_type = other RNA
taaatcacaggaaagatgtctt

SEQ ID NO: 145514 - RNA, 22 nt, synthetic construct
  source 1..22: mol_type = other RNA
taaatcagaaactgacaggact

SEQ ID NO: 145515 - RNA, 22 nt, synthetic construct
  source 1..22: mol_type = other RNA
taaatcagactgtattaccagc

SEQ ID NO: 145516 - RNA, 22 nt, synthetic construct
  source 1..22: mol_type = other RNA
taaatcagcaccatctaacaga

SEQ ID NO: 145517 - RNA, 22 nt, synthetic construct
  source 1..22: mol_type = other RNA
taaatcaggatgtctttgggaa

SEQ ID NO: 145518 - RNA, 22 nt, synthetic construct
  source 1..22: mol_type = other RNA
taaatcagggcctttaatcacc

SEQ ID NO: 145519 - RNA, 22 nt, synthetic construct
  source 1..22: mol_type = other RNA
taaatcatgatgtttggctcct

SEQ ID NO: 145520 - RNA, 22 nt, synthetic construct
  source 1..22: mol_type = other RNA
taaatccaacgaccggacgtgg

SEQ ID NO: 145521 - RNA, 22 nt, synthetic construct
  source 1..22: mol_type = other RNA
taaatcccacttgatccaggtg

SEQ ID NO: 145522 - RNA, 22 nt, synthetic construct
  source 1..22: mol_type = other RNA
taaatcccggccaggtgcggtg

SEQ ID NO: 145523 - RNA, 22 nt, synthetic construct
  source 1..22: mol_type = other RNA
taaatccgagacaagttctcct

SEQ ID NO: 145524 - RNA, 22 nt, synthetic construct
  source 1..22: mol_type = other RNA
taaatcctcacatgtttggtca

SEQ ID NO: 145525 - RNA, 22 nt, synthetic construct
  source 1..22: mol_type = other RNA
taaatctaaagccaatcttccc

SEQ ID NO: 145526 - RNA, 22 nt, synthetic construct
  source 1..22: mol_type = other RNA
taaatctaagtctcaacctact

SEQ ID NO: 145527 - RNA, 22 nt, synthetic construct
  source 1..22: mol_type = other RNA
taaatctaataaaaagcctctc

SEQ ID NO: 145528 - RNA, 22 nt, synthetic construct
  source 1..22: mol_type = other RNA
taaatcttcaaaatctgatgtg

SEQ ID NO: 145529 - RNA, 22 nt, synthetic construct
  source 1..22: mol_type = other RNA
taaatctttggtgaaggttcat

SEQ ID NO: 145530 - RNA, 22 nt, synthetic construct
  source 1..22: mol_type = other RNA
taaatgaaacacttgtgtaact

SEQ ID NO: 145531 - RNA, 22 nt, synthetic construct
  source 1..22: mol_type = other RNA
taaatgaaatttgaggccctat

SEQ ID NO: 145532 - RNA, 22 nt, synthetic construct
  source 1..22: mol_type = other RNA
taaatgaagaaaatccaagaag

SEQ ID NO: 145533 - RNA, 22 nt, synthetic construct
  source 1..22: mol_type = other RNA
taaatgaaggaaaaaacgggtt

SEQ ID NO: 145534 - RNA, 22 nt, synthetic construct
  source 1..22: mol_type = other RNA
taaatgaatattcgttccagca

SEQ ID NO: 145535 - RNA, 22 nt, synthetic construct
  source 1..22: mol_type = other RNA
taaatgagacacctacaatatt

SEQ ID NO: 145536 - RNA, 22 nt, synthetic construct
  source 1..22: mol_type = other RNA
taaatgaggtatcatttccaag

SEQ ID NO: 145537 - RNA, 22 nt, synthetic construct
  source 1..22: mol_type = other RNA
taaatgatctttcaaggggcct

SEQ ID NO: 145538 - RNA, 22 nt, synthetic construct
  source 1..22: mol_type = other RNA
taaatgatgagctactgcatgc

SEQ ID NO: 145539 - RNA, 22 nt, synthetic construct
  source 1..22: mol_type = other RNA
taaatgcaatgcaggcgcctgg

SEQ ID NO: 145540 - RNA, 22 nt, synthetic construct
  source 1..22: mol_type = other RNA
taaatgcataaacgacagcagg

SEQ ID NO: 145541 - RNA, 22 nt, synthetic construct
  source 1..22: mol_type = other RNA
taaatgccaatttgggatatag

SEQ ID NO: 145542 - RNA, 22 nt, synthetic construct
  source 1..22: mol_type = other RNA
taaatgccacataaatcacagg

SEQ ID NO: 145543 - RNA, 22 nt, synthetic construct
  source 1..22: mol_type = other RNA
taaatgctcacatttagtttca

SEQ ID NO: 145544 - RNA, 22 nt, synthetic construct
  source 1..22: mol_type = other RNA
taaatgctcagtgggttcaatt

SEQ ID NO: 145545 - RNA, 22 nt, synthetic construct
  source 1..22: mol_type = other RNA
taaatggctttttacgatgaaa

SEQ ID NO: 145546 - RNA, 22 nt, synthetic construct
  source 1..22: mol_type = other RNA
taaatggtagcttgggctaagg

SEQ ID NO: 145547 - RNA, 22 nt, synthetic construct
  source 1..22: mol_type = other RNA
taaatggtgcaggccagatatc

SEQ ID NO: 145548 - RNA, 22 nt, synthetic construct
  source 1..22: mol_type = other RNA
taaatggtgtgaagttgggctt

SEQ ID NO: 145549 - RNA, 22 nt, synthetic construct
  source 1..22: mol_type = other RNA
taaatggtttctccttctgcag

SEQ ID NO: 145550 - RNA, 22 nt, synthetic construct
  source 1..22: mol_type = other RNA
taaatgtacaacattcatccct

SEQ ID NO: 145551 - RNA, 22 nt, synthetic construct
  source 1..22: mol_type = other RNA
taaatgtagatcaagtatttcc

SEQ ID NO: 145552 - RNA, 22 nt, synthetic construct
  source 1..22: mol_type = other RNA
taaatgtccatcgagagatgaa

SEQ ID NO: 145553 - RNA, 22 nt, synthetic construct
  source 1..22: mol_type = other RNA
taaatgtgaattagatggctta

SEQ ID NO: 145554 - RNA, 22 nt, synthetic construct
  source 1..22: mol_type = other RNA
taaatgtgagcatttagccccc

SEQ ID NO: 145555 - RNA, 22 nt, synthetic construct
  source 1..22: mol_type = other RNA
taaatgttcagtttatgggtca

SEQ ID NO: 145556 - RNA, 22 nt, synthetic construct
  source 1..22: mol_type = other RNA
taaatgttttgcagagatgagg

SEQ ID NO: 145557 - RNA, 22 nt, synthetic construct
  source 1..22: mol_type = other RNA
taaattaaaaactgagaccgga

SEQ ID NO: 145558 - RNA, 22 nt, synthetic construct
  source 1..22: mol_type = other RNA
taaattaagcttcgacagtccc

SEQ ID NO: 145559 - RNA, 22 nt, synthetic construct
  source 1..22: mol_type = other RNA
taaattacaaaataggcagtcc

SEQ ID NO: 145560 - RNA, 22 nt, synthetic construct
  source 1..22: mol_type = other RNA
taaattacccaaagactttgtt

SEQ ID NO: 145561 - RNA, 22 nt, synthetic construct
  source 1..22: mol_type = other RNA
taaattatagctccaaaagcga

SEQ ID NO: 145562 - RNA, 22 nt, synthetic construct
  source 1..22: mol_type = other RNA
taaattattagcttgctagtag

SEQ ID NO: 145563 - RNA, 22 nt, synthetic construct
  source 1..22: mol_type = other RNA
taaattcctaactcaagagtta

SEQ ID NO: 145564 - RNA, 22 nt, synthetic construct
  source 1..22: mol_type = other RNA
taaattctgccacattcaacaa

SEQ ID NO: 145565 - RNA, 22 nt, synthetic construct
  source 1..22: mol_type = other RNA
taaattgaacagcctaaagtcc

SEQ ID NO: 145566 - RNA, 22 nt, synthetic construct
  source 1..22: mol_type = other RNA
taaattgcaaaaacagtttccc

SEQ ID NO: 145567 - RNA, 22 nt, synthetic construct
  source 1..22: mol_type = other RNA
taaattggtcctggaaaaagac

SEQ ID NO: 145568 - RNA, 22 nt, synthetic construct
  source 1..22: mol_type = other RNA
taaatttcattaggttgatggc

SEQ ID NO: 145569 - RNA, 22 nt, synthetic construct
  source 1..22: mol_type = other RNA
taaatttctaaggttctgctat

SEQ ID NO: 145570 - RNA, 22 nt, synthetic construct
  source 1..22: mol_type = other RNA
taaatttctgttgcttaagtca

SEQ ID NO: 145571 - RNA, 22 nt, synthetic construct
  source 1..22: mol_type = other RNA
taaatttgattgttagccacag

SEQ ID NO: 145572 - RNA, 22 nt, synthetic construct
  source 1..22: mol_type = other RNA
taaatttgccacattttaccaa

SEQ ID NO: 145573 - RNA, 22 nt, synthetic construct
  source 1..22: mol_type = other RNA
taaattttaagtgcacaatgca

SEQ ID NO: 145574 - RNA, 22 nt, synthetic construct
  source 1..22: mol_type = other RNA
taaattttgagacctcaggcag

SEQ ID NO: 145575 - RNA, 22 nt, synthetic construct
  source 1..22: mol_type = other RNA
taaattttgaggcttttggatt

SEQ ID NO: 145576 - RNA, 22 nt, synthetic construct
  source 1..22: mol_type = other RNA
taacaaaaatacgaaagtgctc

SEQ ID NO: 145577 - RNA, 22 nt, synthetic construct
  source 1..22: mol_type = other RNA
taacaaaactaggctgtcccaa

SEQ ID NO: 145578 - RNA, 22 nt, synthetic construct
  source 1..22: mol_type = other RNA
taacaaaagatacacaagatct

SEQ ID NO: 145579 - RNA, 22 nt, synthetic construct
  source 1..22: mol_type = other RNA
taacaaaaggtagaagataatg

SEQ ID NO: 145580 - RNA, 22 nt, synthetic construct
  source 1..22: mol_type = other RNA
taacaaaataggattaagacac

SEQ ID NO: 145581 - RNA, 22 nt, synthetic construct
  source 1..22: mol_type = other RNA
taacaaacgcattgtgatgtct

SEQ ID NO: 145582 - RNA, 22 nt, synthetic construct
  source 1..22: mol_type = other RNA
taacaaagaacaggaagggaga

SEQ ID NO: 145583 - RNA, 22 nt, synthetic construct
  source 1..22: mol_type = other RNA
taacaaagatgccacaaatgga

SEQ ID NO: 145584 - RNA, 22 nt, synthetic construct
  source 1..22: mol_type = other RNA
taacaaagctctgatgctttct

SEQ ID NO: 145585 - RNA, 22 nt, synthetic construct
  source 1..22: mol_type = other RNA
taacaaagggcctgttccaggc

SEQ ID NO: 145586 - RNA, 22 nt, synthetic construct
  source 1..22: mol_type = other RNA
taacaaagggttcttggaaatt

SEQ ID NO: 145587 - RNA, 22 nt, synthetic construct
  source 1..22: mol_type = other RNA
taacaaataagaagattgagtc

SEQ ID NO: 145588 - RNA, 22 nt, synthetic construct
  source 1..22: mol_type = other RNA
taacaagaaagggtagctttga

SEQ ID NO: 145589 - RNA, 22 nt, synthetic construct
  source 1..22: mol_type = other RNA
taacaagaagctgttttggtaa

SEQ ID NO: 145590 - RNA, 22 nt, synthetic construct
  source 1..22: mol_type = other RNA
taacaagaatcctgctatttta

SEQ ID NO: 145591 - RNA, 22 nt, synthetic construct
  source 1..22: mol_type = other RNA
taacaatactgcattgtgcact

SEQ ID NO: 145592 - RNA, 22 nt, synthetic construct
  source 1..22: mol_type = other RNA
taacaattggtgaatctgagta

SEQ ID NO: 145593 - RNA, 22 nt, synthetic construct
  source 1..22: mol_type = other RNA
taacacacaacaatgaattctc

SEQ ID NO: 145594 - RNA, 22 nt, synthetic construct
  source 1..22: mol_type = other RNA
taacacagttctagttctaata

SEQ ID NO: 145595 - RNA, 22 nt, synthetic construct
  source 1..22: mol_type = other RNA
taacaccagtaagattctgtct

SEQ ID NO: 145596 - RNA, 22 nt, synthetic construct
  source 1..22: mol_type = other RNA
taacaccatagctgaaggcact

SEQ ID NO: 145597 - RNA, 22 nt, synthetic construct
  source 1..22: mol_type = other RNA
taacaccatggcaggtttcaag

SEQ ID NO: 145598 - RNA, 22 nt, synthetic construct
  source 1..22: mol_type = other RNA
taacaccttgaactgggacttc

SEQ ID NO: 145599 - RNA, 22 nt, synthetic construct
  source 1..22: mol_type = other RNA
taacacctttgtattcatccag

SEQ ID NO: 145600 - RNA, 22 nt, synthetic construct
  source 1..22: mol_type = other RNA
taacacgcagaaccactgagca

SEQ ID NO: 145601 - RNA, 22 nt, synthetic construct
  source 1..22: mol_type = other RNA
taacactaatccttctcatagt

SEQ ID NO: 145602 - RNA, 22 nt, synthetic construct
  source 1..22: mol_type = other RNA
taacactcagaagtactactca

SEQ ID NO: 145603 - RNA, 22 nt, synthetic construct
  source 1..22: mol_type = other RNA
taacagaaatacaatgtgagcc

SEQ ID NO: 145604 - RNA, 22 nt, synthetic construct
  source 1..22: mol_type = other RNA
taacagaagaagaattctatag

SEQ ID NO: 145605 - RNA, 22 nt, synthetic construct
  source 1..22: mol_type = other RNA
taacagaagggtatatacaata

SEQ ID NO: 145606 - RNA, 22 nt, synthetic construct
  source 1..22: mol_type = other RNA
taacagacctctgaagagtcta

SEQ ID NO: 145607 - RNA, 22 nt, synthetic construct
  source 1..22: mol_type = other RNA
taacagaggcatgcacggactt

SEQ ID NO: 145608 - RNA, 22 nt, synthetic construct
  source 1..22: mol_type = other RNA
taacagatgaatgaacaaaatg

SEQ ID NO: 145609 - RNA, 22 nt, synthetic construct
  source 1..22: mol_type = other RNA
taacagatggaactctattttc

SEQ ID NO: 145610 - RNA, 22 nt, synthetic construct
  source 1..22: mol_type = other RNA
taacagatggtccttttttact

SEQ ID NO: 145611 - RNA, 22 nt, synthetic construct
  source 1..22: mol_type = other RNA
taacagccaaagaaattggacg

SEQ ID NO: 145612 - RNA, 22 nt, synthetic construct
  source 1..22: mol_type = other RNA
taacagccaaataaaacacaag

SEQ ID NO: 145613 - RNA, 22 nt, synthetic construct
  source 1..22: mol_type = other RNA
taacagccggcatatgtcactg

SEQ ID NO: 145614 - RNA, 22 nt, synthetic construct
  source 1..22: mol_type = other RNA
taacagcctaagcaaatgtaat

SEQ ID NO: 145615 - RNA, 22 nt, synthetic construct
  source 1..22: mol_type = other RNA
taacagctcagaagctatagct

SEQ ID NO: 145616 - RNA, 22 nt, synthetic construct
  source 1..22: mol_type = other RNA
taacagggtctacaaaaggttt

SEQ ID NO: 145617 - RNA, 22 nt, synthetic construct
  source 1..22: mol_type = other RNA
taacagtattgtcttctaaccc

SEQ ID NO: 145618 - RNA, 22 nt, synthetic construct
  source 1..22: mol_type = other RNA
taacagtctcgtgaatttggta

SEQ ID NO: 145619 - RNA, 22 nt, synthetic construct
  source 1..22: mol_type = other RNA
taacagtgctgtgccagtgcaa

SEQ ID NO: 145620 - RNA, 22 nt, synthetic construct
  source 1..22: mol_type = other RNA
taacagtggttaggaaaataca

SEQ ID NO: 145621 - RNA, 22 nt, synthetic construct
  source 1..22: mol_type = other RNA
taacagttcaatactactgcaa

SEQ ID NO: 145622 - RNA, 22 nt, synthetic construct
  source 1..22: mol_type = other RNA
taacataaaagcgtactgtgat

SEQ ID NO: 145623 - RNA, 22 nt, synthetic construct
  source 1..22: mol_type = other RNA
taacatacacatcagattttga

SEQ ID NO: 145624 - RNA, 22 nt, synthetic construct
  source 1..22: mol_type = other RNA
taacataccgacggctcaggcc

SEQ ID NO: 145625 - RNA, 22 nt, synthetic construct
  source 1..22: mol_type = other RNA
taacatgaactactcaaagaaa

SEQ ID NO: 145626 - RNA, 22 nt, synthetic construct
  source 1..22: mol_type = other RNA
taacatgcatatgtttgtaact

SEQ ID NO: 145627 - RNA, 22 nt, synthetic construct
  source 1..22: mol_type = other RNA
taacatgtcttggtgtgctctt

SEQ ID NO: 145628 - RNA, 22 nt, synthetic construct
  source 1..22: mol_type = other RNA
taacatgtggaacataatcttt

SEQ ID NO: 145629 - RNA, 22 nt, synthetic construct
  source 1..22: mol_type = other RNA
taacatgttagattaggaaaca

SEQ ID NO: 145630 - RNA, 22 nt, synthetic construct
  source 1..22: mol_type = other RNA
taacattacaacagcaaggctc

SEQ ID NO: 145631 - RNA, 22 nt, synthetic construct
  source 1..22: mol_type = other RNA
taacattaccaataaaagcctc

SEQ ID NO: 145632 - RNA, 22 nt, synthetic construct
  source 1..22: mol_type = other RNA
taacattatcttctaccttttg

SEQ ID NO: 145633 - RNA, 22 nt, synthetic construct
  source 1..22: mol_type = other RNA
taacattgatacaatacttgga

SEQ ID NO: 145634 - RNA, 22 nt, synthetic construct
  source 1..22: mol_type = other RNA
taacatttcttctagtcacatt

SEQ ID NO: 145635 - RNA, 22 nt, synthetic construct
  source 1..22: mol_type = other RNA
taacatttgaactcactggcca

SEQ ID NO: 145636 - RNA, 22 nt, synthetic construct
  source 1..22: mol_type = other RNA
taacattttctctacagttaac

SEQ ID NO: 145637 - RNA, 22 nt, synthetic construct
  source 1..22: mol_type = other RNA
taaccaacattgagtttcaatg

SEQ ID NO: 145638 - RNA, 22 nt, synthetic construct
  source 1..22: mol_type = other RNA
taaccaagaacaaccttatcta

SEQ ID NO: 145639 - RNA, 22 nt, synthetic construct
  source 1..22: mol_type = other RNA
taaccaatgtcagagatctgaa

SEQ ID NO: 145640 - RNA, 22 nt, synthetic construct
  source 1..22: mol_type = other RNA
taaccaattatgctgagtgaat

SEQ ID NO: 145641 - RNA, 22 nt, synthetic construct
  source 1..22: mol_type = other RNA
taaccacatgtggcttgtggct

SEQ ID NO: 145642 - RNA, 22 nt, synthetic construct
  source 1..22: mol_type = other RNA
taaccacgagtaatggatgttt

SEQ ID NO: 145643 - RNA, 22 nt, synthetic construct
  source 1..22: mol_type = other RNA
taaccactgaaacttttctttt

SEQ ID NO: 145644 - RNA, 22 nt, synthetic construct
  source 1..22: mol_type = other RNA
taaccactgttatctgggaaca

SEQ ID NO: 145645 - RNA, 22 nt, synthetic construct
  source 1..22: mol_type = other RNA
taaccaggcccggggcagagaa

SEQ ID NO: 145646 - RNA, 22 nt, synthetic construct
  source 1..22: mol_type = other RNA
taaccatatggtttacaatggt

SEQ ID NO: 145647 - RNA, 22 nt, synthetic construct
  source 1..22: mol_type = other RNA
taaccattaacagctcagaagc

SEQ ID NO: 145648 - RNA, 22 nt, synthetic construct
  source 1..22: mol_type = other RNA
taaccattgagccaaagaagaa

SEQ ID NO: 145649 - RNA, 22 nt, synthetic construct
  source 1..22: mol_type = other RNA
taacccacagataatttcttca

SEQ ID NO: 145650 - RNA, 22 nt, synthetic construct
  source 1..22: mol_type = other RNA
taacccatatctttgcttataa

SEQ ID NO: 145651 - RNA, 22 nt, synthetic construct
  source 1..22: mol_type = other RNA
taaccccagagattgtcgttga

SEQ ID NO: 145652 - RNA, 22 nt, synthetic construct
  source 1..22: mol_type = other RNA
taacccgttttttccttcattt

SEQ ID NO: 145653 - RNA, 22 nt, synthetic construct
  source 1..22: mol_type = other RNA
taaccctcaaatgccatagagc

SEQ ID NO: 145654 - RNA, 22 nt, synthetic construct
  source 1..22: mol_type = other RNA
taaccctcaatccccatctggg

SEQ ID NO: 145655 - RNA, 22 nt, synthetic construct
  source 1..22: mol_type = other RNA
taaccctcctcctctacaagtt

SEQ ID NO: 145656 - RNA, 22 nt, synthetic construct
  source 1..22: mol_type = other RNA
taaccctgtttcccttaatgtt

SEQ ID NO: 145657 - RNA, 22 nt, synthetic construct
  source 1..22: mol_type = other RNA
taaccctgttttgtagattaaa

SEQ ID NO: 145658 - RNA, 22 nt, synthetic construct
  source 1..22: mol_type = other RNA
taacctaaagttgaggttgaag

SEQ ID NO: 145659 - RNA, 22 nt, synthetic construct
  source 1..22: mol_type = other RNA
taacctcaaagtggaaacaact

SEQ ID NO: 145660 - RNA, 22 nt, synthetic construct
  source 1..22: mol_type = other RNA
taacctcataagaactcctggt

SEQ ID NO: 145661 - RNA, 22 nt, synthetic construct
  source 1..22: mol_type = other RNA
taacctccacctcccagattct

SEQ ID NO: 145662 - RNA, 22 nt, synthetic construct
  source 1..22: mol_type = other RNA
taacctctggtattttaagatt

SEQ ID NO: 145663 - RNA, 22 nt, synthetic construct
  source 1..22: mol_type = other RNA
taacctcttgaagtcagttaca

SEQ ID NO: 145664 - RNA, 22 nt, synthetic construct
  source 1..22: mol_type = other RNA
taaccttctggggttcaaacca

SEQ ID NO: 145665 - RNA, 22 nt, synthetic construct
  source 1..22: mol_type = other RNA
taacgaattctttaaaactgct

SEQ ID NO: 145666 - RNA, 22 nt, synthetic construct
  source 1..22: mol_type = other RNA
taacgatagtctcctatattgt

SEQ ID NO: 145667 - RNA, 22 nt, synthetic construct
  source 1..22: mol_type = other RNA
taacgatccttactaccaccac

SEQ ID NO: 145668 - RNA, 22 nt, synthetic construct
  source 1..22: mol_type = other RNA
taacgtatctgggaaaaaataa

SEQ ID NO: 145669 - RNA, 22 nt, synthetic construct
  source 1..22: mol_type = other RNA
taacgtgagctggaagtaagga

SEQ ID NO: 145670 - RNA, 22 nt, synthetic construct
  source 1..22: mol_type = other RNA
taacgtgcttgctctgcggcag

SEQ ID NO: 145671 - RNA, 22 nt, synthetic construct
  source 1..22: mol_type = other RNA
taacgtttatctacagaggatt

SEQ ID NO: 145672 - RNA, 22 nt, synthetic construct
  source 1..22: mol_type = other RNA
taactaaactttgagtagcacc

SEQ ID NO: 145673 - RNA, 22 nt, synthetic construct
  source 1..22: mol_type = other RNA
taactaatagccagtgcagcaa

SEQ ID NO: 145674 - RNA, 22 nt, synthetic construct
  source 1..22: mol_type = other RNA
taactaattactgtttcttagc

SEQ ID NO: 145675 - RNA, 22 nt, synthetic construct
  source 1..22: mol_type = other RNA
taactacacatcagtgctgctc

SEQ ID NO: 145676 - RNA, 22 nt, synthetic construct
  source 1..22: mol_type = other RNA
taactacagacatgccacacca

SEQ ID NO: 145677 - RNA, 22 nt, synthetic construct
  source 1..22: mol_type = other RNA
taactaccactgaggtcaagaa

SEQ ID NO: 145678 - RNA, 22 nt, synthetic construct
  source 1..22: mol_type = other RNA
taactagaaaaccgacagcaga

SEQ ID NO: 145679 - RNA, 22 nt, synthetic construct
  source 1..22: mol_type = other RNA
taactagaaacttcttctgttg

SEQ ID NO: 145680 - RNA, 22 nt, synthetic construct
  source 1..22: mol_type = other RNA
taactagaattgactttaccct

SEQ ID NO: 145681 - RNA, 22 nt, synthetic construct
  source 1..22: mol_type = other RNA
taactagatgcctcgaaggcct

SEQ ID NO: 145682 - RNA, 22 nt, synthetic construct
  source 1..22: mol_type = other RNA
taactataggagttcattcgta

SEQ ID NO: 145683 - RNA, 22 nt, synthetic construct
  source 1..22: mol_type = other RNA
taactatcctatgtggggaatg

SEQ ID NO: 145684 - RNA, 22 nt, synthetic construct
  source 1..22: mol_type = other RNA
taactatggacatgaggaaagc

SEQ ID NO: 145685 - RNA, 22 nt, synthetic construct
  source 1..22: mol_type = other RNA
taactatttctctttaaagctg

SEQ ID NO: 145686 - RNA, 22 nt, synthetic construct
  source 1..22: mol_type = other RNA
taactcaagagttacttctgga

SEQ ID NO: 145687 - RNA, 22 nt, synthetic construct
  source 1..22: mol_type = other RNA
taactcatttaaacgtcagagc

SEQ ID NO: 145688 - RNA, 22 nt, synthetic construct
  source 1..22: mol_type = other RNA
taactccagcttttattagagc

SEQ ID NO: 145689 - RNA, 22 nt, synthetic construct
  source 1..22: mol_type = other RNA
taactccaggggacatgctctg

SEQ ID NO: 145690 - RNA, 22 nt, synthetic construct
  source 1..22: mol_type = other RNA
taactccatcttcacgtggcgc

SEQ ID NO: 145691 - RNA, 22 nt, synthetic construct
  source 1..22: mol_type = other RNA
taactcctgttctttggagctg

SEQ ID NO: 145692 - RNA, 22 nt, synthetic construct
  source 1..22: mol_type = other RNA
taactcgtaatgcgatgatcaa

SEQ ID NO: 145693 - RNA, 22 nt, synthetic construct
  source 1..22: mol_type = other RNA
taactcttgagttaggaattta

SEQ ID NO: 145694 - RNA, 22 nt, synthetic construct
  source 1..22: mol_type = other RNA
taactcttgcattagagcccca

SEQ ID NO: 145695 - RNA, 22 nt, synthetic construct
  source 1..22: mol_type = other RNA
taactgaaatcgggagtaacag

SEQ ID NO: 145696 - RNA, 22 nt, synthetic construct
  source 1..22: mol_type = other RNA
taactgaacatgtatgtttctc

SEQ ID NO: 145697 - RNA, 22 nt, synthetic construct
  source 1..22: mol_type = other RNA
taactgacttacagaccttatt

SEQ ID NO: 145698 - RNA, 22 nt, synthetic construct
  source 1..22: mol_type = other RNA
taactgacttcaagaggttaaa

SEQ ID NO: 145699 - RNA, 22 nt, synthetic construct
  source 1..22: mol_type = other RNA
taactgaggtgtttttcagccc

SEQ ID NO: 145700 - RNA, 22 nt, synthetic construct
  source 1..22: mol_type = other RNA
taactgatatgagggatgagga

SEQ ID NO: 145701 - RNA, 22 nt, synthetic construct
  source 1..22: mol_type = other RNA
taactgatgtgaggatctgttg

SEQ ID NO: 145702 - RNA, 22 nt, synthetic construct
  source 1..22: mol_type = other RNA
taactgcagaggtcaggaaggc

SEQ ID NO: 145703 - RNA, 22 nt, synthetic construct
  source 1..22: mol_type = other RNA
taactgcctaagtaatgctggc

SEQ ID NO: 145704 - RNA, 22 nt, synthetic construct
  source 1..22: mol_type = other RNA
taactgctcctctgactttatg

SEQ ID NO: 145705 - RNA, 22 nt, synthetic construct
  source 1..22: mol_type = other RNA
taactgggtgtgcacgtttgct

SEQ ID NO: 145706 - RNA, 22 nt, synthetic construct
  source 1..22: mol_type = other RNA
taactggtccagatgaagcagg

SEQ ID NO: 145707 - RNA, 22 nt, synthetic construct
  source 1..22: mol_type = other RNA
taactggtctcctttctatact

SEQ ID NO: 145708 - RNA, 22 nt, synthetic construct
  source 1..22: mol_type = other RNA
taactggtgcttttttggtgtt

SEQ ID NO: 145709 - RNA, 22 nt, synthetic construct
  source 1..22: mol_type = other RNA
taactgtaaagtaatcaagtga

SEQ ID NO: 145710 - RNA, 22 nt, synthetic construct
  source 1..22: mol_type = other RNA
taactgtattgcaaactaagtg

SEQ ID NO: 145711 - RNA, 22 nt, synthetic construct
  source 1..22: mol_type = other RNA
taactgtcatcagcgtcctcac

SEQ ID NO: 145712 - RNA, 22 nt, synthetic construct
  source 1..22: mol_type = other RNA
taactgtcctgaattctaacat

SEQ ID NO: 145713 - RNA, 22 nt, synthetic construct
  source 1..22: mol_type = other RNA
taactgttggcaaggatgtgga

SEQ ID NO: 145714 - RNA, 22 nt, synthetic construct
  source 1..22: mol_type = other RNA
taacttattggaaaactctgtt

SEQ ID NO: 145715 - RNA, 22 nt, synthetic construct
  source 1..22: mol_type = other RNA
taacttcacctctacacaaaaa

SEQ ID NO: 145716 - RNA, 22 nt, synthetic construct
  source 1..22: mol_type = other RNA
taacttccatgagattacatag

SEQ ID NO: 145717 - RNA, 22 nt, synthetic construct
  source 1..22: mol_type = other RNA
taacttcccagacagggaatgc

SEQ ID NO: 145718 - RNA, 22 nt, synthetic construct
  source 1..22: mol_type = other RNA
taacttctaatgcccattaaaa

SEQ ID NO: 145719 - RNA, 22 nt, synthetic construct
  source 1..22: mol_type = other RNA
taacttgaattcagatggcccc

SEQ ID NO: 145720 - RNA, 22 nt, synthetic construct
  source 1..22: mol_type = other RNA
taacttgcttaggctgaagcag

SEQ ID NO: 145721 - RNA, 22 nt, synthetic construct
  source 1..22: mol_type = other RNA
taacttgctttgaatttggaaa

SEQ ID NO: 145722 - RNA, 22 nt, synthetic construct
  source 1..22: mol_type = other RNA
taacttggagaacttaaaggtt

SEQ ID NO: 145723 - RNA, 22 nt, synthetic construct
  source 1..22: mol_type = other RNA
taacttggtcgaaaacctgaaa

SEQ ID NO: 145724 - RNA, 22 nt, synthetic construct
  source 1..22: mol_type = other RNA
taacttgttcatgtttacagaa

SEQ ID NO: 145725 - RNA, 22 nt, synthetic construct
  source 1..22: mol_type = other RNA
taactttaaagctctatggcat

SEQ ID NO: 145726 - RNA, 22 nt, synthetic construct
  source 1..22: mol_type = other RNA
taactttaaattttgagacctc

SEQ ID NO: 145727 - RNA, 22 nt, synthetic construct
  source 1..22: mol_type = other RNA
taactttaatcaccaggcgcgg

SEQ ID NO: 145728 - RNA, 22 nt, synthetic construct
  source 1..22: mol_type = other RNA
taactttctattcccctggatc

SEQ ID NO: 145729 - RNA, 22 nt, synthetic construct
  source 1..22: mol_type = other RNA
taactttctgcttaaagcctct

SEQ ID NO: 145730 - RNA, 22 nt, synthetic construct
  source 1..22: mol_type = other RNA
taactttgaaatcagaacttga

SEQ ID NO: 145731 - RNA, 22 nt, synthetic construct
  source 1..22: mol_type = other RNA
taactttgatgaattccagttt

SEQ ID NO: 145732 - RNA, 22 nt, synthetic construct
  source 1..22: mol_type = other RNA
taacttttaacccacagataat

SEQ ID NO: 145733 - RNA, 22 nt, synthetic construct
  source 1..22: mol_type = other RNA
taagaaaaacagaagacacaaa

SEQ ID NO: 145734 - RNA, 22 nt, synthetic construct
  source 1..22: mol_type = other RNA
taagaaaaattccctcagcaaa

SEQ ID NO: 145735 - RNA, 22 nt, synthetic construct
  source 1..22: mol_type = other RNA
taagaaaacaaattcatgcaac

SEQ ID NO: 145736 - RNA, 22 nt, synthetic construct
  source 1..22: mol_type = other RNA
taagaaaacagataacctagat

SEQ ID NO: 145737 - RNA, 22 nt, synthetic construct
  source 1..22: mol_type = other RNA
taagaaaagaagttacggttcc

SEQ ID NO: 145738 - RNA, 22 nt, synthetic construct
  source 1..22: mol_type = other RNA
taagaaaatcattgttcaggga

SEQ ID NO: 145739 - RNA, 22 nt, synthetic construct
  source 1..22: mol_type = other RNA
taagaaaatgtgacattagtgg

SEQ ID NO: 145740 - RNA, 22 nt, synthetic construct
  source 1..22: mol_type = other RNA
taagaaagatctcaaacagcct

SEQ ID NO: 145741 - RNA, 22 nt, synthetic construct
  source 1..22: mol_type = other RNA
taagaaaggagttcagctttaa

SEQ ID NO: 145742 - RNA, 22 nt, synthetic construct
  source 1..22: mol_type = other RNA
taagaaagggtgtgtgaatgga

SEQ ID NO: 145743 - RNA, 22 nt, synthetic construct
  source 1..22: mol_type = other RNA
taagaaaggtctagtgtgcatg

SEQ ID NO: 145744 - RNA, 22 nt, synthetic construct
  source 1..22: mol_type = other RNA
taagaacacttaacatgagatc

SEQ ID NO: 145745 - RNA, 22 nt, synthetic construct
  source 1..22: mol_type = other RNA
taagaaccatacagtgccttca

SEQ ID NO: 145746 - RNA, 22 nt, synthetic construct
  source 1..22: mol_type = other RNA
taagaaccttcatactattttc

SEQ ID NO: 145747 - RNA, 22 nt, synthetic construct
  source 1..22: mol_type = other RNA
taagaactcctggtctcccagc

SEQ ID NO: 145748 - RNA, 22 nt, synthetic construct
  source 1..22: mol_type = other RNA
taagaacttcttcaaaagacat

SEQ ID NO: 145749 - RNA, 22 nt, synthetic construct
  source 1..22: mol_type = other RNA
taagaacttgtctttgtctatt

SEQ ID NO: 145750 - RNA, 22 nt, synthetic construct
  source 1..22: mol_type = other RNA
taagaagatggttggaagtttc

SEQ ID NO: 145751 - RNA, 22 nt, synthetic construct
  source 1..22: mol_type = other RNA
taagaagattgagtcagtaatc

SEQ ID NO: 145752 - RNA, 22 nt, synthetic construct
  source 1..22: mol_type = other RNA
taagaaggaaaagaacacagtg

SEQ ID NO: 145753 - RNA, 22 nt, synthetic construct
  source 1..22: mol_type = other RNA
taagaagggaacactaagaaga

SEQ ID NO: 145754 - RNA, 22 nt, synthetic construct
  source 1..22: mol_type = other RNA
taagaaggtttgtagagcaagc

SEQ ID NO: 145755 - RNA, 22 nt, synthetic construct
  source 1..22: mol_type = other RNA
taagaagtgaaaaatgacctaa

SEQ ID NO: 145756 - RNA, 22 nt, synthetic construct
  source 1..22: mol_type = other RNA
taagaagtgaaactgctggatc

SEQ ID NO: 145757 - RNA, 22 nt, synthetic construct
  source 1..22: mol_type = other RNA
taagaataccaaattcacgaga

SEQ ID NO: 145758 - RNA, 22 nt, synthetic construct
  source 1..22: mol_type = other RNA
taagaatgtcaagctgtttgag

SEQ ID NO: 145759 - RNA, 22 nt, synthetic construct
  source 1..22: mol_type = other RNA
taagaattaaaaacattggagg

SEQ ID NO: 145760 - RNA, 22 nt, synthetic construct
  source 1..22: mol_type = other RNA
taagacaatgtctttggctctt

SEQ ID NO: 145761 - RNA, 22 nt, synthetic construct
  source 1..22: mol_type = other RNA
taagacaatgtggagttggtgc

SEQ ID NO: 145762 - RNA, 22 nt, synthetic construct
  source 1..22: mol_type = other RNA
taagacacaaggaaggtcaaat

SEQ ID NO: 145763 - RNA, 22 nt, synthetic construct
  source 1..22: mol_type = other RNA
taagacaccgctccacgcccat

SEQ ID NO: 145764 - RNA, 22 nt, synthetic construct
  source 1..22: mol_type = other RNA
taagacactagctattgtcttt

SEQ ID NO: 145765 - RNA, 22 nt, synthetic construct
  source 1..22: mol_type = other RNA
taagacatttgggaatgtggtc

SEQ ID NO: 145766 - RNA, 22 nt, synthetic construct
  source 1..22: mol_type = other RNA
taagaccaaaatggagacccat

SEQ ID NO: 145767 - RNA, 22 nt, synthetic construct
  source 1..22: mol_type = other RNA
taagaccacaaggattaatctt

SEQ ID NO: 145768 - RNA, 22 nt, synthetic construct
  source 1..22: mol_type = other RNA
taagacccagtggctagtgtgt

SEQ ID NO: 145769 - RNA, 22 nt, synthetic construct
  source 1..22: mol_type = other RNA
taagaccccagtagaaatcttc

SEQ ID NO: 145770 - RNA, 22 nt, synthetic construct
  source 1..22: mol_type = other RNA
taagacccctcaggtgtcactg

SEQ ID NO: 145771 - RNA, 22 nt, synthetic construct
  source 1..22: mol_type = other RNA
taagactataaaactcttagct

SEQ ID NO: 145772 - RNA, 22 nt, synthetic construct
  source 1..22: mol_type = other RNA
taagactgctgtttaccaaggg

SEQ ID NO: 145773 - RNA, 22 nt, synthetic construct
  source 1..22: mol_type = other RNA
taagagaaggaagcaccaaccc

SEQ ID NO: 145774 - RNA, 22 nt, synthetic construct
  source 1..22: mol_type = other RNA
taagagaatggaaacttgccat

SEQ ID NO: 145775 - RNA, 22 nt, synthetic construct
  source 1..22: mol_type = other RNA
taagagactctcaagaaggtat

SEQ ID NO: 145776 - RNA, 22 nt, synthetic construct
  source 1..22: mol_type = other RNA
taagagaggaagtgaccctgag

SEQ ID NO: 145777 - RNA, 22 nt, synthetic construct
  source 1..22: mol_type = other RNA
taagagattaattcagtcaaca

SEQ ID NO: 145778 - RNA, 22 nt, synthetic construct
  source 1..22: mol_type = other RNA
taagagcatgttgggccaactt

SEQ ID NO: 145779 - RNA, 22 nt, synthetic construct
  source 1..22: mol_type = other RNA
taagagccaaagacattgtctt

SEQ ID NO: 145780 - RNA, 22 nt, synthetic construct
  source 1..22: mol_type = other RNA
taagagctaagactataaaact

SEQ ID NO: 145781 - RNA, 22 nt, synthetic construct
  source 1..22: mol_type = other RNA
taagaggtatcaccatctgata

SEQ ID NO: 145782 - RNA, 22 nt, synthetic construct
  source 1..22: mol_type = other RNA
taagagtatctttttcagcagc

SEQ ID NO: 145783 - RNA, 22 nt, synthetic construct
  source 1..22: mol_type = other RNA
taagagtccccaactgcaaaac

SEQ ID NO: 145784 - RNA, 22 nt, synthetic construct
  source 1..22: mol_type = other RNA
taagagtctcatctgtcaaaaa

SEQ ID NO: 145785 - RNA, 22 nt, synthetic construct
  source 1..22: mol_type = other RNA
taagagtgaaaaggcaaaccac

SEQ ID NO: 145786 - RNA, 22 nt, synthetic construct
  source 1..22: mol_type = other RNA
taagagtgaagaaacctttctc

SEQ ID NO: 145787 - RNA, 22 nt, synthetic construct
  source 1..22: mol_type = other RNA
taagagtgggcaaaaaagtcat

SEQ ID NO: 145788 - RNA, 22 nt, synthetic construct
  source 1..22: mol_type = other RNA
taagagtgtgctgactagtacg

SEQ ID NO: 145789 - RNA, 22 nt, synthetic construct
  source 1..22: mol_type = other RNA
taagagttttatagtcttagct

SEQ ID NO: 145790 - RNA, 22 nt, synthetic construct
  source 1..22: mol_type = other RNA
taagataatgctgttctctgtg

SEQ ID NO: 145791 - RNA, 22 nt, synthetic construct
  source 1..22: mol_type = other RNA
taagatcatacacctggatcaa

SEQ ID NO: 145792 - RNA, 22 nt, synthetic construct
  source 1..22: mol_type = other RNA
taagatccaagtattgtatcaa

SEQ ID NO: 145793 - RNA, 22 nt, synthetic construct
  source 1..22: mol_type = other RNA
taagatcctggattgctagtgt

SEQ ID NO: 145794 - RNA, 22 nt, synthetic construct
  source 1..22: mol_type = other RNA
taagatctgtctttggcccata

SEQ ID NO: 145795 - RNA, 22 nt, synthetic construct
  source 1..22: mol_type = other RNA
taagatgaggtctcagcctttt

SEQ ID NO: 145796 - RNA, 22 nt, synthetic construct
  source 1..22: mol_type = other RNA
taagatgatctaaatggtgtga

SEQ ID NO: 145797 - RNA, 22 nt, synthetic construct
  source 1..22: mol_type = other RNA
taagatgctattcaagacaagc

SEQ ID NO: 145798 - RNA, 22 nt, synthetic construct
  source 1..22: mol_type = other RNA
taagatggaaagtggactatgt

SEQ ID NO: 145799 - RNA, 22 nt, synthetic construct
  source 1..22: mol_type = other RNA
taagatggatttttctgtttct

SEQ ID NO: 145800 - RNA, 22 nt, synthetic construct
  source 1..22: mol_type = other RNA
taagattcaacaaaactggggg

SEQ ID NO: 145801 - RNA, 22 nt, synthetic construct
  source 1..22: mol_type = other RNA
taagattccgtctcaaaaaatt

SEQ ID NO: 145802 - RNA, 22 nt, synthetic construct
  source 1..22: mol_type = other RNA
taagattctctttagggaagat

SEQ ID NO: 145803 - RNA, 22 nt, synthetic construct
  source 1..22: mol_type = other RNA
taagattctgtctctacaaaaa

SEQ ID NO: 145804 - RNA, 22 nt, synthetic construct
  source 1..22: mol_type = other RNA
taagattgtggtccagaaaaaa

SEQ ID NO: 145805 - RNA, 22 nt, synthetic construct
  source 1..22: mol_type = other RNA
taagcaaaatggaagtgctggg

SEQ ID NO: 145806 - RNA, 22 nt, synthetic construct
  source 1..22: mol_type = other RNA
taagcaaaattgacaaaccctt

SEQ ID NO: 145807 - RNA, 22 nt, synthetic construct
  source 1..22: mol_type = other RNA
taagcaaagatatgggttattc

SEQ ID NO: 145808 - RNA, 22 nt, synthetic construct
  source 1..22: mol_type = other RNA
taagcaaccttttaggtgcccc

SEQ ID NO: 145809 - RNA, 22 nt, synthetic construct
  source 1..22: mol_type = other RNA
taagcaactgcatcttctttta

SEQ ID NO: 145810 - RNA, 22 nt, synthetic construct
  source 1..22: mol_type = other RNA
taagcaagttacatgcttagcc

SEQ ID NO: 145811 - RNA, 22 nt, synthetic construct
  source 1..22: mol_type = other RNA
taagcacacatgaacctgcatg

SEQ ID NO: 145812 - RNA, 22 nt, synthetic construct
  source 1..22: mol_type = other RNA
taagcacagaattactatatga

SEQ ID NO: 145813 - RNA, 22 nt, synthetic construct
  source 1..22: mol_type = other RNA
taagcacagactgtgccttgat

SEQ ID NO: 145814 - RNA, 22 nt, synthetic construct
  source 1..22: mol_type = other RNA
taagcacatctgtcttgtgcat

SEQ ID NO: 145815 - RNA, 22 nt, synthetic construct
  source 1..22: mol_type = other RNA
taagcacatggtgataactggt

SEQ ID NO: 145816 - RNA, 22 nt, synthetic construct
  source 1..22: mol_type = other RNA
taagcaccaacagatcctcaca

SEQ ID NO: 145817 - RNA, 22 nt, synthetic construct
  source 1..22: mol_type = other RNA
taagcaccactagagtattacc

SEQ ID NO: 145818 - RNA, 22 nt, synthetic construct
  source 1..22: mol_type = other RNA
taagcactgcgccaagcaggga

SEQ ID NO: 145819 - RNA, 22 nt, synthetic construct
  source 1..22: mol_type = other RNA
taagcagaaagttactattttc

SEQ ID NO: 145820 - RNA, 22 nt, synthetic construct
  source 1..22: mol_type = other RNA
taagcagaaatgacaagtaaat

SEQ ID NO: 145821 - RNA, 22 nt, synthetic construct
  source 1..22: mol_type = other RNA
taagcagaattcaaaaacactg

SEQ ID NO: 145822 - RNA, 22 nt, synthetic construct
  source 1..22: mol_type = other RNA
taagcatagtttgagtatttca

SEQ ID NO: 145823 - RNA, 22 nt, synthetic construct
  source 1..22: mol_type = other RNA
taagcatcccatatggaggcaa

SEQ ID NO: 145824 - RNA, 22 nt, synthetic construct
  source 1..22: mol_type = other RNA
taagcatcgtgaagtctttatt

SEQ ID NO: 145825 - RNA, 22 nt, synthetic construct
  source 1..22: mol_type = other RNA
taagcatgagatactacgccta

SEQ ID NO: 145826 - RNA, 22 nt, synthetic construct
  source 1..22: mol_type = other RNA
taagcatgtaacttgcttaggc

SEQ ID NO: 145827 - RNA, 22 nt, synthetic construct
  source 1..22: mol_type = other RNA
taagcattttccggttgtatag

SEQ ID NO: 145828 - RNA, 22 nt, synthetic construct
  source 1..22: mol_type = other RNA
taagccaatatccctgataatc

SEQ ID NO: 145829 - RNA, 22 nt, synthetic construct
  source 1..22: mol_type = other RNA
taagccaccgcactcagcctgt

SEQ ID NO: 145830 - RNA, 22 nt, synthetic construct
  source 1..22: mol_type = other RNA
taagccagtcactaaaaatcag

SEQ ID NO: 145831 - RNA, 22 nt, synthetic construct
  source 1..22: mol_type = other RNA
taagccatctaattcacattta

SEQ ID NO: 145832 - RNA, 22 nt, synthetic construct
  source 1..22: mol_type = other RNA
taagccatgtttctcctgcatg

SEQ ID NO: 145833 - RNA, 22 nt, synthetic construct
  source 1..22: mol_type = other RNA
taagccatttcaggttttcgac

SEQ ID NO: 145834 - RNA, 22 nt, synthetic construct
  source 1..22: mol_type = other RNA
taagcccaacctgattagaggc

SEQ ID NO: 145835 - RNA, 22 nt, synthetic construct
  source 1..22: mol_type = other RNA
taagcccaacttcacaccattt

SEQ ID NO: 145836 - RNA, 22 nt, synthetic construct
  source 1..22: mol_type = other RNA
taagccgttccatcagagaggc

SEQ ID NO: 145837 - RNA, 22 nt, synthetic construct
  source 1..22: mol_type = other RNA
taagcctacctcccttcacaaa

SEQ ID NO: 145838 - RNA, 22 nt, synthetic construct
  source 1..22: mol_type = other RNA
taagcctactgctctgtcctgt

SEQ ID NO: 145839 - RNA, 22 nt, synthetic construct
  source 1..22: mol_type = other RNA
taagcctagagattaggcagaa

SEQ ID NO: 145840 - RNA, 22 nt, synthetic construct
  source 1..22: mol_type = other RNA
taagcctatgtaagacaatgtc

SEQ ID NO: 145841 - RNA, 22 nt, synthetic construct
  source 1..22: mol_type = other RNA
taagctaagagttttatagtct

SEQ ID NO: 145842 - RNA, 22 nt, synthetic construct
  source 1..22: mol_type = other RNA
taagctaatcccaaagtgagca

SEQ ID NO: 145843 - RNA, 22 nt, synthetic construct
  source 1..22: mol_type = other RNA
taagctcccagccaaacagttt

SEQ ID NO: 145844 - RNA, 22 nt, synthetic construct
  source 1..22: mol_type = other RNA
taagctgaactctgtggagtcc

SEQ ID NO: 145845 - RNA, 22 nt, synthetic construct
  source 1..22: mol_type = other RNA
taagctggtaatacagtctgat

SEQ ID NO: 145846 - RNA, 22 nt, synthetic construct
  source 1..22: mol_type = other RNA
taagctgtgagtccttccagta

SEQ ID NO: 145847 - RNA, 22 nt, synthetic construct
  source 1..22: mol_type = other RNA
taagcttaagagctaagactat

SEQ ID NO: 145848 - RNA, 22 nt, synthetic construct
  source 1..22: mol_type = other RNA
taagcttaggtctttgatccat

SEQ ID NO: 145849 - RNA, 22 nt, synthetic construct
  source 1..22: mol_type = other RNA
taagcttcctctggctgacctg

SEQ ID NO: 145850 - RNA, 22 nt, synthetic construct
  source 1..22: mol_type = other RNA
taagcttcgaagcaaaacatat

SEQ ID NO: 145851 - RNA, 22 nt, synthetic construct
  source 1..22: mol_type = other RNA
taagcttcgacagtcccttgcc

SEQ ID NO: 145852 - RNA, 22 nt, synthetic construct
  source 1..22: mol_type = other RNA
taagcttgggtaggaagctgat

SEQ ID NO: 145853 - RNA, 22 nt, synthetic construct
  source 1..22: mol_type = other RNA
taaggaaaagtcagtaaaaaag

SEQ ID NO: 145854 - RNA, 22 nt, synthetic construct
  source 1..22: mol_type = other RNA
taaggaaacagagttttccaat

SEQ ID NO: 145855 - RNA, 22 nt, synthetic construct
  source 1..22: mol_type = other RNA
taaggaaaccccagggatattt

SEQ ID NO: 145856 - RNA, 22 nt, synthetic construct
  source 1..22: mol_type = other RNA
taaggaaagcacgtttgatctg

SEQ ID NO: 145857 - RNA, 22 nt, synthetic construct
  source 1..22: mol_type = other RNA
taaggaaagctcaggaccagat

SEQ ID NO: 145858 - RNA, 22 nt, synthetic construct
  source 1..22: mol_type = other RNA
taaggaaatggacagcacatta

SEQ ID NO: 145859 - RNA, 22 nt, synthetic construct
  source 1..22: mol_type = other RNA
taaggaatgcctataaaatgct

SEQ ID NO: 145860 - RNA, 22 nt, synthetic construct
  source 1..22: mol_type = other RNA
taaggacatccacaacattgtg

SEQ ID NO: 145861 - RNA, 22 nt, synthetic construct
  source 1..22: mol_type = other RNA
taaggaccaggtatggcgactc

SEQ ID NO: 145862 - RNA, 22 nt, synthetic construct
  source 1..22: mol_type = other RNA
taaggactgaagtcctttcttg

SEQ ID NO: 145863 - RNA, 22 nt, synthetic construct
  source 1..22: mol_type = other RNA
taaggagatggcacataccatg

SEQ ID NO: 145864 - RNA, 22 nt, synthetic construct
  source 1..22: mol_type = other RNA
taaggagccaaacatcatgatt

SEQ ID NO: 145865 - RNA, 22 nt, synthetic construct
  source 1..22: mol_type = other RNA
taaggatcgttagtattttcac

SEQ ID NO: 145866 - RNA, 22 nt, synthetic construct
  source 1..22: mol_type = other RNA
taaggattatggctagaaactt

SEQ ID NO: 145867 - RNA, 22 nt, synthetic construct
  source 1..22: mol_type = other RNA
taaggattttctattcattacc

SEQ ID NO: 145868 - RNA, 22 nt, synthetic construct
  source 1..22: mol_type = other RNA
taaggcagggcttggtggccca

SEQ ID NO: 145869 - RNA, 22 nt, synthetic construct
  source 1..22: mol_type = other RNA
taaggcgcagacacaccatgac

SEQ ID NO: 145870 - RNA, 22 nt, synthetic construct
  source 1..22: mol_type = other RNA
taaggctaaaacatacatgaga

SEQ ID NO: 145871 - RNA, 22 nt, synthetic construct
  source 1..22: mol_type = other RNA
taaggcttggaaaacaaattgc

SEQ ID NO: 145872 - RNA, 22 nt, synthetic construct
  source 1..22: mol_type = other RNA
taagggaaacactcataccagg

SEQ ID NO: 145873 - RNA, 22 nt, synthetic construct
  source 1..22: mol_type = other RNA
taagggaaacagggttacagta

SEQ ID NO: 145874 - RNA, 22 nt, synthetic construct
  source 1..22: mol_type = other RNA
taagggaagagctaagatgcta

SEQ ID NO: 145875 - RNA, 22 nt, synthetic construct
  source 1..22: mol_type = other RNA
taagggcattttcaaggtagaa

SEQ ID NO: 145876 - RNA, 22 nt, synthetic construct
  source 1..22: mol_type = other RNA
taagggccatttcatttctgtt

SEQ ID NO: 145877 - RNA, 22 nt, synthetic construct
  source 1..22: mol_type = other RNA
taaggggaatcatgcagtactt

SEQ ID NO: 145878 - RNA, 22 nt, synthetic construct
  source 1..22: mol_type = other RNA
taaggggcagggtggagtccaa

SEQ ID NO: 145879 - RNA, 22 nt, synthetic construct
  source 1..22: mol_type = other RNA
taaggggctatctttactttca

SEQ ID NO: 145880 - RNA, 22 nt, synthetic construct
  source 1..22: mol_type = other RNA
taagggggaatctactcttttg

SEQ ID NO: 145881 - RNA, 22 nt, synthetic construct
  source 1..22: mol_type = other RNA
taaggggtaaatggtttctcct

SEQ ID NO: 145882 - RNA, 22 nt, synthetic construct
  source 1..22: mol_type = other RNA
taagggtaaacagaattaaaca

SEQ ID NO: 145883 - RNA, 22 nt, synthetic construct
  source 1..22: mol_type = other RNA
taagggtacagaactgctaatg

SEQ ID NO: 145884 - RNA, 22 nt, synthetic construct
  source 1..22: mol_type = other RNA
taagggtccagcttcactcttc

SEQ ID NO: 145885 - RNA, 22 nt, synthetic construct
  source 1..22: mol_type = other RNA
taagggtctgttttacatgttt

SEQ ID NO: 145886 - RNA, 22 nt, synthetic construct
  source 1..22: mol_type = other RNA
taagggtgataaaaaggaggga

SEQ ID NO: 145887 - RNA, 22 nt, synthetic construct
  source 1..22: mol_type = other RNA
taaggtaagggtccagcttcac

SEQ ID NO: 145888 - RNA, 22 nt, synthetic construct
  source 1..22: mol_type = other RNA
taaggtcaacacatcagcgcta

SEQ ID NO: 145889 - RNA, 22 nt, synthetic construct
  source 1..22: mol_type = other RNA
taaggtcaagagagattaaata

SEQ ID NO: 145890 - RNA, 22 nt, synthetic construct
  source 1..22: mol_type = other RNA
taaggtcacattcagaggtatt

SEQ ID NO: 145891 - RNA, 22 nt, synthetic construct
  source 1..22: mol_type = other RNA
taaggtctgtaagtcagttaac

SEQ ID NO: 145892 - RNA, 22 nt, synthetic construct
  source 1..22: mol_type = other RNA
taaggtgcacgctgtgaatgtg

SEQ ID NO: 145893 - RNA, 22 nt, synthetic construct
  source 1..22: mol_type = other RNA
taaggtggagtggtggatagag

SEQ ID NO: 145894 - RNA, 22 nt, synthetic construct
  source 1..22: mol_type = other RNA
taaggtgtttggtgaattttat

SEQ ID NO: 145895 - RNA, 22 nt, synthetic construct
  source 1..22: mol_type = other RNA
taaggttctgctatgctgaaag

SEQ ID NO: 145896 - RNA, 22 nt, synthetic construct
  source 1..22: mol_type = other RNA
taaggttgttcttggttaatat

SEQ ID NO: 145897 - RNA, 22 nt, synthetic construct
  source 1..22: mol_type = other RNA
taaggtttagaaaacatatcct

SEQ ID NO: 145898 - RNA, 22 nt, synthetic construct
  source 1..22: mol_type = other RNA
taaggtttccctggggaataag

SEQ ID NO: 145899 - RNA, 22 nt, synthetic construct
  source 1..22: mol_type = other RNA
taagtaaaatcggaacaggctc

SEQ ID NO: 145900 - RNA, 22 nt, synthetic construct
  source 1..22: mol_type = other RNA
taagtaatgctggccagtgagt

SEQ ID NO: 145901 - RNA, 22 nt, synthetic construct
  source 1..22: mol_type = other RNA
taagtagaaggtcaatctagga

SEQ ID NO: 145902 - RNA, 22 nt, synthetic construct
  source 1..22: mol_type = other RNA
taagtagtggcagccccgcttc

SEQ ID NO: 145903 - RNA, 22 nt, synthetic construct
  source 1..22: mol_type = other RNA
taagtatctcagtcataatttg

SEQ ID NO: 145904 - RNA, 22 nt, synthetic construct
  source 1..22: mol_type = other RNA
taagtatctcggtcattctgga

SEQ ID NO: 145905 - RNA, 22 nt, synthetic construct
  source 1..22: mol_type = other RNA
taagtatgcagaaaccagttgt

SEQ ID NO: 145906 - RNA, 22 nt, synthetic construct
  source 1..22: mol_type = other RNA
taagtattgcattgaatctgta

SEQ ID NO: 145907 - RNA, 22 nt, synthetic construct
  source 1..22: mol_type = other RNA
taagtcactccatttgtggcat

SEQ ID NO: 145908 - RNA, 22 nt, synthetic construct
  source 1..22: mol_type = other RNA
taagtcagaattcactgtgact

SEQ ID NO: 145909 - RNA, 22 nt, synthetic construct
  source 1..22: mol_type = other RNA
taagtcagcctgggcacacgcc

SEQ ID NO: 145910 - RNA, 22 nt, synthetic construct
  source 1..22: mol_type = other RNA
taagtcagttaacagtgctgtg

SEQ ID NO: 145911 - RNA, 22 nt, synthetic construct
  source 1..22: mol_type = other RNA
taagtcatcaaaggaaggaatt

SEQ ID NO: 145912 - RNA, 22 nt, synthetic construct
  source 1..22: mol_type = other RNA
taagtccctaacagtctcgtga

SEQ ID NO: 145913 - RNA, 22 nt, synthetic construct
  source 1..22: mol_type = other RNA
taagtctcaacctactttaaat

SEQ ID NO: 145914 - RNA, 22 nt, synthetic construct
  source 1..22: mol_type = other RNA
taagtctgaaagcttctgagca

SEQ ID NO: 145915 - RNA, 22 nt, synthetic construct
  source 1..22: mol_type = other RNA
taagtcttcttctaagctaaga

SEQ ID NO: 145916 - RNA, 22 nt, synthetic construct
  source 1..22: mol_type = other RNA
taagtgagtttgacctgtaatt

SEQ ID NO: 145917 - RNA, 22 nt, synthetic construct
  source 1..22: mol_type = other RNA
taagtgcacaatgcagtattgt

SEQ ID NO: 145918 - RNA, 22 nt, synthetic construct
  source 1..22: mol_type = other RNA
taagtgcatttcggctctgtgc

SEQ ID NO: 145919 - RNA, 22 nt, synthetic construct
  source 1..22: mol_type = other RNA
taagtggaatcattccgtatat

SEQ ID NO: 145920 - RNA, 22 nt, synthetic construct
  source 1..22: mol_type = other RNA
taagtggcgctgtttgcctgcg

SEQ ID NO: 145921 - RNA, 22 nt, synthetic construct
  source 1..22: mol_type = other RNA
taagtgggaggaggtcatactg

SEQ ID NO: 145922 - RNA, 22 nt, synthetic construct
  source 1..22: mol_type = other RNA
taagtggtattctatcatcaag

SEQ ID NO: 145923 - RNA, 22 nt, synthetic construct
  source 1..22: mol_type = other RNA
taagtgtacaattcggtggcat

SEQ ID NO: 145924 - RNA, 22 nt, synthetic construct
  source 1..22: mol_type = other RNA
taagtgtgaagattaagcacat

SEQ ID NO: 145925 - RNA, 22 nt, synthetic construct
  source 1..22: mol_type = other RNA
taagtgtgagcaaaaatacagc

SEQ ID NO: 145926 - RNA, 22 nt, synthetic construct
  source 1..22: mol_type = other RNA
taagtgttcttaccacaaaaaa

SEQ ID NO: 145927 - RNA, 22 nt, synthetic construct
  source 1..22: mol_type = other RNA
taagtgtttaggatataagagt

SEQ ID NO: 145928 - RNA, 22 nt, synthetic construct
  source 1..22: mol_type = other RNA
taagtgtttgaaaagtgtttgt

SEQ ID NO: 145929 - RNA, 22 nt, synthetic construct
  source 1..22: mol_type = other RNA
taagttaaaacttgtagaggag

SEQ ID NO: 145930 - RNA, 22 nt, synthetic construct
  source 1..22: mol_type = other RNA
taagttaactgaaatcgggagt

SEQ ID NO: 145931 - RNA, 22 nt, synthetic construct
  source 1..22: mol_type = other RNA
taagttactgattagaaggatt

SEQ ID NO: 145932 - RNA, 22 nt, synthetic construct
  source 1..22: mol_type = other RNA
taagttcaaagaaactacctag

SEQ ID NO: 145933 - RNA, 22 nt, synthetic construct
  source 1..22: mol_type = other RNA
taagttcctggactgtgatgac

SEQ ID NO: 145934 - RNA, 22 nt, synthetic construct
  source 1..22: mol_type = other RNA
taagttctccaagttattacaa

SEQ ID NO: 145935 - RNA, 22 nt, synthetic construct
  source 1..22: mol_type = other RNA
taagttgagaaactatccaaca

SEQ ID NO: 145936 - RNA, 22 nt, synthetic construct
  source 1..22: mol_type = other RNA
taagttgcatacgtcgtccccc

SEQ ID NO: 145937 - RNA, 22 nt, synthetic construct
  source 1..22: mol_type = other RNA
taagttggattcccaggtattt

SEQ ID NO: 145938 - RNA, 22 nt, synthetic construct
  source 1..22: mol_type = other RNA
taagttgggagtctatttctga

SEQ ID NO: 145939 - RNA, 22 nt, synthetic construct
  source 1..22: mol_type = other RNA
taagtttcatggacttcctatt

SEQ ID NO: 145940 - RNA, 22 nt, synthetic construct
  source 1..22: mol_type = other RNA
taagtttgccaaagattcttgt

SEQ ID NO: 145941 - RNA, 22 nt, synthetic construct
  source 1..22: mol_type = other RNA
taagttttgggggaagagagca

SEQ ID NO: 145942 - RNA, 22 nt, synthetic construct
  source 1..22: mol_type = other RNA
taataaaaacatatgcaggacc

SEQ ID NO: 145943 - RNA, 22 nt, synthetic construct
  source 1..22: mol_type = other RNA
taataaaaagcctctctgatgg

SEQ ID NO: 145944 - RNA, 22 nt, synthetic construct
  source 1..22: mol_type = other RNA
taataaaagctggagttatttg

SEQ ID NO: 145945 - RNA, 22 nt, synthetic construct
  source 1..22: mol_type = other RNA
taataaaatagcaggattcttg

SEQ ID NO: 145946 - RNA, 22 nt, synthetic construct
  source 1..22: mol_type = other RNA
taataaaatgtttagcggaatg

SEQ ID NO: 145947 - RNA, 22 nt, synthetic construct
  source 1..22: mol_type = other RNA
taataaacgcggaatgaagcag

SEQ ID NO: 145948 - RNA, 22 nt, synthetic construct
  source 1..22: mol_type = other RNA
taataaagcaagtatgagccac

SEQ ID NO: 145949 - RNA, 22 nt, synthetic construct
  source 1..22: mol_type = other RNA
taataaaggcaatgctctcttc

SEQ ID NO: 145950 - RNA, 22 nt, synthetic construct
  source 1..22: mol_type = other RNA
taataaaggtgctaattgtttg

SEQ ID NO: 145951 - RNA, 22 nt, synthetic construct
  source 1..22: mol_type = other RNA
taataaatgcataaacgacagc

SEQ ID NO: 145952 - RNA, 22 nt, synthetic construct
  source 1..22: mol_type = other RNA
taataacagcctaagcaaatgt

SEQ ID NO: 145953 - RNA, 22 nt, synthetic construct
  source 1..22: mol_type = other RNA
taataaccctgttttgtagatt

SEQ ID NO: 145954 - RNA, 22 nt, synthetic construct
  source 1..22: mol_type = other RNA
taataacctcaaagtggaaaca

SEQ ID NO: 145955 - RNA, 22 nt, synthetic construct
  source 1..22: mol_type = other RNA
taataactaaactttgagtagc

SEQ ID NO: 145956 - RNA, 22 nt, synthetic construct
  source 1..22: mol_type = other RNA
taataactacacatcagtgctg

SEQ ID NO: 145957 - RNA, 22 nt, synthetic construct
  source 1..22: mol_type = other RNA
taataactagaaacttcttctg

SEQ ID NO: 145958 - RNA, 22 nt, synthetic construct
  source 1..22: mol_type = other RNA
taataactgcctaagtaatgct

SEQ ID NO: 145959 - RNA, 22 nt, synthetic construct
  source 1..22: mol_type = other RNA
taataacttggagaacttaaag

SEQ ID NO: 145960 - RNA, 22 nt, synthetic construct
  source 1..22: mol_type = other RNA
taataagatcatacacctggat

SEQ ID NO: 145961 - RNA, 22 nt, synthetic construct
  source 1..22: mol_type = other RNA
taataagcttcgaagcaaaaca

SEQ ID NO: 145962 - RNA, 22 nt, synthetic construct
  source 1..22: mol_type = other RNA
taataagtgagtttgacctgta

SEQ ID NO: 145963 - RNA, 22 nt, synthetic construct
  source 1..22: mol_type = other RNA
taataatgaaagctcccaatgc

SEQ ID NO: 145964 - RNA, 22 nt, synthetic construct
  source 1..22: mol_type = other RNA
taataattaagacaatgtggag

SEQ ID NO: 145965 - RNA, 22 nt, synthetic construct
  source 1..22: mol_type = other RNA
taataattgcttttgctgaggg

SEQ ID NO: 145966 - RNA, 22 nt, synthetic construct
  source 1..22: mol_type = other RNA
taatacaaatgatgaagggttt

SEQ ID NO: 145967 - RNA, 22 nt, synthetic construct
  source 1..22: mol_type = other RNA
taatacacttttcaggtattga

SEQ ID NO: 145968 - RNA, 22 nt, synthetic construct
  source 1..22: mol_type = other RNA
taatacagtaaagccccattgt

SEQ ID NO: 145969 - RNA, 22 nt, synthetic construct
  source 1..22: mol_type = other RNA
taatacctaacagccggcatat

SEQ ID NO: 145970 - RNA, 22 nt, synthetic construct
  source 1..22: mol_type = other RNA
taatactatgtatgtggctcac

SEQ ID NO: 145971 - RNA, 22 nt, synthetic construct
  source 1..22: mol_type = other RNA
taatactctagtggtgcttaat

SEQ ID NO: 145972 - RNA, 22 nt, synthetic construct
  source 1..22: mol_type = other RNA
taatactgtagaatgtttttcc

SEQ ID NO: 145973 - RNA, 22 nt, synthetic construct
  source 1..22: mol_type = other RNA
taatacttgtgtagcgggaaaa

SEQ ID NO: 145974 - RNA, 22 nt, synthetic construct
  source 1..22: mol_type = other RNA
taatactttcacactgattttc

SEQ ID NO: 145975 - RNA, 22 nt, synthetic construct
  source 1..22: mol_type = other RNA
taatagaggtctgtctttcagt

SEQ ID NO: 145976 - RNA, 22 nt, synthetic construct
  source 1..22: mol_type = other RNA
taatagataggtcatgtacata

SEQ ID NO: 145977 - RNA, 22 nt, synthetic construct
  source 1..22: mol_type = other RNA
taatagccagtgcagcaagcag

SEQ ID NO: 145978 - RNA, 22 nt, synthetic construct
  source 1..22: mol_type = other RNA
taatagcccaacagggttttgt

SEQ ID NO: 145979 - RNA, 22 nt, synthetic construct
  source 1..22: mol_type = other RNA
taatagcctcctaagttttggg

SEQ ID NO: 145980 - RNA, 22 nt, synthetic construct
  source 1..22: mol_type = other RNA
taatagctagtgatgttgagta

SEQ ID NO: 145981 - RNA, 22 nt, synthetic construct
  source 1..22: mol_type = other RNA
taatagctatcctaatgggcgt

SEQ ID NO: 145982 - RNA, 22 nt, synthetic construct
  source 1..22: mol_type = other RNA
taataggaagtggctagacgga

SEQ ID NO: 145983 - RNA, 22 nt, synthetic construct
  source 1..22: mol_type = other RNA
taatagtaataaaggcaatgct

SEQ ID NO: 145984 - RNA, 22 nt, synthetic construct
  source 1..22: mol_type = other RNA
taatagtctcacgatacttttt

SEQ ID NO: 145985 - RNA, 22 nt, synthetic construct
  source 1..22: mol_type = other RNA
taatagtgaccctttgaagtat

SEQ ID NO: 145986 - RNA, 22 nt, synthetic construct
  source 1..22: mol_type = other RNA
taatagttcacctctccgggta

SEQ ID NO: 145987 - RNA, 22 nt, synthetic construct
  source 1..22: mol_type = other RNA
taatataaaaattccgctctgg

SEQ ID NO: 145988 - RNA, 22 nt, synthetic construct
  source 1..22: mol_type = other RNA
taatatacctgtagaaaatagg

SEQ ID NO: 145989 - RNA, 22 nt, synthetic construct
  source 1..22: mol_type = other RNA
taatatacttgtcaagttctga

SEQ ID NO: 145990 - RNA, 22 nt, synthetic construct
  source 1..22: mol_type = other RNA
taatatctggactgaaaagata

SEQ ID NO: 145991 - RNA, 22 nt, synthetic construct
  source 1..22: mol_type = other RNA
taatatctttggggagatacct

SEQ ID NO: 145992 - RNA, 22 nt, synthetic construct
  source 1..22: mol_type = other RNA
taatatgagttcctgcttcccc

SEQ ID NO: 145993 - RNA, 22 nt, synthetic construct
  source 1..22: mol_type = other RNA
taatatgataccctcaaaagat

SEQ ID NO: 145994 - RNA, 22 nt, synthetic construct
  source 1..22: mol_type = other RNA
taatatgcctcatgcatccaca

SEQ ID NO: 145995 - RNA, 22 nt, synthetic construct
  source 1..22: mol_type = other RNA
taatatgctgtagtgattcact

SEQ ID NO: 145996 - RNA, 22 nt, synthetic construct
  source 1..22: mol_type = other RNA
taatatgtgtacaatggggctt

SEQ ID NO: 145997 - RNA, 22 nt, synthetic construct
  source 1..22: mol_type = other RNA
taatattaaccaagaacaacct

SEQ ID NO: 145998 - RNA, 22 nt, synthetic construct
  source 1..22: mol_type = other RNA
taatattataagttgggagtct

SEQ ID NO: 145999 - RNA, 22 nt, synthetic construct
  source 1..22: mol_type = other RNA
taatattgaaacgatgcattcc

SEQ ID NO: 146000 - RNA, 22 nt, synthetic construct
  source 1..22: mol_type = other RNA
taatattgtaggtgtctcattt

SEQ ID NO: 146001 - RNA, 22 nt, synthetic construct
  source 1..22: mol_type = other RNA
taatattgtatatacccttctg

SEQ ID NO: 146002 - RNA, 22 nt, synthetic construct
  source 1..22: mol_type = other RNA
taatcaaaaacctcccaacagg

SEQ ID NO: 146003 - RNA, 22 nt, synthetic construct
  source 1..22: mol_type = other RNA
taatcaaacagtgtgatattgg

SEQ ID NO: 146004 - RNA, 22 nt, synthetic construct
  source 1..22: mol_type = other RNA
taatcaaacataccccaaccct

SEQ ID NO: 146005 - RNA, 22 nt, synthetic construct
  source 1..22: mol_type = other RNA
taatcaaattcacagaactgtc

SEQ ID NO: 146006 - RNA, 22 nt, synthetic construct
  source 1..22: mol_type = other RNA
taatcaactattccataagatc

SEQ ID NO: 146007 - RNA, 22 nt, synthetic construct
  source 1..22: mol_type = other RNA
taatcaagccgcaaataatcat

SEQ ID NO: 146008 - RNA, 22 nt, synthetic construct
  source 1..22: mol_type = other RNA
taatcaagtatctccctgtgcg

SEQ ID NO: 146009 - RNA, 22 nt, synthetic construct
  source 1..22: mol_type = other RNA
taatcaagtgaaatgatctttg

SEQ ID NO: 146010 - RNA, 22 nt, synthetic construct
  source 1..22: mol_type = other RNA
taatcacagacgcaaaggatgt

SEQ ID NO: 146011 - RNA, 22 nt, synthetic construct
  source 1..22: mol_type = other RNA
taatcacagtacgcttttatgt

SEQ ID NO: 146012 - RNA, 22 nt, synthetic construct
  source 1..22: mol_type = other RNA
taatcaccaggcgcggtggctc

SEQ ID NO: 146013 - RNA, 22 nt, synthetic construct
  source 1..22: mol_type = other RNA
taatcacctcaagtgatgcaac

SEQ ID NO: 146014 - RNA, 22 nt, synthetic construct
  source 1..22: mol_type = other RNA
taatcagccgtgattgcaccac

SEQ ID NO: 146015 - RNA, 22 nt, synthetic construct
  source 1..22: mol_type = other RNA
taatcaggttgggcttatcaga

SEQ ID NO: 146016 - RNA, 22 nt, synthetic construct
  source 1..22: mol_type = other RNA
taatcagtctgtaagcacctgt

SEQ ID NO: 146017 - RNA, 22 nt, synthetic construct
  source 1..22: mol_type = other RNA
taatcattcttctaataggaag

SEQ ID NO: 146018 - RNA, 22 nt, synthetic construct
  source 1..22: mol_type = other RNA
taatcattgttaggtgctggct

SEQ ID NO: 146019 - RNA, 22 nt, synthetic construct
  source 1..22: mol_type = other RNA
taatccaactgcagtctgtcct

SEQ ID NO: 146020 - RNA, 22 nt, synthetic construct
  source 1..22: mol_type = other RNA
taatccagatggacaaattacc

SEQ ID NO: 146021 - RNA, 22 nt, synthetic construct
  source 1..22: mol_type = other RNA
taatccattgggtacataccga

SEQ ID NO: 146022 - RNA, 22 nt, synthetic construct
  source 1..22: mol_type = other RNA
taatcccaaagtgagcagaagg

SEQ ID NO: 146023 - RNA, 22 nt, synthetic construct
  source 1..22: mol_type = other RNA
taatcccgcaccttgattttga

SEQ ID NO: 146024 - RNA, 22 nt, synthetic construct
  source 1..22: mol_type = other RNA
taatcctattttgttattaggg

SEQ ID NO: 146025 - RNA, 22 nt, synthetic construct
  source 1..22: mol_type = other RNA
taatcctgtttctctacatctg

SEQ ID NO: 146026 - RNA, 22 nt, synthetic construct
  source 1..22: mol_type = other RNA
taatccttctcatagtcttcca

SEQ ID NO: 146027 - RNA, 22 nt, synthetic construct
  source 1..22: mol_type = other RNA
taatccttgtggtcttaagaga

SEQ ID NO: 146028 - RNA, 22 nt, synthetic construct
  source 1..22: mol_type = other RNA
taatcctttgcacacaccaaat

SEQ ID NO: 146029 - RNA, 22 nt, synthetic construct
  source 1..22: mol_type = other RNA
taatcgaatcctcacaacaggc

SEQ ID NO: 146030 - RNA, 22 nt, synthetic construct
  source 1..22: mol_type = other RNA
taatctaacatgttacaaatgg

SEQ ID NO: 146031 - RNA, 22 nt, synthetic construct
  source 1..22: mol_type = other RNA
taatctaaccctcctcctctac

SEQ ID NO: 146032 - RNA, 22 nt, synthetic construct
  source 1..22: mol_type = other RNA
taatctaaggattatggctaga

SEQ ID NO: 146033 - RNA, 22 nt, synthetic construct
  source 1..22: mol_type = other RNA
taatctacaaaacagggttatt

SEQ ID NO: 146034 - RNA, 22 nt, synthetic construct
  source 1..22: mol_type = other RNA
taatctactttctaatcctttg

SEQ ID NO: 146035 - RNA, 22 nt, synthetic construct
  source 1..22: mol_type = other RNA
taatctcaatcagggccttccc

SEQ ID NO: 146036 - RNA, 22 nt, synthetic construct
  source 1..22: mol_type = other RNA
taatctcatccacaatgagaca

SEQ ID NO: 146037 - RNA, 22 nt, synthetic construct
  source 1..22: mol_type = other RNA
taatctcctgagtagcagggac

SEQ ID NO: 146038 - RNA, 22 nt, synthetic construct
  source 1..22: mol_type = other RNA
taatctctaggcttaaaattct

SEQ ID NO: 146039 - RNA, 22 nt, synthetic construct
  source 1..22: mol_type = other RNA
taatctctcttgaccttagttt

SEQ ID NO: 146040 - RNA, 22 nt, synthetic construct
  source 1..22: mol_type = other RNA
taatctcttacacctgtttaaa

SEQ ID NO: 146041 - RNA, 22 nt, synthetic construct
  source 1..22: mol_type = other RNA
taatctgattttaatctgtcct

SEQ ID NO: 146042 - RNA, 22 nt, synthetic construct
  source 1..22: mol_type = other RNA
taatctgatttttagtgactgg

SEQ ID NO: 146043 - RNA, 22 nt, synthetic construct
  source 1..22: mol_type = other RNA
taatctgtcagcagttcagcct

SEQ ID NO: 146044 - RNA, 22 nt, synthetic construct
  source 1..22: mol_type = other RNA
taatctgtcctgaatactattc

SEQ ID NO: 146045 - RNA, 22 nt, synthetic construct
  source 1..22: mol_type = other RNA
taatcttcacacttagttcaag

SEQ ID NO: 146046 - RNA, 22 nt, synthetic construct
  source 1..22: mol_type = other RNA
taatcttgcaaaacaatagccc

SEQ ID NO: 146047 - RNA, 22 nt, synthetic construct
  source 1..22: mol_type = other RNA
taatcttgctaaacatgtatac

SEQ ID NO: 146048 - RNA, 22 nt, synthetic construct
  source 1..22: mol_type = other RNA
taatctttctgaactcaaaagt

SEQ ID NO: 146049 - RNA, 22 nt, synthetic construct
  source 1..22: mol_type = other RNA
taatctttggtgctgataaatg

SEQ ID NO: 146050 - RNA, 22 nt, synthetic construct
  source 1..22: mol_type = other RNA
taatgaaaattagctggatgtg

SEQ ID NO: 146051 - RNA, 22 nt, synthetic construct
  source 1..22: mol_type = other RNA
taatgaaagctcccaatgcttg

SEQ ID NO: 146052 - RNA, 22 nt, synthetic construct
  source 1..22: mol_type = other RNA
taatgaactcccagaactcgaa

SEQ ID NO: 146053 - RNA, 22 nt, synthetic construct
  source 1..22: mol_type = other RNA
taatgacctggaaattattcaa

SEQ ID NO: 146054 - RNA, 22 nt, synthetic construct
  source 1..22: mol_type = other RNA
taatgagaatttcagaaagaga

SEQ ID NO: 146055 - RNA, 22 nt, synthetic construct
  source 1..22: mol_type = other RNA
taatgagataaactagattacc

SEQ ID NO: 146056 - RNA, 22 nt, synthetic construct
  source 1..22: mol_type = other RNA
taatgagatagaccagatgcgt

SEQ ID NO: 146057 - RNA, 22 nt, synthetic construct
  source 1..22: mol_type = other RNA
taatgagctgagattgccccat

SEQ ID NO: 146058 - RNA, 22 nt, synthetic construct
  source 1..22: mol_type = other RNA
taatgagtaacatgtggaacat

SEQ ID NO: 146059 - RNA, 22 nt, synthetic construct
  source 1..22: mol_type = other RNA
taatgagtagtacttctgagtg

SEQ ID NO: 146060 - RNA, 22 nt, synthetic construct
  source 1..22: mol_type = other RNA
taatgatgactatgaaaagcct

SEQ ID NO: 146061 - RNA, 22 nt, synthetic construct
  source 1..22: mol_type = other RNA
taatgcaacctgctttcctcat

SEQ ID NO: 146062 - RNA, 22 nt, synthetic construct
  source 1..22: mol_type = other RNA
taatgcaagagttaaaactcac

SEQ ID NO: 146063 - RNA, 22 nt, synthetic construct
  source 1..22: mol_type = other RNA
taatgcacatgggcatgggtcc

SEQ ID NO: 146064 - RNA, 22 nt, synthetic construct
  source 1..22: mol_type = other RNA
taatgcccaatcaaatccagtc

SEQ ID NO: 146065 - RNA, 22 nt, synthetic construct
  source 1..22: mol_type = other RNA
taatgcccattaaaaccatgaa

SEQ ID NO: 146066 - RNA, 22 nt, synthetic construct
  source 1..22: mol_type = other RNA
taatgccccatgtgttggcact

SEQ ID NO: 146067 - RNA, 22 nt, synthetic construct
  source 1..22: mol_type = other RNA
taatgcctcaaattagtcatag

SEQ ID NO: 146068 - RNA, 22 nt, synthetic construct
  source 1..22: mol_type = other RNA
taatgcgatgatcaaaaccagg

SEQ ID NO: 146069 - RNA, 22 nt, synthetic construct
  source 1..22: mol_type = other RNA
taatgctatcattttaaaggga

SEQ ID NO: 146070 - RNA, 22 nt, synthetic construct
  source 1..22: mol_type = other RNA
taatgctatccagaagagaatg

SEQ ID NO: 146071 - RNA, 22 nt, synthetic construct
  source 1..22: mol_type = other RNA
taatgctggccagtgagttcaa

SEQ ID NO: 146072 - RNA, 22 nt, synthetic construct
  source 1..22: mol_type = other RNA
taatgctggcttcatgggtgga

SEQ ID NO: 146073 - RNA, 22 nt, synthetic construct
  source 1..22: mol_type = other RNA
taatgctgttctctgtgtggtt

SEQ ID NO: 146074 - RNA, 22 nt, synthetic construct
  source 1..22: mol_type = other RNA
taatgcttcatattttgtggga

SEQ ID NO: 146075 - RNA, 22 nt, synthetic construct
  source 1..22: mol_type = other RNA
taatggagtactatgcagcaac

SEQ ID NO: 146076 - RNA, 22 nt, synthetic construct
  source 1..22: mol_type = other RNA
taatggatcaaggcacagtctg

SEQ ID NO: 146077 - RNA, 22 nt, synthetic construct
  source 1..22: mol_type = other RNA
taatggatgtttttagagagat

SEQ ID NO: 146078 - RNA, 22 nt, synthetic construct
  source 1..22: mol_type = other RNA
taatgggaaagacaggtagaca

SEQ ID NO: 146079 - RNA, 22 nt, synthetic construct
  source 1..22: mol_type = other RNA
taatgggcacttgggatgtttc

SEQ ID NO: 146080 - RNA, 22 nt, synthetic construct
  source 1..22: mol_type = other RNA
taatgggcattagaagttaaat

SEQ ID NO: 146081 - RNA, 22 nt, synthetic construct
  source 1..22: mol_type = other RNA
taatgggcgtggagcggtgtct

SEQ ID NO: 146082 - RNA, 22 nt, synthetic construct
  source 1..22: mol_type = other RNA
taatggggaaatagatgcctag

SEQ ID NO: 146083 - RNA, 22 nt, synthetic construct
  source 1..22: mol_type = other RNA
taatgggtacagggtttctgtt

SEQ ID NO: 146084 - RNA, 22 nt, synthetic construct
  source 1..22: mol_type = other RNA
taatggtccttgctgaagaata

SEQ ID NO: 146085 - RNA, 22 nt, synthetic construct
  source 1..22: mol_type = other RNA
taatggttagactgcacataaa

SEQ ID NO: 146086 - RNA, 22 nt, synthetic construct
  source 1..22: mol_type = other RNA
taatggttggccgaggccagtc

SEQ ID NO: 146087 - RNA, 22 nt, synthetic construct
  source 1..22: mol_type = other RNA
taatgtaaaaatatagaaggcc

SEQ ID NO: 146088 - RNA, 22 nt, synthetic construct
  source 1..22: mol_type = other RNA
taatgtaaacagcatactgtgg

SEQ ID NO: 146089 - RNA, 22 nt, synthetic construct
  source 1..22: mol_type = other RNA
taatgtagatcctgaggaagct

SEQ ID NO: 146090 - RNA, 22 nt, synthetic construct
  source 1..22: mol_type = other RNA
taatgtaggtgtctgatgtgtg

SEQ ID NO: 146091 - RNA, 22 nt, synthetic construct
  source 1..22: mol_type = other RNA
taatgtccagaggaggaagaga

SEQ ID NO: 146092 - RNA, 22 nt, synthetic construct
  source 1..22: mol_type = other RNA
taatgtccttttcctgttccgg

SEQ ID NO: 146093 - RNA, 22 nt, synthetic construct
  source 1..22: mol_type = other RNA
taatgtctcctctttcatatct

SEQ ID NO: 146094 - RNA, 22 nt, synthetic construct
  source 1..22: mol_type = other RNA
taatgtctttttacacttggag

SEQ ID NO: 146095 - RNA, 22 nt, synthetic construct
  source 1..22: mol_type = other RNA
taatgtgatatgccacattttt

SEQ ID NO: 146096 - RNA, 22 nt, synthetic construct
  source 1..22: mol_type = other RNA
taatgtgcaaggagagaaaaac

SEQ ID NO: 146097 - RNA, 22 nt, synthetic construct
  source 1..22: mol_type = other RNA
taatgtgctgtccatttcctta

SEQ ID NO: 146098 - RNA, 22 nt, synthetic construct
  source 1..22: mol_type = other RNA
taatgtggcttgcaaggcccac

SEQ ID NO: 146099 - RNA, 22 nt, synthetic construct
  source 1..22: mol_type = other RNA
taatgtgtaagaaatgccacat

SEQ ID NO: 146100 - RNA, 22 nt, synthetic construct
  source 1..22: mol_type = other RNA
taatgtgtgaagaaggaatgtg

SEQ ID NO: 146101 - RNA, 22 nt, synthetic construct
  source 1..22: mol_type = other RNA
taatgtgtgttccagacaaaaa

SEQ ID NO: 146102 - RNA, 22 nt, synthetic construct
  source 1..22: mol_type = other RNA
taatgtgttgtctgattcagtt

SEQ ID NO: 146103 - RNA, 22 nt, synthetic construct
  source 1..22: mol_type = other RNA
taatgttacttctcagctatag

SEQ ID NO: 146104 - RNA, 22 nt, synthetic construct
  source 1..22: mol_type = other RNA
taatgttagaattcaggacagt

SEQ ID NO: 146105 - RNA, 22 nt, synthetic construct
  source 1..22: mol_type = other RNA
taatgttatatttccgtatcca

SEQ ID NO: 146106 - RNA, 22 nt, synthetic construct
  source 1..22: mol_type = other RNA
taatgttatgaagcttttctcc

SEQ ID NO: 146107 - RNA, 22 nt, synthetic construct
  source 1..22: mol_type = other RNA
taatgttgacatcttgcataac

SEQ ID NO: 146108 - RNA, 22 nt, synthetic construct
  source 1..22: mol_type = other RNA
taatgtttagtagaattctcca

SEQ ID NO: 146109 - RNA, 22 nt, synthetic construct
  source 1..22: mol_type = other RNA
taatgtttgtacttctaccttg

SEQ ID NO: 146110 - RNA, 22 nt, synthetic construct
  source 1..22: mol_type = other RNA
taatgttttatttagcccatgt

SEQ ID NO: 146111 - RNA, 22 nt, synthetic construct
  source 1..22: mol_type = other RNA
taatgttttccgtgtgacaaaa

SEQ ID NO: 146112 - RNA, 22 nt, synthetic construct
  source 1..22: mol_type = other RNA
taattaagacaatgtggagttg

SEQ ID NO: 146113 - RNA, 22 nt, synthetic construct
  source 1..22: mol_type = other RNA
taattacaataatgcacatggg

SEQ ID NO: 146114 - RNA, 22 nt, synthetic construct
  source 1..22: mol_type = other RNA
taattacaggggactttgatgt

SEQ ID NO: 146115 - RNA, 22 nt, synthetic construct
  source 1..22: mol_type = other RNA
taattacatacttcaaagggtc

SEQ ID NO: 146116 - RNA, 22 nt, synthetic construct
  source 1..22: mol_type = other RNA
taattacccaggcatgatggct

SEQ ID NO: 146117 - RNA, 22 nt, synthetic construct
  source 1..22: mol_type = other RNA
taattagaaactggtgaactgg

SEQ ID NO: 146118 - RNA, 22 nt, synthetic construct
  source 1..22: mol_type = other RNA
taattagccgggtgtagtggtg

SEQ ID NO: 146119 - RNA, 22 nt, synthetic construct
  source 1..22: mol_type = other RNA
taattagttacatgaggtcacc

SEQ ID NO: 146120 - RNA, 22 nt, synthetic construct
  source 1..22: mol_type = other RNA
taattatgagcattccccacat

SEQ ID NO: 146121 - RNA, 22 nt, synthetic construct
  source 1..22: mol_type = other RNA
taattatttgtgcatactgtga

SEQ ID NO: 146122 - RNA, 22 nt, synthetic construct
  source 1..22: mol_type = other RNA
taattcaattttcatgggttga

SEQ ID NO: 146123 - RNA, 22 nt, synthetic construct
  source 1..22: mol_type = other RNA
taattcacatttaagaagggaa

SEQ ID NO: 146124 - RNA, 22 nt, synthetic construct
  source 1..22: mol_type = other RNA
taattcagtcaacaccaagcaa

SEQ ID NO: 146125 - RNA, 22 nt, synthetic construct
  source 1..22: mol_type = other RNA
taattcattgtacatgaagtcc

SEQ ID NO: 146126 - RNA, 22 nt, synthetic construct
  source 1..22: mol_type = other RNA
taattccaaattagctttctcc

SEQ ID NO: 146127 - RNA, 22 nt, synthetic construct
  source 1..22: mol_type = other RNA
taattccacaaccactggggag

SEQ ID NO: 146128 - RNA, 22 nt, synthetic construct
  source 1..22: mol_type = other RNA
taattcctactttcttcaacca

SEQ ID NO: 146129 - RNA, 22 nt, synthetic construct
  source 1..22: mol_type = other RNA
taattcgaaaatgggccaaaga

SEQ ID NO: 146130 - RNA, 22 nt, synthetic construct
  source 1..22: mol_type = other RNA
taattctaattagaaactggtg

SEQ ID NO: 146131 - RNA, 22 nt, synthetic construct
  source 1..22: mol_type = other RNA
taattctatctgaactttcgaa

SEQ ID NO: 146132 - RNA, 22 nt, synthetic construct
  source 1..22: mol_type = other RNA
taattctccactttcatgattt

SEQ ID NO: 146133 - RNA, 22 nt, synthetic construct
  source 1..22: mol_type = other RNA
taattctgacaactgggagaat

SEQ ID NO: 146134 - RNA, 22 nt, synthetic construct
  source 1..22: mol_type = other RNA
taattctgaggcctcctgcctt

SEQ ID NO: 146135 - RNA, 22 nt, synthetic construct
  source 1..22: mol_type = other RNA
taattctgcagtgaacatggga

SEQ ID NO: 146136 - RNA, 22 nt, synthetic construct
  source 1..22: mol_type = other RNA
taattctgccttcaatgtttgg

SEQ ID NO: 146137 - RNA, 22 nt, synthetic construct
  source 1..22: mol_type = other RNA
taattctgtgccaagcaacttg

SEQ ID NO: 146138 - RNA, 22 nt, synthetic construct
  source 1..22: mol_type = other RNA
taattctgtttacccttactaa

SEQ ID NO: 146139 - RNA, 22 nt, synthetic construct
  source 1..22: mol_type = other RNA
taattcttaaactgccaaaccc

SEQ ID NO: 146140 - RNA, 22 nt, synthetic construct
  source 1..22: mol_type = other RNA
taattcttcctgtcttggaccc

SEQ ID NO: 146141 - RNA, 22 nt, synthetic construct
  source 1..22: mol_type = other RNA
taattcttttgctgtataccca

SEQ ID NO: 146142 - RNA, 22 nt, synthetic construct
  source 1..22: mol_type = other RNA
taattgaacccactgagcattt

SEQ ID NO: 146143 - RNA, 22 nt, synthetic construct
  source 1..22: mol_type = other RNA
taattgagctgtccccaccgcc

SEQ ID NO: 146144 - RNA, 22 nt, synthetic construct
  source 1..22: mol_type = other RNA
taattgctgcagtttttccact

SEQ ID NO: 146145 - RNA, 22 nt, synthetic construct
  source 1..22: mol_type = other RNA
taattgcttttgctgagggaat

SEQ ID NO: 146146 - RNA, 22 nt, synthetic construct
  source 1..22: mol_type = other RNA
taattgggggaaaattgacatt

SEQ ID NO: 146147 - RNA, 22 nt, synthetic construct
  source 1..22: mol_type = other RNA
taattggttaaacttggtctgg

SEQ ID NO: 146148 - RNA, 22 nt, synthetic construct
  source 1..22: mol_type = other RNA
taattggttcgtttgaggcttt

SEQ ID NO: 146149 - RNA, 22 nt, synthetic construct
  source 1..22: mol_type = other RNA
taattgtacacctcaaactaga

SEQ ID NO: 146150 - RNA, 22 nt, synthetic construct
  source 1..22: mol_type = other RNA
taattgtaccttggagagaaac

SEQ ID NO: 146151 - RNA, 22 nt, synthetic construct
  source 1..22: mol_type = other RNA
taattgtagtttccatggaggg

SEQ ID NO: 146152 - RNA, 22 nt, synthetic construct
  source 1..22: mol_type = other RNA
taattgtttgttgggtttaact

SEQ ID NO: 146153 - RNA, 22 nt, synthetic construct
  source 1..22: mol_type = other RNA
taattgttttcccttttgtagc

SEQ ID NO: 146154 - RNA, 22 nt, synthetic construct
  source 1..22: mol_type = other RNA
taatttacatagtgctcttctg

SEQ ID NO: 146155 - RNA, 22 nt, synthetic construct
  source 1..22: mol_type = other RNA
taatttagatgagagtggccta

SEQ ID NO: 146156 - RNA, 22 nt, synthetic construct
  source 1..22: mol_type = other RNA
taatttagcgttcatccaaatt

SEQ ID NO: 146157 - RNA, 22 nt, synthetic construct
  source 1..22: mol_type = other RNA
taatttatcagatcccaattac

SEQ ID NO: 146158 - RNA, 22 nt, synthetic construct
  source 1..22: mol_type = other RNA
taatttatctccataagtccct

SEQ ID NO: 146159 - RNA, 22 nt, synthetic construct
  source 1..22: mol_type = other RNA
taatttcagagagacctgaaga

SEQ ID NO: 146160 - RNA, 22 nt, synthetic construct
  source 1..22: mol_type = other RNA
taatttccaagaaccctttgtt

SEQ ID NO: 146161 - RNA, 22 nt, synthetic construct
  source 1..22: mol_type = other RNA
taatttccacccatgaagccag

SEQ ID NO: 146162 - RNA, 22 nt, synthetic construct
  source 1..22: mol_type = other RNA
taatttccaggtcattacatat

SEQ ID NO: 146163 - RNA, 22 nt, synthetic construct
  source 1..22: mol_type = other RNA
taatttcccatttgatttcttc

SEQ ID NO: 146164 - RNA, 22 nt, synthetic construct
  source 1..22: mol_type = other RNA
taatttccctcagaatttgagg

SEQ ID NO: 146165 - RNA, 22 nt, synthetic construct
  source 1..22: mol_type = other RNA
taatttctgagagtattgccag

SEQ ID NO: 146166 - RNA, 22 nt, synthetic construct
  source 1..22: mol_type = other RNA
taatttctttaaaaccagagcg

SEQ ID NO: 146167 - RNA, 22 nt, synthetic construct
  source 1..22: mol_type = other RNA
taatttgaggcattagtgaatt

SEQ ID NO: 146168 - RNA, 22 nt, synthetic construct
  source 1..22: mol_type = other RNA
taatttgaggtctaggctaatg

SEQ ID NO: 146169 - RNA, 22 nt, synthetic construct
  source 1..22: mol_type = other RNA
taatttggatgaacgctaaatt

SEQ ID NO: 146170 - RNA, 22 nt, synthetic construct
  source 1..22: mol_type = other RNA
taatttggcaaaaaatgcagta

SEQ ID NO: 146171 - RNA, 22 nt, synthetic construct
  source 1..22: mol_type = other RNA
taatttggcttggggaacagtt

SEQ ID NO: 146172 - RNA, 22 nt, synthetic construct
  source 1..22: mol_type = other RNA
taatttgggtttgagtttccag

SEQ ID NO: 146173 - RNA, 22 nt, synthetic construct
  source 1..22: mol_type = other RNA
taatttggttatgcgaatttac

SEQ ID NO: 146174 - RNA, 22 nt, synthetic construct
  source 1..22: mol_type = other RNA
taatttgtcaacttttagtagg

SEQ ID NO: 146175 - RNA, 22 nt, synthetic construct
  source 1..22: mol_type = other RNA
taatttgtccatctggattata

SEQ ID NO: 146176 - RNA, 22 nt, synthetic construct
  source 1..22: mol_type = other RNA
taatttgtgaaccttgaagtac

SEQ ID NO: 146177 - RNA, 22 nt, synthetic construct
  source 1..22: mol_type = other RNA
taattttctgactctgtgcttg

SEQ ID NO: 146178 - RNA, 22 nt, synthetic construct
  source 1..22: mol_type = other RNA
taattttgagagtgcagtatgt

SEQ ID NO: 146179 - RNA, 22 nt, synthetic construct
  source 1..22: mol_type = other RNA
taattttggggccatctgaatt

SEQ ID NO: 146180 - RNA, 22 nt, synthetic construct
  source 1..22: mol_type = other RNA
taatttttaaaaagcagctacc

SEQ ID NO: 146181 - RNA, 22 nt, synthetic construct
  source 1..22: mol_type = other RNA
taatttttaaaagagcgaagag

SEQ ID NO: 146182 - RNA, 22 nt, synthetic construct
  source 1..22: mol_type = other RNA
taatttttgtcaagtgactcca

SEQ ID NO: 146183 - RNA, 22 nt, synthetic construct
  source 1..22: mol_type = other RNA
taattttttgagacggaatctt

SEQ ID NO: 146184 - RNA, 22 nt, synthetic construct
  source 1..22: mol_type = other RNA
tacaaaaacacactgagctttt

SEQ ID NO: 146185 - RNA, 22 nt, synthetic construct
  source 1..22: mol_type = other RNA
tacaaaaagcacctaccataac

SEQ ID NO: 146186 - RNA, 22 nt, synthetic construct
  source 1..22: mol_type = other RNA
tacaaaaagtgataccataaag

SEQ ID NO: 146187 - RNA, 22 nt, synthetic construct
  source 1..22: mol_type = other RNA
tacaaaaatgacacaacttact

SEQ ID NO: 146188 - RNA, 22 nt, synthetic construct
  source 1..22: mol_type = other RNA
tacaaaaattagctgggcgaga

SEQ ID NO: 146189 - RNA, 22 nt, synthetic construct
  source 1..22: mol_type = other RNA
tacaaaacagggttattaacat

SEQ ID NO: 146190 - RNA, 22 nt, synthetic construct
  source 1..22: mol_type = other RNA
tacaaaactgaactcaaaatgg

SEQ ID NO: 146191 - RNA, 22 nt, synthetic construct
  source 1..22: mol_type = other RNA
tacaaaagaacaggacttttgg

SEQ ID NO: 146192 - RNA, 22 nt, synthetic construct
  source 1..22: mol_type = other RNA
tacaaaagatcatttcaaacca

SEQ ID NO: 146193 - RNA, 22 nt, synthetic construct
  source 1..22: mol_type = other RNA
tacaaaaggaggaactaattga

SEQ ID NO: 146194 - RNA, 22 nt, synthetic construct
  source 1..22: mol_type = other RNA
tacaaaagggaaaacaattact

SEQ ID NO: 146195 - RNA, 22 nt, synthetic construct
  source 1..22: mol_type = other RNA
tacaaaaggtttccagtggccc

SEQ ID NO: 146196 - RNA, 22 nt, synthetic construct
  source 1..22: mol_type = other RNA
tacaaaagtgctgttgaggctg

SEQ ID NO: 146197 - RNA, 22 nt, synthetic construct
  source 1..22: mol_type = other RNA
tacaaaataggcagtcctctac

SEQ ID NO: 146198 - RNA, 22 nt, synthetic construct
  source 1..22: mol_type = other RNA
tacaaaatatgtaatgacctgg

SEQ ID NO: 146199 - RNA, 22 nt, synthetic construct
  source 1..22: mol_type = other RNA
tacaaaccaaaaaatgtggcat

SEQ ID NO: 146200 - RNA, 22 nt, synthetic construct
  source 1..22: mol_type = other RNA
tacaaaccttcttatttccttc

SEQ ID NO: 146201 - RNA, 22 nt, synthetic construct
  source 1..22: mol_type = other RNA
tacaaactccaaacctttaagt

SEQ ID NO: 146202 - RNA, 22 nt, synthetic construct
  source 1..22: mol_type = other RNA
tacaaagatttacccctacttt

SEQ ID NO: 146203 - RNA, 22 nt, synthetic construct
  source 1..22: mol_type = other RNA
tacaaaggacatgaactcaacc

SEQ ID NO: 146204 - RNA, 22 nt, synthetic construct
  source 1..22: mol_type = other RNA
tacaaaggtgttaagccgttcc

SEQ ID NO: 146205 - RNA, 22 nt, synthetic construct
  source 1..22: mol_type = other RNA
tacaaataactccagcttttat

SEQ ID NO: 146206 - RNA, 22 nt, synthetic construct
  source 1..22: mol_type = other RNA
tacaaatgaaagtcagctaatt

SEQ ID NO: 146207 - RNA, 22 nt, synthetic construct
  source 1..22: mol_type = other RNA
tacaaatgatgaagggttttct

SEQ ID NO: 146208 - RNA, 22 nt, synthetic construct
  source 1..22: mol_type = other RNA
tacaaatttctatagtcattcc

SEQ ID NO: 146209 - RNA, 22 nt, synthetic construct
  source 1..22: mol_type = other RNA
tacaacagcaaggctcctgcag

SEQ ID NO: 146210 - RNA, 22 nt, synthetic construct
  source 1..22: mol_type = other RNA
tacaacagcaccttttttggta

SEQ ID NO: 146211 - RNA, 22 nt, synthetic construct
  source 1..22: mol_type = other RNA
tacaacattcatccctctaaat

SEQ ID NO: 146212 - RNA, 22 nt, synthetic construct
  source 1..22: mol_type = other RNA
tacaaccggaaaatgcttaaca

SEQ ID NO: 146213 - RNA, 22 nt, synthetic construct
  source 1..22: mol_type = other RNA
tacaactaataattgcttttgc

SEQ ID NO: 146214 - RNA, 22 nt, synthetic construct
  source 1..22: mol_type = other RNA
tacaactactcgggaggctgag

SEQ ID NO: 146215 - RNA, 22 nt, synthetic construct
  source 1..22: mol_type = other RNA
tacaactctaataacagcctaa

SEQ ID NO: 146216 - RNA, 22 nt, synthetic construct
  source 1..22: mol_type = other RNA
tacaactctgaccattgtgtgg

SEQ ID NO: 146217 - RNA, 22 nt, synthetic construct
  source 1..22: mol_type = other RNA
tacaactgctcataatagtctc

SEQ ID NO: 146218 - RNA, 22 nt, synthetic construct
  source 1..22: mol_type = other RNA
tacaactggtttctgcatactt

SEQ ID NO: 146219 - RNA, 22 nt, synthetic construct
  source 1..22: mol_type = other RNA
tacaagaccagcctgggcaata

SEQ ID NO: 146220 - RNA, 22 nt, synthetic construct
  source 1..22: mol_type = other RNA
tacaagagttcccctatactgt

SEQ ID NO: 146221 - RNA, 22 nt, synthetic construct
  source 1..22: mol_type = other RNA
tacaaggagacctactaaaagt

SEQ ID NO: 146222 - RNA, 22 nt, synthetic construct
  source 1..22: mol_type = other RNA
tacaaggattgaatggaaagaa

SEQ ID NO: 146223 - RNA, 22 nt, synthetic construct
  source 1..22: mol_type = other RNA
tacaaggctagagctcacacga

SEQ ID NO: 146224 - RNA, 22 nt, synthetic construct
  source 1..22: mol_type = other RNA
tacaagggtgacagagccgagc

SEQ ID NO: 146225 - RNA, 22 nt, synthetic construct
  source 1..22: mol_type = other RNA
tacaaggtcaatctgaaaaata

SEQ ID NO: 146226 - RNA, 22 nt, synthetic construct
  source 1..22: mol_type = other RNA
tacaagtacatgaaatactcaa

SEQ ID NO: 146227 - RNA, 22 nt, synthetic construct
  source 1..22: mol_type = other RNA
tacaataatatgcctcatgcat

SEQ ID NO: 146228 - RNA, 22 nt, synthetic construct
  source 1..22: mol_type = other RNA
tacaataatgcacatgggcatg

SEQ ID NO: 146229 - RNA, 22 nt, synthetic construct
  source 1..22: mol_type = other RNA
tacaatacttggatcttatctg

SEQ ID NO: 146230 - RNA, 22 nt, synthetic construct
  source 1..22: mol_type = other RNA
tacaatattacagtaaggtttc

SEQ ID NO: 146231 - RNA, 22 nt, synthetic construct
  source 1..22: mol_type = other RNA
tacaatgaatatgtactaccta

SEQ ID NO: 146232 - RNA, 22 nt, synthetic construct
  source 1..22: mol_type = other RNA
tacaatgaattagcaatgcgaa

SEQ ID NO: 146233 - RNA, 22 nt, synthetic construct
  source 1..22: mol_type = other RNA
tacaatggaaatgaagtattga

SEQ ID NO: 146234 - RNA, 22 nt, synthetic construct
  source 1..22: mol_type = other RNA
tacaatggggctttactgtatt

SEQ ID NO: 146235 - RNA, 22 nt, synthetic construct
  source 1..22: mol_type = other RNA
tacaatggttgaactagtttag

SEQ ID NO: 146236 - RNA, 22 nt, synthetic construct
  source 1..22: mol_type = other RNA
tacaatgtaaggtgcacgctgt

SEQ ID NO: 146237 - RNA, 22 nt, synthetic construct
  source 1..22: mol_type = other RNA
tacaatgtgagccacatacata

SEQ ID NO: 146238 - RNA, 22 nt, synthetic construct
  source 1..22: mol_type = other RNA
tacaattacacatctcccatac

SEQ ID NO: 146239 - RNA, 22 nt, synthetic construct
  source 1..22: mol_type = other RNA
tacaattaggctgtttgagatc

SEQ ID NO: 146240 - RNA, 22 nt, synthetic construct
  source 1..22: mol_type = other RNA
tacaattcctttctaggcatct

SEQ ID NO: 146241 - RNA, 22 nt, synthetic construct
  source 1..22: mol_type = other RNA
tacaattcggtggcattaagga

SEQ ID NO: 146242 - RNA, 22 nt, synthetic construct
  source 1..22: mol_type = other RNA
tacaattttcttaccctttact

SEQ ID NO: 146243 - RNA, 22 nt, synthetic construct
  source 1..22: mol_type = other RNA
tacacaaaaagatctgtggact

SEQ ID NO: 146244 - RNA, 22 nt, synthetic construct
  source 1..22: mol_type = other RNA
tacacaacatgttttatttctg

SEQ ID NO: 146245 - RNA, 22 nt, synthetic construct
  source 1..22: mol_type = other RNA
tacacaagatctctatgcagaa

SEQ ID NO: 146246 - RNA, 22 nt, synthetic construct
  source 1..22: mol_type = other RNA
tacacaagtattaacgaattct

SEQ ID NO: 146247 - RNA, 22 nt, synthetic construct
  source 1..22: mol_type = other RNA
tacacaagtgtttcatttacaa

SEQ ID NO: 146248 - RNA, 22 nt, synthetic construct
  source 1..22: mol_type = other RNA
tacacacacctaccaccatgct

SEQ ID NO: 146249 - RNA, 22 nt, synthetic construct
  source 1..22: mol_type = other RNA
tacacacacgtttatattcctt

SEQ ID NO: 146250 - RNA, 22 nt, synthetic construct
  source 1..22: mol_type = other RNA
tacacacataagggggaatcta

SEQ ID NO: 146251 - RNA, 22 nt, synthetic construct
  source 1..22: mol_type = other RNA
tacacacctgaaattctcaaat

SEQ ID NO: 146252 - RNA, 22 nt, synthetic construct
  source 1..22: mol_type = other RNA
tacacagaaagcctcttcagaa

SEQ ID NO: 146253 - RNA, 22 nt, synthetic construct
  source 1..22: mol_type = other RNA
tacacagacatgaacaatcctt

SEQ ID NO: 146254 - RNA, 22 nt, synthetic construct
  source 1..22: mol_type = other RNA
tacacagggaaaactacatgta

SEQ ID NO: 146255 - RNA, 22 nt, synthetic construct
  source 1..22: mol_type = other RNA
tacacaggtagacatgtgccat

SEQ ID NO: 146256 - RNA, 22 nt, synthetic construct
  source 1..22: mol_type = other RNA
tacacatacacagggaaaacta

SEQ ID NO: 146257 - RNA, 22 nt, synthetic construct
  source 1..22: mol_type = other RNA
tacacatatctttaggtgtttt

SEQ ID NO: 146258 - RNA, 22 nt, synthetic construct
  source 1..22: mol_type = other RNA
tacacatcagattttgaagatt

SEQ ID NO: 146259 - RNA, 22 nt, synthetic construct
  source 1..22: mol_type = other RNA
tacacatcagtgctgctctgac

SEQ ID NO: 146260 - RNA, 22 nt, synthetic construct
  source 1..22: mol_type = other RNA
tacacatccagaagtcactttt

SEQ ID NO: 146261 - RNA, 22 nt, synthetic construct
  source 1..22: mol_type = other RNA
tacacatcctaatacagtaaag

SEQ ID NO: 146262 - RNA, 22 nt, synthetic construct
  source 1..22: mol_type = other RNA
tacacatctcccataccacctg

SEQ ID NO: 146263 - RNA, 22 nt, synthetic construct
  source 1..22: mol_type = other RNA
tacacatgtcagccacaagaca

SEQ ID NO: 146264 - RNA, 22 nt, synthetic construct
  source 1..22: mol_type = other RNA
tacacatgttgagtcttgttta

SEQ ID NO: 146265 - RNA, 22 nt, synthetic construct
  source 1..22: mol_type = other RNA
tacacattaggctctgggtcag

SEQ ID NO: 146266 - RNA, 22 nt, synthetic construct
  source 1..22: mol_type = other RNA
tacacattccagaccagcagtt

SEQ ID NO: 146267 - RNA, 22 nt, synthetic construct
  source 1..22: mol_type = other RNA
tacaccaaactcaaaaggacat

SEQ ID NO: 146268 - RNA, 22 nt, synthetic construct
  source 1..22: mol_type = other RNA
tacaccatgcaggttcatgtgt

SEQ ID NO: 146269 - RNA, 22 nt, synthetic construct
  source 1..22: mol_type = other RNA
tacacccagttcaccagtttct

SEQ ID NO: 146270 - RNA, 22 nt, synthetic construct
  source 1..22: mol_type = other RNA
tacacccatccacccacttgtc

SEQ ID NO: 146271 - RNA, 22 nt, synthetic construct
  source 1..22: mol_type = other RNA
tacacccggctaattaaacaaa

SEQ ID NO: 146272 - RNA, 22 nt, synthetic construct
  source 1..22: mol_type = other RNA
tacaccctaggtagggttgggg

SEQ ID NO: 146273 - RNA, 22 nt, synthetic construct
  source 1..22: mol_type = other RNA
tacaccctgggaaagcctggct

SEQ ID NO: 146274 - RNA, 22 nt, synthetic construct
  source 1..22: mol_type = other RNA
tacacctcaaactagaaaaaga

SEQ ID NO: 146275 - RNA, 22 nt, synthetic construct
  source 1..22: mol_type = other RNA
tacacctggatcaagtgggatt

SEQ ID NO: 146276 - RNA, 22 nt, synthetic construct
  source 1..22: mol_type = other RNA
tacacgaaaatatccctggggt

SEQ ID NO: 146277 - RNA, 22 nt, synthetic construct
  source 1..22: mol_type = other RNA
tacacgagtgtgtttcgcaaag

SEQ ID NO: 146278 - RNA, 22 nt, synthetic construct
  source 1..22: mol_type = other RNA
tacacgccttcgcgggcacctt

SEQ ID NO: 146279 - RNA, 22 nt, synthetic construct
  source 1..22: mol_type = other RNA
tacacgtcttgtcaataatttg

SEQ ID NO: 146280 - RNA, 22 nt, synthetic construct
  source 1..22: mol_type = other RNA
tacacgtggctgtcaaaaatgt

SEQ ID NO: 146281 - RNA, 22 nt, synthetic construct
  source 1..22: mol_type = other RNA
tacactatggcttttgagtgta

SEQ ID NO: 146282 - RNA, 22 nt, synthetic construct
  source 1..22: mol_type = other RNA
tacactcaaaagccatagtgta

SEQ ID NO: 146283 - RNA, 22 nt, synthetic construct
  source 1..22: mol_type = other RNA
tacactcaatacacgtggctgt

SEQ ID NO: 146284 - RNA, 22 nt, synthetic construct
  source 1..22: mol_type = other RNA
tacactcatttcctttcagtcg

SEQ ID NO: 146285 - RNA, 22 nt, synthetic construct
  source 1..22: mol_type = other RNA
tacactgaagggaattttactg

SEQ ID NO: 146286 - RNA, 22 nt, synthetic construct
  source 1..22: mol_type = other RNA
tacactgttgatttagaaatac

SEQ ID NO: 146287 - RNA, 22 nt, synthetic construct
  source 1..22: mol_type = other RNA
tacacttccagtacatctcaat

SEQ ID NO: 146288 - RNA, 22 nt, synthetic construct
  source 1..22: mol_type = other RNA
tacacttctatccagtgacacc

SEQ ID NO: 146289 - RNA, 22 nt, synthetic construct
  source 1..22: mol_type = other RNA
tacacttggagttttcccccta

SEQ ID NO: 146290 - RNA, 22 nt, synthetic construct
  source 1..22: mol_type = other RNA
tacacttttcaggtattgagcc

SEQ ID NO: 146291 - RNA, 22 nt, synthetic construct
  source 1..22: mol_type = other RNA
tacagaaaacccttcatcattt

SEQ ID NO: 146292 - RNA, 22 nt, synthetic construct
  source 1..22: mol_type = other RNA
tacagaaataaaacatgttgtg

SEQ ID NO: 146293 - RNA, 22 nt, synthetic construct
  source 1..22: mol_type = other RNA
tacagaaatataccttatgtga

SEQ ID NO: 146294 - RNA, 22 nt, synthetic construct
  source 1..22: mol_type = other RNA
tacagaactgctaatggtcctt

SEQ ID NO: 146295 - RNA, 22 nt, synthetic construct
  source 1..22: mol_type = other RNA
tacagaatgttcaagtatttcc

SEQ ID NO: 146296 - RNA, 22 nt, synthetic construct
  source 1..22: mol_type = other RNA
tacagacatgccacaccacatc

SEQ ID NO: 146297 - RNA, 22 nt, synthetic construct
  source 1..22: mol_type = other RNA
tacagactaatatgagttcctg

SEQ ID NO: 146298 - RNA, 22 nt, synthetic construct
  source 1..22: mol_type = other RNA
tacagactcaataaccacatgt

SEQ ID NO: 146299 - RNA, 22 nt, synthetic construct
  source 1..22: mol_type = other RNA
tacagactgattaatttgaggt

SEQ ID NO: 146300 - RNA, 22 nt, synthetic construct
  source 1..22: mol_type = other RNA
tacagagcacagactcaagcct

SEQ ID NO: 146301 - RNA, 22 nt, synthetic construct
  source 1..22: mol_type = other RNA
tacagaggattttggattgcga

SEQ ID NO: 146302 - RNA, 22 nt, synthetic construct
  source 1..22: mol_type = other RNA
tacagataaccaataagaagtg

SEQ ID NO: 146303 - RNA, 22 nt, synthetic construct
  source 1..22: mol_type = other RNA
tacagatatcacccagaccaag

SEQ ID NO: 146304 - RNA, 22 nt, synthetic construct
  source 1..22: mol_type = other RNA
tacagatgtgagcccccacgcc

SEQ ID NO: 146305 - RNA, 22 nt, synthetic construct
  source 1..22: mol_type = other RNA
tacagattcaatgcaatactta

SEQ ID NO: 146306 - RNA, 22 nt, synthetic construct
  source 1..22: mol_type = other RNA
tacagcaaaagaattaaactca

SEQ ID NO: 146307 - RNA, 22 nt, synthetic construct
  source 1..22: mol_type = other RNA
tacagcaaatctctagaactta

SEQ ID NO: 146308 - RNA, 22 nt, synthetic construct
  source 1..22: mol_type = other RNA
tacagcagatctgcttgcagac

SEQ ID NO: 146309 - RNA, 22 nt, synthetic construct
  source 1..22: mol_type = other RNA
tacagcagctctagcaaacaaa

SEQ ID NO: 146310 - RNA, 22 nt, synthetic construct
  source 1..22: mol_type = other RNA
tacagcatattagctgtctgga

SEQ ID NO: 146311 - RNA, 22 nt, synthetic construct
  source 1..22: mol_type = other RNA
tacagcatttcagccaaagctg

SEQ ID NO: 146312 - RNA, 22 nt, synthetic construct
  source 1..22: mol_type = other RNA
tacagccatcaacctaatgaaa

SEQ ID NO: 146313 - RNA, 22 nt, synthetic construct
  source 1..22: mol_type = other RNA
tacagctccaaagaacaggagt

SEQ ID NO: 146314 - RNA, 22 nt, synthetic construct
  source 1..22: mol_type = other RNA
tacagctcttctcagttgcagc

SEQ ID NO: 146315 - RNA, 22 nt, synthetic construct
  source 1..22: mol_type = other RNA
tacaggaagagactatctcttc

SEQ ID NO: 146316 - RNA, 22 nt, synthetic construct
  source 1..22: mol_type = other RNA
tacaggagcccaccaccatgcc

SEQ ID NO: 146317 - RNA, 22 nt, synthetic construct
  source 1..22: mol_type = other RNA
tacaggagttccgatttctcgg

SEQ ID NO: 146318 - RNA, 22 nt, synthetic construct
  source 1..22: mol_type = other RNA
tacaggatatcagaagtgctga

SEQ ID NO: 146319 - RNA, 22 nt, synthetic construct
  source 1..22: mol_type = other RNA
tacaggcataagccaccgcact

SEQ ID NO: 146320 - RNA, 22 nt, synthetic construct
  source 1..22: mol_type = other RNA
tacaggcatgagccactgcggg

SEQ ID NO: 146321 - RNA, 22 nt, synthetic construct
  source 1..22: mol_type = other RNA
tacaggcatgagtcgccatacc

SEQ ID NO: 146322 - RNA, 22 nt, synthetic construct
  source 1..22: mol_type = other RNA
tacaggcgcacgccatctcgcc

SEQ ID NO: 146323 - RNA, 22 nt, synthetic construct
  source 1..22: mol_type = other RNA
tacaggcgtgagccaccacgtc

SEQ ID NO: 146324 - RNA, 22 nt, synthetic construct
  source 1..22: mol_type = other RNA
tacaggcgtgagccacctcatc

SEQ ID NO: 146325 - RNA, 22 nt, synthetic construct
  source 1..22: mol_type = other RNA
tacagggaaccgtaacttcttt

SEQ ID NO: 146326 - RNA, 22 nt, synthetic construct
  source 1..22: mol_type = other RNA
tacaggggactttgatgtttta

SEQ ID NO: 146327 - RNA, 22 nt, synthetic construct
  source 1..22: mol_type = other RNA
tacaggggcattccctgtctgg

SEQ ID NO: 146328 - RNA, 22 nt, synthetic construct
  source 1..22: mol_type = other RNA
tacagggtttctgtttggatga

SEQ ID NO: 146329 - RNA, 22 nt, synthetic construct
  source 1..22: mol_type = other RNA
tacaggtcaaactcacttatta

SEQ ID NO: 146330 - RNA, 22 nt, synthetic construct
  source 1..22: mol_type = other RNA
tacaggtcggaaggaatgtgct

SEQ ID NO: 146331 - RNA, 22 nt, synthetic construct
  source 1..22: mol_type = other RNA
tacaggtgcccgccatcacgcc

SEQ ID NO: 146332 - RNA, 22 nt, synthetic construct
  source 1..22: mol_type = other RNA
tacaggtgcttacagactgatt

SEQ ID NO: 146333 - RNA, 22 nt, synthetic construct
  source 1..22: mol_type = other RNA
tacaggtgtgaaccacgcatct

SEQ ID NO: 146334 - RNA, 22 nt, synthetic construct
  source 1..22: mol_type = other RNA
tacagtaaagccccattgtaca

SEQ ID NO: 146335 - RNA, 22 nt, synthetic construct
  source 1..22: mol_type = other RNA
tacagtaagatcctggattgct

SEQ ID NO: 146336 - RNA, 22 nt, synthetic construct
  source 1..22: mol_type = other RNA
tacagtaaggtttccctgggga

SEQ ID NO: 146337 - RNA, 22 nt, synthetic construct
  source 1..22: mol_type = other RNA
tacagtaatcaaacagtgtgat

SEQ ID NO: 146338 - RNA, 22 nt, synthetic construct
  source 1..22: mol_type = other RNA
tacagtaattgtagtttccatg

SEQ ID NO: 146339 - RNA, 22 nt, synthetic construct
  source 1..22: mol_type = other RNA
tacagtagccaaaggtagaaac

SEQ ID NO: 146340 - RNA, 22 nt, synthetic construct
  source 1..22: mol_type = other RNA
tacagtagtaaaaccaaatgtg

SEQ ID NO: 146341 - RNA, 22 nt, synthetic construct
  source 1..22: mol_type = other RNA
tacagtataggggaactcttgt

SEQ ID NO: 146342 - RNA, 22 nt, synthetic construct
  source 1..22: mol_type = other RNA
tacagtattacacagaaagcct

SEQ ID NO: 146343 - RNA, 22 nt, synthetic construct
  source 1..22: mol_type = other RNA
tacagtcacacaccactacacc

SEQ ID NO: 146344 - RNA, 22 nt, synthetic construct
  source 1..22: mol_type = other RNA
tacagtcatcacagtccaggaa

SEQ ID NO: 146345 - RNA, 22 nt, synthetic construct
  source 1..22: mol_type = other RNA
tacagtctcgaccccctgggct

SEQ ID NO: 146346 - RNA, 22 nt, synthetic construct
  source 1..22: mol_type = other RNA
tacagtgacatatgccggctgt

SEQ ID NO: 146347 - RNA, 22 nt, synthetic construct
  source 1..22: mol_type = other RNA
tacagtgagtagaagagtaatg

SEQ ID NO: 146348 - RNA, 22 nt, synthetic construct
  source 1..22: mol_type = other RNA
tacagtgcataccaccacattc

SEQ ID NO: 146349 - RNA, 22 nt, synthetic construct
  source 1..22: mol_type = other RNA
tacagtgccttcagctatggtg

SEQ ID NO: 146350 - RNA, 22 nt, synthetic construct
  source 1..22: mol_type = other RNA
tacagtggcacgattttggctc

SEQ ID NO: 146351 - RNA, 22 nt, synthetic construct
  source 1..22: mol_type = other RNA
tacagtggttccatttgttttg

SEQ ID NO: 146352 - RNA, 22 nt, synthetic construct
  source 1..22: mol_type = other RNA
tacagtgtttagggacgaatgc

SEQ ID NO: 146353 - RNA, 22 nt, synthetic construct
  source 1..22: mol_type = other RNA
tacagtgtttttgaattctgct

SEQ ID NO: 146354 - RNA, 22 nt, synthetic construct
  source 1..22: mol_type = other RNA
tacagttaacaatactgcattg

SEQ ID NO: 146355 - RNA, 22 nt, synthetic construct
  source 1..22: mol_type = other RNA
tacagttaacgtatgaataaac

SEQ ID NO: 146356 - RNA, 22 nt, synthetic construct
  source 1..22: mol_type = other RNA
tacagttatgtcagtcaacaca

SEQ ID NO: 146357 - RNA, 22 nt, synthetic construct
  source 1..22: mol_type = other RNA
tacagttggaactcttgcggtc

SEQ ID NO: 146358 - RNA, 22 nt, synthetic construct
  source 1..22: mol_type = other RNA
tacagtttaaaagtaaattcgc

SEQ ID NO: 146359 - RNA, 22 nt, synthetic construct
  source 1..22: mol_type = other RNA
tacagttttgaccaaaacaaaa

SEQ ID NO: 146360 - RNA, 22 nt, synthetic construct
  source 1..22: mol_type = other RNA
tacataacttcccagacaggga

SEQ ID NO: 146361 - RNA, 22 nt, synthetic construct
  source 1..22: mol_type = other RNA
tacataccgagtaatgggatgg

SEQ ID NO: 146362 - RNA, 22 nt, synthetic construct
  source 1..22: mol_type = other RNA
tacatactgcactctcaaaatt

SEQ ID NO: 146363 - RNA, 22 nt, synthetic construct
  source 1..22: mol_type = other RNA
tacatacttcaaagggtcacta

SEQ ID NO: 146364 - RNA, 22 nt, synthetic construct
  source 1..22: mol_type = other RNA
tacatagcaaggaagcagaatg

SEQ ID NO: 146365 - RNA, 22 nt, synthetic construct
  source 1..22: mol_type = other RNA
tacataggcttagtacagccat

SEQ ID NO: 146366 - RNA, 22 nt, synthetic construct
  source 1..22: mol_type = other RNA
tacatagtccactttccatctt

SEQ ID NO: 146367 - RNA, 22 nt, synthetic construct
  source 1..22: mol_type = other RNA
tacatagtgctcttctgatcac

SEQ ID NO: 146368 - RNA, 22 nt, synthetic construct
  source 1..22: mol_type = other RNA
tacatatagaagtaaatcccgg

SEQ ID NO: 146369 - RNA, 22 nt, synthetic construct
  source 1..22: mol_type = other RNA
tacatatggcaattccataaat

SEQ ID NO: 146370 - RNA, 22 nt, synthetic construct
  source 1..22: mol_type = other RNA
tacatatttatttccttaagcc

SEQ ID NO: 146371 - RNA, 22 nt, synthetic construct
  source 1..22: mol_type = other RNA
tacatcacagacagggaatggg

SEQ ID NO: 146372 - RNA, 22 nt, synthetic construct
  source 1..22: mol_type = other RNA
tacatcagcagtgaccatattt

SEQ ID NO: 146373 - RNA, 22 nt, synthetic construct
  source 1..22: mol_type = other RNA
tacatccccccacccctgctct

SEQ ID NO: 146374 - RNA, 22 nt, synthetic construct
  source 1..22: mol_type = other RNA
tacatctcaattcagaagctaa

SEQ ID NO: 146375 - RNA, 22 nt, synthetic construct
  source 1..22: mol_type = other RNA
tacatctggatcctgtctcaga

SEQ ID NO: 146376 - RNA, 22 nt, synthetic construct
  source 1..22: mol_type = other RNA
tacatgaaatactcaaactatg

SEQ ID NO: 146377 - RNA, 22 nt, synthetic construct
  source 1..22: mol_type = other RNA
tacatgaagtcctcaatcatgt

SEQ ID NO: 146378 - RNA, 22 nt, synthetic construct
  source 1..22: mol_type = other RNA
tacatgaatggaaaattcttgg

SEQ ID NO: 146379 - RNA, 22 nt, synthetic construct
  source 1..22: mol_type = other RNA
tacatgacatggttttcctact

SEQ ID NO: 146380 - RNA, 22 nt, synthetic construct
  source 1..22: mol_type = other RNA
tacatgacctatctattaacag

SEQ ID NO: 146381 - RNA, 22 nt, synthetic construct
  source 1..22: mol_type = other RNA
tacatgagaaatgttaagattc

SEQ ID NO: 146382 - RNA, 22 nt, synthetic construct
  source 1..22: mol_type = other RNA
tacatgaggcctctccccttga

SEQ ID NO: 146383 - RNA, 22 nt, synthetic construct
  source 1..22: mol_type = other RNA
tacatgaggtcacccaagccac

SEQ ID NO: 146384 - RNA, 22 nt, synthetic construct
  source 1..22: mol_type = other RNA
tacatgcttagccttccagaga

SEQ ID NO: 146385 - RNA, 22 nt, synthetic construct
  source 1..22: mol_type = other RNA
tacatggttctgtgctagatgc

SEQ ID NO: 146386 - RNA, 22 nt, synthetic construct
  source 1..22: mol_type = other RNA
tacatgtaaaaactgtttggct

SEQ ID NO: 146387 - RNA, 22 nt, synthetic construct
  source 1..22: mol_type = other RNA
tacatgtacgccaattttcata

SEQ ID NO: 146388 - RNA, 22 nt, synthetic construct
  source 1..22: mol_type = other RNA
tacatgtagatatgggagtccc

SEQ ID NO: 146389 - RNA, 22 nt, synthetic construct
  source 1..22: mol_type = other RNA
tacatgtagttttccctgtgta

SEQ ID NO: 146390 - RNA, 22 nt, synthetic construct
  source 1..22: mol_type = other RNA
tacatgtcatgttcccggattg

SEQ ID NO: 146391 - RNA, 22 nt, synthetic construct
  source 1..22: mol_type = other RNA
tacatgtttaactatcctatgt

SEQ ID NO: 146392 - RNA, 22 nt, synthetic construct
  source 1..22: mol_type = other RNA
tacatgtttagcaagattactg

SEQ ID NO: 146393 - RNA, 22 nt, synthetic construct
  source 1..22: mol_type = other RNA
tacattaaagacagctactaaa

SEQ ID NO: 146394 - RNA, 22 nt, synthetic construct
  source 1..22: mol_type = other RNA
tacattaatctcatccacaatg

SEQ ID NO: 146395 - RNA, 22 nt, synthetic construct
  source 1..22: mol_type = other RNA
tacattagagaagaatgagaaa

SEQ ID NO: 146396 - RNA, 22 nt, synthetic construct
  source 1..22: mol_type = other RNA
tacattgccttcaagttgcttt

SEQ ID NO: 146397 - RNA, 22 nt, synthetic construct
  source 1..22: mol_type = other RNA
tacattgccttcgcagggtgaa

SEQ ID NO: 146398 - RNA, 22 nt, synthetic construct
  source 1..22: mol_type = other RNA
tacattgtaatcctgtttctct

SEQ ID NO: 146399 - RNA, 22 nt, synthetic construct
  source 1..22: mol_type = other RNA
tacatttaaaagaaaatggcca

SEQ ID NO: 146400 - RNA, 22 nt, synthetic construct
  source 1..22: mol_type = other RNA
tacatttaaaattgcagagtgt

SEQ ID NO: 146401 - RNA, 22 nt, synthetic construct
  source 1..22: mol_type = other RNA
tacatttgcttaggctgttatt

SEQ ID NO: 146402 - RNA, 22 nt, synthetic construct
  source 1..22: mol_type = other RNA
taccaaaaaactacgagtatca

SEQ ID NO: 146403 - RNA, 22 nt, synthetic construct
  source 1..22: mol_type = other RNA
taccaaaaaaggtgctgttgta

SEQ ID NO: 146404 - RNA, 22 nt, synthetic construct
  source 1..22: mol_type = other RNA
taccaaaacagcttcttgttag

SEQ ID NO: 146405 - RNA, 22 nt, synthetic construct
  source 1..22: mol_type = other RNA
taccaaaacccttgggatgcag

SEQ ID NO: 146406 - RNA, 22 nt, synthetic construct
  source 1..22: mol_type = other RNA
taccaaaacctggtatgagtgt

SEQ ID NO: 146407 - RNA, 22 nt, synthetic construct
  source 1..22: mol_type = other RNA
taccaaaagtcctgttcttttg

SEQ ID NO: 146408 - RNA, 22 nt, synthetic construct
  source 1..22: mol_type = other RNA
taccaaacattgaaggcagaat

SEQ ID NO: 146409 - RNA, 22 nt, synthetic construct
  source 1..22: mol_type = other RNA
taccaaagcagaaatacagacc

SEQ ID NO: 146410 - RNA, 22 nt, synthetic construct
  source 1..22: mol_type = other RNA
taccaaattcacgagactgtta

SEQ ID NO: 146411 - RNA, 22 nt, synthetic construct
  source 1..22: mol_type = other RNA
taccaagcccggcacggtggct

SEQ ID NO: 146412 - RNA, 22 nt, synthetic construct
  source 1..22: mol_type = other RNA
taccaaggctaagttgagaaac

SEQ ID NO: 146413 - RNA, 22 nt, synthetic construct
  source 1..22: mol_type = other RNA
taccaaggctggagtgcagtgg

SEQ ID NO: 146414 - RNA, 22 nt, synthetic construct
  source 1..22: mol_type = other RNA
taccaagggtgtgtttaatttc

SEQ ID NO: 146415 - RNA, 22 nt, synthetic construct
  source 1..22: mol_type = other RNA
taccaagtgccgcgttttttgt

SEQ ID NO: 146416 - RNA, 22 nt, synthetic construct
  source 1..22: mol_type = other RNA
taccaagttgaatttctgtcct

SEQ ID NO: 146417 - RNA, 22 nt, synthetic construct
  source 1..22: mol_type = other RNA
taccaataaaagcctcatttga

SEQ ID NO: 146418 - RNA, 22 nt, synthetic construct
  source 1..22: mol_type = other RNA
taccaattctccctgaaattgt

SEQ ID NO: 146419 - RNA, 22 nt, synthetic construct
  source 1..22: mol_type = other RNA
taccacattttgttcattcatc

SEQ ID NO: 146420 - RNA, 22 nt, synthetic construct
  source 1..22: mol_type = other RNA
taccaccaagaaaaagcagaga

SEQ ID NO: 146421 - RNA, 22 nt, synthetic construct
  source 1..22: mol_type = other RNA
taccaccacattcggccaagat

SEQ ID NO: 146422 - RNA, 22 nt, synthetic construct
  source 1..22: mol_type = other RNA
taccaccactaatgtcacattt

SEQ ID NO: 146423 - RNA, 22 nt, synthetic construct
  source 1..22: mol_type = other RNA
taccacccgtccaatttctttg

SEQ ID NO: 146424 - RNA, 22 nt, synthetic construct
  source 1..22: mol_type = other RNA
taccacctgaaatctgatttgt

SEQ ID NO: 146425 - RNA, 22 nt, synthetic construct
  source 1..22: mol_type = other RNA
taccacctgtcagaaacaccaa

SEQ ID NO: 146426 - RNA, 22 nt, synthetic construct
  source 1..22: mol_type = other RNA
taccactagcaaactactgata

SEQ ID NO: 146427 - RNA, 22 nt, synthetic construct
  source 1..22: mol_type = other RNA
taccactataatccagatggac

SEQ ID NO: 146428 - RNA, 22 nt, synthetic construct
  source 1..22: mol_type = other RNA
taccactgaagtgttgagaggc

SEQ ID NO: 146429 - RNA, 22 nt, synthetic construct
  source 1..22: mol_type = other RNA
taccactgaggtcaagaaataa

SEQ ID NO: 146430 - RNA, 22 nt, synthetic construct
  source 1..22: mol_type = other RNA
taccacttagtttgcaatacag

SEQ ID NO: 146431 - RNA, 22 nt, synthetic construct
  source 1..22: mol_type = other RNA
taccagaccctttatcggataa

SEQ ID NO: 146432 - RNA, 22 nt, synthetic construct
  source 1..22: mol_type = other RNA
taccagagattgggaaaatctt

SEQ ID NO: 146433 - RNA, 22 nt, synthetic construct
  source 1..22: mol_type = other RNA
taccagaggttaaagcaacagg

SEQ ID NO: 146434 - RNA, 22 nt, synthetic construct
  source 1..22: mol_type = other RNA
taccagcttacagcagatctgc

SEQ ID NO: 146435 - RNA, 22 nt, synthetic construct
  source 1..22: mol_type = other RNA
taccaggctggaagaattttaa

SEQ ID NO: 146436 - RNA, 22 nt, synthetic construct
  source 1..22: mol_type = other RNA
taccaggtcagccagaggaagc

SEQ ID NO: 146437 - RNA, 22 nt, synthetic construct
  source 1..22: mol_type = other RNA
taccaggttttggtaatgggaa

SEQ ID NO: 146438 - RNA, 22 nt, synthetic construct
  source 1..22: mol_type = other RNA
taccagtgcttgcagccttccc

SEQ ID NO: 146439 - RNA, 22 nt, synthetic construct
  source 1..22: mol_type = other RNA
taccataaaaccatttttcaga

SEQ ID NO: 146440 - RNA, 22 nt, synthetic construct
  source 1..22: mol_type = other RNA
taccataaagtcagaggagcag

SEQ ID NO: 146441 - RNA, 22 nt, synthetic construct
  source 1..22: mol_type = other RNA
taccataaagtcttccatttta

SEQ ID NO: 146442 - RNA, 22 nt, synthetic construct
  source 1..22: mol_type = other RNA
taccatatacacaaaaagatct

SEQ ID NO: 146443 - RNA, 22 nt, synthetic construct
  source 1..22: mol_type = other RNA
taccatcagagtgaacaggcaa

SEQ ID NO: 146444 - RNA, 22 nt, synthetic construct
  source 1..22: mol_type = other RNA
taccatctaaagccaggctttc

SEQ ID NO: 146445 - RNA, 22 nt, synthetic construct
  source 1..22: mol_type = other RNA
taccatctctccaacagaagaa

SEQ ID NO: 146446 - RNA, 22 nt, synthetic construct
  source 1..22: mol_type = other RNA
taccatctgacatatgttttgc

SEQ ID NO: 146447 - RNA, 22 nt, synthetic construct
  source 1..22: mol_type = other RNA
taccatgctgttttgcttactg

SEQ ID NO: 146448 - RNA, 22 nt, synthetic construct
  source 1..22: mol_type = other RNA
taccatgttgttcttttcaaaa

SEQ ID NO: 146449 - RNA, 22 nt, synthetic construct
  source 1..22: mol_type = other RNA
taccatgtttccataaaaagcg

SEQ ID NO: 146450 - RNA, 22 nt, synthetic construct
  source 1..22: mol_type = other RNA
taccattccccttgccaaggct

SEQ ID NO: 146451 - RNA, 22 nt, synthetic construct
  source 1..22: mol_type = other RNA
taccatttattcctctcttgga

SEQ ID NO: 146452 - RNA, 22 nt, synthetic construct
  source 1..22: mol_type = other RNA
taccatttgaccttccttgtgt

SEQ ID NO: 146453 - RNA, 22 nt, synthetic construct
  source 1..22: mol_type = other RNA
tacccaaagactttgttttgtt

SEQ ID NO: 146454 - RNA, 22 nt, synthetic construct
  source 1..22: mol_type = other RNA
tacccaacatgagagaaaattg

SEQ ID NO: 146455 - RNA, 22 nt, synthetic construct
  source 1..22: mol_type = other RNA
tacccaagcttaggtcagattc

SEQ ID NO: 146456 - RNA, 22 nt, synthetic construct
  source 1..22: mol_type = other RNA
tacccaagtaaacaactgactc

SEQ ID NO: 146457 - RNA, 22 nt, synthetic construct
  source 1..22: mol_type = other RNA
tacccacaaaagaaaattttct

SEQ ID NO: 146458 - RNA, 22 nt, synthetic construct
  source 1..22: mol_type = other RNA
tacccacaagaaaaacctaaac

SEQ ID NO: 146459 - RNA, 22 nt, synthetic construct
  source 1..22: mol_type = other RNA
tacccactattgaaagcccttg

SEQ ID NO: 146460 - RNA, 22 nt, synthetic construct
  source 1..22: mol_type = other RNA
tacccagcactctgaatcacct

SEQ ID NO: 146461 - RNA, 22 nt, synthetic construct
  source 1..22: mol_type = other RNA
tacccaggcatgatggctcaac

SEQ ID NO: 146462 - RNA, 22 nt, synthetic construct
  source 1..22: mol_type = other RNA
tacccaggtgtgagattgatag

SEQ ID NO: 146463 - RNA, 22 nt, synthetic construct
  source 1..22: mol_type = other RNA
tacccagtgtgtttgtttgcta

SEQ ID NO: 146464 - RNA, 22 nt, synthetic construct
  source 1..22: mol_type = other RNA
tacccattagacactaactttc

SEQ ID NO: 146465 - RNA, 22 nt, synthetic construct
  source 1..22: mol_type = other RNA
tacccatttcttctaggttatc

SEQ ID NO: 146466 - RNA, 22 nt, synthetic construct
  source 1..22: mol_type = other RNA
taccccaaccctacctagggtg

SEQ ID NO: 146467 - RNA, 22 nt, synthetic construct
  source 1..22: mol_type = other RNA
taccccattcactcagcataat

SEQ ID NO: 146468 - RNA, 22 nt, synthetic construct
  source 1..22: mol_type = other RNA
tacccccatcacactggtcact

SEQ ID NO: 146469 - RNA, 22 nt, synthetic construct
  source 1..22: mol_type = other RNA
taccccctggaaataagtttca

SEQ ID NO: 146470 - RNA, 22 nt, synthetic construct
  source 1..22: mol_type = other RNA
tacccctactttttgtcacacg

SEQ ID NO: 146471 - RNA, 22 nt, synthetic construct
  source 1..22: mol_type = other RNA
tacccctccctacctggcagtc

SEQ ID NO: 146472 - RNA, 22 nt, synthetic construct
  source 1..22: mol_type = other RNA
tacccctgagaacttcagtata

SEQ ID NO: 146473 - RNA, 22 nt, synthetic construct
  source 1..22: mol_type = other RNA
taccccttaaattccaaaagtg

SEQ ID NO: 146474 - RNA, 22 nt, synthetic construct
  source 1..22: mol_type = other RNA
tacccggagaggtgaactatta

SEQ ID NO: 146475 - RNA, 22 nt, synthetic construct
  source 1..22: mol_type = other RNA
tacccgtggaaatacttgaaca

SEQ ID NO: 146476 - RNA, 22 nt, synthetic construct
  source 1..22: mol_type = other RNA
tacccgtgtgttttgttgttgt

SEQ ID NO: 146477 - RNA, 22 nt, synthetic construct
  source 1..22: mol_type = other RNA
taccctaataacaaaataggat

SEQ ID NO: 146478 - RNA, 22 nt, synthetic construct
  source 1..22: mol_type = other RNA
taccctcaaaagatgcagaaaa

SEQ ID NO: 146479 - RNA, 22 nt, synthetic construct
  source 1..22: mol_type = other RNA
taccctcacagtcacaaagctt

SEQ ID NO: 146480 - RNA, 22 nt, synthetic construct
  source 1..22: mol_type = other RNA
taccctcattttataagggtga

SEQ ID NO: 146481 - RNA, 22 nt, synthetic construct
  source 1..22: mol_type = other RNA
taccctcgagtaaaaagaatga

SEQ ID NO: 146482 - RNA, 22 nt, synthetic construct
  source 1..22: mol_type = other RNA
taccctctagctccccattccc

SEQ ID NO: 146483 - RNA, 22 nt, synthetic construct
  source 1..22: mol_type = other RNA
taccctctggaatgcccatcct

SEQ ID NO: 146484 - RNA, 22 nt, synthetic construct
  source 1..22: mol_type = other RNA
taccctgaggatataacgatag

SEQ ID NO: 146485 - RNA, 22 nt, synthetic construct
  source 1..22: mol_type = other RNA
taccctgccttccttgggcaca

SEQ ID NO: 146486 - RNA, 22 nt, synthetic construct
  source 1..22: mol_type = other RNA
taccctgctggaacgaatattc

SEQ ID NO: 146487 - RNA, 22 nt, synthetic construct
  source 1..22: mol_type = other RNA
tacccttacgcgtggatgtgtg

SEQ ID NO: 146488 - RNA, 22 nt, synthetic construct
  source 1..22: mol_type = other RNA
tacccttactaaattttgaggc

SEQ ID NO: 146489 - RNA, 22 nt, synthetic construct
  source 1..22: mol_type = other RNA
tacccttctgttaatagatagg

SEQ ID NO: 146490 - RNA, 22 nt, synthetic construct
  source 1..22: mol_type = other RNA
taccctttactcagattcacca

SEQ ID NO: 146491 - RNA, 22 nt, synthetic construct
  source 1..22: mol_type = other RNA
taccctttccaaattcaaagca

SEQ ID NO: 146492 - RNA, 22 nt, synthetic construct
  source 1..22: mol_type = other RNA
taccctttcttgttagtaggaa

SEQ ID NO: 146493 - RNA, 22 nt, synthetic construct
  source 1..22: mol_type = other RNA
taccgacggctcaggcctgttg

SEQ ID NO: 146494 - RNA, 22 nt, synthetic construct
  source 1..22: mol_type = other RNA
taccgagtaatgggatggctgg

SEQ ID NO: 146495 - RNA, 22 nt, synthetic construct
  source 1..22: mol_type = other RNA
taccggcatccgccaccacgcc

SEQ ID NO: 146496 - RNA, 22 nt, synthetic construct
  source 1..22: mol_type = other RNA
tacctaaaaagggagtcagtag

SEQ ID NO: 146497 - RNA, 22 nt, synthetic construct
  source 1..22: mol_type = other RNA
tacctaacagccggcatatgtc

SEQ ID NO: 146498 - RNA, 22 nt, synthetic construct
  source 1..22: mol_type = other RNA
tacctaagcatcgtgaagtctt

SEQ ID NO: 146499 - RNA, 22 nt, synthetic construct
  source 1..22: mol_type = other RNA
tacctagaaaaacaccaaaaaa

SEQ ID NO: 146500 - RNA, 22 nt, synthetic construct
  source 1..22: mol_type = other RNA
tacctagggtgtaaaaggctaa

SEQ ID NO: 146501 - RNA, 22 nt, synthetic construct
  source 1..22: mol_type = other RNA
tacctagtacgtaacctaaagt

SEQ ID NO: 146502 - RNA, 22 nt, synthetic construct
  source 1..22: mol_type = other RNA
tacctagttttccaatccggga

SEQ ID NO: 146503 - RNA, 22 nt, synthetic construct
  source 1..22: mol_type = other RNA
tacctatagaattcttcttctg

SEQ ID NO: 146504 - RNA, 22 nt, synthetic construct
  source 1..22: mol_type = other RNA
tacctatgaataggtgtgtgtt

SEQ ID NO: 146505 - RNA, 22 nt, synthetic construct
  source 1..22: mol_type = other RNA
tacctatttagagggatgaatg

SEQ ID NO: 146506 - RNA, 22 nt, synthetic construct
  source 1..22: mol_type = other RNA
tacctcaaaggagagaagaggg

SEQ ID NO: 146507 - RNA, 22 nt, synthetic construct
  source 1..22: mol_type = other RNA
tacctcaaattgtgtgttctct

SEQ ID NO: 146508 - RNA, 22 nt, synthetic construct
  source 1..22: mol_type = other RNA
tacctcccatgcattcgtccct

SEQ ID NO: 146509 - RNA, 22 nt, synthetic construct
  source 1..22: mol_type = other RNA
tacctcccttcacaaagccctc

SEQ ID NO: 146510 - RNA, 22 nt, synthetic construct
  source 1..22: mol_type = other RNA
tacctctgggatgctcagtttc

SEQ ID NO: 146511 - RNA, 22 nt, synthetic construct
  source 1..22: mol_type = other RNA
tacctgaaaagtgtattattct

SEQ ID NO: 146512 - RNA, 22 nt, synthetic construct
  source 1..22: mol_type = other RNA
tacctgacttcaaactatactt

SEQ ID NO: 146513 - RNA, 22 nt, synthetic construct
  source 1..22: mol_type = other RNA
tacctgcaggttgatactagtt

SEQ ID NO: 146514 - RNA, 22 nt, synthetic construct
  source 1..22: mol_type = other RNA
tacctggagcctgaggacacta

SEQ ID NO: 146515 - RNA, 22 nt, synthetic construct
  source 1..22: mol_type = other RNA
tacctggcagtctaggaaaaga

SEQ ID NO: 146516 - RNA, 22 nt, synthetic construct
  source 1..22: mol_type = other RNA
tacctggtccttaaatttctaa

SEQ ID NO: 146517 - RNA, 22 nt, synthetic construct
  source 1..22: mol_type = other RNA
tacctgtagaaaatagggacgg

SEQ ID NO: 146518 - RNA, 22 nt, synthetic construct
  source 1..22: mol_type = other RNA
tacctgtctttcccattaccaa

SEQ ID NO: 146519 - RNA, 22 nt, synthetic construct
  source 1..22: mol_type = other RNA
tacctgttgaatagcaactgtt

SEQ ID NO: 146520 - RNA, 22 nt, synthetic construct
  source 1..22: mol_type = other RNA
tacctgttgattgttgccatca

SEQ ID NO: 146521 - RNA, 22 nt, synthetic construct
  source 1..22: mol_type = other RNA
taccttaaaccatatacaaaac

SEQ ID NO: 146522 - RNA, 22 nt, synthetic construct
  source 1..22: mol_type = other RNA
taccttatagatgacgaaagtg

SEQ ID NO: 146523 - RNA, 22 nt, synthetic construct
  source 1..22: mol_type = other RNA
taccttatgtgaaagtagagga

SEQ ID NO: 146524 - RNA, 22 nt, synthetic construct
  source 1..22: mol_type = other RNA
taccttccaaagtatgcatagc

SEQ ID NO: 146525 - RNA, 22 nt, synthetic construct
  source 1..22: mol_type = other RNA
taccttctaaaatcatcacagt

SEQ ID NO: 146526 - RNA, 22 nt, synthetic construct
  source 1..22: mol_type = other RNA
taccttcttgagagtctcttaa

SEQ ID NO: 146527 - RNA, 22 nt, synthetic construct
  source 1..22: mol_type = other RNA
taccttgaaaatgcccttattt

SEQ ID NO: 146528 - RNA, 22 nt, synthetic construct
  source 1..22: mol_type = other RNA
taccttgaaaggatactgagaa

SEQ ID NO: 146529 - RNA, 22 nt, synthetic construct
  source 1..22: mol_type = other RNA
taccttgatttatggcctaaga

SEQ ID NO: 146530 - RNA, 22 nt, synthetic construct
  source 1..22: mol_type = other RNA
taccttggagagaaaccttggt

SEQ ID NO: 146531 - RNA, 22 nt, synthetic construct
  source 1..22: mol_type = other RNA
tacctttatctttggatatccc

SEQ ID NO: 146532 - RNA, 22 nt, synthetic construct
  source 1..22: mol_type = other RNA
tacctttcgctatcagtagttt

SEQ ID NO: 146533 - RNA, 22 nt, synthetic construct
  source 1..22: mol_type = other RNA
tacctttggctactgtaaacaa

SEQ ID NO: 146534 - RNA, 22 nt, synthetic construct
  source 1..22: mol_type = other RNA
tacgaaagcctttattttttct

SEQ ID NO: 146535 - RNA, 22 nt, synthetic construct
  source 1..22: mol_type = other RNA
tacgaaagtgctctaccctttc

SEQ ID NO: 146536 - RNA, 22 nt, synthetic construct
  source 1..22: mol_type = other RNA
tacgaagctacagtaatcaaac

SEQ ID NO: 146537 - RNA, 22 nt, synthetic construct
  source 1..22: mol_type = other RNA
tacgaatgaactcctatagtta

SEQ ID NO: 146538 - RNA, 22 nt, synthetic construct
  source 1..22: mol_type = other RNA
tacgacgctcttgttcaaaaac

SEQ ID NO: 146539 - RNA, 22 nt, synthetic construct
  source 1..22: mol_type = other RNA
tacgaggacagactgcagttgg

SEQ ID NO: 146540 - RNA, 22 nt, synthetic construct
  source 1..22: mol_type = other RNA
tacgagtatcatataaattgca

SEQ ID NO: 146541 - RNA, 22 nt, synthetic construct
  source 1..22: mol_type = other RNA
tacgagttatgcaagatgtcaa

SEQ ID NO: 146542 - RNA, 22 nt, synthetic construct
  source 1..22: mol_type = other RNA
tacgataaacttcagttttatc

SEQ ID NO: 146543 - RNA, 22 nt, synthetic construct
  source 1..22: mol_type = other RNA
tacgatgaaattgaccattcca

SEQ ID NO: 146544 - RNA, 22 nt, synthetic construct
  source 1..22: mol_type = other RNA
tacgatgttggccaggctggtc

SEQ ID NO: 146545 - RNA, 22 nt, synthetic construct
  source 1..22: mol_type = other RNA
tacgccaattttcatagcagca

SEQ ID NO: 146546 - RNA, 22 nt, synthetic construct
  source 1..22: mol_type = other RNA
tacgcccggcccatgacatgtg

SEQ ID NO: 146547 - RNA, 22 nt, synthetic construct
  source 1..22: mol_type = other RNA
tacgcctagctgacttttaaaa

SEQ ID NO: 146548 - RNA, 22 nt, synthetic construct
  source 1..22: mol_type = other RNA
tacgcgggaggctgaggcagga

SEQ ID NO: 146549 - RNA, 22 nt, synthetic construct
  source 1..22: mol_type = other RNA
tacgcgtggatgtgtgcacaac

SEQ ID NO: 146550 - RNA, 22 nt, synthetic construct
  source 1..22: mol_type = other RNA
tacgctccctcgcgcggcaccg

SEQ ID NO: 146551 - RNA, 22 nt, synthetic construct
  source 1..22: mol_type = other RNA
tacgctgccaaaagccaagagc

SEQ ID NO: 146552 - RNA, 22 nt, synthetic construct
  source 1..22: mol_type = other RNA
tacgcttttatgttataatgag

SEQ ID NO: 146553 - RNA, 22 nt, synthetic construct
  source 1..22: mol_type = other RNA
tacggaaatataacattaccaa

SEQ ID NO: 146554 - RNA, 22 nt, synthetic construct
  source 1..22: mol_type = other RNA
tacggaatgattccacttatat

SEQ ID NO: 146555 - RNA, 22 nt, synthetic construct
  source 1..22: mol_type = other RNA
tacggacgcaggcaaacagcgc

SEQ ID NO: 146556 - RNA, 22 nt, synthetic construct
  source 1..22: mol_type = other RNA
tacggaggatgaggggctgagc

SEQ ID NO: 146557 - RNA, 22 nt, synthetic construct
  source 1..22: mol_type = other RNA
tacggagtctcgctctgtccca

SEQ ID NO: 146558 - RNA, 22 nt, synthetic construct
  source 1..22: mol_type = other RNA
tacggttccctgtagagatttt

SEQ ID NO: 146559 - RNA, 22 nt, synthetic construct
  source 1..22: mol_type = other RNA
tacgtaacctaaagttgaggtt

SEQ ID NO: 146560 - RNA, 22 nt, synthetic construct
  source 1..22: mol_type = other RNA
tacgtactaggtatcacagtga

SEQ ID NO: 146561 - RNA, 22 nt, synthetic construct
  source 1..22: mol_type = other RNA
tacgtatatgaaaagcccaatc

SEQ ID NO: 146562 - RNA, 22 nt, synthetic construct
  source 1..22: mol_type = other RNA
tacgtatttatcatgtcttctt

SEQ ID NO: 146563 - RNA, 22 nt, synthetic construct
  source 1..22: mol_type = other RNA
tacgtcgtcccccatccccttt

SEQ ID NO: 146564 - RNA, 22 nt, synthetic construct
  source 1..22: mol_type = other RNA
tacgtgcagagcaggggtgggg

SEQ ID NO: 146565 - RNA, 22 nt, synthetic construct
  source 1..22: mol_type = other RNA
tacgtgtatactgggtgtgatg

SEQ ID NO: 146566 - RNA, 22 nt, synthetic construct
  source 1..22: mol_type = other RNA
tacgttaaaggaaaagagatct

SEQ ID NO: 146567 - RNA, 22 nt, synthetic construct
  source 1..22: mol_type = other RNA
tacgttaactgtattgcaaact

SEQ ID NO: 146568 - RNA, 22 nt, synthetic construct
  source 1..22: mol_type = other RNA
tactaaaaagaaaaagttgggc

SEQ ID NO: 146569 - RNA, 22 nt, synthetic construct
  source 1..22: mol_type = other RNA
tactaaacaaatcagatttcag

SEQ ID NO: 146570 - RNA, 22 nt, synthetic construct
  source 1..22: mol_type = other RNA
tactaaactgaacgaagtgaaa

SEQ ID NO: 146571 - RNA, 22 nt, synthetic construct
  source 1..22: mol_type = other RNA
tactaaatacaccaaactcaaa

SEQ ID NO: 146572 - RNA, 22 nt, synthetic construct
  source 1..22: mol_type = other RNA
tactaaatgatctttcaagggg

SEQ ID NO: 146573 - RNA, 22 nt, synthetic construct
  source 1..22: mol_type = other RNA
tactaaattttgaggcttttgg

SEQ ID NO: 146574 - RNA, 22 nt, synthetic construct
  source 1..22: mol_type = other RNA
tactaacaagaaagggtagctt

SEQ ID NO: 146575 - RNA, 22 nt, synthetic construct
  source 1..22: mol_type = other RNA
tactaacgatccttactaccac

SEQ ID NO: 146576 - RNA, 22 nt, synthetic construct
  source 1..22: mol_type = other RNA
tactaagaagtgaaactgctgg

SEQ ID NO: 146577 - RNA, 22 nt, synthetic construct
  source 1..22: mol_type = other RNA
tactaagcctatgtaagacaat

SEQ ID NO: 146578 - RNA, 22 nt, synthetic construct
  source 1..22: mol_type = other RNA
tactaataaatgcataaacgac

SEQ ID NO: 146579 - RNA, 22 nt, synthetic construct
  source 1..22: mol_type = other RNA
tactacaagagttcccctatac

SEQ ID NO: 146580 - RNA, 22 nt, synthetic construct
  source 1..22: mol_type = other RNA
tactaccaccactaatgtcaca

SEQ ID NO: 146581 - RNA, 22 nt, synthetic construct
  source 1..22: mol_type = other RNA
tactacctatagaattcttctt

SEQ ID NO: 146582 - RNA, 22 nt, synthetic construct
  source 1..22: mol_type = other RNA
tactacgaagctacagtaatca

SEQ ID NO: 146583 - RNA, 22 nt, synthetic construct
  source 1..22: mol_type = other RNA
tactacgcctagctgactttta

SEQ ID NO: 146584 - RNA, 22 nt, synthetic construct
  source 1..22: mol_type = other RNA
tactactgacctgggagaaaga

SEQ ID NO: 146585 - RNA, 22 nt, synthetic construct
  source 1..22: mol_type = other RNA
tactactgcaaatatccaatca

SEQ ID NO: 146586 - RNA, 22 nt, synthetic construct
  source 1..22: mol_type = other RNA
tactactgcattttttgccaaa

SEQ ID NO: 146587 - RNA, 22 nt, synthetic construct
  source 1..22: mol_type = other RNA
tactactgtactgtttagcatc

SEQ ID NO: 146588 - RNA, 22 nt, synthetic construct
  source 1..22: mol_type = other RNA
tactacttgtcaggtgggcact

SEQ ID NO: 146589 - RNA, 22 nt, synthetic construct
  source 1..22: mol_type = other RNA
tactagaagcactttttaccaa

SEQ ID NO: 146590 - RNA, 22 nt, synthetic construct
  source 1..22: mol_type = other RNA
tactagatcaagcccttccttg

SEQ ID NO: 146591 - RNA, 22 nt, synthetic construct
  source 1..22: mol_type = other RNA
tactagcaaactgaatcagaca

SEQ ID NO: 146592 - RNA, 22 nt, synthetic construct
  source 1..22: mol_type = other RNA
tactagccagtgattggatatt

SEQ ID NO: 146593 - RNA, 22 nt, synthetic construct
  source 1..22: mol_type = other RNA
tactaggtatcacagtgaggac

SEQ ID NO: 146594 - RNA, 22 nt, synthetic construct
  source 1..22: mol_type = other RNA
tactagtagaaagcaggttcat

SEQ ID NO: 146595 - RNA, 22 nt, synthetic construct
  source 1..22: mol_type = other RNA
tactagtaggatgaattacaaa

SEQ ID NO: 146596 - RNA, 22 nt, synthetic construct
  source 1..22: mol_type = other RNA
tactagtataagagaaggaagc

SEQ ID NO: 146597 - RNA, 22 nt, synthetic construct
  source 1..22: mol_type = other RNA
tactagtcagcacactcttaat

SEQ ID NO: 146598 - RNA, 22 nt, synthetic construct
  source 1..22: mol_type = other RNA
tactagtctccatacaaggaga

SEQ ID NO: 146599 - RNA, 22 nt, synthetic construct
  source 1..22: mol_type = other RNA
tactagttgtgctacctcaaat

SEQ ID NO: 146600 - RNA, 22 nt, synthetic construct
  source 1..22: mol_type = other RNA
tactagtttagtgcagtatctt

SEQ ID NO: 146601 - RNA, 22 nt, synthetic construct
  source 1..22: mol_type = other RNA
tactatatgatccagcagtttc

SEQ ID NO: 146602 - RNA, 22 nt, synthetic construct
  source 1..22: mol_type = other RNA
tactatcttccctaaagagaat

SEQ ID NO: 146603 - RNA, 22 nt, synthetic construct
  source 1..22: mol_type = other RNA
tactatgaatatactggaaaac

SEQ ID NO: 146604 - RNA, 22 nt, synthetic construct
  source 1..22: mol_type = other RNA
tactatgcagcaacggaaatga

SEQ ID NO: 146605 - RNA, 22 nt, synthetic construct
  source 1..22: mol_type = other RNA
tactatgtatgtggctcacatt

SEQ ID NO: 146606 - RNA, 22 nt, synthetic construct
  source 1..22: mol_type = other RNA
tactattccaggatcaaatctg

SEQ ID NO: 146607 - RNA, 22 nt, synthetic construct
  source 1..22: mol_type = other RNA
tactatttcgcaaagcaacatg

SEQ ID NO: 146608 - RNA, 22 nt, synthetic construct
  source 1..22: mol_type = other RNA
tactatttgtatcttcacaaac

SEQ ID NO: 146609 - RNA, 22 nt, synthetic construct
  source 1..22: mol_type = other RNA
tactattttcataacaaagctc

SEQ ID NO: 146610 - RNA, 22 nt, synthetic construct
  source 1..22: mol_type = other RNA
tactattttctatagtggctgc

SEQ ID NO: 146611 - RNA, 22 nt, synthetic construct
  source 1..22: mol_type = other RNA
tactcaaactatgcttaatctg

SEQ ID NO: 146612 - RNA, 22 nt, synthetic construct
  source 1..22: mol_type = other RNA
tactcaaatccaaattcacagc

SEQ ID NO: 146613 - RNA, 22 nt, synthetic construct
  source 1..22: mol_type = other RNA
tactcaacatcactagctatta

SEQ ID NO: 146614 - RNA, 22 nt, synthetic construct
  source 1..22: mol_type = other RNA
tactcaacgacaatctctgggg

SEQ ID NO: 146615 - RNA, 22 nt, synthetic construct
  source 1..22: mol_type = other RNA
tactcaagggctttcaatagtg

SEQ ID NO: 146616 - RNA, 22 nt, synthetic construct
  source 1..22: mol_type = other RNA
tactcaatcagtggccagtgac

SEQ ID NO: 146617 - RNA, 22 nt, synthetic construct
  source 1..22: mol_type = other RNA
tactcactgaaaccctcacgaa

SEQ ID NO: 146618 - RNA, 22 nt, synthetic construct
  source 1..22: mol_type = other RNA
tactcactgtactactgacctg

SEQ ID NO: 146619 - RNA, 22 nt, synthetic construct
  source 1..22: mol_type = other RNA
tactcagattcaccaattgtta

SEQ ID NO: 146620 - RNA, 22 nt, synthetic construct
  source 1..22: mol_type = other RNA
tactcagccccctcgaagagac

SEQ ID NO: 146621 - RNA, 22 nt, synthetic construct
  source 1..22: mol_type = other RNA
tactcagctgtcactctcttta

SEQ ID NO: 146622 - RNA, 22 nt, synthetic construct
  source 1..22: mol_type = other RNA
tactcaggagattaaggctgga

SEQ ID NO: 146623 - RNA, 22 nt, synthetic construct
  source 1..22: mol_type = other RNA
tactcaggaggctgaggcagga

SEQ ID NO: 146624 - RNA, 22 nt, synthetic construct
  source 1..22: mol_type = other RNA
tactcagtctcgaaaaggaatg

SEQ ID NO: 146625 - RNA, 22 nt, synthetic construct
  source 1..22: mol_type = other RNA
tactcatgcttgctccagagaa

SEQ ID NO: 146626 - RNA, 22 nt, synthetic construct
  source 1..22: mol_type = other RNA
tactcatgtctacctgtctttc

SEQ ID NO: 146627 - RNA, 22 nt, synthetic construct
  source 1..22: mol_type = other RNA
tactcattatggttgttggcta

SEQ ID NO: 146628 - RNA, 22 nt, synthetic construct
  source 1..22: mol_type = other RNA
tactccaagaaggctagcacag

SEQ ID NO: 146629 - RNA, 22 nt, synthetic construct
  source 1..22: mol_type = other RNA
tactccaccagcatcttttgac

SEQ ID NO: 146630 - RNA, 22 nt, synthetic construct
  source 1..22: mol_type = other RNA
tactccagcctgggcgacaaga

SEQ ID NO: 146631 - RNA, 22 nt, synthetic construct
  source 1..22: mol_type = other RNA
tactccattatatgaataaacc

SEQ ID NO: 146632 - RNA, 22 nt, synthetic construct
  source 1..22: mol_type = other RNA
tactcccagcctcaaacaatcc

SEQ ID NO: 146633 - RNA, 22 nt, synthetic construct
  source 1..22: mol_type = other RNA
tactcccgatttcagttaactt

SEQ ID NO: 146634 - RNA, 22 nt, synthetic construct
  source 1..22: mol_type = other RNA
tactcctagatactcgggaggc

SEQ ID NO: 146635 - RNA, 22 nt, synthetic construct
  source 1..22: mol_type = other RNA
tactcctgagcaaggaaggaaa

SEQ ID NO: 146636 - RNA, 22 nt, synthetic construct
  source 1..22: mol_type = other RNA
tactcgagggtagcttttcctg

SEQ ID NO: 146637 - RNA, 22 nt, synthetic construct
  source 1..22: mol_type = other RNA
tactcggtatgtacccaatgga

SEQ ID NO: 146638 - RNA, 22 nt, synthetic construct
  source 1..22: mol_type = other RNA
tactcgtagttttttggtagat

SEQ ID NO: 146639 - RNA, 22 nt, synthetic construct
  source 1..22: mol_type = other RNA
tactcgtggttatagccataag

SEQ ID NO: 146640 - RNA, 22 nt, synthetic construct
  source 1..22: mol_type = other RNA
tactcgtgtgtctcataaagcc

SEQ ID NO: 146641 - RNA, 22 nt, synthetic construct
  source 1..22: mol_type = other RNA
tactctaatggggaaatagatg

SEQ ID NO: 146642 - RNA, 22 nt, synthetic construct
  source 1..22: mol_type = other RNA
tactctagtggtgcttaattca

SEQ ID NO: 146643 - RNA, 22 nt, synthetic construct
  source 1..22: mol_type = other RNA
tactctcaaataatttggcaaa

SEQ ID NO: 146644 - RNA, 22 nt, synthetic construct
  source 1..22: mol_type = other RNA
tactctcagaaattataagctt

SEQ ID NO: 146645 - RNA, 22 nt, synthetic construct
  source 1..22: mol_type = other RNA
tactctctctgcctcggcacag

SEQ ID NO: 146646 - RNA, 22 nt, synthetic construct
  source 1..22: mol_type = other RNA
tactctctttaattatgagcat

SEQ ID NO: 146647 - RNA, 22 nt, synthetic construct
  source 1..22: mol_type = other RNA
tactctgagacaggatccagat

SEQ ID NO: 146648 - RNA, 22 nt, synthetic construct
  source 1..22: mol_type = other RNA
tactctgcctcagttgacatcc

SEQ ID NO: 146649 - RNA, 22 nt, synthetic construct
  source 1..22: mol_type = other RNA
tactcttaaagtttcaaactgt

SEQ ID NO: 146650 - RNA, 22 nt, synthetic construct
  source 1..22: mol_type = other RNA
tactcttctactcactgtacta

SEQ ID NO: 146651 - RNA, 22 nt, synthetic construct
  source 1..22: mol_type = other RNA
tactgaaaccagtgctctcccc

SEQ ID NO: 146652 - RNA, 22 nt, synthetic construct
  source 1..22: mol_type = other RNA
tactgaaagacagacctctatt

SEQ ID NO: 146653 - RNA, 22 nt, synthetic construct
  source 1..22: mol_type = other RNA
tactgaaatcctagccccaaat

SEQ ID NO: 146654 - RNA, 22 nt, synthetic construct
  source 1..22: mol_type = other RNA
tactgaaggcatagggccttct

SEQ ID NO: 146655 - RNA, 22 nt, synthetic construct
  source 1..22: mol_type = other RNA
tactgaagttctcaggggtaaa

SEQ ID NO: 146656 - RNA, 22 nt, synthetic construct
  source 1..22: mol_type = other RNA
tactgacaatagccaagacatg

SEQ ID NO: 146657 - RNA, 22 nt, synthetic construct
  source 1..22: mol_type = other RNA
tactgaccatctcagcacagag

SEQ ID NO: 146658 - RNA, 22 nt, synthetic construct
  source 1..22: mol_type = other RNA
tactgacctgggagaaagacca

SEQ ID NO: 146659 - RNA, 22 nt, synthetic construct
  source 1..22: mol_type = other RNA
tactgactagtggctcatactt

SEQ ID NO: 146660 - RNA, 22 nt, synthetic construct
  source 1..22: mol_type = other RNA
tactgactcaatcttcttattt

SEQ ID NO: 146661 - RNA, 22 nt, synthetic construct
  source 1..22: mol_type = other RNA
tactgactccctttttaggtag

SEQ ID NO: 146662 - RNA, 22 nt, synthetic construct
  source 1..22: mol_type = other RNA
tactgacttttccttaaaaaag

SEQ ID NO: 146663 - RNA, 22 nt, synthetic construct
  source 1..22: mol_type = other RNA
tactgagtcaaaaccaaagaaa

SEQ ID NO: 146664 - RNA, 22 nt, synthetic construct
  source 1..22: mol_type = other RNA
tactgatagcgaaaggtacgac

SEQ ID NO: 146665 - RNA, 22 nt, synthetic construct
  source 1..22: mol_type = other RNA
tactgatctgctcaagttttct

SEQ ID NO: 146666 - RNA, 22 nt, synthetic construct
  source 1..22: mol_type = other RNA
tactgatcttttctgacaattt

SEQ ID NO: 146667 - RNA, 22 nt, synthetic construct
  source 1..22: mol_type = other RNA
tactgattagaaggattgttca

SEQ ID NO: 146668 - RNA, 22 nt, synthetic construct
  source 1..22: mol_type = other RNA
tactgatttatagtgtttcctt

SEQ ID NO: 146669 - RNA, 22 nt, synthetic construct
  source 1..22: mol_type = other RNA
tactgcaaatatccaatcactg

SEQ ID NO: 146670 - RNA, 22 nt, synthetic construct
  source 1..22: mol_type = other RNA
tactgcaacctccgtttttcag

SEQ ID NO: 146671 - RNA, 22 nt, synthetic construct
  source 1..22: mol_type = other RNA
tactgcactaaactagtatcaa

SEQ ID NO: 146672 - RNA, 22 nt, synthetic construct
  source 1..22: mol_type = other RNA
tactgcactctcaaaattaaat

SEQ ID NO: 146673 - RNA, 22 nt, synthetic construct
  source 1..22: mol_type = other RNA
tactgcagcacttttaaggctt

SEQ ID NO: 146674 - RNA, 22 nt, synthetic construct
  source 1..22: mol_type = other RNA
tactgcatattgaagccagcac

SEQ ID NO: 146675 - RNA, 22 nt, synthetic construct
  source 1..22: mol_type = other RNA
tactgcatgattccccttatat

SEQ ID NO: 146676 - RNA, 22 nt, synthetic construct
  source 1..22: mol_type = other RNA
tactgcatgctaggggctgttc

SEQ ID NO: 146677 - RNA, 22 nt, synthetic construct
  source 1..22: mol_type = other RNA
tactgcattgtgcacttaaaat

SEQ ID NO: 146678 - RNA, 22 nt, synthetic construct
  source 1..22: mol_type = other RNA
tactgcattttttgccaaatta

SEQ ID NO: 146679 - RNA, 22 nt, synthetic construct
  source 1..22: mol_type = other RNA
tactgcctccacaggctttgac

SEQ ID NO: 146680 - RNA, 22 nt, synthetic construct
  source 1..22: mol_type = other RNA
tactgctataaacttccctctc

SEQ ID NO: 146681 - RNA, 22 nt, synthetic construct
  source 1..22: mol_type = other RNA
tactgctatacaaccggaaaat

SEQ ID NO: 146682 - RNA, 22 nt, synthetic construct
  source 1..22: mol_type = other RNA
tactgctctgtcctgtcagtgt

SEQ ID NO: 146683 - RNA, 22 nt, synthetic construct
  source 1..22: mol_type = other RNA
tactgcttgctgcactggctat

SEQ ID NO: 146684 - RNA, 22 nt, synthetic construct
  source 1..22: mol_type = other RNA
tactggaaaactagagatggga

SEQ ID NO: 146685 - RNA, 22 nt, synthetic construct
  source 1..22: mol_type = other RNA
tactggaaatggacagcgggga

SEQ ID NO: 146686 - RNA, 22 nt, synthetic construct
  source 1..22: mol_type = other RNA
tactggaaggactcacagctta

SEQ ID NO: 146687 - RNA, 22 nt, synthetic construct
  source 1..22: mol_type = other RNA
tactggaagtgtaacatacaca

SEQ ID NO: 146688 - RNA, 22 nt, synthetic construct
  source 1..22: mol_type = other RNA
tactggagcagggtgggccctt

SEQ ID NO: 146689 - RNA, 22 nt, synthetic construct
  source 1..22: mol_type = other RNA
tactggatacaaggtcaatctg

SEQ ID NO: 146690 - RNA, 22 nt, synthetic construct
  source 1..22: mol_type = other RNA
tactggccatgttttatttctt

SEQ ID NO: 146691 - RNA, 22 nt, synthetic construct
  source 1..22: mol_type = other RNA
tactggggtcttagttctgctt

SEQ ID NO: 146692 - RNA, 22 nt, synthetic construct
  source 1..22: mol_type = other RNA
tactgggtgtgatggcgcatgc

SEQ ID NO: 146693 - RNA, 22 nt, synthetic construct
  source 1..22: mol_type = other RNA
tactggtaccaaagcagaaata

SEQ ID NO: 146694 - RNA, 22 nt, synthetic construct
  source 1..22: mol_type = other RNA
tactggtgttaggcaatccttc

SEQ ID NO: 146695 - RNA, 22 nt, synthetic construct
  source 1..22: mol_type = other RNA
tactgtaaacaatgctgctatg

SEQ ID NO: 146696 - RNA, 22 nt, synthetic construct
  source 1..22: mol_type = other RNA
tactgtaaccctgtttccctta

SEQ ID NO: 146697 - RNA, 22 nt, synthetic construct
  source 1..22: mol_type = other RNA
tactgtaagttcctggactgtg

SEQ ID NO: 146698 - RNA, 22 nt, synthetic construct
  source 1..22: mol_type = other RNA
tactgtaatattgtatataccc

SEQ ID NO: 146699 - RNA, 22 nt, synthetic construct
  source 1..22: mol_type = other RNA
tactgtacaaagatttacccct

SEQ ID NO: 146700 - RNA, 22 nt, synthetic construct
  source 1..22: mol_type = other RNA
tactgtactgtttagcatctag

SEQ ID NO: 146701 - RNA, 22 nt, synthetic construct
  source 1..22: mol_type = other RNA
tactgtagaatgtttttccgtc

SEQ ID NO: 146702 - RNA, 22 nt, synthetic construct
  source 1..22: mol_type = other RNA
tactgtattaggatgtgtaccc

SEQ ID NO: 146703 - RNA, 22 nt, synthetic construct
  source 1..22: mol_type = other RNA
tactgtcacaggctttcctaca

SEQ ID NO: 146704 - RNA, 22 nt, synthetic construct
  source 1..22: mol_type = other RNA
tactgtccaaacagtgaccaca

SEQ ID NO: 146705 - RNA, 22 nt, synthetic construct
  source 1..22: mol_type = other RNA
tactgtctcagtcccaaatggg

SEQ ID NO: 146706 - RNA, 22 nt, synthetic construct
  source 1..22: mol_type = other RNA
tactgtctgtgaaaataatacc

SEQ ID NO: 146707 - RNA, 22 nt, synthetic construct
  source 1..22: mol_type = other RNA
tactgtgaattcactaatgcct

SEQ ID NO: 146708 - RNA, 22 nt, synthetic construct
  source 1..22: mol_type = other RNA
tactgtgatgattttagaaggt

SEQ ID NO: 146709 - RNA, 22 nt, synthetic construct
  source 1..22: mol_type = other RNA
tactgtgattacaattcctttc

SEQ ID NO: 146710 - RNA, 22 nt, synthetic construct
  source 1..22: mol_type = other RNA
tactgtgcagtggatgactagg

SEQ ID NO: 146711 - RNA, 22 nt, synthetic construct
  source 1..22: mol_type = other RNA
tactgtgtggcttctcaaactg

SEQ ID NO: 146712 - RNA, 22 nt, synthetic construct
  source 1..22: mol_type = other RNA
tactgttatgacaagactacct

SEQ ID NO: 146713 - RNA, 22 nt, synthetic construct
  source 1..22: mol_type = other RNA
tactgttctccagtcccactga

SEQ ID NO: 146714 - RNA, 22 nt, synthetic construct
  source 1..22: mol_type = other RNA
tactgtttagcatctagcacag

SEQ ID NO: 146715 - RNA, 22 nt, synthetic construct
  source 1..22: mol_type = other RNA
tactgtttcttagctatattca

SEQ ID NO: 146716 - RNA, 22 nt, synthetic construct
  source 1..22: mol_type = other RNA
tacttaagagcatgttgggcca

SEQ ID NO: 146717 - RNA, 22 nt, synthetic construct
  source 1..22: mol_type = other RNA
tacttaatagcccaacagggtt

SEQ ID NO: 146718 - RNA, 22 nt, synthetic construct
  source 1..22: mol_type = other RNA
tacttaatttacccacaaaaga

SEQ ID NO: 146719 - RNA, 22 nt, synthetic construct
  source 1..22: mol_type = other RNA
tacttactagttgtgctacctc

SEQ ID NO: 146720 - RNA, 22 nt, synthetic construct
  source 1..22: mol_type = other RNA
tacttagcccctgctgccagat

SEQ ID NO: 146721 - RNA, 22 nt, synthetic construct
  source 1..22: mol_type = other RNA
tacttagctaatttcagagaga

SEQ ID NO: 146722 - RNA, 22 nt, synthetic construct
  source 1..22: mol_type = other RNA
tacttaggcagttattaagagt

SEQ ID NO: 146723 - RNA, 22 nt, synthetic construct
  source 1..22: mol_type = other RNA
tacttcaaagggtcactattaa

SEQ ID NO: 146724 - RNA, 22 nt, synthetic construct
  source 1..22: mol_type = other RNA
tacttcaaggttcacaaattag

SEQ ID NO: 146725 - RNA, 22 nt, synthetic construct
  source 1..22: mol_type = other RNA
tacttcaatgctacagtaagca

SEQ ID NO: 146726 - RNA, 22 nt, synthetic construct
  source 1..22: mol_type = other RNA
tacttcagcgcttgaacaaata

SEQ ID NO: 146727 - RNA, 22 nt, synthetic construct
  source 1..22: mol_type = other RNA
tacttcatagatgttatgcccc

SEQ ID NO: 146728 - RNA, 22 nt, synthetic construct
  source 1..22: mol_type = other RNA
tacttcatctttcctgatcaca

SEQ ID NO: 146729 - RNA, 22 nt, synthetic construct
  source 1..22: mol_type = other RNA
tacttccagctcacgttaccct

SEQ ID NO: 146730 - RNA, 22 nt, synthetic construct
  source 1..22: mol_type = other RNA
tacttccagtgttttagggggg

SEQ ID NO: 146731 - RNA, 22 nt, synthetic construct
  source 1..22: mol_type = other RNA
tacttccctctttctcaacttc

SEQ ID NO: 146732 - RNA, 22 nt, synthetic construct
  source 1..22: mol_type = other RNA
tacttcccttctcgaagtggtg

SEQ ID NO: 146733 - RNA, 22 nt, synthetic construct
  source 1..22: mol_type = other RNA
tacttcctgatttcaaaactta

SEQ ID NO: 146734 - RNA, 22 nt, synthetic construct
  source 1..22: mol_type = other RNA
tacttcgtgtgtggagtggggc

SEQ ID NO: 146735 - RNA, 22 nt, synthetic construct
  source 1..22: mol_type = other RNA
tacttctacagaatgttcaagt

SEQ ID NO: 146736 - RNA, 22 nt, synthetic construct
  source 1..22: mol_type = other RNA
tacttctaccttgaaaatgccc

SEQ ID NO: 146737 - RNA, 22 nt, synthetic construct
  source 1..22: mol_type = other RNA
tacttctcagctatagcttctg

SEQ ID NO: 146738 - RNA, 22 nt, synthetic construct
  source 1..22: mol_type = other RNA
tacttctgagtgttacttgaaa

SEQ ID NO: 146739 - RNA, 22 nt, synthetic construct
  source 1..22: mol_type = other RNA
tacttctggaaagttcaaatga

SEQ ID NO: 146740 - RNA, 22 nt, synthetic construct
  source 1..22: mol_type = other RNA
tacttctttctctttcagccat

SEQ ID NO: 146741 - RNA, 22 nt, synthetic construct
  source 1..22: mol_type = other RNA
tacttgaaatcatttcactctt

SEQ ID NO: 146742 - RNA, 22 nt, synthetic construct
  source 1..22: mol_type = other RNA
tacttgaacattctgtagaagt

SEQ ID NO: 146743 - RNA, 22 nt, synthetic construct
  source 1..22: mol_type = other RNA
tacttgacacaaaggactggaa

SEQ ID NO: 146744 - RNA, 22 nt, synthetic construct
  source 1..22: mol_type = other RNA
tacttgactattttaccctcat

SEQ ID NO: 146745 - RNA, 22 nt, synthetic construct
  source 1..22: mol_type = other RNA
tacttgagagcagagacacaca

SEQ ID NO: 146746 - RNA, 22 nt, synthetic construct
  source 1..22: mol_type = other RNA
tacttgagccccagaataggca

SEQ ID NO: 146747 - RNA, 22 nt, synthetic construct
  source 1..22: mol_type = other RNA
tacttgattacaagggtgacag

SEQ ID NO: 146748 - RNA, 22 nt, synthetic construct
  source 1..22: mol_type = other RNA
tacttgcttggtttcacacgca

SEQ ID NO: 146749 - RNA, 22 nt, synthetic construct
  source 1..22: mol_type = other RNA
tacttgctttattacttcagtt

SEQ ID NO: 146750 - RNA, 22 nt, synthetic construct
  source 1..22: mol_type = other RNA
tacttggacaggggacatgaag

SEQ ID NO: 146751 - RNA, 22 nt, synthetic construct
  source 1..22: mol_type = other RNA
tacttggatcttatctgctgtc

SEQ ID NO: 146752 - RNA, 22 nt, synthetic construct
  source 1..22: mol_type = other RNA
tacttggctcctcccggctaag

SEQ ID NO: 146753 - RNA, 22 nt, synthetic construct
  source 1..22: mol_type = other RNA
tacttgggaggctgagacacta

SEQ ID NO: 146754 - RNA, 22 nt, synthetic construct
  source 1..22: mol_type = other RNA
tacttggggagagtgggcccag

SEQ ID NO: 146755 - RNA, 22 nt, synthetic construct
  source 1..22: mol_type = other RNA
tacttgggtataaatgatgagc

SEQ ID NO: 146756 - RNA, 22 nt, synthetic construct
  source 1..22: mol_type = other RNA
tacttgtcaagttctgatttca

SEQ ID NO: 146757 - RNA, 22 nt, synthetic construct
  source 1..22: mol_type = other RNA
tacttgtcaggtgggcactggg

SEQ ID NO: 146758 - RNA, 22 nt, synthetic construct
  source 1..22: mol_type = other RNA
tacttgtcatttctgcttagtc

SEQ ID NO: 146759 - RNA, 22 nt, synthetic construct
  source 1..22: mol_type = other RNA
tacttgtctttttgtgacttgt

SEQ ID NO: 146760 - RNA, 22 nt, synthetic construct
  source 1..22: mol_type = other RNA
tacttgtgtagcgggaaaaaat

SEQ ID NO: 146761 - RNA, 22 nt, synthetic construct
  source 1..22: mol_type = other RNA
tactttaaatcagggcctttaa

SEQ ID NO: 146762 - RNA, 22 nt, synthetic construct
  source 1..22: mol_type = other RNA
tactttacagttatgtcagtca

SEQ ID NO: 146763 - RNA, 22 nt, synthetic construct
  source 1..22: mol_type = other RNA
tactttagacatgggctaaata

SEQ ID NO: 146764 - RNA, 22 nt, synthetic construct
  source 1..22: mol_type = other RNA
tactttcacactgattttctgc

SEQ ID NO: 146765 - RNA, 22 nt, synthetic construct
  source 1..22: mol_type = other RNA
tactttcagctcaaacagcttg

SEQ ID NO: 146766 - RNA, 22 nt, synthetic construct
  source 1..22: mol_type = other RNA
tactttcccatctctagttttc

SEQ ID NO: 146767 - RNA, 22 nt, synthetic construct
  source 1..22: mol_type = other RNA
tactttctaatcctttgcacac

SEQ ID NO: 146768 - RNA, 22 nt, synthetic construct
  source 1..22: mol_type = other RNA
tactttcttcaaccatactttt

SEQ ID NO: 146769 - RNA, 22 nt, synthetic construct
  source 1..22: mol_type = other RNA
tactttgaatttaagacacaag

SEQ ID NO: 146770 - RNA, 22 nt, synthetic construct
  source 1..22: mol_type = other RNA
tactttgcgaaacacactcgtg

SEQ ID NO: 146771 - RNA, 22 nt, synthetic construct
  source 1..22: mol_type = other RNA
tactttggaaggtaggagggtg

SEQ ID NO: 146772 - RNA, 22 nt, synthetic construct
  source 1..22: mol_type = other RNA
tactttgtcaggcatgctaact

SEQ ID NO: 146773 - RNA, 22 nt, synthetic construct
  source 1..22: mol_type = other RNA
tacttttaaagaaaggtctctc

SEQ ID NO: 146774 - RNA, 22 nt, synthetic construct
  source 1..22: mol_type = other RNA
tacttttagtttacactatggc

SEQ ID NO: 146775 - RNA, 22 nt, synthetic construct
  source 1..22: mol_type = other RNA
tacttttcaactgaacaacgct

SEQ ID NO: 146776 - RNA, 22 nt, synthetic construct
  source 1..22: mol_type = other RNA
tactttttcatccaaacagaaa

SEQ ID NO: 146777 - RNA, 22 nt, synthetic construct
  source 1..22: mol_type = other RNA
tactttttgtcacacggaaaac

SEQ ID NO: 146778 - RNA, 22 nt, synthetic construct
  source 1..22: mol_type = other RNA
tacttttttgtagagacagaat

SEQ ID NO: 146779 - RNA, 22 nt, synthetic construct
  source 1..22: mol_type = other RNA
tagaaaaacaccaaaaaagcac

SEQ ID NO: 146780 - RNA, 22 nt, synthetic construct
  source 1..22: mol_type = other RNA
tagaaaaagaataagctaatcc

SEQ ID NO: 146781 - RNA, 22 nt, synthetic construct
  source 1..22: mol_type = other RNA
tagaaaacatatccttctacat

SEQ ID NO: 146782 - RNA, 22 nt, synthetic construct
  source 1..22: mol_type = other RNA
tagaaaaccgacagcagataag

SEQ ID NO: 146783 - RNA, 22 nt, synthetic construct
  source 1..22: mol_type = other RNA
tagaaaacttgagcagatcagt

SEQ ID NO: 146784 - RNA, 22 nt, synthetic construct
  source 1..22: mol_type = other RNA
tagaaaagacaatagctagtgt

SEQ ID NO: 146785 - RNA, 22 nt, synthetic construct
  source 1..22: mol_type = other RNA
tagaaaagataagtagaaggtc

SEQ ID NO: 146786 - RNA, 22 nt, synthetic construct
  source 1..22: mol_type = other RNA
tagaaaatacagttttgaccaa

SEQ ID NO: 146787 - RNA, 22 nt, synthetic construct
  source 1..22: mol_type = other RNA
tagaaaatagggacggccttct

SEQ ID NO: 146788 - RNA, 22 nt, synthetic construct
  source 1..22: mol_type = other RNA
tagaaaatagtatgaaggttct

SEQ ID NO: 146789 - RNA, 22 nt, synthetic construct
  source 1..22: mol_type = other RNA
tagaaaatcatacattttccac

SEQ ID NO: 146790 - RNA, 22 nt, synthetic construct
  source 1..22: mol_type = other RNA
tagaaaatccttacttccagct

SEQ ID NO: 146791 - RNA, 22 nt, synthetic construct
  source 1..22: mol_type = other RNA
tagaaaatgcttatgtcttgtg

SEQ ID NO: 146792 - RNA, 22 nt, synthetic construct
  source 1..22: mol_type = other RNA
tagaaaattagctgactttcat

SEQ ID NO: 146793 - RNA, 22 nt, synthetic construct
  source 1..22: mol_type = other RNA
tagaaacatcccaagtgcccat

SEQ ID NO: 146794 - RNA, 22 nt, synthetic construct
  source 1..22: mol_type = other RNA
tagaaactggtgaactgggtgt

SEQ ID NO: 146795 - RNA, 22 nt, synthetic construct
  source 1..22: mol_type = other RNA
tagaaacttcttctgttggaga

SEQ ID NO: 146796 - RNA, 22 nt, synthetic construct
  source 1..22: mol_type = other RNA
tagaaacttggattgtgtgtcg

SEQ ID NO: 146797 - RNA, 22 nt, synthetic construct
  source 1..22: mol_type = other RNA
tagaaagaaaatccaaaagcct

SEQ ID NO: 146798 - RNA, 22 nt, synthetic construct
  source 1..22: mol_type = other RNA
tagaaagataaatccaacgacc

SEQ ID NO: 146799 - RNA, 22 nt, synthetic construct
  source 1..22: mol_type = other RNA
tagaaagcaccagggcctctga

SEQ ID NO: 146800 - RNA, 22 nt, synthetic construct
  source 1..22: mol_type = other RNA
tagaaagcaggttcattttaat

SEQ ID NO: 146801 - RNA, 22 nt, synthetic construct
  source 1..22: mol_type = other RNA
tagaaagctggactcattccaa

SEQ ID NO: 146802 - RNA, 22 nt, synthetic construct
  source 1..22: mol_type = other RNA
tagaaaggaattgtaatcacag

SEQ ID NO: 146803 - RNA, 22 nt, synthetic construct
  source 1..22: mol_type = other RNA
tagaaaggagaccagttaggaa

SEQ ID NO: 146804 - RNA, 22 nt, synthetic construct
  source 1..22: mol_type = other RNA
tagaaaggagggactgaaacca

SEQ ID NO: 146805 - RNA, 22 nt, synthetic construct
  source 1..22: mol_type = other RNA
tagaaagtagattagcttttac

SEQ ID NO: 146806 - RNA, 22 nt, synthetic construct
  source 1..22: mol_type = other RNA
tagaaagttagtgtctaatggg

SEQ ID NO: 146807 - RNA, 22 nt, synthetic construct
  source 1..22: mol_type = other RNA
tagaaataactttaatcaccag

SEQ ID NO: 146808 - RNA, 22 nt, synthetic construct
  source 1..22: mol_type = other RNA
tagaaatacctgcaggttgata

SEQ ID NO: 146809 - RNA, 22 nt, synthetic construct
  source 1..22: mol_type = other RNA
tagaaatcatacacgagtgtgt

SEQ ID NO: 146810 - RNA, 22 nt, synthetic construct
  source 1..22: mol_type = other RNA
tagaaatcttccagaaggagaa

SEQ ID NO: 146811 - RNA, 22 nt, synthetic construct
  source 1..22: mol_type = other RNA
tagaaatgaagatggcctccct

SEQ ID NO: 146812 - RNA, 22 nt, synthetic construct
  source 1..22: mol_type = other RNA
tagaaatgtggaagcagaacta

SEQ ID NO: 146813 - RNA, 22 nt, synthetic construct
  source 1..22: mol_type = other RNA
tagaaatgtggagataaagagc

SEQ ID NO: 146814 - RNA, 22 nt, synthetic construct
  source 1..22: mol_type = other RNA
tagaaatttaaggaccaggtat

SEQ ID NO: 146815 - RNA, 22 nt, synthetic construct
  source 1..22: mol_type = other RNA
tagaacaattttgaatgtgttg

SEQ ID NO: 146816 - RNA, 22 nt, synthetic construct
  source 1..22: mol_type = other RNA
tagaacagaataaaaagtgact

SEQ ID NO: 146817 - RNA, 22 nt, synthetic construct
  source 1..22: mol_type = other RNA
tagaacatataatccaactgca

SEQ ID NO: 146818 - RNA, 22 nt, synthetic construct
  source 1..22: mol_type = other RNA
tagaacatctggcagcaggggc

SEQ ID NO: 146819 - RNA, 22 nt, synthetic construct
  source 1..22: mol_type = other RNA
tagaactagaactgtgttacat

SEQ ID NO: 146820 - RNA, 22 nt, synthetic construct
  source 1..22: mol_type = other RNA
tagaactagaatactccaccag

SEQ ID NO: 146821 - RNA, 22 nt, synthetic construct
  source 1..22: mol_type = other RNA
tagaactgtcacaattcacaga

SEQ ID NO: 146822 - RNA, 22 nt, synthetic construct
  source 1..22: mol_type = other RNA
tagaactgtgttacattgcctt

SEQ ID NO: 146823 - RNA, 22 nt, synthetic construct
  source 1..22: mol_type = other RNA
tagaacttatgcatcttgcaaa

SEQ ID NO: 146824 - RNA, 22 nt, synthetic construct
  source 1..22: mol_type = other RNA
tagaagaaatgggtaaatttct

SEQ ID NO: 146825 - RNA, 22 nt, synthetic construct
  source 1..22: mol_type = other RNA
tagaagaaatgttaacaattgg

SEQ ID NO: 146826 - RNA, 22 nt, synthetic construct
  source 1..22: mol_type = other RNA
tagaagaagacttaggagaaaa

SEQ ID NO: 146827 - RNA, 22 nt, synthetic construct
  source 1..22: mol_type = other RNA
tagaagaatgattatttgcggc

SEQ ID NO: 146828 - RNA, 22 nt, synthetic construct
  source 1..22: mol_type = other RNA
tagaagacaatactgttatgac

SEQ ID NO: 146829 - RNA, 22 nt, synthetic construct
  source 1..22: mol_type = other RNA
tagaagacctcaaattctgagg

SEQ ID NO: 146830 - RNA, 22 nt, synthetic construct
  source 1..22: mol_type = other RNA
tagaagactcagcagttttaaa

SEQ ID NO: 146831 - RNA, 22 nt, synthetic construct
  source 1..22: mol_type = other RNA
tagaagagcagtgtgttctgcc

SEQ ID NO: 146832 - RNA, 22 nt, synthetic construct
  source 1..22: mol_type = other RNA
tagaagagtaatggttggccga

SEQ ID NO: 146833 - RNA, 22 nt, synthetic construct
  source 1..22: mol_type = other RNA
tagaagcactttttaccaagtt

SEQ ID NO: 146834 - RNA, 22 nt, synthetic construct
  source 1..22: mol_type = other RNA
tagaagcagcaagggtggctgg

SEQ ID NO: 146835 - RNA, 22 nt, synthetic construct
  source 1..22: mol_type = other RNA
tagaagcatctgatacacttct

SEQ ID NO: 146836 - RNA, 22 nt, synthetic construct
  source 1..22: mol_type = other RNA
tagaagcgctcttcaagcattg

SEQ ID NO: 146837 - RNA, 22 nt, synthetic construct
  source 1..22: mol_type = other RNA
tagaaggatatgttttctaaac

SEQ ID NO: 146838 - RNA, 22 nt, synthetic construct
  source 1..22: mol_type = other RNA
tagaaggattgttcatgtctgt

SEQ ID NO: 146839 - RNA, 22 nt, synthetic construct
  source 1..22: mol_type = other RNA
tagaaggccagagggaatctag

SEQ ID NO: 146840 - RNA, 22 nt, synthetic construct
  source 1..22: mol_type = other RNA
tagaaggccctatgccttcagt

SEQ ID NO: 146841 - RNA, 22 nt, synthetic construct
  source 1..22: mol_type = other RNA
tagaagggagaacccaggaaca

SEQ ID NO: 146842 - RNA, 22 nt, synthetic construct
  source 1..22: mol_type = other RNA
tagaaggtaagaatgtcaagct

SEQ ID NO: 146843 - RNA, 22 nt, synthetic construct
  source 1..22: mol_type = other RNA
tagaaggtcaatctaggaggtc

SEQ ID NO: 146844 - RNA, 22 nt, synthetic construct
  source 1..22: mol_type = other RNA
tagaagtaaatcccggccaggt

SEQ ID NO: 146845 - RNA, 22 nt, synthetic construct
  source 1..22: mol_type = other RNA
tagaagtacaaacattacagaa

SEQ ID NO: 146846 - RNA, 22 nt, synthetic construct
  source 1..22: mol_type = other RNA
tagaagtatcccagatggggat

SEQ ID NO: 146847 - RNA, 22 nt, synthetic construct
  source 1..22: mol_type = other RNA
tagaagtcccagttcaaggtgt

SEQ ID NO: 146848 - RNA, 22 nt, synthetic construct
  source 1..22: mol_type = other RNA
tagaagtgtatcagatgcttct

SEQ ID NO: 146849 - RNA, 22 nt, synthetic construct
  source 1..22: mol_type = other RNA
tagaataatacacttttcaggt

SEQ ID NO: 146850 - RNA, 22 nt, synthetic construct
  source 1..22: mol_type = other RNA
tagaataccacttagtttgcaa

SEQ ID NO: 146851 - RNA, 22 nt, synthetic construct
  source 1..22: mol_type = other RNA
tagaatactccaccagcatctt

SEQ ID NO: 146852 - RNA, 22 nt, synthetic construct
  source 1..22: mol_type = other RNA
tagaatatccaagcacaaacct

SEQ ID NO: 146853 - RNA, 22 nt, synthetic construct
  source 1..22: mol_type = other RNA
tagaatcatccggggagctttt

SEQ ID NO: 146854 - RNA, 22 nt, synthetic construct
  source 1..22: mol_type = other RNA
tagaatgaaaatttttgtctgg

SEQ ID NO: 146855 - RNA, 22 nt, synthetic construct
  source 1..22: mol_type = other RNA
tagaatgcatccctcctctggc

SEQ ID NO: 146856 - RNA, 22 nt, synthetic construct
  source 1..22: mol_type = other RNA
tagaatgtgacttcgtcaaggg

SEQ ID NO: 146857 - RNA, 22 nt, synthetic construct
  source 1..22: mol_type = other RNA
tagaatgtttttccgtctagcc

SEQ ID NO: 146858 - RNA, 22 nt, synthetic construct
  source 1..22: mol_type = other RNA
tagaattacaggcatgagtcgc

SEQ ID NO: 146859 - RNA, 22 nt, synthetic construct
  source 1..22: mol_type = other RNA
tagaattcaggacagtcatcct

SEQ ID NO: 146860 - RNA, 22 nt, synthetic construct
  source 1..22: mol_type = other RNA
tagaattcaggacagttattct

SEQ ID NO: 146861 - RNA, 22 nt, synthetic construct
  source 1..22: mol_type = other RNA
tagaattctctctcaactggcc

SEQ ID NO: 146862 - RNA, 22 nt, synthetic construct
  source 1..22: mol_type = other RNA
tagaattgactttaccctgctg

SEQ ID NO: 146863 - RNA, 22 nt, synthetic construct
  source 1..22: mol_type = other RNA
tagaattttgcttttgctttgg

SEQ ID NO: 146864 - RNA, 22 nt, synthetic construct
  source 1..22: mol_type = other RNA
tagacaaagacaagttcttacc

SEQ ID NO: 146865 - RNA, 22 nt, synthetic construct
  source 1..22: mol_type = other RNA
tagacacatttttgacagccac

SEQ ID NO: 146866 - RNA, 22 nt, synthetic construct
  source 1..22: mol_type = other RNA
tagacactaactttctattccc

SEQ ID NO: 146867 - RNA, 22 nt, synthetic construct
  source 1..22: mol_type = other RNA
tagacagcatccccagaaagag

SEQ ID NO: 146868 - RNA, 22 nt, synthetic construct
  source 1..22: mol_type = other RNA
tagacatgagtaaaaagaaatc

SEQ ID NO: 146869 - RNA, 22 nt, synthetic construct
  source 1..22: mol_type = other RNA
tagacatgggctaaataaaaca

SEQ ID NO: 146870 - RNA, 22 nt, synthetic construct
  source 1..22: mol_type = other RNA
tagaccagatgcgtggttcaca

SEQ ID NO: 146871 - RNA, 22 nt, synthetic construct
  source 1..22: mol_type = other RNA
tagaccatataatctaaccctc

SEQ ID NO: 146872 - RNA, 22 nt, synthetic construct
  source 1..22: mol_type = other RNA
tagacccaaagcaaaagcaaaa

SEQ ID NO: 146873 - RNA, 22 nt, synthetic construct
  source 1..22: mol_type = other RNA
tagaccctgttagtcccctagt

SEQ ID NO: 146874 - RNA, 22 nt, synthetic construct
  source 1..22: mol_type = other RNA
tagaccgaggaaacccgctctg

SEQ ID NO: 146875 - RNA, 22 nt, synthetic construct
  source 1..22: mol_type = other RNA
tagacctcaaattaatcagtct

SEQ ID NO: 146876 - RNA, 22 nt, synthetic construct
  source 1..22: mol_type = other RNA
tagacctcctagattgaccttc

SEQ ID NO: 146877 - RNA, 22 nt, synthetic construct
  source 1..22: mol_type = other RNA
tagacctgaatgactgttgcct

SEQ ID NO: 146878 - RNA, 22 nt, synthetic construct
  source 1..22: mol_type = other RNA
tagacctttcttaggtttctca

SEQ ID NO: 146879 - RNA, 22 nt, synthetic construct
  source 1..22: mol_type = other RNA
tagacggaaaaacattctacag

SEQ ID NO: 146880 - RNA, 22 nt, synthetic construct
  source 1..22: mol_type = other RNA
tagactaagaaaaacagaagac

SEQ ID NO: 146881 - RNA, 22 nt, synthetic construct
  source 1..22: mol_type = other RNA
tagactcccaacttataatatt

SEQ ID NO: 146882 - RNA, 22 nt, synthetic construct
  source 1..22: mol_type = other RNA
tagactcttcagaggtctgtta

SEQ ID NO: 146883 - RNA, 22 nt, synthetic construct
  source 1..22: mol_type = other RNA
tagactgcacataaaaggatat

SEQ ID NO: 146884 - RNA, 22 nt, synthetic construct
  source 1..22: mol_type = other RNA
tagactgccaggtagggagggg

SEQ ID NO: 146885 - RNA, 22 nt, synthetic construct
  source 1..22: mol_type = other RNA
tagactgcctgaggtctcaaaa

SEQ ID NO: 146886 - RNA, 22 nt, synthetic construct
  source 1..22: mol_type = other RNA
tagactggattaaggagatggc

SEQ ID NO: 146887 - RNA, 22 nt, synthetic construct
  source 1..22: mol_type = other RNA
tagactgtaaaaattttctccc

SEQ ID NO: 146888 - RNA, 22 nt, synthetic construct
  source 1..22: mol_type = other RNA
tagactttagagtcagttgttt

SEQ ID NO: 146889 - RNA, 22 nt, synthetic construct
  source 1..22: mol_type = other RNA
tagagaaaatgttatacagcaa

SEQ ID NO: 146890 - RNA, 22 nt, synthetic construct
  source 1..22: mol_type = other RNA
tagagaaacaggattacaatgt

SEQ ID NO: 146891 - RNA, 22 nt, synthetic construct
  source 1..22: mol_type = other RNA
tagagaaagcatcagagctttg

SEQ ID NO: 146892 - RNA, 22 nt, synthetic construct
  source 1..22: mol_type = other RNA
tagagaagaatgagaaacatac

SEQ ID NO: 146893 - RNA, 22 nt, synthetic construct
  source 1..22: mol_type = other RNA
tagagaaggctttgtgttggtg

SEQ ID NO: 146894 - RNA, 22 nt, synthetic construct
  source 1..22: mol_type = other RNA
tagagacagaatcttactggtg

SEQ ID NO: 146895 - RNA, 22 nt, synthetic construct
  source 1..22: mol_type = other RNA
tagagactggatcctggagggc

SEQ ID NO: 146896 - RNA, 22 nt, synthetic construct
  source 1..22: mol_type = other RNA
tagagagatgcctgtgcttgtc

SEQ ID NO: 146897 - RNA, 22 nt, synthetic construct
  source 1..22: mol_type = other RNA
tagagagattcaagaaaccaca

SEQ ID NO: 146898 - RNA, 22 nt, synthetic construct
  source 1..22: mol_type = other RNA
tagagatcttgtgtatcttttg

SEQ ID NO: 146899 - RNA, 22 nt, synthetic construct
  source 1..22: mol_type = other RNA
tagagatgaggttttacgatgt

SEQ ID NO: 146900 - RNA, 22 nt, synthetic construct
  source 1..22: mol_type = other RNA
tagagatgggaaagtattccca

SEQ ID NO: 146901 - RNA, 22 nt, synthetic construct
  source 1..22: mol_type = other RNA
tagagattaggcagaaccacct

SEQ ID NO: 146902 - RNA, 22 nt, synthetic construct
  source 1..22: mol_type = other RNA
tagagatttgctgtataacatt

SEQ ID NO: 146903 - RNA, 22 nt, synthetic construct
  source 1..22: mol_type = other RNA
tagagcaagcaacaccagatac

SEQ ID NO: 146904 - RNA, 22 nt, synthetic construct
  source 1..22: mol_type = other RNA
tagagcactttcgtatttttgt

SEQ ID NO: 146905 - RNA, 22 nt, synthetic construct
  source 1..22: mol_type = other RNA
tagagccaggaagtcagcaact

SEQ ID NO: 146906 - RNA, 22 nt, synthetic construct
  source 1..22: mol_type = other RNA
tagagccccaagaaagcaggtc

SEQ ID NO: 146907 - RNA, 22 nt, synthetic construct
  source 1..22: mol_type = other RNA
tagagctcacacgagaaggaca

SEQ ID NO: 146908 - RNA, 22 nt, synthetic construct
  source 1..22: mol_type = other RNA
tagagctgctgtaacaaagatg

SEQ ID NO: 146909 - RNA, 22 nt, synthetic construct
  source 1..22: mol_type = other RNA
tagagcttcaacctcctgggct

SEQ ID NO: 146910 - RNA, 22 nt, synthetic construct
  source 1..22: mol_type = other RNA
tagagcttttattttactctct

SEQ ID NO: 146911 - RNA, 22 nt, synthetic construct
  source 1..22: mol_type = other RNA
tagaggactgcctattttgtaa

SEQ ID NO: 146912 - RNA, 22 nt, synthetic construct
  source 1..22: mol_type = other RNA
tagaggaggagggttagattat

SEQ ID NO: 146913 - RNA, 22 nt, synthetic construct
  source 1..22: mol_type = other RNA
tagaggatgggcattccagagg

SEQ ID NO: 146914 - RNA, 22 nt, synthetic construct
  source 1..22: mol_type = other RNA
tagaggattccaggtttacagg

SEQ ID NO: 146915 - RNA, 22 nt, synthetic construct
  source 1..22: mol_type = other RNA
tagaggcagttgagttttcaac

SEQ ID NO: 146916 - RNA, 22 nt, synthetic construct
  source 1..22: mol_type = other RNA
tagaggccgagggttgaacatc

SEQ ID NO: 146917 - RNA, 22 nt, synthetic construct
  source 1..22: mol_type = other RNA
tagaggctgcaccctcctcctc

SEQ ID NO: 146918 - RNA, 22 nt, synthetic construct
  source 1..22: mol_type = other RNA
tagaggctgtattgtaggaaag

SEQ ID NO: 146919 - RNA, 22 nt, synthetic construct
  source 1..22: mol_type = other RNA
tagagggaatttgttttaccat

SEQ ID NO: 146920 - RNA, 22 nt, synthetic construct
  source 1..22: mol_type = other RNA
tagagggagcatcttcccatga

SEQ ID NO: 146921 - RNA, 22 nt, synthetic construct
  source 1..22: mol_type = other RNA
tagagggatgaatgttgtacat

SEQ ID NO: 146922 - RNA, 22 nt, synthetic construct
  source 1..22: mol_type = other RNA
tagagggcctaaataaaacaca

SEQ ID NO: 146923 - RNA, 22 nt, synthetic construct
  source 1..22: mol_type = other RNA
tagagggcttcatgctgggaga

SEQ ID NO: 146924 - RNA, 22 nt, synthetic construct
  source 1..22: mol_type = other RNA
tagagggtaagaccaaaatgga

SEQ ID NO: 146925 - RNA, 22 nt, synthetic construct
  source 1..22: mol_type = other RNA
tagaggtctgtctttcagtatg

SEQ ID NO: 146926 - RNA, 22 nt, synthetic construct
  source 1..22: mol_type = other RNA
tagaggtgaagttaagggccat

SEQ ID NO: 146927 - RNA, 22 nt, synthetic construct
  source 1..22: mol_type = other RNA
tagagtaactgtcatcagcgtc

SEQ ID NO: 146928 - RNA, 22 nt, synthetic construct
  source 1..22: mol_type = other RNA
tagagtaagcaactgcatcttc

SEQ ID NO: 146929 - RNA, 22 nt, synthetic construct
  source 1..22: mol_type = other RNA
tagagtaccaggtcagccagag

SEQ ID NO: 146930 - RNA, 22 nt, synthetic construct
  source 1..22: mol_type = other RNA
tagagtattacctatgaatagg

SEQ ID NO: 146931 - RNA, 22 nt, synthetic construct
  source 1..22: mol_type = other RNA
tagagtcagttgtttacttggg

SEQ ID NO: 146932 - RNA, 22 nt, synthetic construct
  source 1..22: mol_type = other RNA
tagagtgaaaagaaacaagtga

SEQ ID NO: 146933 - RNA, 22 nt, synthetic construct
  source 1..22: mol_type = other RNA
tagagttccatctgttatagtg

SEQ ID NO: 146934 - RNA, 22 nt, synthetic construct
  source 1..22: mol_type = other RNA
tagagtttgcattacatgaatg

SEQ ID NO: 146935 - RNA, 22 nt, synthetic construct
  source 1..22: mol_type = other RNA
tagataaactggaattcatcaa

SEQ ID NO: 146936 - RNA, 22 nt, synthetic construct
  source 1..22: mol_type = other RNA
tagataaggttgttcttggtta

SEQ ID NO: 146937 - RNA, 22 nt, synthetic construct
  source 1..22: mol_type = other RNA
tagataccagaccctttatcgg

SEQ ID NO: 146938 - RNA, 22 nt, synthetic construct
  source 1..22: mol_type = other RNA
tagataggatgggcagactcct

SEQ ID NO: 146939 - RNA, 22 nt, synthetic construct
  source 1..22: mol_type = other RNA
tagataggtcatgtacataaat

SEQ ID NO: 146940 - RNA, 22 nt, synthetic construct
  source 1..22: mol_type = other RNA
tagatagtggtttgaagcttca

SEQ ID NO: 146941 - RNA, 22 nt, synthetic construct
  source 1..22: mol_type = other RNA
tagatatcccatataaggggaa

SEQ ID NO: 146942 - RNA, 22 nt, synthetic construct
  source 1..22: mol_type = other RNA
tagatatgggagtccctgcttt

SEQ ID NO: 146943 - RNA, 22 nt, synthetic construct
  source 1..22: mol_type = other RNA
tagatattttctgtcattctgc

SEQ ID NO: 146944 - RNA, 22 nt, synthetic construct
  source 1..22: mol_type = other RNA
tagatcaagcccttccttgctt

SEQ ID NO: 146945 - RNA, 22 nt, synthetic construct
  source 1..22: mol_type = other RNA
tagatcaagtatttcctatgaa

SEQ ID NO: 146946 - RNA, 22 nt, synthetic construct
  source 1..22: mol_type = other RNA
tagatcaagtcctttccagagg

SEQ ID NO: 146947 - RNA, 22 nt, synthetic construct
  source 1..22: mol_type = other RNA
tagatcacaaggactggcttca

SEQ ID NO: 146948 - RNA, 22 nt, synthetic construct
  source 1..22: mol_type = other RNA
tagatcaccaggggctggggga

SEQ ID NO: 146949 - RNA, 22 nt, synthetic construct
  source 1..22: mol_type = other RNA
tagatcctgaggaagctaatca

SEQ ID NO: 146950 - RNA, 22 nt, synthetic construct
  source 1..22: mol_type = other RNA
tagatctcttttcctttaacgt

SEQ ID NO: 146951 - RNA, 22 nt, synthetic construct
  source 1..22: mol_type = other RNA
tagatctgggataatgctatca

SEQ ID NO: 146952 - RNA, 22 nt, synthetic construct
  source 1..22: mol_type = other RNA
tagatgaaactaaatgtgagca

SEQ ID NO: 146953 - RNA, 22 nt, synthetic construct
  source 1..22: mol_type = other RNA
tagatgacgaaagtgaagccca

SEQ ID NO: 146954 - RNA, 22 nt, synthetic construct
  source 1..22: mol_type = other RNA
tagatgagagtggcctaaatca

SEQ ID NO: 146955 - RNA, 22 nt, synthetic construct
  source 1..22: mol_type = other RNA
tagatgagcccaggagttgcat

SEQ ID NO: 146956 - RNA, 22 nt, synthetic construct
  source 1..22: mol_type = other RNA
tagatgatgttttgaacgaatg

SEQ ID NO: 146957 - RNA, 22 nt, synthetic construct
  source 1..22: mol_type = other RNA
tagatgattcgcattgctaatt

SEQ ID NO: 146958 - RNA, 22 nt, synthetic construct
  source 1..22: mol_type = other RNA
tagatgcctagaaaggaattgt

SEQ ID NO: 146959 - RNA, 22 nt, synthetic construct
  source 1..22: mol_type = other RNA
tagatgcctcgaaggcctgctt

SEQ ID NO: 146960 - RNA, 22 nt, synthetic construct
  source 1..22: mol_type = other RNA
tagatgctaaacagtacagtag

SEQ ID NO: 146961 - RNA, 22 nt, synthetic construct
  source 1..22: mol_type = other RNA
tagatggcttaggatcaccaaa

SEQ ID NO: 146962 - RNA, 22 nt, synthetic construct
  source 1..22: mol_type = other RNA
tagatggtaaaacaaattccct

SEQ ID NO: 146963 - RNA, 22 nt, synthetic construct
  source 1..22: mol_type = other RNA
tagatggtgctgatttaaaatt

SEQ ID NO: 146964 - RNA, 22 nt, synthetic construct
  source 1..22: mol_type = other RNA
tagatgttatgccccctcttct

SEQ ID NO: 146965 - RNA, 22 nt, synthetic construct
  source 1..22: mol_type = other RNA
tagattacaaaagaacaggact

SEQ ID NO: 146966 - RNA, 22 nt, synthetic construct
  source 1..22: mol_type = other RNA
tagattagcttttacgaggaca

SEQ ID NO: 146967 - RNA, 22 nt, synthetic construct
  source 1..22: mol_type = other RNA
tagattaggaaacagattgatt

SEQ ID NO: 146968 - RNA, 22 nt, synthetic construct
  source 1..22: mol_type = other RNA
tagattatatggtctaccatgt

SEQ ID NO: 146969 - RNA, 22 nt, synthetic construct
  source 1..22: mol_type = other RNA
tagattcatatgctttgagcta

SEQ ID NO: 146970 - RNA, 22 nt, synthetic construct
  source 1..22: mol_type = other RNA
tagattcccccttatgtgtgta

SEQ ID NO: 146971 - RNA, 22 nt, synthetic construct
  source 1..22: mol_type = other RNA
tagattccctctggccttctat

SEQ ID NO: 146972 - RNA, 22 nt, synthetic construct
  source 1..22: mol_type = other RNA
tagattgaccttctacttatct

SEQ ID NO: 146973 - RNA, 22 nt, synthetic construct
  source 1..22: mol_type = other RNA
tagattgggcttttcatatacg

SEQ ID NO: 146974 - RNA, 22 nt, synthetic construct
  source 1..22: mol_type = other RNA
tagattgttttaggtagtcttg

SEQ ID NO: 146975 - RNA, 22 nt, synthetic construct
  source 1..22: mol_type = other RNA
tagattgttttgttgctattgt

SEQ ID NO: 146976 - RNA, 22 nt, synthetic construct
  source 1..22: mol_type = other RNA
tagatttatcaatagcagtgct

SEQ ID NO: 146977 - RNA, 22 nt, synthetic construct
  source 1..22: mol_type = other RNA
tagatttatttttacccgtgga

SEQ ID NO: 146978 - RNA, 22 nt, synthetic construct
  source 1..22: mol_type = other RNA
tagatttcaatctggaatgcat

SEQ ID NO: 146979 - RNA, 22 nt, synthetic construct
  source 1..22: mol_type = other RNA
tagatttctgcatagagatctt

SEQ ID NO: 146980 - RNA, 22 nt, synthetic construct
  source 1..22: mol_type = other RNA
tagatttttcctttgcctaagt

SEQ ID NO: 146981 - RNA, 22 nt, synthetic construct
  source 1..22: mol_type = other RNA
tagcaaacaaacacactgggta

SEQ ID NO: 146982 - RNA, 22 nt, synthetic construct
  source 1..22: mol_type = other RNA
tagcaaacatttatggaattgc

SEQ ID NO: 146983 - RNA, 22 nt, synthetic construct
  source 1..22: mol_type = other RNA
tagcaaactactgatagcgaaa

SEQ ID NO: 146984 - RNA, 22 nt, synthetic construct
  source 1..22: mol_type = other RNA
tagcaaactgaatcagacaaca

SEQ ID NO: 146985 - RNA, 22 nt, synthetic construct
  source 1..22: mol_type = other RNA
tagcaaagaggcaaaactcctg

SEQ ID NO: 146986 - RNA, 22 nt, synthetic construct
  source 1..22: mol_type = other RNA
tagcaacaaaacaatctaattc

SEQ ID NO: 146987 - RNA, 22 nt, synthetic construct
  source 1..22: mol_type = other RNA
tagcaactgttttttcctccct

SEQ ID NO: 146988 - RNA, 22 nt, synthetic construct
  source 1..22: mol_type = other RNA
tagcaacttgcagaagagtgaa

SEQ ID NO: 146989 - RNA, 22 nt, synthetic construct
  source 1..22: mol_type = other RNA
tagcaagattactggatacaag

SEQ ID NO: 146990 - RNA, 22 nt, synthetic construct
  source 1..22: mol_type = other RNA
tagcaagctaataatttatcag

SEQ ID NO: 146991 - RNA, 22 nt, synthetic construct
  source 1..22: mol_type = other RNA
tagcaaggaagcagaatgtcca

SEQ ID NO: 146992 - RNA, 22 nt, synthetic construct
  source 1..22: mol_type = other RNA
tagcaatccaaggacagaaatt

SEQ ID NO: 146993 - RNA, 22 nt, synthetic construct
  source 1..22: mol_type = other RNA
tagcaatccaggatcttactgt

SEQ ID NO: 146994 - RNA, 22 nt, synthetic construct
  source 1..22: mol_type = other RNA
tagcaatgcgaatcatctaggc

SEQ ID NO: 146995 - RNA, 22 nt, synthetic construct
  source 1..22: mol_type = other RNA
tagcacaactagtaagtaaaat

SEQ ID NO: 146996 - RNA, 22 nt, synthetic construct
  source 1..22: mol_type = other RNA
tagcacagaaccatgtaacagg

SEQ ID NO: 146997 - RNA, 22 nt, synthetic construct
  source 1..22: mol_type = other RNA
tagcacagaggcaacagtcatt

SEQ ID NO: 146998 - RNA, 22 nt, synthetic construct
  source 1..22: mol_type = other RNA
tagcaccctatttatgttgcac

SEQ ID NO: 146999 - RNA, 22 nt, synthetic construct
  source 1..22: mol_type = other RNA
tagcacctttattaactagaat

SEQ ID NO: 147000 - RNA, 22 nt, synthetic construct
  source 1..22: mol_type = other RNA
tagcagaaacacaggactgtgt

SEQ ID NO: 147001 - RNA, 22 nt, synthetic construct
  source 1..22: mol_type = other RNA
tagcagaaccttagaaatttaa

SEQ ID NO: 147002 - RNA, 22 nt, synthetic construct
  source 1..22: mol_type = other RNA
tagcagaatccccaaataacat

SEQ ID NO: 147003 - RNA, 22 nt, synthetic construct
  source 1..22: mol_type = other RNA
tagcagaatggccctgcgattg

SEQ ID NO: 147004 - RNA, 22 nt, synthetic construct
  source 1..22: mol_type = other RNA
tagcagacactgggttctcacc

SEQ ID NO: 147005 - RNA, 22 nt, synthetic construct
  source 1..22: mol_type = other RNA
tagcagcattgtttacagtagc

SEQ ID NO: 147006 - RNA, 22 nt, synthetic construct
  source 1..22: mol_type = other RNA
tagcaggactggactccttctg

SEQ ID NO: 147007 - RNA, 22 nt, synthetic construct
  source 1..22: mol_type = other RNA
tagcaggattcttgttaagcat

SEQ ID NO: 147008 - RNA, 22 nt, synthetic construct
  source 1..22: mol_type = other RNA
tagcagggaccacaggcatgcg

SEQ ID NO: 147009 - RNA, 22 nt, synthetic construct
  source 1..22: mol_type = other RNA
tagcagggactacagtcacaca

SEQ ID NO: 147010 - RNA, 22 nt, synthetic construct
  source 1..22: mol_type = other RNA
tagcagggtcatgcacacgctg

SEQ ID NO: 147011 - RNA, 22 nt, synthetic construct
  source 1..22: mol_type = other RNA
tagcaggtttaggaagcacatt

SEQ ID NO: 147012 - RNA, 22 nt, synthetic construct
  source 1..22: mol_type = other RNA
tagcagtaaaatgaaaaaacct

SEQ ID NO: 147013 - RNA, 22 nt, synthetic construct
  source 1..22: mol_type = other RNA
tagcagtaaatgcctacattaa

SEQ ID NO: 147014 - RNA, 22 nt, synthetic construct
  source 1..22: mol_type = other RNA
tagcagtgctgaaagctagaag

SEQ ID NO: 147015 - RNA, 22 nt, synthetic construct
  source 1..22: mol_type = other RNA
tagcagtgggaagtggagtgcg

SEQ ID NO: 147016 - RNA, 22 nt, synthetic construct
  source 1..22: mol_type = other RNA
tagcagttctgtacccttacgc

SEQ ID NO: 147017 - RNA, 22 nt, synthetic construct
  source 1..22: mol_type = other RNA
tagcatcaccatcatcatcagg

SEQ ID NO: 147018 - RNA, 22 nt, synthetic construct
  source 1..22: mol_type = other RNA
tagcatctagcacagaaccatg

SEQ ID NO: 147019 - RNA, 22 nt, synthetic construct
  source 1..22: mol_type = other RNA
tagcatcttagctcttccctta

SEQ ID NO: 147020 - RNA, 22 nt, synthetic construct
  source 1..22: mol_type = other RNA
tagcatgcagtagctcatcatt

SEQ ID NO: 147021 - RNA, 22 nt, synthetic construct
  source 1..22: mol_type = other RNA
tagcatgcctgacaaagtatga

SEQ ID NO: 147022 - RNA, 22 nt, synthetic construct
  source 1..22: mol_type = other RNA
tagcatgttgctttgcgaaata

SEQ ID NO: 147023 - RNA, 22 nt, synthetic construct
  source 1..22: mol_type = other RNA
tagcattatcccagatctaaca

SEQ ID NO: 147024 - RNA, 22 nt, synthetic construct
  source 1..22: mol_type = other RNA
tagcattatccctttaaaatga

SEQ ID NO: 147025 - RNA, 22 nt, synthetic construct
  source 1..22: mol_type = other RNA
tagcattgaagtatagtttgaa

SEQ ID NO: 147026 - RNA, 22 nt, synthetic construct
  source 1..22: mol_type = other RNA
tagcatttgaaaacatgttttg

SEQ ID NO: 147027 - RNA, 22 nt, synthetic construct
  source 1..22: mol_type = other RNA
tagccaaagcaagccttggcaa

SEQ ID NO: 147028 - RNA, 22 nt, synthetic construct
  source 1..22: mol_type = other RNA
tagccaaaggtagaaacatccc

SEQ ID NO: 147029 - RNA, 22 nt, synthetic construct
  source 1..22: mol_type = other RNA
tagccaacaaccataatgagta

SEQ ID NO: 147030 - RNA, 22 nt, synthetic construct
  source 1..22: mol_type = other RNA
tagccaagcatggtggtaggtg

SEQ ID NO: 147031 - RNA, 22 nt, synthetic construct
  source 1..22: mol_type = other RNA
tagccaagggtttgtcaatttt

SEQ ID NO: 147032 - RNA, 22 nt, synthetic construct
  source 1..22: mol_type = other RNA
tagccacaagccacatgtggtt

SEQ ID NO: 147033 - RNA, 22 nt, synthetic construct
  source 1..22: mol_type = other RNA
tagccacagcgttgttcagttg

SEQ ID NO: 147034 - RNA, 22 nt, synthetic construct
  source 1..22: mol_type = other RNA
tagccactctgaattctctgga

SEQ ID NO: 147035 - RNA, 22 nt, synthetic construct
  source 1..22: mol_type = other RNA
tagccactgggtcttataggtt

SEQ ID NO: 147036 - RNA, 22 nt, synthetic construct
  source 1..22: mol_type = other RNA
tagccacttcctattagaagaa

SEQ ID NO: 147037 - RNA, 22 nt, synthetic construct
  source 1..22: mol_type = other RNA
tagccaggcatgggggcgcgtg

SEQ ID NO: 147038 - RNA, 22 nt, synthetic construct
  source 1..22: mol_type = other RNA
tagccaggcgtggtggcggatg

SEQ ID NO: 147039 - RNA, 22 nt, synthetic construct
  source 1..22: mol_type = other RNA
tagccaggtgtggtgctgcacg

SEQ ID NO: 147040 - RNA, 22 nt, synthetic construct
  source 1..22: mol_type = other RNA
tagccagtgattggatatttgc

SEQ ID NO: 147041 - RNA, 22 nt, synthetic construct
  source 1..22: mol_type = other RNA
tagccagtgcagcaagcagtaa

SEQ ID NO: 147042 - RNA, 22 nt, synthetic construct
  source 1..22: mol_type = other RNA
tagccataagagtccccaactg

SEQ ID NO: 147043 - RNA, 22 nt, synthetic construct
  source 1..22: mol_type = other RNA
tagccataatccttagattaca

SEQ ID NO: 147044 - RNA, 22 nt, synthetic construct
  source 1..22: mol_type = other RNA
tagcccaacagggttttgtttt

SEQ ID NO: 147045 - RNA, 22 nt, synthetic construct
  source 1..22: mol_type = other RNA
tagcccaagctaccatttattc

SEQ ID NO: 147046 - RNA, 22 nt, synthetic construct
  source 1..22: mol_type = other RNA
tagcccacttgttgatggggtt

SEQ ID NO: 147047 - RNA, 22 nt, synthetic construct
  source 1..22: mol_type = other RNA
tagcccagcacttccattttgc

SEQ ID NO: 147048 - RNA, 22 nt, synthetic construct
  source 1..22: mol_type = other RNA
tagcccagcttccgggacttgg

SEQ ID NO: 147049 - RNA, 22 nt, synthetic construct
  source 1..22: mol_type = other RNA
tagcccatgtctaaagtattgt

SEQ ID NO: 147050 - RNA, 22 nt, synthetic construct
  source 1..22: mol_type = other RNA
tagccccaaatacctctgaatg

SEQ ID NO: 147051 - RNA, 22 nt, synthetic construct
  source 1..22: mol_type = other RNA
tagccccctgaatacccctccc

SEQ ID NO: 147052 - RNA, 22 nt, synthetic construct
  source 1..22: mol_type = other RNA
tagcccctgctgccagatgttc

SEQ ID NO: 147053 - RNA, 22 nt, synthetic construct
  source 1..22: mol_type = other RNA
tagccccttatcaggaaagtgc

SEQ ID NO: 147054 - RNA, 22 nt, synthetic construct
  source 1..22: mol_type = other RNA
tagccgggaggagccaagtaaa

SEQ ID NO: 147055 - RNA, 22 nt, synthetic construct
  source 1..22: mol_type = other RNA
tagccgggtgtagtggtgtgtg

SEQ ID NO: 147056 - RNA, 22 nt, synthetic construct
  source 1..22: mol_type = other RNA
tagcctagacctcaaattaatc

SEQ ID NO: 147057 - RNA, 22 nt, synthetic construct
  source 1..22: mol_type = other RNA
tagcctccagaaaaccagaaaa

SEQ ID NO: 147058 - RNA, 22 nt, synthetic construct
  source 1..22: mol_type = other RNA
tagcctcctaagttttggggga

SEQ ID NO: 147059 - RNA, 22 nt, synthetic construct
  source 1..22: mol_type = other RNA
tagcctctctgggcttcacttt

SEQ ID NO: 147060 - RNA, 22 nt, synthetic construct
  source 1..22: mol_type = other RNA
tagccttccagagacaaagcat

SEQ ID NO: 147061 - RNA, 22 nt, synthetic construct
  source 1..22: mol_type = other RNA
tagccttcttggagtaaacctg

SEQ ID NO: 147062 - RNA, 22 nt, synthetic construct
  source 1..22: mol_type = other RNA
tagccttgccattctcccagtt

SEQ ID NO: 147063 - RNA, 22 nt, synthetic construct
  source 1..22: mol_type = other RNA
tagccttggtaaaatcactaat

SEQ ID NO: 147064 - RNA, 22 nt, synthetic construct
  source 1..22: mol_type = other RNA
tagccttgtactgtgtggcttc

SEQ ID NO: 147065 - RNA, 22 nt, synthetic construct
  source 1..22: mol_type = other RNA
tagccttttacaccctaggtag

SEQ ID NO: 147066 - RNA, 22 nt, synthetic construct
  source 1..22: mol_type = other RNA
tagcgaaagggattctggccaa

SEQ ID NO: 147067 - RNA, 22 nt, synthetic construct
  source 1..22: mol_type = other RNA
tagcgaaaggtacgacgctctt

SEQ ID NO: 147068 - RNA, 22 nt, synthetic construct
  source 1..22: mol_type = other RNA
tagcgagacctcatctctgcaa

SEQ ID NO: 147069 - RNA, 22 nt, synthetic construct
  source 1..22: mol_type = other RNA
tagcgctgatgtgttgacctta

SEQ ID NO: 147070 - RNA, 22 nt, synthetic construct
  source 1..22: mol_type = other RNA
tagcgctggaggtcgggctgcc

SEQ ID NO: 147071 - RNA, 22 nt, synthetic construct
  source 1..22: mol_type = other RNA
tagcgctttaagcatcccatat

SEQ ID NO: 147072 - RNA, 22 nt, synthetic construct
  source 1..22: mol_type = other RNA
tagcggaatgactatagaaatt

SEQ ID NO: 147073 - RNA, 22 nt, synthetic construct
  source 1..22: mol_type = other RNA
tagcgggaaaaaataatatgag

SEQ ID NO: 147074 - RNA, 22 nt, synthetic construct
  source 1..22: mol_type = other RNA
tagcgttcatccaaattattga

SEQ ID NO: 147075 - RNA, 22 nt, synthetic construct
  source 1..22: mol_type = other RNA
tagctaagaaacagtaattagt

SEQ ID NO: 147076 - RNA, 22 nt, synthetic construct
  source 1..22: mol_type = other RNA
tagctaagtatgcagaaaccag

SEQ ID NO: 147077 - RNA, 22 nt, synthetic construct
  source 1..22: mol_type = other RNA
tagctaatatctttggggagat

SEQ ID NO: 147078 - RNA, 22 nt, synthetic construct
  source 1..22: mol_type = other RNA
tagctaatttcagagagacctg

SEQ ID NO: 147079 - RNA, 22 nt, synthetic construct
  source 1..22: mol_type = other RNA
tagctacaaaagggaaaacaat

SEQ ID NO: 147080 - RNA, 22 nt, synthetic construct
  source 1..22: mol_type = other RNA
tagctacttgggaggctgagac

SEQ ID NO: 147081 - RNA, 22 nt, synthetic construct
  source 1..22: mol_type = other RNA
tagctaggaccataggcacgcg

SEQ ID NO: 147082 - RNA, 22 nt, synthetic construct
  source 1..22: mol_type = other RNA
tagctagtgatgttgagtatct

SEQ ID NO: 147083 - RNA, 22 nt, synthetic construct
  source 1..22: mol_type = other RNA
tagctagtgtcttagtctgact

SEQ ID NO: 147084 - RNA, 22 nt, synthetic construct
  source 1..22: mol_type = other RNA
tagctatatcccaaattggcat

SEQ ID NO: 147085 - RNA, 22 nt, synthetic construct
  source 1..22: mol_type = other RNA
tagctatattcacttttggaat

SEQ ID NO: 147086 - RNA, 22 nt, synthetic construct
  source 1..22: mol_type = other RNA
tagctatcctaatgggcgtgga

SEQ ID NO: 147087 - RNA, 22 nt, synthetic construct
  source 1..22: mol_type = other RNA
tagctattagagaaatgcaaat

SEQ ID NO: 147088 - RNA, 22 nt, synthetic construct
  source 1..22: mol_type = other RNA
tagctattgtcttttctatctg

SEQ ID NO: 147089 - RNA, 22 nt, synthetic construct
  source 1..22: mol_type = other RNA
tagctcaaagcatatgaatcta

SEQ ID NO: 147090 - RNA, 22 nt, synthetic construct
  source 1..22: mol_type = other RNA
tagctcactagagcttcaacct

SEQ ID NO: 147091 - RNA, 22 nt, synthetic construct
  source 1..22: mol_type = other RNA
tagctcatcatttatacccaag

SEQ ID NO: 147092 - RNA, 22 nt, synthetic construct
  source 1..22: mol_type = other RNA
tagctccaaaagcgaaaggcaa

SEQ ID NO: 147093 - RNA, 22 nt, synthetic construct
  source 1..22: mol_type = other RNA
tagctccccattccctgtctgt

SEQ ID NO: 147094 - RNA, 22 nt, synthetic construct
  source 1..22: mol_type = other RNA
tagctcctgggaaaaggatttg

SEQ ID NO: 147095 - RNA, 22 nt, synthetic construct
  source 1..22: mol_type = other RNA
tagctctcatgtcagagacaca

SEQ ID NO: 147096 - RNA, 22 nt, synthetic construct
  source 1..22: mol_type = other RNA
tagctcttaagcttaggtcttt

SEQ ID NO: 147097 - RNA, 22 nt, synthetic construct
  source 1..22: mol_type = other RNA
tagctcttcccttaaccttttt

SEQ ID NO: 147098 - RNA, 22 nt, synthetic construct
  source 1..22: mol_type = other RNA
tagctgaaggcactgtatggtt

SEQ ID NO: 147099 - RNA, 22 nt, synthetic construct
  source 1..22: mol_type = other RNA
tagctgacccactggtttcagt

SEQ ID NO: 147100 - RNA, 22 nt, synthetic construct
  source 1..22: mol_type = other RNA
tagctgactttcatttgtaatt

SEQ ID NO: 147101 - RNA, 22 nt, synthetic construct
  source 1..22: mol_type = other RNA
tagctgacttttaaaatatgtg

SEQ ID NO: 147102 - RNA, 22 nt, synthetic construct
  source 1..22: mol_type = other RNA
tagctgagaagtaacattacaa

SEQ ID NO: 147103 - RNA, 22 nt, synthetic construct
  source 1..22: mol_type = other RNA
tagctgcctcttcctgttgctt

SEQ ID NO: 147104 - RNA, 22 nt, synthetic construct
  source 1..22: mol_type = other RNA
tagctggatgtggtgtggcatg

SEQ ID NO: 147105 - RNA, 22 nt, synthetic construct
  source 1..22: mol_type = other RNA
tagctggcaaaatggagacatc

SEQ ID NO: 147106 - RNA, 22 nt, synthetic construct
  source 1..22: mol_type = other RNA
tagctgggatcacaggcgttga

SEQ ID NO: 147107 - RNA, 22 nt, synthetic construct
  source 1..22: mol_type = other RNA
tagctgggatggctgaaagaga

SEQ ID NO: 147108 - RNA, 22 nt, synthetic construct
  source 1..22: mol_type = other RNA
tagctgggattacacacaccta

SEQ ID NO: 147109 - RNA, 22 nt, synthetic construct
  source 1..22: mol_type = other RNA
tagctgggattacaggcgcacg

SEQ ID NO: 147110 - RNA, 22 nt, synthetic construct
  source 1..22: mol_type = other RNA
tagctgggcgagatggcgtgcg

SEQ ID NO: 147111 - RNA, 22 nt, synthetic construct
  source 1..22: mol_type = other RNA
tagctggggcagcaaagcaaga

SEQ ID NO: 147112 - RNA, 22 nt, synthetic construct
  source 1..22: mol_type = other RNA
tagctgtcgctctcctgtgcca

SEQ ID NO: 147113 - RNA, 22 nt, synthetic construct
  source 1..22: mol_type = other RNA
tagctgtctggattgattccag

SEQ ID NO: 147114 - RNA, 22 nt, synthetic construct
  source 1..22: mol_type = other RNA
tagctgtgattaccggcatccg

SEQ ID NO: 147115 - RNA, 22 nt, synthetic construct
  source 1..22: mol_type = other RNA
tagctgtggaagcacagtctct

SEQ ID NO: 147116 - RNA, 22 nt, synthetic construct
  source 1..22: mol_type = other RNA
tagctgtggctcactcatttcc

SEQ ID NO: 147117 - RNA, 22 nt, synthetic construct
  source 1..22: mol_type = other RNA
tagctgttgaattgttgcgcgt

SEQ ID NO: 147118 - RNA, 22 nt, synthetic construct
  source 1..22: mol_type = other RNA
tagctgttttcatgcgacatat

SEQ ID NO: 147119 - RNA, 22 nt, synthetic construct
  source 1..22: mol_type = other RNA
tagcttagaagaagacttagga

SEQ ID NO: 147120 - RNA, 22 nt, synthetic construct
  source 1..22: mol_type = other RNA
tagcttcaatgagggcagagat

SEQ ID NO: 147121 - RNA, 22 nt, synthetic construct
  source 1..22: mol_type = other RNA
tagcttcacgtgcattcatact

SEQ ID NO: 147122 - RNA, 22 nt, synthetic construct
  source 1..22: mol_type = other RNA
tagcttcatataagtggaatca

SEQ ID NO: 147123 - RNA, 22 nt, synthetic construct
  source 1..22: mol_type = other RNA
tagcttcctaagaaagggtgtg

SEQ ID NO: 147124 - RNA, 22 nt, synthetic construct
  source 1..22: mol_type = other RNA
tagcttcctcaggatctacatt

SEQ ID NO: 147125 - RNA, 22 nt, synthetic construct
  source 1..22: mol_type = other RNA
tagcttctgaattgagatgtac

SEQ ID NO: 147126 - RNA, 22 nt, synthetic construct
  source 1..22: mol_type = other RNA
tagcttctgagctgttaatggt

SEQ ID NO: 147127 - RNA, 22 nt, synthetic construct
  source 1..22: mol_type = other RNA
tagcttgacaaaaggccccttg

SEQ ID NO: 147128 - RNA, 22 nt, synthetic construct
  source 1..22: mol_type = other RNA
tagcttgctagtagcagaatcc

SEQ ID NO: 147129 - RNA, 22 nt, synthetic construct
  source 1..22: mol_type = other RNA
tagcttgggctaaggtggagtg

SEQ ID NO: 147130 - RNA, 22 nt, synthetic construct
  source 1..22: mol_type = other RNA
tagctttcagcactgctattga

SEQ ID NO: 147131 - RNA, 22 nt, synthetic construct
  source 1..22: mol_type = other RNA
tagctttctcccagctgtccaa

SEQ ID NO: 147132 - RNA, 22 nt, synthetic construct
  source 1..22: mol_type = other RNA
tagctttgatgcccccaccctt

SEQ ID NO: 147133 - RNA, 22 nt, synthetic construct
  source 1..22: mol_type = other RNA
tagcttttacgaggacagactg

SEQ ID NO: 147134 - RNA, 22 nt, synthetic construct
  source 1..22: mol_type = other RNA
tagcttttcctgctgtcgttta

SEQ ID NO: 147135 - RNA, 22 nt, synthetic construct
  source 1..22: mol_type = other RNA
taggaaaaccatgtcatgtata

SEQ ID NO: 147136 - RNA, 22 nt, synthetic construct
  source 1..22: mol_type = other RNA
taggaaaagacttctcaaacag

SEQ ID NO: 147137 - RNA, 22 nt, synthetic construct
  source 1..22: mol_type = other RNA
taggaaaagacttgaggtttac

SEQ ID NO: 147138 - RNA, 22 nt, synthetic construct
  source 1..22: mol_type = other RNA
taggaaaatacatgaggcctct

SEQ ID NO: 147139 - RNA, 22 nt, synthetic construct
  source 1..22: mol_type = other RNA
taggaaaatagagttccatctg

SEQ ID NO: 147140 - RNA, 22 nt, synthetic construct
  source 1..22: mol_type = other RNA
taggaaacactgctcagaagct

SEQ ID NO: 147141 - RNA, 22 nt, synthetic construct
  source 1..22: mol_type = other RNA
taggaaactttgcattcctgaa

SEQ ID NO: 147142 - RNA, 22 nt, synthetic construct
  source 1..22: mol_type = other RNA
taggaaagcctgtgacagtatg

SEQ ID NO: 147143 - RNA, 22 nt, synthetic construct
  source 1..22: mol_type = other RNA
taggaaagtgacagatgagaaa

SEQ ID NO: 147144 - RNA, 22 nt, synthetic construct
  source 1..22: mol_type = other RNA
taggaaatacttgatctacatt

SEQ ID NO: 147145 - RNA, 22 nt, synthetic construct
  source 1..22: mol_type = other RNA
taggaaccatattagagtgaaa

SEQ ID NO: 147146 - RNA, 22 nt, synthetic construct
  source 1..22: mol_type = other RNA
taggaagcacattccttccgac

SEQ ID NO: 147147 - RNA, 22 nt, synthetic construct
  source 1..22: mol_type = other RNA
taggaagccactgcattcatcc

SEQ ID NO: 147148 - RNA, 22 nt, synthetic construct
  source 1..22: mol_type = other RNA
taggaagctatggagcactgtg

SEQ ID NO: 147149 - RNA, 22 nt, synthetic construct
  source 1..22: mol_type = other RNA
taggaagctgatcaaggaagct

SEQ ID NO: 147150 - RNA, 22 nt, synthetic construct
  source 1..22: mol_type = other RNA
taggaagcttccttgatcagct

SEQ ID NO: 147151 - RNA, 22 nt, synthetic construct
  source 1..22: mol_type = other RNA
taggaaggaacacacacctatt

SEQ ID NO: 147152 - RNA, 22 nt, synthetic construct
  source 1..22: mol_type = other RNA
taggaaggcggtggggacagct

SEQ ID NO: 147153 - RNA, 22 nt, synthetic construct
  source 1..22: mol_type = other RNA
taggaagtccatgaaacttatt

SEQ ID NO: 147154 - RNA, 22 nt, synthetic construct
  source 1..22: mol_type = other RNA
taggaagtggctagacggaaaa

SEQ ID NO: 147155 - RNA, 22 nt, synthetic construct
  source 1..22: mol_type = other RNA
taggaatagtattcaggacaga

SEQ ID NO: 147156 - RNA, 22 nt, synthetic construct
  source 1..22: mol_type = other RNA
taggaatttacatttccattca

SEQ ID NO: 147157 - RNA, 22 nt, synthetic construct
  source 1..22: mol_type = other RNA
taggacaaggaaaggatggttt

SEQ ID NO: 147158 - RNA, 22 nt, synthetic construct
  source 1..22: mol_type = other RNA
taggaccataggcacgcgcccc

SEQ ID NO: 147159 - RNA, 22 nt, synthetic construct
  source 1..22: mol_type = other RNA
taggagaaaagcttcataacat

SEQ ID NO: 147160 - RNA, 22 nt, synthetic construct
  source 1..22: mol_type = other RNA
taggagactatcgttatatcct

SEQ ID NO: 147161 - RNA, 22 nt, synthetic construct
  source 1..22: mol_type = other RNA
taggaggctattaactttgaaa

SEQ ID NO: 147162 - RNA, 22 nt, synthetic construct
  source 1..22: mol_type = other RNA
taggagggtgtgatcaggaaag

SEQ ID NO: 147163 - RNA, 22 nt, synthetic construct
  source 1..22: mol_type = other RNA
taggaggtctaagagataacta

SEQ ID NO: 147164 - RNA, 22 nt, synthetic construct
  source 1..22: mol_type = other RNA
taggagtacagtgcataccacc

SEQ ID NO: 147165 - RNA, 22 nt, synthetic construct
  source 1..22: mol_type = other RNA
taggagtcaactaatcaaacat

SEQ ID NO: 147166 - RNA, 22 nt, synthetic construct
  source 1..22: mol_type = other RNA
taggagttcattcgtagcaggt

SEQ ID NO: 147167 - RNA, 22 nt, synthetic construct
  source 1..22: mol_type = other RNA
taggataatgtccagaggagga

SEQ ID NO: 147168 - RNA, 22 nt, synthetic construct
  source 1..22: mol_type = other RNA
taggatataagagtgggcaaaa

SEQ ID NO: 147169 - RNA, 22 nt, synthetic construct
  source 1..22: mol_type = other RNA
taggatcaccaaagacttcagg

SEQ ID NO: 147170 - RNA, 22 nt, synthetic construct
  source 1..22: mol_type = other RNA
taggatcccagtcctttgggag

SEQ ID NO: 147171 - RNA, 22 nt, synthetic construct
  source 1..22: mol_type = other RNA
taggatgaattacaaatgaaag

SEQ ID NO: 147172 - RNA, 22 nt, synthetic construct
  source 1..22: mol_type = other RNA
taggatgggcagactccttccc

SEQ ID NO: 147173 - RNA, 22 nt, synthetic construct
  source 1..22: mol_type = other RNA
taggatgtgtacccgtgtgttt

SEQ ID NO: 147174 - RNA, 22 nt, synthetic construct
  source 1..22: mol_type = other RNA
taggattaagacactacaaaaa

SEQ ID NO: 147175 - RNA, 22 nt, synthetic construct
  source 1..22: mol_type = other RNA
taggattttcgtatcttttaac

SEQ ID NO: 147176 - RNA, 22 nt, synthetic construct
  source 1..22: mol_type = other RNA
taggcaaaggaaaaatctaacc

SEQ ID NO: 147177 - RNA, 22 nt, synthetic construct
  source 1..22: mol_type = other RNA
taggcaaattcatagatcacca

SEQ ID NO: 147178 - RNA, 22 nt, synthetic construct
  source 1..22: mol_type = other RNA
taggcaacatccctatgcaata

SEQ ID NO: 147179 - RNA, 22 nt, synthetic construct
  source 1..22: mol_type = other RNA
taggcaagagagcaagactcaa

SEQ ID NO: 147180 - RNA, 22 nt, synthetic construct
  source 1..22: mol_type = other RNA
taggcaatccttccgcctcagc

SEQ ID NO: 147181 - RNA, 22 nt, synthetic construct
  source 1..22: mol_type = other RNA
taggcaatgagtctgacatact

SEQ ID NO: 147182 - RNA, 22 nt, synthetic construct
  source 1..22: mol_type = other RNA
taggcaatttagaattctctct

SEQ ID NO: 147183 - RNA, 22 nt, synthetic construct
  source 1..22: mol_type = other RNA
taggcacattcaagcagaaatg

SEQ ID NO: 147184 - RNA, 22 nt, synthetic construct
  source 1..22: mol_type = other RNA
taggcacgcgcccccatgcctg

SEQ ID NO: 147185 - RNA, 22 nt, synthetic construct
  source 1..22: mol_type = other RNA
taggcagaaccacctgggggag

SEQ ID NO: 147186 - RNA, 22 nt, synthetic construct
  source 1..22: mol_type = other RNA
taggcagtcctctactttcaca

SEQ ID NO: 147187 - RNA, 22 nt, synthetic construct
  source 1..22: mol_type = other RNA
taggcagttattaagagtgtgc

SEQ ID NO: 147188 - RNA, 22 nt, synthetic construct
  source 1..22: mol_type = other RNA
taggcatataaactggaaggaa

SEQ ID NO: 147189 - RNA, 22 nt, synthetic construct
  source 1..22: mol_type = other RNA
taggcatataataagcagaatt

SEQ ID NO: 147190 - RNA, 22 nt, synthetic construct
  source 1..22: mol_type = other RNA
taggcatctatttccccattag

SEQ ID NO: 147191 - RNA, 22 nt, synthetic construct
  source 1..22: mol_type = other RNA
taggcatctctcccttcctgtt

SEQ ID NO: 147192 - RNA, 22 nt, synthetic construct
  source 1..22: mol_type = other RNA
taggccactctcatctaaatta

SEQ ID NO: 147193 - RNA, 22 nt, synthetic construct
  source 1..22: mol_type = other RNA
taggccataaatcaaggtacaa

SEQ ID NO: 147194 - RNA, 22 nt, synthetic construct
  source 1..22: mol_type = other RNA
taggccccgatgccatgtgttt

SEQ ID NO: 147195 - RNA, 22 nt, synthetic construct
  source 1..22: mol_type = other RNA
taggccctaaccccagagattg

SEQ ID NO: 147196 - RNA, 22 nt, synthetic construct
  source 1..22: mol_type = other RNA
taggccctctataattctgcct

SEQ ID NO: 147197 - RNA, 22 nt, synthetic construct
  source 1..22: mol_type = other RNA
taggcctaggtgtgataactga

SEQ ID NO: 147198 - RNA, 22 nt, synthetic construct
  source 1..22: mol_type = other RNA
taggcctattttaggctctgtg

SEQ ID NO: 147199 - RNA, 22 nt, synthetic construct
  source 1..22: mol_type = other RNA
taggcgaaatatctccctcaca

SEQ ID NO: 147200 - RNA, 22 nt, synthetic construct
  source 1..22: mol_type = other RNA
taggcgtagtatctcatgctta

SEQ ID NO: 147201 - RNA, 22 nt, synthetic construct
  source 1..22: mol_type = other RNA
taggcgtgagccatcgcgccca

SEQ ID NO: 147202 - RNA, 22 nt, synthetic construct
  source 1..22: mol_type = other RNA
taggctaatgtgtgttccagac

SEQ ID NO: 147203 - RNA, 22 nt, synthetic construct
  source 1..22: mol_type = other RNA
taggctcctgagaaccggaact

SEQ ID NO: 147204 - RNA, 22 nt, synthetic construct
  source 1..22: mol_type = other RNA
taggctctgggtcagaatcgtg

SEQ ID NO: 147205 - RNA, 22 nt, synthetic construct
  source 1..22: mol_type = other RNA
taggctctgtggtttcttgaat

SEQ ID NO: 147206 - RNA, 22 nt, synthetic construct
  source 1..22: mol_type = other RNA
taggctgaagcaggctttttac

SEQ ID NO: 147207 - RNA, 22 nt, synthetic construct
  source 1..22: mol_type = other RNA
taggctggagtgcaattgtgca

SEQ ID NO: 147208 - RNA, 22 nt, synthetic construct
  source 1..22: mol_type = other RNA
taggctgtcccaaatgcaccaa

SEQ ID NO: 147209 - RNA, 22 nt, synthetic construct
  source 1..22: mol_type = other RNA
taggctgtctccaacgcttttt

SEQ ID NO: 147210 - RNA, 22 nt, synthetic construct
  source 1..22: mol_type = other RNA
taggctgttattagagttgtaa

SEQ ID NO: 147211 - RNA, 22 nt, synthetic construct
  source 1..22: mol_type = other RNA
taggctgttcaatttagaaaat

SEQ ID NO: 147212 - RNA, 22 nt, synthetic construct
  source 1..22: mol_type = other RNA
taggctgtttgagatctttctt

SEQ ID NO: 147213 - RNA, 22 nt, synthetic construct
  source 1..22: mol_type = other RNA
taggcttaaaattcttccagcc

SEQ ID NO: 147214 - RNA, 22 nt, synthetic construct
  source 1..22: mol_type = other RNA
taggcttagataggatgggcag

SEQ ID NO: 147215 - RNA, 22 nt, synthetic construct
  source 1..22: mol_type = other RNA
taggcttagatgagcccaggag

SEQ ID NO: 147216 - RNA, 22 nt, synthetic construct
  source 1..22: mol_type = other RNA
taggcttagtacagccatcaac

SEQ ID NO: 147217 - RNA, 22 nt, synthetic construct
  source 1..22: mol_type = other RNA
tagggaagatagtactgaccat

SEQ ID NO: 147218 - RNA, 22 nt, synthetic construct
  source 1..22: mol_type = other RNA
tagggaagcagttgatgcaatt

SEQ ID NO: 147219 - RNA, 22 nt, synthetic construct
  source 1..22: mol_type = other RNA
tagggaaggtgcccgcgaaggc

SEQ ID NO: 147220 - RNA, 22 nt, synthetic construct
  source 1..22: mol_type = other RNA
tagggaatagacaaagacaagt

SEQ ID NO: 147221 - RNA, 22 nt, synthetic construct
  source 1..22: mol_type = other RNA
tagggacgaatgcatgggaggt

SEQ ID NO: 147222 - RNA, 22 nt, synthetic construct
  source 1..22: mol_type = other RNA
tagggacggggttttgccatgt

SEQ ID NO: 147223 - RNA, 22 nt, synthetic construct
  source 1..22: mol_type = other RNA
tagggactggcctcggccaacc

SEQ ID NO: 147224 - RNA, 22 nt, synthetic construct
  source 1..22: mol_type = other RNA
tagggacttatggagataaatt

SEQ ID NO: 147225 - RNA, 22 nt, synthetic construct
  source 1..22: mol_type = other RNA
tagggagactttcactgctcag

SEQ ID NO: 147226 - RNA, 22 nt, synthetic construct
  source 1..22: mol_type = other RNA
tagggagcatatatactctgag

SEQ ID NO: 147227 - RNA, 22 nt, synthetic construct
  source 1..22: mol_type = other RNA
tagggagggggctgaggattgg

SEQ ID NO: 147228 - RNA, 22 nt, synthetic construct
  source 1..22: mol_type = other RNA
tagggaggggtattcagggggc

SEQ ID NO: 147229 - RNA, 22 nt, synthetic construct
  source 1..22: mol_type = other RNA
tagggataagaataccaaattc

SEQ ID NO: 147230 - RNA, 22 nt, synthetic construct
  source 1..22: mol_type = other RNA
tagggatgttgcctactagcca

SEQ ID NO: 147231 - RNA, 22 nt, synthetic construct
  source 1..22: mol_type = other RNA
tagggcaccgtgacagaacaaa

SEQ ID NO: 147232 - RNA, 22 nt, synthetic construct
  source 1..22: mol_type = other RNA
tagggcctagaaatcatacacg

SEQ ID NO: 147233 - RNA, 22 nt, synthetic construct
  source 1..22: mol_type = other RNA
tagggcctcaaatttcatttac

SEQ ID NO: 147234 - RNA, 22 nt, synthetic construct
  source 1..22: mol_type = other RNA
tagggccttctactttaataaa

SEQ ID NO: 147235 - RNA, 22 nt, synthetic construct
  source 1..22: mol_type = other RNA
taggggaactcttgtagtattt

SEQ ID NO: 147236 - RNA, 22 nt, synthetic construct
  source 1..22: mol_type = other RNA
taggggactaacagggtctaca

SEQ ID NO: 147237 - RNA, 22 nt, synthetic construct
  source 1..22: mol_type = other RNA
taggggctgttcccagataaca

SEQ ID NO: 147238 - RNA, 22 nt, synthetic construct
  source 1..22: mol_type = other RNA
tagggggaaaactccaagtgta

SEQ ID NO: 147239 - RNA, 22 nt, synthetic construct
  source 1..22: mol_type = other RNA
taggggggaaaacacccttgaa

SEQ ID NO: 147240 - RNA, 22 nt, synthetic construct
  source 1..22: mol_type = other RNA
taggggtaaatctttgtacagt

SEQ ID NO: 147241 - RNA, 22 nt, synthetic construct
  source 1..22: mol_type = other RNA
tagggtaatgctggcttcatgg

SEQ ID NO: 147242 - RNA, 22 nt, synthetic construct
  source 1..22: mol_type = other RNA
tagggtgactagtgtgaatgag

SEQ ID NO: 147243 - RNA, 22 nt, synthetic construct
  source 1..22: mol_type = other RNA
tagggtgctactcaaagtttag

SEQ ID NO: 147244 - RNA, 22 nt, synthetic construct
  source 1..22: mol_type = other RNA
tagggtgtaaaaggctaatttt

SEQ ID NO: 147245 - RNA, 22 nt, synthetic construct
  source 1..22: mol_type = other RNA
tagggttggggtatgtttgatt

SEQ ID NO: 147246 - RNA, 22 nt, synthetic construct
  source 1..22: mol_type = other RNA
tagggtttggcagtttaagaat

SEQ ID NO: 147247 - RNA, 22 nt, synthetic construct
  source 1..22: mol_type = other RNA
taggtaagaaaaattccctcag

SEQ ID NO: 147248 - RNA, 22 nt, synthetic construct
  source 1..22: mol_type = other RNA
taggtaatactctagtggtgct

SEQ ID NO: 147249 - RNA, 22 nt, synthetic construct
  source 1..22: mol_type = other RNA
taggtagggataagaataccaa

SEQ ID NO: 147250 - RNA, 22 nt, synthetic construct
  source 1..22: mol_type = other RNA
taggtagggttggggtatgttt

SEQ ID NO: 147251 - RNA, 22 nt, synthetic construct
  source 1..22: mol_type = other RNA
taggtagtacatattcattgta

SEQ ID NO: 147252 - RNA, 22 nt, synthetic construct
  source 1..22: mol_type = other RNA
taggtagtcttgtcataacagt

SEQ ID NO: 147253 - RNA, 22 nt, synthetic construct
  source 1..22: mol_type = other RNA
taggtagtttctttgaacttat

SEQ ID NO: 147254 - RNA, 22 nt, synthetic construct
  source 1..22: mol_type = other RNA
taggtatcacagtgaggacgct

SEQ ID NO: 147255 - RNA, 22 nt, synthetic construct
  source 1..22: mol_type = other RNA
taggtattattttcacagacag

SEQ ID NO: 147256 - RNA, 22 nt, synthetic construct
  source 1..22: mol_type = other RNA
taggtattcatgctgtgaattt

SEQ ID NO: 147257 - RNA, 22 nt, synthetic construct
  source 1..22: mol_type = other RNA
taggtcactgcagtctcaaact

SEQ ID NO: 147258 - RNA, 22 nt, synthetic construct
  source 1..22: mol_type = other RNA
taggtcagaatacaaaaatgac

SEQ ID NO: 147259 - RNA, 22 nt, synthetic construct
  source 1..22: mol_type = other RNA
taggtcatttttcacttcttat

SEQ ID NO: 147260 - RNA, 22 nt, synthetic construct
  source 1..22: mol_type = other RNA
taggtctccttgtatggagact

SEQ ID NO: 147261 - RNA, 22 nt, synthetic construct
  source 1..22: mol_type = other RNA
taggtctttgatccattttgag

SEQ ID NO: 147262 - RNA, 22 nt, synthetic construct
  source 1..22: mol_type = other RNA
taggtgacctgccagagttggc

SEQ ID NO: 147263 - RNA, 22 nt, synthetic construct
  source 1..22: mol_type = other RNA
taggtgagtgagatgggaagaa

SEQ ID NO: 147264 - RNA, 22 nt, synthetic construct
  source 1..22: mol_type = other RNA
taggtgcacacaacactcagat

SEQ ID NO: 147265 - RNA, 22 nt, synthetic construct
  source 1..22: mol_type = other RNA
taggtgccccactccacacacg

SEQ ID NO: 147266 - RNA, 22 nt, synthetic construct
  source 1..22: mol_type = other RNA
taggtgctggcttcaatatgca

SEQ ID NO: 147267 - RNA, 22 nt, synthetic construct
  source 1..22: mol_type = other RNA
taggtgctttttgtatcctgtt

SEQ ID NO: 147268 - RNA, 22 nt, synthetic construct
  source 1..22: mol_type = other RNA
taggtggtttgaaccccagaag

SEQ ID NO: 147269 - RNA, 22 nt, synthetic construct
  source 1..22: mol_type = other RNA
taggtgtctcatttaataacta

SEQ ID NO: 147270 - RNA, 22 nt, synthetic construct
  source 1..22: mol_type = other RNA
taggtgtctgatgtgtgtctct

SEQ ID NO: 147271 - RNA, 22 nt, synthetic construct
  source 1..22: mol_type = other RNA
taggtgtgagccactacgcccg

SEQ ID NO: 147272 - RNA, 22 nt, synthetic construct
  source 1..22: mol_type = other RNA
taggtgtgataactgatatgag

SEQ ID NO: 147273 - RNA, 22 nt, synthetic construct
  source 1..22: mol_type = other RNA
taggtgtgtgtaatcccagcta

SEQ ID NO: 147274 - RNA, 22 nt, synthetic construct
  source 1..22: mol_type = other RNA
taggtgtgtgttccttcctaca

SEQ ID NO: 147275 - RNA, 22 nt, synthetic construct
  source 1..22: mol_type = other RNA
taggtgttttttccttctttgg

SEQ ID NO: 147276 - RNA, 22 nt, synthetic construct
  source 1..22: mol_type = other RNA
taggttacgtactaggtatcac

SEQ ID NO: 147277 - RNA, 22 nt, synthetic construct
  source 1..22: mol_type = other RNA
taggttatccaattttttggca

SEQ ID NO: 147278 - RNA, 22 nt, synthetic construct
  source 1..22: mol_type = other RNA
taggttatctgttttcttactg

SEQ ID NO: 147279 - RNA, 22 nt, synthetic construct
  source 1..22: mol_type = other RNA
taggttgaaagttcagaatacc

SEQ ID NO: 147280 - RNA, 22 nt, synthetic construct
  source 1..22: mol_type = other RNA
taggttgaatagggcctcaaat

SEQ ID NO: 147281 - RNA, 22 nt, synthetic construct
  source 1..22: mol_type = other RNA
taggttgagacttagatttatt

SEQ ID NO: 147282 - RNA, 22 nt, synthetic construct
  source 1..22: mol_type = other RNA
taggttgatggctgtactaagc

SEQ ID NO: 147283 - RNA, 22 nt, synthetic construct
  source 1..22: mol_type = other RNA
taggtttctcatttttcagggg

SEQ ID NO: 147284 - RNA, 22 nt, synthetic construct
  source 1..22: mol_type = other RNA
taggtttttcttgtgggtattt

SEQ ID NO: 147285 - RNA, 22 nt, synthetic construct
  source 1..22: mol_type = other RNA
taggttttttcattttactgct

SEQ ID NO: 147286 - RNA, 22 nt, synthetic construct
  source 1..22: mol_type = other RNA
tagtaaaaccaaatgtggatag

SEQ ID NO: 147287 - RNA, 22 nt, synthetic construct
  source 1..22: mol_type = other RNA
tagtaaagcaaatgtgactaga

SEQ ID NO: 147288 - RNA, 22 nt, synthetic construct
  source 1..22: mol_type = other RNA
tagtaaatatccgaaagaactg

SEQ ID NO: 147289 - RNA, 22 nt, synthetic construct
  source 1..22: mol_type = other RNA
tagtaaatatttaacaccatgg

SEQ ID NO: 147290 - RNA, 22 nt, synthetic construct
  source 1..22: mol_type = other RNA
tagtaaatctttggtgaaggtt

SEQ ID NO: 147291 - RNA, 22 nt, synthetic construct
  source 1..22: mol_type = other RNA
tagtaacttggtcgaaaacctg

SEQ ID NO: 147292 - RNA, 22 nt, synthetic construct
  source 1..22: mol_type = other RNA
tagtaactttctgcttaaagcc

SEQ ID NO: 147293 - RNA, 22 nt, synthetic construct
  source 1..22: mol_type = other RNA
tagtaagaggtatcaccatctg

SEQ ID NO: 147294 - RNA, 22 nt, synthetic construct
  source 1..22: mol_type = other RNA
tagtaaggatcgttagtatttt

SEQ ID NO: 147295 - RNA, 22 nt, synthetic construct
  source 1..22: mol_type = other RNA
tagtaagggtaaacagaattaa

SEQ ID NO: 147296 - RNA, 22 nt, synthetic construct
  source 1..22: mol_type = other RNA
tagtaagtaaaatcggaacagg

SEQ ID NO: 147297 - RNA, 22 nt, synthetic construct
  source 1..22: mol_type = other RNA
tagtaagtgtgagcaaaaatac

SEQ ID NO: 147298 - RNA, 22 nt, synthetic construct
  source 1..22: mol_type = other RNA
tagtaagttgtgtcatttttgt

SEQ ID NO: 147299 - RNA, 22 nt, synthetic construct
  source 1..22: mol_type = other RNA
tagtaataaaggcaatgctctc

SEQ ID NO: 147300 - RNA, 22 nt, synthetic construct
  source 1..22: mol_type = other RNA
tagtaattctccactttcatga

SEQ ID NO: 147301 - RNA, 22 nt, synthetic construct
  source 1..22: mol_type = other RNA
tagtacaaaagtgctgttgagg

SEQ ID NO: 147302 - RNA, 22 nt, synthetic construct
  source 1..22: mol_type = other RNA
tagtacactgttgatttagaaa

SEQ ID NO: 147303 - RNA, 22 nt, synthetic construct
  source 1..22: mol_type = other RNA
tagtacagccatcaacctaatg

SEQ ID NO: 147304 - RNA, 22 nt, synthetic construct
  source 1..22: mol_type = other RNA
tagtacagtgagtagaagagta

SEQ ID NO: 147305 - RNA, 22 nt, synthetic construct
  source 1..22: mol_type = other RNA
tagtacgtaacctaaagttgag

SEQ ID NO: 147306 - RNA, 22 nt, synthetic construct
  source 1..22: mol_type = other RNA
tagtacgtgcagagcaggggtg

SEQ ID NO: 147307 - RNA, 22 nt, synthetic construct
  source 1..22: mol_type = other RNA
tagtactgaccatctcagcaca

SEQ ID NO: 147308 - RNA, 22 nt, synthetic construct
  source 1..22: mol_type = other RNA
tagtacttctgagtgttacttg

SEQ ID NO: 147309 - RNA, 22 nt, synthetic construct
  source 1..22: mol_type = other RNA
tagtagaaagcaggttcatttt

SEQ ID NO: 147310 - RNA, 22 nt, synthetic construct
  source 1..22: mol_type = other RNA
tagtagaattctccagtgaagt

SEQ ID NO: 147311 - RNA, 22 nt, synthetic construct
  source 1..22: mol_type = other RNA
tagtagagatgaggttttacga

SEQ ID NO: 147312 - RNA, 22 nt, synthetic construct
  source 1..22: mol_type = other RNA
tagtagcagaatccccaaataa

SEQ ID NO: 147313 - RNA, 22 nt, synthetic construct
  source 1..22: mol_type = other RNA
tagtagctgtctttaatgtaaa

SEQ ID NO: 147314 - RNA, 22 nt, synthetic construct
  source 1..22: mol_type = other RNA
tagtagctgttgaattgttgcg

SEQ ID NO: 147315 - RNA, 22 nt, synthetic construct
  source 1..22: mol_type = other RNA
tagtagcttcaatgagggcaga

SEQ ID NO: 147316 - RNA, 22 nt, synthetic construct
  source 1..22: mol_type = other RNA
tagtaggaaaaccatgtcatgt

SEQ ID NO: 147317 - RNA, 22 nt, synthetic construct
  source 1..22: mol_type = other RNA
tagtaggatgaattacaaatga

SEQ ID NO: 147318 - RNA, 22 nt, synthetic construct
  source 1..22: mol_type = other RNA
tagtaggcaacatccctatgca

SEQ ID NO: 147319 - RNA, 22 nt, synthetic construct
  source 1..22: mol_type = other RNA
tagtaggtctccttgtatggag

SEQ ID NO: 147320 - RNA, 22 nt, synthetic construct
  source 1..22: mol_type = other RNA
tagtagtaagttgtgtcatttt

SEQ ID NO: 147321 - RNA, 22 nt, synthetic construct
  source 1..22: mol_type = other RNA
tagtagttaggtggtttgaacc

SEQ ID NO: 147322 - RNA, 22 nt, synthetic construct
  source 1..22: mol_type = other RNA
tagtagttgctcagaaaatttt

SEQ ID NO: 147323 - RNA, 22 nt, synthetic construct
  source 1..22: mol_type = other RNA
tagtataagagaaggaagcacc

SEQ ID NO: 147324 - RNA, 22 nt, synthetic construct
  source 1..22: mol_type = other RNA
tagtatacatgtttagcaagat

SEQ ID NO: 147325 - RNA, 22 nt, synthetic construct
  source 1..22: mol_type = other RNA
tagtatattttcaaggcttgtg

SEQ ID NO: 147326 - RNA, 22 nt, synthetic construct
  source 1..22: mol_type = other RNA
tagtatcaacctgcaggtattt

SEQ ID NO: 147327 - RNA, 22 nt, synthetic construct
  source 1..22: mol_type = other RNA
tagtatctcatgcttaggatcc

SEQ ID NO: 147328 - RNA, 22 nt, synthetic construct
  source 1..22: mol_type = other RNA
tagtattacctcccatgcattc

SEQ ID NO: 147329 - RNA, 22 nt, synthetic construct
  source 1..22: mol_type = other RNA
tagtattcaggacagattaaaa

SEQ ID NO: 147330 - RNA, 22 nt, synthetic construct
  source 1..22: mol_type = other RNA
tagtattccatggtatgtgcca

SEQ ID NO: 147331 - RNA, 22 nt, synthetic construct
  source 1..22: mol_type = other RNA
tagtattgaactgttacttgac

SEQ ID NO: 147332 - RNA, 22 nt, synthetic construct
  source 1..22: mol_type = other RNA
tagtattttgttgacatccttt

SEQ ID NO: 147333 - RNA, 22 nt, synthetic construct
  source 1..22: mol_type = other RNA
tagtcaacacttttccagtctt

SEQ ID NO: 147334 - RNA, 22 nt, synthetic construct
  source 1..22: mol_type = other RNA
tagtcaagtaacagttcaatac

SEQ ID NO: 147335 - RNA, 22 nt, synthetic construct
  source 1..22: mol_type = other RNA
tagtcaatgcaatgcgtgtgaa

SEQ ID NO: 147336 - RNA, 22 nt, synthetic construct
  source 1..22: mol_type = other RNA
tagtcacatttgctttactact

SEQ ID NO: 147337 - RNA, 22 nt, synthetic construct
  source 1..22: mol_type = other RNA
tagtcaccctacagactcaata

SEQ ID NO: 147338 - RNA, 22 nt, synthetic construct
  source 1..22: mol_type = other RNA
tagtcagacacactagctgacc

SEQ ID NO: 147339 - RNA, 22 nt, synthetic construct
  source 1..22: mol_type = other RNA
tagtcagcacactcttaataac

SEQ ID NO: 147340 - RNA, 22 nt, synthetic construct
  source 1..22: mol_type = other RNA
tagtcagtatatttactgcttg

SEQ ID NO: 147341 - RNA, 22 nt, synthetic construct
  source 1..22: mol_type = other RNA
tagtcagtgaagatgctgaact

SEQ ID NO: 147342 - RNA, 22 nt, synthetic construct
  source 1..22: mol_type = other RNA
tagtcatagcagtgggaagtgg

SEQ ID NO: 147343 - RNA, 22 nt, synthetic construct
  source 1..22: mol_type = other RNA
tagtcatcattattagcaaaca

SEQ ID NO: 147344 - RNA, 22 nt, synthetic construct
  source 1..22: mol_type = other RNA
tagtcatccactgcacagtatg

SEQ ID NO: 147345 - RNA, 22 nt, synthetic construct
  source 1..22: mol_type = other RNA
tagtcattccgctaaacatttt

SEQ ID NO: 147346 - RNA, 22 nt, synthetic construct
  source 1..22: mol_type = other RNA
tagtccactttccatcttaggc

SEQ ID NO: 147347 - RNA, 22 nt, synthetic construct
  source 1..22: mol_type = other RNA
tagtccatgaagaaaacactcc

SEQ ID NO: 147348 - RNA, 22 nt, synthetic construct
  source 1..22: mol_type = other RNA
tagtcccctagtggatgctggg

SEQ ID NO: 147349 - RNA, 22 nt, synthetic construct
  source 1..22: mol_type = other RNA
tagtccctgctacttgtggggc

SEQ ID NO: 147350 - RNA, 22 nt, synthetic construct
  source 1..22: mol_type = other RNA
tagtctcacgatactttttatt

SEQ ID NO: 147351 - RNA, 22 nt, synthetic construct
  source 1..22: mol_type = other RNA
tagtctccatacaaggagacct

SEQ ID NO: 147352 - RNA, 22 nt, synthetic construct
  source 1..22: mol_type = other RNA
tagtctcctatattgtcaatgg

SEQ ID NO: 147353 - RNA, 22 nt, synthetic construct
  source 1..22: mol_type = other RNA
tagtctcttcctgtatatctcc

SEQ ID NO: 147354 - RNA, 22 nt, synthetic construct
  source 1..22: mol_type = other RNA
tagtctgacttctctcagaggg

SEQ ID NO: 147355 - RNA, 22 nt, synthetic construct
  source 1..22: mol_type = other RNA
tagtctgtagcttcacgtgcat

SEQ ID NO: 147356 - RNA, 22 nt, synthetic construct
  source 1..22: mol_type = other RNA
tagtcttagctcttaagcttag

SEQ ID NO: 147357 - RNA, 22 nt, synthetic construct
  source 1..22: mol_type = other RNA
tagtcttccaaaatattgaaga

SEQ ID NO: 147358 - RNA, 22 nt, synthetic construct
  source 1..22: mol_type = other RNA
tagtcttccaattgcagaaaaa

SEQ ID NO: 147359 - RNA, 22 nt, synthetic construct
  source 1..22: mol_type = other RNA
tagtcttctcagatctgttgca

SEQ ID NO: 147360 - RNA, 22 nt, synthetic construct
  source 1..22: mol_type = other RNA
tagtcttgtcataacagtattg

SEQ ID NO: 147361 - RNA, 22 nt, synthetic construct
  source 1..22: mol_type = other RNA
tagtcttgtcttttctttttct

SEQ ID NO: 147362 - RNA, 22 nt, synthetic construct
  source 1..22: mol_type = other RNA
tagtgaaatagttggtcagaaa

SEQ ID NO: 147363 - RNA, 22 nt, synthetic construct
  source 1..22: mol_type = other RNA
tagtgaagcagagagagaagat

SEQ ID NO: 147364 - RNA, 22 nt, synthetic construct
  source 1..22: mol_type = other RNA
tagtgaagtcaatttcagatct

SEQ ID NO: 147365 - RNA, 22 nt, synthetic construct
  source 1..22: mol_type = other RNA
tagtgaagtcccatcttccata

SEQ ID NO: 147366 - RNA, 22 nt, synthetic construct
  source 1..22: mol_type = other RNA
tagtgaatgagaccaaatgcat

SEQ ID NO: 147367 - RNA, 22 nt, synthetic construct
  source 1..22: mol_type = other RNA
tagtgaattcacagtagaagac

SEQ ID NO: 147368 - RNA, 22 nt, synthetic construct
  source 1..22: mol_type = other RNA
tagtgaccctttgaagtatgta

SEQ ID NO: 147369 - RNA, 22 nt, synthetic construct
  source 1..22: mol_type = other RNA
tagtgactggcttaatgcatat

SEQ ID NO: 147370 - RNA, 22 nt, synthetic construct
  source 1..22: mol_type = other RNA
tagtgagccaaaatcgtgccac

SEQ ID NO: 147371 - RNA, 22 nt, synthetic construct
  source 1..22: mol_type = other RNA
tagtgagggaggccatcttcat

SEQ ID NO: 147372 - RNA, 22 nt, synthetic construct
  source 1..22: mol_type = other RNA
tagtgatgggagatggacactg

SEQ ID NO: 147373 - RNA, 22 nt, synthetic construct
  source 1..22: mol_type = other RNA
tagtgatgtcttttgaagaagt

SEQ ID NO: 147374 - RNA, 22 nt, synthetic construct
  source 1..22: mol_type = other RNA
tagtgatgttgagtatcttttc

SEQ ID NO: 147375 - RNA, 22 nt, synthetic construct
  source 1..22: mol_type = other RNA
tagtgattcacttttgagttca

SEQ ID NO: 147376 - RNA, 22 nt, synthetic construct
  source 1..22: mol_type = other RNA
tagtgattttaccaaggctaag

SEQ ID NO: 147377 - RNA, 22 nt, synthetic construct
  source 1..22: mol_type = other RNA
tagtgcagtatcttgaagaaac

SEQ ID NO: 147378 - RNA, 22 nt, synthetic construct
  source 1..22: mol_type = other RNA
tagtgccttcagaaggagtcca

SEQ ID NO: 147379 - RNA, 22 nt, synthetic construct
  source 1..22: mol_type = other RNA
tagtgctcttctgatcacagaa

SEQ ID NO: 147380 - RNA, 22 nt, synthetic construct
  source 1..22: mol_type = other RNA
tagtgctttttactttgcgaaa

SEQ ID NO: 147381 - RNA, 22 nt, synthetic construct
  source 1..22: mol_type = other RNA
tagtggaaaaactgcagcaatt

SEQ ID NO: 147382 - RNA, 22 nt, synthetic construct
  source 1..22: mol_type = other RNA
tagtggaagaatcaggtctctt

SEQ ID NO: 147383 - RNA, 22 nt, synthetic construct
  source 1..22: mol_type = other RNA
tagtggatgctggggacccctc

SEQ ID NO: 147384 - RNA, 22 nt, synthetic construct
  source 1..22: mol_type = other RNA
tagtggcagccccgcttcagtt

SEQ ID NO: 147385 - RNA, 22 nt, synthetic construct
  source 1..22: mol_type = other RNA
tagtggctcacagtgctccata

SEQ ID NO: 147386 - RNA, 22 nt, synthetic construct
  source 1..22: mol_type = other RNA
tagtggctcatacttgctttat

SEQ ID NO: 147387 - RNA, 22 nt, synthetic construct
  source 1..22: mol_type = other RNA
tagtggctgcaccattttttca

SEQ ID NO: 147388 - RNA, 22 nt, synthetic construct
  source 1..22: mol_type = other RNA
tagtgggaccccgtctctgcaa

SEQ ID NO: 147389 - RNA, 22 nt, synthetic construct
  source 1..22: mol_type = other RNA
tagtgggatcaaaccatgttca

SEQ ID NO: 147390 - RNA, 22 nt, synthetic construct
  source 1..22: mol_type = other RNA
tagtgggtagaagcagcaaggg

SEQ ID NO: 147391 - RNA, 22 nt, synthetic construct
  source 1..22: mol_type = other RNA
tagtgggtcgggtgtcagaaac

SEQ ID NO: 147392 - RNA, 22 nt, synthetic construct
  source 1..22: mol_type = other RNA
tagtggtaactagatgcctcga

SEQ ID NO: 147393 - RNA, 22 nt, synthetic construct
  source 1..22: mol_type = other RNA
tagtggtaaggagccaaacatc

SEQ ID NO: 147394 - RNA, 22 nt, synthetic construct
  source 1..22: mol_type = other RNA
tagtggtgcttaattcaaacaa

SEQ ID NO: 147395 - RNA, 22 nt, synthetic construct
  source 1..22: mol_type = other RNA
tagtggtggtagtaaggatcgt

SEQ ID NO: 147396 - RNA, 22 nt, synthetic construct
  source 1..22: mol_type = other RNA
tagtggtgtgtgactgtagtcc

SEQ ID NO: 147397 - RNA, 22 nt, synthetic construct
  source 1..22: mol_type = other RNA
tagtggttgacccataaactga

SEQ ID NO: 147398 - RNA, 22 nt, synthetic construct
  source 1..22: mol_type = other RNA
tagtggtttgaagcttcacttc

SEQ ID NO: 147399 - RNA, 22 nt, synthetic construct
  source 1..22: mol_type = other RNA
tagtgtattgtaccttgattta

SEQ ID NO: 147400 - RNA, 22 nt, synthetic construct
  source 1..22: mol_type = other RNA
tagtgtcctcaggctccaggta

SEQ ID NO: 147401 - RNA, 22 nt, synthetic construct
  source 1..22: mol_type = other RNA
tagtgtctaatgggtacagggt

SEQ ID NO: 147402 - RNA, 22 nt, synthetic construct
  source 1..22: mol_type = other RNA
tagtgtctcagcctcccaagta

SEQ ID NO: 147403 - RNA, 22 nt, synthetic construct
  source 1..22: mol_type = other RNA
tagtgtctccataccccctgga

SEQ ID NO: 147404 - RNA, 22 nt, synthetic construct
  source 1..22: mol_type = other RNA
tagtgtcttaatcctattttgt

SEQ ID NO: 147405 - RNA, 22 nt, synthetic construct
  source 1..22: mol_type = other RNA
tagtgtcttagtctgacttctc

SEQ ID NO: 147406 - RNA, 22 nt, synthetic construct
  source 1..22: mol_type = other RNA
tagtgtgaatgaggagtgaatt

SEQ ID NO: 147407 - RNA, 22 nt, synthetic construct
  source 1..22: mol_type = other RNA
tagtgtgcatgtgttgtgcaca

SEQ ID NO: 147408 - RNA, 22 nt, synthetic construct
  source 1..22: mol_type = other RNA
tagtgtgtctgactacactgaa

SEQ ID NO: 147409 - RNA, 22 nt, synthetic construct
  source 1..22: mol_type = other RNA
tagtgtgttgactgacataact

SEQ ID NO: 147410 - RNA, 22 nt, synthetic construct
  source 1..22: mol_type = other RNA
tagtgttaattcttccttaatg

SEQ ID NO: 147411 - RNA, 22 nt, synthetic construct
  source 1..22: mol_type = other RNA
tagtgttcccttcttaaatgtg

SEQ ID NO: 147412 - RNA, 22 nt, synthetic construct
  source 1..22: mol_type = other RNA
tagtgttctgtgtttatgaatg

SEQ ID NO: 147413 - RNA, 22 nt, synthetic construct
  source 1..22: mol_type = other RNA
tagtgttgcttggtgttgactg

SEQ ID NO: 147414 - RNA, 22 nt, synthetic construct
  source 1..22: mol_type = other RNA
tagtgtttccttccagatgttt

SEQ ID NO: 147415 - RNA, 22 nt, synthetic construct
  source 1..22: mol_type = other RNA
tagttaaacatgtaaaacagac

SEQ ID NO: 147416 - RNA, 22 nt, synthetic construct
  source 1..22: mol_type = other RNA
tagttaaccttctggggttcaa

SEQ ID NO: 147417 - RNA, 22 nt, synthetic construct
  source 1..22: mol_type = other RNA
tagttaacgtttatctacagag

SEQ ID NO: 147418 - RNA, 22 nt, synthetic construct
  source 1..22: mol_type = other RNA
tagttaagtctgaaagcttctg

SEQ ID NO: 147419 - RNA, 22 nt, synthetic construct
  source 1..22: mol_type = other RNA
tagttaataaaggtgctaattg

SEQ ID NO: 147420 - RNA, 22 nt, synthetic construct
  source 1..22: mol_type = other RNA
tagttaatgtgtgaagaaggaa

SEQ ID NO: 147421 - RNA, 22 nt, synthetic construct
  source 1..22: mol_type = other RNA
tagttacaactactcgggaggc

SEQ ID NO: 147422 - RNA, 22 nt, synthetic construct
  source 1..22: mol_type = other RNA
tagttacacaagtgtttcattt

SEQ ID NO: 147423 - RNA, 22 nt, synthetic construct
  source 1..22: mol_type = other RNA
tagttacatgaggtcacccaag

SEQ ID NO: 147424 - RNA, 22 nt, synthetic construct
  source 1..22: mol_type = other RNA
tagttaccactagcaaactact

SEQ ID NO: 147425 - RNA, 22 nt, synthetic construct
  source 1..22: mol_type = other RNA
tagttactcaaatccaaattca

SEQ ID NO: 147426 - RNA, 22 nt, synthetic construct
  source 1..22: mol_type = other RNA
tagttaggtggtttgaacccca

SEQ ID NO: 147427 - RNA, 22 nt, synthetic construct
  source 1..22: mol_type = other RNA
tagttagtttgttgacccaatc

SEQ ID NO: 147428 - RNA, 22 nt, synthetic construct
  source 1..22: mol_type = other RNA
tagttatctcttagacctccta

SEQ ID NO: 147429 - RNA, 22 nt, synthetic construct
  source 1..22: mol_type = other RNA
tagttatgataaaaataacggg

SEQ ID NO: 147430 - RNA, 22 nt, synthetic construct
  source 1..22: mol_type = other RNA
tagttattaaatgagacaccta

SEQ ID NO: 147431 - RNA, 22 nt, synthetic construct
  source 1..22: mol_type = other RNA
tagttcaagatgcataccaagc

SEQ ID NO: 147432 - RNA, 22 nt, synthetic construct
  source 1..22: mol_type = other RNA
tagttcacctctccgggtaaaa

SEQ ID NO: 147433 - RNA, 22 nt, synthetic construct
  source 1..22: mol_type = other RNA
tagttcatgttagcataattcg

SEQ ID NO: 147434 - RNA, 22 nt, synthetic construct
  source 1..22: mol_type = other RNA
tagttcctccttttgtagaggg

SEQ ID NO: 147435 - RNA, 22 nt, synthetic construct
  source 1..22: mol_type = other RNA
tagttccttttaagggaaacac

SEQ ID NO: 147436 - RNA, 22 nt, synthetic construct
  source 1..22: mol_type = other RNA
tagttctaataaacgcggaatg

SEQ ID NO: 147437 - RNA, 22 nt, synthetic construct
  source 1..22: mol_type = other RNA
tagttctagctctgtctttttt

SEQ ID NO: 147438 - RNA, 22 nt, synthetic construct
  source 1..22: mol_type = other RNA
tagttctgcttccacatttcta

SEQ ID NO: 147439 - RNA, 22 nt, synthetic construct
  source 1..22: mol_type = other RNA
tagttctggtgtcgtttatttc

SEQ ID NO: 147440 - RNA, 22 nt, synthetic construct
  source 1..22: mol_type = other RNA
tagttgactcctaaaacatggt

SEQ ID NO: 147441 - RNA, 22 nt, synthetic construct
  source 1..22: mol_type = other RNA
tagttgattatttttacccaac

SEQ ID NO: 147442 - RNA, 22 nt, synthetic construct
  source 1..22: mol_type = other RNA
tagttgcacggtgaagaaccga

SEQ ID NO: 147443 - RNA, 22 nt, synthetic construct
  source 1..22: mol_type = other RNA
tagttgcagattcatcttgact

SEQ ID NO: 147444 - RNA, 22 nt, synthetic construct
  source 1..22: mol_type = other RNA
tagttgctcagaaaattttctt

SEQ ID NO: 147445 - RNA, 22 nt, synthetic construct
  source 1..22: mol_type = other RNA
tagttggtcagaaaaatggaat

SEQ ID NO: 147446 - RNA, 22 nt, synthetic construct
  source 1..22: mol_type = other RNA
tagttgtaactacagacatgcc

SEQ ID NO: 147447 - RNA, 22 nt, synthetic construct
  source 1..22: mol_type = other RNA
tagttgtacttgacacaaagga

SEQ ID NO: 147448 - RNA, 22 nt, synthetic construct
  source 1..22: mol_type = other RNA
tagttgtgctacctcaaattgt

SEQ ID NO: 147449 - RNA, 22 nt, synthetic construct
  source 1..22: mol_type = other RNA
tagtttaattgggggaaaattg

SEQ ID NO: 147450 - RNA, 22 nt, synthetic construct
  source 1..22: mol_type = other RNA
tagtttacactatggcttttga

SEQ ID NO: 147451 - RNA, 22 nt, synthetic construct
  source 1..22: mol_type = other RNA
tagtttagtgcagtatcttgaa

SEQ ID NO: 147452 - RNA, 22 nt, synthetic construct
  source 1..22: mol_type = other RNA
tagtttagttactcaaatccaa

SEQ ID NO: 147453 - RNA, 22 nt, synthetic construct
  source 1..22: mol_type = other RNA
tagtttattcatacgttaactg

SEQ ID NO: 147454 - RNA, 22 nt, synthetic construct
  source 1..22: mol_type = other RNA
tagtttcatctatgtcccctgg

SEQ ID NO: 147455 - RNA, 22 nt, synthetic construct
  source 1..22: mol_type = other RNA
tagtttccatggaggggccagt

SEQ ID NO: 147456 - RNA, 22 nt, synthetic construct
  source 1..22: mol_type = other RNA
tagtttctcaacttagccttgg

SEQ ID NO: 147457 - RNA, 22 nt, synthetic construct
  source 1..22: mol_type = other RNA
tagtttctttttgttttctcct

SEQ ID NO: 147458 - RNA, 22 nt, synthetic construct
  source 1..22: mol_type = other RNA
tagtttgaggtgtacaattagg

SEQ ID NO: 147459 - RNA, 22 nt, synthetic construct
  source 1..22: mol_type = other RNA
tagtttgagtatttcatgtact

SEQ ID NO: 147460 - RNA, 22 nt, synthetic construct
  source 1..22: mol_type = other RNA
tagtttgcaatacagttaacgt

SEQ ID NO: 147461 - RNA, 22 nt, synthetic construct
  source 1..22: mol_type = other RNA
tagtttgcacgtttttagaaat

SEQ ID NO: 147462 - RNA, 22 nt, synthetic construct
  source 1..22: mol_type = other RNA
tagtttgctagtggtaactaga

SEQ ID NO: 147463 - RNA, 22 nt, synthetic construct
  source 1..22: mol_type = other RNA
tagtttgttgacccaatcatgt

SEQ ID NO: 147464 - RNA, 22 nt, synthetic construct
  source 1..22: mol_type = other RNA
tagttttcacttttgtgcaaca

SEQ ID NO: 147465 - RNA, 22 nt, synthetic construct
  source 1..22: mol_type = other RNA
tagttttccaatccgggaacat

SEQ ID NO: 147466 - RNA, 22 nt, synthetic construct
  source 1..22: mol_type = other RNA
tagttttccagtatattcatag

SEQ ID NO: 147467 - RNA, 22 nt, synthetic construct
  source 1..22: mol_type = other RNA
tagttttccctgtgtatgtgta

SEQ ID NO: 147468 - RNA, 22 nt, synthetic construct
  source 1..22: mol_type = other RNA
tagttttggtgtcatttttaag

SEQ ID NO: 147469 - RNA, 22 nt, synthetic construct
  source 1..22: mol_type = other RNA
tagttttttggtagataccaga

SEQ ID NO: 147470 - RNA, 22 nt, synthetic construct
  source 1..22: mol_type = other RNA
tataaaaagacacaaaagagct

SEQ ID NO: 147471 - RNA, 22 nt, synthetic construct
  source 1..22: mol_type = other RNA
tataaaaagcctctgtggacca

SEQ ID NO: 147472 - RNA, 22 nt, synthetic construct
  source 1..22: mol_type = other RNA
tataaaaatggcacatactgca

SEQ ID NO: 147473 - RNA, 22 nt, synthetic construct
  source 1..22: mol_type = other RNA
tataaaaattccgctctggttt

SEQ ID NO: 147474 - RNA, 22 nt, synthetic construct
  source 1..22: mol_type = other RNA
tataaaactcttagcttagaag

SEQ ID NO: 147475 - RNA, 22 nt, synthetic construct
  source 1..22: mol_type = other RNA
tataaaataggaagtccatgaa

SEQ ID NO: 147476 - RNA, 22 nt, synthetic construct
  source 1..22: mol_type = other RNA
tataaacgtgtgtgtaagcaca

SEQ ID NO: 147477 - RNA, 22 nt, synthetic construct
  source 1..22: mol_type = other RNA
tataaactcttccttatccgat

SEQ ID NO: 147478 - RNA, 22 nt, synthetic construct
  source 1..22: mol_type = other RNA
tataaactggaaggaaataaga

SEQ ID NO: 147479 - RNA, 22 nt, synthetic construct
  source 1..22: mol_type = other RNA
tataaacttccctctcagtggt

SEQ ID NO: 147480 - RNA, 22 nt, synthetic construct
  source 1..22: mol_type = other RNA
tataaagaacatgattgggtca

SEQ ID NO: 147481 - RNA, 22 nt, synthetic construct
  source 1..22: mol_type = other RNA
tataaagaactccaacaattca

SEQ ID NO: 147482 - RNA, 22 nt, synthetic construct
  source 1..22: mol_type = other RNA
tataaaggatgcacaagacaga

SEQ ID NO: 147483 - RNA, 22 nt, synthetic construct
  source 1..22: mol_type = other RNA
tataaagtttccgttttgcaag

SEQ ID NO: 147484 - RNA, 22 nt, synthetic construct
  source 1..22: mol_type = other RNA
tataaataaaatgtctggccgg

SEQ ID NO: 147485 - RNA, 22 nt, synthetic construct
  source 1..22: mol_type = other RNA
tataaatacgtgtatactgggt

SEQ ID NO: 147486 - RNA, 22 nt, synthetic construct
  source 1..22: mol_type = other RNA
tataaatgaggtatcatttcca

SEQ ID NO: 147487 - RNA, 22 nt, synthetic construct
  source 1..22: mol_type = other RNA
tataaatgatgagctactgcat

SEQ ID NO: 147488 - RNA, 22 nt, synthetic construct
  source 1..22: mol_type = other RNA
tataaatgctcagtgggttcaa

SEQ ID NO: 147489 - RNA, 22 nt, synthetic construct
  source 1..22: mol_type = other RNA
tataaatgttcagtttatgggt

SEQ ID NO: 147490 - RNA, 22 nt, synthetic construct
  source 1..22: mol_type = other RNA
tataacagatggaactctattt

SEQ ID NO: 147491 - RNA, 22 nt, synthetic construct
  source 1..22: mol_type = other RNA
tataacataaaagcgtactgtg

SEQ ID NO: 147492 - RNA, 22 nt, synthetic construct
  source 1..22: mol_type = other RNA
tataacattaccaataaaagcc

SEQ ID NO: 147493 - RNA, 22 nt, synthetic construct
  source 1..22: mol_type = other RNA
tataaccacgagtaatggatgt

SEQ ID NO: 147494 - RNA, 22 nt, synthetic construct
  source 1..22: mol_type = other RNA
tataacccgttttttccttcat

SEQ ID NO: 147495 - RNA, 22 nt, synthetic construct
  source 1..22: mol_type = other RNA
tataaccttgaacttccaggct

SEQ ID NO: 147496 - RNA, 22 nt, synthetic construct
  source 1..22: mol_type = other RNA
tataacgatagtctcctatatt

SEQ ID NO: 147497 - RNA, 22 nt, synthetic construct
  source 1..22: mol_type = other RNA
tataactgaacatgtatgtttc

SEQ ID NO: 147498 - RNA, 22 nt, synthetic construct
  source 1..22: mol_type = other RNA
tataagacccagtggctagtgt

SEQ ID NO: 147499 - RNA, 22 nt, synthetic construct
  source 1..22: mol_type = other RNA
tataagagaaggaagcaccaac

SEQ ID NO: 147500 - RNA, 22 nt, synthetic construct
  source 1..22: mol_type = other RNA
tataagagtgggcaaaaaagtc

SEQ ID NO: 147501 - RNA, 22 nt, synthetic construct
  source 1..22: mol_type = other RNA
tataagatgatctaaatggtgt

SEQ ID NO: 147502 - RNA, 22 nt, synthetic construct
  source 1..22: mol_type = other RNA
tataagcaaagatatgggttat

SEQ ID NO: 147503 - RNA, 22 nt, synthetic construct
  source 1..22: mol_type = other RNA
tataagccaatatccctgataa

SEQ ID NO: 147504 - RNA, 22 nt, synthetic construct
  source 1..22: mol_type = other RNA
tataagcttcctctggctgacc

SEQ ID NO: 147505 - RNA, 22 nt, synthetic construct
  source 1..22: mol_type = other RNA
tataaggggaatcatgcagtac

SEQ ID NO: 147506 - RNA, 22 nt, synthetic construct
  source 1..22: mol_type = other RNA
tataagggtgataaaaaggagg

SEQ ID NO: 147507 - RNA, 22 nt, synthetic construct
  source 1..22: mol_type = other RNA
tataagtggaatcattccgtat

SEQ ID NO: 147508 - RNA, 22 nt, synthetic construct
  source 1..22: mol_type = other RNA
tataagttcaaagaaactacct

SEQ ID NO: 147509 - RNA, 22 nt, synthetic construct
  source 1..22: mol_type = other RNA
tataagttgggagtctatttct

SEQ ID NO: 147510 - RNA, 22 nt, synthetic construct
  source 1..22: mol_type = other RNA
tataatcagccgtgattgcacc

SEQ ID NO: 147511 - RNA, 22 nt, synthetic construct
  source 1..22: mol_type = other RNA
tataatccaactgcagtctgtc

SEQ ID NO: 147512 - RNA, 22 nt, synthetic construct
  source 1..22: mol_type = other RNA
tataatccagatggacaaatta

SEQ ID NO: 147513 - RNA, 22 nt, synthetic construct
  source 1..22: mol_type = other RNA
tataatccattgggtacatacc

SEQ ID NO: 147514 - RNA, 22 nt, synthetic construct
  source 1..22: mol_type = other RNA
tataatctaaccctcctcctct

SEQ ID NO: 147515 - RNA, 22 nt, synthetic construct
  source 1..22: mol_type = other RNA
tataatgagatagaccagatgc

SEQ ID NO: 147516 - RNA, 22 nt, synthetic construct
  source 1..22: mol_type = other RNA
tataatggagtactatgcagca

SEQ ID NO: 147517 - RNA, 22 nt, synthetic construct
  source 1..22: mol_type = other RNA
tataatgggcaatcagaaaaaa

SEQ ID NO: 147518 - RNA, 22 nt, synthetic construct
  source 1..22: mol_type = other RNA
tataattctgccttcaatgttt

SEQ ID NO: 147519 - RNA, 22 nt, synthetic construct
  source 1..22: mol_type = other RNA
tataatttctgagagtattgcc

SEQ ID NO: 147520 - RNA, 22 nt, synthetic construct
  source 1..22: mol_type = other RNA
tataattttttgagacggaatc

SEQ ID NO: 147521 - RNA, 22 nt, synthetic construct
  source 1..22: mol_type = other RNA
tatacaaataactccagctttt

SEQ ID NO: 147522 - RNA, 22 nt, synthetic construct
  source 1..22: mol_type = other RNA
tatacaaccggaaaatgcttaa

SEQ ID NO: 147523 - RNA, 22 nt, synthetic construct
  source 1..22: mol_type = other RNA
tatacacaaaaagatctgtgga

SEQ ID NO: 147524 - RNA, 22 nt, synthetic construct
  source 1..22: mol_type = other RNA
tatacacacataagggggaatc

SEQ ID NO: 147525 - RNA, 22 nt, synthetic construct
  source 1..22: mol_type = other RNA
tatacagcaaatctctagaact

SEQ ID NO: 147526 - RNA, 22 nt, synthetic construct
  source 1..22: mol_type = other RNA
tatacaggaagagactatctct

SEQ ID NO: 147527 - RNA, 22 nt, synthetic construct
  source 1..22: mol_type = other RNA
tatacaggtgcttacagactga

SEQ ID NO: 147528 - RNA, 22 nt, synthetic construct
  source 1..22: mol_type = other RNA
tatacagttggaactcttgcgg

SEQ ID NO: 147529 - RNA, 22 nt, synthetic construct
  source 1..22: mol_type = other RNA
tatacatgacatggttttccta

SEQ ID NO: 147530 - RNA, 22 nt, synthetic construct
  source 1..22: mol_type = other RNA
tatacatgtttagcaagattac

SEQ ID NO: 147531 - RNA, 22 nt, synthetic construct
  source 1..22: mol_type = other RNA
tatacccaagtaaacaactgac

SEQ ID NO: 147532 - RNA, 22 nt, synthetic construct
  source 1..22: mol_type = other RNA
tatacccaggtgtgagattgat

SEQ ID NO: 147533 - RNA, 22 nt, synthetic construct
  source 1..22: mol_type = other RNA
tatacccttctgttaatagata

SEQ ID NO: 147534 - RNA, 22 nt, synthetic construct
  source 1..22: mol_type = other RNA
tatacctgtagaaaatagggac

SEQ ID NO: 147535 - RNA, 22 nt, synthetic construct
  source 1..22: mol_type = other RNA
tatacctgttgaatagcaactg

SEQ ID NO: 147536 - RNA, 22 nt, synthetic construct
  source 1..22: mol_type = other RNA
tataccttatgtgaaagtagag

SEQ ID NO: 147537 - RNA, 22 nt, synthetic construct
  source 1..22: mol_type = other RNA
tatacggaatgattccacttat

SEQ ID NO: 147538 - RNA, 22 nt, synthetic construct
  source 1..22: mol_type = other RNA
tatacgtatttatcatgtcttc

SEQ ID NO: 147539 - RNA, 22 nt, synthetic construct
  source 1..22: mol_type = other RNA
tatactaaatacaccaaactca

SEQ ID NO: 147540 - RNA, 22 nt, synthetic construct
  source 1..22: mol_type = other RNA
tatactagtagaaagcaggttc

SEQ ID NO: 147541 - RNA, 22 nt, synthetic construct
  source 1..22: mol_type = other RNA
tatactctgagacaggatccag

SEQ ID NO: 147542 - RNA, 22 nt, synthetic construct
  source 1..22: mol_type = other RNA
tatactgaagttctcaggggta

SEQ ID NO: 147543 - RNA, 22 nt, synthetic construct
  source 1..22: mol_type = other RNA
tatactgactagtggctcatac

SEQ ID NO: 147544 - RNA, 22 nt, synthetic construct
  source 1..22: mol_type = other RNA
tatactggaaaactagagatgg

SEQ ID NO: 147545 - RNA, 22 nt, synthetic construct
  source 1..22: mol_type = other RNA
tatactgggtgtgatggcgcat

SEQ ID NO: 147546 - RNA, 22 nt, synthetic construct
  source 1..22: mol_type = other RNA
tatactgtaaccctgtttccct

SEQ ID NO: 147547 - RNA, 22 nt, synthetic construct
  source 1..22: mol_type = other RNA
tatacttcaatgctacagtaag

SEQ ID NO: 147548 - RNA, 22 nt, synthetic construct
  source 1..22: mol_type = other RNA
tatacttcatctttcctgatca

SEQ ID NO: 147549 - RNA, 22 nt, synthetic construct
  source 1..22: mol_type = other RNA
tatacttgtcaagttctgattt

SEQ ID NO: 147550 - RNA, 22 nt, synthetic construct
  source 1..22: mol_type = other RNA
tatagaaaggagaccagttagg

SEQ ID NO: 147551 - RNA, 22 nt, synthetic construct
  source 1..22: mol_type = other RNA
tatagaaggccagagggaatct

SEQ ID NO: 147552 - RNA, 22 nt, synthetic construct
  source 1..22: mol_type = other RNA
tatagaagtaaatcccggccag

SEQ ID NO: 147553 - RNA, 22 nt, synthetic construct
  source 1..22: mol_type = other RNA
tatagacagcatccccagaaag

SEQ ID NO: 147554 - RNA, 22 nt, synthetic construct
  source 1..22: mol_type = other RNA
tatagacccaaagcaaaagcaa

SEQ ID NO: 147555 - RNA, 22 nt, synthetic construct
  source 1..22: mol_type = other RNA
tatagagggcctaaataaaaca

SEQ ID NO: 147556 - RNA, 22 nt, synthetic construct
  source 1..22: mol_type = other RNA
tatagatgacgaaagtgaagcc

SEQ ID NO: 147557 - RNA, 22 nt, synthetic construct
  source 1..22: mol_type = other RNA
tatagccataagagtccccaac

SEQ ID NO: 147558 - RNA, 22 nt, synthetic construct
  source 1..22: mol_type = other RNA
tatagcgagacctcatctctgc

SEQ ID NO: 147559 - RNA, 22 nt, synthetic construct
  source 1..22: mol_type = other RNA
tatagctccaaaagcgaaaggc

SEQ ID NO: 147560 - RNA, 22 nt, synthetic construct
  source 1..22: mol_type = other RNA
tatagctgagaagtaacattac

SEQ ID NO: 147561 - RNA, 22 nt, synthetic construct
  source 1..22: mol_type = other RNA
tatagcttctgagctgttaatg

SEQ ID NO: 147562 - RNA, 22 nt, synthetic construct
  source 1..22: mol_type = other RNA
tataggagactatcgttatatc

SEQ ID NO: 147563 - RNA, 22 nt, synthetic construct
  source 1..22: mol_type = other RNA
tataggagttcattcgtagcag

SEQ ID NO: 147564 - RNA, 22 nt, synthetic construct
  source 1..22: mol_type = other RNA
tataggcaatgagtctgacata

SEQ ID NO: 147565 - RNA, 22 nt, synthetic construct
  source 1..22: mol_type = other RNA
tataggcaatttagaattctct

SEQ ID NO: 147566 - RNA, 22 nt, synthetic construct
  source 1..22: mol_type = other RNA
tataggggaactcttgtagtat

SEQ ID NO: 147567 - RNA, 22 nt, synthetic construct
  source 1..22: mol_type = other RNA
tataggtagtacatattcattg

SEQ ID NO: 147568 - RNA, 22 nt, synthetic construct
  source 1..22: mol_type = other RNA
tataggttgaatagggcctcaa

SEQ ID NO: 147569 - RNA, 22 nt, synthetic construct
  source 1..22: mol_type = other RNA
tatagtattacctcccatgcat

SEQ ID NO: 147570 - RNA, 22 nt, synthetic construct
  source 1..22: mol_type = other RNA
tatagtcattccgctaaacatt

SEQ ID NO: 147571 - RNA, 22 nt, synthetic construct
  source 1..22: mol_type = other RNA
tatagtcttagctcttaagctt

SEQ ID NO: 147572 - RNA, 22 nt, synthetic construct
  source 1..22: mol_type = other RNA
tatagtggctgcaccatttttt

SEQ ID NO: 147573 - RNA, 22 nt, synthetic construct
  source 1..22: mol_type = other RNA
tatagtgggaccccgtctctgc

SEQ ID NO: 147574 - RNA, 22 nt, synthetic construct
  source 1..22: mol_type = other RNA
tatagtggtaaggagccaaaca

SEQ ID NO: 147575 - RNA, 22 nt, synthetic construct
  source 1..22: mol_type = other RNA
tatagtgtttccttccagatgt

SEQ ID NO: 147576 - RNA, 22 nt, synthetic construct
  source 1..22: mol_type = other RNA
tatagttaagtctgaaagcttc

SEQ ID NO: 147577 - RNA, 22 nt, synthetic construct
  source 1..22: mol_type = other RNA
tatagtttaattgggggaaaat

SEQ ID NO: 147578 - RNA, 22 nt, synthetic construct
  source 1..22: mol_type = other RNA
tatataaatgctcagtgggttc

SEQ ID NO: 147579 - RNA, 22 nt, synthetic construct
  source 1..22: mol_type = other RNA
tatatacccttctgttaataga

SEQ ID NO: 147580 - RNA, 22 nt, synthetic construct
  source 1..22: mol_type = other RNA
tatatacggaatgattccactt

SEQ ID NO: 147581 - RNA, 22 nt, synthetic construct
  source 1..22: mol_type = other RNA
tatatactctgagacaggatcc

SEQ ID NO: 147582 - RNA, 22 nt, synthetic construct
  source 1..22: mol_type = other RNA
tatatactgaagttctcagggg

SEQ ID NO: 147583 - RNA, 22 nt, synthetic construct
  source 1..22: mol_type = other RNA
tatatatcatagagtaccaggt

SEQ ID NO: 147584 - RNA, 22 nt, synthetic construct
  source 1..22: mol_type = other RNA
tatatatgatgatttttgccag

SEQ ID NO: 147585 - RNA, 22 nt, synthetic construct
  source 1..22: mol_type = other RNA
tatatatgctccctaaatacac

SEQ ID NO: 147586 - RNA, 22 nt, synthetic construct
  source 1..22: mol_type = other RNA
tatatcatagagtaccaggtca

SEQ ID NO: 147587 - RNA, 22 nt, synthetic construct
  source 1..22: mol_type = other RNA
tatatcatcttaagaaccatac

SEQ ID NO: 147588 - RNA, 22 nt, synthetic construct
  source 1..22: mol_type = other RNA
tatatccagattgatatctgag

SEQ ID NO: 147589 - RNA, 22 nt, synthetic construct
  source 1..22: mol_type = other RNA
tatatcccaaattggcatttaa

SEQ ID NO: 147590 - RNA, 22 nt, synthetic construct
  source 1..22: mol_type = other RNA
tatatcctaaacacttagcatg

SEQ ID NO: 147591 - RNA, 22 nt, synthetic construct
  source 1..22: mol_type = other RNA
tatatcctcagggtaggaaaag

SEQ ID NO: 147592 - RNA, 22 nt, synthetic construct
  source 1..22: mol_type = other RNA
tatatctccttttaagagtgaa

SEQ ID NO: 147593 - RNA, 22 nt, synthetic construct
  source 1..22: mol_type = other RNA
tatatctgtctgggataatgag

SEQ ID NO: 147594 - RNA, 22 nt, synthetic construct
  source 1..22: mol_type = other RNA
tatatctttggaaaaatgtccg

SEQ ID NO: 147595 - RNA, 22 nt, synthetic construct
  source 1..22: mol_type = other RNA
tatatgaaaagcccaatctaca

SEQ ID NO: 147596 - RNA, 22 nt, synthetic construct
  source 1..22: mol_type = other RNA
tatatgaaaagcttcccccctc

SEQ ID NO: 147597 - RNA, 22 nt, synthetic construct
  source 1..22: mol_type = other RNA
tatatgaataaaccacgcagtt

SEQ ID NO: 147598 - RNA, 22 nt, synthetic construct
  source 1..22: mol_type = other RNA
tatatgatccagcagtttcact

SEQ ID NO: 147599 - RNA, 22 nt, synthetic construct
  source 1..22: mol_type = other RNA
tatatgatgatttttgccagtg

SEQ ID NO: 147600 - RNA, 22 nt, synthetic construct
  source 1..22: mol_type = other RNA
tatatgcacaatggaatattac

SEQ ID NO: 147601 - RNA, 22 nt, synthetic construct
  source 1..22: mol_type = other RNA
tatatgcattaagccagtcact

SEQ ID NO: 147602 - RNA, 22 nt, synthetic construct
  source 1..22: mol_type = other RNA
tatatgcattcccatgttcact

SEQ ID NO: 147603 - RNA, 22 nt, synthetic construct
  source 1..22: mol_type = other RNA
tatatgcctagatgattcgcat

SEQ ID NO: 147604 - RNA, 22 nt, synthetic construct
  source 1..22: mol_type = other RNA
tatatgcctagatttcaatctg

SEQ ID NO: 147605 - RNA, 22 nt, synthetic construct
  source 1..22: mol_type = other RNA
tatatgctccctaaatacacat

SEQ ID NO: 147606 - RNA, 22 nt, synthetic construct
  source 1..22: mol_type = other RNA
tatatggtctaccatgttgttc

SEQ ID NO: 147607 - RNA, 22 nt, synthetic construct
  source 1..22: mol_type = other RNA
tatatggtttaaggtaagggtc

SEQ ID NO: 147608 - RNA, 22 nt, synthetic construct
  source 1..22: mol_type = other RNA
tatatgttgatgtaatggatca

SEQ ID NO: 147609 - RNA, 22 nt, synthetic construct
  source 1..22: mol_type = other RNA
tatattaattctgaggcctcct

SEQ ID NO: 147610 - RNA, 22 nt, synthetic construct
  source 1..22: mol_type = other RNA
tatattatggtctttttccagg

SEQ ID NO: 147611 - RNA, 22 nt, synthetic construct
  source 1..22: mol_type = other RNA
tatattatgtgcaagttctctt

SEQ ID NO: 147612 - RNA, 22 nt, synthetic construct
  source 1..22: mol_type = other RNA
tatattcatagtagctgttgaa

SEQ ID NO: 147613 - RNA, 22 nt, synthetic construct
  source 1..22: mol_type = other RNA
tatattctaaacctgaggtctt

SEQ ID NO: 147614 - RNA, 22 nt, synthetic construct
  source 1..22: mol_type = other RNA
tatattctaagtttgccaaaga

SEQ ID NO: 147615 - RNA, 22 nt, synthetic construct
  source 1..22: mol_type = other RNA
tatattctgtgaattgtgacag

SEQ ID NO: 147616 - RNA, 22 nt, synthetic construct
  source 1..22: mol_type = other RNA
tatattgtcaatggggaacttt

SEQ ID NO: 147617 - RNA, 22 nt, synthetic construct
  source 1..22: mol_type = other RNA
tatatttactagatcaagccct

SEQ ID NO: 147618 - RNA, 22 nt, synthetic construct
  source 1..22: mol_type = other RNA
tatatttactgcttgctgcact

SEQ ID NO: 147619 - RNA, 22 nt, synthetic construct
  source 1..22: mol_type = other RNA
tatatttccgatgataccttct

SEQ ID NO: 147620 - RNA, 22 nt, synthetic construct
  source 1..22: mol_type = other RNA
tatatttccgtatccagtggtt

SEQ ID NO: 147621 - RNA, 22 nt, synthetic construct
  source 1..22: mol_type = other RNA
tatattttaagttctagggaac

SEQ ID NO: 147622 - RNA, 22 nt, synthetic construct
  source 1..22: mol_type = other RNA
tatattttcaaggcttgtgcat

SEQ ID NO: 147623 - RNA, 22 nt, synthetic construct
  source 1..22: mol_type = other RNA
tatattttctaagagccaaaga

SEQ ID NO: 147624 - RNA, 22 nt, synthetic construct
  source 1..22: mol_type = other RNA
tatattttggtagagatggggt

SEQ ID NO: 147625 - RNA, 22 nt, synthetic construct
  source 1..22: mol_type = other RNA
tatcaaaacacttctgtgatca

SEQ ID NO: 147626 - RNA, 22 nt, synthetic construct
  source 1..22: mol_type = other RNA
tatcaaaatcaaggtgcgggat

SEQ ID NO: 147627 - RNA, 22 nt, synthetic construct
  source 1..22: mol_type = other RNA
tatcaacctgcaggtatttcta

SEQ ID NO: 147628 - RNA, 22 nt, synthetic construct
  source 1..22: mol_type = other RNA
tatcaatagcagtgctgaaagc

SEQ ID NO: 147629 - RNA, 22 nt, synthetic construct
  source 1..22: mol_type = other RNA
tatcaatctcacacctgggtat

SEQ ID NO: 147630 - RNA, 22 nt, synthetic construct
  source 1..22: mol_type = other RNA
tatcaattagttcctccttttg

SEQ ID NO: 147631 - RNA, 22 nt, synthetic construct
  source 1..22: mol_type = other RNA
tatcaattgtaatgtctcctct

SEQ ID NO: 147632 - RNA, 22 nt, synthetic construct
  source 1..22: mol_type = other RNA
tatcacacctaggcctatttta

SEQ ID NO: 147633 - RNA, 22 nt, synthetic construct
  source 1..22: mol_type = other RNA
tatcacactgtttgattactgt

SEQ ID NO: 147634 - RNA, 22 nt, synthetic construct
  source 1..22: mol_type = other RNA
tatcacagtgaggacgctgatg

SEQ ID NO: 147635 - RNA, 22 nt, synthetic construct
  source 1..22: mol_type = other RNA
tatcaccatctgataagcccaa

SEQ ID NO: 147636 - RNA, 22 nt, synthetic construct
  source 1..22: mol_type = other RNA
tatcaccatgtgcttatcaata

SEQ ID NO: 147637 - RNA, 22 nt, synthetic construct
  source 1..22: mol_type = other RNA
tatcacccagaccaagtttaac

SEQ ID NO: 147638 - RNA, 22 nt, synthetic construct
  source 1..22: mol_type = other RNA
tatcacccttataaaatgaggg

SEQ ID NO: 147639 - RNA, 22 nt, synthetic construct
  source 1..22: mol_type = other RNA
tatcacgattctgacccagagc

SEQ ID NO: 147640 - RNA, 22 nt, synthetic construct
  source 1..22: mol_type = other RNA
tatcagaagcacaccaaggttt

SEQ ID NO: 147641 - RNA, 22 nt, synthetic construct
  source 1..22: mol_type = other RNA
tatcagaagtgctgacttggca

SEQ ID NO: 147642 - RNA, 22 nt, synthetic construct
  source 1..22: mol_type = other RNA
tatcagagcatgtcccctggag

SEQ ID NO: 147643 - RNA, 22 nt, synthetic construct
  source 1..22: mol_type = other RNA
tatcagatcccaattacttcca

SEQ ID NO: 147644 - RNA, 22 nt, synthetic construct
  source 1..22: mol_type = other RNA
tatcagatgcttctagccaaag

SEQ ID NO: 147645 - RNA, 22 nt, synthetic construct
  source 1..22: mol_type = other RNA
tatcagatggtgatacctctta

SEQ ID NO: 147646 - RNA, 22 nt, synthetic construct
  source 1..22: mol_type = other RNA
tatcagcaccaaagattatgtt

SEQ ID NO: 147647 - RNA, 22 nt, synthetic construct
  source 1..22: mol_type = other RNA
tatcaggaaagtgccagccacc

SEQ ID NO: 147648 - RNA, 22 nt, synthetic construct
  source 1..22: mol_type = other RNA
tatcaggccttccacctgctct

SEQ ID NO: 147649 - RNA, 22 nt, synthetic construct
  source 1..22: mol_type = other RNA
tatcaggcttgagtctgtgctc

SEQ ID NO: 147650 - RNA, 22 nt, synthetic construct
  source 1..22: mol_type = other RNA
tatcagggatattggcttatag

SEQ ID NO: 147651 - RNA, 22 nt, synthetic construct
  source 1..22: mol_type = other RNA
tatcagggatcacagatacaac

SEQ ID NO: 147652 - RNA, 22 nt, synthetic construct
  source 1..22: mol_type = other RNA
tatcagggctgaaaaacacctc

SEQ ID NO: 147653 - RNA, 22 nt, synthetic construct
  source 1..22: mol_type = other RNA
tatcagtagtttgctagtggta

SEQ ID NO: 147654 - RNA, 22 nt, synthetic construct
  source 1..22: mol_type = other RNA
tatcagtctccaatcctcagcc

SEQ ID NO: 147655 - RNA, 22 nt, synthetic construct
  source 1..22: mol_type = other RNA
tatcagttatcacacctaggcc

SEQ ID NO: 147656 - RNA, 22 nt, synthetic construct
  source 1..22: mol_type = other RNA
tatcatagagtaccaggtcagc

SEQ ID NO: 147657 - RNA, 22 nt, synthetic construct
  source 1..22: mol_type = other RNA
tatcatatgatctatcaatctc

SEQ ID NO: 147658 - RNA, 22 nt, synthetic construct
  source 1..22: mol_type = other RNA
tatcatcaagacagagctccct

SEQ ID NO: 147659 - RNA, 22 nt, synthetic construct
  source 1..22: mol_type = other RNA
tatcatcatcttatacttggca

SEQ ID NO: 147660 - RNA, 22 nt, synthetic construct
  source 1..22: mol_type = other RNA
tatcatcggaaatataaaaagc

SEQ ID NO: 147661 - RNA, 22 nt, synthetic construct
  source 1..22: mol_type = other RNA
tatcatcttaagaaccatacag

SEQ ID NO: 147662 - RNA, 22 nt, synthetic construct
  source 1..22: mol_type = other RNA
tatcatgtcttcttggattttc

SEQ ID NO: 147663 - RNA, 22 nt, synthetic construct
  source 1..22: mol_type = other RNA
tatcattgcaccactgcactcc

SEQ ID NO: 147664 - RNA, 22 nt, synthetic construct
  source 1..22: mol_type = other RNA
tatcatttgaatgatgcgaaag

SEQ ID NO: 147665 - RNA, 22 nt, synthetic construct
  source 1..22: mol_type = other RNA
tatcattttaaagggataatgc

SEQ ID NO: 147666 - RNA, 22 nt, synthetic construct
  source 1..22: mol_type = other RNA
tatccaaagataaaggtaagga

SEQ ID NO: 147667 - RNA, 22 nt, synthetic construct
  source 1..22: mol_type = other RNA
tatccaacatgccagctttggc

SEQ ID NO: 147668 - RNA, 22 nt, synthetic construct
  source 1..22: mol_type = other RNA
tatccaagcacaaacctggcaa

SEQ ID NO: 147669 - RNA, 22 nt, synthetic construct
  source 1..22: mol_type = other RNA
tatccaatcactggctagtagg

SEQ ID NO: 147670 - RNA, 22 nt, synthetic construct
  source 1..22: mol_type = other RNA
tatccaattttttggcatacaa

SEQ ID NO: 147671 - RNA, 22 nt, synthetic construct
  source 1..22: mol_type = other RNA
tatccacagtatgctgtttaca

SEQ ID NO: 147672 - RNA, 22 nt, synthetic construct
  source 1..22: mol_type = other RNA
tatccacatttggttttactac

SEQ ID NO: 147673 - RNA, 22 nt, synthetic construct
  source 1..22: mol_type = other RNA
tatccaccactccaccttagcc

SEQ ID NO: 147674 - RNA, 22 nt, synthetic construct
  source 1..22: mol_type = other RNA
tatccagaagagaatggctgga

SEQ ID NO: 147675 - RNA, 22 nt, synthetic construct
  source 1..22: mol_type = other RNA
tatccagattgatatctgagtg

SEQ ID NO: 147676 - RNA, 22 nt, synthetic construct
  source 1..22: mol_type = other RNA
tatccagtaatcttgctaaaca

SEQ ID NO: 147677 - RNA, 22 nt, synthetic construct
  source 1..22: mol_type = other RNA
tatccagtctctgcaacatttg

SEQ ID NO: 147678 - RNA, 22 nt, synthetic construct
  source 1..22: mol_type = other RNA
tatccagtgacacctgaggggt

SEQ ID NO: 147679 - RNA, 22 nt, synthetic construct
  source 1..22: mol_type = other RNA
tatccagtggttttttgttttt

SEQ ID NO: 147680 - RNA, 22 nt, synthetic construct
  source 1..22: mol_type = other RNA
tatccattcatctctcgatgga

SEQ ID NO: 147681 - RNA, 22 nt, synthetic construct
  source 1..22: mol_type = other RNA
tatcccaaattggcatttaaaa

SEQ ID NO: 147682 - RNA, 22 nt, synthetic construct
  source 1..22: mol_type = other RNA
tatcccagacagatatatgcat

SEQ ID NO: 147683 - RNA, 22 nt, synthetic construct
  source 1..22: mol_type = other RNA
tatcccagatctaacaaacgca

SEQ ID NO: 147684 - RNA, 22 nt, synthetic construct
  source 1..22: mol_type = other RNA
tatcccagatggggattgaggg

SEQ ID NO: 147685 - RNA, 22 nt, synthetic construct
  source 1..22: mol_type = other RNA
tatcccatataaggggaatcat

SEQ ID NO: 147686 - RNA, 22 nt, synthetic construct
  source 1..22: mol_type = other RNA
tatccccatttttctcgacaca

SEQ ID NO: 147687 - RNA, 22 nt, synthetic construct
  source 1..22: mol_type = other RNA
tatccctacctaaaaagggagt

SEQ ID NO: 147688 - RNA, 22 nt, synthetic construct
  source 1..22: mol_type = other RNA
tatccctgataatcacagacgc

SEQ ID NO: 147689 - RNA, 22 nt, synthetic construct
  source 1..22: mol_type = other RNA
tatccctggggtttccttacct

SEQ ID NO: 147690 - RNA, 22 nt, synthetic construct
  source 1..22: mol_type = other RNA
tatccctttaaaatgatagcat

SEQ ID NO: 147691 - RNA, 22 nt, synthetic construct
  source 1..22: mol_type = other RNA
tatccgaaagaactgaaagcag

SEQ ID NO: 147692 - RNA, 22 nt, synthetic construct
  source 1..22: mol_type = other RNA
tatccgataaagggtctggtat

SEQ ID NO: 147693 - RNA, 22 nt, synthetic construct
  source 1..22: mol_type = other RNA
tatcctaaacacttagcatgtt

SEQ ID NO: 147694 - RNA, 22 nt, synthetic construct
  source 1..22: mol_type = other RNA
tatcctaatgggcgtggagcgg

SEQ ID NO: 147695 - RNA, 22 nt, synthetic construct
  source 1..22: mol_type = other RNA
tatcctatcagagcatgtcccc

SEQ ID NO: 147696 - RNA, 22 nt, synthetic construct
  source 1..22: mol_type = other RNA
tatcctatgtggggaatgctca

SEQ ID NO: 147697 - RNA, 22 nt, synthetic construct
  source 1..22: mol_type = other RNA
tatcctcagggtaggaaaagac

SEQ ID NO: 147698 - RNA, 22 nt, synthetic construct
  source 1..22: mol_type = other RNA
tatcctccaatgtttttaattc

SEQ ID NO: 147699 - RNA, 22 nt, synthetic construct
  source 1..22: mol_type = other RNA
tatcctcttctgaagaggcttt

SEQ ID NO: 147700 - RNA, 22 nt, synthetic construct
  source 1..22: mol_type = other RNA
tatcctgagacttaggcaaagg

SEQ ID NO: 147701 - RNA, 22 nt, synthetic construct
  source 1..22: mol_type = other RNA
tatcctgtaaacctggaatcct

SEQ ID NO: 147702 - RNA, 22 nt, synthetic construct
  source 1..22: mol_type = other RNA
tatcctgtttgagaagtctttt

SEQ ID NO: 147703 - RNA, 22 nt, synthetic construct
  source 1..22: mol_type = other RNA
tatccttctacatccccccacc

SEQ ID NO: 147704 - RNA, 22 nt, synthetic construct
  source 1..22: mol_type = other RNA
tatccttgcaccaactccacat

SEQ ID NO: 147705 - RNA, 22 nt, synthetic construct
  source 1..22: mol_type = other RNA
tatcctttcaaggtatctcccc

SEQ ID NO: 147706 - RNA, 22 nt, synthetic construct
  source 1..22: mol_type = other RNA
tatccttttatgtgcagtctaa

SEQ ID NO: 147707 - RNA, 22 nt, synthetic construct
  source 1..22: mol_type = other RNA
tatcggataaggaagagtttat

SEQ ID NO: 147708 - RNA, 22 nt, synthetic construct
  source 1..22: mol_type = other RNA
tatcgtgagactattatgagca

SEQ ID NO: 147709 - RNA, 22 nt, synthetic construct
  source 1..22: mol_type = other RNA
tatcgttatatcctcagggtag

SEQ ID NO: 147710 - RNA, 22 nt, synthetic construct
  source 1..22: mol_type = other RNA
tatctaagcctactgctctgtc

SEQ ID NO: 147711 - RNA, 22 nt, synthetic construct
  source 1..22: mol_type = other RNA
tatctacagaggattttggatt

SEQ ID NO: 147712 - RNA, 22 nt, synthetic construct
  source 1..22: mol_type = other RNA
tatctacatgtacgccaatttt

SEQ ID NO: 147713 - RNA, 22 nt, synthetic construct
  source 1..22: mol_type = other RNA
tatctaccaaaaaactacgagt

SEQ ID NO: 147714 - RNA, 22 nt, synthetic construct
  source 1..22: mol_type = other RNA
tatctaggagtacagtgcatac

SEQ ID NO: 147715 - RNA, 22 nt, synthetic construct
  source 1..22: mol_type = other RNA
tatctaggcgaaatatctccct

SEQ ID NO: 147716 - RNA, 22 nt, synthetic construct
  source 1..22: mol_type = other RNA
tatctatcagggctgaaaaaca

SEQ ID NO: 147717 - RNA, 22 nt, synthetic construct
  source 1..22: mol_type = other RNA
tatctattaacagaagggtata

SEQ ID NO: 147718 - RNA, 22 nt, synthetic construct
  source 1..22: mol_type = other RNA
tatctcagtcataatttgtgtc

SEQ ID NO: 147719 - RNA, 22 nt, synthetic construct
  source 1..22: mol_type = other RNA
tatctcatgcttaggatcccag

SEQ ID NO: 147720 - RNA, 22 nt, synthetic construct
  source 1..22: mol_type = other RNA
tatctcattaaaaatcaaccca

SEQ ID NO: 147721 - RNA, 22 nt, synthetic construct
  source 1..22: mol_type = other RNA
tatctccacatttctacacaac

SEQ ID NO: 147722 - RNA, 22 nt, synthetic construct
  source 1..22: mol_type = other RNA
tatctccataagtccctaacag

SEQ ID NO: 147723 - RNA, 22 nt, synthetic construct
  source 1..22: mol_type = other RNA
tatctccccaaagatattagct

SEQ ID NO: 147724 - RNA, 22 nt, synthetic construct
  source 1..22: mol_type = other RNA
tatctccctcacagtccactca

SEQ ID NO: 147725 - RNA, 22 nt, synthetic construct
  source 1..22: mol_type = other RNA
tatctccctgtgcgtgaatctg

SEQ ID NO: 147726 - RNA, 22 nt, synthetic construct
  source 1..22: mol_type = other RNA
tatctcctttccttccttgctc

SEQ ID NO: 147727 - RNA, 22 nt, synthetic construct
  source 1..22: mol_type = other RNA
tatctccttttaagagtgaaga

SEQ ID NO: 147728 - RNA, 22 nt, synthetic construct
  source 1..22: mol_type = other RNA
tatctcggtcattctggagtgt

SEQ ID NO: 147729 - RNA, 22 nt, synthetic construct
  source 1..22: mol_type = other RNA
tatctctcagatctgagtttgc

SEQ ID NO: 147730 - RNA, 22 nt, synthetic construct
  source 1..22: mol_type = other RNA
tatctctctcaagcaatctgaa

SEQ ID NO: 147731 - RNA, 22 nt, synthetic construct
  source 1..22: mol_type = other RNA
tatctctgccctcattgaagct

SEQ ID NO: 147732 - RNA, 22 nt, synthetic construct
  source 1..22: mol_type = other RNA
tatctcttagacctcctagatt

SEQ ID NO: 147733 - RNA, 22 nt, synthetic construct
  source 1..22: mol_type = other RNA
tatctcttcctcctctggacat

SEQ ID NO: 147734 - RNA, 22 nt, synthetic construct
  source 1..22: mol_type = other RNA
tatctgaacattttagctgggg

SEQ ID NO: 147735 - RNA, 22 nt, synthetic construct
  source 1..22: mol_type = other RNA
tatctgaacgtctttaaatttc

SEQ ID NO: 147736 - RNA, 22 nt, synthetic construct
  source 1..22: mol_type = other RNA
tatctgaactttcgaagtggga

SEQ ID NO: 147737 - RNA, 22 nt, synthetic construct
  source 1..22: mol_type = other RNA
tatctgagtgttgtgtgcacct

SEQ ID NO: 147738 - RNA, 22 nt, synthetic construct
  source 1..22: mol_type = other RNA
tatctgattttgtgtcttctgt

SEQ ID NO: 147739 - RNA, 22 nt, synthetic construct
  source 1..22: mol_type = other RNA
tatctgctgtcggttttctagt

SEQ ID NO: 147740 - RNA, 22 nt, synthetic construct
  source 1..22: mol_type = other RNA
tatctggactgaaaagatacag

SEQ ID NO: 147741 - RNA, 22 nt, synthetic construct
  source 1..22: mol_type = other RNA
tatctggatttttgtgtagagg

SEQ ID NO: 147742 - RNA, 22 nt, synthetic construct
  source 1..22: mol_type = other RNA
tatctggcctgcaccatttatt

SEQ ID NO: 147743 - RNA, 22 nt, synthetic construct
  source 1..22: mol_type = other RNA
tatctgggaacagcccctagca

SEQ ID NO: 147744 - RNA, 22 nt, synthetic construct
  source 1..22: mol_type = other RNA
tatctggtgctggcagccttct

SEQ ID NO: 147745 - RNA, 22 nt, synthetic construct
  source 1..22: mol_type = other RNA
tatctggtgttgcttgctctac

SEQ ID NO: 147746 - RNA, 22 nt, synthetic construct
  source 1..22: mol_type = other RNA
tatctgtaagtcatcaaaggaa

SEQ ID NO: 147747 - RNA, 22 nt, synthetic construct
  source 1..22: mol_type = other RNA
tatctgtctgggataatgagtt

SEQ ID NO: 147748 - RNA, 22 nt, synthetic construct
  source 1..22: mol_type = other RNA
tatctgtgatccctgatatgtc

SEQ ID NO: 147749 - RNA, 22 nt, synthetic construct
  source 1..22: mol_type = other RNA
tatctgtgggttaaaagttagc

SEQ ID NO: 147750 - RNA, 22 nt, synthetic construct
  source 1..22: mol_type = other RNA
tatcttaataacctcaaagtgg

SEQ ID NO: 147751 - RNA, 22 nt, synthetic construct
  source 1..22: mol_type = other RNA
tatcttcacaaacaaatccttt

SEQ ID NO: 147752 - RNA, 22 nt, synthetic construct
  source 1..22: mol_type = other RNA
tatcttccctaaagagaatctt

SEQ ID NO: 147753 - RNA, 22 nt, synthetic construct
  source 1..22: mol_type = other RNA
tatcttgaagaaaccaagagca

SEQ ID NO: 147754 - RNA, 22 nt, synthetic construct
  source 1..22: mol_type = other RNA
tatctttactttcagctcaaac

SEQ ID NO: 147755 - RNA, 22 nt, synthetic construct
  source 1..22: mol_type = other RNA
tatctttaggtgttttttcctt

SEQ ID NO: 147756 - RNA, 22 nt, synthetic construct
  source 1..22: mol_type = other RNA
tatctttctagattcatatgct

SEQ ID NO: 147757 - RNA, 22 nt, synthetic construct
  source 1..22: mol_type = other RNA
tatctttggaaaaatgtccgtt

SEQ ID NO: 147758 - RNA, 22 nt, synthetic construct
  source 1..22: mol_type = other RNA
tatctttggatatccccatttt

SEQ ID NO: 147759 - RNA, 22 nt, synthetic construct
  source 1..22: mol_type = other RNA
tatctttgggaaaatctctgac

SEQ ID NO: 147760 - RNA, 22 nt, synthetic construct
  source 1..22: mol_type = other RNA
tatctttggggagataccttga

SEQ ID NO: 147761 - RNA, 22 nt, synthetic construct
  source 1..22: mol_type = other RNA
tatcttttaacagatggtcctt

SEQ ID NO: 147762 - RNA, 22 nt, synthetic construct
  source 1..22: mol_type = other RNA
tatcttttcaaaaacccaactc

SEQ ID NO: 147763 - RNA, 22 nt, synthetic construct
  source 1..22: mol_type = other RNA
tatcttttcagtccagatatta

SEQ ID NO: 147764 - RNA, 22 nt, synthetic construct
  source 1..22: mol_type = other RNA
tatcttttcatgttgaccattt

SEQ ID NO: 147765 - RNA, 22 nt, synthetic construct
  source 1..22: mol_type = other RNA
tatctttttcagcagcagagaa

SEQ ID NO: 147766 - RNA, 22 nt, synthetic construct
  source 1..22: mol_type = other RNA
tatgaaaagcccaatctacagg

SEQ ID NO: 147767 - RNA, 22 nt, synthetic construct
  source 1..22: mol_type = other RNA
tatgaaaagcctcaaacgaacc

SEQ ID NO: 147768 - RNA, 22 nt, synthetic construct
  source 1..22: mol_type = other RNA
tatgaaaagcttcccccctctc

SEQ ID NO: 147769 - RNA, 22 nt, synthetic construct
  source 1..22: mol_type = other RNA
tatgaaaatagtaactttctgc

SEQ ID NO: 147770 - RNA, 22 nt, synthetic construct
  source 1..22: mol_type = other RNA
tatgaaaattggcgtacatgta

SEQ ID NO: 147771 - RNA, 22 nt, synthetic construct
  source 1..22: mol_type = other RNA
tatgaaagaggagacattacaa

SEQ ID NO: 147772 - RNA, 22 nt, synthetic construct
  source 1..22: mol_type = other RNA
tatgaaatcacacaatcttgag

SEQ ID NO: 147773 - RNA, 22 nt, synthetic construct
  source 1..22: mol_type = other RNA
tatgaaatcttgaagatggcaa

SEQ ID NO: 147774 - RNA, 22 nt, synthetic construct
  source 1..22: mol_type = other RNA
tatgaaatgtggtttttggttc

SEQ ID NO: 147775 - RNA, 22 nt, synthetic construct
  source 1..22: mol_type = other RNA
tatgaacattttgagttattgc

SEQ ID NO: 147776 - RNA, 22 nt, synthetic construct
  source 1..22: mol_type = other RNA
tatgaaccacactgacaggaca

SEQ ID NO: 147777 - RNA, 22 nt, synthetic construct
  source 1..22: mol_type = other RNA
tatgaaccattgtaaaccatat

SEQ ID NO: 147778 - RNA, 22 nt, synthetic construct
  source 1..22: mol_type = other RNA
tatgaagcattaatgcaacctg

SEQ ID NO: 147779 - RNA, 22 nt, synthetic construct
  source 1..22: mol_type = other RNA
tatgaagcttttctcctaagtc

SEQ ID NO: 147780 - RNA, 22 nt, synthetic construct
  source 1..22: mol_type = other RNA
tatgaataaaccacgcagtttg

SEQ ID NO: 147781 - RNA, 22 nt, synthetic construct
  source 1..22: mol_type = other RNA
tatgaataggtgtgtgttcctt

SEQ ID NO: 147782 - RNA, 22 nt, synthetic construct
  source 1..22: mol_type = other RNA
tatgaatatactggaaaactag

SEQ ID NO: 147783 - RNA, 22 nt, synthetic construct
  source 1..22: mol_type = other RNA
tatgaatgatgccatcacattt

SEQ ID NO: 147784 - RNA, 22 nt, synthetic construct
  source 1..22: mol_type = other RNA
tatgaatgcacgtgaagctaca

SEQ ID NO: 147785 - RNA, 22 nt, synthetic construct
  source 1..22: mol_type = other RNA
tatgaatggaaatgtaaattcc

SEQ ID NO: 147786 - RNA, 22 nt, synthetic construct
  source 1..22: mol_type = other RNA
tatgaatttgcctattctgggg

SEQ ID NO: 147787 - RNA, 22 nt, synthetic construct
  source 1..22: mol_type = other RNA
tatgacaagactacctaaaaca

SEQ ID NO: 147788 - RNA, 22 nt, synthetic construct
  source 1..22: mol_type = other RNA
tatgacctcctcccacttacat

SEQ ID NO: 147789 - RNA, 22 nt, synthetic construct
  source 1..22: mol_type = other RNA
tatgactaatttgaggcattag

SEQ ID NO: 147790 - RNA, 22 nt, synthetic construct
  source 1..22: mol_type = other RNA
tatgactgagatacttaagttt

SEQ ID NO: 147791 - RNA, 22 nt, synthetic construct
  source 1..22: mol_type = other RNA
tatgactggtgtccttctgaga

SEQ ID NO: 147792 - RNA, 22 nt, synthetic construct
  source 1..22: mol_type = other RNA
tatgagaaatgtctggtttgct

SEQ ID NO: 147793 - RNA, 22 nt, synthetic construct
  source 1..22: mol_type = other RNA
tatgagaagactggaaaagtgt

SEQ ID NO: 147794 - RNA, 22 nt, synthetic construct
  source 1..22: mol_type = other RNA
tatgagaaggattagtgttaat

SEQ ID NO: 147795 - RNA, 22 nt, synthetic construct
  source 1..22: mol_type = other RNA
tatgagaattcattgttgtgtg

SEQ ID NO: 147796 - RNA, 22 nt, synthetic construct
  source 1..22: mol_type = other RNA
tatgagacacacgagtattcaa

SEQ ID NO: 147797 - RNA, 22 nt, synthetic construct
  source 1..22: mol_type = other RNA
tatgagcagttgtatgccaaaa

SEQ ID NO: 147798 - RNA, 22 nt, synthetic construct
  source 1..22: mol_type = other RNA
tatgagcattccccacatagga

SEQ ID NO: 147799 - RNA, 22 nt, synthetic construct
  source 1..22: mol_type = other RNA
tatgagccactagtcagtatat

SEQ ID NO: 147800 - RNA, 22 nt, synthetic construct
  source 1..22: mol_type = other RNA
tatgagggatgaggaagaggaa

SEQ ID NO: 147801 - RNA, 22 nt, synthetic construct
  source 1..22: mol_type = other RNA
tatgagtcttccgtctcaagat

SEQ ID NO: 147802 - RNA, 22 nt, synthetic construct
  source 1..22: mol_type = other RNA
tatgagtgtttcccttaaaagg

SEQ ID NO: 147803 - RNA, 22 nt, synthetic construct
  source 1..22: mol_type = other RNA
tatgagttcctgcttcccccaa

SEQ ID NO: 147804 - RNA, 22 nt, synthetic construct
  source 1..22: mol_type = other RNA
tatgataaaaataacgggccgg

SEQ ID NO: 147805 - RNA, 22 nt, synthetic construct
  source 1..22: mol_type = other RNA
tatgataccctcaaaagatgca

SEQ ID NO: 147806 - RNA, 22 nt, synthetic construct
  source 1..22: mol_type = other RNA
tatgatactcgtagttttttgg

SEQ ID NO: 147807 - RNA, 22 nt, synthetic construct
  source 1..22: mol_type = other RNA
tatgatcaaagtgaaaggcaaa

SEQ ID NO: 147808 - RNA, 22 nt, synthetic construct
  source 1..22: mol_type = other RNA
tatgatccagcagtttcacttc

SEQ ID NO: 147809 - RNA, 22 nt, synthetic construct
  source 1..22: mol_type = other RNA
tatgatctatcaatctcacacc

SEQ ID NO: 147810 - RNA, 22 nt, synthetic construct
  source 1..22: mol_type = other RNA
tatgatcttgggaatactttcc

SEQ ID NO: 147811 - RNA, 22 nt, synthetic construct
  source 1..22: mol_type = other RNA
tatgatgatttttgccagtgtt

SEQ ID NO: 147812 - RNA, 22 nt, synthetic construct
  source 1..22: mol_type = other RNA
tatgatgccactcaaaactgaa

SEQ ID NO: 147813 - RNA, 22 nt, synthetic construct
  source 1..22: mol_type = other RNA
tatgatttcacttacttgagcc

SEQ ID NO: 147814 - RNA, 22 nt, synthetic construct
  source 1..22: mol_type = other RNA
tatgatttctaggccctaaccc

SEQ ID NO: 147815 - RNA, 22 nt, synthetic construct
  source 1..22: mol_type = other RNA
tatgcaacttactctcaaataa

SEQ ID NO: 147816 - RNA, 22 nt, synthetic construct
  source 1..22: mol_type = other RNA
tatgcaagatggcaagtttcca

SEQ ID NO: 147817 - RNA, 22 nt, synthetic construct
  source 1..22: mol_type = other RNA
tatgcaagatgtcaacattaag

SEQ ID NO: 147818 - RNA, 22 nt, synthetic construct
  source 1..22: mol_type = other RNA
tatgcaataactcaaaatgttc

SEQ ID NO: 147819 - RNA, 22 nt, synthetic construct
  source 1..22: mol_type = other RNA
tatgcacaatggaatattactc

SEQ ID NO: 147820 - RNA, 22 nt, synthetic construct
  source 1..22: mol_type = other RNA
tatgcactgtactcctagatac

SEQ ID NO: 147821 - RNA, 22 nt, synthetic construct
  source 1..22: mol_type = other RNA
tatgcagaaaccagttgtaatt

SEQ ID NO: 147822 - RNA, 22 nt, synthetic construct
  source 1..22: mol_type = other RNA
tatgcagaaatctaccaaacat

SEQ ID NO: 147823 - RNA, 22 nt, synthetic construct
  source 1..22: mol_type = other RNA
tatgcagcaacggaaatgagtg

SEQ ID NO: 147824 - RNA, 22 nt, synthetic construct
  source 1..22: mol_type = other RNA
tatgcaggaccaactttaagca

SEQ ID NO: 147825 - RNA, 22 nt, synthetic construct
  source 1..22: mol_type = other RNA
tatgcagggaaatcattcagga

SEQ ID NO: 147826 - RNA, 22 nt, synthetic construct
  source 1..22: mol_type = other RNA
tatgcagtatgtgccattttta

SEQ ID NO: 147827 - RNA, 22 nt, synthetic construct
  source 1..22: mol_type = other RNA
tatgcatactgcagcactttta

SEQ ID NO: 147828 - RNA, 22 nt, synthetic construct
  source 1..22: mol_type = other RNA
tatgcatactttggaaggtagg

SEQ ID NO: 147829 - RNA, 22 nt, synthetic construct
  source 1..22: mol_type = other RNA
tatgcatagatcacaaggactg

SEQ ID NO: 147830 - RNA, 22 nt, synthetic construct
  source 1..22: mol_type = other RNA
tatgcatagcagggtcatgcac

SEQ ID NO: 147831 - RNA, 22 nt, synthetic construct
  source 1..22: mol_type = other RNA
tatgcatcttgaactaagtgtg

SEQ ID NO: 147832 - RNA, 22 nt, synthetic construct
  source 1..22: mol_type = other RNA
tatgcatcttgcaaaacggaaa

SEQ ID NO: 147833 - RNA, 22 nt, synthetic construct
  source 1..22: mol_type = other RNA
tatgcatgttatttggggattc

SEQ ID NO: 147834 - RNA, 22 nt, synthetic construct
  source 1..22: mol_type = other RNA
tatgcattaagccagtcactaa

SEQ ID NO: 147835 - RNA, 22 nt, synthetic construct
  source 1..22: mol_type = other RNA
tatgcattcccatgttcactgc

SEQ ID NO: 147836 - RNA, 22 nt, synthetic construct
  source 1..22: mol_type = other RNA
tatgcatttattagtagttagg

SEQ ID NO: 147837 - RNA, 22 nt, synthetic construct
  source 1..22: mol_type = other RNA
tatgcatttggtctcattcact

SEQ ID NO: 147838 - RNA, 22 nt, synthetic construct
  source 1..22: mol_type = other RNA
tatgccaatatcacactgtttg

SEQ ID NO: 147839 - RNA, 22 nt, synthetic construct
  source 1..22: mol_type = other RNA
tatgccacattttttggtttgt

SEQ ID NO: 147840 - RNA, 22 nt, synthetic construct
  source 1..22: mol_type = other RNA
tatgccccctcttctctccttt

SEQ ID NO: 147841 - RNA, 22 nt, synthetic construct
  source 1..22: mol_type = other RNA
tatgccgctggtgaaaaaatgg

SEQ ID NO: 147842 - RNA, 22 nt, synthetic construct
  source 1..22: mol_type = other RNA
tatgccggctgttaggtattat

SEQ ID NO: 147843 - RNA, 22 nt, synthetic construct
  source 1..22: mol_type = other RNA
tatgcctagatgattcgcattg

SEQ ID NO: 147844 - RNA, 22 nt, synthetic construct
  source 1..22: mol_type = other RNA
tatgcctagatttcaatctgga

SEQ ID NO: 147845 - RNA, 22 nt, synthetic construct
  source 1..22: mol_type = other RNA
tatgcctcatgcatccacattt

SEQ ID NO: 147846 - RNA, 22 nt, synthetic construct
  source 1..22: mol_type = other RNA
tatgccttcagtatgaatgcac

SEQ ID NO: 147847 - RNA, 22 nt, synthetic construct
  source 1..22: mol_type = other RNA
tatgcggggtttcagcacaata

SEQ ID NO: 147848 - RNA, 22 nt, synthetic construct
  source 1..22: mol_type = other RNA
tatgctaacatgaactactcaa

SEQ ID NO: 147849 - RNA, 22 nt, synthetic construct
  source 1..22: mol_type = other RNA
tatgctattataaatggcatct

SEQ ID NO: 147850 - RNA, 22 nt, synthetic construct
  source 1..22: mol_type = other RNA
tatgctccctaaatacacatgt

SEQ ID NO: 147851 - RNA, 22 nt, synthetic construct
  source 1..22: mol_type = other RNA
tatgctcctgcctcagcctccc

SEQ ID NO: 147852 - RNA, 22 nt, synthetic construct
  source 1..22: mol_type = other RNA
tatgctcttggtttcttcaaga

SEQ ID NO: 147853 - RNA, 22 nt, synthetic construct
  source 1..22: mol_type = other RNA
tatgctgaaaggcatgaaattc

SEQ ID NO: 147854 - RNA, 22 nt, synthetic construct
  source 1..22: mol_type = other RNA
tatgctgagtgaatggggtaat

SEQ ID NO: 147855 - RNA, 22 nt, synthetic construct
  source 1..22: mol_type = other RNA
tatgctgatgaactacacagac

SEQ ID NO: 147856 - RNA, 22 nt, synthetic construct
  source 1..22: mol_type = other RNA
tatgctggtgggctttgagaaa

SEQ ID NO: 147857 - RNA, 22 nt, synthetic construct
  source 1..22: mol_type = other RNA
tatgctgtagtgattcactttt

SEQ ID NO: 147858 - RNA, 22 nt, synthetic construct
  source 1..22: mol_type = other RNA
tatgctgtttacattagagaag

SEQ ID NO: 147859 - RNA, 22 nt, synthetic construct
  source 1..22: mol_type = other RNA
tatgctgtttttgaaaagaaca

SEQ ID NO: 147860 - RNA, 22 nt, synthetic construct
  source 1..22: mol_type = other RNA
tatgctttgagctacaaactcc

SEQ ID NO: 147861 - RNA, 22 nt, synthetic construct
  source 1..22: mol_type = other RNA
tatgctttgtctctggaaggct

SEQ ID NO: 147862 - RNA, 22 nt, synthetic construct
  source 1..22: mol_type = other RNA
tatggaaacatggtaatttgtc

SEQ ID NO: 147863 - RNA, 22 nt, synthetic construct
  source 1..22: mol_type = other RNA
tatggaagatgggacttcacta

SEQ ID NO: 147864 - RNA, 22 nt, synthetic construct
  source 1..22: mol_type = other RNA
tatggaataatggaactaagaa

SEQ ID NO: 147865 - RNA, 22 nt, synthetic construct
  source 1..22: mol_type = other RNA
tatggaattgccatatgtaggg

SEQ ID NO: 147866 - RNA, 22 nt, synthetic construct
  source 1..22: mol_type = other RNA
tatggacatgaggaaagcaggt

SEQ ID NO: 147867 - RNA, 22 nt, synthetic construct
  source 1..22: mol_type = other RNA
tatggagacactagggactggc

SEQ ID NO: 147868 - RNA, 22 nt, synthetic construct
  source 1..22: mol_type = other RNA
tatggagactagtacactgttg

SEQ ID NO: 147869 - RNA, 22 nt, synthetic construct
  source 1..22: mol_type = other RNA
tatggagataaattacccaaag

SEQ ID NO: 147870 - RNA, 22 nt, synthetic construct
  source 1..22: mol_type = other RNA
tatggagcactgtgagccacta

SEQ ID NO: 147871 - RNA, 22 nt, synthetic construct
  source 1..22: mol_type = other RNA
tatggaggcaatgttgattttg

SEQ ID NO: 147872 - RNA, 22 nt, synthetic construct
  source 1..22: mol_type = other RNA
tatggatatctggcctgcacca

SEQ ID NO: 147873 - RNA, 22 nt, synthetic construct
  source 1..22: mol_type = other RNA
tatggcaattccataaatgttt

SEQ ID NO: 147874 - RNA, 22 nt, synthetic construct
  source 1..22: mol_type = other RNA
tatggcaggcaccttcagaagc

SEQ ID NO: 147875 - RNA, 22 nt, synthetic construct
  source 1..22: mol_type = other RNA
tatggcatttgagggttagaag

SEQ ID NO: 147876 - RNA, 22 nt, synthetic construct
  source 1..22: mol_type = other RNA
tatggcctaagatggaaagtgg

SEQ ID NO: 147877 - RNA, 22 nt, synthetic construct
  source 1..22: mol_type = other RNA
tatggcgactcatgcctgtaat

SEQ ID NO: 147878 - RNA, 22 nt, synthetic construct
  source 1..22: mol_type = other RNA
tatggctagaaacttggattgt

SEQ ID NO: 147879 - RNA, 22 nt, synthetic construct
  source 1..22: mol_type = other RNA
tatggctataaccacgagtaat

SEQ ID NO: 147880 - RNA, 22 nt, synthetic construct
  source 1..22: mol_type = other RNA
tatggcttttgagtgtaaggtg

SEQ ID NO: 147881 - RNA, 22 nt, synthetic construct
  source 1..22: mol_type = other RNA
tatgggagatgtgtaattgtac

SEQ ID NO: 147882 - RNA, 22 nt, synthetic construct
  source 1..22: mol_type = other RNA
tatgggagtccctgctttcagt

SEQ ID NO: 147883 - RNA, 22 nt, synthetic construct
  source 1..22: mol_type = other RNA
tatgggatatctaacataatca

SEQ ID NO: 147884 - RNA, 22 nt, synthetic construct
  source 1..22: mol_type = other RNA
tatgggatgcttaaagcgctac

SEQ ID NO: 147885 - RNA, 22 nt, synthetic construct
  source 1..22: mol_type = other RNA
tatgggccaaagacagatctta

SEQ ID NO: 147886 - RNA, 22 nt, synthetic construct
  source 1..22: mol_type = other RNA
tatgggtcaaccactaaggtca

SEQ ID NO: 147887 - RNA, 22 nt, synthetic construct
  source 1..22: mol_type = other RNA
tatgggtctccattttggtctt

SEQ ID NO: 147888 - RNA, 22 nt, synthetic construct
  source 1..22: mol_type = other RNA
tatgggttattcacccaagaat

SEQ ID NO: 147889 - RNA, 22 nt, synthetic construct
  source 1..22: mol_type = other RNA
tatggtaactcctgttctttgg

SEQ ID NO: 147890 - RNA, 22 nt, synthetic construct
  source 1..22: mol_type = other RNA
tatggtaattggttcgtttgag

SEQ ID NO: 147891 - RNA, 22 nt, synthetic construct
  source 1..22: mol_type = other RNA
tatggtaggtgctttttgtatc

SEQ ID NO: 147892 - RNA, 22 nt, synthetic construct
  source 1..22: mol_type = other RNA
tatggtcactgctgatgtaagt

SEQ ID NO: 147893 - RNA, 22 nt, synthetic construct
  source 1..22: mol_type = other RNA
tatggtctaccatgttgttctt

SEQ ID NO: 147894 - RNA, 22 nt, synthetic construct
  source 1..22: mol_type = other RNA
tatggtctttttccaggaccaa

SEQ ID NO: 147895 - RNA, 22 nt, synthetic construct
  source 1..22: mol_type = other RNA
tatggtgttatttgttctgtca

SEQ ID NO: 147896 - RNA, 22 nt, synthetic construct
  source 1..22: mol_type = other RNA
tatggttaatagtgaccctttg

SEQ ID NO: 147897 - RNA, 22 nt, synthetic construct
  source 1..22: mol_type = other RNA
tatggttgaagaaagtaggaat

SEQ ID NO: 147898 - RNA, 22 nt, synthetic construct
  source 1..22: mol_type = other RNA
tatggttgttggctaaaagacc

SEQ ID NO: 147899 - RNA, 22 nt, synthetic construct
  source 1..22: mol_type = other RNA
tatggtttaaggtaagggtcca

SEQ ID NO: 147900 - RNA, 22 nt, synthetic construct
  source 1..22: mol_type = other RNA
tatggtttacaatggttcataa

SEQ ID NO: 147901 - RNA, 22 nt, synthetic construct
  source 1..22: mol_type = other RNA
tatggttttttcccccctggaa

SEQ ID NO: 147902 - RNA, 22 nt, synthetic construct
  source 1..22: mol_type = other RNA
tatgtaagacaatgtctttggc

SEQ ID NO: 147903 - RNA, 22 nt, synthetic construct
  source 1..22: mol_type = other RNA
tatgtaatctcatggaagttat

SEQ ID NO: 147904 - RNA, 22 nt, synthetic construct
  source 1..22: mol_type = other RNA
tatgtaatgacctggaaattat

SEQ ID NO: 147905 - RNA, 22 nt, synthetic construct
  source 1..22: mol_type = other RNA
tatgtaattacaggggactttg

SEQ ID NO: 147906 - RNA, 22 nt, synthetic construct
  source 1..22: mol_type = other RNA
tatgtacacgtcttgtcaataa

SEQ ID NO: 147907 - RNA, 22 nt, synthetic construct
  source 1..22: mol_type = other RNA
tatgtacatgacctatctatta

SEQ ID NO: 147908 - RNA, 22 nt, synthetic construct
  source 1..22: mol_type = other RNA
tatgtacccaatggattataaa

SEQ ID NO: 147909 - RNA, 22 nt, synthetic construct
  source 1..22: mol_type = other RNA
tatgtactacctatagaattct

SEQ ID NO: 147910 - RNA, 22 nt, synthetic construct
  source 1..22: mol_type = other RNA
tatgtagctgggatggctgaaa

SEQ ID NO: 147911 - RNA, 22 nt, synthetic construct
  source 1..22: mol_type = other RNA
tatgtaggaaactttgcattcc

SEQ ID NO: 147912 - RNA, 22 nt, synthetic construct
  source 1..22: mol_type = other RNA
tatgtaggcacattcaagcaga

SEQ ID NO: 147913 - RNA, 22 nt, synthetic construct
  source 1..22: mol_type = other RNA
tatgtagggcaccgtgacagaa

SEQ ID NO: 147914 - RNA, 22 nt, synthetic construct
  source 1..22: mol_type = other RNA
tatgtatgtggctcacattgta

SEQ ID NO: 147915 - RNA, 22 nt, synthetic construct
  source 1..22: mol_type = other RNA
tatgtcactgtaagaataatgt

SEQ ID NO: 147916 - RNA, 22 nt, synthetic construct
  source 1..22: mol_type = other RNA
tatgtcagactcattgcctata

SEQ ID NO: 147917 - RNA, 22 nt, synthetic construct
  source 1..22: mol_type = other RNA
tatgtcagatggtaaattggtc

SEQ ID NO: 147918 - RNA, 22 nt, synthetic construct
  source 1..22: mol_type = other RNA
tatgtcagtcaacacactagcc

SEQ ID NO: 147919 - RNA, 22 nt, synthetic construct
  source 1..22: mol_type = other RNA
tatgtccagcccccagttttgt

SEQ ID NO: 147920 - RNA, 22 nt, synthetic construct
  source 1..22: mol_type = other RNA
tatgtcccctggggcctcagca

SEQ ID NO: 147921 - RNA, 22 nt, synthetic construct
  source 1..22: mol_type = other RNA
tatgtccttttgagtttggtgt

SEQ ID NO: 147922 - RNA, 22 nt, synthetic construct
  source 1..22: mol_type = other RNA
tatgtcgcatgaaaacagctag

SEQ ID NO: 147923 - RNA, 22 nt, synthetic construct
  source 1..22: mol_type = other RNA
tatgtcttgtggctgacatgtg

SEQ ID NO: 147924 - RNA, 22 nt, synthetic construct
  source 1..22: mol_type = other RNA
tatgtgaaaatactaacgatcc

SEQ ID NO: 147925 - RNA, 22 nt, synthetic construct
  source 1..22: mol_type = other RNA
tatgtgaaagtagaggactgcc

SEQ ID NO: 147926 - RNA, 22 nt, synthetic construct
  source 1..22: mol_type = other RNA
tatgtgacaaacacttttcaaa

SEQ ID NO: 147927 - RNA, 22 nt, synthetic construct
  source 1..22: mol_type = other RNA
tatgtgacagaatgcatctttt

SEQ ID NO: 147928 - RNA, 22 nt, synthetic construct
  source 1..22: mol_type = other RNA
tatgtgcagtctaaccattaac

SEQ ID NO: 147929 - RNA, 22 nt, synthetic construct
  source 1..22: mol_type = other RNA
tatgtgccatctccttaatcca

SEQ ID NO: 147930 - RNA, 22 nt, synthetic construct
  source 1..22: mol_type = other RNA
tatgtgctttctcaacactgtg

SEQ ID NO: 147931 - RNA, 22 nt, synthetic construct
  source 1..22: mol_type = other RNA
tatgtggaaaaatataggaaca

SEQ ID NO: 147932 - RNA, 22 nt, synthetic construct
  source 1..22: mol_type = other RNA
tatgtggggaatgctcataatt

SEQ ID NO: 147933 - RNA, 22 nt, synthetic construct
  source 1..22: mol_type = other RNA
tatgtgtacaatggggctttac

SEQ ID NO: 147934 - RNA, 22 nt, synthetic construct
  source 1..22: mol_type = other RNA
tatgtgtaggaaggaacacaca

SEQ ID NO: 147935 - RNA, 22 nt, synthetic construct
  source 1..22: mol_type = other RNA
tatgtgtagtcagtgaagatgc

SEQ ID NO: 147936 - RNA, 22 nt, synthetic construct
  source 1..22: mol_type = other RNA
tatgtgtctctgacatgagagc

SEQ ID NO: 147937 - RNA, 22 nt, synthetic construct
  source 1..22: mol_type = other RNA
tatgtgtgtataacccgttttt

SEQ ID NO: 147938 - RNA, 22 nt, synthetic construct
  source 1..22: mol_type = other RNA
tatgtgttaaaccattcttgca

SEQ ID NO: 147939 - RNA, 22 nt, synthetic construct
  source 1..22: mol_type = other RNA
tatgtgttacaactctaataac

SEQ ID NO: 147940 - RNA, 22 nt, synthetic construct
  source 1..22: mol_type = other RNA
tatgttaagtgtttgaaaagtg

SEQ ID NO: 147941 - RNA, 22 nt, synthetic construct
  source 1..22: mol_type = other RNA
tatgttaataaccctgttttgt

SEQ ID NO: 147942 - RNA, 22 nt, synthetic construct
  source 1..22: mol_type = other RNA
tatgttacacttccagtacatc

SEQ ID NO: 147943 - RNA, 22 nt, synthetic construct
  source 1..22: mol_type = other RNA
tatgttagatatcccatataag

SEQ ID NO: 147944 - RNA, 22 nt, synthetic construct
  source 1..22: mol_type = other RNA
tatgttataatgagatagacca

SEQ ID NO: 147945 - RNA, 22 nt, synthetic construct
  source 1..22: mol_type = other RNA
tatgttcatgaaccttcaccaa

SEQ ID NO: 147946 - RNA, 22 nt, synthetic construct
  source 1..22: mol_type = other RNA
tatgttccacatgttactcatt

SEQ ID NO: 147947 - RNA, 22 nt, synthetic construct
  source 1..22: mol_type = other RNA
tatgttcctatatttttccaca

SEQ ID NO: 147948 - RNA, 22 nt, synthetic construct
  source 1..22: mol_type = other RNA
tatgttgatgtaatggatcaag

SEQ ID NO: 147949 - RNA, 22 nt, synthetic construct
  source 1..22: mol_type = other RNA
tatgttgcacaaaagtgaaaac

SEQ ID NO: 147950 - RNA, 22 nt, synthetic construct
  source 1..22: mol_type = other RNA
tatgttgtgttttcattcgttc

SEQ ID NO: 147951 - RNA, 22 nt, synthetic construct
  source 1..22: mol_type = other RNA
tatgtttctcattcttctctaa

SEQ ID NO: 147952 - RNA, 22 nt, synthetic construct
  source 1..22: mol_type = other RNA
tatgtttgattagttgactcct

SEQ ID NO: 147953 - RNA, 22 nt, synthetic construct
  source 1..22: mol_type = other RNA
tatgtttgtaacttgttcatgt

SEQ ID NO: 147954 - RNA, 22 nt, synthetic construct
  source 1..22: mol_type = other RNA
tatgttttgcttcgaagcttat

SEQ ID NO: 147955 - RNA, 22 nt, synthetic construct
  source 1..22: mol_type = other RNA
tattaaaacatggatatttggc

SEQ ID NO: 147956 - RNA, 22 nt, synthetic construct
  source 1..22: mol_type = other RNA
tattaaaacccatgatctttgg

SEQ ID NO: 147957 - RNA, 22 nt, synthetic construct
  source 1..22: mol_type = other RNA
tattaaaagcacaagcacagag

SEQ ID NO: 147958 - RNA, 22 nt, synthetic construct
  source 1..22: mol_type = other RNA
tattaaaatgaacctgctttct

SEQ ID NO: 147959 - RNA, 22 nt, synthetic construct
  source 1..22: mol_type = other RNA
tattaaacctgttacatggttc

SEQ ID NO: 147960 - RNA, 22 nt, synthetic construct
  source 1..22: mol_type = other RNA
tattaaagtagaaggccctatg

SEQ ID NO: 147961 - RNA, 22 nt, synthetic construct
  source 1..22: mol_type = other RNA
tattaaatcatgatgtttggct

SEQ ID NO: 147962 - RNA, 22 nt, synthetic construct
  source 1..22: mol_type = other RNA
tattaaatgagacacctacaat

SEQ ID NO: 147963 - RNA, 22 nt, synthetic construct
  source 1..22: mol_type = other RNA
tattaacagaagggtatataca

SEQ ID NO: 147964 - RNA, 22 nt, synthetic construct
  source 1..22: mol_type = other RNA
tattaacataccgacggctcag

SEQ ID NO: 147965 - RNA, 22 nt, synthetic construct
  source 1..22: mol_type = other RNA
tattaaccaagaacaaccttat

SEQ ID NO: 147966 - RNA, 22 nt, synthetic construct
  source 1..22: mol_type = other RNA
tattaaccactgaaacttttct

SEQ ID NO: 147967 - RNA, 22 nt, synthetic construct
  source 1..22: mol_type = other RNA
tattaactcatttaaacgtcag

SEQ ID NO: 147968 - RNA, 22 nt, synthetic construct
  source 1..22: mol_type = other RNA
tattaagagtctcatctgtcaa

SEQ ID NO: 147969 - RNA, 22 nt, synthetic construct
  source 1..22: mol_type = other RNA
tattaagagtgtgctgactagt

SEQ ID NO: 147970 - RNA, 22 nt, synthetic construct
  source 1..22: mol_type = other RNA
tattaagataatgctgttctct

SEQ ID NO: 147971 - RNA, 22 nt, synthetic construct
  source 1..22: mol_type = other RNA
tattaagcaaaatggaagtgct

SEQ ID NO: 147972 - RNA, 22 nt, synthetic construct
  source 1..22: mol_type = other RNA
tattaatgtgttgtctgattca

SEQ ID NO: 147973 - RNA, 22 nt, synthetic construct
  source 1..22: mol_type = other RNA
tattaattctgaggcctcctgc

SEQ ID NO: 147974 - RNA, 22 nt, synthetic construct
  source 1..22: mol_type = other RNA
tattaatttggcttggggaaca

SEQ ID NO: 147975 - RNA, 22 nt, synthetic construct
  source 1..22: mol_type = other RNA
tattacacagaaagcctcttca

SEQ ID NO: 147976 - RNA, 22 nt, synthetic construct
  source 1..22: mol_type = other RNA
tattacagtaaggtttccctgg

SEQ ID NO: 147977 - RNA, 22 nt, synthetic construct
  source 1..22: mol_type = other RNA
tattaccagcttacagcagatc

SEQ ID NO: 147978 - RNA, 22 nt, synthetic construct
  source 1..22: mol_type = other RNA
tattacctatgaataggtgtgt

SEQ ID NO: 147979 - RNA, 22 nt, synthetic construct
  source 1..22: mol_type = other RNA
tattacctcccatgcattcgtc

SEQ ID NO: 147980 - RNA, 22 nt, synthetic construct
  source 1..22: mol_type = other RNA
tattactcagtctcgaaaagga

SEQ ID NO: 147981 - RNA, 22 nt, synthetic construct
  source 1..22: mol_type = other RNA
tattagaactagaactgtgtta

SEQ ID NO: 147982 - RNA, 22 nt, synthetic construct
  source 1..22: mol_type = other RNA
tattagagtgaaaagaaacaag

SEQ ID NO: 147983 - RNA, 22 nt, synthetic construct
  source 1..22: mol_type = other RNA
tattagatagtggtttgaagct

SEQ ID NO: 147984 - RNA, 22 nt, synthetic construct
  source 1..22: mol_type = other RNA
tattagcaaagaggcaaaactc

SEQ ID NO: 147985 - RNA, 22 nt, synthetic construct
  source 1..22: mol_type = other RNA
tattagctacaaaagggaaaac

SEQ ID NO: 147986 - RNA, 22 nt, synthetic construct
  source 1..22: mol_type = other RNA
tattagctgtctggattgattc

SEQ ID NO: 147987 - RNA, 22 nt, synthetic construct
  source 1..22: mol_type = other RNA
tattagcttgctagtagcagaa

SEQ ID NO: 147988 - RNA, 22 nt, synthetic construct
  source 1..22: mol_type = other RNA
tattaggatgtgtacccgtgtg

SEQ ID NO: 147989 - RNA, 22 nt, synthetic construct
  source 1..22: mol_type = other RNA
tattagggtaatgctggcttca

SEQ ID NO: 147990 - RNA, 22 nt, synthetic construct
  source 1..22: mol_type = other RNA
tattaggtgcacacaacactca

SEQ ID NO: 147991 - RNA, 22 nt, synthetic construct
  source 1..22: mol_type = other RNA
tattagtagttaggtggtttga

SEQ ID NO: 147992 - RNA, 22 nt, synthetic construct
  source 1..22: mol_type = other RNA
tattagtctgtagcttcacgtg

SEQ ID NO: 147993 - RNA, 22 nt, synthetic construct
  source 1..22: mol_type = other RNA
tattagttaaccttctggggtt

SEQ ID NO: 147994 - RNA, 22 nt, synthetic construct
  source 1..22: mol_type = other RNA
tattagttgtacttgacacaaa

SEQ ID NO: 147995 - RNA, 22 nt, synthetic construct
  source 1..22: mol_type = other RNA
tattataagttgggagtctatt

SEQ ID NO: 147996 - RNA, 22 nt, synthetic construct
  source 1..22: mol_type = other RNA
tattatgaaccattgtaaacca

SEQ ID NO: 147997 - RNA, 22 nt, synthetic construct
  source 1..22: mol_type = other RNA
tattatgagcagttgtatgcca

SEQ ID NO: 147998 - RNA, 22 nt, synthetic construct
  source 1..22: mol_type = other RNA
tattatggtctttttccaggac

SEQ ID NO: 147999 - RNA, 22 nt, synthetic construct
  source 1..22: mol_type = other RNA
tattatgtgcaagttctctttt

SEQ ID NO: 148000 - RNA, 22 nt, synthetic construct
  source 1..22: mol_type = other RNA
tattattctaaacacacgggct

SEQ ID NO: 148001 - RNA, 22 nt, synthetic construct
  source 1..22: mol_type = other RNA
tattatttctgtcatctgaatc

SEQ ID NO: 148002 - RNA, 22 nt, synthetic construct
  source 1..22: mol_type = other RNA
tattattttttcccgctacaca

SEQ ID NO: 148003 - RNA, 22 nt, synthetic construct
  source 1..22: mol_type = other RNA
tattcaaaacaaaacacatggc

SEQ ID NO: 148004 - RNA, 22 nt, synthetic construct
  source 1..22: mol_type = other RNA
tattcaaagatcatttcacttg

SEQ ID NO: 148005 - RNA, 22 nt, synthetic construct
  source 1..22: mol_type = other RNA
tattcaaataattgctgcagtt

SEQ ID NO: 148006 - RNA, 22 nt, synthetic construct
  source 1..22: mol_type = other RNA
tattcaacaggtataaagtttc

SEQ ID NO: 148007 - RNA, 22 nt, synthetic construct
  source 1..22: mol_type = other RNA
tattcaacctataagacccagt

SEQ ID NO: 148008 - RNA, 22 nt, synthetic construct
  source 1..22: mol_type = other RNA
tattcaagacaagcaaggaagg

SEQ ID NO: 148009 - RNA, 22 nt, synthetic construct
  source 1..22: mol_type = other RNA
tattcaagtttcaccctgcgaa

SEQ ID NO: 148010 - RNA, 22 nt, synthetic construct
  source 1..22: mol_type = other RNA
tattcacactgctcctgccttt

SEQ ID NO: 148011 - RNA, 22 nt, synthetic construct
  source 1..22: mol_type = other RNA
tattcacccaagaatttcatgc

SEQ ID NO: 148012 - RNA, 22 nt, synthetic construct
  source 1..22: mol_type = other RNA
tattcacttttggaatttaagg

SEQ ID NO: 148013 - RNA, 22 nt, synthetic construct
  source 1..22: mol_type = other RNA
tattcaggacagattaaaatca

SEQ ID NO: 148014 - RNA, 22 nt, synthetic construct
  source 1..22: mol_type = other RNA
tattcagggggctaaatgctca

SEQ ID NO: 148015 - RNA, 22 nt, synthetic construct
  source 1..22: mol_type = other RNA
tattcatacgttaactgtattg

SEQ ID NO: 148016 - RNA, 22 nt, synthetic construct
  source 1..22: mol_type = other RNA
tattcataggtaatactctagt

SEQ ID NO: 148017 - RNA, 22 nt, synthetic construct
  source 1..22: mol_type = other RNA
tattcatagtagctgttgaatt

SEQ ID NO: 148018 - RNA, 22 nt, synthetic construct
  source 1..22: mol_type = other RNA
tattcatccagtttaaagcttt

SEQ ID NO: 148019 - RNA, 22 nt, synthetic construct
  source 1..22: mol_type = other RNA
tattcatgctgtgaatttggat

SEQ ID NO: 148020 - RNA, 22 nt, synthetic construct
  source 1..22: mol_type = other RNA
tattcatgtttgtggttttaac

SEQ ID NO: 148021 - RNA, 22 nt, synthetic construct
  source 1..22: mol_type = other RNA
tattcattaccaggctggaaga

SEQ ID NO: 148022 - RNA, 22 nt, synthetic construct
  source 1..22: mol_type = other RNA
tattcattctttttactcgagg

SEQ ID NO: 148023 - RNA, 22 nt, synthetic construct
  source 1..22: mol_type = other RNA
tattcatttccaaagatcatgg

SEQ ID NO: 148024 - RNA, 22 nt, synthetic construct
  source 1..22: mol_type = other RNA
tattccaaatgtctgtctttat

SEQ ID NO: 148025 - RNA, 22 nt, synthetic construct
  source 1..22: mol_type = other RNA
tattccagagaattcagagtgg

SEQ ID NO: 148026 - RNA, 22 nt, synthetic construct
  source 1..22: mol_type = other RNA
tattccaggatcaaatctggct

SEQ ID NO: 148027 - RNA, 22 nt, synthetic construct
  source 1..22: mol_type = other RNA
tattccataaaaaccaaacact

SEQ ID NO: 148028 - RNA, 22 nt, synthetic construct
  source 1..22: mol_type = other RNA
tattccataagatctgtctttg

SEQ ID NO: 148029 - RNA, 22 nt, synthetic construct
  source 1..22: mol_type = other RNA
tattccatggtatgtgccatct

SEQ ID NO: 148030 - RNA, 22 nt, synthetic construct
  source 1..22: mol_type = other RNA
tattccattgttctctttgttt

SEQ ID NO: 148031 - RNA, 22 nt, synthetic construct
  source 1..22: mol_type = other RNA
tattccatttttctgaccaact

SEQ ID NO: 148032 - RNA, 22 nt, synthetic construct
  source 1..22: mol_type = other RNA
tattcccaagatcataagcttt

SEQ ID NO: 148033 - RNA, 22 nt, synthetic construct
  source 1..22: mol_type = other RNA
tattccccagggaaaccttact

SEQ ID NO: 148034 - RNA, 22 nt, synthetic construct
  source 1..22: mol_type = other RNA
tattcccctggatcccccagcc

SEQ ID NO: 148035 - RNA, 22 nt, synthetic construct
  source 1..22: mol_type = other RNA
tattccctacattgccttcaag

SEQ ID NO: 148036 - RNA, 22 nt, synthetic construct
  source 1..22: mol_type = other RNA
tattcctatcagaagcacacca

SEQ ID NO: 148037 - RNA, 22 nt, synthetic construct
  source 1..22: mol_type = other RNA
tattcctctcttggaatgtgca

SEQ ID NO: 148038 - RNA, 22 nt, synthetic construct
  source 1..22: mol_type = other RNA
tattcgttccagcagggtaaag

SEQ ID NO: 148039 - RNA, 22 nt, synthetic construct
  source 1..22: mol_type = other RNA
tattctaaacacacgggctggg

SEQ ID NO: 148040 - RNA, 22 nt, synthetic construct
  source 1..22: mol_type = other RNA
tattctaaacctgaggtcttta

SEQ ID NO: 148041 - RNA, 22 nt, synthetic construct
  source 1..22: mol_type = other RNA
tattctaagtttgccaaagatt

SEQ ID NO: 148042 - RNA, 22 nt, synthetic construct
  source 1..22: mol_type = other RNA
tattctacagaaaacccttcat

SEQ ID NO: 148043 - RNA, 22 nt, synthetic construct
  source 1..22: mol_type = other RNA
tattctagttctagctctgtct

SEQ ID NO: 148044 - RNA, 22 nt, synthetic construct
  source 1..22: mol_type = other RNA
tattctatcatcaagacagagc

SEQ ID NO: 148045 - RNA, 22 nt, synthetic construct
  source 1..22: mol_type = other RNA
tattctctttctgaaattctca

SEQ ID NO: 148046 - RNA, 22 nt, synthetic construct
  source 1..22: mol_type = other RNA
tattctgaactttcaacctaac

SEQ ID NO: 148047 - RNA, 22 nt, synthetic construct
  source 1..22: mol_type = other RNA
tattctgacctaaagttttaag

SEQ ID NO: 148048 - RNA, 22 nt, synthetic construct
  source 1..22: mol_type = other RNA
tattctggggctcaagtaagtg

SEQ ID NO: 148049 - RNA, 22 nt, synthetic construct
  source 1..22: mol_type = other RNA
tattctgtgaattgtgacagtt

SEQ ID NO: 148050 - RNA, 22 nt, synthetic construct
  source 1..22: mol_type = other RNA
tattctgttctagctcctggga

SEQ ID NO: 148051 - RNA, 22 nt, synthetic construct
  source 1..22: mol_type = other RNA
tattcttacagtgacatatgcc

SEQ ID NO: 148052 - RNA, 22 nt, synthetic construct
  source 1..22: mol_type = other RNA
tattcttatccctacctaaaaa

SEQ ID NO: 148053 - RNA, 22 nt, synthetic construct
  source 1..22: mol_type = other RNA
tattcttcagcaaggaccatta

SEQ ID NO: 148054 - RNA, 22 nt, synthetic construct
  source 1..22: mol_type = other RNA
tattcttgttttcttgagatgg

SEQ ID NO: 148055 - RNA, 22 nt, synthetic construct
  source 1..22: mol_type = other RNA
tattcttttagagtaactgtca

SEQ ID NO: 148056 - RNA, 22 nt, synthetic construct
  source 1..22: mol_type = other RNA
tattctttttctagtttgaggt

SEQ ID NO: 148057 - RNA, 22 nt, synthetic construct
  source 1..22: mol_type = other RNA
tattgaaacgatgcattccaga

SEQ ID NO: 148058 - RNA, 22 nt, synthetic construct
  source 1..22: mol_type = other RNA
tattgaaagcccttgagtattt

SEQ ID NO: 148059 - RNA, 22 nt, synthetic construct
  source 1..22: mol_type = other RNA
tattgaactgttacttgactat

SEQ ID NO: 148060 - RNA, 22 nt, synthetic construct
  source 1..22: mol_type = other RNA
tattgaagagggaacattttca

SEQ ID NO: 148061 - RNA, 22 nt, synthetic construct
  source 1..22: mol_type = other RNA
tattgaagccagcacctaacaa

SEQ ID NO: 148062 - RNA, 22 nt, synthetic construct
  source 1..22: mol_type = other RNA
tattgaataatttccaggtcat

SEQ ID NO: 148063 - RNA, 22 nt, synthetic construct
  source 1..22: mol_type = other RNA
tattgacaagacgtgtacataa

SEQ ID NO: 148064 - RNA, 22 nt, synthetic construct
  source 1..22: mol_type = other RNA
tattgagaagcagaaaatcagt

SEQ ID NO: 148065 - RNA, 22 nt, synthetic construct
  source 1..22: mol_type = other RNA
tattgagagtgaaaacacaaac

SEQ ID NO: 148066 - RNA, 22 nt, synthetic construct
  source 1..22: mol_type = other RNA
tattgagcctgttccgatttta

SEQ ID NO: 148067 - RNA, 22 nt, synthetic construct
  source 1..22: mol_type = other RNA
tattgagtctgtagggtgacta

SEQ ID NO: 148068 - RNA, 22 nt, synthetic construct
  source 1..22: mol_type = other RNA
tattgagtgtagctgtggctca

SEQ ID NO: 148069 - RNA, 22 nt, synthetic construct
  source 1..22: mol_type = other RNA
tattgataagcacatggtgata

SEQ ID NO: 148070 - RNA, 22 nt, synthetic construct
  source 1..22: mol_type = other RNA
tattgattcagatgacagaaat

SEQ ID NO: 148071 - RNA, 22 nt, synthetic construct
  source 1..22: mol_type = other RNA
tattgattggcaaatctttagt

SEQ ID NO: 148072 - RNA, 22 nt, synthetic construct
  source 1..22: mol_type = other RNA
tattgatttgaccatgggacaa

SEQ ID NO: 148073 - RNA, 22 nt, synthetic construct
  source 1..22: mol_type = other RNA
tattgcaaactaagtggtattc

SEQ ID NO: 148074 - RNA, 22 nt, synthetic construct
  source 1..22: mol_type = other RNA
tattgcatagggatgttgccta

SEQ ID NO: 148075 - RNA, 22 nt, synthetic construct
  source 1..22: mol_type = other RNA
tattgcattgaatctgtagatt

SEQ ID NO: 148076 - RNA, 22 nt, synthetic construct
  source 1..22: mol_type = other RNA
tattgccaggtttgtgcttgga

SEQ ID NO: 148077 - RNA, 22 nt, synthetic construct
  source 1..22: mol_type = other RNA
tattgcccaggctggtcttgta

SEQ ID NO: 148078 - RNA, 22 nt, synthetic construct
  source 1..22: mol_type = other RNA
tattggaaaactctgtttcctt

SEQ ID NO: 148079 - RNA, 22 nt, synthetic construct
  source 1..22: mol_type = other RNA
tattggattaagggcccaccct

SEQ ID NO: 148080 - RNA, 22 nt, synthetic construct
  source 1..22: mol_type = other RNA
tattggcaacattttaattcca

SEQ ID NO: 148081 - RNA, 22 nt, synthetic construct
  source 1..22: mol_type = other RNA
tattggcataaagacagacatt

SEQ ID NO: 148082 - RNA, 22 nt, synthetic construct
  source 1..22: mol_type = other RNA
tattggccaggctggttccaaa

SEQ ID NO: 148083 - RNA, 22 nt, synthetic construct
  source 1..22: mol_type = other RNA
tattggcttatagtgttctttt

SEQ ID NO: 148084 - RNA, 22 nt, synthetic construct
  source 1..22: mol_type = other RNA
tattggtaatgttatatttccg

SEQ ID NO: 148085 - RNA, 22 nt, synthetic construct
  source 1..22: mol_type = other RNA
tattgtaacttgaattcagatg

SEQ ID NO: 148086 - RNA, 22 nt, synthetic construct
  source 1..22: mol_type = other RNA
tattgtaccttgatttatggcc

SEQ ID NO: 148087 - RNA, 22 nt, synthetic construct
  source 1..22: mol_type = other RNA
tattgtaggaaagcctgtgaca

SEQ ID NO: 148088 - RNA, 22 nt, synthetic construct
  source 1..22: mol_type = other RNA
tattgtaggtgtctcatttaat

SEQ ID NO: 148089 - RNA, 22 nt, synthetic construct
  source 1..22: mol_type = other RNA
tattgtatatacccttctgtta

SEQ ID NO: 148090 - RNA, 22 nt, synthetic construct
  source 1..22: mol_type = other RNA
tattgtcaaggtcatcctttcc

SEQ ID NO: 148091 - RNA, 22 nt, synthetic construct
  source 1..22: mol_type = other RNA
tattgtcaatggggaactttat

SEQ ID NO: 148092 - RNA, 22 nt, synthetic construct
  source 1..22: mol_type = other RNA
tattgtcagtaattctgcagtg

SEQ ID NO: 148093 - RNA, 22 nt, synthetic construct
  source 1..22: mol_type = other RNA
tattgtcattaccttatagatg

SEQ ID NO: 148094 - RNA, 22 nt, synthetic construct
  source 1..22: mol_type = other RNA
tattgtctgcaagcagatctgc

SEQ ID NO: 148095 - RNA, 22 nt, synthetic construct
  source 1..22: mol_type = other RNA
tattgtcttctaaccctcaaat

SEQ ID NO: 148096 - RNA, 22 nt, synthetic construct
  source 1..22: mol_type = other RNA
tattgtcttttctatctgaaca

SEQ ID NO: 148097 - RNA, 22 nt, synthetic construct
  source 1..22: mol_type = other RNA
tattgtgctgaaaccccgcata

SEQ ID NO: 148098 - RNA, 22 nt, synthetic construct
  source 1..22: mol_type = other RNA
tattgttgaattgttggagttc

SEQ ID NO: 148099 - RNA, 22 nt, synthetic construct
  source 1..22: mol_type = other RNA
tattgtttcacttttctggttt

SEQ ID NO: 148100 - RNA, 22 nt, synthetic construct
  source 1..22: mol_type = other RNA
tatttaacaccatggcaggttt

SEQ ID NO: 148101 - RNA, 22 nt, synthetic construct
  source 1..22: mol_type = other RNA
tatttaatctctcttgacctta

SEQ ID NO: 148102 - RNA, 22 nt, synthetic construct
  source 1..22: mol_type = other RNA
tatttaatctgtcagcagttca

SEQ ID NO: 148103 - RNA, 22 nt, synthetic construct
  source 1..22: mol_type = other RNA
tatttaatgagtagtacttctg

SEQ ID NO: 148104 - RNA, 22 nt, synthetic construct
  source 1..22: mol_type = other RNA
tatttaatgtgctgtccatttc

SEQ ID NO: 148105 - RNA, 22 nt, synthetic construct
  source 1..22: mol_type = other RNA
tatttactaagaagtgaaactg

SEQ ID NO: 148106 - RNA, 22 nt, synthetic construct
  source 1..22: mol_type = other RNA
tatttactagatcaagcccttc

SEQ ID NO: 148107 - RNA, 22 nt, synthetic construct
  source 1..22: mol_type = other RNA
tatttactgcttgctgcactgg

SEQ ID NO: 148108 - RNA, 22 nt, synthetic construct
  source 1..22: mol_type = other RNA
tatttacttctacagaatgttc

SEQ ID NO: 148109 - RNA, 22 nt, synthetic construct
  source 1..22: mol_type = other RNA
tatttagagggatgaatgttgt

SEQ ID NO: 148110 - RNA, 22 nt, synthetic construct
  source 1..22: mol_type = other RNA
tatttagagtttgcattacatg

SEQ ID NO: 148111 - RNA, 22 nt, synthetic construct
  source 1..22: mol_type = other RNA
tatttagcccatgtctaaagta

SEQ ID NO: 148112 - RNA, 22 nt, synthetic construct
  source 1..22: mol_type = other RNA
tatttaggccctctataattct

SEQ ID NO: 148113 - RNA, 22 nt, synthetic construct
  source 1..22: mol_type = other RNA
tatttagggagcatatatactc

SEQ ID NO: 148114 - RNA, 22 nt, synthetic construct
  source 1..22: mol_type = other RNA
tatttagtgaaatagttggtca

SEQ ID NO: 148115 - RNA, 22 nt, synthetic construct
  source 1..22: mol_type = other RNA
tatttatacaggtgcttacaga

SEQ ID NO: 148116 - RNA, 22 nt, synthetic construct
  source 1..22: mol_type = other RNA
tatttatcatgtcttcttggat

SEQ ID NO: 148117 - RNA, 22 nt, synthetic construct
  source 1..22: mol_type = other RNA
tatttatgctgatgaactacac

SEQ ID NO: 148118 - RNA, 22 nt, synthetic construct
  source 1..22: mol_type = other RNA
tatttatgttgcacaaaagtga

SEQ ID NO: 148119 - RNA, 22 nt, synthetic construct
  source 1..22: mol_type = other RNA
tatttatttttgagacaggttg

SEQ ID NO: 148120 - RNA, 22 nt, synthetic construct
  source 1..22: mol_type = other RNA
tatttccacgggtaaaaataaa

SEQ ID NO: 148121 - RNA, 22 nt, synthetic construct
  source 1..22: mol_type = other RNA
tatttccagcctttaatttagc

SEQ ID NO: 148122 - RNA, 22 nt, synthetic construct
  source 1..22: mol_type = other RNA
tatttccagggggtatggagac

SEQ ID NO: 148123 - RNA, 22 nt, synthetic construct
  source 1..22: mol_type = other RNA
tatttccccattagagtaagca

SEQ ID NO: 148124 - RNA, 22 nt, synthetic construct
  source 1..22: mol_type = other RNA
tatttcccttttggatgcagat

SEQ ID NO: 148125 - RNA, 22 nt, synthetic construct
  source 1..22: mol_type = other RNA
tatttccgatgataccttcttg

SEQ ID NO: 148126 - RNA, 22 nt, synthetic construct
  source 1..22: mol_type = other RNA
tatttccgtatccagtggtttt

SEQ ID NO: 148127 - RNA, 22 nt, synthetic construct
  source 1..22: mol_type = other RNA
tatttccttaagccatttcagg

SEQ ID NO: 148128 - RNA, 22 nt, synthetic construct
  source 1..22: mol_type = other RNA
tatttccttatagtattacctc

SEQ ID NO: 148129 - RNA, 22 nt, synthetic construct
  source 1..22: mol_type = other RNA
tatttccttccagtttatatgc

SEQ ID NO: 148130 - RNA, 22 nt, synthetic construct
  source 1..22: mol_type = other RNA
tatttcgaattatgctaacatg

SEQ ID NO: 148131 - RNA, 22 nt, synthetic construct
  source 1..22: mol_type = other RNA
tatttcgcaaagcaacatgcta

SEQ ID NO: 148132 - RNA, 22 nt, synthetic construct
  source 1..22: mol_type = other RNA
tatttcgcctagataagaaaat

SEQ ID NO: 148133 - RNA, 22 nt, synthetic construct
  source 1..22: mol_type = other RNA
tatttctaaatcaacagtgtac

SEQ ID NO: 148134 - RNA, 22 nt, synthetic construct
  source 1..22: mol_type = other RNA
tatttctcatctgtcactttcc

SEQ ID NO: 148135 - RNA, 22 nt, synthetic construct
  source 1..22: mol_type = other RNA
tatttctctttaaagctgaact

SEQ ID NO: 148136 - RNA, 22 nt, synthetic construct
  source 1..22: mol_type = other RNA
tatttctgggctctctattcca

SEQ ID NO: 148137 - RNA, 22 nt, synthetic construct
  source 1..22: mol_type = other RNA
tatttctgtaaacatgaacaag

SEQ ID NO: 148138 - RNA, 22 nt, synthetic construct
  source 1..22: mol_type = other RNA
tatttctgtatcttttcagtcc

SEQ ID NO: 148139 - RNA, 22 nt, synthetic construct
  source 1..22: mol_type = other RNA
tatttctgtcatctgaatcaat

SEQ ID NO: 148140 - RNA, 22 nt, synthetic construct
  source 1..22: mol_type = other RNA
tatttctgttagatggtgctga

SEQ ID NO: 148141 - RNA, 22 nt, synthetic construct
  source 1..22: mol_type = other RNA
tatttcttctccctcttcgctc

SEQ ID NO: 148142 - RNA, 22 nt, synthetic construct
  source 1..22: mol_type = other RNA
tatttcttgacctcagtggtag

SEQ ID NO: 148143 - RNA, 22 nt, synthetic construct
  source 1..22: mol_type = other RNA
tatttctttccattcaatcctt

SEQ ID NO: 148144 - RNA, 22 nt, synthetic construct
  source 1..22: mol_type = other RNA
tatttctttttcttgctttgct

SEQ ID NO: 148145 - RNA, 22 nt, synthetic construct
  source 1..22: mol_type = other RNA
tatttgaataaggtctgtaagt

SEQ ID NO: 148146 - RNA, 22 nt, synthetic construct
  source 1..22: mol_type = other RNA
tatttgagagtaagttgcatac

SEQ ID NO: 148147 - RNA, 22 nt, synthetic construct
  source 1..22: mol_type = other RNA
tatttgcagtagtattgaactg

SEQ ID NO: 148148 - RNA, 22 nt, synthetic construct
  source 1..22: mol_type = other RNA
tatttgcggcttgattagcttc

SEQ ID NO: 148149 - RNA, 22 nt, synthetic construct
  source 1..22: mol_type = other RNA
tatttgctgtcaggcaagggac

SEQ ID NO: 148150 - RNA, 22 nt, synthetic construct
  source 1..22: mol_type = other RNA
tatttggaaatatggtcactgc

SEQ ID NO: 148151 - RNA, 22 nt, synthetic construct
  source 1..22: mol_type = other RNA
tatttggaagagagaaggctgc

SEQ ID NO: 148152 - RNA, 22 nt, synthetic construct
  source 1..22: mol_type = other RNA
tatttggctgttaccatttgac

SEQ ID NO: 148153 - RNA, 22 nt, synthetic construct
  source 1..22: mol_type = other RNA
tatttggggattctgctactag

SEQ ID NO: 148154 - RNA, 22 nt, synthetic construct
  source 1..22: mol_type = other RNA
tatttggggctaggatttcagt

SEQ ID NO: 148155 - RNA, 22 nt, synthetic construct
  source 1..22: mol_type = other RNA
tatttgtgcatactgtgatgat

SEQ ID NO: 148156 - RNA, 22 nt, synthetic construct
  source 1..22: mol_type = other RNA
tatttgttactgatctgctcaa

SEQ ID NO: 148157 - RNA, 22 nt, synthetic construct
  source 1..22: mol_type = other RNA
tatttgttcaagcgctgaagta

SEQ ID NO: 148158 - RNA, 22 nt, synthetic construct
  source 1..22: mol_type = other RNA
tatttgttcagaaatagactcc

SEQ ID NO: 148159 - RNA, 22 nt, synthetic construct
  source 1..22: mol_type = other RNA
tatttgttctgtcacggtgccc

SEQ ID NO: 148160 - RNA, 22 nt, synthetic construct
  source 1..22: mol_type = other RNA
tattttaaaagtcagctaggcg

SEQ ID NO: 148161 - RNA, 22 nt, synthetic construct
  source 1..22: mol_type = other RNA
tattttaagattctctttaggg

SEQ ID NO: 148162 - RNA, 22 nt, synthetic construct
  source 1..22: mol_type = other RNA
tattttaagttctagggaacat

SEQ ID NO: 148163 - RNA, 22 nt, synthetic construct
  source 1..22: mol_type = other RNA
tattttaatcgaatcctcacaa

SEQ ID NO: 148164 - RNA, 22 nt, synthetic construct
  source 1..22: mol_type = other RNA
tattttacaccatgcaggttca

SEQ ID NO: 148165 - RNA, 22 nt, synthetic construct
  source 1..22: mol_type = other RNA
tattttaggctctgtggtttct

SEQ ID NO: 148166 - RNA, 22 nt, synthetic construct
  source 1..22: mol_type = other RNA
tattttataatgggcaatcaga

SEQ ID NO: 148167 - RNA, 22 nt, synthetic construct
  source 1..22: mol_type = other RNA
tattttatgctttgtctctgga

SEQ ID NO: 148168 - RNA, 22 nt, synthetic construct
  source 1..22: mol_type = other RNA
tattttatgtacacgtcttgtc

SEQ ID NO: 148169 - RNA, 22 nt, synthetic construct
  source 1..22: mol_type = other RNA
tattttattgataagcacatgg

SEQ ID NO: 148170 - RNA, 22 nt, synthetic construct
  source 1..22: mol_type = other RNA
tattttcaaggcttgtgcatca

SEQ ID NO: 148171 - RNA, 22 nt, synthetic construct
  source 1..22: mol_type = other RNA
tattttcataacaaagctctga

SEQ ID NO: 148172 - RNA, 22 nt, synthetic construct
  source 1..22: mol_type = other RNA
tattttcatggttttaatgggc

SEQ ID NO: 148173 - RNA, 22 nt, synthetic construct
  source 1..22: mol_type = other RNA
tattttcctaaaactccccatg

SEQ ID NO: 148174 - RNA, 22 nt, synthetic construct
  source 1..22: mol_type = other RNA
tattttcctaaccactgttatc

SEQ ID NO: 148175 - RNA, 22 nt, synthetic construct
  source 1..22: mol_type = other RNA
tattttcctccttctgctcact

SEQ ID NO: 148176 - RNA, 22 nt, synthetic construct
  source 1..22: mol_type = other RNA
tattttccttatccattcatct

SEQ ID NO: 148177 - RNA, 22 nt, synthetic construct
  source 1..22: mol_type = other RNA
tattttcgtgtactgaaaccag

SEQ ID NO: 148178 - RNA, 22 nt, synthetic construct
  source 1..22: mol_type = other RNA
tattttctaagagccaaagaca

SEQ ID NO: 148179 - RNA, 22 nt, synthetic construct
  source 1..22: mol_type = other RNA
tattttctatagtggctgcacc

SEQ ID NO: 148180 - RNA, 22 nt, synthetic construct
  source 1..22: mol_type = other RNA
tattttctgcatttggtttgca

SEQ ID NO: 148181 - RNA, 22 nt, synthetic construct
  source 1..22: mol_type = other RNA
tattttctgtcattctgcagtt

SEQ ID NO: 148182 - RNA, 22 nt, synthetic construct
  source 1..22: mol_type = other RNA
tattttctttgagtagttcatg

SEQ ID NO: 148183 - RNA, 22 nt, synthetic construct
  source 1..22: mol_type = other RNA
tattttggaagactatgagaag

SEQ ID NO: 148184 - RNA, 22 nt, synthetic construct
  source 1..22: mol_type = other RNA
tattttggtagagatggggtct

SEQ ID NO: 148185 - RNA, 22 nt, synthetic construct
  source 1..22: mol_type = other RNA
tattttgtaacgtgtatagctt

SEQ ID NO: 148186 - RNA, 22 nt, synthetic construct
  source 1..22: mol_type = other RNA
tattttgtgggaattcagtcac

SEQ ID NO: 148187 - RNA, 22 nt, synthetic construct
  source 1..22: mol_type = other RNA
tattttgttattagggtaatgc

SEQ ID NO: 148188 - RNA, 22 nt, synthetic construct
  source 1..22: mol_type = other RNA
tattttgttgacatcctttgcg

SEQ ID NO: 148189 - RNA, 22 nt, synthetic construct
  source 1..22: mol_type = other RNA
tattttgttgttgttgtttctg

SEQ ID NO: 148190 - RNA, 22 nt, synthetic construct
  source 1..22: mol_type = other RNA
tatttttacccaacatgagaga

SEQ ID NO: 148191 - RNA, 22 nt, synthetic construct
  source 1..22: mol_type = other RNA
tatttttacccgtggaaatact

SEQ ID NO: 148192 - RNA, 22 nt, synthetic construct
  source 1..22: mol_type = other RNA
tatttttagtagagatgaggtt

SEQ ID NO: 148193 - RNA, 22 nt, synthetic construct
  source 1..22: mol_type = other RNA
tatttttatgcatttggtctca

SEQ ID NO: 148194 - RNA, 22 nt, synthetic construct
  source 1..22: mol_type = other RNA
tatttttcacaaacacacaaac

SEQ ID NO: 148195 - RNA, 22 nt, synthetic construct
  source 1..22: mol_type = other RNA
tatttttcagattgaccttgta

SEQ ID NO: 148196 - RNA, 22 nt, synthetic construct
  source 1..22: mol_type = other RNA
tatttttccacataaagtcttg

SEQ ID NO: 148197 - RNA, 22 nt, synthetic construct
  source 1..22: mol_type = other RNA
tatttttctaaactggttttcc

SEQ ID NO: 148198 - RNA, 22 nt, synthetic construct
  source 1..22: mol_type = other RNA
tatttttctgcaattggaagac

SEQ ID NO: 148199 - RNA, 22 nt, synthetic construct
  source 1..22: mol_type = other RNA
tatttttgagacaggttgttgc

SEQ ID NO: 148200 - RNA, 22 nt, synthetic construct
  source 1..22: mol_type = other RNA
tatttttgctcacacttactaa

SEQ ID NO: 148201 - RNA, 22 nt, synthetic construct
  source 1..22: mol_type = other RNA
tatttttgtccttcattctgtt

SEQ ID NO: 148202 - RNA, 22 nt, synthetic construct
  source 1..22: mol_type = other RNA
tatttttgtctggtggacaaaa

SEQ ID NO: 148203 - RNA, 22 nt, synthetic construct
  source 1..22: mol_type = other RNA
tattttttcccagatacgttaa

SEQ ID NO: 148204 - RNA, 22 nt, synthetic construct
  source 1..22: mol_type = other RNA
tattttttcccgctacacaagt

SEQ ID NO: 148205 - RNA, 22 nt, synthetic construct
  source 1..22: mol_type = other RNA
tattttttcttcccatctcact

SEQ ID NO: 148206 - RNA, 22 nt, synthetic construct
  source 1..22: mol_type = other RNA
tcaaaaaacaacaacaacaaca

SEQ ID NO: 148207 - RNA, 22 nt, synthetic construct
  source 1..22: mol_type = other RNA
tcaaaaacactgtattttgaac

SEQ ID NO: 148208 - RNA, 22 nt, synthetic construct
  source 1..22: mol_type = other RNA
tcaaaaacagcatatacatgac

SEQ ID NO: 148209 - RNA, 22 nt, synthetic construct
  source 1..22: mol_type = other RNA
tcaaaaacccaactctttcttt

SEQ ID NO: 148210 - RNA, 22 nt, synthetic construct
  source 1..22: mol_type = other RNA
tcaaaaacctcccaacaggctg

SEQ ID NO: 148211 - RNA, 22 nt, synthetic construct
  source 1..22: mol_type = other RNA
tcaaaaagagaacacacaattt

SEQ ID NO: 148212 - RNA, 22 nt, synthetic construct
  source 1..22: mol_type = other RNA
tcaaaaatactcaagggctttc

SEQ ID NO: 148213 - RNA, 22 nt, synthetic construct
  source 1..22: mol_type = other RNA
tcaaaaatgtgtctagtgaatg

SEQ ID NO: 148214 - RNA, 22 nt, synthetic construct
  source 1..22: mol_type = other RNA
tcaaaacaaaacacatggcatc

SEQ ID NO: 148215 - RNA, 22 nt, synthetic construct
  source 1..22: mol_type = other RNA
tcaaaacaaacaaacagaaagg

SEQ ID NO: 148216 - RNA, 22 nt, synthetic construct
  source 1..22: mol_type = other RNA
tcaaaacaataagacaccgctc

SEQ ID NO: 148217 - RNA, 22 nt, synthetic construct
  source 1..22: mol_type = other RNA
tcaaaacacttctgtgatcaga

SEQ ID NO: 148218 - RNA, 22 nt, synthetic construct
  source 1..22: mol_type = other RNA
tcaaaacatcatctaatttccc

SEQ ID NO: 148219 - RNA, 22 nt, synthetic construct
  source 1..22: mol_type = other RNA
tcaaaaccaaagaaaggggaag

SEQ ID NO: 148220 - RNA, 22 nt, synthetic construct
  source 1..22: mol_type = other RNA
tcaaaaccaggaggtttgcact

SEQ ID NO: 148221 - RNA, 22 nt, synthetic construct
  source 1..22: mol_type = other RNA
tcaaaactgaagtttatcagtc

SEQ ID NO: 148222 - RNA, 22 nt, synthetic construct
  source 1..22: mol_type = other RNA
tcaaaagacatcactaagagtg

SEQ ID NO: 148223 - RNA, 22 nt, synthetic construct
  source 1..22: mol_type = other RNA
tcaaaagaccaagaattttcca

SEQ ID NO: 148224 - RNA, 22 nt, synthetic construct
  source 1..22: mol_type = other RNA
tcaaaagatgcagaaaaagcat

SEQ ID NO: 148225 - RNA, 22 nt, synthetic construct
  source 1..22: mol_type = other RNA
tcaaaagatgctggtggagtat

SEQ ID NO: 148226 - RNA, 22 nt, synthetic construct
  source 1..22: mol_type = other RNA
tcaaaagccatagtgtaaacta

SEQ ID NO: 148227 - RNA, 22 nt, synthetic construct
  source 1..22: mol_type = other RNA
tcaaaagccccaaaccatcaag

SEQ ID NO: 148228 - RNA, 22 nt, synthetic construct
  source 1..22: mol_type = other RNA
tcaaaagctccccggatgattc

SEQ ID NO: 148229 - RNA, 22 nt, synthetic construct
  source 1..22: mol_type = other RNA
tcaaaagtgaatcactacagca

SEQ ID NO: 148230 - RNA, 22 nt, synthetic construct
  source 1..22: mol_type = other RNA
tcaaaatcaacattgcctccat

SEQ ID NO: 148231 - RNA, 22 nt, synthetic construct
  source 1..22: mol_type = other RNA
tcaaaatcaaggtgcgggatta

SEQ ID NO: 148232 - RNA, 22 nt, synthetic construct
  source 1..22: mol_type = other RNA
tcaaaatctgatgtgtatgtta

SEQ ID NO: 148233 - RNA, 22 nt, synthetic construct
  source 1..22: mol_type = other RNA
tcaaaatggatcaaagacctaa

SEQ ID NO: 148234 - RNA, 22 nt, synthetic construct
  source 1..22: mol_type = other RNA
tcaaaatgtgatggcatcattc

SEQ ID NO: 148235 - RNA, 22 nt, synthetic construct
  source 1..22: mol_type = other RNA
tcaaaatttagtaagggtaaac

SEQ ID NO: 148236 - RNA, 22 nt, synthetic construct
  source 1..22: mol_type = other RNA
tcaaacaattacttcatagatg

SEQ ID NO: 148237 - RNA, 22 nt, synthetic construct
  source 1..22: mol_type = other RNA
tcaaacagcctaattgtacacc

SEQ ID NO: 148238 - RNA, 22 nt, synthetic construct
  source 1..22: mol_type = other RNA
tcaaacagcttgacattcttac

SEQ ID NO: 148239 - RNA, 22 nt, synthetic construct
  source 1..22: mol_type = other RNA
tcaaacaggatacaaaaagcac

SEQ ID NO: 148240 - RNA, 22 nt, synthetic construct
  source 1..22: mol_type = other RNA
tcaaacagtgtgatattggcat

SEQ ID NO: 148241 - RNA, 22 nt, synthetic construct
  source 1..22: mol_type = other RNA
tcaaacataccccaaccctacc

SEQ ID NO: 148242 - RNA, 22 nt, synthetic construct
  source 1..22: mol_type = other RNA
tcaaacatgacagatcccaaaa

SEQ ID NO: 148243 - RNA, 22 nt, synthetic construct
  source 1..22: mol_type = other RNA
tcaaaccaatgttctcttttcc

SEQ ID NO: 148244 - RNA, 22 nt, synthetic construct
  source 1..22: mol_type = other RNA
tcaaaccacctaactactaata

SEQ ID NO: 148245 - RNA, 22 nt, synthetic construct
  source 1..22: mol_type = other RNA
tcaaaccatcctttccttgtcc

SEQ ID NO: 148246 - RNA, 22 nt, synthetic construct
  source 1..22: mol_type = other RNA
tcaaaccatgttcatgggaaga

SEQ ID NO: 148247 - RNA, 22 nt, synthetic construct
  source 1..22: mol_type = other RNA
tcaaacccaaattaaaggatgt

SEQ ID NO: 148248 - RNA, 22 nt, synthetic construct
  source 1..22: mol_type = other RNA
tcaaacgaaccaattaccataa

SEQ ID NO: 148249 - RNA, 22 nt, synthetic construct
  source 1..22: mol_type = other RNA
tcaaacgtccatcaacagcaga

SEQ ID NO: 148250 - RNA, 22 nt, synthetic construct
  source 1..22: mol_type = other RNA
tcaaacgtgctttccttattga

SEQ ID NO: 148251 - RNA, 22 nt, synthetic construct
  source 1..22: mol_type = other RNA
tcaaactagaaaaagaataagc

SEQ ID NO: 148252 - RNA, 22 nt, synthetic construct
  source 1..22: mol_type = other RNA
tcaaactatacttcaatgctac

SEQ ID NO: 148253 - RNA, 22 nt, synthetic construct
  source 1..22: mol_type = other RNA
tcaaactatgcttaatctgatt

SEQ ID NO: 148254 - RNA, 22 nt, synthetic construct
  source 1..22: mol_type = other RNA
tcaaactcacttattagcaaag

SEQ ID NO: 148255 - RNA, 22 nt, synthetic construct
  source 1..22: mol_type = other RNA
tcaaactccaagtctcatgcaa

SEQ ID NO: 148256 - RNA, 22 nt, synthetic construct
  source 1..22: mol_type = other RNA
tcaaactgtggtcactgtttgg

SEQ ID NO: 148257 - RNA, 22 nt, synthetic construct
  source 1..22: mol_type = other RNA
tcaaactgtgtgcttggagtca

SEQ ID NO: 148258 - RNA, 22 nt, synthetic construct
  source 1..22: mol_type = other RNA
tcaaagaaaataatgttttccg

SEQ ID NO: 148259 - RNA, 22 nt, synthetic construct
  source 1..22: mol_type = other RNA
tcaaagaaactacctagaaaaa

SEQ ID NO: 148260 - RNA, 22 nt, synthetic construct
  source 1..22: mol_type = other RNA
tcaaagaaagagttgggttttt

SEQ ID NO: 148261 - RNA, 22 nt, synthetic construct
  source 1..22: mol_type = other RNA
tcaaagacctaagcttaagagc

SEQ ID NO: 148262 - RNA, 22 nt, synthetic construct
  source 1..22: mol_type = other RNA
tcaaagagaacaaaatacctgg

SEQ ID NO: 148263 - RNA, 22 nt, synthetic construct
  source 1..22: mol_type = other RNA
tcaaagagacctgattcttcca

SEQ ID NO: 148264 - RNA, 22 nt, synthetic construct
  source 1..22: mol_type = other RNA
tcaaagatcatttcacttgatt

SEQ ID NO: 148265 - RNA, 22 nt, synthetic construct
  source 1..22: mol_type = other RNA
tcaaagcaagttaaaagacatc

SEQ ID NO: 148266 - RNA, 22 nt, synthetic construct
  source 1..22: mol_type = other RNA
tcaaagcatatgaatctagaaa

SEQ ID NO: 148267 - RNA, 22 nt, synthetic construct
  source 1..22: mol_type = other RNA
tcaaagcccaccagcataagac

SEQ ID NO: 148268 - RNA, 22 nt, synthetic construct
  source 1..22: mol_type = other RNA
tcaaagcctgtggaggcagtac

SEQ ID NO: 148269 - RNA, 22 nt, synthetic construct
  source 1..22: mol_type = other RNA
tcaaagctaccctttcttgtta

SEQ ID NO: 148270 - RNA, 22 nt, synthetic construct
  source 1..22: mol_type = other RNA
tcaaaggaaggaattttaggac

SEQ ID NO: 148271 - RNA, 22 nt, synthetic construct
  source 1..22: mol_type = other RNA
tcaaaggacactattgagagtg

SEQ ID NO: 148272 - RNA, 22 nt, synthetic construct
  source 1..22: mol_type = other RNA
tcaaaggagagaagagggggca

SEQ ID NO: 148273 - RNA, 22 nt, synthetic construct
  source 1..22: mol_type = other RNA
tcaaaggggcattccgtggaag

SEQ ID NO: 148274 - RNA, 22 nt, synthetic construct
  source 1..22: mol_type = other RNA
tcaaagggtcactattaaccat

SEQ ID NO: 148275 - RNA, 22 nt, synthetic construct
  source 1..22: mol_type = other RNA
tcaaagtcccctgtaattacat

SEQ ID NO: 148276 - RNA, 22 nt, synthetic construct
  source 1..22: mol_type = other RNA
tcaaagtgaaaggcaaaggaaa

SEQ ID NO: 148277 - RNA, 22 nt, synthetic construct
  source 1..22: mol_type = other RNA
tcaaagtggaaacaactcaaac

SEQ ID NO: 148278 - RNA, 22 nt, synthetic construct
  source 1..22: mol_type = other RNA
tcaaagttaaacttttgtgcat

SEQ ID NO: 148279 - RNA, 22 nt, synthetic construct
  source 1..22: mol_type = other RNA
tcaaagttaatagcctcctaag

SEQ ID NO: 148280 - RNA, 22 nt, synthetic construct
  source 1..22: mol_type = other RNA
tcaaataatagctatcctaatg

SEQ ID NO: 148281 - RNA, 22 nt, synthetic construct
  source 1..22: mol_type = other RNA
tcaaataattgctgcagttttt

SEQ ID NO: 148282 - RNA, 22 nt, synthetic construct
  source 1..22: mol_type = other RNA
tcaaatacctagttttccaatc

SEQ ID NO: 148283 - RNA, 22 nt, synthetic construct
  source 1..22: mol_type = other RNA
tcaaatcaatacttcatttcca

SEQ ID NO: 148284 - RNA, 22 nt, synthetic construct
  source 1..22: mol_type = other RNA
tcaaatccaaattcacagcatg

SEQ ID NO: 148285 - RNA, 22 nt, synthetic construct
  source 1..22: mol_type = other RNA
tcaaatccagtcttcaggtctc

SEQ ID NO: 148286 - RNA, 22 nt, synthetic construct
  source 1..22: mol_type = other RNA
tcaaatctggctgcagggcttc

SEQ ID NO: 148287 - RNA, 22 nt, synthetic construct
  source 1..22: mol_type = other RNA
tcaaatgaacaggttcttcatc

SEQ ID NO: 148288 - RNA, 22 nt, synthetic construct
  source 1..22: mol_type = other RNA
tcaaatgaggcttttattggta

SEQ ID NO: 148289 - RNA, 22 nt, synthetic construct
  source 1..22: mol_type = other RNA
tcaaatgccatagagctttaaa

SEQ ID NO: 148290 - RNA, 22 nt, synthetic construct
  source 1..22: mol_type = other RNA
tcaaatgctataaagaacatga

SEQ ID NO: 148291 - RNA, 22 nt, synthetic construct
  source 1..22: mol_type = other RNA
tcaaatggccttctttctttca

SEQ ID NO: 148292 - RNA, 22 nt, synthetic construct
  source 1..22: mol_type = other RNA
tcaaatgggaaattagatgatg

SEQ ID NO: 148293 - RNA, 22 nt, synthetic construct
  source 1..22: mol_type = other RNA
tcaaatggtaacagccaaataa

SEQ ID NO: 148294 - RNA, 22 nt, synthetic construct
  source 1..22: mol_type = other RNA
tcaaatgtctcattgtggatga

SEQ ID NO: 148295 - RNA, 22 nt, synthetic construct
  source 1..22: mol_type = other RNA
tcaaatgtgacagaacaaactc

SEQ ID NO: 148296 - RNA, 22 nt, synthetic construct
  source 1..22: mol_type = other RNA
tcaaatgttaagcccaacttca

SEQ ID NO: 148297 - RNA, 22 nt, synthetic construct
  source 1..22: mol_type = other RNA
tcaaattaatcagtctgtaagc

SEQ ID NO: 148298 - RNA, 22 nt, synthetic construct
  source 1..22: mol_type = other RNA
tcaaattagtcatagcagtggg

SEQ ID NO: 148299 - RNA, 22 nt, synthetic construct
  source 1..22: mol_type = other RNA
tcaaattcacagaactgtcact

SEQ ID NO: 148300 - RNA, 22 nt, synthetic construct
  source 1..22: mol_type = other RNA
tcaaattctgagggaaattatt

SEQ ID NO: 148301 - RNA, 22 nt, synthetic construct
  source 1..22: mol_type = other RNA
tcaaattgtgtgttctcttttt

SEQ ID NO: 148302 - RNA, 22 nt, synthetic construct
  source 1..22: mol_type = other RNA
tcaaatttaacacacaacaatg

SEQ ID NO: 148303 - RNA, 22 nt, synthetic construct
  source 1..22: mol_type = other RNA
tcaaatttttcacattcttcac

SEQ ID NO: 148304 - RNA, 22 nt, synthetic construct
  source 1..22: mol_type = other RNA
tcaacaaaactgggggctggac

SEQ ID NO: 148305 - RNA, 22 nt, synthetic construct
  source 1..22: mol_type = other RNA
tcaacaaactaactagaaaacc

SEQ ID NO: 148306 - RNA, 22 nt, synthetic construct
  source 1..22: mol_type = other RNA
tcaacaaaggttgaaaactcaa

SEQ ID NO: 148307 - RNA, 22 nt, synthetic construct
  source 1..22: mol_type = other RNA
tcaacaagagaggacagttggc

SEQ ID NO: 148308 - RNA, 22 nt, synthetic construct
  source 1..22: mol_type = other RNA
tcaacaatagcaacaaaacaat

SEQ ID NO: 148309 - RNA, 22 nt, synthetic construct
  source 1..22: mol_type = other RNA
tcaacacactagccactgggtc

SEQ ID NO: 148310 - RNA, 22 nt, synthetic construct
  source 1..22: mol_type = other RNA
tcaacacatcagcgctaagtgc

SEQ ID NO: 148311 - RNA, 22 nt, synthetic construct
  source 1..22: mol_type = other RNA
tcaacacattcaaaattgttct

SEQ ID NO: 148312 - RNA, 22 nt, synthetic construct
  source 1..22: mol_type = other RNA
tcaacaccaagcaacactaaag

SEQ ID NO: 148313 - RNA, 22 nt, synthetic construct
  source 1..22: mol_type = other RNA
tcaacactgtgttcttttcctt

SEQ ID NO: 148314 - RNA, 22 nt, synthetic construct
  source 1..22: mol_type = other RNA
tcaacacttcagtggtaaggac

SEQ ID NO: 148315 - RNA, 22 nt, synthetic construct
  source 1..22: mol_type = other RNA
tcaacacttttccagtcttctc

SEQ ID NO: 148316 - RNA, 22 nt, synthetic construct
  source 1..22: mol_type = other RNA
tcaacagcacttttgtactact

SEQ ID NO: 148317 - RNA, 22 nt, synthetic construct
  source 1..22: mol_type = other RNA
tcaacagcagaacaaactgcgt

SEQ ID NO: 148318 - RNA, 22 nt, synthetic construct
  source 1..22: mol_type = other RNA
tcaacagctactatgaatatac

SEQ ID NO: 148319 - RNA, 22 nt, synthetic construct
  source 1..22: mol_type = other RNA
tcaacagggtaagattccgtct

SEQ ID NO: 148320 - RNA, 22 nt, synthetic construct
  source 1..22: mol_type = other RNA
tcaacaggtagctgctttttaa

SEQ ID NO: 148321 - RNA, 22 nt, synthetic construct
  source 1..22: mol_type = other RNA
tcaacaggtataaagtttccgt

SEQ ID NO: 148322 - RNA, 22 nt, synthetic construct
  source 1..22: mol_type = other RNA
tcaacagtgtactagtctccat

SEQ ID NO: 148323 - RNA, 22 nt, synthetic construct
  source 1..22: mol_type = other RNA
tcaacatcactagctattagag

SEQ ID NO: 148324 - RNA, 22 nt, synthetic construct
  source 1..22: mol_type = other RNA
tcaacatgaaaagatactcaac

SEQ ID NO: 148325 - RNA, 22 nt, synthetic construct
  source 1..22: mol_type = other RNA
tcaacatgtgtatttagggagc

SEQ ID NO: 148326 - RNA, 22 nt, synthetic construct
  source 1..22: mol_type = other RNA
tcaacattaagggaaacagggt

SEQ ID NO: 148327 - RNA, 22 nt, synthetic construct
  source 1..22: mol_type = other RNA
tcaacattcattcatgacaaga

SEQ ID NO: 148328 - RNA, 22 nt, synthetic construct
  source 1..22: mol_type = other RNA
tcaacattgcctccatatggga

SEQ ID NO: 148329 - RNA, 22 nt, synthetic construct
  source 1..22: mol_type = other RNA
tcaaccactaaggtcaacacat

SEQ ID NO: 148330 - RNA, 22 nt, synthetic construct
  source 1..22: mol_type = other RNA
tcaaccatacttttcaactgaa

SEQ ID NO: 148331 - RNA, 22 nt, synthetic construct
  source 1..22: mol_type = other RNA
tcaacccatgaaaattgaatta

SEQ ID NO: 148332 - RNA, 22 nt, synthetic construct
  source 1..22: mol_type = other RNA
tcaaccccatcaacaagtgggc

SEQ ID NO: 148333 - RNA, 22 nt, synthetic construct
  source 1..22: mol_type = other RNA
tcaaccctcggcctctactgac

SEQ ID NO: 148334 - RNA, 22 nt, synthetic construct
  source 1..22: mol_type = other RNA
tcaacctaacatgtcttggtgt

SEQ ID NO: 148335 - RNA, 22 nt, synthetic construct
  source 1..22: mol_type = other RNA
tcaacctactttaaatcagggc

SEQ ID NO: 148336 - RNA, 22 nt, synthetic construct
  source 1..22: mol_type = other RNA
tcaacctataagacccagtggc

SEQ ID NO: 148337 - RNA, 22 nt, synthetic construct
  source 1..22: mol_type = other RNA
tcaacctcaactttaggttacg

SEQ ID NO: 148338 - RNA, 22 nt, synthetic construct
  source 1..22: mol_type = other RNA
tcaacctgcaggtatttctaaa

SEQ ID NO: 148339 - RNA, 22 nt, synthetic construct
  source 1..22: mol_type = other RNA
tcaacctttgcctcctgggttc

SEQ ID NO: 148340 - RNA, 22 nt, synthetic construct
  source 1..22: mol_type = other RNA
tcaacctttgttgaaaacgagg

SEQ ID NO: 148341 - RNA, 22 nt, synthetic construct
  source 1..22: mol_type = other RNA
tcaacgacaatctctggggtta

SEQ ID NO: 148342 - RNA, 22 nt, synthetic construct
  source 1..22: mol_type = other RNA
tcaacgcacccagagcgggttt

SEQ ID NO: 148343 - RNA, 22 nt, synthetic construct
  source 1..22: mol_type = other RNA
tcaacgcctgtgatcccagcta

SEQ ID NO: 148344 - RNA, 22 nt, synthetic construct
  source 1..22: mol_type = other RNA
tcaacggacatttttccaaaga

SEQ ID NO: 148345 - RNA, 22 nt, synthetic construct
  source 1..22: mol_type = other RNA
tcaactaatcaaacatacccca

SEQ ID NO: 148346 - RNA, 22 nt, synthetic construct
  source 1..22: mol_type = other RNA
tcaactattccataagatctgt

SEQ ID NO: 148347 - RNA, 22 nt, synthetic construct
  source 1..22: mol_type = other RNA
tcaactgaacaacgctgtggct

SEQ ID NO: 148348 - RNA, 22 nt, synthetic construct
  source 1..22: mol_type = other RNA
tcaactgaggcagagtagagaa

SEQ ID NO: 148349 - RNA, 22 nt, synthetic construct
  source 1..22: mol_type = other RNA
tcaactgcctctacatcacaga

SEQ ID NO: 148350 - RNA, 22 nt, synthetic construct
  source 1..22: mol_type = other RNA
tcaactgcttccctagcccagc

SEQ ID NO: 148351 - RNA, 22 nt, synthetic construct
  source 1..22: mol_type = other RNA
tcaactggcccctccatggaaa

SEQ ID NO: 148352 - RNA, 22 nt, synthetic construct
  source 1..22: mol_type = other RNA
tcaacttagccttggtaaaatc

SEQ ID NO: 148353 - RNA, 22 nt, synthetic construct
  source 1..22: mol_type = other RNA
tcaacttcctgttttagtggct

SEQ ID NO: 148354 - RNA, 22 nt, synthetic construct
  source 1..22: mol_type = other RNA
tcaacttggtaaaaagtgcttc

SEQ ID NO: 148355 - RNA, 22 nt, synthetic construct
  source 1..22: mol_type = other RNA
tcaactttaggttacgtactag

SEQ ID NO: 148356 - RNA, 22 nt, synthetic construct
  source 1..22: mol_type = other RNA
tcaacttttagtaggtctcctt

SEQ ID NO: 148357 - RNA, 22 nt, synthetic construct
  source 1..22: mol_type = other RNA
tcaagaaaccacagagcctaaa

SEQ ID NO: 148358 - RNA, 22 nt, synthetic construct
  source 1..22: mol_type = other RNA
tcaagaaataaaacatggccag

SEQ ID NO: 148359 - RNA, 22 nt, synthetic construct
  source 1..22: mol_type = other RNA
tcaagaaggtatcatcggaaat

SEQ ID NO: 148360 - RNA, 22 nt, synthetic construct
  source 1..22: mol_type = other RNA
tcaagaatgaagtcagagattt

SEQ ID NO: 148361 - RNA, 22 nt, synthetic construct
  source 1..22: mol_type = other RNA
tcaagacaagcaaggaagggct

SEQ ID NO: 148362 - RNA, 22 nt, synthetic construct
  source 1..22: mol_type = other RNA
tcaagacagagctccctctccc

SEQ ID NO: 148363 - RNA, 22 nt, synthetic construct
  source 1..22: mol_type = other RNA
tcaagagagattaaataacttc

SEQ ID NO: 148364 - RNA, 22 nt, synthetic construct
  source 1..22: mol_type = other RNA
tcaagagcggcctttgcctctc

SEQ ID NO: 148365 - RNA, 22 nt, synthetic construct
  source 1..22: mol_type = other RNA
tcaagaggttaaaaccacaaac

SEQ ID NO: 148366 - RNA, 22 nt, synthetic construct
  source 1..22: mol_type = other RNA
tcaagagttacttctggaaagt

SEQ ID NO: 148367 - RNA, 22 nt, synthetic construct
  source 1..22: mol_type = other RNA
tcaagatactgcactaaactag

SEQ ID NO: 148368 - RNA, 22 nt, synthetic construct
  source 1..22: mol_type = other RNA
tcaagatgaatctgcaactatc

SEQ ID NO: 148369 - RNA, 22 nt, synthetic construct
  source 1..22: mol_type = other RNA
tcaagatgcataccaagcccgg

SEQ ID NO: 148370 - RNA, 22 nt, synthetic construct
  source 1..22: mol_type = other RNA
tcaagattgtgtgatttcatat

SEQ ID NO: 148371 - RNA, 22 nt, synthetic construct
  source 1..22: mol_type = other RNA
tcaagatttcataggcatctct

SEQ ID NO: 148372 - RNA, 22 nt, synthetic construct
  source 1..22: mol_type = other RNA
tcaagcaatctgaaacgacctt

SEQ ID NO: 148373 - RNA, 22 nt, synthetic construct
  source 1..22: mol_type = other RNA
tcaagcaccacttcgagaaggg

SEQ ID NO: 148374 - RNA, 22 nt, synthetic construct
  source 1..22: mol_type = other RNA
tcaagcagaaatgagttccagt

SEQ ID NO: 148375 - RNA, 22 nt, synthetic construct
  source 1..22: mol_type = other RNA
tcaagcagtcctgccttggcct

SEQ ID NO: 148376 - RNA, 22 nt, synthetic construct
  source 1..22: mol_type = other RNA
tcaagcattgggagctttcatt

SEQ ID NO: 148377 - RNA, 22 nt, synthetic construct
  source 1..22: mol_type = other RNA
tcaagccatcctccagccttaa

SEQ ID NO: 148378 - RNA, 22 nt, synthetic construct
  source 1..22: mol_type = other RNA
tcaagccccagttctgcgcaat

SEQ ID NO: 148379 - RNA, 22 nt, synthetic construct
  source 1..22: mol_type = other RNA
tcaagcccttccttgcttgtct

SEQ ID NO: 148380 - RNA, 22 nt, synthetic construct
  source 1..22: mol_type = other RNA
tcaagccgcaaataatcattct

SEQ ID NO: 148381 - RNA, 22 nt, synthetic construct
  source 1..22: mol_type = other RNA
tcaagcctgataagctcccagc

SEQ ID NO: 148382 - RNA, 22 nt, synthetic construct
  source 1..22: mol_type = other RNA
tcaagcgctgaagtacttcaag

SEQ ID NO: 148383 - RNA, 22 nt, synthetic construct
  source 1..22: mol_type = other RNA
tcaagctatcagaattttattc

SEQ ID NO: 148384 - RNA, 22 nt, synthetic construct
  source 1..22: mol_type = other RNA
tcaagctcgccgtctccctcgg

SEQ ID NO: 148385 - RNA, 22 nt, synthetic construct
  source 1..22: mol_type = other RNA
tcaagctgtttgagctgaaagt

SEQ ID NO: 148386 - RNA, 22 nt, synthetic construct
  source 1..22: mol_type = other RNA
tcaaggaagcttcctaaagaga

SEQ ID NO: 148387 - RNA, 22 nt, synthetic construct
  source 1..22: mol_type = other RNA
tcaaggcacagtctgtgcttaa

SEQ ID NO: 148388 - RNA, 22 nt, synthetic construct
  source 1..22: mol_type = other RNA
tcaaggcagaacacactgctct

SEQ ID NO: 148389 - RNA, 22 nt, synthetic construct
  source 1..22: mol_type = other RNA
tcaaggcagaaggatcacttga

SEQ ID NO: 148390 - RNA, 22 nt, synthetic construct
  source 1..22: mol_type = other RNA
tcaaggccaactgtcctctctt

SEQ ID NO: 148391 - RNA, 22 nt, synthetic construct
  source 1..22: mol_type = other RNA
tcaaggcttgtgcatcagaatt

SEQ ID NO: 148392 - RNA, 22 nt, synthetic construct
  source 1..22: mol_type = other RNA
tcaagggctttcaatagtgggt

SEQ ID NO: 148393 - RNA, 22 nt, synthetic construct
  source 1..22: mol_type = other RNA
tcaaggggagaggcctcatgta

SEQ ID NO: 148394 - RNA, 22 nt, synthetic construct
  source 1..22: mol_type = other RNA
tcaaggggccttttgtcaagct

SEQ ID NO: 148395 - RNA, 22 nt, synthetic construct
  source 1..22: mol_type = other RNA
tcaagggtggtgctggactgga

SEQ ID NO: 148396 - RNA, 22 nt, synthetic construct
  source 1..22: mol_type = other RNA
tcaagggtgttttcccccctaa

SEQ ID NO: 148397 - RNA, 22 nt, synthetic construct
  source 1..22: mol_type = other RNA
tcaaggtaatctagtttatctc

SEQ ID NO: 148398 - RNA, 22 nt, synthetic construct
  source 1..22: mol_type = other RNA
tcaaggtacaatacactaaatt

SEQ ID NO: 148399 - RNA, 22 nt, synthetic construct
  source 1..22: mol_type = other RNA
tcaaggtagaagtacaaacatt

SEQ ID NO: 148400 - RNA, 22 nt, synthetic construct
  source 1..22: mol_type = other RNA
tcaaggtatctccccaaagata

SEQ ID NO: 148401 - RNA, 22 nt, synthetic construct
  source 1..22: mol_type = other RNA
tcaaggtcatcctttcccttct

SEQ ID NO: 148402 - RNA, 22 nt, synthetic construct
  source 1..22: mol_type = other RNA
tcaaggtgcgggattatttgga

SEQ ID NO: 148403 - RNA, 22 nt, synthetic construct
  source 1..22: mol_type = other RNA
tcaaggtgttagcaggactgga

SEQ ID NO: 148404 - RNA, 22 nt, synthetic construct
  source 1..22: mol_type = other RNA
tcaaggtgttcctgaagtcttt

SEQ ID NO: 148405 - RNA, 22 nt, synthetic construct
  source 1..22: mol_type = other RNA
tcaaggttataatcagccgtga

SEQ ID NO: 148406 - RNA, 22 nt, synthetic construct
  source 1..22: mol_type = other RNA
tcaaggttcacaaattagaaca

SEQ ID NO: 148407 - RNA, 22 nt, synthetic construct
  source 1..22: mol_type = other RNA
tcaagtaacactcagaagtact

SEQ ID NO: 148408 - RNA, 22 nt, synthetic construct
  source 1..22: mol_type = other RNA
tcaagtaacagttcaatactac

SEQ ID NO: 148409 - RNA, 22 nt, synthetic construct
  source 1..22: mol_type = other RNA
tcaagtaattgttttccctttt

SEQ ID NO: 148410 - RNA, 22 nt, synthetic construct
  source 1..22: mol_type = other RNA
tcaagtacaactaataattgct

SEQ ID NO: 148411 - RNA, 22 nt, synthetic construct
  source 1..22: mol_type = other RNA
tcaagtatctccctgtgcgtga

SEQ ID NO: 148412 - RNA, 22 nt, synthetic construct
  source 1..22: mol_type = other RNA
tcaagtatttccacgggtaaaa

SEQ ID NO: 148413 - RNA, 22 nt, synthetic construct
  source 1..22: mol_type = other RNA
tcaagtcctttccagaggttct

SEQ ID NO: 148414 - RNA, 22 nt, synthetic construct
  source 1..22: mol_type = other RNA
tcaagtcttttcctagactgcc

SEQ ID NO: 148415 - RNA, 22 nt, synthetic construct
  source 1..22: mol_type = other RNA
tcaagtgaaatgatctttgaat

SEQ ID NO: 148416 - RNA, 22 nt, synthetic construct
  source 1..22: mol_type = other RNA
tcaagtgaaccaaaaaccacat

SEQ ID NO: 148417 - RNA, 22 nt, synthetic construct
  source 1..22: mol_type = other RNA
tcaagtgactccaagcacacag

SEQ ID NO: 148418 - RNA, 22 nt, synthetic construct
  source 1..22: mol_type = other RNA
tcaagtgatgcaactcctgggc

SEQ ID NO: 148419 - RNA, 22 nt, synthetic construct
  source 1..22: mol_type = other RNA
tcaagttacaataatatgcctc

SEQ ID NO: 148420 - RNA, 22 nt, synthetic construct
  source 1..22: mol_type = other RNA
tcaagttccggttctcaggagc

SEQ ID NO: 148421 - RNA, 22 nt, synthetic construct
  source 1..22: mol_type = other RNA
tcaagttctgatttcaaagtta

SEQ ID NO: 148422 - RNA, 22 nt, synthetic construct
  source 1..22: mol_type = other RNA
tcaagttgcttggcacagaatt

SEQ ID NO: 148423 - RNA, 22 nt, synthetic construct
  source 1..22: mol_type = other RNA
tcaagttgctttttcttcttgt

SEQ ID NO: 148424 - RNA, 22 nt, synthetic construct
  source 1..22: mol_type = other RNA
tcaagtttcaccctgcgaaggc

SEQ ID NO: 148425 - RNA, 22 nt, synthetic construct
  source 1..22: mol_type = other RNA
tcaagtttggctcccatgattc

SEQ ID NO: 148426 - RNA, 22 nt, synthetic construct
  source 1..22: mol_type = other RNA
tcaagttttctatttcttcatg

SEQ ID NO: 148427 - RNA, 22 nt, synthetic construct
  source 1..22: mol_type = other RNA
tcaataaccacatgtggcttgt

SEQ ID NO: 148428 - RNA, 22 nt, synthetic construct
  source 1..22: mol_type = other RNA
tcaataaggaaagcacgtttga

SEQ ID NO: 148429 - RNA, 22 nt, synthetic construct
  source 1..22: mol_type = other RNA
tcaataattctgtgccaagcaa

SEQ ID NO: 148430 - RNA, 22 nt, synthetic construct
  source 1..22: mol_type = other RNA
tcaataatttggatgaacgcta

SEQ ID NO: 148431 - RNA, 22 nt, synthetic construct
  source 1..22: mol_type = other RNA
tcaatacacgtggctgtcaaaa

SEQ ID NO: 148432 - RNA, 22 nt, synthetic construct
  source 1..22: mol_type = other RNA
tcaatacctgaaaagtgtatta

SEQ ID NO: 148433 - RNA, 22 nt, synthetic construct
  source 1..22: mol_type = other RNA
tcaatactactgcaaatatcca

SEQ ID NO: 148434 - RNA, 22 nt, synthetic construct
  source 1..22: mol_type = other RNA
tcaatacttcatttccattgta

SEQ ID NO: 148435 - RNA, 22 nt, synthetic construct
  source 1..22: mol_type = other RNA
tcaatagcagtgctgaaagcta

SEQ ID NO: 148436 - RNA, 22 nt, synthetic construct
  source 1..22: mol_type = other RNA
tcaatagtgggtagaagcagca

SEQ ID NO: 148437 - RNA, 22 nt, synthetic construct
  source 1..22: mol_type = other RNA
tcaatatgcagtatgtgccatt

SEQ ID NO: 148438 - RNA, 22 nt, synthetic construct
  source 1..22: mol_type = other RNA
tcaatattaagagtctcatctg

SEQ ID NO: 148439 - RNA, 22 nt, synthetic construct
  source 1..22: mol_type = other RNA
tcaatattttggaagactatga

SEQ ID NO: 148440 - RNA, 22 nt, synthetic construct
  source 1..22: mol_type = other RNA
tcaatcagggccttcccaaaga

SEQ ID NO: 148441 - RNA, 22 nt, synthetic construct
  source 1..22: mol_type = other RNA
tcaatcagtggccagtgaccag

SEQ ID NO: 148442 - RNA, 22 nt, synthetic construct
  source 1..22: mol_type = other RNA
tcaatcatgtcaagaatgaagt

SEQ ID NO: 148443 - RNA, 22 nt, synthetic construct
  source 1..22: mol_type = other RNA
tcaatccagacagctaatatgc

SEQ ID NO: 148444 - RNA, 22 nt, synthetic construct
  source 1..22: mol_type = other RNA
tcaatccccatctgggatactt

SEQ ID NO: 148445 - RNA, 22 nt, synthetic construct
  source 1..22: mol_type = other RNA
tcaatcccttccccacctttcc

SEQ ID NO: 148446 - RNA, 22 nt, synthetic construct
  source 1..22: mol_type = other RNA
tcaatctaggaggtctaagaga

SEQ ID NO: 148447 - RNA, 22 nt, synthetic construct
  source 1..22: mol_type = other RNA
tcaatctcacacctgggtatac

SEQ ID NO: 148448 - RNA, 22 nt, synthetic construct
  source 1..22: mol_type = other RNA
tcaatctcctgatccacctgcc

SEQ ID NO: 148449 - RNA, 22 nt, synthetic construct
  source 1..22: mol_type = other RNA
tcaatctggaatgcatcgtttc

SEQ ID NO: 148450 - RNA, 22 nt, synthetic construct
  source 1..22: mol_type = other RNA
tcaatctggatataacaaatca

SEQ ID NO: 148451 - RNA, 22 nt, synthetic construct
  source 1..22: mol_type = other RNA
tcaatctgtttcctaatctaac

SEQ ID NO: 148452 - RNA, 22 nt, synthetic construct
  source 1..22: mol_type = other RNA
tcaatcttcttatttgttactg

SEQ ID NO: 148453 - RNA, 22 nt, synthetic construct
  source 1..22: mol_type = other RNA
tcaatcttggaaatgatacctc

SEQ ID NO: 148454 - RNA, 22 nt, synthetic construct
  source 1..22: mol_type = other RNA
tcaatgacttttatcaattcac

SEQ ID NO: 148455 - RNA, 22 nt, synthetic construct
  source 1..22: mol_type = other RNA
tcaatgagggcagagataactg

SEQ ID NO: 148456 - RNA, 22 nt, synthetic construct
  source 1..22: mol_type = other RNA
tcaatgatagactggattaagg

SEQ ID NO: 148457 - RNA, 22 nt, synthetic construct
  source 1..22: mol_type = other RNA
tcaatgcaatacttaatagccc

SEQ ID NO: 148458 - RNA, 22 nt, synthetic construct
  source 1..22: mol_type = other RNA
tcaatgcaatgcgtgtgaaacc

SEQ ID NO: 148459 - RNA, 22 nt, synthetic construct
  source 1..22: mol_type = other RNA
tcaatgctacagtaagcaaaac

SEQ ID NO: 148460 - RNA, 22 nt, synthetic construct
  source 1..22: mol_type = other RNA
tcaatggaaaatgtaaaacatc

SEQ ID NO: 148461 - RNA, 22 nt, synthetic construct
  source 1..22: mol_type = other RNA
tcaatggggaactttatttttt

SEQ ID NO: 148462 - RNA, 22 nt, synthetic construct
  source 1..22: mol_type = other RNA
tcaatggttaagactgctgttt

SEQ ID NO: 148463 - RNA, 22 nt, synthetic construct
  source 1..22: mol_type = other RNA
tcaatgttggttagtgttgttt

SEQ ID NO: 148464 - RNA, 22 nt, synthetic construct
  source 1..22: mol_type = other RNA
tcaatgtttggtagatttctgc

SEQ ID NO: 148465 - RNA, 22 nt, synthetic construct
  source 1..22: mol_type = other RNA
tcaattaagcaaccttttaggt

SEQ ID NO: 148466 - RNA, 22 nt, synthetic construct
  source 1..22: mol_type = other RNA
tcaattaatgcccaatcaaatc

SEQ ID NO: 148467 - RNA, 22 nt, synthetic construct
  source 1..22: mol_type = other RNA
tcaattagttcctccttttgta

SEQ ID NO: 148468 - RNA, 22 nt, synthetic construct
  source 1..22: mol_type = other RNA
tcaattcacaagattaatcttg

SEQ ID NO: 148469 - RNA, 22 nt, synthetic construct
  source 1..22: mol_type = other RNA
tcaattcagaagctaaattttc

SEQ ID NO: 148470 - RNA, 22 nt, synthetic construct
  source 1..22: mol_type = other RNA
tcaattctagttaataaaggtg

SEQ ID NO: 148471 - RNA, 22 nt, synthetic construct
  source 1..22: mol_type = other RNA
tcaattgaccaaacatgtgagg

SEQ ID NO: 148472 - RNA, 22 nt, synthetic construct
  source 1..22: mol_type = other RNA
tcaattgatctgccaggacaat

SEQ ID NO: 148473 - RNA, 22 nt, synthetic construct
  source 1..22: mol_type = other RNA
tcaattgtaatgtctcctcttt

SEQ ID NO: 148474 - RNA, 22 nt, synthetic construct
  source 1..22: mol_type = other RNA
tcaattgtcctggcagatcaat

SEQ ID NO: 148475 - RNA, 22 nt, synthetic construct
  source 1..22: mol_type = other RNA
tcaatttaacttctaatgccca

SEQ ID NO: 148476 - RNA, 22 nt, synthetic construct
  source 1..22: mol_type = other RNA
tcaatttcagatctctgacatt

SEQ ID NO: 148477 - RNA, 22 nt, synthetic construct
  source 1..22: mol_type = other RNA
tcaatttcatcgtaaaaagcca

SEQ ID NO: 148478 - RNA, 22 nt, synthetic construct
  source 1..22: mol_type = other RNA
tcaattttcatgggttgatttt

SEQ ID NO: 148479 - RNA, 22 nt, synthetic construct
  source 1..22: mol_type = other RNA
tcaattttcccccaattaaact

SEQ ID NO: 148480 - RNA, 22 nt, synthetic construct
  source 1..22: mol_type = other RNA
tcacaaaaagacaagtactgca

SEQ ID NO: 148481 - RNA, 22 nt, synthetic construct
  source 1..22: mol_type = other RNA
tcacaaaaagtgtgaccacatt

SEQ ID NO: 148482 - RNA, 22 nt, synthetic construct
  source 1..22: mol_type = other RNA
tcacaaaatgtggatgcatgag

SEQ ID NO: 148483 - RNA, 22 nt, synthetic construct
  source 1..22: mol_type = other RNA
tcacaaacaaatccttttccca

SEQ ID NO: 148484 - RNA, 22 nt, synthetic construct
  source 1..22: mol_type = other RNA
tcacaaacacaaaacaaatgga

SEQ ID NO: 148485 - RNA, 22 nt, synthetic construct
  source 1..22: mol_type = other RNA
tcacaaacacacaaaccaacaa

SEQ ID NO: 148486 - RNA, 22 nt, synthetic construct
  source 1..22: mol_type = other RNA
tcacaaagccctcaggaccagg

SEQ ID NO: 148487 - RNA, 22 nt, synthetic construct
  source 1..22: mol_type = other RNA
tcacaaagctttaaactggatg

SEQ ID NO: 148488 - RNA, 22 nt, synthetic construct
  source 1..22: mol_type = other RNA
tcacaacaggcctgagccgtcg

SEQ ID NO: 148489 - RNA, 22 nt, synthetic construct
  source 1..22: mol_type = other RNA
tcacaacgatttcttaaaaatg

SEQ ID NO: 148490 - RNA, 22 nt, synthetic construct
  source 1..22: mol_type = other RNA
tcacaacttgtatgaaattagt

SEQ ID NO: 148491 - RNA, 22 nt, synthetic construct
  source 1..22: mol_type = other RNA
tcacaagattaatcttgcaaaa

SEQ ID NO: 148492 - RNA, 22 nt, synthetic construct
  source 1..22: mol_type = other RNA
tcacaagccagggtctgtctca

SEQ ID NO: 148493 - RNA, 22 nt, synthetic construct
  source 1..22: mol_type = other RNA
tcacaaggactggcttcagtgc

SEQ ID NO: 148494 - RNA, 22 nt, synthetic construct
  source 1..22: mol_type = other RNA
tcacaaggtcagaagtttggaa

SEQ ID NO: 148495 - RNA, 22 nt, synthetic construct
  source 1..22: mol_type = other RNA
tcacaatgcgtttgttagatct

SEQ ID NO: 148496 - RNA, 22 nt, synthetic construct
  source 1..22: mol_type = other RNA
tcacaattcacagaatatactc

SEQ ID NO: 148497 - RNA, 22 nt, synthetic construct
  source 1..22: mol_type = other RNA
tcacacaatcttgagacggaag

SEQ ID NO: 148498 - RNA, 22 nt, synthetic construct
  source 1..22: mol_type = other RNA
tcacacaccactacacccggct

SEQ ID NO: 148499 - RNA, 22 nt, synthetic construct
  source 1..22: mol_type = other RNA
tcacacaccctttcttaggaag

SEQ ID NO: 148500 - RNA, 22 nt, synthetic construct
  source 1..22: mol_type = other RNA
tcacacattaactatggacatg

SEQ ID NO: 148501 - RNA, 22 nt, synthetic construct
  source 1..22: mol_type = other RNA
tcacaccatttagatcatctta

SEQ ID NO: 148502 - RNA, 22 nt, synthetic construct
  source 1..22: mol_type = other RNA
tcacacccagtatacacgtatt

SEQ ID NO: 148503 - RNA, 22 nt, synthetic construct
  source 1..22: mol_type = other RNA
tcacaccctcctaccttccaaa

SEQ ID NO: 148504 - RNA, 22 nt, synthetic construct
  source 1..22: mol_type = other RNA
tcacaccgctgcattccagcct

SEQ ID NO: 148505 - RNA, 22 nt, synthetic construct
  source 1..22: mol_type = other RNA
tcacacctaggcctattttagg

SEQ ID NO: 148506 - RNA, 22 nt, synthetic construct
  source 1..22: mol_type = other RNA
tcacacctgggtatacagcaaa

SEQ ID NO: 148507 - RNA, 22 nt, synthetic construct
  source 1..22: mol_type = other RNA
tcacacgagaaggacagcttcc

SEQ ID NO: 148508 - RNA, 22 nt, synthetic construct
  source 1..22: mol_type = other RNA
tcacacgcattgcattgactac

SEQ ID NO: 148509 - RNA, 22 nt, synthetic construct
  source 1..22: mol_type = other RNA
tcacacggaaaacattattttc

SEQ ID NO: 148510 - RNA, 22 nt, synthetic construct
  source 1..22: mol_type = other RNA
tcacactagtcaccctacagac

SEQ ID NO: 148511 - RNA, 22 nt, synthetic construct
  source 1..22: mol_type = other RNA
tcacactataacagatggaact

SEQ ID NO: 148512 - RNA, 22 nt, synthetic construct
  source 1..22: mol_type = other RNA
tcacactcgcactccacttccc

SEQ ID NO: 148513 - RNA, 22 nt, synthetic construct
  source 1..22: mol_type = other RNA
tcacactgattttctgcttctc

SEQ ID NO: 148514 - RNA, 22 nt, synthetic construct
  source 1..22: mol_type = other RNA
tcacactgctcctgcctttgtt

SEQ ID NO: 148515 - RNA, 22 nt, synthetic construct
  source 1..22: mol_type = other RNA
tcacactggtcactggccactg

SEQ ID NO: 148516 - RNA, 22 nt, synthetic construct
  source 1..22: mol_type = other RNA
tcacactgttgtccaggccaga

SEQ ID NO: 148517 - RNA, 22 nt, synthetic construct
  source 1..22: mol_type = other RNA
tcacactgtttgattactgtag

SEQ ID NO: 148518 - RNA, 22 nt, synthetic construct
  source 1..22: mol_type = other RNA
tcacacttactaaatgatcttt

SEQ ID NO: 148519 - RNA, 22 nt, synthetic construct
  source 1..22: mol_type = other RNA
tcacacttagttcaagatgcat

SEQ ID NO: 148520 - RNA, 22 nt, synthetic construct
  source 1..22: mol_type = other RNA
tcacacttgatggtttggggct

SEQ ID NO: 148521 - RNA, 22 nt, synthetic construct
  source 1..22: mol_type = other RNA
tcacactttttgtgagttttaa

SEQ ID NO: 148522 - RNA, 22 nt, synthetic construct
  source 1..22: mol_type = other RNA
tcacagaaacagaaaaatccat

SEQ ID NO: 148523 - RNA, 22 nt, synthetic construct
  source 1..22: mol_type = other RNA
tcacagaactgtcactgacaca

SEQ ID NO: 148524 - RNA, 22 nt, synthetic construct
  source 1..22: mol_type = other RNA
tcacagaagtgttttgatagtt

SEQ ID NO: 148525 - RNA, 22 nt, synthetic construct
  source 1..22: mol_type = other RNA
tcacagaatatactcagaaaaa

SEQ ID NO: 148526 - RNA, 22 nt, synthetic construct
  source 1..22: mol_type = other RNA
tcacagacagggaatggggagc

SEQ ID NO: 148527 - RNA, 22 nt, synthetic construct
  source 1..22: mol_type = other RNA
tcacagacagtaatttatacaa

SEQ ID NO: 148528 - RNA, 22 nt, synthetic construct
  source 1..22: mol_type = other RNA
tcacagacgcaaaggatgtcaa

SEQ ID NO: 148529 - RNA, 22 nt, synthetic construct
  source 1..22: mol_type = other RNA
tcacagatacaactctgaccat

SEQ ID NO: 148530 - RNA, 22 nt, synthetic construct
  source 1..22: mol_type = other RNA
tcacagcatgaatacctattta

SEQ ID NO: 148531 - RNA, 22 nt, synthetic construct
  source 1..22: mol_type = other RNA
tcacagcgtgcaccttacattg

SEQ ID NO: 148532 - RNA, 22 nt, synthetic construct
  source 1..22: mol_type = other RNA
tcacagcttaccaagtgccgcg

SEQ ID NO: 148533 - RNA, 22 nt, synthetic construct
  source 1..22: mol_type = other RNA
tcacaggaaagatgtcttttaa

SEQ ID NO: 148534 - RNA, 22 nt, synthetic construct
  source 1..22: mol_type = other RNA
tcacaggcgttgagccatcatg

SEQ ID NO: 148535 - RNA, 22 nt, synthetic construct
  source 1..22: mol_type = other RNA
tcacaggctttcctacaataca

SEQ ID NO: 148536 - RNA, 22 nt, synthetic construct
  source 1..22: mol_type = other RNA
tcacagggcagggagagagaaa

SEQ ID NO: 148537 - RNA, 22 nt, synthetic construct
  source 1..22: mol_type = other RNA
tcacaggtttaggtttttcttg

SEQ ID NO: 148538 - RNA, 22 nt, synthetic construct
  source 1..22: mol_type = other RNA
tcacagtacgcttttatgttat

SEQ ID NO: 148539 - RNA, 22 nt, synthetic construct
  source 1..22: mol_type = other RNA
tcacagtagaagactcagcagt

SEQ ID NO: 148540 - RNA, 22 nt, synthetic construct
  source 1..22: mol_type = other RNA
tcacagtatgcacaaataatta

SEQ ID NO: 148541 - RNA, 22 nt, synthetic construct
  source 1..22: mol_type = other RNA
tcacagtcacaaagctttaaac

SEQ ID NO: 148542 - RNA, 22 nt, synthetic construct
  source 1..22: mol_type = other RNA
tcacagtccactcacctgtcat

SEQ ID NO: 148543 - RNA, 22 nt, synthetic construct
  source 1..22: mol_type = other RNA
tcacagtccaggaacttacagt

SEQ ID NO: 148544 - RNA, 22 nt, synthetic construct
  source 1..22: mol_type = other RNA
tcacagtgaattctgacttagt

SEQ ID NO: 148545 - RNA, 22 nt, synthetic construct
  source 1..22: mol_type = other RNA
tcacagtgaggacgctgatgac

SEQ ID NO: 148546 - RNA, 22 nt, synthetic construct
  source 1..22: mol_type = other RNA
tcacagtgctccatagcttcct

SEQ ID NO: 148547 - RNA, 22 nt, synthetic construct
  source 1..22: mol_type = other RNA
tcacataaatttgccacatttt

SEQ ID NO: 148548 - RNA, 22 nt, synthetic construct
  source 1..22: mol_type = other RNA
tcacataaggtatatttctgta

SEQ ID NO: 148549 - RNA, 22 nt, synthetic construct
  source 1..22: mol_type = other RNA
tcacatagaagcgctcttcaag

SEQ ID NO: 148550 - RNA, 22 nt, synthetic construct
  source 1..22: mol_type = other RNA
tcacatagacctgaatgactgt

SEQ ID NO: 148551 - RNA, 22 nt, synthetic construct
  source 1..22: mol_type = other RNA
tcacatatctaattaacatcca

SEQ ID NO: 148552 - RNA, 22 nt, synthetic construct
  source 1..22: mol_type = other RNA
tcacatattttatgctttgtct

SEQ ID NO: 148553 - RNA, 22 nt, synthetic construct
  source 1..22: mol_type = other RNA
tcacatcagttaccaccaagaa

SEQ ID NO: 148554 - RNA, 22 nt, synthetic construct
  source 1..22: mol_type = other RNA
tcacatgtttggtcaattgatc

SEQ ID NO: 148555 - RNA, 22 nt, synthetic construct
  source 1..22: mol_type = other RNA
tcacattcacagcgtgcacctt

SEQ ID NO: 148556 - RNA, 22 nt, synthetic construct
  source 1..22: mol_type = other RNA
tcacattcagaggtatttgggg

SEQ ID NO: 148557 - RNA, 22 nt, synthetic construct
  source 1..22: mol_type = other RNA
tcacattctagtgatgggagat

SEQ ID NO: 148558 - RNA, 22 nt, synthetic construct
  source 1..22: mol_type = other RNA
tcacattctgcctgcagactgc

SEQ ID NO: 148559 - RNA, 22 nt, synthetic construct
  source 1..22: mol_type = other RNA
tcacattcttcaccattccagc

SEQ ID NO: 148560 - RNA, 22 nt, synthetic construct
  source 1..22: mol_type = other RNA
tcacattgcacagtctccccca

SEQ ID NO: 148561 - RNA, 22 nt, synthetic construct
  source 1..22: mol_type = other RNA
tcacattgtatttctgttagat

SEQ ID NO: 148562 - RNA, 22 nt, synthetic construct
  source 1..22: mol_type = other RNA
tcacatttaagaagggaacact

SEQ ID NO: 148563 - RNA, 22 nt, synthetic construct
  source 1..22: mol_type = other RNA
tcacatttagtttcatctatgt

SEQ ID NO: 148564 - RNA, 22 nt, synthetic construct
  source 1..22: mol_type = other RNA
tcacatttcgccttctcagaag

SEQ ID NO: 148565 - RNA, 22 nt, synthetic construct
  source 1..22: mol_type = other RNA
tcacatttgaaagaaagaaggc

SEQ ID NO: 148566 - RNA, 22 nt, synthetic construct
  source 1..22: mol_type = other RNA
tcacatttgctttactactgca

SEQ ID NO: 148567 - RNA, 22 nt, synthetic construct
  source 1..22: mol_type = other RNA
tcacattttcttatctaggcga

SEQ ID NO: 148568 - RNA, 22 nt, synthetic construct
  source 1..22: mol_type = other RNA
tcacattttgaatcatgggagc

SEQ ID NO: 148569 - RNA, 22 nt, synthetic construct
  source 1..22: mol_type = other RNA
tcaccaaacaccttacactcaa

SEQ ID NO: 148570 - RNA, 22 nt, synthetic construct
  source 1..22: mol_type = other RNA
tcaccaaacgtttagatgaatg

SEQ ID NO: 148571 - RNA, 22 nt, synthetic construct
  source 1..22: mol_type = other RNA
tcaccaaagacttcaggaacac

SEQ ID NO: 148572 - RNA, 22 nt, synthetic construct
  source 1..22: mol_type = other RNA
tcaccaaagatttactaaactg

SEQ ID NO: 148573 - RNA, 22 nt, synthetic construct
  source 1..22: mol_type = other RNA
tcaccaacatccacagctttct

SEQ ID NO: 148574 - RNA, 22 nt, synthetic construct
  source 1..22: mol_type = other RNA
tcaccaactgaagcggggctgc

SEQ ID NO: 148575 - RNA, 22 nt, synthetic construct
  source 1..22: mol_type = other RNA
tcaccaattgttaacatttctt

SEQ ID NO: 148576 - RNA, 22 nt, synthetic construct
  source 1..22: mol_type = other RNA
tcaccagcggcatacaggagtt

SEQ ID NO: 148577 - RNA, 22 nt, synthetic construct
  source 1..22: mol_type = other RNA
tcaccaggctggaatgcagcgg

SEQ ID NO: 148578 - RNA, 22 nt, synthetic construct
  source 1..22: mol_type = other RNA
tcaccaggggctgggggatcca

SEQ ID NO: 148579 - RNA, 22 nt, synthetic construct
  source 1..22: mol_type = other RNA
tcaccagtttctaattagaatt

SEQ ID NO: 148580 - RNA, 22 nt, synthetic construct
  source 1..22: mol_type = other RNA
tcaccatattggccaggctggt

SEQ ID NO: 148581 - RNA, 22 nt, synthetic construct
  source 1..22: mol_type = other RNA
tcaccatcatcatcaggctggc

SEQ ID NO: 148582 - RNA, 22 nt, synthetic construct
  source 1..22: mol_type = other RNA
tcaccatctgataagcccaacc

SEQ ID NO: 148583 - RNA, 22 nt, synthetic construct
  source 1..22: mol_type = other RNA
tcaccatgtgcttatcaataaa

SEQ ID NO: 148584 - RNA, 22 nt, synthetic construct
  source 1..22: mol_type = other RNA
tcaccattccagccattctctt

SEQ ID NO: 148585 - RNA, 22 nt, synthetic construct
  source 1..22: mol_type = other RNA
tcacccaagaatttcatgcctt

SEQ ID NO: 148586 - RNA, 22 nt, synthetic construct
  source 1..22: mol_type = other RNA
tcacccaagccacagcgtggaa

SEQ ID NO: 148587 - RNA, 22 nt, synthetic construct
  source 1..22: mol_type = other RNA
tcacccacgtggagtgcaatgg

SEQ ID NO: 148588 - RNA, 22 nt, synthetic construct
  source 1..22: mol_type = other RNA
tcacccagaccaagtttaacca

SEQ ID NO: 148589 - RNA, 22 nt, synthetic construct
  source 1..22: mol_type = other RNA
tcacccagctcgaccaggggaa

SEQ ID NO: 148590 - RNA, 22 nt, synthetic construct
  source 1..22: mol_type = other RNA
tcaccctacagactcaataacc

SEQ ID NO: 148591 - RNA, 22 nt, synthetic construct
  source 1..22: mol_type = other RNA
tcaccctcaggactctgctcaa

SEQ ID NO: 148592 - RNA, 22 nt, synthetic construct
  source 1..22: mol_type = other RNA
tcaccctgcgaaggcaatgtaa

SEQ ID NO: 148593 - RNA, 22 nt, synthetic construct
  source 1..22: mol_type = other RNA
tcacccttataaaatgagggta

SEQ ID NO: 148594 - RNA, 22 nt, synthetic construct
  source 1..22: mol_type = other RNA
tcacccttgtaatcaagtatct

SEQ ID NO: 148595 - RNA, 22 nt, synthetic construct
  source 1..22: mol_type = other RNA
tcaccgcaacatctgcctcccg

SEQ ID NO: 148596 - RNA, 22 nt, synthetic construct
  source 1..22: mol_type = other RNA
tcaccgtgcaactagagaaagc

SEQ ID NO: 148597 - RNA, 22 nt, synthetic construct
  source 1..22: mol_type = other RNA
tcacctagcctctctgggcttc

SEQ ID NO: 148598 - RNA, 22 nt, synthetic construct
  source 1..22: mol_type = other RNA
tcacctagctgttttcatgcga

SEQ ID NO: 148599 - RNA, 22 nt, synthetic construct
  source 1..22: mol_type = other RNA
tcacctcaaggcagaacacact

SEQ ID NO: 148600 - RNA, 22 nt, synthetic construct
  source 1..22: mol_type = other RNA
tcacctcaaggccaactgtcct

SEQ ID NO: 148601 - RNA, 22 nt, synthetic construct
  source 1..22: mol_type = other RNA
tcacctcaagtgatgcaactcc

SEQ ID NO: 148602 - RNA, 22 nt, synthetic construct
  source 1..22: mol_type = other RNA
tcacctcacattcacagcgtgc

SEQ ID NO: 148603 - RNA, 22 nt, synthetic construct
  source 1..22: mol_type = other RNA
tcacctctacacaaaaatccag

SEQ ID NO: 148604 - RNA, 22 nt, synthetic construct
  source 1..22: mol_type = other RNA
tcacctctccgggtaaaaagcc

SEQ ID NO: 148605 - RNA, 22 nt, synthetic construct
  source 1..22: mol_type = other RNA
tcacctctggactcagggtcac

SEQ ID NO: 148606 - RNA, 22 nt, synthetic construct
  source 1..22: mol_type = other RNA
tcacctgtcatgtcaaattttt

SEQ ID NO: 148607 - RNA, 22 nt, synthetic construct
  source 1..22: mol_type = other RNA
tcaccttctgctgggcccactc

SEQ ID NO: 148608 - RNA, 22 nt, synthetic construct
  source 1..22: mol_type = other RNA
tcacgaaagcggtcaacgcacc

SEQ ID NO: 148609 - RNA, 22 nt, synthetic construct
  source 1..22: mol_type = other RNA
tcacgagactgttagggactta

SEQ ID NO: 148610 - RNA, 22 nt, synthetic construct
  source 1..22: mol_type = other RNA
tcacgatgcttaggtaagaaaa

SEQ ID NO: 148611 - RNA, 22 nt, synthetic construct
  source 1..22: mol_type = other RNA
tcacgattctgacccagagcct

SEQ ID NO: 148612 - RNA, 22 nt, synthetic construct
  source 1..22: mol_type = other RNA
tcacgcacagggagatacttga

SEQ ID NO: 148613 - RNA, 22 nt, synthetic construct
  source 1..22: mol_type = other RNA
tcacgccactgcattccgcctg

SEQ ID NO: 148614 - RNA, 22 nt, synthetic construct
  source 1..22: mol_type = other RNA
tcacggctgattataaccttga

SEQ ID NO: 148615 - RNA, 22 nt, synthetic construct
  source 1..22: mol_type = other RNA
tcacggtgccctacatatggca

SEQ ID NO: 148616 - RNA, 22 nt, synthetic construct
  source 1..22: mol_type = other RNA
tcacgtcaccgcaacctccgcc

SEQ ID NO: 148617 - RNA, 22 nt, synthetic construct
  source 1..22: mol_type = other RNA
tcacgtgcattcatactgaagg

SEQ ID NO: 148618 - RNA, 22 nt, synthetic construct
  source 1..22: mol_type = other RNA
tcacgtggcgctccctctgtgt

SEQ ID NO: 148619 - RNA, 22 nt, synthetic construct
  source 1..22: mol_type = other RNA
tcacgttaccctctggaatgcc

SEQ ID NO: 148620 - RNA, 22 nt, synthetic construct
  source 1..22: mol_type = other RNA
tcactaaaaatcagattaagca

SEQ ID NO: 148621 - RNA, 22 nt, synthetic construct
  source 1..22: mol_type = other RNA
tcactaagagtgaaaaggcaaa

SEQ ID NO: 148622 - RNA, 22 nt, synthetic construct
  source 1..22: mol_type = other RNA
tcactaagtcagaattcactgt

SEQ ID NO: 148623 - RNA, 22 nt, synthetic construct
  source 1..22: mol_type = other RNA
tcactaatgcctcaaattagtc

SEQ ID NO: 148624 - RNA, 22 nt, synthetic construct
  source 1..22: mol_type = other RNA
tcactacagcatattagctgtc

SEQ ID NO: 148625 - RNA, 22 nt, synthetic construct
  source 1..22: mol_type = other RNA
tcactagaatgtgacttcgtca

SEQ ID NO: 148626 - RNA, 22 nt, synthetic construct
  source 1..22: mol_type = other RNA
tcactagacacatttttgacag

SEQ ID NO: 148627 - RNA, 22 nt, synthetic construct
  source 1..22: mol_type = other RNA
tcactagagcttcaacctcctg

SEQ ID NO: 148628 - RNA, 22 nt, synthetic construct
  source 1..22: mol_type = other RNA
tcactagatctcttttccttta

SEQ ID NO: 148629 - RNA, 22 nt, synthetic construct
  source 1..22: mol_type = other RNA
tcactagctattagagaaatgc

SEQ ID NO: 148630 - RNA, 22 nt, synthetic construct
  source 1..22: mol_type = other RNA
tcactagtgggtcgggtgtcag

SEQ ID NO: 148631 - RNA, 22 nt, synthetic construct
  source 1..22: mol_type = other RNA
tcactattaaccatatggttta

SEQ ID NO: 148632 - RNA, 22 nt, synthetic construct
  source 1..22: mol_type = other RNA
tcactcacctagctgttttcat

SEQ ID NO: 148633 - RNA, 22 nt, synthetic construct
  source 1..22: mol_type = other RNA
tcactcactggcctgagctctc

SEQ ID NO: 148634 - RNA, 22 nt, synthetic construct
  source 1..22: mol_type = other RNA
tcactcagcataattggttaaa

SEQ ID NO: 148635 - RNA, 22 nt, synthetic construct
  source 1..22: mol_type = other RNA
tcactcatttccgttgctgcat

SEQ ID NO: 148636 - RNA, 22 nt, synthetic construct
  source 1..22: mol_type = other RNA
tcactccaaagcaaacgtgcac

SEQ ID NO: 148637 - RNA, 22 nt, synthetic construct
  source 1..22: mol_type = other RNA
tcactccatttgtggcatcttt

SEQ ID NO: 148638 - RNA, 22 nt, synthetic construct
  source 1..22: mol_type = other RNA
tcactcctcattcacactagtc

SEQ ID NO: 148639 - RNA, 22 nt, synthetic construct
  source 1..22: mol_type = other RNA
tcactctaatatggttcctaga

SEQ ID NO: 148640 - RNA, 22 nt, synthetic construct
  source 1..22: mol_type = other RNA
tcactctcaatagtgtcctttg

SEQ ID NO: 148641 - RNA, 22 nt, synthetic construct
  source 1..22: mol_type = other RNA
tcactctctttaggaagcttcc

SEQ ID NO: 148642 - RNA, 22 nt, synthetic construct
  source 1..22: mol_type = other RNA
tcactctgtcgcccaggctgga

SEQ ID NO: 148643 - RNA, 22 nt, synthetic construct
  source 1..22: mol_type = other RNA
tcactcttaaaaggagatatac

SEQ ID NO: 148644 - RNA, 22 nt, synthetic construct
  source 1..22: mol_type = other RNA
tcactcttaccaaggctggagt

SEQ ID NO: 148645 - RNA, 22 nt, synthetic construct
  source 1..22: mol_type = other RNA
tcactcttagtgatgtcttttg

SEQ ID NO: 148646 - RNA, 22 nt, synthetic construct
  source 1..22: mol_type = other RNA
tcactcttctgcaagttgctat

SEQ ID NO: 148647 - RNA, 22 nt, synthetic construct
  source 1..22: mol_type = other RNA
tcactcttttaaggtttagaaa

SEQ ID NO: 148648 - RNA, 22 nt, synthetic construct
  source 1..22: mol_type = other RNA
tcactgaaaccctcacgaaagc

SEQ ID NO: 148649 - RNA, 22 nt, synthetic construct
  source 1..22: mol_type = other RNA
tcactgacacaggctgaaggga

SEQ ID NO: 148650 - RNA, 22 nt, synthetic construct
  source 1..22: mol_type = other RNA
tcactgactacacatacacagg

SEQ ID NO: 148651 - RNA, 22 nt, synthetic construct
  source 1..22: mol_type = other RNA
tcactgactggctgtgccaact

SEQ ID NO: 148652 - RNA, 22 nt, synthetic construct
  source 1..22: mol_type = other RNA
tcactgcaagctccgcctcctg

SEQ ID NO: 148653 - RNA, 22 nt, synthetic construct
  source 1..22: mol_type = other RNA
tcactgcagaattactgacaat

SEQ ID NO: 148654 - RNA, 22 nt, synthetic construct
  source 1..22: mol_type = other RNA
tcactgctcagtccctcacctt

SEQ ID NO: 148655 - RNA, 22 nt, synthetic construct
  source 1..22: mol_type = other RNA
tcactgctgatgtaagtgggag

SEQ ID NO: 148656 - RNA, 22 nt, synthetic construct
  source 1..22: mol_type = other RNA
tcactggagaattctactaaac

SEQ ID NO: 148657 - RNA, 22 nt, synthetic construct
  source 1..22: mol_type = other RNA
tcactggatagaagtgtatcag

SEQ ID NO: 148658 - RNA, 22 nt, synthetic construct
  source 1..22: mol_type = other RNA
tcactggccactgattgagtat

SEQ ID NO: 148659 - RNA, 22 nt, synthetic construct
  source 1..22: mol_type = other RNA
tcactggccagcattacttagg

SEQ ID NO: 148660 - RNA, 22 nt, synthetic construct
  source 1..22: mol_type = other RNA
tcactggcctgagctctcagtg

SEQ ID NO: 148661 - RNA, 22 nt, synthetic construct
  source 1..22: mol_type = other RNA
tcactggctagtaggcaacatc

SEQ ID NO: 148662 - RNA, 22 nt, synthetic construct
  source 1..22: mol_type = other RNA
tcactgtaacctccacctccca

SEQ ID NO: 148663 - RNA, 22 nt, synthetic construct
  source 1..22: mol_type = other RNA
tcactgtaagaataatgtcttt

SEQ ID NO: 148664 - RNA, 22 nt, synthetic construct
  source 1..22: mol_type = other RNA
tcactgtactactgacctggga

SEQ ID NO: 148665 - RNA, 22 nt, synthetic construct
  source 1..22: mol_type = other RNA
tcactgtctccatgtcctcacc

SEQ ID NO: 148666 - RNA, 22 nt, synthetic construct
  source 1..22: mol_type = other RNA
tcactgtgactccaaagcaaac

SEQ ID NO: 148667 - RNA, 22 nt, synthetic construct
  source 1..22: mol_type = other RNA
tcactgtgatacctagtacgta

SEQ ID NO: 148668 - RNA, 22 nt, synthetic construct
  source 1..22: mol_type = other RNA
tcactgtggaaaacagtttggc

SEQ ID NO: 148669 - RNA, 22 nt, synthetic construct
  source 1..22: mol_type = other RNA
tcactgtttggacagtaaaaaa

SEQ ID NO: 148670 - RNA, 22 nt, synthetic construct
  source 1..22: mol_type = other RNA
tcacttacttgagccccagaat

SEQ ID NO: 148671 - RNA, 22 nt, synthetic construct
  source 1..22: mol_type = other RNA
tcacttattagcaaagaggcaa

SEQ ID NO: 148672 - RNA, 22 nt, synthetic construct
  source 1..22: mol_type = other RNA
tcacttccaagtcccggaagct

SEQ ID NO: 148673 - RNA, 22 nt, synthetic construct
  source 1..22: mol_type = other RNA
tcacttcctctcttaaatccga

SEQ ID NO: 148674 - RNA, 22 nt, synthetic construct
  source 1..22: mol_type = other RNA
tcacttcgttcagtttagtaaa

SEQ ID NO: 148675 - RNA, 22 nt, synthetic construct
  source 1..22: mol_type = other RNA
tcacttctctgctgctgaaaaa

SEQ ID NO: 148676 - RNA, 22 nt, synthetic construct
  source 1..22: mol_type = other RNA
tcacttcttagtaaatatccga

SEQ ID NO: 148677 - RNA, 22 nt, synthetic construct
  source 1..22: mol_type = other RNA
tcacttcttattggttatctgt

SEQ ID NO: 148678 - RNA, 22 nt, synthetic construct
  source 1..22: mol_type = other RNA
tcacttgaaacctgccatggtg

SEQ ID NO: 148679 - RNA, 22 nt, synthetic construct
  source 1..22: mol_type = other RNA
tcacttgagcctggaagttcaa

SEQ ID NO: 148680 - RNA, 22 nt, synthetic construct
  source 1..22: mol_type = other RNA
tcacttgaggtgattaaaggcc

SEQ ID NO: 148681 - RNA, 22 nt, synthetic construct
  source 1..22: mol_type = other RNA
tcacttgattactttacagtta

SEQ ID NO: 148682 - RNA, 22 nt, synthetic construct
  source 1..22: mol_type = other RNA
tcacttgtttcttttcactcta

SEQ ID NO: 148683 - RNA, 22 nt, synthetic construct
  source 1..22: mol_type = other RNA
tcactttcctattcacactgct

SEQ ID NO: 148684 - RNA, 22 nt, synthetic construct
  source 1..22: mol_type = other RNA
tcactttcgtcatctataaggt

SEQ ID NO: 148685 - RNA, 22 nt, synthetic construct
  source 1..22: mol_type = other RNA
tcactttgatcatacacatcca

SEQ ID NO: 148686 - RNA, 22 nt, synthetic construct
  source 1..22: mol_type = other RNA
tcactttgggattagcttattc

SEQ ID NO: 148687 - RNA, 22 nt, synthetic construct
  source 1..22: mol_type = other RNA
tcactttgttgctcaggctgga

SEQ ID NO: 148688 - RNA, 22 nt, synthetic construct
  source 1..22: mol_type = other RNA
tcacttttctggttttctggag

SEQ ID NO: 148689 - RNA, 22 nt, synthetic construct
  source 1..22: mol_type = other RNA
tcacttttgagttcagaaagat

SEQ ID NO: 148690 - RNA, 22 nt, synthetic construct
  source 1..22: mol_type = other RNA
tcacttttggaatttaaggggt

SEQ ID NO: 148691 - RNA, 22 nt, synthetic construct
  source 1..22: mol_type = other RNA
tcacttttgtgcaacataaata

SEQ ID NO: 148692 - RNA, 22 nt, synthetic construct
  source 1..22: mol_type = other RNA
tcactttttattctgttctagc

SEQ ID NO: 148693 - RNA, 22 nt, synthetic construct
  source 1..22: mol_type = other RNA
tcagaaaagatcagtaaaattc

SEQ ID NO: 148694 - RNA, 22 nt, synthetic construct
  source 1..22: mol_type = other RNA
tcagaaaaggctgagacctcat

SEQ ID NO: 148695 - RNA, 22 nt, synthetic construct
  source 1..22: mol_type = other RNA
tcagaaaattttcttttgtggg

SEQ ID NO: 148696 - RNA, 22 nt, synthetic construct
  source 1..22: mol_type = other RNA
tcagaaacaacaacaacaaaat

SEQ ID NO: 148697 - RNA, 22 nt, synthetic construct
  source 1..22: mol_type = other RNA
tcagaaacaccaacacaaagcc

SEQ ID NO: 148698 - RNA, 22 nt, synthetic construct
  source 1..22: mol_type = other RNA
tcagaaaccatcgttcacactc

SEQ ID NO: 148699 - RNA, 22 nt, synthetic construct
  source 1..22: mol_type = other RNA
tcagaaactgacaggactccac

SEQ ID NO: 148700 - RNA, 22 nt, synthetic construct
  source 1..22: mol_type = other RNA
tcagaaagagaatagcagaaac

SEQ ID NO: 148701 - RNA, 22 nt, synthetic construct
  source 1..22: mol_type = other RNA
tcagaaagattaatccttgtgg

SEQ ID NO: 148702 - RNA, 22 nt, synthetic construct
  source 1..22: mol_type = other RNA
tcagaaatagactcccaactta

SEQ ID NO: 148703 - RNA, 22 nt, synthetic construct
  source 1..22: mol_type = other RNA
tcagaaatgtttaattcctact

SEQ ID NO: 148704 - RNA, 22 nt, synthetic construct
  source 1..22: mol_type = other RNA
tcagaaattataagcttcctct

SEQ ID NO: 148705 - RNA, 22 nt, synthetic construct
  source 1..22: mol_type = other RNA
tcagaactcttctccaaggaaa

SEQ ID NO: 148706 - RNA, 22 nt, synthetic construct
  source 1..22: mol_type = other RNA
tcagaacttgacaagtatatta

SEQ ID NO: 148707 - RNA, 22 nt, synthetic construct
  source 1..22: mol_type = other RNA
tcagaagaaattacttctttct

SEQ ID NO: 148708 - RNA, 22 nt, synthetic construct
  source 1..22: mol_type = other RNA
tcagaagagcactatgtaaatt

SEQ ID NO: 148709 - RNA, 22 nt, synthetic construct
  source 1..22: mol_type = other RNA
tcagaagaggataaggggcagg

SEQ ID NO: 148710 - RNA, 22 nt, synthetic construct
  source 1..22: mol_type = other RNA
tcagaagcacaccaaggtttct

SEQ ID NO: 148711 - RNA, 22 nt, synthetic construct
  source 1..22: mol_type = other RNA
tcagaagccctgcagccagatt

SEQ ID NO: 148712 - RNA, 22 nt, synthetic construct
  source 1..22: mol_type = other RNA
tcagaagctaaattttcatagg

SEQ ID NO: 148713 - RNA, 22 nt, synthetic construct
  source 1..22: mol_type = other RNA
tcagaagctatagctgagaagt

SEQ ID NO: 148714 - RNA, 22 nt, synthetic construct
  source 1..22: mol_type = other RNA
tcagaagctttcagacttaact

SEQ ID NO: 148715 - RNA, 22 nt, synthetic construct
  source 1..22: mol_type = other RNA
tcagaaggagtccagtcctgct

SEQ ID NO: 148716 - RNA, 22 nt, synthetic construct
  source 1..22: mol_type = other RNA
tcagaagtactactcattaaat

SEQ ID NO: 148717 - RNA, 22 nt, synthetic construct
  source 1..22: mol_type = other RNA
tcagaagtgctgacttggcagc

SEQ ID NO: 148718 - RNA, 22 nt, synthetic construct
  source 1..22: mol_type = other RNA
tcagaagtttggaaccagcctg

SEQ ID NO: 148719 - RNA, 22 nt, synthetic construct
  source 1..22: mol_type = other RNA
tcagaatacaaaaatgacacaa

SEQ ID NO: 148720 - RNA, 22 nt, synthetic construct
  source 1..22: mol_type = other RNA
tcagaataccagagattgggaa

SEQ ID NO: 148721 - RNA, 22 nt, synthetic construct
  source 1..22: mol_type = other RNA
tcagaatcgtgatagtcttcca

SEQ ID NO: 148722 - RNA, 22 nt, synthetic construct
  source 1..22: mol_type = other RNA
tcagaattagaaagctggactc

SEQ ID NO: 148723 - RNA, 22 nt, synthetic construct
  source 1..22: mol_type = other RNA
tcagaattcactgtgactccaa

SEQ ID NO: 148724 - RNA, 22 nt, synthetic construct
  source 1..22: mol_type = other RNA
tcagaattccatcagtggttgt

SEQ ID NO: 148725 - RNA, 22 nt, synthetic construct
  source 1..22: mol_type = other RNA
tcagaattccattccttttcga

SEQ ID NO: 148726 - RNA, 22 nt, synthetic construct
  source 1..22: mol_type = other RNA
tcagaatttgaggtcttctagc

SEQ ID NO: 148727 - RNA, 22 nt, synthetic construct
  source 1..22: mol_type = other RNA
tcagacaacacattaataagat

SEQ ID NO: 148728 - RNA, 22 nt, synthetic construct
  source 1..22: mol_type = other RNA
tcagacacactagctgacccac

SEQ ID NO: 148729 - RNA, 22 nt, synthetic construct
  source 1..22: mol_type = other RNA
tcagacacctacattaatctca

SEQ ID NO: 148730 - RNA, 22 nt, synthetic construct
  source 1..22: mol_type = other RNA
tcagactaagacactagctatt

SEQ ID NO: 148731 - RNA, 22 nt, synthetic construct
  source 1..22: mol_type = other RNA
tcagactcattgcctatagaca

SEQ ID NO: 148732 - RNA, 22 nt, synthetic construct
  source 1..22: mol_type = other RNA
tcagactgtattaccagcttac

SEQ ID NO: 148733 - RNA, 22 nt, synthetic construct
  source 1..22: mol_type = other RNA
tcagacttaactataggagttc

SEQ ID NO: 148734 - RNA, 22 nt, synthetic construct
  source 1..22: mol_type = other RNA
tcagagacacatactgaaagac

SEQ ID NO: 148735 - RNA, 22 nt, synthetic construct
  source 1..22: mol_type = other RNA
tcagagagacctgaagactgga

SEQ ID NO: 148736 - RNA, 22 nt, synthetic construct
  source 1..22: mol_type = other RNA
tcagagaggctttttattagat

SEQ ID NO: 148737 - RNA, 22 nt, synthetic construct
  source 1..22: mol_type = other RNA
tcagagatctgaaattgacttc

SEQ ID NO: 148738 - RNA, 22 nt, synthetic construct
  source 1..22: mol_type = other RNA
tcagagattttcccaaagatag

SEQ ID NO: 148739 - RNA, 22 nt, synthetic construct
  source 1..22: mol_type = other RNA
tcagagcagcactgatgtgtag

SEQ ID NO: 148740 - RNA, 22 nt, synthetic construct
  source 1..22: mol_type = other RNA
tcagagcatgtcccctggagtt

SEQ ID NO: 148741 - RNA, 22 nt, synthetic construct
  source 1..22: mol_type = other RNA
tcagagctttgttatgaaaata

SEQ ID NO: 148742 - RNA, 22 nt, synthetic construct
  source 1..22: mol_type = other RNA
tcagaggagcagttactcctga

SEQ ID NO: 148743 - RNA, 22 nt, synthetic construct
  source 1..22: mol_type = other RNA
tcagaggccctggtgctttcta

SEQ ID NO: 148744 - RNA, 22 nt, synthetic construct
  source 1..22: mol_type = other RNA
tcagagggaaactgtttttgca

SEQ ID NO: 148745 - RNA, 22 nt, synthetic construct
  source 1..22: mol_type = other RNA
tcagaggtatttggggctagga

SEQ ID NO: 148746 - RNA, 22 nt, synthetic construct
  source 1..22: mol_type = other RNA
tcagaggtctgttactcccgat

SEQ ID NO: 148747 - RNA, 22 nt, synthetic construct
  source 1..22: mol_type = other RNA
tcagagtatatatgctccctaa

SEQ ID NO: 148748 - RNA, 22 nt, synthetic construct
  source 1..22: mol_type = other RNA
tcagagtgaacaggcaaccttg

SEQ ID NO: 148749 - RNA, 22 nt, synthetic construct
  source 1..22: mol_type = other RNA
tcagagtgctgggtagagactg

SEQ ID NO: 148750 - RNA, 22 nt, synthetic construct
  source 1..22: mol_type = other RNA
tcagagtggctaatgtggcttg

SEQ ID NO: 148751 - RNA, 22 nt, synthetic construct
  source 1..22: mol_type = other RNA
tcagagttgtatctgtgatccc

SEQ ID NO: 148752 - RNA, 22 nt, synthetic construct
  source 1..22: mol_type = other RNA
tcagataacaaagggttcttgg

SEQ ID NO: 148753 - RNA, 22 nt, synthetic construct
  source 1..22: mol_type = other RNA
tcagatagaaaagacaatagct

SEQ ID NO: 148754 - RNA, 22 nt, synthetic construct
  source 1..22: mol_type = other RNA
tcagatatcaatctggatataa

SEQ ID NO: 148755 - RNA, 22 nt, synthetic construct
  source 1..22: mol_type = other RNA
tcagatatccacctgcctcagc

SEQ ID NO: 148756 - RNA, 22 nt, synthetic construct
  source 1..22: mol_type = other RNA
tcagatatgaaagaggagacat

SEQ ID NO: 148757 - RNA, 22 nt, synthetic construct
  source 1..22: mol_type = other RNA
tcagatcccaattacttccagt

SEQ ID NO: 148758 - RNA, 22 nt, synthetic construct
  source 1..22: mol_type = other RNA
tcagatctctgacattggttat

SEQ ID NO: 148759 - RNA, 22 nt, synthetic construct
  source 1..22: mol_type = other RNA
tcagatctgagagatagaaagc

SEQ ID NO: 148760 - RNA, 22 nt, synthetic construct
  source 1..22: mol_type = other RNA
tcagatctgagtttgctctgca

SEQ ID NO: 148761 - RNA, 22 nt, synthetic construct
  source 1..22: mol_type = other RNA
tcagatctgttgcagtccccgg

SEQ ID NO: 148762 - RNA, 22 nt, synthetic construct
  source 1..22: mol_type = other RNA
tcagatgacagaaataatacaa

SEQ ID NO: 148763 - RNA, 22 nt, synthetic construct
  source 1..22: mol_type = other RNA
tcagatgatcctcccgccttgg

SEQ ID NO: 148764 - RNA, 22 nt, synthetic construct
  source 1..22: mol_type = other RNA
tcagatgcttctagccaaagca

SEQ ID NO: 148765 - RNA, 22 nt, synthetic construct
  source 1..22: mol_type = other RNA
tcagatggccccaaaattaccc

SEQ ID NO: 148766 - RNA, 22 nt, synthetic construct
  source 1..22: mol_type = other RNA
tcagatggtaaattggtcctgg

SEQ ID NO: 148767 - RNA, 22 nt, synthetic construct
  source 1..22: mol_type = other RNA
tcagatggtgatacctcttact

SEQ ID NO: 148768 - RNA, 22 nt, synthetic construct
  source 1..22: mol_type = other RNA
tcagatgtctccattttgccag

SEQ ID NO: 148769 - RNA, 22 nt, synthetic construct
  source 1..22: mol_type = other RNA
tcagattaagcatagtttgagt

SEQ ID NO: 148770 - RNA, 22 nt, synthetic construct
  source 1..22: mol_type = other RNA
tcagattcaccaattgttaaca

SEQ ID NO: 148771 - RNA, 22 nt, synthetic construct
  source 1..22: mol_type = other RNA
tcagattgaccttgtatccagt

SEQ ID NO: 148772 - RNA, 22 nt, synthetic construct
  source 1..22: mol_type = other RNA
tcagattgcttgagagagataa

SEQ ID NO: 148773 - RNA, 22 nt, synthetic construct
  source 1..22: mol_type = other RNA
tcagatttcaggtggtatttaa

SEQ ID NO: 148774 - RNA, 22 nt, synthetic construct
  source 1..22: mol_type = other RNA
tcagattttcttgttataagca

SEQ ID NO: 148775 - RNA, 22 nt, synthetic construct
  source 1..22: mol_type = other RNA
tcagcaaaagcaattattagtt

SEQ ID NO: 148776 - RNA, 22 nt, synthetic construct
  source 1..22: mol_type = other RNA
tcagcaactcttggccattttc

SEQ ID NO: 148777 - RNA, 22 nt, synthetic construct
  source 1..22: mol_type = other RNA
tcagcaaggaccattagcagtt

SEQ ID NO: 148778 - RNA, 22 nt, synthetic construct
  source 1..22: mol_type = other RNA
tcagcacaatactgtctcagtc

SEQ ID NO: 148779 - RNA, 22 nt, synthetic construct
  source 1..22: mol_type = other RNA
tcagcacactcttaataactgc

SEQ ID NO: 148780 - RNA, 22 nt, synthetic construct
  source 1..22: mol_type = other RNA
tcagcacagagccgaaatgcac

SEQ ID NO: 148781 - RNA, 22 nt, synthetic construct
  source 1..22: mol_type = other RNA
tcagcaccaaagattatgttcc

SEQ ID NO: 148782 - RNA, 22 nt, synthetic construct
  source 1..22: mol_type = other RNA
tcagcaccatctaacagaaata

SEQ ID NO: 148783 - RNA, 22 nt, synthetic construct
  source 1..22: mol_type = other RNA
tcagcaccctcaaatgtctcat

SEQ ID NO: 148784 - RNA, 22 nt, synthetic construct
  source 1..22: mol_type = other RNA
tcagcactgctattgataaatc

SEQ ID NO: 148785 - RNA, 22 nt, synthetic construct
  source 1..22: mol_type = other RNA
tcagcacttctgatatcctgta

SEQ ID NO: 148786 - RNA, 22 nt, synthetic construct
  source 1..22: mol_type = other RNA
tcagcagcagagaagtgaagct

SEQ ID NO: 148787 - RNA, 22 nt, synthetic construct
  source 1..22: mol_type = other RNA
tcagcagtgaccatatttccaa

SEQ ID NO: 148788 - RNA, 22 nt, synthetic construct
  source 1..22: mol_type = other RNA
tcagcagttcagcctgcagaag

SEQ ID NO: 148789 - RNA, 22 nt, synthetic construct
  source 1..22: mol_type = other RNA
tcagcagttttaaagaattcgt

SEQ ID NO: 148790 - RNA, 22 nt, synthetic construct
  source 1..22: mol_type = other RNA
tcagcataattggttaaacttg

SEQ ID NO: 148791 - RNA, 22 nt, synthetic construct
  source 1..22: mol_type = other RNA
tcagcatagcagaaccttagaa

SEQ ID NO: 148792 - RNA, 22 nt, synthetic construct
  source 1..22: mol_type = other RNA
tcagcatcttcactgactacac

SEQ ID NO: 148793 - RNA, 22 nt, synthetic construct
  source 1..22: mol_type = other RNA
tcagcatgtcttcagaggccct

SEQ ID NO: 148794 - RNA, 22 nt, synthetic construct
  source 1..22: mol_type = other RNA
tcagccaaagctggcatgttgg

SEQ ID NO: 148795 - RNA, 22 nt, synthetic construct
  source 1..22: mol_type = other RNA
tcagccacaagacataagcatt

SEQ ID NO: 148796 - RNA, 22 nt, synthetic construct
  source 1..22: mol_type = other RNA
tcagccagaggaagcttataat

SEQ ID NO: 148797 - RNA, 22 nt, synthetic construct
  source 1..22: mol_type = other RNA
tcagccatcccagctacataac

SEQ ID NO: 148798 - RNA, 22 nt, synthetic construct
  source 1..22: mol_type = other RNA
tcagccccctccctaccacccg

SEQ ID NO: 148799 - RNA, 22 nt, synthetic construct
  source 1..22: mol_type = other RNA
tcagccccctcgaagagaccac

SEQ ID NO: 148800 - RNA, 22 nt, synthetic construct
  source 1..22: mol_type = other RNA
tcagccccctgagtagctgtga

SEQ ID NO: 148801 - RNA, 22 nt, synthetic construct
  source 1..22: mol_type = other RNA
tcagcccctcatcctccgtagc

SEQ ID NO: 148802 - RNA, 22 nt, synthetic construct
  source 1..22: mol_type = other RNA
tcagccctgatagatattggca

SEQ ID NO: 148803 - RNA, 22 nt, synthetic construct
  source 1..22: mol_type = other RNA
tcagccgccgcagaggccaaat

SEQ ID NO: 148804 - RNA, 22 nt, synthetic construct
  source 1..22: mol_type = other RNA
tcagccgtgattgcaccactga

SEQ ID NO: 148805 - RNA, 22 nt, synthetic construct
  source 1..22: mol_type = other RNA
tcagcctaagcaagttacatgc

SEQ ID NO: 148806 - RNA, 22 nt, synthetic construct
  source 1..22: mol_type = other RNA
tcagcctcccgagtagttgtaa

SEQ ID NO: 148807 - RNA, 22 nt, synthetic construct
  source 1..22: mol_type = other RNA
tcagcctgcagaaggagaaacc

SEQ ID NO: 148808 - RNA, 22 nt, synthetic construct
  source 1..22: mol_type = other RNA
tcagcctgggcacacgccactg

SEQ ID NO: 148809 - RNA, 22 nt, synthetic construct
  source 1..22: mol_type = other RNA
tcagcctgtgtcagtgacagtt

SEQ ID NO: 148810 - RNA, 22 nt, synthetic construct
  source 1..22: mol_type = other RNA
tcagcctgttgggaggtttttg

SEQ ID NO: 148811 - RNA, 22 nt, synthetic construct
  source 1..22: mol_type = other RNA
tcagccttttctgatttgctgg

SEQ ID NO: 148812 - RNA, 22 nt, synthetic construct
  source 1..22: mol_type = other RNA
tcagcgctaagtgcatttcggc

SEQ ID NO: 148813 - RNA, 22 nt, synthetic construct
  source 1..22: mol_type = other RNA
tcagcgcttgaacaaatatgaa

SEQ ID NO: 148814 - RNA, 22 nt, synthetic construct
  source 1..22: mol_type = other RNA
tcagcgtcctcactgtgatacc

SEQ ID NO: 148815 - RNA, 22 nt, synthetic construct
  source 1..22: mol_type = other RNA
tcagctaattttctaatcttca

SEQ ID NO: 148816 - RNA, 22 nt, synthetic construct
  source 1..22: mol_type = other RNA
tcagctaggcgtagtatctcat

SEQ ID NO: 148817 - RNA, 22 nt, synthetic construct
  source 1..22: mol_type = other RNA
tcagctagtgtgtctgactaca

SEQ ID NO: 148818 - RNA, 22 nt, synthetic construct
  source 1..22: mol_type = other RNA
tcagctatagcttctgagctgt

SEQ ID NO: 148819 - RNA, 22 nt, synthetic construct
  source 1..22: mol_type = other RNA
tcagctatggtgttatttgttc

SEQ ID NO: 148820 - RNA, 22 nt, synthetic construct
  source 1..22: mol_type = other RNA
tcagctcaaacagcttgacatt

SEQ ID NO: 148821 - RNA, 22 nt, synthetic construct
  source 1..22: mol_type = other RNA
tcagctcattacagtctcgacc

SEQ ID NO: 148822 - RNA, 22 nt, synthetic construct
  source 1..22: mol_type = other RNA
tcagctcctcagaaggccaagg

SEQ ID NO: 148823 - RNA, 22 nt, synthetic construct
  source 1..22: mol_type = other RNA
tcagctgtcactctctttagga

SEQ ID NO: 148824 - RNA, 22 nt, synthetic construct
  source 1..22: mol_type = other RNA
tcagcttacagtcatcacagtc

SEQ ID NO: 148825 - RNA, 22 nt, synthetic construct
  source 1..22: mol_type = other RNA
tcagcttcctacccaagcttag

SEQ ID NO: 148826 - RNA, 22 nt, synthetic construct
  source 1..22: mol_type = other RNA
tcagctttaaagagaaatagtt

SEQ ID NO: 148827 - RNA, 22 nt, synthetic construct
  source 1..22: mol_type = other RNA
tcaggaaaaccagtttagaaaa

SEQ ID NO: 148828 - RNA, 22 nt, synthetic construct
  source 1..22: mol_type = other RNA
tcaggaaagaccggggactgca

SEQ ID NO: 148829 - RNA, 22 nt, synthetic construct
  source 1..22: mol_type = other RNA
tcaggaaagatgaagtatagaa

SEQ ID NO: 148830 - RNA, 22 nt, synthetic construct
  source 1..22: mol_type = other RNA
tcaggaaagtgccagccaccct

SEQ ID NO: 148831 - RNA, 22 nt, synthetic construct
  source 1..22: mol_type = other RNA
tcaggaacaccttgaacatgaa

SEQ ID NO: 148832 - RNA, 22 nt, synthetic construct
  source 1..22: mol_type = other RNA
tcaggaaggcaggaggcctcag

SEQ ID NO: 148833 - RNA, 22 nt, synthetic construct
  source 1..22: mol_type = other RNA
tcaggaagtatgagtcttccgt

SEQ ID NO: 148834 - RNA, 22 nt, synthetic construct
  source 1..22: mol_type = other RNA
tcaggaatgcaaagtttcctac

SEQ ID NO: 148835 - RNA, 22 nt, synthetic construct
  source 1..22: mol_type = other RNA
tcaggacactggaggtgcacat

SEQ ID NO: 148836 - RNA, 22 nt, synthetic construct
  source 1..22: mol_type = other RNA
tcaggacagattaaaatcagat

SEQ ID NO: 148837 - RNA, 22 nt, synthetic construct
  source 1..22: mol_type = other RNA
tcaggacagtcatcctcaacaa

SEQ ID NO: 148838 - RNA, 22 nt, synthetic construct
  source 1..22: mol_type = other RNA
tcaggacagttattcttcagca

SEQ ID NO: 148839 - RNA, 22 nt, synthetic construct
  source 1..22: mol_type = other RNA
tcaggaccagatgacttcactg

SEQ ID NO: 148840 - RNA, 22 nt, synthetic construct
  source 1..22: mol_type = other RNA
tcaggaccagcttgggcaagag

SEQ ID NO: 148841 - RNA, 22 nt, synthetic construct
  source 1..22: mol_type = other RNA
tcaggaccaggcagtcctctca

SEQ ID NO: 148842 - RNA, 22 nt, synthetic construct
  source 1..22: mol_type = other RNA
tcaggactcatgagagctgtgc

SEQ ID NO: 148843 - RNA, 22 nt, synthetic construct
  source 1..22: mol_type = other RNA
tcaggactctgctcaaaggggc

SEQ ID NO: 148844 - RNA, 22 nt, synthetic construct
  source 1..22: mol_type = other RNA
tcaggagattaaggctggagga

SEQ ID NO: 148845 - RNA, 22 nt, synthetic construct
  source 1..22: mol_type = other RNA
tcaggagcctagtcatccactg

SEQ ID NO: 148846 - RNA, 22 nt, synthetic construct
  source 1..22: mol_type = other RNA
tcaggaggctgaggcaggaggc

SEQ ID NO: 148847 - RNA, 22 nt, synthetic construct
  source 1..22: mol_type = other RNA
tcaggagtaactgctcctctga

SEQ ID NO: 148848 - RNA, 22 nt, synthetic construct
  source 1..22: mol_type = other RNA
tcaggagttttgcctctttgct

SEQ ID NO: 148849 - RNA, 22 nt, synthetic construct
  source 1..22: mol_type = other RNA
tcaggatgtctttgggaaggcc

SEQ ID NO: 148850 - RNA, 22 nt, synthetic construct
  source 1..22: mol_type = other RNA
tcaggcaagggactgtcgaagc

SEQ ID NO: 148851 - RNA, 22 nt, synthetic construct
  source 1..22: mol_type = other RNA
tcaggcagtctagtccatgaag

SEQ ID NO: 148852 - RNA, 22 nt, synthetic construct
  source 1..22: mol_type = other RNA
tcaggcatgctaactgcagagg

SEQ ID NO: 148853 - RNA, 22 nt, synthetic construct
  source 1..22: mol_type = other RNA
tcaggccagtgagtgatgaaaa

SEQ ID NO: 148854 - RNA, 22 nt, synthetic construct
  source 1..22: mol_type = other RNA
tcaggcctgttgtgaggattcg

SEQ ID NO: 148855 - RNA, 22 nt, synthetic construct
  source 1..22: mol_type = other RNA
tcaggccttccacctgctcttt

SEQ ID NO: 148856 - RNA, 22 nt, synthetic construct
  source 1..22: mol_type = other RNA
tcaggctccaggtagaatgaaa

SEQ ID NO: 148857 - RNA, 22 nt, synthetic construct
  source 1..22: mol_type = other RNA
tcaggctggctctttccactct

SEQ ID NO: 148858 - RNA, 22 nt, synthetic construct
  source 1..22: mol_type = other RNA
tcaggcttgagtctgtgctctg

SEQ ID NO: 148859 - RNA, 22 nt, synthetic construct
  source 1..22: mol_type = other RNA
tcagggaaggctgcaagcactg

SEQ ID NO: 148860 - RNA, 22 nt, synthetic construct
  source 1..22: mol_type = other RNA
tcagggagaattggtagtcaat

SEQ ID NO: 148861 - RNA, 22 nt, synthetic construct
  source 1..22: mol_type = other RNA
tcagggatattggcttatagtg

SEQ ID NO: 148862 - RNA, 22 nt, synthetic construct
  source 1..22: mol_type = other RNA
tcagggatcacagatacaactc

SEQ ID NO: 148863 - RNA, 22 nt, synthetic construct
  source 1..22: mol_type = other RNA
tcagggatttggccagaatccc

SEQ ID NO: 148864 - RNA, 22 nt, synthetic construct
  source 1..22: mol_type = other RNA
tcagggcctgcttttggaagca

SEQ ID NO: 148865 - RNA, 22 nt, synthetic construct
  source 1..22: mol_type = other RNA
tcagggccttcccaaagacatc

SEQ ID NO: 148866 - RNA, 22 nt, synthetic construct
  source 1..22: mol_type = other RNA
tcagggcctttaatcacctcaa

SEQ ID NO: 148867 - RNA, 22 nt, synthetic construct
  source 1..22: mol_type = other RNA
tcagggctgaaaaacacctcag

SEQ ID NO: 148868 - RNA, 22 nt, synthetic construct
  source 1..22: mol_type = other RNA
tcagggggctaaatgctcacat

SEQ ID NO: 148869 - RNA, 22 nt, synthetic construct
  source 1..22: mol_type = other RNA
tcaggggggccactggaaacct

SEQ ID NO: 148870 - RNA, 22 nt, synthetic construct
  source 1..22: mol_type = other RNA
tcaggggtaaaggggatggggg

SEQ ID NO: 148871 - RNA, 22 nt, synthetic construct
  source 1..22: mol_type = other RNA
tcagggtaggaaaagacttctc

SEQ ID NO: 148872 - RNA, 22 nt, synthetic construct
  source 1..22: mol_type = other RNA
tcagggtcacttcctctcttaa

SEQ ID NO: 148873 - RNA, 22 nt, synthetic construct
  source 1..22: mol_type = other RNA
tcagggtgcgacctcgaagcac

SEQ ID NO: 148874 - RNA, 22 nt, synthetic construct
  source 1..22: mol_type = other RNA
tcaggtattgagcctgttccga

SEQ ID NO: 148875 - RNA, 22 nt, synthetic construct
  source 1..22: mol_type = other RNA
tcaggtctatgtgacagaatgc

SEQ ID NO: 148876 - RNA, 22 nt, synthetic construct
  source 1..22: mol_type = other RNA
tcaggtctctctgaaattagct

SEQ ID NO: 148877 - RNA, 22 nt, synthetic construct
  source 1..22: mol_type = other RNA
tcaggtctctttgaaaggaatc

SEQ ID NO: 148878 - RNA, 22 nt, synthetic construct
  source 1..22: mol_type = other RNA
tcaggtgcctcctgcctcagcc

SEQ ID NO: 148879 - RNA, 22 nt, synthetic construct
  source 1..22: mol_type = other RNA
tcaggtgggcactgggagccct

SEQ ID NO: 148880 - RNA, 22 nt, synthetic construct
  source 1..22: mol_type = other RNA
tcaggtggtatttaatctgtca

SEQ ID NO: 148881 - RNA, 22 nt, synthetic construct
  source 1..22: mol_type = other RNA
tcaggtgtcactggatagaagt

SEQ ID NO: 148882 - RNA, 22 nt, synthetic construct
  source 1..22: mol_type = other RNA
tcaggtgtgtaaacactgttct

SEQ ID NO: 148883 - RNA, 22 nt, synthetic construct
  source 1..22: mol_type = other RNA
tcaggttgggcttatcagatgg

SEQ ID NO: 148884 - RNA, 22 nt, synthetic construct
  source 1..22: mol_type = other RNA
tcaggttttcgaccaagttact

SEQ ID NO: 148885 - RNA, 22 nt, synthetic construct
  source 1..22: mol_type = other RNA
tcagtaaaaaaggaccatctgt

SEQ ID NO: 148886 - RNA, 22 nt, synthetic construct
  source 1..22: mol_type = other RNA
tcagtaaaattcccttcagtgt

SEQ ID NO: 148887 - RNA, 22 nt, synthetic construct
  source 1..22: mol_type = other RNA
tcagtaaatgaaatttgaggcc

SEQ ID NO: 148888 - RNA, 22 nt, synthetic construct
  source 1..22: mol_type = other RNA
tcagtaacaaataagaagattg

SEQ ID NO: 148889 - RNA, 22 nt, synthetic construct
  source 1..22: mol_type = other RNA
tcagtaagaaaacagataacct

SEQ ID NO: 148890 - RNA, 22 nt, synthetic construct
  source 1..22: mol_type = other RNA
tcagtaattctgcagtgaacat

SEQ ID NO: 148891 - RNA, 22 nt, synthetic construct
  source 1..22: mol_type = other RNA
tcagtacacgaaaatatccctg

SEQ ID NO: 148892 - RNA, 22 nt, synthetic construct
  source 1..22: mol_type = other RNA
tcagtactatcttccctaaaga

SEQ ID NO: 148893 - RNA, 22 nt, synthetic construct
  source 1..22: mol_type = other RNA
tcagtacttccctctttctcaa

SEQ ID NO: 148894 - RNA, 22 nt, synthetic construct
  source 1..22: mol_type = other RNA
tcagtagaggccgagggttgaa

SEQ ID NO: 148895 - RNA, 22 nt, synthetic construct
  source 1..22: mol_type = other RNA
tcagtagtacagtgagtagaag

SEQ ID NO: 148896 - RNA, 22 nt, synthetic construct
  source 1..22: mol_type = other RNA
tcagtagtttgctagtggtaac

SEQ ID NO: 148897 - RNA, 22 nt, synthetic construct
  source 1..22: mol_type = other RNA
tcagtatatattttctaagagc

SEQ ID NO: 148898 - RNA, 22 nt, synthetic construct
  source 1..22: mol_type = other RNA
tcagtatatttactgcttgctg

SEQ ID NO: 148899 - RNA, 22 nt, synthetic construct
  source 1..22: mol_type = other RNA
tcagtatcctttcaaggtatct

SEQ ID NO: 148900 - RNA, 22 nt, synthetic construct
  source 1..22: mol_type = other RNA
tcagtatgaatgcacgtgaagc

SEQ ID NO: 148901 - RNA, 22 nt, synthetic construct
  source 1..22: mol_type = other RNA
tcagtatgtgtctctgacatga

SEQ ID NO: 148902 - RNA, 22 nt, synthetic construct
  source 1..22: mol_type = other RNA
tcagtcaacacactagccactg

SEQ ID NO: 148903 - RNA, 22 nt, synthetic construct
  source 1..22: mol_type = other RNA
tcagtcaacaccaagcaacact

SEQ ID NO: 148904 - RNA, 22 nt, synthetic construct
  source 1..22: mol_type = other RNA
tcagtcaccaaacgtttagatg

SEQ ID NO: 148905 - RNA, 22 nt, synthetic construct
  source 1..22: mol_type = other RNA
tcagtcagttctctgccccggg

SEQ ID NO: 148906 - RNA, 22 nt, synthetic construct
  source 1..22: mol_type = other RNA
tcagtcataatttgtgtccttt

SEQ ID NO: 148907 - RNA, 22 nt, synthetic construct
  source 1..22: mol_type = other RNA
tcagtccagatattatcctcca

SEQ ID NO: 148908 - RNA, 22 nt, synthetic construct
  source 1..22: mol_type = other RNA
tcagtcccaaatgggagcatgc

SEQ ID NO: 148909 - RNA, 22 nt, synthetic construct
  source 1..22: mol_type = other RNA
tcagtccctcaccttctgctgg

SEQ ID NO: 148910 - RNA, 22 nt, synthetic construct
  source 1..22: mol_type = other RNA
tcagtccctcctttctagaatg

SEQ ID NO: 148911 - RNA, 22 nt, synthetic construct
  source 1..22: mol_type = other RNA
tcagtccttaccactgaagtgt

SEQ ID NO: 148912 - RNA, 22 nt, synthetic construct
  source 1..22: mol_type = other RNA
tcagtcggttcttcaccgtgca

SEQ ID NO: 148913 - RNA, 22 nt, synthetic construct
  source 1..22: mol_type = other RNA
tcagtctccaatcctcagcccc

SEQ ID NO: 148914 - RNA, 22 nt, synthetic construct
  source 1..22: mol_type = other RNA
tcagtctcgaaaaggaatggaa

SEQ ID NO: 148915 - RNA, 22 nt, synthetic construct
  source 1..22: mol_type = other RNA
tcagtctgtaagcacctgtata

SEQ ID NO: 148916 - RNA, 22 nt, synthetic construct
  source 1..22: mol_type = other RNA
tcagtctgtttgccatcttcaa

SEQ ID NO: 148917 - RNA, 22 nt, synthetic construct
  source 1..22: mol_type = other RNA
tcagtcttggtagtttgcacgt

SEQ ID NO: 148918 - RNA, 22 nt, synthetic construct
  source 1..22: mol_type = other RNA
tcagtgaagatgctgaacttgt

SEQ ID NO: 148919 - RNA, 22 nt, synthetic construct
  source 1..22: mol_type = other RNA
tcagtgaatatcatttgaatga

SEQ ID NO: 148920 - RNA, 22 nt, synthetic construct
  source 1..22: mol_type = other RNA
tcagtgacagttctgtgaattt

SEQ ID NO: 148921 - RNA, 22 nt, synthetic construct
  source 1..22: mol_type = other RNA
tcagtgagtagggaaggtgccc

SEQ ID NO: 148922 - RNA, 22 nt, synthetic construct
  source 1..22: mol_type = other RNA
tcagtgatggaggtggaactct

SEQ ID NO: 148923 - RNA, 22 nt, synthetic construct
  source 1..22: mol_type = other RNA
tcagtgccaacacatggggcat

SEQ ID NO: 148924 - RNA, 22 nt, synthetic construct
  source 1..22: mol_type = other RNA
tcagtgctgctctgacgtttaa

SEQ ID NO: 148925 - RNA, 22 nt, synthetic construct
  source 1..22: mol_type = other RNA
tcagtggccagtgaccagtgtg

SEQ ID NO: 148926 - RNA, 22 nt, synthetic construct
  source 1..22: mol_type = other RNA
tcagtggccctgttggcctgga

SEQ ID NO: 148927 - RNA, 22 nt, synthetic construct
  source 1..22: mol_type = other RNA
tcagtgggactggagaacagta

SEQ ID NO: 148928 - RNA, 22 nt, synthetic construct
  source 1..22: mol_type = other RNA
tcagtgggttcaattatgtgga

SEQ ID NO: 148929 - RNA, 22 nt, synthetic construct
  source 1..22: mol_type = other RNA
tcagtggtaaggactgaagtcc

SEQ ID NO: 148930 - RNA, 22 nt, synthetic construct
  source 1..22: mol_type = other RNA
tcagtggtagttacacaagtgt

SEQ ID NO: 148931 - RNA, 22 nt, synthetic construct
  source 1..22: mol_type = other RNA
tcagtggtgcaatcacggctga

SEQ ID NO: 148932 - RNA, 22 nt, synthetic construct
  source 1..22: mol_type = other RNA
tcagtggtgcttttgctgcatc

SEQ ID NO: 148933 - RNA, 22 nt, synthetic construct
  source 1..22: mol_type = other RNA
tcagtggttctgcgtgttattt

SEQ ID NO: 148934 - RNA, 22 nt, synthetic construct
  source 1..22: mol_type = other RNA
tcagtggttggaaaacttttaa

SEQ ID NO: 148935 - RNA, 22 nt, synthetic construct
  source 1..22: mol_type = other RNA
tcagtggttgtgcttcgaggtc

SEQ ID NO: 148936 - RNA, 22 nt, synthetic construct
  source 1..22: mol_type = other RNA
tcagtgtagtcagacacactag

SEQ ID NO: 148937 - RNA, 22 nt, synthetic construct
  source 1..22: mol_type = other RNA
tcagtgtgaaagtattaaaagc

SEQ ID NO: 148938 - RNA, 22 nt, synthetic construct
  source 1..22: mol_type = other RNA
tcagtgtggttcatatttccct

SEQ ID NO: 148939 - RNA, 22 nt, synthetic construct
  source 1..22: mol_type = other RNA
tcagtgtgtccacacaatggtc

SEQ ID NO: 148940 - RNA, 22 nt, synthetic construct
  source 1..22: mol_type = other RNA
tcagtgtgtttttgtaaatgaa

SEQ ID NO: 148941 - RNA, 22 nt, synthetic construct
  source 1..22: mol_type = other RNA
tcagttaaaagttttccaacca

SEQ ID NO: 148942 - RNA, 22 nt, synthetic construct
  source 1..22: mol_type = other RNA
tcagttaaacccaacaaacaat

SEQ ID NO: 148943 - RNA, 22 nt, synthetic construct
  source 1..22: mol_type = other RNA
tcagttaacagtgctgtgccag

SEQ ID NO: 148944 - RNA, 22 nt, synthetic construct
  source 1..22: mol_type = other RNA
tcagttaacttattggaaaact

SEQ ID NO: 148945 - RNA, 22 nt, synthetic construct
  source 1..22: mol_type = other RNA
tcagttacagcatttcagccaa

SEQ ID NO: 148946 - RNA, 22 nt, synthetic construct
  source 1..22: mol_type = other RNA
tcagttaccaccaagaaaaagc

SEQ ID NO: 148947 - RNA, 22 nt, synthetic construct
  source 1..22: mol_type = other RNA
tcagttatcacacctaggccta

SEQ ID NO: 148948 - RNA, 22 nt, synthetic construct
  source 1..22: mol_type = other RNA
tcagttctctgccccgggcctg

SEQ ID NO: 148949 - RNA, 22 nt, synthetic construct
  source 1..22: mol_type = other RNA
tcagttctttcggatatttact

SEQ ID NO: 148950 - RNA, 22 nt, synthetic construct
  source 1..22: mol_type = other RNA
tcagttgaaaagtatggttgaa

SEQ ID NO: 148951 - RNA, 22 nt, synthetic construct
  source 1..22: mol_type = other RNA
tcagttgacatcctttaatttg

SEQ ID NO: 148952 - RNA, 22 nt, synthetic construct
  source 1..22: mol_type = other RNA
tcagttgcagcatgctcactgt

SEQ ID NO: 148953 - RNA, 22 nt, synthetic construct
  source 1..22: mol_type = other RNA
tcagttgcatgaatttgttttc

SEQ ID NO: 148954 - RNA, 22 nt, synthetic construct
  source 1..22: mol_type = other RNA
tcagttggtgaagagagcctgt

SEQ ID NO: 148955 - RNA, 22 nt, synthetic construct
  source 1..22: mol_type = other RNA
tcagttgtttacttgggtataa

SEQ ID NO: 148956 - RNA, 22 nt, synthetic construct
  source 1..22: mol_type = other RNA
tcagtttagtaaatctttggtg

SEQ ID NO: 148957 - RNA, 22 nt, synthetic construct
  source 1..22: mol_type = other RNA
tcagtttatgggtcaaccacta

SEQ ID NO: 148958 - RNA, 22 nt, synthetic construct
  source 1..22: mol_type = other RNA
tcagtttcaaaagctccccgga

SEQ ID NO: 148959 - RNA, 22 nt, synthetic construct
  source 1..22: mol_type = other RNA
tcagtttctgatttatctttct

SEQ ID NO: 148960 - RNA, 22 nt, synthetic construct
  source 1..22: mol_type = other RNA
tcagtttgctagtattttgttg

SEQ ID NO: 148961 - RNA, 22 nt, synthetic construct
  source 1..22: mol_type = other RNA
tcagttttatcaattagttcct

SEQ ID NO: 148962 - RNA, 22 nt, synthetic construct
  source 1..22: mol_type = other RNA
tcagttttgagtggcatcatac

SEQ ID NO: 148963 - RNA, 22 nt, synthetic construct
  source 1..22: mol_type = other RNA
tcagttttgtatatggtttaag

SEQ ID NO: 148964 - RNA, 22 nt, synthetic construct
  source 1..22: mol_type = other RNA
tcataaaatatgtccttttgag

SEQ ID NO: 148965 - RNA, 22 nt, synthetic construct
  source 1..22: mol_type = other RNA
tcataaaatgatggcaacaatc

SEQ ID NO: 148966 - RNA, 22 nt, synthetic construct
  source 1..22: mol_type = other RNA
tcataaacacagaacactaaag

SEQ ID NO: 148967 - RNA, 22 nt, synthetic construct
  source 1..22: mol_type = other RNA
tcataaagccggattcctttca

SEQ ID NO: 148968 - RNA, 22 nt, synthetic construct
  source 1..22: mol_type = other RNA
tcataacaaagctctgatgctt

SEQ ID NO: 148969 - RNA, 22 nt, synthetic construct
  source 1..22: mol_type = other RNA
tcataacagtattgtcttctaa

SEQ ID NO: 148970 - RNA, 22 nt, synthetic construct
  source 1..22: mol_type = other RNA
tcataagaactcctggtctccc

SEQ ID NO: 148971 - RNA, 22 nt, synthetic construct
  source 1..22: mol_type = other RNA
tcataatagtctcacgatactt

SEQ ID NO: 148972 - RNA, 22 nt, synthetic construct
  source 1..22: mol_type = other RNA
tcatacaatagtttagttactc

SEQ ID NO: 148973 - RNA, 22 nt, synthetic construct
  source 1..22: mol_type = other RNA
tcatacacatccagaagtcact

SEQ ID NO: 148974 - RNA, 22 nt, synthetic construct
  source 1..22: mol_type = other RNA
tcatacacctggatcaagtggg

SEQ ID NO: 148975 - RNA, 22 nt, synthetic construct
  source 1..22: mol_type = other RNA
tcatacacgagtgtgtttcgca

SEQ ID NO: 148976 - RNA, 22 nt, synthetic construct
  source 1..22: mol_type = other RNA
tcataccaggttttggtaatgg

SEQ ID NO: 148977 - RNA, 22 nt, synthetic construct
  source 1..22: mol_type = other RNA
tcatacgttaactgtattgcaa

SEQ ID NO: 148978 - RNA, 22 nt, synthetic construct
  source 1..22: mol_type = other RNA
tcatactattttctatagtggc

SEQ ID NO: 148979 - RNA, 22 nt, synthetic construct
  source 1..22: mol_type = other RNA
tcatactgaaggcatagggcct

SEQ ID NO: 148980 - RNA, 22 nt, synthetic construct
  source 1..22: mol_type = other RNA
tcatactggaaggactcacagc

SEQ ID NO: 148981 - RNA, 22 nt, synthetic construct
  source 1..22: mol_type = other RNA
tcatacttgctttattacttca

SEQ ID NO: 148982 - RNA, 22 nt, synthetic construct
  source 1..22: mol_type = other RNA
tcatactttgtcaggcatgcta

SEQ ID NO: 148983 - RNA, 22 nt, synthetic construct
  source 1..22: mol_type = other RNA
tcatagagtaccaggtcagcca

SEQ ID NO: 148984 - RNA, 22 nt, synthetic construct
  source 1..22: mol_type = other RNA
tcatagatcaccaggggctggg

SEQ ID NO: 148985 - RNA, 22 nt, synthetic construct
  source 1..22: mol_type = other RNA
tcatagatgttatgccccctct

SEQ ID NO: 148986 - RNA, 22 nt, synthetic construct
  source 1..22: mol_type = other RNA
tcatagcagaatggccctgcga

SEQ ID NO: 148987 - RNA, 22 nt, synthetic construct
  source 1..22: mol_type = other RNA
tcatagcagcattgtttacagt

SEQ ID NO: 148988 - RNA, 22 nt, synthetic construct
  source 1..22: mol_type = other RNA
tcatagcagtgggaagtggagt

SEQ ID NO: 148989 - RNA, 22 nt, synthetic construct
  source 1..22: mol_type = other RNA
tcatagctcactagagcttcaa

SEQ ID NO: 148990 - RNA, 22 nt, synthetic construct
  source 1..22: mol_type = other RNA
tcataggaaatacttgatctac

SEQ ID NO: 148991 - RNA, 22 nt, synthetic construct
  source 1..22: mol_type = other RNA
tcataggcatctctcccttcct

SEQ ID NO: 148992 - RNA, 22 nt, synthetic construct
  source 1..22: mol_type = other RNA
tcataggtaatactctagtggt

SEQ ID NO: 148993 - RNA, 22 nt, synthetic construct
  source 1..22: mol_type = other RNA
tcatagtagctgttgaattgtt

SEQ ID NO: 148994 - RNA, 22 nt, synthetic construct
  source 1..22: mol_type = other RNA
tcatagtcatcattattagcaa

SEQ ID NO: 148995 - RNA, 22 nt, synthetic construct
  source 1..22: mol_type = other RNA
tcatagtcttccaaaatattga

SEQ ID NO: 148996 - RNA, 22 nt, synthetic construct
  source 1..22: mol_type = other RNA
tcatataagtggaatcattccg

SEQ ID NO: 148997 - RNA, 22 nt, synthetic construct
  source 1..22: mol_type = other RNA
tcatataatggagtactatgca

SEQ ID NO: 148998 - RNA, 22 nt, synthetic construct
  source 1..22: mol_type = other RNA
tcatatacgtatttatcatgtc

SEQ ID NO: 148999 - RNA, 22 nt, synthetic construct
  source 1..22: mol_type = other RNA
tcatatagtaattctgtgctta

SEQ ID NO: 149000 - RNA, 22 nt, synthetic construct
  source 1..22: mol_type = other RNA
tcatatcagttatcacacctag

SEQ ID NO: 149001 - RNA, 22 nt, synthetic construct
  source 1..22: mol_type = other RNA
tcatatcatcatcttatacttg

SEQ ID NO: 149002 - RNA, 22 nt, synthetic construct
  source 1..22: mol_type = other RNA
tcatatctgattttgtgtcttc

SEQ ID NO: 149003 - RNA, 22 nt, synthetic construct
  source 1..22: mol_type = other RNA
tcatatgaaatcacacaatctt

SEQ ID NO: 149004 - RNA, 22 nt, synthetic construct
  source 1..22: mol_type = other RNA
tcatatgatctatcaatctcac

SEQ ID NO: 149005 - RNA, 22 nt, synthetic construct
  source 1..22: mol_type = other RNA
tcatatgctttgagctacaaac

SEQ ID NO: 149006 - RNA, 22 nt, synthetic construct
  source 1..22: mol_type = other RNA
tcatattagtctgtagcttcac

SEQ ID NO: 149007 - RNA, 22 nt, synthetic construct
  source 1..22: mol_type = other RNA
tcatattattttttcccgctac

SEQ ID NO: 149008 - RNA, 22 nt, synthetic construct
  source 1..22: mol_type = other RNA
tcatattggattaagggcccac

SEQ ID NO: 149009 - RNA, 22 nt, synthetic construct
  source 1..22: mol_type = other RNA
tcatatttcccttttggatgca

SEQ ID NO: 149010 - RNA, 22 nt, synthetic construct
  source 1..22: mol_type = other RNA
tcatatttgttcaagcgctgaa

SEQ ID NO: 149011 - RNA, 22 nt, synthetic construct
  source 1..22: mol_type = other RNA
tcatattttccttatccattca

SEQ ID NO: 149012 - RNA, 22 nt, synthetic construct
  source 1..22: mol_type = other RNA
tcatattttgtgggaattcagt

SEQ ID NO: 149013 - RNA, 22 nt, synthetic construct
  source 1..22: mol_type = other RNA
tcatcaaaggaaggaattttag

SEQ ID NO: 149014 - RNA, 22 nt, synthetic construct
  source 1..22: mol_type = other RNA
tcatcaaagttaaacttttgtg

SEQ ID NO: 149015 - RNA, 22 nt, synthetic construct
  source 1..22: mol_type = other RNA
tcatcaagacagagctccctct

SEQ ID NO: 149016 - RNA, 22 nt, synthetic construct
  source 1..22: mol_type = other RNA
tcatcacagtatgcacaaataa

SEQ ID NO: 149017 - RNA, 22 nt, synthetic construct
  source 1..22: mol_type = other RNA
tcatcacagtccaggaacttac

SEQ ID NO: 149018 - RNA, 22 nt, synthetic construct
  source 1..22: mol_type = other RNA
tcatcactcactggcctgagct

SEQ ID NO: 149019 - RNA, 22 nt, synthetic construct
  source 1..22: mol_type = other RNA
tcatcagcgtcctcactgtgat

SEQ ID NO: 149020 - RNA, 22 nt, synthetic construct
  source 1..22: mol_type = other RNA
tcatcaggctggctctttccac

SEQ ID NO: 149021 - RNA, 22 nt, synthetic construct
  source 1..22: mol_type = other RNA
tcatcatcaggctggctctttc

SEQ ID NO: 149022 - RNA, 22 nt, synthetic construct
  source 1..22: mol_type = other RNA
tcatcatcttatacttggcaaa

SEQ ID NO: 149023 - RNA, 22 nt, synthetic construct
  source 1..22: mol_type = other RNA
tcatcatcttttgcctggatga

SEQ ID NO: 149024 - RNA, 22 nt, synthetic construct
  source 1..22: mol_type = other RNA
tcatcatttatacccaagtaaa

SEQ ID NO: 149025 - RNA, 22 nt, synthetic construct
  source 1..22: mol_type = other RNA
tcatccaaacagaaaccctgta

SEQ ID NO: 149026 - RNA, 22 nt, synthetic construct
  source 1..22: mol_type = other RNA
tcatccaaattattgacaagac

SEQ ID NO: 149027 - RNA, 22 nt, synthetic construct
  source 1..22: mol_type = other RNA
tcatccacaatgagacatttga

SEQ ID NO: 149028 - RNA, 22 nt, synthetic construct
  source 1..22: mol_type = other RNA
tcatccactgcacagtatgcgg

SEQ ID NO: 149029 - RNA, 22 nt, synthetic construct
  source 1..22: mol_type = other RNA
tcatccaggcaaaagatgatga

SEQ ID NO: 149030 - RNA, 22 nt, synthetic construct
  source 1..22: mol_type = other RNA
tcatccagtttaaagctttgtg

SEQ ID NO: 149031 - RNA, 22 nt, synthetic construct
  source 1..22: mol_type = other RNA
tcatccatgttgttgaatgtgg

SEQ ID NO: 149032 - RNA, 22 nt, synthetic construct
  source 1..22: mol_type = other RNA
tcatccctcatatcagttatca

SEQ ID NO: 149033 - RNA, 22 nt, synthetic construct
  source 1..22: mol_type = other RNA
tcatccctctaaataggtattc

SEQ ID NO: 149034 - RNA, 22 nt, synthetic construct
  source 1..22: mol_type = other RNA
tcatccggggagcttttgaaac

SEQ ID NO: 149035 - RNA, 22 nt, synthetic construct
  source 1..22: mol_type = other RNA
tcatccggtctcagtttttaat

SEQ ID NO: 149036 - RNA, 22 nt, synthetic construct
  source 1..22: mol_type = other RNA
tcatcctcaacaagagaggaca

SEQ ID NO: 149037 - RNA, 22 nt, synthetic construct
  source 1..22: mol_type = other RNA
tcatcctccgtagctgtcgctc

SEQ ID NO: 149038 - RNA, 22 nt, synthetic construct
  source 1..22: mol_type = other RNA
tcatcctttcccttctgctcgg

SEQ ID NO: 149039 - RNA, 22 nt, synthetic construct
  source 1..22: mol_type = other RNA
tcatcgcattacgagttatgca

SEQ ID NO: 149040 - RNA, 22 nt, synthetic construct
  source 1..22: mol_type = other RNA
tcatcggaaatataaaaagcct

SEQ ID NO: 149041 - RNA, 22 nt, synthetic construct
  source 1..22: mol_type = other RNA
tcatcgtaaaaagccatttatc

SEQ ID NO: 149042 - RNA, 22 nt, synthetic construct
  source 1..22: mol_type = other RNA
tcatctaaacgtttggtgactg

SEQ ID NO: 149043 - RNA, 22 nt, synthetic construct
  source 1..22: mol_type = other RNA
tcatctaaattaagcttcgaca

SEQ ID NO: 149044 - RNA, 22 nt, synthetic construct
  source 1..22: mol_type = other RNA
tcatctaagcctacctcccttc

SEQ ID NO: 149045 - RNA, 22 nt, synthetic construct
  source 1..22: mol_type = other RNA
tcatctaatttcccatttgatt

SEQ ID NO: 149046 - RNA, 22 nt, synthetic construct
  source 1..22: mol_type = other RNA
tcatctaggcatataaactgga

SEQ ID NO: 149047 - RNA, 22 nt, synthetic construct
  source 1..22: mol_type = other RNA
tcatctataaggtaatgacaat

SEQ ID NO: 149048 - RNA, 22 nt, synthetic construct
  source 1..22: mol_type = other RNA
tcatctatgtcccctggggcct

SEQ ID NO: 149049 - RNA, 22 nt, synthetic construct
  source 1..22: mol_type = other RNA
tcatctctcgatggacatttag

SEQ ID NO: 149050 - RNA, 22 nt, synthetic construct
  source 1..22: mol_type = other RNA
tcatctctgcaaaacatttaaa

SEQ ID NO: 149051 - RNA, 22 nt, synthetic construct
  source 1..22: mol_type = other RNA
tcatctgaatcaataagaatga

SEQ ID NO: 149052 - RNA, 22 nt, synthetic construct
  source 1..22: mol_type = other RNA
tcatctgcagtgtccatctccc

SEQ ID NO: 149053 - RNA, 22 nt, synthetic construct
  source 1..22: mol_type = other RNA
tcatctggaccagttactctct

SEQ ID NO: 149054 - RNA, 22 nt, synthetic construct
  source 1..22: mol_type = other RNA
tcatctggtcctgagctttcct

SEQ ID NO: 149055 - RNA, 22 nt, synthetic construct
  source 1..22: mol_type = other RNA
tcatctgtcaaaaagagaacac

SEQ ID NO: 149056 - RNA, 22 nt, synthetic construct
  source 1..22: mol_type = other RNA
tcatctgtcactttcctattca

SEQ ID NO: 149057 - RNA, 22 nt, synthetic construct
  source 1..22: mol_type = other RNA
tcatctgttaatgggcacttgg

SEQ ID NO: 149058 - RNA, 22 nt, synthetic construct
  source 1..22: mol_type = other RNA
tcatcttaagaaccatacagtg

SEQ ID NO: 149059 - RNA, 22 nt, synthetic construct
  source 1..22: mol_type = other RNA
tcatcttagccgggaggagcca

SEQ ID NO: 149060 - RNA, 22 nt, synthetic construct
  source 1..22: mol_type = other RNA
tcatcttatacttggcaaaaaa

SEQ ID NO: 149061 - RNA, 22 nt, synthetic construct
  source 1..22: mol_type = other RNA
tcatcttatattaattctgagg

SEQ ID NO: 149062 - RNA, 22 nt, synthetic construct
  source 1..22: mol_type = other RNA
tcatcttctctctctgcttcac

SEQ ID NO: 149063 - RNA, 22 nt, synthetic construct
  source 1..22: mol_type = other RNA
tcatcttgacttcacttccaag

SEQ ID NO: 149064 - RNA, 22 nt, synthetic construct
  source 1..22: mol_type = other RNA
tcatctttcctgatcacaccct

SEQ ID NO: 149065 - RNA, 22 nt, synthetic construct
  source 1..22: mol_type = other RNA
tcatcttttgcctggatgaatg

SEQ ID NO: 149066 - RNA, 22 nt, synthetic construct
  source 1..22: mol_type = other RNA
tcatgaaagtggagaattacta

SEQ ID NO: 149067 - RNA, 22 nt, synthetic construct
  source 1..22: mol_type = other RNA
tcatgaaatcccctttagtgtt

SEQ ID NO: 149068 - RNA, 22 nt, synthetic construct
  source 1..22: mol_type = other RNA
tcatgaacaattttctctcatg

SEQ ID NO: 149069 - RNA, 22 nt, synthetic construct
  source 1..22: mol_type = other RNA
tcatgaaccttcaccaaagatt

SEQ ID NO: 149070 - RNA, 22 nt, synthetic construct
  source 1..22: mol_type = other RNA
tcatgaatgaatgttgagtttt

SEQ ID NO: 149071 - RNA, 22 nt, synthetic construct
  source 1..22: mol_type = other RNA
tcatgacaagaatctttggcaa

SEQ ID NO: 149072 - RNA, 22 nt, synthetic construct
  source 1..22: mol_type = other RNA
tcatgacctgctttcttggggc

SEQ ID NO: 149073 - RNA, 22 nt, synthetic construct
  source 1..22: mol_type = other RNA
tcatgacttttttgcccactct

SEQ ID NO: 149074 - RNA, 22 nt, synthetic construct
  source 1..22: mol_type = other RNA
tcatgagagctgtgccgaggca

SEQ ID NO: 149075 - RNA, 22 nt, synthetic construct
  source 1..22: mol_type = other RNA
tcatgagtcctgaaaattcctt

SEQ ID NO: 149076 - RNA, 22 nt, synthetic construct
  source 1..22: mol_type = other RNA
tcatgatgtttggctccttacc

SEQ ID NO: 149077 - RNA, 22 nt, synthetic construct
  source 1..22: mol_type = other RNA
tcatgattcagtcttggtagtt

SEQ ID NO: 149078 - RNA, 22 nt, synthetic construct
  source 1..22: mol_type = other RNA
tcatgatttaatagaggtctgt

SEQ ID NO: 149079 - RNA, 22 nt, synthetic construct
  source 1..22: mol_type = other RNA
tcatgatttggtgtgtgcaaag

SEQ ID NO: 149080 - RNA, 22 nt, synthetic construct
  source 1..22: mol_type = other RNA
tcatgcaactgaaaacatcttt

SEQ ID NO: 149081 - RNA, 22 nt, synthetic construct
  source 1..22: mol_type = other RNA
tcatgcaattccccagcctcag

SEQ ID NO: 149082 - RNA, 22 nt, synthetic construct
  source 1..22: mol_type = other RNA
tcatgcacacgctggaagggag

SEQ ID NO: 149083 - RNA, 22 nt, synthetic construct
  source 1..22: mol_type = other RNA
tcatgcagtacttgtctttttg

SEQ ID NO: 149084 - RNA, 22 nt, synthetic construct
  source 1..22: mol_type = other RNA
tcatgcatccacattttgtgac

SEQ ID NO: 149085 - RNA, 22 nt, synthetic construct
  source 1..22: mol_type = other RNA
tcatgccatcctggatttggga

SEQ ID NO: 149086 - RNA, 22 nt, synthetic construct
  source 1..22: mol_type = other RNA
tcatgcctgggtaattaaacat

SEQ ID NO: 149087 - RNA, 22 nt, synthetic construct
  source 1..22: mol_type = other RNA
tcatgcctttcagcatagcaga

SEQ ID NO: 149088 - RNA, 22 nt, synthetic construct
  source 1..22: mol_type = other RNA
tcatgcgacatatcagggatca

SEQ ID NO: 149089 - RNA, 22 nt, synthetic construct
  source 1..22: mol_type = other RNA
tcatgctgggagaccaggagtt

SEQ ID NO: 149090 - RNA, 22 nt, synthetic construct
  source 1..22: mol_type = other RNA
tcatgctgtgaatttggatttg

SEQ ID NO: 149091 - RNA, 22 nt, synthetic construct
  source 1..22: mol_type = other RNA
tcatgcttaggatcccagtcct

SEQ ID NO: 149092 - RNA, 22 nt, synthetic construct
  source 1..22: mol_type = other RNA
tcatgcttgctccagagaagtt

SEQ ID NO: 149093 - RNA, 22 nt, synthetic construct
  source 1..22: mol_type = other RNA
tcatggaagttatttaatctct

SEQ ID NO: 149094 - RNA, 22 nt, synthetic construct
  source 1..22: mol_type = other RNA
tcatggactagactgcctgagg

SEQ ID NO: 149095 - RNA, 22 nt, synthetic construct
  source 1..22: mol_type = other RNA
tcatggacttcctattttataa

SEQ ID NO: 149096 - RNA, 22 nt, synthetic construct
  source 1..22: mol_type = other RNA
tcatgggaagatgctccctcta

SEQ ID NO: 149097 - RNA, 22 nt, synthetic construct
  source 1..22: mol_type = other RNA
tcatgggagccaaacttgaacc

SEQ ID NO: 149098 - RNA, 22 nt, synthetic construct
  source 1..22: mol_type = other RNA
tcatgggccgggcgtagtggct

SEQ ID NO: 149099 - RNA, 22 nt, synthetic construct
  source 1..22: mol_type = other RNA
tcatgggtggaaattaaacaca

SEQ ID NO: 149100 - RNA, 22 nt, synthetic construct
  source 1..22: mol_type = other RNA
tcatgggttgatttttaatgag

SEQ ID NO: 149101 - RNA, 22 nt, synthetic construct
  source 1..22: mol_type = other RNA
tcatggtatcaattgtaatgtc

SEQ ID NO: 149102 - RNA, 22 nt, synthetic construct
  source 1..22: mol_type = other RNA
tcatggtgggccttgcaagcca

SEQ ID NO: 149103 - RNA, 22 nt, synthetic construct
  source 1..22: mol_type = other RNA
tcatggtgtgtctgcgccttaa

SEQ ID NO: 149104 - RNA, 22 nt, synthetic construct
  source 1..22: mol_type = other RNA
tcatggttttaatgggcattag

SEQ ID NO: 149105 - RNA, 22 nt, synthetic construct
  source 1..22: mol_type = other RNA
tcatgtaactaattactgtttc

SEQ ID NO: 149106 - RNA, 22 nt, synthetic construct
  source 1..22: mol_type = other RNA
tcatgtaatgcaaactctaaat

SEQ ID NO: 149107 - RNA, 22 nt, synthetic construct
  source 1..22: mol_type = other RNA
tcatgtacaatgaattagcaat

SEQ ID NO: 149108 - RNA, 22 nt, synthetic construct
  source 1..22: mol_type = other RNA
tcatgtatatgctgtttttgaa

SEQ ID NO: 149109 - RNA, 22 nt, synthetic construct
  source 1..22: mol_type = other RNA
tcatgtatgttttagccttaaa

SEQ ID NO: 149110 - RNA, 22 nt, synthetic construct
  source 1..22: mol_type = other RNA
tcatgtattttcctaaccactg

SEQ ID NO: 149111 - RNA, 22 nt, synthetic construct
  source 1..22: mol_type = other RNA
tcatgtcaaatttttcacattc

SEQ ID NO: 149112 - RNA, 22 nt, synthetic construct
  source 1..22: mol_type = other RNA
tcatgtcaagaatgaagtcaga

SEQ ID NO: 149113 - RNA, 22 nt, synthetic construct
  source 1..22: mol_type = other RNA
tcatgtcagagacacatactga

SEQ ID NO: 149114 - RNA, 22 nt, synthetic construct
  source 1..22: mol_type = other RNA
tcatgtccatagttaatgtgtg

SEQ ID NO: 149115 - RNA, 22 nt, synthetic construct
  source 1..22: mol_type = other RNA
tcatgtcccctgtccaagtatt

SEQ ID NO: 149116 - RNA, 22 nt, synthetic construct
  source 1..22: mol_type = other RNA
tcatgtctacctgtctttccca

SEQ ID NO: 149117 - RNA, 22 nt, synthetic construct
  source 1..22: mol_type = other RNA
tcatgtctgtgtagttcatcag

SEQ ID NO: 149118 - RNA, 22 nt, synthetic construct
  source 1..22: mol_type = other RNA
tcatgtcttcttggattttctt

SEQ ID NO: 149119 - RNA, 22 nt, synthetic construct
  source 1..22: mol_type = other RNA
tcatgtggggactttgtggcct

SEQ ID NO: 149120 - RNA, 22 nt, synthetic construct
  source 1..22: mol_type = other RNA
tcatgtgtgcttacacacacgt

SEQ ID NO: 149121 - RNA, 22 nt, synthetic construct
  source 1..22: mol_type = other RNA
tcatgttagcataattcgaaat

SEQ ID NO: 149122 - RNA, 22 nt, synthetic construct
  source 1..22: mol_type = other RNA
tcatgttcaaggtgttcctgaa

SEQ ID NO: 149123 - RNA, 22 nt, synthetic construct
  source 1..22: mol_type = other RNA
tcatgttcccggattggaaaac

SEQ ID NO: 149124 - RNA, 22 nt, synthetic construct
  source 1..22: mol_type = other RNA
tcatgttctttatagcatttga

SEQ ID NO: 149125 - RNA, 22 nt, synthetic construct
  source 1..22: mol_type = other RNA
tcatgttgaccatttttatatc

SEQ ID NO: 149126 - RNA, 22 nt, synthetic construct
  source 1..22: mol_type = other RNA
tcatgttgggtaaaaataatca

SEQ ID NO: 149127 - RNA, 22 nt, synthetic construct
  source 1..22: mol_type = other RNA
tcatgtttacagaaatatacct

SEQ ID NO: 149128 - RNA, 22 nt, synthetic construct
  source 1..22: mol_type = other RNA
tcatgtttgaattttccattca

SEQ ID NO: 149129 - RNA, 22 nt, synthetic construct
  source 1..22: mol_type = other RNA
tcatgtttgtggttttaacctc

SEQ ID NO: 149130 - RNA, 22 nt, synthetic construct
  source 1..22: mol_type = other RNA
tcattaaaaatcaacccatgaa

SEQ ID NO: 149131 - RNA, 22 nt, synthetic construct
  source 1..22: mol_type = other RNA
tcattaaaaggtataaaggatg

SEQ ID NO: 149132 - RNA, 22 nt, synthetic construct
  source 1..22: mol_type = other RNA
tcattacagtctcgaccccctg

SEQ ID NO: 149133 - RNA, 22 nt, synthetic construct
  source 1..22: mol_type = other RNA
tcattacatattttgtaacgtg

SEQ ID NO: 149134 - RNA, 22 nt, synthetic construct
  source 1..22: mol_type = other RNA
tcattacatttgcttaggctgt

SEQ ID NO: 149135 - RNA, 22 nt, synthetic construct
  source 1..22: mol_type = other RNA
tcattaccaggctggaagaatt

SEQ ID NO: 149136 - RNA, 22 nt, synthetic construct
  source 1..22: mol_type = other RNA
tcattaccttatagatgacgaa

SEQ ID NO: 149137 - RNA, 22 nt, synthetic construct
  source 1..22: mol_type = other RNA
tcattacttttttgtagagaca

SEQ ID NO: 149138 - RNA, 22 nt, synthetic construct
  source 1..22: mol_type = other RNA
tcattagaattcaggacagtca

SEQ ID NO: 149139 - RNA, 22 nt, synthetic construct
  source 1..22: mol_type = other RNA
tcattaggttgatggctgtact

SEQ ID NO: 149140 - RNA, 22 nt, synthetic construct
  source 1..22: mol_type = other RNA
tcattagttatctcttagacct

SEQ ID NO: 149141 - RNA, 22 nt, synthetic construct
  source 1..22: mol_type = other RNA
tcattataacataaaagcgtac

SEQ ID NO: 149142 - RNA, 22 nt, synthetic construct
  source 1..22: mol_type = other RNA
tcattatcccagacagatatat

SEQ ID NO: 149143 - RNA, 22 nt, synthetic construct
  source 1..22: mol_type = other RNA
tcattatggttgttggctaaaa

SEQ ID NO: 149144 - RNA, 22 nt, synthetic construct
  source 1..22: mol_type = other RNA
tcattcaaatgatattcactga

SEQ ID NO: 149145 - RNA, 22 nt, synthetic construct
  source 1..22: mol_type = other RNA
tcattcacactagtcaccctac

SEQ ID NO: 149146 - RNA, 22 nt, synthetic construct
  source 1..22: mol_type = other RNA
tcattcactagacacatttttg

SEQ ID NO: 149147 - RNA, 22 nt, synthetic construct
  source 1..22: mol_type = other RNA
tcattcaggacactggaggtgc

SEQ ID NO: 149148 - RNA, 22 nt, synthetic construct
  source 1..22: mol_type = other RNA
tcattcaggtctatgtgacaga

SEQ ID NO: 149149 - RNA, 22 nt, synthetic construct
  source 1..22: mol_type = other RNA
tcattcataaacacagaacact

SEQ ID NO: 149150 - RNA, 22 nt, synthetic construct
  source 1..22: mol_type = other RNA
tcattcatatttgttcaagcgc

SEQ ID NO: 149151 - RNA, 22 nt, synthetic construct
  source 1..22: mol_type = other RNA
tcattcatctaaacgtttggtg

SEQ ID NO: 149152 - RNA, 22 nt, synthetic construct
  source 1..22: mol_type = other RNA
tcattcatctgcagtgtccatc

SEQ ID NO: 149153 - RNA, 22 nt, synthetic construct
  source 1..22: mol_type = other RNA
tcattcatctgttaatgggcac

SEQ ID NO: 149154 - RNA, 22 nt, synthetic construct
  source 1..22: mol_type = other RNA
tcattcatgacaagaatctttg

SEQ ID NO: 149155 - RNA, 22 nt, synthetic construct
  source 1..22: mol_type = other RNA
tcattccaatccttccttcatg

SEQ ID NO: 149156 - RNA, 22 nt, synthetic construct
  source 1..22: mol_type = other RNA
tcattccgcgtttattagaact

SEQ ID NO: 149157 - RNA, 22 nt, synthetic construct
  source 1..22: mol_type = other RNA
tcattccgctaaacattttatt

SEQ ID NO: 149158 - RNA, 22 nt, synthetic construct
  source 1..22: mol_type = other RNA
tcattcgtagcaggtttaggaa

SEQ ID NO: 149159 - RNA, 22 nt, synthetic construct
  source 1..22: mol_type = other RNA
tcattcgttcaaaacatcatct

SEQ ID NO: 149160 - RNA, 22 nt, synthetic construct
  source 1..22: mol_type = other RNA
tcattctacctggagcctgagg

SEQ ID NO: 149161 - RNA, 22 nt, synthetic construct
  source 1..22: mol_type = other RNA
tcattctgcagtttgtgttttc

SEQ ID NO: 149162 - RNA, 22 nt, synthetic construct
  source 1..22: mol_type = other RNA
tcattctggagtgttttcttca

SEQ ID NO: 149163 - RNA, 22 nt, synthetic construct
  source 1..22: mol_type = other RNA
tcattcttattgattcagatga

SEQ ID NO: 149164 - RNA, 22 nt, synthetic construct
  source 1..22: mol_type = other RNA
tcattcttctaataggaagtgg

SEQ ID NO: 149165 - RNA, 22 nt, synthetic construct
  source 1..22: mol_type = other RNA
tcattcttctctaatgtaaaca

SEQ ID NO: 149166 - RNA, 22 nt, synthetic construct
  source 1..22: mol_type = other RNA
tcattcttgacatgattgagga

SEQ ID NO: 149167 - RNA, 22 nt, synthetic construct
  source 1..22: mol_type = other RNA
tcattctttttactcgagggta

SEQ ID NO: 149168 - RNA, 22 nt, synthetic construct
  source 1..22: mol_type = other RNA
tcattgaaactcaatgttggtt

SEQ ID NO: 149169 - RNA, 22 nt, synthetic construct
  source 1..22: mol_type = other RNA
tcattgaagctactattccagg

SEQ ID NO: 149170 - RNA, 22 nt, synthetic construct
  source 1..22: mol_type = other RNA
tcattgcaccactgcactccag

SEQ ID NO: 149171 - RNA, 22 nt, synthetic construct
  source 1..22: mol_type = other RNA
tcattgcctatagacagcatcc

SEQ ID NO: 149172 - RNA, 22 nt, synthetic construct
  source 1..22: mol_type = other RNA
tcattgtacatgaagtcctcaa

SEQ ID NO: 149173 - RNA, 22 nt, synthetic construct
  source 1..22: mol_type = other RNA
tcattgtagctatatcccaaat

SEQ ID NO: 149174 - RNA, 22 nt, synthetic construct
  source 1..22: mol_type = other RNA
tcattgtggatgagattaatgt

SEQ ID NO: 149175 - RNA, 22 nt, synthetic construct
  source 1..22: mol_type = other RNA
tcattgtgttgcccacgctggt

SEQ ID NO: 149176 - RNA, 22 nt, synthetic construct
  source 1..22: mol_type = other RNA
tcattgttaggtgctggcttca

SEQ ID NO: 149177 - RNA, 22 nt, synthetic construct
  source 1..22: mol_type = other RNA
tcattgttcagggaaggctgca

SEQ ID NO: 149178 - RNA, 22 nt, synthetic construct
  source 1..22: mol_type = other RNA
tcattgttgtgtgttaaatttg

SEQ ID NO: 149179 - RNA, 22 nt, synthetic construct
  source 1..22: mol_type = other RNA
tcatttaaacgtcagagcagca

SEQ ID NO: 149180 - RNA, 22 nt, synthetic construct
  source 1..22: mol_type = other RNA
tcatttacaaaaacacactgag

SEQ ID NO: 149181 - RNA, 22 nt, synthetic construct
  source 1..22: mol_type = other RNA
tcatttactgaaatcctagccc

SEQ ID NO: 149182 - RNA, 22 nt, synthetic construct
  source 1..22: mol_type = other RNA
tcatttagtaagtgtgagcaaa

SEQ ID NO: 149183 - RNA, 22 nt, synthetic construct
  source 1..22: mol_type = other RNA
tcatttatacccaagtaaacaa

SEQ ID NO: 149184 - RNA, 22 nt, synthetic construct
  source 1..22: mol_type = other RNA
tcatttattaaagtagaaggcc

SEQ ID NO: 149185 - RNA, 22 nt, synthetic construct
  source 1..22: mol_type = other RNA
tcatttcaaaccaatgttctct

SEQ ID NO: 149186 - RNA, 22 nt, synthetic construct
  source 1..22: mol_type = other RNA
tcatttcactcttttaaggttt

SEQ ID NO: 149187 - RNA, 22 nt, synthetic construct
  source 1..22: mol_type = other RNA
tcatttcacttgattactttac

SEQ ID NO: 149188 - RNA, 22 nt, synthetic construct
  source 1..22: mol_type = other RNA
tcatttcaggaatgcaaagttt

SEQ ID NO: 149189 - RNA, 22 nt, synthetic construct
  source 1..22: mol_type = other RNA
tcatttccaaagatcatgggtt

SEQ ID NO: 149190 - RNA, 22 nt, synthetic construct
  source 1..22: mol_type = other RNA
tcatttccaagattgaaaatgg

SEQ ID NO: 149191 - RNA, 22 nt, synthetic construct
  source 1..22: mol_type = other RNA
tcatttccgttgctgcatagta

SEQ ID NO: 149192 - RNA, 22 nt, synthetic construct
  source 1..22: mol_type = other RNA
tcatttcctttcagtcggttct

SEQ ID NO: 149193 - RNA, 22 nt, synthetic construct
  source 1..22: mol_type = other RNA
tcatttctaagccatgtttctc

SEQ ID NO: 149194 - RNA, 22 nt, synthetic construct
  source 1..22: mol_type = other RNA
tcatttctgcttagtcttctca

SEQ ID NO: 149195 - RNA, 22 nt, synthetic construct
  source 1..22: mol_type = other RNA
tcatttctgcttgaatgtgcct

SEQ ID NO: 149196 - RNA, 22 nt, synthetic construct
  source 1..22: mol_type = other RNA
tcatttgaactttccagaagta

SEQ ID NO: 149197 - RNA, 22 nt, synthetic construct
  source 1..22: mol_type = other RNA
tcatttgaatgatgcgaaagaa

SEQ ID NO: 149198 - RNA, 22 nt, synthetic construct
  source 1..22: mol_type = other RNA
tcatttgagaatttcaggtgtg

SEQ ID NO: 149199 - RNA, 22 nt, synthetic construct
  source 1..22: mol_type = other RNA
tcatttgagcccaggaggttga

SEQ ID NO: 149200 - RNA, 22 nt, synthetic construct
  source 1..22: mol_type = other RNA
tcatttgcagagcaaactcaga

SEQ ID NO: 149201 - RNA, 22 nt, synthetic construct
  source 1..22: mol_type = other RNA
tcatttggcctctgcggcggct

SEQ ID NO: 149202 - RNA, 22 nt, synthetic construct
  source 1..22: mol_type = other RNA
tcatttgtaattcatcctacta

SEQ ID NO: 149203 - RNA, 22 nt, synthetic construct
  source 1..22: mol_type = other RNA
tcattttaaagggataatgcta

SEQ ID NO: 149204 - RNA, 22 nt, synthetic construct
  source 1..22: mol_type = other RNA
tcattttaataagcttcgaagc

SEQ ID NO: 149205 - RNA, 22 nt, synthetic construct
  source 1..22: mol_type = other RNA
tcattttactgctatacaaccg

SEQ ID NO: 149206 - RNA, 22 nt, synthetic construct
  source 1..22: mol_type = other RNA
tcattttgaaaaacagatcttg

SEQ ID NO: 149207 - RNA, 22 nt, synthetic construct
  source 1..22: mol_type = other RNA
tcattttggcaaattgtcagat

SEQ ID NO: 149208 - RNA, 22 nt, synthetic construct
  source 1..22: mol_type = other RNA
tcatttttaagaaatcgttgtg

SEQ ID NO: 149209 - RNA, 22 nt, synthetic construct
  source 1..22: mol_type = other RNA
tcatttttcacttcttattggt

SEQ ID NO: 149210 - RNA, 22 nt, synthetic construct
  source 1..22: mol_type = other RNA
tcatttttcaggggggccactg

SEQ ID NO: 149211 - RNA, 22 nt, synthetic construct
  source 1..22: mol_type = other RNA
tcatttttgtattctgacctaa

SEQ ID NO: 149212 - RNA, 22 nt, synthetic construct
  source 1..22: mol_type = other RNA
tccaaaagcaggccctgagaag

SEQ ID NO: 149213 - RNA, 22 nt, synthetic construct
  source 1..22: mol_type = other RNA
tccaaaagcctcaaaatttagt

SEQ ID NO: 149214 - RNA, 22 nt, synthetic construct
  source 1..22: mol_type = other RNA
tccaaaagcgaaaggcaaaaaa

SEQ ID NO: 149215 - RNA, 22 nt, synthetic construct
  source 1..22: mol_type = other RNA
tccaaaagggaaatatgaacca

SEQ ID NO: 149216 - RNA, 22 nt, synthetic construct
  source 1..22: mol_type = other RNA
tccaaaagtgaatatagctaag

SEQ ID NO: 149217 - RNA, 22 nt, synthetic construct
  source 1..22: mol_type = other RNA
tccaaaatattgaagagggaac

SEQ ID NO: 149218 - RNA, 22 nt, synthetic construct
  source 1..22: mol_type = other RNA
tccaaaatcctctgtagataaa

SEQ ID NO: 149219 - RNA, 22 nt, synthetic construct
  source 1..22: mol_type = other RNA
tccaaacagaaaccctgtaccc

SEQ ID NO: 149220 - RNA, 22 nt, synthetic construct
  source 1..22: mol_type = other RNA
tccaaacagtgaccacagtttg

SEQ ID NO: 149221 - RNA, 22 nt, synthetic construct
  source 1..22: mol_type = other RNA
tccaaacctttaagttctccaa

SEQ ID NO: 149222 - RNA, 22 nt, synthetic construct
  source 1..22: mol_type = other RNA
tccaaacttctgaccttgtgat

SEQ ID NO: 149223 - RNA, 22 nt, synthetic construct
  source 1..22: mol_type = other RNA
tccaaagaacaggagttaccat

SEQ ID NO: 149224 - RNA, 22 nt, synthetic construct
  source 1..22: mol_type = other RNA
tccaaagataaaggtaaggaaa

SEQ ID NO: 149225 - RNA, 22 nt, synthetic construct
  source 1..22: mol_type = other RNA
tccaaagatataaaaatggtca

SEQ ID NO: 149226 - RNA, 22 nt, synthetic construct
  source 1..22: mol_type = other RNA
tccaaagatcatgggttttaat

SEQ ID NO: 149227 - RNA, 22 nt, synthetic construct
  source 1..22: mol_type = other RNA
tccaaagcaaaccagacatttc

SEQ ID NO: 149228 - RNA, 22 nt, synthetic construct
  source 1..22: mol_type = other RNA
tccaaagcaaacgtgcacaccc

SEQ ID NO: 149229 - RNA, 22 nt, synthetic construct
  source 1..22: mol_type = other RNA
tccaaagtatgcatagcagggt

SEQ ID NO: 149230 - RNA, 22 nt, synthetic construct
  source 1..22: mol_type = other RNA
tccaaataatcccgcaccttga

SEQ ID NO: 149231 - RNA, 22 nt, synthetic construct
  source 1..22: mol_type = other RNA
tccaaatgtctgtctttatgcc

SEQ ID NO: 149232 - RNA, 22 nt, synthetic construct
  source 1..22: mol_type = other RNA
tccaaattagctttctcccagc

SEQ ID NO: 149233 - RNA, 22 nt, synthetic construct
  source 1..22: mol_type = other RNA
tccaaattattgacaagacgtg

SEQ ID NO: 149234 - RNA, 22 nt, synthetic construct
  source 1..22: mol_type = other RNA
tccaaattcaaagcaagttaaa

SEQ ID NO: 149235 - RNA, 22 nt, synthetic construct
  source 1..22: mol_type = other RNA
tccaaattcacagcatgaatac

SEQ ID NO: 149236 - RNA, 22 nt, synthetic construct
  source 1..22: mol_type = other RNA
tccaacaagggttggtgcttcc

SEQ ID NO: 149237 - RNA, 22 nt, synthetic construct
  source 1..22: mol_type = other RNA
tccaacaattcaacaatagcaa

SEQ ID NO: 149238 - RNA, 22 nt, synthetic construct
  source 1..22: mol_type = other RNA
tccaacagaagaagtttctagt

SEQ ID NO: 149239 - RNA, 22 nt, synthetic construct
  source 1..22: mol_type = other RNA
tccaacagtttacacgccttcg

SEQ ID NO: 149240 - RNA, 22 nt, synthetic construct
  source 1..22: mol_type = other RNA
tccaacatgccagctttggctg

SEQ ID NO: 149241 - RNA, 22 nt, synthetic construct
  source 1..22: mol_type = other RNA
tccaacatggcaaaaccccgtc

SEQ ID NO: 149242 - RNA, 22 nt, synthetic construct
  source 1..22: mol_type = other RNA
tccaaccaagcccaactttttc

SEQ ID NO: 149243 - RNA, 22 nt, synthetic construct
  source 1..22: mol_type = other RNA
tccaaccaatcgcagggccatt

SEQ ID NO: 149244 - RNA, 22 nt, synthetic construct
  source 1..22: mol_type = other RNA
tccaaccactgaatcagatttt

SEQ ID NO: 149245 - RNA, 22 nt, synthetic construct
  source 1..22: mol_type = other RNA
tccaaccatcttcttagtgttc

SEQ ID NO: 149246 - RNA, 22 nt, synthetic construct
  source 1..22: mol_type = other RNA
tccaacccattccaggttttat

SEQ ID NO: 149247 - RNA, 22 nt, synthetic construct
  source 1..22: mol_type = other RNA
tccaacgaccggacgtggtggc

SEQ ID NO: 149248 - RNA, 22 nt, synthetic construct
  source 1..22: mol_type = other RNA
tccaacgctttttatggaaaca

SEQ ID NO: 149249 - RNA, 22 nt, synthetic construct
  source 1..22: mol_type = other RNA
tccaactcaaaaaagaaaaaca

SEQ ID NO: 149250 - RNA, 22 nt, synthetic construct
  source 1..22: mol_type = other RNA
tccaactgcagtctgtcctcgt

SEQ ID NO: 149251 - RNA, 22 nt, synthetic construct
  source 1..22: mol_type = other RNA
tccaactgtataaatgttcagt

SEQ ID NO: 149252 - RNA, 22 nt, synthetic construct
  source 1..22: mol_type = other RNA
tccaagaaccctttgttatctg

SEQ ID NO: 149253 - RNA, 22 nt, synthetic construct
  source 1..22: mol_type = other RNA
tccaagaagacatgataaatac

SEQ ID NO: 149254 - RNA, 22 nt, synthetic construct
  source 1..22: mol_type = other RNA
tccaagaaggctagcacagagg

SEQ ID NO: 149255 - RNA, 22 nt, synthetic construct
  source 1..22: mol_type = other RNA
tccaagacaggaagaattattg

SEQ ID NO: 149256 - RNA, 22 nt, synthetic construct
  source 1..22: mol_type = other RNA
tccaagagaggaataaatggta

SEQ ID NO: 149257 - RNA, 22 nt, synthetic construct
  source 1..22: mol_type = other RNA
tccaagattgaaaatggtttag

SEQ ID NO: 149258 - RNA, 22 nt, synthetic construct
  source 1..22: mol_type = other RNA
tccaagattttcccaatctctg

SEQ ID NO: 149259 - RNA, 22 nt, synthetic construct
  source 1..22: mol_type = other RNA
tccaagcacaaacctggcaata

SEQ ID NO: 149260 - RNA, 22 nt, synthetic construct
  source 1..22: mol_type = other RNA
tccaagcacacagtttgagaag

SEQ ID NO: 149261 - RNA, 22 nt, synthetic construct
  source 1..22: mol_type = other RNA
tccaagccttaaaagtgctgca

SEQ ID NO: 149262 - RNA, 22 nt, synthetic construct
  source 1..22: mol_type = other RNA
tccaaggaaagtgtgcttgggc

SEQ ID NO: 149263 - RNA, 22 nt, synthetic construct
  source 1..22: mol_type = other RNA
tccaaggacagaaattcaactt

SEQ ID NO: 149264 - RNA, 22 nt, synthetic construct
  source 1..22: mol_type = other RNA
tccaaggctgcccgctccggcc

SEQ ID NO: 149265 - RNA, 22 nt, synthetic construct
  source 1..22: mol_type = other RNA
tccaaggtacaattacacatct

SEQ ID NO: 149266 - RNA, 22 nt, synthetic construct
  source 1..22: mol_type = other RNA
tccaagtattgtatcaatgtta

SEQ ID NO: 149267 - RNA, 22 nt, synthetic construct
  source 1..22: mol_type = other RNA
tccaagtatttctcatctgtca

SEQ ID NO: 149268 - RNA, 22 nt, synthetic construct
  source 1..22: mol_type = other RNA
tccaagtcccggaagctgggct

SEQ ID NO: 149269 - RNA, 22 nt, synthetic construct
  source 1..22: mol_type = other RNA
tccaagtctcatgcaattcccc

SEQ ID NO: 149270 - RNA, 22 nt, synthetic construct
  source 1..22: mol_type = other RNA
tccaagtgtaaaaagacattat

SEQ ID NO: 149271 - RNA, 22 nt, synthetic construct
  source 1..22: mol_type = other RNA
tccaagtttctagccataatcc

SEQ ID NO: 149272 - RNA, 22 nt, synthetic construct
  source 1..22: mol_type = other RNA
tccaataagttaactgaaatcg

SEQ ID NO: 149273 - RNA, 22 nt, synthetic construct
  source 1..22: mol_type = other RNA
tccaatcactggctagtaggca

SEQ ID NO: 149274 - RNA, 22 nt, synthetic construct
  source 1..22: mol_type = other RNA
tccaatccgggaacatgacatg

SEQ ID NO: 149275 - RNA, 22 nt, synthetic construct
  source 1..22: mol_type = other RNA
tccaatcctcagccccctccct

SEQ ID NO: 149276 - RNA, 22 nt, synthetic construct
  source 1..22: mol_type = other RNA
tccaatccttccttcatgtccc

SEQ ID NO: 149277 - RNA, 22 nt, synthetic construct
  source 1..22: mol_type = other RNA
tccaattgcagaaaaatagaat

SEQ ID NO: 149278 - RNA, 22 nt, synthetic construct
  source 1..22: mol_type = other RNA
tccaatttctttggctgttagc

SEQ ID NO: 149279 - RNA, 22 nt, synthetic construct
  source 1..22: mol_type = other RNA
tccaattttttggcatacaact

SEQ ID NO: 149280 - RNA, 22 nt, synthetic construct
  source 1..22: mol_type = other RNA
tccacaacattgtgcaaccatc

SEQ ID NO: 149281 - RNA, 22 nt, synthetic construct
  source 1..22: mol_type = other RNA
tccacaaccactggggagtgtg

SEQ ID NO: 149282 - RNA, 22 nt, synthetic construct
  source 1..22: mol_type = other RNA
tccacaatgagacatttgaggg

SEQ ID NO: 149283 - RNA, 22 nt, synthetic construct
  source 1..22: mol_type = other RNA
tccacacaatggtcagagttgt

SEQ ID NO: 149284 - RNA, 22 nt, synthetic construct
  source 1..22: mol_type = other RNA
tccacacacgaagtagtttttt

SEQ ID NO: 149285 - RNA, 22 nt, synthetic construct
  source 1..22: mol_type = other RNA
tccacacctggcccctttcaag

SEQ ID NO: 149286 - RNA, 22 nt, synthetic construct
  source 1..22: mol_type = other RNA
tccacagaggctttttatattt

SEQ ID NO: 149287 - RNA, 22 nt, synthetic construct
  source 1..22: mol_type = other RNA
tccacagagttcagcttacagt

SEQ ID NO: 149288 - RNA, 22 nt, synthetic construct
  source 1..22: mol_type = other RNA
tccacagatctttttgtgtata

SEQ ID NO: 149289 - RNA, 22 nt, synthetic construct
  source 1..22: mol_type = other RNA
tccacagctatcaggccttcca

SEQ ID NO: 149290 - RNA, 22 nt, synthetic construct
  source 1..22: mol_type = other RNA
tccacagctttcttttccaacc

SEQ ID NO: 149291 - RNA, 22 nt, synthetic construct
  source 1..22: mol_type = other RNA
tccacaggctttgacttctcag

SEQ ID NO: 149292 - RNA, 22 nt, synthetic construct
  source 1..22: mol_type = other RNA
tccacagtatgctgtttacatt

SEQ ID NO: 149293 - RNA, 22 nt, synthetic construct
  source 1..22: mol_type = other RNA
tccacagtgactttactgttct

SEQ ID NO: 149294 - RNA, 22 nt, synthetic construct
  source 1..22: mol_type = other RNA
tccacataaagtcttgctggaa

SEQ ID NO: 149295 - RNA, 22 nt, synthetic construct
  source 1..22: mol_type = other RNA
tccacataattgaacccactga

SEQ ID NO: 149296 - RNA, 22 nt, synthetic construct
  source 1..22: mol_type = other RNA
tccacatattttaaaagtcagc

SEQ ID NO: 149297 - RNA, 22 nt, synthetic construct
  source 1..22: mol_type = other RNA
tccacatccttgccaacagtta

SEQ ID NO: 149298 - RNA, 22 nt, synthetic construct
  source 1..22: mol_type = other RNA
tccacatgttactcattatggt

SEQ ID NO: 149299 - RNA, 22 nt, synthetic construct
  source 1..22: mol_type = other RNA
tccacatttctaatttccaaga

SEQ ID NO: 149300 - RNA, 22 nt, synthetic construct
  source 1..22: mol_type = other RNA
tccacatttctacacaacatgt

SEQ ID NO: 149301 - RNA, 22 nt, synthetic construct
  source 1..22: mol_type = other RNA
tccacatttggttttactactg

SEQ ID NO: 149302 - RNA, 22 nt, synthetic construct
  source 1..22: mol_type = other RNA
tccacattttgtgacaagttca

SEQ ID NO: 149303 - RNA, 22 nt, synthetic construct
  source 1..22: mol_type = other RNA
tccaccactccaccttagccca

SEQ ID NO: 149304 - RNA, 22 nt, synthetic construct
  source 1..22: mol_type = other RNA
tccaccagacaaaaatagagga

SEQ ID NO: 149305 - RNA, 22 nt, synthetic construct
  source 1..22: mol_type = other RNA
tccaccagcatcttttgacgcg

SEQ ID NO: 149306 - RNA, 22 nt, synthetic construct
  source 1..22: mol_type = other RNA
tccacccaagtggagcctgctc

SEQ ID NO: 149307 - RNA, 22 nt, synthetic construct
  source 1..22: mol_type = other RNA
tccacccacttgtcccatggtc

SEQ ID NO: 149308 - RNA, 22 nt, synthetic construct
  source 1..22: mol_type = other RNA
tccacccatgaagccagcatta

SEQ ID NO: 149309 - RNA, 22 nt, synthetic construct
  source 1..22: mol_type = other RNA
tccaccctgccccttatcctct

SEQ ID NO: 149310 - RNA, 22 nt, synthetic construct
  source 1..22: mol_type = other RNA
tccacctcagaaacaaacaaaa

SEQ ID NO: 149311 - RNA, 22 nt, synthetic construct
  source 1..22: mol_type = other RNA
tccacctccatcactgactggc

SEQ ID NO: 149312 - RNA, 22 nt, synthetic construct
  source 1..22: mol_type = other RNA
tccacctgctctttatctccac

SEQ ID NO: 149313 - RNA, 22 nt, synthetic construct
  source 1..22: mol_type = other RNA
tccacctggcaacaaaggcgaa

SEQ ID NO: 149314 - RNA, 22 nt, synthetic construct
  source 1..22: mol_type = other RNA
tccaccttagcccaagctacca

SEQ ID NO: 149315 - RNA, 22 nt, synthetic construct
  source 1..22: mol_type = other RNA
tccacgcccattaggatagcta

SEQ ID NO: 149316 - RNA, 22 nt, synthetic construct
  source 1..22: mol_type = other RNA
tccacgcgtaagggtacagaac

SEQ ID NO: 149317 - RNA, 22 nt, synthetic construct
  source 1..22: mol_type = other RNA
tccacgctgtggcttgggtgac

SEQ ID NO: 149318 - RNA, 22 nt, synthetic construct
  source 1..22: mol_type = other RNA
tccacggaatgcccctttgagc

SEQ ID NO: 149319 - RNA, 22 nt, synthetic construct
  source 1..22: mol_type = other RNA
tccacgggtaaaaataaatcta

SEQ ID NO: 149320 - RNA, 22 nt, synthetic construct
  source 1..22: mol_type = other RNA
tccacgtgggtgacagagcaag

SEQ ID NO: 149321 - RNA, 22 nt, synthetic construct
  source 1..22: mol_type = other RNA
tccactaatgtccttttcctgt

SEQ ID NO: 149322 - RNA, 22 nt, synthetic construct
  source 1..22: mol_type = other RNA
tccactaggggactaacagggt

SEQ ID NO: 149323 - RNA, 22 nt, synthetic construct
  source 1..22: mol_type = other RNA
tccactagtgggatcaaaccat

SEQ ID NO: 149324 - RNA, 22 nt, synthetic construct
  source 1..22: mol_type = other RNA
tccactcacctgtcatgtcaaa

SEQ ID NO: 149325 - RNA, 22 nt, synthetic construct
  source 1..22: mol_type = other RNA
tccactccagcctgagcaacaa

SEQ ID NO: 149326 - RNA, 22 nt, synthetic construct
  source 1..22: mol_type = other RNA
tccactctctggctgcaattgc

SEQ ID NO: 149327 - RNA, 22 nt, synthetic construct
  source 1..22: mol_type = other RNA
tccactgcacagtatgcggggt

SEQ ID NO: 149328 - RNA, 22 nt, synthetic construct
  source 1..22: mol_type = other RNA
tccactgtcagtgggactggag

SEQ ID NO: 149329 - RNA, 22 nt, synthetic construct
  source 1..22: mol_type = other RNA
tccacttatatgaagctaaaaa

SEQ ID NO: 149330 - RNA, 22 nt, synthetic construct
  source 1..22: mol_type = other RNA
tccacttcccactgctatgact

SEQ ID NO: 149331 - RNA, 22 nt, synthetic construct
  source 1..22: mol_type = other RNA
tccacttgggtggaagctgtcc

SEQ ID NO: 149332 - RNA, 22 nt, synthetic construct
  source 1..22: mol_type = other RNA
tccactttcatgatttggtgtg

SEQ ID NO: 149333 - RNA, 22 nt, synthetic construct
  source 1..22: mol_type = other RNA
tccactttccatcttaggccat

SEQ ID NO: 149334 - RNA, 22 nt, synthetic construct
  source 1..22: mol_type = other RNA
tccactttgaggttattaagat

SEQ ID NO: 149335 - RNA, 22 nt, synthetic construct
  source 1..22: mol_type = other RNA
tccagaaaaccagaaaagtgaa

SEQ ID NO: 149336 - RNA, 22 nt, synthetic construct
  source 1..22: mol_type = other RNA
tccagaaaactggcaatcaaat

SEQ ID NO: 149337 - RNA, 22 nt, synthetic construct
  source 1..22: mol_type = other RNA
tccagaaacttccaaccatctt

SEQ ID NO: 149338 - RNA, 22 nt, synthetic construct
  source 1..22: mol_type = other RNA
tccagaagagaatggctggaat

SEQ ID NO: 149339 - RNA, 22 nt, synthetic construct
  source 1..22: mol_type = other RNA
tccagaaggagaaaacaaaaag

SEQ ID NO: 149340 - RNA, 22 nt, synthetic construct
  source 1..22: mol_type = other RNA
tccagaagtaactcttgagtta

SEQ ID NO: 149341 - RNA, 22 nt, synthetic construct
  source 1..22: mol_type = other RNA
tccagaagtcactttttattct

SEQ ID NO: 149342 - RNA, 22 nt, synthetic construct
  source 1..22: mol_type = other RNA
tccagaatgaccgagatactta

SEQ ID NO: 149343 - RNA, 22 nt, synthetic construct
  source 1..22: mol_type = other RNA
tccagacaaaaattttcattct

SEQ ID NO: 149344 - RNA, 22 nt, synthetic construct
  source 1..22: mol_type = other RNA
tccagacagctaatatgctgta

SEQ ID NO: 149345 - RNA, 22 nt, synthetic construct
  source 1..22: mol_type = other RNA
tccagaccagcagttcaagcac

SEQ ID NO: 149346 - RNA, 22 nt, synthetic construct
  source 1..22: mol_type = other RNA
tccagactgggcaacagagaca

SEQ ID NO: 149347 - RNA, 22 nt, synthetic construct
  source 1..22: mol_type = other RNA
tccagagaagttttccaggaaa

SEQ ID NO: 149348 - RNA, 22 nt, synthetic construct
  source 1..22: mol_type = other RNA
tccagagaattcagagtggcta

SEQ ID NO: 149349 - RNA, 22 nt, synthetic construct
  source 1..22: mol_type = other RNA
tccagagacaaagcataaaata

SEQ ID NO: 149350 - RNA, 22 nt, synthetic construct
  source 1..22: mol_type = other RNA
tccagaggaggaagagatagtc

SEQ ID NO: 149351 - RNA, 22 nt, synthetic construct
  source 1..22: mol_type = other RNA
tccagagggtaacgtgagctgg

SEQ ID NO: 149352 - RNA, 22 nt, synthetic construct
  source 1..22: mol_type = other RNA
tccagaggtgagctttttcttt

SEQ ID NO: 149353 - RNA, 22 nt, synthetic construct
  source 1..22: mol_type = other RNA
tccagaggttcttttaaatgcc

SEQ ID NO: 149354 - RNA, 22 nt, synthetic construct
  source 1..22: mol_type = other RNA
tccagataaattatagctccaa

SEQ ID NO: 149355 - RNA, 22 nt, synthetic construct
  source 1..22: mol_type = other RNA
tccagatattatcctccaatgt

SEQ ID NO: 149356 - RNA, 22 nt, synthetic construct
  source 1..22: mol_type = other RNA
tccagatgaagcagggaaatgg

SEQ ID NO: 149357 - RNA, 22 nt, synthetic construct
  source 1..22: mol_type = other RNA
tccagatggacaaattaccatg

SEQ ID NO: 149358 - RNA, 22 nt, synthetic construct
  source 1..22: mol_type = other RNA
tccagatgtagagaaacaggat

SEQ ID NO: 149359 - RNA, 22 nt, synthetic construct
  source 1..22: mol_type = other RNA
tccagatgttttacacatgtca

SEQ ID NO: 149360 - RNA, 22 nt, synthetic construct
  source 1..22: mol_type = other RNA
tccagattgaaatctaggcata

SEQ ID NO: 149361 - RNA, 22 nt, synthetic construct
  source 1..22: mol_type = other RNA
tccagattgatatctgagtgtt

SEQ ID NO: 149362 - RNA, 22 nt, synthetic construct
  source 1..22: mol_type = other RNA
tccagcaagactttatgtggaa

SEQ ID NO: 149363 - RNA, 22 nt, synthetic construct
  source 1..22: mol_type = other RNA
tccagcaccacccttgatgtca

SEQ ID NO: 149364 - RNA, 22 nt, synthetic construct
  source 1..22: mol_type = other RNA
tccagcagggtaaagtcaattc

SEQ ID NO: 149365 - RNA, 22 nt, synthetic construct
  source 1..22: mol_type = other RNA
tccagcagtttcacttcttagt

SEQ ID NO: 149366 - RNA, 22 nt, synthetic construct
  source 1..22: mol_type = other RNA
tccagcatccctccagtccagc

SEQ ID NO: 149367 - RNA, 22 nt, synthetic construct
  source 1..22: mol_type = other RNA
tccagcattttataggcattcc

SEQ ID NO: 149368 - RNA, 22 nt, synthetic construct
  source 1..22: mol_type = other RNA
tccagccattctcttctggata

SEQ ID NO: 149369 - RNA, 22 nt, synthetic construct
  source 1..22: mol_type = other RNA
tccagcccccagttttgttgaa

SEQ ID NO: 149370 - RNA, 22 nt, synthetic construct
  source 1..22: mol_type = other RNA
tccagcctaggcaagagagcaa

SEQ ID NO: 149371 - RNA, 22 nt, synthetic construct
  source 1..22: mol_type = other RNA
tccagcctggtaatgaatagaa

SEQ ID NO: 149372 - RNA, 22 nt, synthetic construct
  source 1..22: mol_type = other RNA
tccagcctggtcaacagggtaa

SEQ ID NO: 149373 - RNA, 22 nt, synthetic construct
  source 1..22: mol_type = other RNA
tccagccttaatctcctgagta

SEQ ID NO: 149374 - RNA, 22 nt, synthetic construct
  source 1..22: mol_type = other RNA
tccagccttggtaagagtgaga

SEQ ID NO: 149375 - RNA, 22 nt, synthetic construct
  source 1..22: mol_type = other RNA
tccagcctttaatttagcgttc

SEQ ID NO: 149376 - RNA, 22 nt, synthetic construct
  source 1..22: mol_type = other RNA
tccagcgctaagcactgcgcca

SEQ ID NO: 149377 - RNA, 22 nt, synthetic construct
  source 1..22: mol_type = other RNA
tccagcgtgtgcatgaccctgc

SEQ ID NO: 149378 - RNA, 22 nt, synthetic construct
  source 1..22: mol_type = other RNA
tccagctaattttcattacttt

SEQ ID NO: 149379 - RNA, 22 nt, synthetic construct
  source 1..22: mol_type = other RNA
tccagctcacgttaccctctgg

SEQ ID NO: 149380 - RNA, 22 nt, synthetic construct
  source 1..22: mol_type = other RNA
tccagcttcactcttctgcaag

SEQ ID NO: 149381 - RNA, 22 nt, synthetic construct
  source 1..22: mol_type = other RNA
tccagctttctaattctgacaa

SEQ ID NO: 149382 - RNA, 22 nt, synthetic construct
  source 1..22: mol_type = other RNA
tccagcttttattagagcttta

SEQ ID NO: 149383 - RNA, 22 nt, synthetic construct
  source 1..22: mol_type = other RNA
tccaggaaaagcaaatgtcatc

SEQ ID NO: 149384 - RNA, 22 nt, synthetic construct
  source 1..22: mol_type = other RNA
tccaggaacttacagtaagatc

SEQ ID NO: 149385 - RNA, 22 nt, synthetic construct
  source 1..22: mol_type = other RNA
tccaggaccaatttaccatctg

SEQ ID NO: 149386 - RNA, 22 nt, synthetic construct
  source 1..22: mol_type = other RNA
tccaggatcaaatctggctgca

SEQ ID NO: 149387 - RNA, 22 nt, synthetic construct
  source 1..22: mol_type = other RNA
tccaggatccagtctctaccca

SEQ ID NO: 149388 - RNA, 22 nt, synthetic construct
  source 1..22: mol_type = other RNA
tccaggatcttactgtaagttc

SEQ ID NO: 149389 - RNA, 22 nt, synthetic construct
  source 1..22: mol_type = other RNA
tccaggatggcatgaaatgggt

SEQ ID NO: 149390 - RNA, 22 nt, synthetic construct
  source 1..22: mol_type = other RNA
tccaggcaaaagatgatgaaca

SEQ ID NO: 149391 - RNA, 22 nt, synthetic construct
  source 1..22: mol_type = other RNA
tccaggcagttctcctgcctca

SEQ ID NO: 149392 - RNA, 22 nt, synthetic construct
  source 1..22: mol_type = other RNA
tccaggccaacagggccactga

SEQ ID NO: 149393 - RNA, 22 nt, synthetic construct
  source 1..22: mol_type = other RNA
tccaggcctcgctcttggcttt

SEQ ID NO: 149394 - RNA, 22 nt, synthetic construct
  source 1..22: mol_type = other RNA
tccaggcgcctgcattgcattt

SEQ ID NO: 149395 - RNA, 22 nt, synthetic construct
  source 1..22: mol_type = other RNA
tccaggctcaagtgatcctcct

SEQ ID NO: 149396 - RNA, 22 nt, synthetic construct
  source 1..22: mol_type = other RNA
tccagggaggaatccttcagtc

SEQ ID NO: 149397 - RNA, 22 nt, synthetic construct
  source 1..22: mol_type = other RNA
tccaggggaatagaaagttagt

SEQ ID NO: 149398 - RNA, 22 nt, synthetic construct
  source 1..22: mol_type = other RNA
tccaggggacatgctctgatag

SEQ ID NO: 149399 - RNA, 22 nt, synthetic construct
  source 1..22: mol_type = other RNA
tccaggggggaaaaaaccataa

SEQ ID NO: 149400 - RNA, 22 nt, synthetic construct
  source 1..22: mol_type = other RNA
tccagggggtatggagacacta

SEQ ID NO: 149401 - RNA, 22 nt, synthetic construct
  source 1..22: mol_type = other RNA
tccaggtagaatgaaaattttt

SEQ ID NO: 149402 - RNA, 22 nt, synthetic construct
  source 1..22: mol_type = other RNA
tccaggtcattacatattttgt

SEQ ID NO: 149403 - RNA, 22 nt, synthetic construct
  source 1..22: mol_type = other RNA
tccaggtgtatgatcttattaa

SEQ ID NO: 149404 - RNA, 22 nt, synthetic construct
  source 1..22: mol_type = other RNA
tccaggttcatccatgttgttg

SEQ ID NO: 149405 - RNA, 22 nt, synthetic construct
  source 1..22: mol_type = other RNA
tccaggtttacaggatatcaga

SEQ ID NO: 149406 - RNA, 22 nt, synthetic construct
  source 1..22: mol_type = other RNA
tccaggttttatctctctcaag

SEQ ID NO: 149407 - RNA, 22 nt, synthetic construct
  source 1..22: mol_type = other RNA
tccagtaatcttgctaaacatg

SEQ ID NO: 149408 - RNA, 22 nt, synthetic construct
  source 1..22: mol_type = other RNA
tccagtacatctcaattcagaa

SEQ ID NO: 149409 - RNA, 22 nt, synthetic construct
  source 1..22: mol_type = other RNA
tccagtactttttcatccaaac

SEQ ID NO: 149410 - RNA, 22 nt, synthetic construct
  source 1..22: mol_type = other RNA
tccagtatattcatagtagctg

SEQ ID NO: 149411 - RNA, 22 nt, synthetic construct
  source 1..22: mol_type = other RNA
tccagtatgacctcctcccact

SEQ ID NO: 149412 - RNA, 22 nt, synthetic construct
  source 1..22: mol_type = other RNA
tccagtatgatgccactcaaaa

SEQ ID NO: 149413 - RNA, 22 nt, synthetic construct
  source 1..22: mol_type = other RNA
tccagtccagcaccacccttga

SEQ ID NO: 149414 - RNA, 22 nt, synthetic construct
  source 1..22: mol_type = other RNA
tccagtcccactgacagtggac

SEQ ID NO: 149415 - RNA, 22 nt, synthetic construct
  source 1..22: mol_type = other RNA
tccagtcctgctaacaccttga

SEQ ID NO: 149416 - RNA, 22 nt, synthetic construct
  source 1..22: mol_type = other RNA
tccagtcctttgtgtcaagtac

SEQ ID NO: 149417 - RNA, 22 nt, synthetic construct
  source 1..22: mol_type = other RNA
tccagtctctacccagcactct

SEQ ID NO: 149418 - RNA, 22 nt, synthetic construct
  source 1..22: mol_type = other RNA
tccagtctctgcaacatttgtt

SEQ ID NO: 149419 - RNA, 22 nt, synthetic construct
  source 1..22: mol_type = other RNA
tccagtcttcaggtctctctga

SEQ ID NO: 149420 - RNA, 22 nt, synthetic construct
  source 1..22: mol_type = other RNA
tccagtcttctcatacagattt

SEQ ID NO: 149421 - RNA, 22 nt, synthetic construct
  source 1..22: mol_type = other RNA
tccagtgaagtcatctggtcct

SEQ ID NO: 149422 - RNA, 22 nt, synthetic construct
  source 1..22: mol_type = other RNA
tccagtgacacctgaggggtct

SEQ ID NO: 149423 - RNA, 22 nt, synthetic construct
  source 1..22: mol_type = other RNA
tccagtggcccccctgaaaaat

SEQ ID NO: 149424 - RNA, 22 nt, synthetic construct
  source 1..22: mol_type = other RNA
tccagtgtcctgaatgatttcc

SEQ ID NO: 149425 - RNA, 22 nt, synthetic construct
  source 1..22: mol_type = other RNA
tccagtgtttggtttttatgga

SEQ ID NO: 149426 - RNA, 22 nt, synthetic construct
  source 1..22: mol_type = other RNA
tccagtgttttaggggggaaaa

SEQ ID NO: 149427 - RNA, 22 nt, synthetic construct
  source 1..22: mol_type = other RNA
tccagtttaaagctttgtgact

SEQ ID NO: 149428 - RNA, 22 nt, synthetic construct
  source 1..22: mol_type = other RNA
tccagtttatatgcctagatga

SEQ ID NO: 149429 - RNA, 22 nt, synthetic construct
  source 1..22: mol_type = other RNA
tccagtttctctgctttttctt

SEQ ID NO: 149430 - RNA, 22 nt, synthetic construct
  source 1..22: mol_type = other RNA
tccagtttgggtgacagagaga

SEQ ID NO: 149431 - RNA, 22 nt, synthetic construct
  source 1..22: mol_type = other RNA
tccataaaaaccaaacactgga

SEQ ID NO: 149432 - RNA, 22 nt, synthetic construct
  source 1..22: mol_type = other RNA
tccataaaaagcgttggagaca

SEQ ID NO: 149433 - RNA, 22 nt, synthetic construct
  source 1..22: mol_type = other RNA
tccataagatctgtctttggcc

SEQ ID NO: 149434 - RNA, 22 nt, synthetic construct
  source 1..22: mol_type = other RNA
tccataagtccctaacagtctc

SEQ ID NO: 149435 - RNA, 22 nt, synthetic construct
  source 1..22: mol_type = other RNA
tccatacaaggagacctactaa

SEQ ID NO: 149436 - RNA, 22 nt, synthetic construct
  source 1..22: mol_type = other RNA
tccataccccctggaaataagt

SEQ ID NO: 149437 - RNA, 22 nt, synthetic construct
  source 1..22: mol_type = other RNA
tccatacgaaagcctttatttt

SEQ ID NO: 149438 - RNA, 22 nt, synthetic construct
  source 1..22: mol_type = other RNA
tccatagcttcctaagaaaggg

SEQ ID NO: 149439 - RNA, 22 nt, synthetic construct
  source 1..22: mol_type = other RNA
tccatagttaatgtgtgaagaa

SEQ ID NO: 149440 - RNA, 22 nt, synthetic construct
  source 1..22: mol_type = other RNA
tccatatgggatgcttaaagcg

SEQ ID NO: 149441 - RNA, 22 nt, synthetic construct
  source 1..22: mol_type = other RNA
tccatcaacagcagaacaaact

SEQ ID NO: 149442 - RNA, 22 nt, synthetic construct
  source 1..22: mol_type = other RNA
tccatcaatgatagactggatt

SEQ ID NO: 149443 - RNA, 22 nt, synthetic construct
  source 1..22: mol_type = other RNA
tccatcactgactggctgtgcc

SEQ ID NO: 149444 - RNA, 22 nt, synthetic construct
  source 1..22: mol_type = other RNA
tccatcagagaggctttttatt

SEQ ID NO: 149445 - RNA, 22 nt, synthetic construct
  source 1..22: mol_type = other RNA
tccatcaggaaaaccagtttag

SEQ ID NO: 149446 - RNA, 22 nt, synthetic construct
  source 1..22: mol_type = other RNA
tccatcagtggttgtgcttcga

SEQ ID NO: 149447 - RNA, 22 nt, synthetic construct
  source 1..22: mol_type = other RNA
tccatcgagagatgaatggata

SEQ ID NO: 149448 - RNA, 22 nt, synthetic construct
  source 1..22: mol_type = other RNA
tccatcggtctgtatttctgct

SEQ ID NO: 149449 - RNA, 22 nt, synthetic construct
  source 1..22: mol_type = other RNA
tccatctcaagaaaacaagaat

SEQ ID NO: 149450 - RNA, 22 nt, synthetic construct
  source 1..22: mol_type = other RNA
tccatctcccatcactagaatg

SEQ ID NO: 149451 - RNA, 22 nt, synthetic construct
  source 1..22: mol_type = other RNA
tccatctggattatagtggtaa

SEQ ID NO: 149452 - RNA, 22 nt, synthetic construct
  source 1..22: mol_type = other RNA
tccatctgttatagtgtgaaaa

SEQ ID NO: 149453 - RNA, 22 nt, synthetic construct
  source 1..22: mol_type = other RNA
tccatcttaggccataaatcaa

SEQ ID NO: 149454 - RNA, 22 nt, synthetic construct
  source 1..22: mol_type = other RNA
tccatcttcacgtggcgctccc

SEQ ID NO: 149455 - RNA, 22 nt, synthetic construct
  source 1..22: mol_type = other RNA
tccatgaaacttatttccaggg

SEQ ID NO: 149456 - RNA, 22 nt, synthetic construct
  source 1..22: mol_type = other RNA
tccatgaagaaaacactccaga

SEQ ID NO: 149457 - RNA, 22 nt, synthetic construct
  source 1..22: mol_type = other RNA
tccatgagattacatagcaagg

SEQ ID NO: 149458 - RNA, 22 nt, synthetic construct
  source 1..22: mol_type = other RNA
tccatggaaactacaattactg

SEQ ID NO: 149459 - RNA, 22 nt, synthetic construct
  source 1..22: mol_type = other RNA
tccatggaggggccagttgaga

SEQ ID NO: 149460 - RNA, 22 nt, synthetic construct
  source 1..22: mol_type = other RNA
tccatggtatgtgccatctcct

SEQ ID NO: 149461 - RNA, 22 nt, synthetic construct
  source 1..22: mol_type = other RNA
tccatgtcctcacctcacattc

SEQ ID NO: 149462 - RNA, 22 nt, synthetic construct
  source 1..22: mol_type = other RNA
tccatgtcttggctattgtcag

SEQ ID NO: 149463 - RNA, 22 nt, synthetic construct
  source 1..22: mol_type = other RNA
tccatgttgttgaatgtggcag

SEQ ID NO: 149464 - RNA, 22 nt, synthetic construct
  source 1..22: mol_type = other RNA
tccattactcgtggttatagcc

SEQ ID NO: 149465 - RNA, 22 nt, synthetic construct
  source 1..22: mol_type = other RNA
tccattatatgaataaaccacg

SEQ ID NO: 149466 - RNA, 22 nt, synthetic construct
  source 1..22: mol_type = other RNA
tccattattccataaaaaccaa

SEQ ID NO: 149467 - RNA, 22 nt, synthetic construct
  source 1..22: mol_type = other RNA
tccattcaatccttgtaacttt

SEQ ID NO: 149468 - RNA, 22 nt, synthetic construct
  source 1..22: mol_type = other RNA
tccattcacacaccctttctta

SEQ ID NO: 149469 - RNA, 22 nt, synthetic construct
  source 1..22: mol_type = other RNA
tccattcatctctcgatggaca

SEQ ID NO: 149470 - RNA, 22 nt, synthetic construct
  source 1..22: mol_type = other RNA
tccattcatgtaatgcaaactc

SEQ ID NO: 149471 - RNA, 22 nt, synthetic construct
  source 1..22: mol_type = other RNA
tccattccttttcgagactgag

SEQ ID NO: 149472 - RNA, 22 nt, synthetic construct
  source 1..22: mol_type = other RNA
tccattgggtacataccgagta

SEQ ID NO: 149473 - RNA, 22 nt, synthetic construct
  source 1..22: mol_type = other RNA
tccattgtgcatatataccaca

SEQ ID NO: 149474 - RNA, 22 nt, synthetic construct
  source 1..22: mol_type = other RNA
tccattgttctctttgtttatc

SEQ ID NO: 149475 - RNA, 22 nt, synthetic construct
  source 1..22: mol_type = other RNA
tccatttccagtactttttcat

SEQ ID NO: 149476 - RNA, 22 nt, synthetic construct
  source 1..22: mol_type = other RNA
tccatttccctgcttcatctgg

SEQ ID NO: 149477 - RNA, 22 nt, synthetic construct
  source 1..22: mol_type = other RNA
tccatttccttaagcacagact

SEQ ID NO: 149478 - RNA, 22 nt, synthetic construct
  source 1..22: mol_type = other RNA
tccatttgtggcatctttgtta

SEQ ID NO: 149479 - RNA, 22 nt, synthetic construct
  source 1..22: mol_type = other RNA
tccatttgttttgtgtttgtga

SEQ ID NO: 149480 - RNA, 22 nt, synthetic construct
  source 1..22: mol_type = other RNA
tccattttagatcaagtccttt

SEQ ID NO: 149481 - RNA, 22 nt, synthetic construct
  source 1..22: mol_type = other RNA
tccattttattaatttggcttg

SEQ ID NO: 149482 - RNA, 22 nt, synthetic construct
  source 1..22: mol_type = other RNA
tccattttgccagctaactttt

SEQ ID NO: 149483 - RNA, 22 nt, synthetic construct
  source 1..22: mol_type = other RNA
tccattttggtcttaccctcta

SEQ ID NO: 149484 - RNA, 22 nt, synthetic construct
  source 1..22: mol_type = other RNA
tccatttttctgaccaactatt

SEQ ID NO: 149485 - RNA, 22 nt, synthetic construct
  source 1..22: mol_type = other RNA
tcccaaagacatcctgatttag

SEQ ID NO: 149486 - RNA, 22 nt, synthetic construct
  source 1..22: mol_type = other RNA
tcccaaagatagactcttcaga

SEQ ID NO: 149487 - RNA, 22 nt, synthetic construct
  source 1..22: mol_type = other RNA
tcccaaaggactgggatcctaa

SEQ ID NO: 149488 - RNA, 22 nt, synthetic construct
  source 1..22: mol_type = other RNA
tcccaaagtgagcagaaggagg

SEQ ID NO: 149489 - RNA, 22 nt, synthetic construct
  source 1..22: mol_type = other RNA
tcccaaatccaggatggcatga

SEQ ID NO: 149490 - RNA, 22 nt, synthetic construct
  source 1..22: mol_type = other RNA
tcccaaatgcaccaacacctgc

SEQ ID NO: 149491 - RNA, 22 nt, synthetic construct
  source 1..22: mol_type = other RNA
tcccaaatgggagcatgcacac

SEQ ID NO: 149492 - RNA, 22 nt, synthetic construct
  source 1..22: mol_type = other RNA
tcccaaatgtcttaagaaggaa

SEQ ID NO: 149493 - RNA, 22 nt, synthetic construct
  source 1..22: mol_type = other RNA
tcccaaattggcatttaaaaga

SEQ ID NO: 149494 - RNA, 22 nt, synthetic construct
  source 1..22: mol_type = other RNA
tcccaacaggctgagtgcggtg

SEQ ID NO: 149495 - RNA, 22 nt, synthetic construct
  source 1..22: mol_type = other RNA
tcccaagatcataagcttttat

SEQ ID NO: 149496 - RNA, 22 nt, synthetic construct
  source 1..22: mol_type = other RNA
tcccaagcaagtgtggtggtct

SEQ ID NO: 149497 - RNA, 22 nt, synthetic construct
  source 1..22: mol_type = other RNA
tcccaagggttttggtatgttg

SEQ ID NO: 149498 - RNA, 22 nt, synthetic construct
  source 1..22: mol_type = other RNA
tcccaaggttgcctgttcactc

SEQ ID NO: 149499 - RNA, 22 nt, synthetic construct
  source 1..22: mol_type = other RNA
tcccaagtagctgggatcacag

SEQ ID NO: 149500 - RNA, 22 nt, synthetic construct
  source 1..22: mol_type = other RNA
tcccaagtgcccattaacagat

SEQ ID NO: 149501 - RNA, 22 nt, synthetic construct
  source 1..22: mol_type = other RNA
tcccaatcctttgtgcaggtct

SEQ ID NO: 149502 - RNA, 22 nt, synthetic construct
  source 1..22: mol_type = other RNA
tcccaatctctggtattctgaa

SEQ ID NO: 149503 - RNA, 22 nt, synthetic construct
  source 1..22: mol_type = other RNA
tcccaatgcttgaagagcgctt

SEQ ID NO: 149504 - RNA, 22 nt, synthetic construct
  source 1..22: mol_type = other RNA
tcccaattacttccagtgtttt

SEQ ID NO: 149505 - RNA, 22 nt, synthetic construct
  source 1..22: mol_type = other RNA
tcccacaaaatatgaagcatta

SEQ ID NO: 149506 - RNA, 22 nt, synthetic construct
  source 1..22: mol_type = other RNA
tcccaccatctctctgcctcaa

SEQ ID NO: 149507 - RNA, 22 nt, synthetic construct
  source 1..22: mol_type = other RNA
tcccacctcagccccacaagta

SEQ ID NO: 149508 - RNA, 22 nt, synthetic construct
  source 1..22: mol_type = other RNA
tcccacctgcgagcggcgggct

SEQ ID NO: 149509 - RNA, 22 nt, synthetic construct
  source 1..22: mol_type = other RNA
tcccactagtggaagaatcagg

SEQ ID NO: 149510 - RNA, 22 nt, synthetic construct
  source 1..22: mol_type = other RNA
tcccactgacagtggacaaagg

SEQ ID NO: 149511 - RNA, 22 nt, synthetic construct
  source 1..22: mol_type = other RNA
tcccactgctatgactaatttg

SEQ ID NO: 149512 - RNA, 22 nt, synthetic construct
  source 1..22: mol_type = other RNA
tcccacttacatcagcagtgac

SEQ ID NO: 149513 - RNA, 22 nt, synthetic construct
  source 1..22: mol_type = other RNA
tcccacttcgaaagttcagata

SEQ ID NO: 149514 - RNA, 22 nt, synthetic construct
  source 1..22: mol_type = other RNA
tcccacttgatccaggtgtatg

SEQ ID NO: 149515 - RNA, 22 nt, synthetic construct
  source 1..22: mol_type = other RNA
tcccagaactcgaagccttccc

SEQ ID NO: 149516 - RNA, 22 nt, synthetic construct
  source 1..22: mol_type = other RNA
tcccagacagatatatgcattc

SEQ ID NO: 149517 - RNA, 22 nt, synthetic construct
  source 1..22: mol_type = other RNA
tcccagacagggaatgcccctg

SEQ ID NO: 149518 - RNA, 22 nt, synthetic construct
  source 1..22: mol_type = other RNA
tcccagaggtactcaacgacaa

SEQ ID NO: 149519 - RNA, 22 nt, synthetic construct
  source 1..22: mol_type = other RNA
tcccagataacagtggttagga

SEQ ID NO: 149520 - RNA, 22 nt, synthetic construct
  source 1..22: mol_type = other RNA
tcccagatacgttaaaggaaaa

SEQ ID NO: 149521 - RNA, 22 nt, synthetic construct
  source 1..22: mol_type = other RNA
tcccagatctaacaaacgcatt

SEQ ID NO: 149522 - RNA, 22 nt, synthetic construct
  source 1..22: mol_type = other RNA
tcccagatggggattgagggtt

SEQ ID NO: 149523 - RNA, 22 nt, synthetic construct
  source 1..22: mol_type = other RNA
tcccagcatgaagccctctaag

SEQ ID NO: 149524 - RNA, 22 nt, synthetic construct
  source 1..22: mol_type = other RNA
tcccagccaaacagtttttaca

SEQ ID NO: 149525 - RNA, 22 nt, synthetic construct
  source 1..22: mol_type = other RNA
tcccagcctcaaacaatcctcc

SEQ ID NO: 149526 - RNA, 22 nt, synthetic construct
  source 1..22: mol_type = other RNA
tcccagctacataacttcccag

SEQ ID NO: 149527 - RNA, 22 nt, synthetic construct
  source 1..22: mol_type = other RNA
tcccagctgtccaacaagggtt

SEQ ID NO: 149528 - RNA, 22 nt, synthetic construct
  source 1..22: mol_type = other RNA
tcccaggagctagaacagaata

SEQ ID NO: 149529 - RNA, 22 nt, synthetic construct
  source 1..22: mol_type = other RNA
tcccagggataaatcccacttg

SEQ ID NO: 149530 - RNA, 22 nt, synthetic construct
  source 1..22: mol_type = other RNA
tcccagggtgtagccacaagcc

SEQ ID NO: 149531 - RNA, 22 nt, synthetic construct
  source 1..22: mol_type = other RNA
tcccaggtattttgttctcttt

SEQ ID NO: 149532 - RNA, 22 nt, synthetic construct
  source 1..22: mol_type = other RNA
tcccaggtcagtagtacagtga

SEQ ID NO: 149533 - RNA, 22 nt, synthetic construct
  source 1..22: mol_type = other RNA
tcccagtcctttgggaggtcaa

SEQ ID NO: 149534 - RNA, 22 nt, synthetic construct
  source 1..22: mol_type = other RNA
tcccagtgcccacctgacaagt

SEQ ID NO: 149535 - RNA, 22 nt, synthetic construct
  source 1..22: mol_type = other RNA
tcccagttcaaggtgttagcag

SEQ ID NO: 149536 - RNA, 22 nt, synthetic construct
  source 1..22: mol_type = other RNA
tcccagttgtcagaattagaaa

SEQ ID NO: 149537 - RNA, 22 nt, synthetic construct
  source 1..22: mol_type = other RNA
tcccataccacctgtcagaaac

SEQ ID NO: 149538 - RNA, 22 nt, synthetic construct
  source 1..22: mol_type = other RNA
tcccatataaggggaatcatgc

SEQ ID NO: 149539 - RNA, 22 nt, synthetic construct
  source 1..22: mol_type = other RNA
tcccatatctacatgtacgcca

SEQ ID NO: 149540 - RNA, 22 nt, synthetic construct
  source 1..22: mol_type = other RNA
tcccatatggaggcaatgttga

SEQ ID NO: 149541 - RNA, 22 nt, synthetic construct
  source 1..22: mol_type = other RNA
tcccatcactagaatgtgactt

SEQ ID NO: 149542 - RNA, 22 nt, synthetic construct
  source 1..22: mol_type = other RNA
tcccatctcactcacctagctg

SEQ ID NO: 149543 - RNA, 22 nt, synthetic construct
  source 1..22: mol_type = other RNA
tcccatctctagttttccagta

SEQ ID NO: 149544 - RNA, 22 nt, synthetic construct
  source 1..22: mol_type = other RNA
tcccatcttccatacgaaagcc

SEQ ID NO: 149545 - RNA, 22 nt, synthetic construct
  source 1..22: mol_type = other RNA
tcccatgaacatggtttgatcc

SEQ ID NO: 149546 - RNA, 22 nt, synthetic construct
  source 1..22: mol_type = other RNA
tcccatgattcaaaatgtgatg

SEQ ID NO: 149547 - RNA, 22 nt, synthetic construct
  source 1..22: mol_type = other RNA
tcccatgcattcgtccctaaac

SEQ ID NO: 149548 - RNA, 22 nt, synthetic construct
  source 1..22: mol_type = other RNA
tcccatggtcaaatcaatactt

SEQ ID NO: 149549 - RNA, 22 nt, synthetic construct
  source 1..22: mol_type = other RNA
tcccatgttcactgcagaatta

SEQ ID NO: 149550 - RNA, 22 nt, synthetic construct
  source 1..22: mol_type = other RNA
tcccattaccaaaacctggtat

SEQ ID NO: 149551 - RNA, 22 nt, synthetic construct
  source 1..22: mol_type = other RNA
tcccattactcggtatgtaccc

SEQ ID NO: 149552 - RNA, 22 nt, synthetic construct
  source 1..22: mol_type = other RNA
tcccatttgatttcttctttgg

SEQ ID NO: 149553 - RNA, 22 nt, synthetic construct
  source 1..22: mol_type = other RNA
tcccatttgggactgagacagt

SEQ ID NO: 149554 - RNA, 22 nt, synthetic construct
  source 1..22: mol_type = other RNA
tcccatttgtaacatgttagat

SEQ ID NO: 149555 - RNA, 22 nt, synthetic construct
  source 1..22: mol_type = other RNA
tccccaaagatattagctacaa

SEQ ID NO: 149556 - RNA, 22 nt, synthetic construct
  source 1..22: mol_type = other RNA
tccccaaataacatgcatatgt

SEQ ID NO: 149557 - RNA, 22 nt, synthetic construct
  source 1..22: mol_type = other RNA
tccccaactgcaaaactttctt

SEQ ID NO: 149558 - RNA, 22 nt, synthetic construct
  source 1..22: mol_type = other RNA
tccccaagccaaattaataaaa

SEQ ID NO: 149559 - RNA, 22 nt, synthetic construct
  source 1..22: mol_type = other RNA
tccccaagtaaacctcaagtct

SEQ ID NO: 149560 - RNA, 22 nt, synthetic construct
  source 1..22: mol_type = other RNA
tccccaagtgctgtgattgcag

SEQ ID NO: 149561 - RNA, 22 nt, synthetic construct
  source 1..22: mol_type = other RNA
tccccacataggatagttaaac

SEQ ID NO: 149562 - RNA, 22 nt, synthetic construct
  source 1..22: mol_type = other RNA
tccccacatgactggccatcct

SEQ ID NO: 149563 - RNA, 22 nt, synthetic construct
  source 1..22: mol_type = other RNA
tccccaccgccttcctaccctg

SEQ ID NO: 149564 - RNA, 22 nt, synthetic construct
  source 1..22: mol_type = other RNA
tccccacctttcctgcccctcc

SEQ ID NO: 149565 - RNA, 22 nt, synthetic construct
  source 1..22: mol_type = other RNA
tccccagaaagagagagggggg

SEQ ID NO: 149566 - RNA, 22 nt, synthetic construct
  source 1..22: mol_type = other RNA
tccccagcatccactaggggac

SEQ ID NO: 149567 - RNA, 22 nt, synthetic construct
  source 1..22: mol_type = other RNA
tccccagcctcagcctcccaag

SEQ ID NO: 149568 - RNA, 22 nt, synthetic construct
  source 1..22: mol_type = other RNA
tccccagggaaaccttactgta

SEQ ID NO: 149569 - RNA, 22 nt, synthetic construct
  source 1..22: mol_type = other RNA
tccccagtggttgtggaattaa

SEQ ID NO: 149570 - RNA, 22 nt, synthetic construct
  source 1..22: mol_type = other RNA
tccccatctgggatacttctaa

SEQ ID NO: 149571 - RNA, 22 nt, synthetic construct
  source 1..22: mol_type = other RNA
tccccatgcaggagaaacatgg

SEQ ID NO: 149572 - RNA, 22 nt, synthetic construct
  source 1..22: mol_type = other RNA
tccccattagagtaagcaactg

SEQ ID NO: 149573 - RNA, 22 nt, synthetic construct
  source 1..22: mol_type = other RNA
tccccattcaattgtcctggca

SEQ ID NO: 149574 - RNA, 22 nt, synthetic construct
  source 1..22: mol_type = other RNA
tccccattccctgtctgtgatg

SEQ ID NO: 149575 - RNA, 22 nt, synthetic construct
  source 1..22: mol_type = other RNA
tccccattgacaatataggaga

SEQ ID NO: 149576 - RNA, 22 nt, synthetic construct
  source 1..22: mol_type = other RNA
tccccatttttctcgacacaca

SEQ ID NO: 149577 - RNA, 22 nt, synthetic construct
  source 1..22: mol_type = other RNA
tcccccaaaacttaggaggcta

SEQ ID NO: 149578 - RNA, 22 nt, synthetic construct
  source 1..22: mol_type = other RNA
tcccccaaagaaggaaaaaaca

SEQ ID NO: 149579 - RNA, 22 nt, synthetic construct
  source 1..22: mol_type = other RNA
tcccccaattaaactatagacc

SEQ ID NO: 149580 - RNA, 22 nt, synthetic construct
  source 1..22: mol_type = other RNA
tcccccagcccctggtgatcta

SEQ ID NO: 149581 - RNA, 22 nt, synthetic construct
  source 1..22: mol_type = other RNA
tcccccaggtggttctgcctaa

SEQ ID NO: 149582 - RNA, 22 nt, synthetic construct
  source 1..22: mol_type = other RNA
tcccccatcccctttacccctg

SEQ ID NO: 149583 - RNA, 22 nt, synthetic construct
  source 1..22: mol_type = other RNA
tccccccacccctgctctgcac

SEQ ID NO: 149584 - RNA, 22 nt, synthetic construct
  source 1..22: mol_type = other RNA
tcccccctaaaacactggaagt

SEQ ID NO: 149585 - RNA, 22 nt, synthetic construct
  source 1..22: mol_type = other RNA
tcccccctctctctttctgggg

SEQ ID NO: 149586 - RNA, 22 nt, synthetic construct
  source 1..22: mol_type = other RNA
tcccccctggaacaatcaaacc

SEQ ID NO: 149587 - RNA, 22 nt, synthetic construct
  source 1..22: mol_type = other RNA
tcccccgaatcctttgcttccc

SEQ ID NO: 149588 - RNA, 22 nt, synthetic construct
  source 1..22: mol_type = other RNA
tcccccgcccgtccctgcttgg

SEQ ID NO: 149589 - RNA, 22 nt, synthetic construct
  source 1..22: mol_type = other RNA
tcccccgggacaatgccagggc

SEQ ID NO: 149590 - RNA, 22 nt, synthetic construct
  source 1..22: mol_type = other RNA
tcccccggggctcgcagcatcc

SEQ ID NO: 149591 - RNA, 22 nt, synthetic construct
  source 1..22: mol_type = other RNA
tccccctacacccagttcacca

SEQ ID NO: 149592 - RNA, 22 nt, synthetic construct
  source 1..22: mol_type = other RNA
tccccctccctccccccacggt

SEQ ID NO: 149593 - RNA, 22 nt, synthetic construct
  source 1..22: mol_type = other RNA
tcccccttatgtgtgtataacc

SEQ ID NO: 149594 - RNA, 22 nt, synthetic construct
  source 1..22: mol_type = other RNA
tccccgctgcgagaaaggcgaa

SEQ ID NO: 149595 - RNA, 22 nt, synthetic construct
  source 1..22: mol_type = other RNA
tccccgctgtccatttccagta

SEQ ID NO: 149596 - RNA, 22 nt, synthetic construct
  source 1..22: mol_type = other RNA
tccccggatgattctaatgtgc

SEQ ID NO: 149597 - RNA, 22 nt, synthetic construct
  source 1..22: mol_type = other RNA
tccccggtctttcctgatcagc

SEQ ID NO: 149598 - RNA, 22 nt, synthetic construct
  source 1..22: mol_type = other RNA
tcccctagtggatgctggggac

SEQ ID NO: 149599 - RNA, 22 nt, synthetic construct
  source 1..22: mol_type = other RNA
tcccctatactgtaaccctgtt

SEQ ID NO: 149600 - RNA, 22 nt, synthetic construct
  source 1..22: mol_type = other RNA
tcccctgctgttcccaagcaag

SEQ ID NO: 149601 - RNA, 22 nt, synthetic construct
  source 1..22: mol_type = other RNA
tcccctggagttaattccacaa

SEQ ID NO: 149602 - RNA, 22 nt, synthetic construct
  source 1..22: mol_type = other RNA
tcccctggatcccccagcccct

SEQ ID NO: 149603 - RNA, 22 nt, synthetic construct
  source 1..22: mol_type = other RNA
tcccctggggcctcagcatgtc

SEQ ID NO: 149604 - RNA, 22 nt, synthetic construct
  source 1..22: mol_type = other RNA
tcccctggtcgagctgggtgat

SEQ ID NO: 149605 - RNA, 22 nt, synthetic construct
  source 1..22: mol_type = other RNA
tcccctgtaattacatacttca

SEQ ID NO: 149606 - RNA, 22 nt, synthetic construct
  source 1..22: mol_type = other RNA
tcccctgtccaagtatttctca

SEQ ID NO: 149607 - RNA, 22 nt, synthetic construct
  source 1..22: mol_type = other RNA
tccccttatatgggatatctaa

SEQ ID NO: 149608 - RNA, 22 nt, synthetic construct
  source 1..22: mol_type = other RNA
tccccttgacgaagtcacattc

SEQ ID NO: 149609 - RNA, 22 nt, synthetic construct
  source 1..22: mol_type = other RNA
tccccttgccaaggcttgcttt

SEQ ID NO: 149610 - RNA, 22 nt, synthetic construct
  source 1..22: mol_type = other RNA
tcccctttacccctgagaactt

SEQ ID NO: 149611 - RNA, 22 nt, synthetic construct
  source 1..22: mol_type = other RNA
tcccctttagtgttctgtgttt

SEQ ID NO: 149612 - RNA, 22 nt, synthetic construct
  source 1..22: mol_type = other RNA
tcccctttctttggttttgact

SEQ ID NO: 149613 - RNA, 22 nt, synthetic construct
  source 1..22: mol_type = other RNA
tcccgagtagttgtaactacag

SEQ ID NO: 149614 - RNA, 22 nt, synthetic construct
  source 1..22: mol_type = other RNA
tcccgagtatctaggagtacag

SEQ ID NO: 149615 - RNA, 22 nt, synthetic construct
  source 1..22: mol_type = other RNA
tcccgatttcagttaacttatt

SEQ ID NO: 149616 - RNA, 22 nt, synthetic construct
  source 1..22: mol_type = other RNA
tcccgcaccttgattttgataa

SEQ ID NO: 149617 - RNA, 22 nt, synthetic construct
  source 1..22: mol_type = other RNA
tcccgctacacaagtattaacg

SEQ ID NO: 149618 - RNA, 22 nt, synthetic construct
  source 1..22: mol_type = other RNA
tcccggaacaggaaaaggacat

SEQ ID NO: 149619 - RNA, 22 nt, synthetic construct
  source 1..22: mol_type = other RNA
tcccggaagctgggctagagcc

SEQ ID NO: 149620 - RNA, 22 nt, synthetic construct
  source 1..22: mol_type = other RNA
tcccggattggaaaactaggta

SEQ ID NO: 149621 - RNA, 22 nt, synthetic construct
  source 1..22: mol_type = other RNA
tcccggcatgcctctcccacca

SEQ ID NO: 149622 - RNA, 22 nt, synthetic construct
  source 1..22: mol_type = other RNA
tcccggccaggtgcggtggctc

SEQ ID NO: 149623 - RNA, 22 nt, synthetic construct
  source 1..22: mol_type = other RNA
tcccggctaagatgaggtctca

SEQ ID NO: 149624 - RNA, 22 nt, synthetic construct
  source 1..22: mol_type = other RNA
tcccgggtccaggcagttctcc

SEQ ID NO: 149625 - RNA, 22 nt, synthetic construct
  source 1..22: mol_type = other RNA
tcccgggtttaagcgattctcc

SEQ ID NO: 149626 - RNA, 22 nt, synthetic construct
  source 1..22: mol_type = other RNA
tccctaaacactgtagttcagt

SEQ ID NO: 149627 - RNA, 22 nt, synthetic construct
  source 1..22: mol_type = other RNA
tccctaaagagaatcttaaaat

SEQ ID NO: 149628 - RNA, 22 nt, synthetic construct
  source 1..22: mol_type = other RNA
tccctaaatacacatgttgagt

SEQ ID NO: 149629 - RNA, 22 nt, synthetic construct
  source 1..22: mol_type = other RNA
tccctaacagtctcgtgaattt

SEQ ID NO: 149630 - RNA, 22 nt, synthetic construct
  source 1..22: mol_type = other RNA
tccctaaccaggcccggggcag

SEQ ID NO: 149631 - RNA, 22 nt, synthetic construct
  source 1..22: mol_type = other RNA
tccctacattgccttcaagttg

SEQ ID NO: 149632 - RNA, 22 nt, synthetic construct
  source 1..22: mol_type = other RNA
tccctaccacccgtccaatttc

SEQ ID NO: 149633 - RNA, 22 nt, synthetic construct
  source 1..22: mol_type = other RNA
tccctacctaaaaagggagtca

SEQ ID NO: 149634 - RNA, 22 nt, synthetic construct
  source 1..22: mol_type = other RNA
tccctacctggcagtctaggaa

SEQ ID NO: 149635 - RNA, 22 nt, synthetic construct
  source 1..22: mol_type = other RNA
tccctactcactgaaaccctca

SEQ ID NO: 149636 - RNA, 22 nt, synthetic construct
  source 1..22: mol_type = other RNA
tccctagcccagcacttccatt

SEQ ID NO: 149637 - RNA, 22 nt, synthetic construct
  source 1..22: mol_type = other RNA
tccctagtgtctccataccccc

SEQ ID NO: 149638 - RNA, 22 nt, synthetic construct
  source 1..22: mol_type = other RNA
tccctatgcaataactcaaaat

SEQ ID NO: 149639 - RNA, 22 nt, synthetic construct
  source 1..22: mol_type = other RNA
tccctattttctacaggtatat

SEQ ID NO: 149640 - RNA, 22 nt, synthetic construct
  source 1..22: mol_type = other RNA
tccctcacagtccactcacctg

SEQ ID NO: 149641 - RNA, 22 nt, synthetic construct
  source 1..22: mol_type = other RNA
tccctcaccttctgctgggccc

SEQ ID NO: 149642 - RNA, 22 nt, synthetic construct
  source 1..22: mol_type = other RNA
tccctcactaagtcagaattca

SEQ ID NO: 149643 - RNA, 22 nt, synthetic construct
  source 1..22: mol_type = other RNA
tccctcagaatttgaggtcttc

SEQ ID NO: 149644 - RNA, 22 nt, synthetic construct
  source 1..22: mol_type = other RNA
tccctcagcaaaagcaattatt

SEQ ID NO: 149645 - RNA, 22 nt, synthetic construct
  source 1..22: mol_type = other RNA
tccctcatatcagttatcacac

SEQ ID NO: 149646 - RNA, 22 nt, synthetic construct
  source 1..22: mol_type = other RNA
tccctccagtccagcaccaccc

SEQ ID NO: 149647 - RNA, 22 nt, synthetic construct
  source 1..22: mol_type = other RNA
tccctccccccacggtctccct

SEQ ID NO: 149648 - RNA, 22 nt, synthetic construct
  source 1..22: mol_type = other RNA
tccctccccctccccctccctc

SEQ ID NO: 149649 - RNA, 22 nt, synthetic construct
  source 1..22: mol_type = other RNA
tccctcctctggccctccattt

SEQ ID NO: 149650 - RNA, 22 nt, synthetic construct
  source 1..22: mol_type = other RNA
tccctccttggcctcccaaagt

SEQ ID NO: 149651 - RNA, 22 nt, synthetic construct
  source 1..22: mol_type = other RNA
tccctcctttctagaatgcatc

SEQ ID NO: 149652 - RNA, 22 nt, synthetic construct
  source 1..22: mol_type = other RNA
tccctcctttttatcaccctta

SEQ ID NO: 149653 - RNA, 22 nt, synthetic construct
  source 1..22: mol_type = other RNA
tccctcggccacagcagggctc

SEQ ID NO: 149654 - RNA, 22 nt, synthetic construct
  source 1..22: mol_type = other RNA
tccctctaaataggtattcatg

SEQ ID NO: 149655 - RNA, 22 nt, synthetic construct
  source 1..22: mol_type = other RNA
tccctctacaaaaggaggaact

SEQ ID NO: 149656 - RNA, 22 nt, synthetic construct
  source 1..22: mol_type = other RNA
tccctctatggcaggcaccttc

SEQ ID NO: 149657 - RNA, 22 nt, synthetic construct
  source 1..22: mol_type = other RNA
tccctctcagtggtgcttttgc

SEQ ID NO: 149658 - RNA, 22 nt, synthetic construct
  source 1..22: mol_type = other RNA
tccctctgagagaagtcagact

SEQ ID NO: 149659 - RNA, 22 nt, synthetic construct
  source 1..22: mol_type = other RNA
tccctctggccttctatatttt

SEQ ID NO: 149660 - RNA, 22 nt, synthetic construct
  source 1..22: mol_type = other RNA
tccctctgtcaccaggctggaa

SEQ ID NO: 149661 - RNA, 22 nt, synthetic construct
  source 1..22: mol_type = other RNA
tccctctgtgtgcatgcatgtc

SEQ ID NO: 149662 - RNA, 22 nt, synthetic construct
  source 1..22: mol_type = other RNA
tccctcttcaatattttggaag

SEQ ID NO: 149663 - RNA, 22 nt, synthetic construct
  source 1..22: mol_type = other RNA
tccctcttcgctcttttaaaaa

SEQ ID NO: 149664 - RNA, 22 nt, synthetic construct
  source 1..22: mol_type = other RNA
tccctctttctcaacttcctgt

SEQ ID NO: 149665 - RNA, 22 nt, synthetic construct
  source 1..22: mol_type = other RNA
tccctgaaattgtcagaaaaga

SEQ ID NO: 149666 - RNA, 22 nt, synthetic construct
  source 1..22: mol_type = other RNA
tccctgaacaatgattttctta

SEQ ID NO: 149667 - RNA, 22 nt, synthetic construct
  source 1..22: mol_type = other RNA
tccctgataatcacagacgcaa

SEQ ID NO: 149668 - RNA, 22 nt, synthetic construct
  source 1..22: mol_type = other RNA
tccctgatatgtcgcatgaaaa

SEQ ID NO: 149669 - RNA, 22 nt, synthetic construct
  source 1..22: mol_type = other RNA
tccctgatcaagttgcttggca

SEQ ID NO: 149670 - RNA, 22 nt, synthetic construct
  source 1..22: mol_type = other RNA
tccctgcatacactcatttcct

SEQ ID NO: 149671 - RNA, 22 nt, synthetic construct
  source 1..22: mol_type = other RNA
tccctgccctgtgaaaatcatt

SEQ ID NO: 149672 - RNA, 22 nt, synthetic construct
  source 1..22: mol_type = other RNA
tccctgctactcaggagattaa

SEQ ID NO: 149673 - RNA, 22 nt, synthetic construct
  source 1..22: mol_type = other RNA
tccctgctacttgtggggctga

SEQ ID NO: 149674 - RNA, 22 nt, synthetic construct
  source 1..22: mol_type = other RNA
tccctgcttcatctggaccagt

SEQ ID NO: 149675 - RNA, 22 nt, synthetic construct
  source 1..22: mol_type = other RNA
tccctgcttggcgcagtgctta

SEQ ID NO: 149676 - RNA, 22 nt, synthetic construct
  source 1..22: mol_type = other RNA
tccctgctttaaaacactggca

SEQ ID NO: 149677 - RNA, 22 nt, synthetic construct
  source 1..22: mol_type = other RNA
tccctgctttcagttctttcgg

SEQ ID NO: 149678 - RNA, 22 nt, synthetic construct
  source 1..22: mol_type = other RNA
tccctggagaggcaaaggccgc

SEQ ID NO: 149679 - RNA, 22 nt, synthetic construct
  source 1..22: mol_type = other RNA
tccctgggatgcaagaatggtt

SEQ ID NO: 149680 - RNA, 22 nt, synthetic construct
  source 1..22: mol_type = other RNA
tccctggggaataagattttag

SEQ ID NO: 149681 - RNA, 22 nt, synthetic construct
  source 1..22: mol_type = other RNA
tccctggggtttccttaccttt

SEQ ID NO: 149682 - RNA, 22 nt, synthetic construct
  source 1..22: mol_type = other RNA
tccctggttcaagctatgctcc

SEQ ID NO: 149683 - RNA, 22 nt, synthetic construct
  source 1..22: mol_type = other RNA
tccctgtagagatttttatcaa

SEQ ID NO: 149684 - RNA, 22 nt, synthetic construct
  source 1..22: mol_type = other RNA
tccctgtctgggaagttatgta

SEQ ID NO: 149685 - RNA, 22 nt, synthetic construct
  source 1..22: mol_type = other RNA
tccctgtctgtgatgtagaggc

SEQ ID NO: 149686 - RNA, 22 nt, synthetic construct
  source 1..22: mol_type = other RNA
tccctgtctttctgtctgcttt

SEQ ID NO: 149687 - RNA, 22 nt, synthetic construct
  source 1..22: mol_type = other RNA
tccctgtgcgtgaatctgttcc

SEQ ID NO: 149688 - RNA, 22 nt, synthetic construct
  source 1..22: mol_type = other RNA
tccctgtgtatgtgtagtcagt

SEQ ID NO: 149689 - RNA, 22 nt, synthetic construct
  source 1..22: mol_type = other RNA
tcccttaaaaggaactaatttc

SEQ ID NO: 149690 - RNA, 22 nt, synthetic construct
  source 1..22: mol_type = other RNA
tcccttaacctttttcttttca

SEQ ID NO: 149691 - RNA, 22 nt, synthetic construct
  source 1..22: mol_type = other RNA
tcccttaatgttgacatcttgc

SEQ ID NO: 149692 - RNA, 22 nt, synthetic construct
  source 1..22: mol_type = other RNA
tcccttagctctcatgtcagag

SEQ ID NO: 149693 - RNA, 22 nt, synthetic construct
  source 1..22: mol_type = other RNA
tcccttcacaaagccctcagga

SEQ ID NO: 149694 - RNA, 22 nt, synthetic construct
  source 1..22: mol_type = other RNA
tcccttcagcctgtgtcagtga

SEQ ID NO: 149695 - RNA, 22 nt, synthetic construct
  source 1..22: mol_type = other RNA
tcccttcagtgtagtcagacac

SEQ ID NO: 149696 - RNA, 22 nt, synthetic construct
  source 1..22: mol_type = other RNA
tcccttccagcgtgtgcatgac

SEQ ID NO: 149697 - RNA, 22 nt, synthetic construct
  source 1..22: mol_type = other RNA
tcccttccccacctttcctgcc

SEQ ID NO: 149698 - RNA, 22 nt, synthetic construct
  source 1..22: mol_type = other RNA
tcccttcctgttctttgttagt

SEQ ID NO: 149699 - RNA, 22 nt, synthetic construct
  source 1..22: mol_type = other RNA
tcccttctattccattgttctc

SEQ ID NO: 149700 - RNA, 22 nt, synthetic construct
  source 1..22: mol_type = other RNA
tcccttctcgaagtggtgcttg

SEQ ID NO: 149701 - RNA, 22 nt, synthetic construct
  source 1..22: mol_type = other RNA
tcccttctgctcggctctgtca

SEQ ID NO: 149702 - RNA, 22 nt, synthetic construct
  source 1..22: mol_type = other RNA
tcccttcttaaatgtgaattag

SEQ ID NO: 149703 - RNA, 22 nt, synthetic construct
  source 1..22: mol_type = other RNA
tcccttgcctgacagcaaataa

SEQ ID NO: 149704 - RNA, 22 nt, synthetic construct
  source 1..22: mol_type = other RNA
tcccttgtgcacctcgggttca

SEQ ID NO: 149705 - RNA, 22 nt, synthetic construct
  source 1..22: mol_type = other RNA
tccctttaaaatgatagcatta

SEQ ID NO: 149706 - RNA, 22 nt, synthetic construct
  source 1..22: mol_type = other RNA
tccctttcgctaatctcaatca

SEQ ID NO: 149707 - RNA, 22 nt, synthetic construct
  source 1..22: mol_type = other RNA
tcccttttggatgcagatttct

SEQ ID NO: 149708 - RNA, 22 nt, synthetic construct
  source 1..22: mol_type = other RNA
tcccttttgtagctaatatctt

SEQ ID NO: 149709 - RNA, 22 nt, synthetic construct
  source 1..22: mol_type = other RNA
tccctttttaggtagggataag

SEQ ID NO: 149710 - RNA, 22 nt, synthetic construct
  source 1..22: mol_type = other RNA
tccgaaagaactgaaagcaggg

SEQ ID NO: 149711 - RNA, 22 nt, synthetic construct
  source 1..22: mol_type = other RNA
tccgacctgtagattgggcttt

SEQ ID NO: 149712 - RNA, 22 nt, synthetic construct
  source 1..22: mol_type = other RNA
tccgagacaagttctcctgtgt

SEQ ID NO: 149713 - RNA, 22 nt, synthetic construct
  source 1..22: mol_type = other RNA
tccgataaagggtctggtatct

SEQ ID NO: 149714 - RNA, 22 nt, synthetic construct
  source 1..22: mol_type = other RNA
tccgatgataccttcttgagag

SEQ ID NO: 149715 - RNA, 22 nt, synthetic construct
  source 1..22: mol_type = other RNA
tccgatttctcggccgggcgcg

SEQ ID NO: 149716 - RNA, 22 nt, synthetic construct
  source 1..22: mol_type = other RNA
tccgattttacttactagttgt

SEQ ID NO: 149717 - RNA, 22 nt, synthetic construct
  source 1..22: mol_type = other RNA
tccgccaccacgcctggctaat

SEQ ID NO: 149718 - RNA, 22 nt, synthetic construct
  source 1..22: mol_type = other RNA
tccgcctccctggttcaagcta

SEQ ID NO: 149719 - RNA, 22 nt, synthetic construct
  source 1..22: mol_type = other RNA
tccgcctcctggtgggttcatg

SEQ ID NO: 149720 - RNA, 22 nt, synthetic construct
  source 1..22: mol_type = other RNA
tccgcggctgggctttctccag

SEQ ID NO: 149721 - RNA, 22 nt, synthetic construct
  source 1..22: mol_type = other RNA
tccgcgtttattagaactagaa

SEQ ID NO: 149722 - RNA, 22 nt, synthetic construct
  source 1..22: mol_type = other RNA
tccgctaaacattttattaggt

SEQ ID NO: 149723 - RNA, 22 nt, synthetic construct
  source 1..22: mol_type = other RNA
tccgctctggttttaaagaaat

SEQ ID NO: 149724 - RNA, 22 nt, synthetic construct
  source 1..22: mol_type = other RNA
tccggagtagctgggattacac

SEQ ID NO: 149725 - RNA, 22 nt, synthetic construct
  source 1..22: mol_type = other RNA
tccggcctcagcctcccgagta

SEQ ID NO: 149726 - RNA, 22 nt, synthetic construct
  source 1..22: mol_type = other RNA
tccggcgggagaggagcgccct

SEQ ID NO: 149727 - RNA, 22 nt, synthetic construct
  source 1..22: mol_type = other RNA
tccggctctgcggcgggtctgg

SEQ ID NO: 149728 - RNA, 22 nt, synthetic construct
  source 1..22: mol_type = other RNA
tccggctttatgagacacacga

SEQ ID NO: 149729 - RNA, 22 nt, synthetic construct
  source 1..22: mol_type = other RNA
tccgggaacatgacatgtattt

SEQ ID NO: 149730 - RNA, 22 nt, synthetic construct
  source 1..22: mol_type = other RNA
tccgggacttggaagtgaagtc

SEQ ID NO: 149731 - RNA, 22 nt, synthetic construct
  source 1..22: mol_type = other RNA
tccgggatcctgtccaggcgcc

SEQ ID NO: 149732 - RNA, 22 nt, synthetic construct
  source 1..22: mol_type = other RNA
tccgggcctcccacctgcgagc

SEQ ID NO: 149733 - RNA, 22 nt, synthetic construct
  source 1..22: mol_type = other RNA
tccggggagcttttgaaactga

SEQ ID NO: 149734 - RNA, 22 nt, synthetic construct
  source 1..22: mol_type = other RNA
tccgggtaaaaagcctgcttca

SEQ ID NO: 149735 - RNA, 22 nt, synthetic construct
  source 1..22: mol_type = other RNA
tccggtcgttggatttatcttt

SEQ ID NO: 149736 - RNA, 22 nt, synthetic construct
  source 1..22: mol_type = other RNA
tccggtctcagtttttaattta

SEQ ID NO: 149737 - RNA, 22 nt, synthetic construct
  source 1..22: mol_type = other RNA
tccggttctcaggagcctagtc

SEQ ID NO: 149738 - RNA, 22 nt, synthetic construct
  source 1..22: mol_type = other RNA
tccggttgtatagcagtaaaat

SEQ ID NO: 149739 - RNA, 22 nt, synthetic construct
  source 1..22: mol_type = other RNA
tccgtagaccgaggaaacccgc

SEQ ID NO: 149740 - RNA, 22 nt, synthetic construct
  source 1..22: mol_type = other RNA
tccgtagctgtcgctctcctgt

SEQ ID NO: 149741 - RNA, 22 nt, synthetic construct
  source 1..22: mol_type = other RNA
tccgtatccagtggttttttgt

SEQ ID NO: 149742 - RNA, 22 nt, synthetic construct
  source 1..22: mol_type = other RNA
tccgtctagccacttcctatta

SEQ ID NO: 149743 - RNA, 22 nt, synthetic construct
  source 1..22: mol_type = other RNA
tccgtctcaagattgtgtgatt

SEQ ID NO: 149744 - RNA, 22 nt, synthetic construct
  source 1..22: mol_type = other RNA
tccgtgcatgcctctgttacag

SEQ ID NO: 149745 - RNA, 22 nt, synthetic construct
  source 1..22: mol_type = other RNA
tccgtggaaggccttctcctcc

SEQ ID NO: 149746 - RNA, 22 nt, synthetic construct
  source 1..22: mol_type = other RNA
tccgtgtgacaaaaagtagggg

SEQ ID NO: 149747 - RNA, 22 nt, synthetic construct
  source 1..22: mol_type = other RNA
tccgttgaagtctttggcccat

SEQ ID NO: 149748 - RNA, 22 nt, synthetic construct
  source 1..22: mol_type = other RNA
tccgttgctgcatagtactcca

SEQ ID NO: 149749 - RNA, 22 nt, synthetic construct
  source 1..22: mol_type = other RNA
tccgttttgcaagatgcataag

SEQ ID NO: 149750 - RNA, 22 nt, synthetic construct
  source 1..22: mol_type = other RNA
tccgtttttcaggttcaagcga

SEQ ID NO: 149751 - RNA, 22 nt, synthetic construct
  source 1..22: mol_type = other RNA
tcctaaaacatggtccacagag

SEQ ID NO: 149752 - RNA, 22 nt, synthetic construct
  source 1..22: mol_type = other RNA
tcctaaaactccccatgcagga

SEQ ID NO: 149753 - RNA, 22 nt, synthetic construct
  source 1..22: mol_type = other RNA
tcctaaaattccttcctttgat

SEQ ID NO: 149754 - RNA, 22 nt, synthetic construct
  source 1..22: mol_type = other RNA
tcctaaacacttagcatgttgc

SEQ ID NO: 149755 - RNA, 22 nt, synthetic construct
  source 1..22: mol_type = other RNA
tcctaaacctgctacgaatgaa

SEQ ID NO: 149756 - RNA, 22 nt, synthetic construct
  source 1..22: mol_type = other RNA
tcctaaagagagtgacagctga

SEQ ID NO: 149757 - RNA, 22 nt, synthetic construct
  source 1..22: mol_type = other RNA
tcctaaccactgttatctggga

SEQ ID NO: 149758 - RNA, 22 nt, synthetic construct
  source 1..22: mol_type = other RNA
tcctaactcaagagttacttct

SEQ ID NO: 149759 - RNA, 22 nt, synthetic construct
  source 1..22: mol_type = other RNA
tcctaactggtctcctttctat

SEQ ID NO: 149760 - RNA, 22 nt, synthetic construct
  source 1..22: mol_type = other RNA
tcctaagaaagggtgtgtgaat

SEQ ID NO: 149761 - RNA, 22 nt, synthetic construct
  source 1..22: mol_type = other RNA
tcctaagcatgagatactacgc

SEQ ID NO: 149762 - RNA, 22 nt, synthetic construct
  source 1..22: mol_type = other RNA
tcctaagccatctaattcacat

SEQ ID NO: 149763 - RNA, 22 nt, synthetic construct
  source 1..22: mol_type = other RNA
tcctaagtcttcttctaagcta

SEQ ID NO: 149764 - RNA, 22 nt, synthetic construct
  source 1..22: mol_type = other RNA
tcctaagttttgggggaagaga

SEQ ID NO: 149765 - RNA, 22 nt, synthetic construct
  source 1..22: mol_type = other RNA
tcctaatacagtaaagccccat

SEQ ID NO: 149766 - RNA, 22 nt, synthetic construct
  source 1..22: mol_type = other RNA
tcctaatctaacatgttacaaa

SEQ ID NO: 149767 - RNA, 22 nt, synthetic construct
  source 1..22: mol_type = other RNA
tcctaatgggcgtggagcggtg

SEQ ID NO: 149768 - RNA, 22 nt, synthetic construct
  source 1..22: mol_type = other RNA
tcctacacatatctttaggtgt

SEQ ID NO: 149769 - RNA, 22 nt, synthetic construct
  source 1..22: mol_type = other RNA
tcctacatactgcactctcaaa

SEQ ID NO: 149770 - RNA, 22 nt, synthetic construct
  source 1..22: mol_type = other RNA
tcctacccaagcttaggtcaga

SEQ ID NO: 149771 - RNA, 22 nt, synthetic construct
  source 1..22: mol_type = other RNA
tcctaccctgaggatataacga

SEQ ID NO: 149772 - RNA, 22 nt, synthetic construct
  source 1..22: mol_type = other RNA
tcctaccctgccttccttgggc

SEQ ID NO: 149773 - RNA, 22 nt, synthetic construct
  source 1..22: mol_type = other RNA
tcctaccttccaaagtatgcat

SEQ ID NO: 149774 - RNA, 22 nt, synthetic construct
  source 1..22: mol_type = other RNA
tcctactaacaagaaagggtag

SEQ ID NO: 149775 - RNA, 22 nt, synthetic construct
  source 1..22: mol_type = other RNA
tcctactagtatttattaaacc

SEQ ID NO: 149776 - RNA, 22 nt, synthetic construct
  source 1..22: mol_type = other RNA
tcctactttcttcaaccatact

SEQ ID NO: 149777 - RNA, 22 nt, synthetic construct
  source 1..22: mol_type = other RNA
tcctagaaaatcatacattttc

SEQ ID NO: 149778 - RNA, 22 nt, synthetic construct
  source 1..22: mol_type = other RNA
tcctagactgccaggtagggag

SEQ ID NO: 149779 - RNA, 22 nt, synthetic construct
  source 1..22: mol_type = other RNA
tcctagattccctctggccttc

SEQ ID NO: 149780 - RNA, 22 nt, synthetic construct
  source 1..22: mol_type = other RNA
tcctagattgaccttctactta

SEQ ID NO: 149781 - RNA, 22 nt, synthetic construct
  source 1..22: mol_type = other RNA
tcctagccccaaatacctctga

SEQ ID NO: 149782 - RNA, 22 nt, synthetic construct
  source 1..22: mol_type = other RNA
tcctagctacttgggaggctga

SEQ ID NO: 149783 - RNA, 22 nt, synthetic construct
  source 1..22: mol_type = other RNA
tcctatagttaagtctgaaagc

SEQ ID NO: 149784 - RNA, 22 nt, synthetic construct
  source 1..22: mol_type = other RNA
tcctatattgtcaatggggaac

SEQ ID NO: 149785 - RNA, 22 nt, synthetic construct
  source 1..22: mol_type = other RNA
tcctatatttttccacataaag

SEQ ID NO: 149786 - RNA, 22 nt, synthetic construct
  source 1..22: mol_type = other RNA
tcctatcagaagcacaccaagg

SEQ ID NO: 149787 - RNA, 22 nt, synthetic construct
  source 1..22: mol_type = other RNA
tcctatcagagcatgtcccctg

SEQ ID NO: 149788 - RNA, 22 nt, synthetic construct
  source 1..22: mol_type = other RNA
tcctatctaagcctactgctct

SEQ ID NO: 149789 - RNA, 22 nt, synthetic construct
  source 1..22: mol_type = other RNA
tcctatgaaaatttagcttctg

SEQ ID NO: 149790 - RNA, 22 nt, synthetic construct
  source 1..22: mol_type = other RNA
tcctatgtggggaatgctcata

SEQ ID NO: 149791 - RNA, 22 nt, synthetic construct
  source 1..22: mol_type = other RNA
tcctattcacactgctcctgcc

SEQ ID NO: 149792 - RNA, 22 nt, synthetic construct
  source 1..22: mol_type = other RNA
tcctattgtttaaaaacaacac

SEQ ID NO: 149793 - RNA, 22 nt, synthetic construct
  source 1..22: mol_type = other RNA
tcctattttataatgggcaatc

SEQ ID NO: 149794 - RNA, 22 nt, synthetic construct
  source 1..22: mol_type = other RNA
tcctattttgttattagggtaa

SEQ ID NO: 149795 - RNA, 22 nt, synthetic construct
  source 1..22: mol_type = other RNA
tcctcaacaagagaggacagtt

SEQ ID NO: 149796 - RNA, 22 nt, synthetic construct
  source 1..22: mol_type = other RNA
tcctcaatcatgtcaagaatga

SEQ ID NO: 149797 - RNA, 22 nt, synthetic construct
  source 1..22: mol_type = other RNA
tcctcacaacaggcctgagccg

SEQ ID NO: 149798 - RNA, 22 nt, synthetic construct
  source 1..22: mol_type = other RNA
tcctcacatcagttaccaccaa

SEQ ID NO: 149799 - RNA, 22 nt, synthetic construct
  source 1..22: mol_type = other RNA
tcctcacatgtttggtcaattg

SEQ ID NO: 149800 - RNA, 22 nt, synthetic construct
  source 1..22: mol_type = other RNA
tcctcacctcacattcacagcg

SEQ ID NO: 149801 - RNA, 22 nt, synthetic construct
  source 1..22: mol_type = other RNA
tcctcactgtgatacctagtac

SEQ ID NO: 149802 - RNA, 22 nt, synthetic construct
  source 1..22: mol_type = other RNA
tcctcagaaggccaaggcagga

SEQ ID NO: 149803 - RNA, 22 nt, synthetic construct
  source 1..22: mol_type = other RNA
tcctcagccccctccctaccac

SEQ ID NO: 149804 - RNA, 22 nt, synthetic construct
  source 1..22: mol_type = other RNA
tcctcaggatctacattaaaaa

SEQ ID NO: 149805 - RNA, 22 nt, synthetic construct
  source 1..22: mol_type = other RNA
tcctcaggctccaggtagaatg

SEQ ID NO: 149806 - RNA, 22 nt, synthetic construct
  source 1..22: mol_type = other RNA
tcctcagggtaggaaaagactt

SEQ ID NO: 149807 - RNA, 22 nt, synthetic construct
  source 1..22: mol_type = other RNA
tcctcatccctcatatcagtta

SEQ ID NO: 149808 - RNA, 22 nt, synthetic construct
  source 1..22: mol_type = other RNA
tcctcatgtccatagttaatgt

SEQ ID NO: 149809 - RNA, 22 nt, synthetic construct
  source 1..22: mol_type = other RNA
tcctcattcacactagtcaccc

SEQ ID NO: 149810 - RNA, 22 nt, synthetic construct
  source 1..22: mol_type = other RNA
tcctccaacccattccaggttt

SEQ ID NO: 149811 - RNA, 22 nt, synthetic construct
  source 1..22: mol_type = other RNA
tcctccaaggctgcccgctccg

SEQ ID NO: 149812 - RNA, 22 nt, synthetic construct
  source 1..22: mol_type = other RNA
tcctccaatgtttttaattctt

SEQ ID NO: 149813 - RNA, 22 nt, synthetic construct
  source 1..22: mol_type = other RNA
tcctccagccttaatctcctga

SEQ ID NO: 149814 - RNA, 22 nt, synthetic construct
  source 1..22: mol_type = other RNA
tcctccaggttcatccatgttg

SEQ ID NO: 149815 - RNA, 22 nt, synthetic construct
  source 1..22: mol_type = other RNA
tcctcccacctcagccccacaa

SEQ ID NO: 149816 - RNA, 22 nt, synthetic construct
  source 1..22: mol_type = other RNA
tcctcccacttacatcagcagt

SEQ ID NO: 149817 - RNA, 22 nt, synthetic construct
  source 1..22: mol_type = other RNA
tcctcccggctaagatgaggtc

SEQ ID NO: 149818 - RNA, 22 nt, synthetic construct
  source 1..22: mol_type = other RNA
tcctccctggagaggcaaaggc

SEQ ID NO: 149819 - RNA, 22 nt, synthetic construct
  source 1..22: mol_type = other RNA
tcctcccttcagcctgtgtcag

SEQ ID NO: 149820 - RNA, 22 nt, synthetic construct
  source 1..22: mol_type = other RNA
tcctccggggacccagtgcccc

SEQ ID NO: 149821 - RNA, 22 nt, synthetic construct
  source 1..22: mol_type = other RNA
tcctccgtagctgtcgctctcc

SEQ ID NO: 149822 - RNA, 22 nt, synthetic construct
  source 1..22: mol_type = other RNA
tcctcctcctggccacatgctt

SEQ ID NO: 149823 - RNA, 22 nt, synthetic construct
  source 1..22: mol_type = other RNA
tcctcctctacaagttttaact

SEQ ID NO: 149824 - RNA, 22 nt, synthetic construct
  source 1..22: mol_type = other RNA
tcctcctctggacattatccta

SEQ ID NO: 149825 - RNA, 22 nt, synthetic construct
  source 1..22: mol_type = other RNA
tcctcctgccttggccttctga

SEQ ID NO: 149826 - RNA, 22 nt, synthetic construct
  source 1..22: mol_type = other RNA
tcctcctggccacatgcttcca

SEQ ID NO: 149827 - RNA, 22 nt, synthetic construct
  source 1..22: mol_type = other RNA
tcctccttctgctcactttggg

SEQ ID NO: 149828 - RNA, 22 nt, synthetic construct
  source 1..22: mol_type = other RNA
tcctccttttgtagagggaatt

SEQ ID NO: 149829 - RNA, 22 nt, synthetic construct
  source 1..22: mol_type = other RNA
tcctcggtctacggacgcaggc

SEQ ID NO: 149830 - RNA, 22 nt, synthetic construct
  source 1..22: mol_type = other RNA
tcctcgtaaaagctaatctact

SEQ ID NO: 149831 - RNA, 22 nt, synthetic construct
  source 1..22: mol_type = other RNA
tcctcgttttcaacaaaggttg

SEQ ID NO: 149832 - RNA, 22 nt, synthetic construct
  source 1..22: mol_type = other RNA
tcctctacaagttttaacttaa

SEQ ID NO: 149833 - RNA, 22 nt, synthetic construct
  source 1..22: mol_type = other RNA
tcctctactttcacataaggta

SEQ ID NO: 149834 - RNA, 22 nt, synthetic construct
  source 1..22: mol_type = other RNA
tcctctatttttgtctggtgga

SEQ ID NO: 149835 - RNA, 22 nt, synthetic construct
  source 1..22: mol_type = other RNA
tcctctcactccaaagcaaacg

SEQ ID NO: 149836 - RNA, 22 nt, synthetic construct
  source 1..22: mol_type = other RNA
tcctctcccgccggagtccgcg

SEQ ID NO: 149837 - RNA, 22 nt, synthetic construct
  source 1..22: mol_type = other RNA
tcctctcttaaatccgagacaa

SEQ ID NO: 149838 - RNA, 22 nt, synthetic construct
  source 1..22: mol_type = other RNA
tcctctcttggaatgtgcacct

SEQ ID NO: 149839 - RNA, 22 nt, synthetic construct
  source 1..22: mol_type = other RNA
tcctctcttgttgaggatgact

SEQ ID NO: 149840 - RNA, 22 nt, synthetic construct
  source 1..22: mol_type = other RNA
tcctctgactttatggtatcac

SEQ ID NO: 149841 - RNA, 22 nt, synthetic construct
  source 1..22: mol_type = other RNA
tcctctggacattatcctatca

SEQ ID NO: 149842 - RNA, 22 nt, synthetic construct
  source 1..22: mol_type = other RNA
tcctctggccctccatttccct

SEQ ID NO: 149843 - RNA, 22 nt, synthetic construct
  source 1..22: mol_type = other RNA
tcctctggctgacctggtactc

SEQ ID NO: 149844 - RNA, 22 nt, synthetic construct
  source 1..22: mol_type = other RNA
tcctctgtagataaacgttaac

SEQ ID NO: 149845 - RNA, 22 nt, synthetic construct
  source 1..22: mol_type = other RNA
tcctcttcctcatccctcatat

SEQ ID NO: 149846 - RNA, 22 nt, synthetic construct
  source 1..22: mol_type = other RNA
tcctcttcgggtgtcagaattc

SEQ ID NO: 149847 - RNA, 22 nt, synthetic construct
  source 1..22: mol_type = other RNA
tcctcttctgaagaggctttct

SEQ ID NO: 149848 - RNA, 22 nt, synthetic construct
  source 1..22: mol_type = other RNA
tcctctttcatatctgattttg

SEQ ID NO: 149849 - RNA, 22 nt, synthetic construct
  source 1..22: mol_type = other RNA
tcctgaaaattccttccccttt

SEQ ID NO: 149850 - RNA, 22 nt, synthetic construct
  source 1..22: mol_type = other RNA
tcctgaaatgaaccaaacttgg

SEQ ID NO: 149851 - RNA, 22 nt, synthetic construct
  source 1..22: mol_type = other RNA
tcctgaacaaaatttttgcaaa

SEQ ID NO: 149852 - RNA, 22 nt, synthetic construct
  source 1..22: mol_type = other RNA
tcctgaactcgtggcctcaagc

SEQ ID NO: 149853 - RNA, 22 nt, synthetic construct
  source 1..22: mol_type = other RNA
tcctgaagtctttggtgatcct

SEQ ID NO: 149854 - RNA, 22 nt, synthetic construct
  source 1..22: mol_type = other RNA
tcctgaatactattcctattgt

SEQ ID NO: 149855 - RNA, 22 nt, synthetic construct
  source 1..22: mol_type = other RNA
tcctgaatgatttccctgcata

SEQ ID NO: 149856 - RNA, 22 nt, synthetic construct
  source 1..22: mol_type = other RNA
tcctgaattctaacattatctt

SEQ ID NO: 149857 - RNA, 22 nt, synthetic construct
  source 1..22: mol_type = other RNA
tcctgaattctaatgaactccc

SEQ ID NO: 149858 - RNA, 22 nt, synthetic construct
  source 1..22: mol_type = other RNA
tcctgacctcaagcgatccagc

SEQ ID NO: 149859 - RNA, 22 nt, synthetic construct
  source 1..22: mol_type = other RNA
tcctgacctcagatatccacct

SEQ ID NO: 149860 - RNA, 22 nt, synthetic construct
  source 1..22: mol_type = other RNA
tcctgacctctgcagttagcat

SEQ ID NO: 149861 - RNA, 22 nt, synthetic construct
  source 1..22: mol_type = other RNA
tcctgagaaccggaacttgagt

SEQ ID NO: 149862 - RNA, 22 nt, synthetic construct
  source 1..22: mol_type = other RNA
tcctgagacttaggcaaaggaa

SEQ ID NO: 149863 - RNA, 22 nt, synthetic construct
  source 1..22: mol_type = other RNA
tcctgagcaaggaaggaaagga

SEQ ID NO: 149864 - RNA, 22 nt, synthetic construct
  source 1..22: mol_type = other RNA
tcctgagctttccttagttcga

SEQ ID NO: 149865 - RNA, 22 nt, synthetic construct
  source 1..22: mol_type = other RNA
tcctgaggaagctaatcaagcc

SEQ ID NO: 149866 - RNA, 22 nt, synthetic construct
  source 1..22: mol_type = other RNA
tcctgagggctttgtgaaggga

SEQ ID NO: 149867 - RNA, 22 nt, synthetic construct
  source 1..22: mol_type = other RNA
tcctgagggtgagaccaccaca

SEQ ID NO: 149868 - RNA, 22 nt, synthetic construct
  source 1..22: mol_type = other RNA
tcctgataaggggctatcttta

SEQ ID NO: 149869 - RNA, 22 nt, synthetic construct
  source 1..22: mol_type = other RNA
tcctgatcacaccctcctacct

SEQ ID NO: 149870 - RNA, 22 nt, synthetic construct
  source 1..22: mol_type = other RNA
tcctgatcagcaccctcaaatg

SEQ ID NO: 149871 - RNA, 22 nt, synthetic construct
  source 1..22: mol_type = other RNA
tcctgatggacattctgcttcc

SEQ ID NO: 149872 - RNA, 22 nt, synthetic construct
  source 1..22: mol_type = other RNA
tcctgatttaggccactctcat

SEQ ID NO: 149873 - RNA, 22 nt, synthetic construct
  source 1..22: mol_type = other RNA
tcctgcacatgcacaaggtcaa

SEQ ID NO: 149874 - RNA, 22 nt, synthetic construct
  source 1..22: mol_type = other RNA
tcctgcactcaagcaatcctcc

SEQ ID NO: 149875 - RNA, 22 nt, synthetic construct
  source 1..22: mol_type = other RNA
tcctgcagacatgcacgagaaa

SEQ ID NO: 149876 - RNA, 22 nt, synthetic construct
  source 1..22: mol_type = other RNA
tcctgcatatgtttttattagc

SEQ ID NO: 149877 - RNA, 22 nt, synthetic construct
  source 1..22: mol_type = other RNA
tcctgcatggggagttttagga

SEQ ID NO: 149878 - RNA, 22 nt, synthetic construct
  source 1..22: mol_type = other RNA
tcctgcccctccactccacaaa

SEQ ID NO: 149879 - RNA, 22 nt, synthetic construct
  source 1..22: mol_type = other RNA
tcctgccttcctgacctctgca

SEQ ID NO: 149880 - RNA, 22 nt, synthetic construct
  source 1..22: mol_type = other RNA
tcctgccttggccttctgagga

SEQ ID NO: 149881 - RNA, 22 nt, synthetic construct
  source 1..22: mol_type = other RNA
tcctgcctttgttcatcatctt

SEQ ID NO: 149882 - RNA, 22 nt, synthetic construct
  source 1..22: mol_type = other RNA
tcctgctaacaccttgaactgg

SEQ ID NO: 149883 - RNA, 22 nt, synthetic construct
  source 1..22: mol_type = other RNA
tcctgctattttattagatagt

SEQ ID NO: 149884 - RNA, 22 nt, synthetic construct
  source 1..22: mol_type = other RNA
tcctgctgggctattgttttgc

SEQ ID NO: 149885 - RNA, 22 nt, synthetic construct
  source 1..22: mol_type = other RNA
tcctgctgtcgtttatgcattt

SEQ ID NO: 149886 - RNA, 22 nt, synthetic construct
  source 1..22: mol_type = other RNA
tcctgcttcccccaaagaagga

SEQ ID NO: 149887 - RNA, 22 nt, synthetic construct
  source 1..22: mol_type = other RNA
tcctggaaaaagaccataatat

SEQ ID NO: 149888 - RNA, 22 nt, synthetic construct
  source 1..22: mol_type = other RNA
tcctggaaaacttctctggagc

SEQ ID NO: 149889 - RNA, 22 nt, synthetic construct
  source 1..22: mol_type = other RNA
tcctggaatagtagcttcaatg

SEQ ID NO: 149890 - RNA, 22 nt, synthetic construct
  source 1..22: mol_type = other RNA
tcctggactgtgatgactgtaa

SEQ ID NO: 149891 - RNA, 22 nt, synthetic construct
  source 1..22: mol_type = other RNA
tcctggagggctcccagtgccc

SEQ ID NO: 149892 - RNA, 22 nt, synthetic construct
  source 1..22: mol_type = other RNA
tcctggattgctagtgtcctca

SEQ ID NO: 149893 - RNA, 22 nt, synthetic construct
  source 1..22: mol_type = other RNA
tcctggatttgggaaggatggc

SEQ ID NO: 149894 - RNA, 22 nt, synthetic construct
  source 1..22: mol_type = other RNA
tcctggcagatcaattgaccaa

SEQ ID NO: 149895 - RNA, 22 nt, synthetic construct
  source 1..22: mol_type = other RNA
tcctggccacatgcttccaaaa

SEQ ID NO: 149896 - RNA, 22 nt, synthetic construct
  source 1..22: mol_type = other RNA
tcctggctctagcccagcttcc

SEQ ID NO: 149897 - RNA, 22 nt, synthetic construct
  source 1..22: mol_type = other RNA
tcctgggaaaaggatttgtttg

SEQ ID NO: 149898 - RNA, 22 nt, synthetic construct
  source 1..22: mol_type = other RNA
tcctgggctcatctaagcctac

SEQ ID NO: 149899 - RNA, 22 nt, synthetic construct
  source 1..22: mol_type = other RNA
tcctgggttcaggtgcctcctg

SEQ ID NO: 149900 - RNA, 22 nt, synthetic construct
  source 1..22: mol_type = other RNA
tcctgggttctcccttctattc

SEQ ID NO: 149901 - RNA, 22 nt, synthetic construct
  source 1..22: mol_type = other RNA
tcctggtctcccagcatgaagc

SEQ ID NO: 149902 - RNA, 22 nt, synthetic construct
  source 1..22: mol_type = other RNA
tcctggtgggttcatgccattc

SEQ ID NO: 149903 - RNA, 22 nt, synthetic construct
  source 1..22: mol_type = other RNA
tcctggttttgatcatcgcatt

SEQ ID NO: 149904 - RNA, 22 nt, synthetic construct
  source 1..22: mol_type = other RNA
tcctgtaaacctggaatcctct

SEQ ID NO: 149905 - RNA, 22 nt, synthetic construct
  source 1..22: mol_type = other RNA
tcctgtatatctccttttaaga

SEQ ID NO: 149906 - RNA, 22 nt, synthetic construct
  source 1..22: mol_type = other RNA
tcctgtatgccgctggtgaaaa

SEQ ID NO: 149907 - RNA, 22 nt, synthetic construct
  source 1..22: mol_type = other RNA
tcctgtcagtgtggttcatatt

SEQ ID NO: 149908 - RNA, 22 nt, synthetic construct
  source 1..22: mol_type = other RNA
tcctgtcagtttctgatttatc

SEQ ID NO: 149909 - RNA, 22 nt, synthetic construct
  source 1..22: mol_type = other RNA
tcctgtccaggcgcctgcattg

SEQ ID NO: 149910 - RNA, 22 nt, synthetic construct
  source 1..22: mol_type = other RNA
tcctgtctcagagtatatatgc

SEQ ID NO: 149911 - RNA, 22 nt, synthetic construct
  source 1..22: mol_type = other RNA
tcctgtcttggacccatgccca

SEQ ID NO: 149912 - RNA, 22 nt, synthetic construct
  source 1..22: mol_type = other RNA
tcctgtgatttatgtggcattt

SEQ ID NO: 149913 - RNA, 22 nt, synthetic construct
  source 1..22: mol_type = other RNA
tcctgtgccaagtccgtgcatg

SEQ ID NO: 149914 - RNA, 22 nt, synthetic construct
  source 1..22: mol_type = other RNA
tcctgtgtgcatgctcccattt

SEQ ID NO: 149915 - RNA, 22 nt, synthetic construct
  source 1..22: mol_type = other RNA
tcctgtgtttctgctattctct

SEQ ID NO: 149916 - RNA, 22 nt, synthetic construct
  source 1..22: mol_type = other RNA
tcctgttccgggatcctgtcca

SEQ ID NO: 149917 - RNA, 22 nt, synthetic construct
  source 1..22: mol_type = other RNA
tcctgttctttggagctgtatt

SEQ ID NO: 149918 - RNA, 22 nt, synthetic construct
  source 1..22: mol_type = other RNA
tcctgttctttgttagtttatt

SEQ ID NO: 149919 - RNA, 22 nt, synthetic construct
  source 1..22: mol_type = other RNA
tcctgttcttttgtaatctaag

SEQ ID NO: 149920 - RNA, 22 nt, synthetic construct
  source 1..22: mol_type = other RNA
tcctgttgctttaacctctggt

SEQ ID NO: 149921 - RNA, 22 nt, synthetic construct
  source 1..22: mol_type = other RNA
tcctgtttctctacatctggat

SEQ ID NO: 149922 - RNA, 22 nt, synthetic construct
  source 1..22: mol_type = other RNA
tcctgtttgagaagtcttttcc

SEQ ID NO: 149923 - RNA, 22 nt, synthetic construct
  source 1..22: mol_type = other RNA
tcctgttttagtggctcacagt

SEQ ID NO: 149924 - RNA, 22 nt, synthetic construct
  source 1..22: mol_type = other RNA
tccttaaaaaaggtttttgaac

SEQ ID NO: 149925 - RNA, 22 nt, synthetic construct
  source 1..22: mol_type = other RNA
tccttaaatttctaaggttctg

SEQ ID NO: 149926 - RNA, 22 nt, synthetic construct
  source 1..22: mol_type = other RNA
tccttaagcacagactgtgcct

SEQ ID NO: 149927 - RNA, 22 nt, synthetic construct
  source 1..22: mol_type = other RNA
tccttaagccatttcaggtttt

SEQ ID NO: 149928 - RNA, 22 nt, synthetic construct
  source 1..22: mol_type = other RNA
tccttaatgccaccgaattgta

SEQ ID NO: 149929 - RNA, 22 nt, synthetic construct
  source 1..22: mol_type = other RNA
tccttaatgtttagtagaattc

SEQ ID NO: 149930 - RNA, 22 nt, synthetic construct
  source 1..22: mol_type = other RNA
tccttaccactataatccagat

SEQ ID NO: 149931 - RNA, 22 nt, synthetic construct
  source 1..22: mol_type = other RNA
tccttaccactgaagtgttgag

SEQ ID NO: 149932 - RNA, 22 nt, synthetic construct
  source 1..22: mol_type = other RNA
tccttaccagtgcttgcagcct

SEQ ID NO: 149933 - RNA, 22 nt, synthetic construct
  source 1..22: mol_type = other RNA
tccttacctttatctttggata

SEQ ID NO: 149934 - RNA, 22 nt, synthetic construct
  source 1..22: mol_type = other RNA
tccttactaccaccactaatgt

SEQ ID NO: 149935 - RNA, 22 nt, synthetic construct
  source 1..22: mol_type = other RNA
tccttacttccagctcacgtta

SEQ ID NO: 149936 - RNA, 22 nt, synthetic construct
  source 1..22: mol_type = other RNA
tccttagattacaaaagaacag

SEQ ID NO: 149937 - RNA, 22 nt, synthetic construct
  source 1..22: mol_type = other RNA
tccttagcccacttgttgatgg

SEQ ID NO: 149938 - RNA, 22 nt, synthetic construct
  source 1..22: mol_type = other RNA
tccttatagtattacctcccat

SEQ ID NO: 149939 - RNA, 22 nt, synthetic construct
  source 1..22: mol_type = other RNA
tccttatccattcatctctcga

SEQ ID NO: 149940 - RNA, 22 nt, synthetic construct
  source 1..22: mol_type = other RNA
tccttatccgataaagggtctg

SEQ ID NO: 149941 - RNA, 22 nt, synthetic construct
  source 1..22: mol_type = other RNA
tccttatggatatctggcctgc

SEQ ID NO: 149942 - RNA, 22 nt, synthetic construct
  source 1..22: mol_type = other RNA
tccttattgagaagcagaaaat

SEQ ID NO: 149943 - RNA, 22 nt, synthetic construct
  source 1..22: mol_type = other RNA
tccttcagtcagttctctgccc

SEQ ID NO: 149944 - RNA, 22 nt, synthetic construct
  source 1..22: mol_type = other RNA
tccttcatgtcccctgtccaag

SEQ ID NO: 149945 - RNA, 22 nt, synthetic construct
  source 1..22: mol_type = other RNA
tccttccagatgttttacacat

SEQ ID NO: 149946 - RNA, 22 nt, synthetic construct
  source 1..22: mol_type = other RNA
tccttccagtatgatgccactc

SEQ ID NO: 149947 - RNA, 22 nt, synthetic construct
  source 1..22: mol_type = other RNA
tccttccagtttatatgcctag

SEQ ID NO: 149948 - RNA, 22 nt, synthetic construct
  source 1..22: mol_type = other RNA
tccttcccaaatccaggatggc

SEQ ID NO: 149949 - RNA, 22 nt, synthetic construct
  source 1..22: mol_type = other RNA
tccttcccctggtcgagctggg

SEQ ID NO: 149950 - RNA, 22 nt, synthetic construct
  source 1..22: mol_type = other RNA
tccttcccctttctttggtttt

SEQ ID NO: 149951 - RNA, 22 nt, synthetic construct
  source 1..22: mol_type = other RNA
tccttccgacctgtagattggg

SEQ ID NO: 149952 - RNA, 22 nt, synthetic construct
  source 1..22: mol_type = other RNA
tccttcctacacatatctttag

SEQ ID NO: 149953 - RNA, 22 nt, synthetic construct
  source 1..22: mol_type = other RNA
tccttccttcatgtcccctgtc

SEQ ID NO: 149954 - RNA, 22 nt, synthetic construct
  source 1..22: mol_type = other RNA
tccttccttgctcaggagtaac

SEQ ID NO: 149955 - RNA, 22 nt, synthetic construct
  source 1..22: mol_type = other RNA
tccttcctttgatgacttacag

SEQ ID NO: 149956 - RNA, 22 nt, synthetic construct
  source 1..22: mol_type = other RNA
tccttctaatcagtaacttaaa

SEQ ID NO: 149957 - RNA, 22 nt, synthetic construct
  source 1..22: mol_type = other RNA
tccttctacatccccccacccc

SEQ ID NO: 149958 - RNA, 22 nt, synthetic construct
  source 1..22: mol_type = other RNA
tccttctcatagtcttccaaaa

SEQ ID NO: 149959 - RNA, 22 nt, synthetic construct
  source 1..22: mol_type = other RNA
tccttctcgtgtgagctctagc

SEQ ID NO: 149960 - RNA, 22 nt, synthetic construct
  source 1..22: mol_type = other RNA
tccttctcttatactagtagaa

SEQ ID NO: 149961 - RNA, 22 nt, synthetic construct
  source 1..22: mol_type = other RNA
tccttctgaaggcactaacaaa

SEQ ID NO: 149962 - RNA, 22 nt, synthetic construct
  source 1..22: mol_type = other RNA
tccttctgagaaggcgaaatgt

SEQ ID NO: 149963 - RNA, 22 nt, synthetic construct
  source 1..22: mol_type = other RNA
tccttctgcaggctgaactgct

SEQ ID NO: 149964 - RNA, 22 nt, synthetic construct
  source 1..22: mol_type = other RNA
tccttctgccttgacctcccaa

SEQ ID NO: 149965 - RNA, 22 nt, synthetic construct
  source 1..22: mol_type = other RNA
tccttctgctcactttgggatt

SEQ ID NO: 149966 - RNA, 22 nt, synthetic construct
  source 1..22: mol_type = other RNA
tccttctggaagatttctactg

SEQ ID NO: 149967 - RNA, 22 nt, synthetic construct
  source 1..22: mol_type = other RNA
tccttcttaagacatttgggaa

SEQ ID NO: 149968 - RNA, 22 nt, synthetic construct
  source 1..22: mol_type = other RNA
tccttcttcacacattaactat

SEQ ID NO: 149969 - RNA, 22 nt, synthetic construct
  source 1..22: mol_type = other RNA
tccttctttgggggaagcagga

SEQ ID NO: 149970 - RNA, 22 nt, synthetic construct
  source 1..22: mol_type = other RNA
tccttgatcagcttcctaccca

SEQ ID NO: 149971 - RNA, 22 nt, synthetic construct
  source 1..22: mol_type = other RNA
tccttgcacattagaatcatcc

SEQ ID NO: 149972 - RNA, 22 nt, synthetic construct
  source 1..22: mol_type = other RNA
tccttgcaccaactccacattg

SEQ ID NO: 149973 - RNA, 22 nt, synthetic construct
  source 1..22: mol_type = other RNA
tccttgccaacagttactttcc

SEQ ID NO: 149974 - RNA, 22 nt, synthetic construct
  source 1..22: mol_type = other RNA
tccttgctatgtaatctcatgg

SEQ ID NO: 149975 - RNA, 22 nt, synthetic construct
  source 1..22: mol_type = other RNA
tccttgctcaggagtaactgct

SEQ ID NO: 149976 - RNA, 22 nt, synthetic construct
  source 1..22: mol_type = other RNA
tccttgctgaagaataactgtc

SEQ ID NO: 149977 - RNA, 22 nt, synthetic construct
  source 1..22: mol_type = other RNA
tccttgcttgtcttgaatagca

SEQ ID NO: 149978 - RNA, 22 nt, synthetic construct
  source 1..22: mol_type = other RNA
tccttggagaagagttctgaag

SEQ ID NO: 149979 - RNA, 22 nt, synthetic construct
  source 1..22: mol_type = other RNA
tccttggattgctaaactgttc

SEQ ID NO: 149980 - RNA, 22 nt, synthetic construct
  source 1..22: mol_type = other RNA
tccttgggcacactccccagtg

SEQ ID NO: 149981 - RNA, 22 nt, synthetic construct
  source 1..22: mol_type = other RNA
tccttgtatggagactagtaca

SEQ ID NO: 149982 - RNA, 22 nt, synthetic construct
  source 1..22: mol_type = other RNA
tccttgtcctaaaattccttcc

SEQ ID NO: 149983 - RNA, 22 nt, synthetic construct
  source 1..22: mol_type = other RNA
tccttgtgatctatgcatactg

SEQ ID NO: 149984 - RNA, 22 nt, synthetic construct
  source 1..22: mol_type = other RNA
tccttgtggtcttaagagactc

SEQ ID NO: 149985 - RNA, 22 nt, synthetic construct
  source 1..22: mol_type = other RNA
tccttgtgtcttaaattcaaag

SEQ ID NO: 149986 - RNA, 22 nt, synthetic construct
  source 1..22: mol_type = other RNA
tccttgtgttttatttggctgt

SEQ ID NO: 149987 - RNA, 22 nt, synthetic construct
  source 1..22: mol_type = other RNA
tcctttaacgtatctgggaaaa

SEQ ID NO: 149988 - RNA, 22 nt, synthetic construct
  source 1..22: mol_type = other RNA
tcctttaatttgggtttgagtt

SEQ ID NO: 149989 - RNA, 22 nt, synthetic construct
  source 1..22: mol_type = other RNA
tcctttcaaagagacctgattc

SEQ ID NO: 149990 - RNA, 22 nt, synthetic construct
  source 1..22: mol_type = other RNA
tcctttcaaggtatctccccaa

SEQ ID NO: 149991 - RNA, 22 nt, synthetic construct
  source 1..22: mol_type = other RNA
tcctttcagtcggttcttcacc

SEQ ID NO: 149992 - RNA, 22 nt, synthetic construct
  source 1..22: mol_type = other RNA
tcctttccagaggttcttttaa

SEQ ID NO: 149993 - RNA, 22 nt, synthetic construct
  source 1..22: mol_type = other RNA
tcctttcccttctgctcggctc

SEQ ID NO: 149994 - RNA, 22 nt, synthetic construct
  source 1..22: mol_type = other RNA
tcctttccttccttgctcagga

SEQ ID NO: 149995 - RNA, 22 nt, synthetic construct
  source 1..22: mol_type = other RNA
tcctttccttgtcctaaaattc

SEQ ID NO: 149996 - RNA, 22 nt, synthetic construct
  source 1..22: mol_type = other RNA
tcctttctagaatgcatccctc

SEQ ID NO: 149997 - RNA, 22 nt, synthetic construct
  source 1..22: mol_type = other RNA
tcctttctaggcatctatttcc

SEQ ID NO: 149998 - RNA, 22 nt, synthetic construct
  source 1..22: mol_type = other RNA
tcctttctatacttcatctttc

SEQ ID NO: 149999 - RNA, 22 nt, synthetic construct
  source 1..22: mol_type = other RNA
tcctttcttaccctcacagtca

SEQ ID NO: 150000 - RNA, 22 nt, synthetic construct
  source 1..22: mol_type = other RNA
tcctttcttggtctgcagactc

SEQ ID NO: 150001 - RNA, 22 nt, synthetic construct
  source 1..22: mol_type = other RNA
tcctttgaggtaagaacttgtc

SEQ ID NO: 150002 - RNA, 22 nt, synthetic construct
  source 1..22: mol_type = other RNA
tcctttgatgacttacagatat

SEQ ID NO: 150003 - RNA, 22 nt, synthetic construct
  source 1..22: mol_type = other RNA
tcctttgatgcacaaaagttta

SEQ ID NO: 150004 - RNA, 22 nt, synthetic construct
  source 1..22: mol_type = other RNA
tcctttgcacacaccaaatcat

SEQ ID NO: 150005 - RNA, 22 nt, synthetic construct
  source 1..22: mol_type = other RNA
tcctttgcctaagtctcaggat

SEQ ID NO: 150006 - RNA, 22 nt, synthetic construct
  source 1..22: mol_type = other RNA
tcctttgcctttcactttgatc

SEQ ID NO: 150007 - RNA, 22 nt, synthetic construct
  source 1..22: mol_type = other RNA
tcctttgcgtctgtgattatca

SEQ ID NO: 150008 - RNA, 22 nt, synthetic construct
  source 1..22: mol_type = other RNA
tcctttgcttcccacttcgaaa

SEQ ID NO: 150009 - RNA, 22 nt, synthetic construct
  source 1..22: mol_type = other RNA
tcctttgggaggtcaaggcaga

SEQ ID NO: 150010 - RNA, 22 nt, synthetic construct
  source 1..22: mol_type = other RNA
tcctttgtgcaggtctgggttt

SEQ ID NO: 150011 - RNA, 22 nt, synthetic construct
  source 1..22: mol_type = other RNA
tcctttgtgtcaagtacaacta

SEQ ID NO: 150012 - RNA, 22 nt, synthetic construct
  source 1..22: mol_type = other RNA
tccttttaagagtgaagaaacc

SEQ ID NO: 150013 - RNA, 22 nt, synthetic construct
  source 1..22: mol_type = other RNA
tccttttaagggaaacactcat

SEQ ID NO: 150014 - RNA, 22 nt, synthetic construct
  source 1..22: mol_type = other RNA
tccttttatgtgcagtctaacc

SEQ ID NO: 150015 - RNA, 22 nt, synthetic construct
  source 1..22: mol_type = other RNA
tccttttcccaggagctagaac

SEQ ID NO: 150016 - RNA, 22 nt, synthetic construct
  source 1..22: mol_type = other RNA
tccttttcctgttccgggatcc

SEQ ID NO: 150017 - RNA, 22 nt, synthetic construct
  source 1..22: mol_type = other RNA
tccttttcgagactgagtaata

SEQ ID NO: 150018 - RNA, 22 nt, synthetic construct
  source 1..22: mol_type = other RNA
tccttttgagtttggtgtattt

SEQ ID NO: 150019 - RNA, 22 nt, synthetic construct
  source 1..22: mol_type = other RNA
tccttttgtagagggaatttgt

SEQ ID NO: 150020 - RNA, 22 nt, synthetic construct
  source 1..22: mol_type = other RNA
tcctttttatcacccttataaa

SEQ ID NO: 150021 - RNA, 22 nt, synthetic construct
  source 1..22: mol_type = other RNA
tccttttttactgacttttcct

SEQ ID NO: 150022 - RNA, 22 nt, synthetic construct
  source 1..22: mol_type = other RNA
tccttttttatgtgctttctca

SEQ ID NO: 150023 - RNA, 22 nt, synthetic construct
  source 1..22: mol_type = other RNA
tcgaaaacctgaaatggcttaa

SEQ ID NO: 150024 - RNA, 22 nt, synthetic construct
  source 1..22: mol_type = other RNA
tcgaaaaggaatggaattctga

SEQ ID NO: 150025 - RNA, 22 nt, synthetic construct
  source 1..22: mol_type = other RNA
tcgaaaatgggccaaagacttc

SEQ ID NO: 150026 - RNA, 22 nt, synthetic construct
  source 1..22: mol_type = other RNA
tcgaaagttcagatagaattaa

SEQ ID NO: 150027 - RNA, 22 nt, synthetic construct
  source 1..22: mol_type = other RNA
tcgaaataatcattgttaggtg

SEQ ID NO: 150028 - RNA, 22 nt, synthetic construct
  source 1..22: mol_type = other RNA
tcgaactaaggaaagctcagga

SEQ ID NO: 150029 - RNA, 22 nt, synthetic construct
  source 1..22: mol_type = other RNA
tcgaactctcgacctcgtgatc

SEQ ID NO: 150030 - RNA, 22 nt, synthetic construct
  source 1..22: mol_type = other RNA
tcgaagagaccacaggctctct

SEQ ID NO: 150031 - RNA, 22 nt, synthetic construct
  source 1..22: mol_type = other RNA
tcgaagcaaaacatatgtcaga

SEQ ID NO: 150032 - RNA, 22 nt, synthetic construct
  source 1..22: mol_type = other RNA
tcgaagcacaaccactgatgga

SEQ ID NO: 150033 - RNA, 22 nt, synthetic construct
  source 1..22: mol_type = other RNA
tcgaagccttcccctgctgttc

SEQ ID NO: 150034 - RNA, 22 nt, synthetic construct
  source 1..22: mol_type = other RNA
tcgaagcttaatttagatgaga

SEQ ID NO: 150035 - RNA, 22 nt, synthetic construct
  source 1..22: mol_type = other RNA
tcgaagcttattaaaatgaacc

SEQ ID NO: 150036 - RNA, 22 nt, synthetic construct
  source 1..22: mol_type = other RNA
tcgaaggcctgcttcattccgc

SEQ ID NO: 150037 - RNA, 22 nt, synthetic construct
  source 1..22: mol_type = other RNA
tcgaagtgggaagcaaaggatt

SEQ ID NO: 150038 - RNA, 22 nt, synthetic construct
  source 1..22: mol_type = other RNA
tcgaagtggtgcttgaactgct

SEQ ID NO: 150039 - RNA, 22 nt, synthetic construct
  source 1..22: mol_type = other RNA
tcgaatcctcacaacaggcctg

SEQ ID NO: 150040 - RNA, 22 nt, synthetic construct
  source 1..22: mol_type = other RNA
tcgaattagattgttttgttgc

SEQ ID NO: 150041 - RNA, 22 nt, synthetic construct
  source 1..22: mol_type = other RNA
tcgaattatgctaacatgaact

SEQ ID NO: 150042 - RNA, 22 nt, synthetic construct
  source 1..22: mol_type = other RNA
tcgacacacaatccaagtttct

SEQ ID NO: 150043 - RNA, 22 nt, synthetic construct
  source 1..22: mol_type = other RNA
tcgacagtcccttgcctgacag

SEQ ID NO: 150044 - RNA, 22 nt, synthetic construct
  source 1..22: mol_type = other RNA
tcgaccaagttactagaagcac

SEQ ID NO: 150045 - RNA, 22 nt, synthetic construct
  source 1..22: mol_type = other RNA
tcgaccaggggaaggagtctgc

SEQ ID NO: 150046 - RNA, 22 nt, synthetic construct
  source 1..22: mol_type = other RNA
tcgaccccctgggctcaagcca

SEQ ID NO: 150047 - RNA, 22 nt, synthetic construct
  source 1..22: mol_type = other RNA
tcgagaaaaatggggatatcca

SEQ ID NO: 150048 - RNA, 22 nt, synthetic construct
  source 1..22: mol_type = other RNA
tcgagaagggaagtaaagatca

SEQ ID NO: 150049 - RNA, 22 nt, synthetic construct
  source 1..22: mol_type = other RNA
tcgagactgagtaatattccat

SEQ ID NO: 150050 - RNA, 22 nt, synthetic construct
  source 1..22: mol_type = other RNA
tcgagactgtaatgagctgaga

SEQ ID NO: 150051 - RNA, 22 nt, synthetic construct
  source 1..22: mol_type = other RNA
tcgagagatgaatggataagga

SEQ ID NO: 150052 - RNA, 22 nt, synthetic construct
  source 1..22: mol_type = other RNA
tcgagctcctgacctcagatat

SEQ ID NO: 150053 - RNA, 22 nt, synthetic construct
  source 1..22: mol_type = other RNA
tcgagctgggtgatgttcaacc

SEQ ID NO: 150054 - RNA, 22 nt, synthetic construct
  source 1..22: mol_type = other RNA
tcgaggcatctagttaccacta

SEQ ID NO: 150055 - RNA, 22 nt, synthetic construct
  source 1..22: mol_type = other RNA
tcgagggggctgagtatgggtc

SEQ ID NO: 150056 - RNA, 22 nt, synthetic construct
  source 1..22: mol_type = other RNA
tcgagggtagcttttcctgctg

SEQ ID NO: 150057 - RNA, 22 nt, synthetic construct
  source 1..22: mol_type = other RNA
tcgaggtcgcaccctgagcatc

SEQ ID NO: 150058 - RNA, 22 nt, synthetic construct
  source 1..22: mol_type = other RNA
tcgagttctgggagttcattag

SEQ ID NO: 150059 - RNA, 22 nt, synthetic construct
  source 1..22: mol_type = other RNA
tcgatggacatttaggttgttt

SEQ ID NO: 150060 - RNA, 22 nt, synthetic construct
  source 1..22: mol_type = other RNA
tcgattaaaataacacgcagaa

SEQ ID NO: 150061 - RNA, 22 nt, synthetic construct
  source 1..22: mol_type = other RNA
tcgcaaagcaacatgctaagtg

SEQ ID NO: 150062 - RNA, 22 nt, synthetic construct
  source 1..22: mol_type = other RNA
tcgcaaagtaaaaagcactatc

SEQ ID NO: 150063 - RNA, 22 nt, synthetic construct
  source 1..22: mol_type = other RNA
tcgcaatccaaaatcctctgta

SEQ ID NO: 150064 - RNA, 22 nt, synthetic construct
  source 1..22: mol_type = other RNA
tcgcaccctgagcatccccgct

SEQ ID NO: 150065 - RNA, 22 nt, synthetic construct
  source 1..22: mol_type = other RNA
tcgcactccacttcccactgct

SEQ ID NO: 150066 - RNA, 22 nt, synthetic construct
  source 1..22: mol_type = other RNA
tcgcagcatccctgccgcgcgc

SEQ ID NO: 150067 - RNA, 22 nt, synthetic construct
  source 1..22: mol_type = other RNA
tcgcagcggggatgctcagggt

SEQ ID NO: 150068 - RNA, 22 nt, synthetic construct
  source 1..22: mol_type = other RNA
tcgcagggccattctgctatga

SEQ ID NO: 150069 - RNA, 22 nt, synthetic construct
  source 1..22: mol_type = other RNA
tcgcagggtgaaacttgaatac

SEQ ID NO: 150070 - RNA, 22 nt, synthetic construct
  source 1..22: mol_type = other RNA
tcgcaggtgggaggcccggagc

SEQ ID NO: 150071 - RNA, 22 nt, synthetic construct
  source 1..22: mol_type = other RNA
tcgcataaccaaattatttcag

SEQ ID NO: 150072 - RNA, 22 nt, synthetic construct
  source 1..22: mol_type = other RNA
tcgcatcattcaaatgatattc

SEQ ID NO: 150073 - RNA, 22 nt, synthetic construct
  source 1..22: mol_type = other RNA
tcgcatgaaaacagctaggtga

SEQ ID NO: 150074 - RNA, 22 nt, synthetic construct
  source 1..22: mol_type = other RNA
tcgcattacgagttatgcaaga

SEQ ID NO: 150075 - RNA, 22 nt, synthetic construct
  source 1..22: mol_type = other RNA
tcgcattgctaattcattgtac

SEQ ID NO: 150076 - RNA, 22 nt, synthetic construct
  source 1..22: mol_type = other RNA
tcgccatacctggtccttaaat

SEQ ID NO: 150077 - RNA, 22 nt, synthetic construct
  source 1..22: mol_type = other RNA
tcgcccaggcggaatgcagtgg

SEQ ID NO: 150078 - RNA, 22 nt, synthetic construct
  source 1..22: mol_type = other RNA
tcgcccaggctggagctcactg

SEQ ID NO: 150079 - RNA, 22 nt, synthetic construct
  source 1..22: mol_type = other RNA
tcgccgtctccctcggccacag

SEQ ID NO: 150080 - RNA, 22 nt, synthetic construct
  source 1..22: mol_type = other RNA
tcgcctagataagaaaatgtga

SEQ ID NO: 150081 - RNA, 22 nt, synthetic construct
  source 1..22: mol_type = other RNA
tcgccttctcagaaggacacca

SEQ ID NO: 150082 - RNA, 22 nt, synthetic construct
  source 1..22: mol_type = other RNA
tcgcctttctcgcagcggggat

SEQ ID NO: 150083 - RNA, 22 nt, synthetic construct
  source 1..22: mol_type = other RNA
tcgcctttgttgccaggtggac

SEQ ID NO: 150084 - RNA, 22 nt, synthetic construct
  source 1..22: mol_type = other RNA
tcgcgcccagcccgtgtgttta

SEQ ID NO: 150085 - RNA, 22 nt, synthetic construct
  source 1..22: mol_type = other RNA
tcgcgcgcggcagggatgctgc

SEQ ID NO: 150086 - RNA, 22 nt, synthetic construct
  source 1..22: mol_type = other RNA
tcgcggacgcgcattttttaag

SEQ ID NO: 150087 - RNA, 22 nt, synthetic construct
  source 1..22: mol_type = other RNA
tcgcgggcaccttccctactca

SEQ ID NO: 150088 - RNA, 22 nt, synthetic construct
  source 1..22: mol_type = other RNA
tcgctaatctcaatcagggcct

SEQ ID NO: 150089 - RNA, 22 nt, synthetic construct
  source 1..22: mol_type = other RNA
tcgctatcagtagtttgctagt

SEQ ID NO: 150090 - RNA, 22 nt, synthetic construct
  source 1..22: mol_type = other RNA
tcgctctcctgtgccaagtccg

SEQ ID NO: 150091 - RNA, 22 nt, synthetic construct
  source 1..22: mol_type = other RNA
tcgctctgtcgcccaggcggaa

SEQ ID NO: 150092 - RNA, 22 nt, synthetic construct
  source 1..22: mol_type = other RNA
tcgctctgttgcccagactgga

SEQ ID NO: 150093 - RNA, 22 nt, synthetic construct
  source 1..22: mol_type = other RNA
tcgctcttggcttttggcagcg

SEQ ID NO: 150094 - RNA, 22 nt, synthetic construct
  source 1..22: mol_type = other RNA
tcgctcttttaaaaattacaac

SEQ ID NO: 150095 - RNA, 22 nt, synthetic construct
  source 1..22: mol_type = other RNA
tcgcttgaacctgaaaaacgga

SEQ ID NO: 150096 - RNA, 22 nt, synthetic construct
  source 1..22: mol_type = other RNA
tcgcttttggagctataattta

SEQ ID NO: 150097 - RNA, 22 nt, synthetic construct
  source 1..22: mol_type = other RNA
tcggaaatataaaaagcctctg

SEQ ID NO: 150098 - RNA, 22 nt, synthetic construct
  source 1..22: mol_type = other RNA
tcggaacaggctcaatacctga

SEQ ID NO: 150099 - RNA, 22 nt, synthetic construct
  source 1..22: mol_type = other RNA
tcggaactcctgtatgccgctg

SEQ ID NO: 150100 - RNA, 22 nt, synthetic construct
  source 1..22: mol_type = other RNA
tcggaaggaatgtgcttcctaa

SEQ ID NO: 150101 - RNA, 22 nt, synthetic construct
  source 1..22: mol_type = other RNA
tcggaaggcggaagttgcagtg

SEQ ID NO: 150102 - RNA, 22 nt, synthetic construct
  source 1..22: mol_type = other RNA
tcggataaggaagagtttatat

SEQ ID NO: 150103 - RNA, 22 nt, synthetic construct
  source 1..22: mol_type = other RNA
tcggatatttactaagaagtga

SEQ ID NO: 150104 - RNA, 22 nt, synthetic construct
  source 1..22: mol_type = other RNA
tcggatttaagagaggaagtga

SEQ ID NO: 150105 - RNA, 22 nt, synthetic construct
  source 1..22: mol_type = other RNA
tcggcacagctctcatgagtcc

SEQ ID NO: 150106 - RNA, 22 nt, synthetic construct
  source 1..22: mol_type = other RNA
tcggccaaccattactcttcta

SEQ ID NO: 150107 - RNA, 22 nt, synthetic construct
  source 1..22: mol_type = other RNA
tcggccaagatctgtttttcaa

SEQ ID NO: 150108 - RNA, 22 nt, synthetic construct
  source 1..22: mol_type = other RNA
tcggccacagcagggctcctcc

SEQ ID NO: 150109 - RNA, 22 nt, synthetic construct
  source 1..22: mol_type = other RNA
tcggccgacccagcccccaacc

SEQ ID NO: 150110 - RNA, 22 nt, synthetic construct
  source 1..22: mol_type = other RNA
tcggcctctactgactcccttt

SEQ ID NO: 150111 - RNA, 22 nt, synthetic construct
  source 1..22: mol_type = other RNA
tcggctccgggcctcccacctg

SEQ ID NO: 150112 - RNA, 22 nt, synthetic construct
  source 1..22: mol_type = other RNA
tcggctctgtcacccttgtaat

SEQ ID NO: 150113 - RNA, 22 nt, synthetic construct
  source 1..22: mol_type = other RNA
tcggctctgtgctgagatggtc

SEQ ID NO: 150114 - RNA, 22 nt, synthetic construct
  source 1..22: mol_type = other RNA
tcggcttactgcaacctccgtt

SEQ ID NO: 150115 - RNA, 22 nt, synthetic construct
  source 1..22: mol_type = other RNA
tcgggagtaacagacctctgaa

SEQ ID NO: 150116 - RNA, 22 nt, synthetic construct
  source 1..22: mol_type = other RNA
tcgggctgcctcagccgccgca

SEQ ID NO: 150117 - RNA, 22 nt, synthetic construct
  source 1..22: mol_type = other RNA
tcggggcctacagtggttccat

SEQ ID NO: 150118 - RNA, 22 nt, synthetic construct
  source 1..22: mol_type = other RNA
tcgggggagagcactggtttca

SEQ ID NO: 150119 - RNA, 22 nt, synthetic construct
  source 1..22: mol_type = other RNA
tcgggtgtcagaaaccatcgtt

SEQ ID NO: 150120 - RNA, 22 nt, synthetic construct
  source 1..22: mol_type = other RNA
tcgggtgtcagaattccatcag

SEQ ID NO: 150121 - RNA, 22 nt, synthetic construct
  source 1..22: mol_type = other RNA
tcgggttcaagccccagttctg

SEQ ID NO: 150122 - RNA, 22 nt, synthetic construct
  source 1..22: mol_type = other RNA
tcggtatgtacccaatggatta

SEQ ID NO: 150123 - RNA, 22 nt, synthetic construct
  source 1..22: mol_type = other RNA
tcggtatgttaataaccctgtt

SEQ ID NO: 150124 - RNA, 22 nt, synthetic construct
  source 1..22: mol_type = other RNA
tcggtcattctggagtgttttc

SEQ ID NO: 150125 - RNA, 22 nt, synthetic construct
  source 1..22: mol_type = other RNA
tcggtctacggacgcaggcaaa

SEQ ID NO: 150126 - RNA, 22 nt, synthetic construct
  source 1..22: mol_type = other RNA
tcggtctcaaaacaaacaaaca

SEQ ID NO: 150127 - RNA, 22 nt, synthetic construct
  source 1..22: mol_type = other RNA
tcggtctgtatttctgctttgg

SEQ ID NO: 150128 - RNA, 22 nt, synthetic construct
  source 1..22: mol_type = other RNA
tcggtggcattaaggacatcca

SEQ ID NO: 150129 - RNA, 22 nt, synthetic construct
  source 1..22: mol_type = other RNA
tcggttcttcaccgtgcaacta

SEQ ID NO: 150130 - RNA, 22 nt, synthetic construct
  source 1..22: mol_type = other RNA
tcggttttctagttagtttgtt

SEQ ID NO: 150131 - RNA, 22 nt, synthetic construct
  source 1..22: mol_type = other RNA
tcgtaaaaagccatttatcagc

SEQ ID NO: 150132 - RNA, 22 nt, synthetic construct
  source 1..22: mol_type = other RNA
tcgtaaaacctcatctctacta

SEQ ID NO: 150133 - RNA, 22 nt, synthetic construct
  source 1..22: mol_type = other RNA
tcgtaaaagctaatctactttc

SEQ ID NO: 150134 - RNA, 22 nt, synthetic construct
  source 1..22: mol_type = other RNA
tcgtaatgcgatgatcaaaacc

SEQ ID NO: 150135 - RNA, 22 nt, synthetic construct
  source 1..22: mol_type = other RNA
tcgtacctttcgctatcagtag

SEQ ID NO: 150136 - RNA, 22 nt, synthetic construct
  source 1..22: mol_type = other RNA
tcgtagcaggtttaggaagcac

SEQ ID NO: 150137 - RNA, 22 nt, synthetic construct
  source 1..22: mol_type = other RNA
tcgtagtaagttttgaaatcag

SEQ ID NO: 150138 - RNA, 22 nt, synthetic construct
  source 1..22: mol_type = other RNA
tcgtagttttttggtagatacc

SEQ ID NO: 150139 - RNA, 22 nt, synthetic construct
  source 1..22: mol_type = other RNA
tcgtatcttttaacagatggtc

SEQ ID NO: 150140 - RNA, 22 nt, synthetic construct
  source 1..22: mol_type = other RNA
tcgtatggaagatgggacttca

SEQ ID NO: 150141 - RNA, 22 nt, synthetic construct
  source 1..22: mol_type = other RNA
tcgtcaaggggagaggcctcat

SEQ ID NO: 150142 - RNA, 22 nt, synthetic construct
  source 1..22: mol_type = other RNA
tcgtcatctataaggtaatgac

SEQ ID NO: 150143 - RNA, 22 nt, synthetic construct
  source 1..22: mol_type = other RNA
tcgtcccccatcccctttaccc

SEQ ID NO: 150144 - RNA, 22 nt, synthetic construct
  source 1..22: mol_type = other RNA
tcgtccctaaacactgtagttc

SEQ ID NO: 150145 - RNA, 22 nt, synthetic construct
  source 1..22: mol_type = other RNA
tcgtcctcttcgggtgtcagaa

SEQ ID NO: 150146 - RNA, 22 nt, synthetic construct
  source 1..22: mol_type = other RNA
tcgtgaatttggtattcttatc

SEQ ID NO: 150147 - RNA, 22 nt, synthetic construct
  source 1..22: mol_type = other RNA
tcgtgagactattatgagcagt

SEQ ID NO: 150148 - RNA, 22 nt, synthetic construct
  source 1..22: mol_type = other RNA
tcgtgagggtttcagtgagtag

SEQ ID NO: 150149 - RNA, 22 nt, synthetic construct
  source 1..22: mol_type = other RNA
tcgtgatagtcttccaattgca

SEQ ID NO: 150150 - RNA, 22 nt, synthetic construct
  source 1..22: mol_type = other RNA
tcgtgcatgtctgcaggagcct

SEQ ID NO: 150151 - RNA, 22 nt, synthetic construct
  source 1..22: mol_type = other RNA
tcgtggcctcaagcagtcctgc

SEQ ID NO: 150152 - RNA, 22 nt, synthetic construct
  source 1..22: mol_type = other RNA
tcgtggttatagccataagagt

SEQ ID NO: 150153 - RNA, 22 nt, synthetic construct
  source 1..22: mol_type = other RNA
tcgtgtactgaaaccagtgctc

SEQ ID NO: 150154 - RNA, 22 nt, synthetic construct
  source 1..22: mol_type = other RNA
tcgtgtatgatttctaggccct

SEQ ID NO: 150155 - RNA, 22 nt, synthetic construct
  source 1..22: mol_type = other RNA
tcgtgtgagctctagccttgta

SEQ ID NO: 150156 - RNA, 22 nt, synthetic construct
  source 1..22: mol_type = other RNA
tcgtgtgtctcataaagccgga

SEQ ID NO: 150157 - RNA, 22 nt, synthetic construct
  source 1..22: mol_type = other RNA
tcgtgtgtggagtggggcacct

SEQ ID NO: 150158 - RNA, 22 nt, synthetic construct
  source 1..22: mol_type = other RNA
tcgttaatacttgtgtagcggg

SEQ ID NO: 150159 - RNA, 22 nt, synthetic construct
  source 1..22: mol_type = other RNA
tcgttatatcctcagggtagga

SEQ ID NO: 150160 - RNA, 22 nt, synthetic construct
  source 1..22: mol_type = other RNA
tcgttcaaaacatcatctaatt

SEQ ID NO: 150161 - RNA, 22 nt, synthetic construct
  source 1..22: mol_type = other RNA
tcgttcacactcgcactccact

SEQ ID NO: 150162 - RNA, 22 nt, synthetic construct
  source 1..22: mol_type = other RNA
tcgttcagtttagtaaatcttt

SEQ ID NO: 150163 - RNA, 22 nt, synthetic construct
  source 1..22: mol_type = other RNA
tcgttcatgttcaaggtgttcc

SEQ ID NO: 150164 - RNA, 22 nt, synthetic construct
  source 1..22: mol_type = other RNA
tcgttccagcagggtaaagtca

SEQ ID NO: 150165 - RNA, 22 nt, synthetic construct
  source 1..22: mol_type = other RNA
tcgttgagtacctctgggatgc

SEQ ID NO: 150166 - RNA, 22 nt, synthetic construct
  source 1..22: mol_type = other RNA
tcgttggatttatctttctaga

SEQ ID NO: 150167 - RNA, 22 nt, synthetic construct
  source 1..22: mol_type = other RNA
tcgtttatgcatttattagtag

SEQ ID NO: 150168 - RNA, 22 nt, synthetic construct
  source 1..22: mol_type = other RNA
tcgtttatttcttctccctctt

SEQ ID NO: 150169 - RNA, 22 nt, synthetic construct
  source 1..22: mol_type = other RNA
tcgtttcaatattaagagtctc

SEQ ID NO: 150170 - RNA, 22 nt, synthetic construct
  source 1..22: mol_type = other RNA
tcgtttcagattgcttgagaga

SEQ ID NO: 150171 - RNA, 22 nt, synthetic construct
  source 1..22: mol_type = other RNA
tcgtttgaggcttttcatagtc

SEQ ID NO: 150172 - RNA, 22 nt, synthetic construct
  source 1..22: mol_type = other RNA
tcgttttcaacaaaggttgaaa

SEQ ID NO: 150173 - RNA, 22 nt, synthetic construct
  source 1..22: mol_type = other RNA
tctaaaaacatccattactcgt

SEQ ID NO: 150174 - RNA, 22 nt, synthetic construct
  source 1..22: mol_type = other RNA
tctaaaaacgtgcaaactacca

SEQ ID NO: 150175 - RNA, 22 nt, synthetic construct
  source 1..22: mol_type = other RNA
tctaaaatcatcacagtatgca

SEQ ID NO: 150176 - RNA, 22 nt, synthetic construct
  source 1..22: mol_type = other RNA
tctaaaatggaagactttatgg

SEQ ID NO: 150177 - RNA, 22 nt, synthetic construct
  source 1..22: mol_type = other RNA
tctaaacacacgggctgggcgc

SEQ ID NO: 150178 - RNA, 22 nt, synthetic construct
  source 1..22: mol_type = other RNA
tctaaacctgaggtctttaaaa

SEQ ID NO: 150179 - RNA, 22 nt, synthetic construct
  source 1..22: mol_type = other RNA
tctaaaccttaaaagagtgaaa

SEQ ID NO: 150180 - RNA, 22 nt, synthetic construct
  source 1..22: mol_type = other RNA
tctaaacgtttggtgactgaat

SEQ ID NO: 150181 - RNA, 22 nt, synthetic construct
  source 1..22: mol_type = other RNA
tctaaactagttcaaccattgt

SEQ ID NO: 150182 - RNA, 22 nt, synthetic construct
  source 1..22: mol_type = other RNA
tctaaactggttttcctgatgg

SEQ ID NO: 150183 - RNA, 22 nt, synthetic construct
  source 1..22: mol_type = other RNA
tctaaagccaatcttcccaatc

SEQ ID NO: 150184 - RNA, 22 nt, synthetic construct
  source 1..22: mol_type = other RNA
tctaaagccaggctttcccagg

SEQ ID NO: 150185 - RNA, 22 nt, synthetic construct
  source 1..22: mol_type = other RNA
tctaaagtctatgctcttggtt

SEQ ID NO: 150186 - RNA, 22 nt, synthetic construct
  source 1..22: mol_type = other RNA
tctaaagttagaagtatcccag

SEQ ID NO: 150187 - RNA, 22 nt, synthetic construct
  source 1..22: mol_type = other RNA
tctaaataggtattcatgctgt

SEQ ID NO: 150188 - RNA, 22 nt, synthetic construct
  source 1..22: mol_type = other RNA
tctaaatcaacagtgtactagt

SEQ ID NO: 150189 - RNA, 22 nt, synthetic construct
  source 1..22: mol_type = other RNA
tctaaatggtgtgaagttgggc

SEQ ID NO: 150190 - RNA, 22 nt, synthetic construct
  source 1..22: mol_type = other RNA
tctaaattaagcttcgacagtc

SEQ ID NO: 150191 - RNA, 22 nt, synthetic construct
  source 1..22: mol_type = other RNA
tctaaattgaacagcctaaagt

SEQ ID NO: 150192 - RNA, 22 nt, synthetic construct
  source 1..22: mol_type = other RNA
tctaaattttaagtgcacaatg

SEQ ID NO: 150193 - RNA, 22 nt, synthetic construct
  source 1..22: mol_type = other RNA
tctaacaaaaatacttaagagc

SEQ ID NO: 150194 - RNA, 22 nt, synthetic construct
  source 1..22: mol_type = other RNA
tctaacaaaactaggctgtccc

SEQ ID NO: 150195 - RNA, 22 nt, synthetic construct
  source 1..22: mol_type = other RNA
tctaacaaaagatacacaagat

SEQ ID NO: 150196 - RNA, 22 nt, synthetic construct
  source 1..22: mol_type = other RNA
tctaacaaacgcattgtgatgt

SEQ ID NO: 150197 - RNA, 22 nt, synthetic construct
  source 1..22: mol_type = other RNA
tctaacaagaagctgttttggt

SEQ ID NO: 150198 - RNA, 22 nt, synthetic construct
  source 1..22: mol_type = other RNA
tctaacactttgggaggccaag

SEQ ID NO: 150199 - RNA, 22 nt, synthetic construct
  source 1..22: mol_type = other RNA
tctaacagaaatacaatgtgag

SEQ ID NO: 150200 - RNA, 22 nt, synthetic construct
  source 1..22: mol_type = other RNA
tctaacataatcaaattcacag

SEQ ID NO: 150201 - RNA, 22 nt, synthetic construct
  source 1..22: mol_type = other RNA
tctaacattatcttctaccttt

SEQ ID NO: 150202 - RNA, 22 nt, synthetic construct
  source 1..22: mol_type = other RNA
tctaaccattaacagctcagaa

SEQ ID NO: 150203 - RNA, 22 nt, synthetic construct
  source 1..22: mol_type = other RNA
tctaaccctcaaatgccataga

SEQ ID NO: 150204 - RNA, 22 nt, synthetic construct
  source 1..22: mol_type = other RNA
tctaaccctcaatccccatctg

SEQ ID NO: 150205 - RNA, 22 nt, synthetic construct
  source 1..22: mol_type = other RNA
tctaaccctcctcctctacaag

SEQ ID NO: 150206 - RNA, 22 nt, synthetic construct
  source 1..22: mol_type = other RNA
tctaagagataactaatgagaa

SEQ ID NO: 150207 - RNA, 22 nt, synthetic construct
  source 1..22: mol_type = other RNA
tctaagagccaaagacattgtc

SEQ ID NO: 150208 - RNA, 22 nt, synthetic construct
  source 1..22: mol_type = other RNA
tctaagccatgtttctcctgca

SEQ ID NO: 150209 - RNA, 22 nt, synthetic construct
  source 1..22: mol_type = other RNA
tctaagcctacctcccttcaca

SEQ ID NO: 150210 - RNA, 22 nt, synthetic construct
  source 1..22: mol_type = other RNA
tctaagcctactgctctgtcct

SEQ ID NO: 150211 - RNA, 22 nt, synthetic construct
  source 1..22: mol_type = other RNA
tctaagctaagagttttatagt

SEQ ID NO: 150212 - RNA, 22 nt, synthetic construct
  source 1..22: mol_type = other RNA
tctaaggattatggctagaaac

SEQ ID NO: 150213 - RNA, 22 nt, synthetic construct
  source 1..22: mol_type = other RNA
tctaaggttctgctatgctgaa

SEQ ID NO: 150214 - RNA, 22 nt, synthetic construct
  source 1..22: mol_type = other RNA
tctaagtcagcctgggcacacg

SEQ ID NO: 150215 - RNA, 22 nt, synthetic construct
  source 1..22: mol_type = other RNA
tctaagtctcaacctactttaa

SEQ ID NO: 150216 - RNA, 22 nt, synthetic construct
  source 1..22: mol_type = other RNA
tctaagtttgccaaagattctt

SEQ ID NO: 150217 - RNA, 22 nt, synthetic construct
  source 1..22: mol_type = other RNA
tctaataaaaagcctctctgat

SEQ ID NO: 150218 - RNA, 22 nt, synthetic construct
  source 1..22: mol_type = other RNA
tctaataaaagctggagttatt

SEQ ID NO: 150219 - RNA, 22 nt, synthetic construct
  source 1..22: mol_type = other RNA
tctaataaaatagcaggattct

SEQ ID NO: 150220 - RNA, 22 nt, synthetic construct
  source 1..22: mol_type = other RNA
tctaataaacgcggaatgaagc

SEQ ID NO: 150221 - RNA, 22 nt, synthetic construct
  source 1..22: mol_type = other RNA
tctaataacagcctaagcaaat

SEQ ID NO: 150222 - RNA, 22 nt, synthetic construct
  source 1..22: mol_type = other RNA
tctaatagctagtgatgttgag

SEQ ID NO: 150223 - RNA, 22 nt, synthetic construct
  source 1..22: mol_type = other RNA
tctaataggaagtggctagacg

SEQ ID NO: 150224 - RNA, 22 nt, synthetic construct
  source 1..22: mol_type = other RNA
tctaatagttcacctctccggg

SEQ ID NO: 150225 - RNA, 22 nt, synthetic construct
  source 1..22: mol_type = other RNA
tctaatatggttcctagaaaat

SEQ ID NO: 150226 - RNA, 22 nt, synthetic construct
  source 1..22: mol_type = other RNA
tctaatcaggttgggcttatca

SEQ ID NO: 150227 - RNA, 22 nt, synthetic construct
  source 1..22: mol_type = other RNA
tctaatcctttgcacacaccaa

SEQ ID NO: 150228 - RNA, 22 nt, synthetic construct
  source 1..22: mol_type = other RNA
tctaatgaactcccagaactcg

SEQ ID NO: 150229 - RNA, 22 nt, synthetic construct
  source 1..22: mol_type = other RNA
tctaatgcaagagttaaaactc

SEQ ID NO: 150230 - RNA, 22 nt, synthetic construct
  source 1..22: mol_type = other RNA
tctaatgcccattaaaaccatg

SEQ ID NO: 150231 - RNA, 22 nt, synthetic construct
  source 1..22: mol_type = other RNA
tctaatggggaaatagatgcct

SEQ ID NO: 150232 - RNA, 22 nt, synthetic construct
  source 1..22: mol_type = other RNA
tctaatgggtacagggtttctg

SEQ ID NO: 150233 - RNA, 22 nt, synthetic construct
  source 1..22: mol_type = other RNA
tctaatgtaaacagcatactgt

SEQ ID NO: 150234 - RNA, 22 nt, synthetic construct
  source 1..22: mol_type = other RNA
tctaatgtgcaaggagagaaaa

SEQ ID NO: 150235 - RNA, 22 nt, synthetic construct
  source 1..22: mol_type = other RNA
tctaattagaaactggtgaact

SEQ ID NO: 150236 - RNA, 22 nt, synthetic construct
  source 1..22: mol_type = other RNA
tctaattcacatttaagaaggg

SEQ ID NO: 150237 - RNA, 22 nt, synthetic construct
  source 1..22: mol_type = other RNA
tctaattcgaaaatgggccaaa

SEQ ID NO: 150238 - RNA, 22 nt, synthetic construct
  source 1..22: mol_type = other RNA
tctaattctgacaactgggaga

SEQ ID NO: 150239 - RNA, 22 nt, synthetic construct
  source 1..22: mol_type = other RNA
tctaatttccaagaaccctttg

SEQ ID NO: 150240 - RNA, 22 nt, synthetic construct
  source 1..22: mol_type = other RNA
tctaatttcccatttgatttct

SEQ ID NO: 150241 - RNA, 22 nt, synthetic construct
  source 1..22: mol_type = other RNA
tctaatttctttaaaaccagag

SEQ ID NO: 150242 - RNA, 22 nt, synthetic construct
  source 1..22: mol_type = other RNA
tctaatttgtgaaccttgaagt

SEQ ID NO: 150243 - RNA, 22 nt, synthetic construct
  source 1..22: mol_type = other RNA
tctacaaaacagggttattaac

SEQ ID NO: 150244 - RNA, 22 nt, synthetic construct
  source 1..22: mol_type = other RNA
tctacaaaaggaggaactaatt

SEQ ID NO: 150245 - RNA, 22 nt, synthetic construct
  source 1..22: mol_type = other RNA
tctacaaaaggtttccagtggc

SEQ ID NO: 150246 - RNA, 22 nt, synthetic construct
  source 1..22: mol_type = other RNA
tctacaaaccttcttatttcct

SEQ ID NO: 150247 - RNA, 22 nt, synthetic construct
  source 1..22: mol_type = other RNA
tctacaatggttgaactagttt

SEQ ID NO: 150248 - RNA, 22 nt, synthetic construct
  source 1..22: mol_type = other RNA
tctacacaaaaatccagataaa

SEQ ID NO: 150249 - RNA, 22 nt, synthetic construct
  source 1..22: mol_type = other RNA
tctacacaacatgttttatttc

SEQ ID NO: 150250 - RNA, 22 nt, synthetic construct
  source 1..22: mol_type = other RNA
tctacagaaaacccttcatcat

SEQ ID NO: 150251 - RNA, 22 nt, synthetic construct
  source 1..22: mol_type = other RNA
tctacagaatgttcaagtattt

SEQ ID NO: 150252 - RNA, 22 nt, synthetic construct
  source 1..22: mol_type = other RNA
tctacagaggattttggattgc

SEQ ID NO: 150253 - RNA, 22 nt, synthetic construct
  source 1..22: mol_type = other RNA
tctacagattcaatgcaatact

SEQ ID NO: 150254 - RNA, 22 nt, synthetic construct
  source 1..22: mol_type = other RNA
tctacagggaaccgtaacttct

SEQ ID NO: 150255 - RNA, 22 nt, synthetic construct
  source 1..22: mol_type = other RNA
tctacaggtcggaaggaatgtg

SEQ ID NO: 150256 - RNA, 22 nt, synthetic construct
  source 1..22: mol_type = other RNA
tctacagtattacacagaaagc

SEQ ID NO: 150257 - RNA, 22 nt, synthetic construct
  source 1..22: mol_type = other RNA
tctacagttaacaatactgcat

SEQ ID NO: 150258 - RNA, 22 nt, synthetic construct
  source 1..22: mol_type = other RNA
tctacatcacagacagggaatg

SEQ ID NO: 150259 - RNA, 22 nt, synthetic construct
  source 1..22: mol_type = other RNA
tctacatccccccacccctgct

SEQ ID NO: 150260 - RNA, 22 nt, synthetic construct
  source 1..22: mol_type = other RNA
tctacatctggatcctgtctca

SEQ ID NO: 150261 - RNA, 22 nt, synthetic construct
  source 1..22: mol_type = other RNA
tctacatgtacgccaattttca

SEQ ID NO: 150262 - RNA, 22 nt, synthetic construct
  source 1..22: mol_type = other RNA
tctaccaaaaaactacgagtat

SEQ ID NO: 150263 - RNA, 22 nt, synthetic construct
  source 1..22: mol_type = other RNA
tctaccaaaatataaatacgtg

SEQ ID NO: 150264 - RNA, 22 nt, synthetic construct
  source 1..22: mol_type = other RNA
tctaccaaacattgaaggcaga

SEQ ID NO: 150265 - RNA, 22 nt, synthetic construct
  source 1..22: mol_type = other RNA
tctaccatgttgttcttttcaa

SEQ ID NO: 150266 - RNA, 22 nt, synthetic construct
  source 1..22: mol_type = other RNA
tctacccactattgaaagccct

SEQ ID NO: 150267 - RNA, 22 nt, synthetic construct
  source 1..22: mol_type = other RNA
tctacccagcactctgaatcac

SEQ ID NO: 150268 - RNA, 22 nt, synthetic construct
  source 1..22: mol_type = other RNA
tctaccctttccaaattcaaag

SEQ ID NO: 150269 - RNA, 22 nt, synthetic construct
  source 1..22: mol_type = other RNA
tctacctggagcctgaggacac

SEQ ID NO: 150270 - RNA, 22 nt, synthetic construct
  source 1..22: mol_type = other RNA
tctacctgtctttcccattacc

SEQ ID NO: 150271 - RNA, 22 nt, synthetic construct
  source 1..22: mol_type = other RNA
tctacctgtgtaacaaacctgc

SEQ ID NO: 150272 - RNA, 22 nt, synthetic construct
  source 1..22: mol_type = other RNA
tctaccttgaaaatgcccttat

SEQ ID NO: 150273 - RNA, 22 nt, synthetic construct
  source 1..22: mol_type = other RNA
tctacctttggctactgtaaac

SEQ ID NO: 150274 - RNA, 22 nt, synthetic construct
  source 1..22: mol_type = other RNA
tctacggacgcaggcaaacagc

SEQ ID NO: 150275 - RNA, 22 nt, synthetic construct
  source 1..22: mol_type = other RNA
tctactaaacattaaggaagaa

SEQ ID NO: 150276 - RNA, 22 nt, synthetic construct
  source 1..22: mol_type = other RNA
tctactagtataagagaaggaa

SEQ ID NO: 150277 - RNA, 22 nt, synthetic construct
  source 1..22: mol_type = other RNA
tctactcactgtactactgacc

SEQ ID NO: 150278 - RNA, 22 nt, synthetic construct
  source 1..22: mol_type = other RNA
tctactctgcctcagttgacat

SEQ ID NO: 150279 - RNA, 22 nt, synthetic construct
  source 1..22: mol_type = other RNA
tctactcttttgtttttggggg

SEQ ID NO: 150280 - RNA, 22 nt, synthetic construct
  source 1..22: mol_type = other RNA
tctactgactccctttttaggt

SEQ ID NO: 150281 - RNA, 22 nt, synthetic construct
  source 1..22: mol_type = other RNA
tctactggggtcttagttctgc

SEQ ID NO: 150282 - RNA, 22 nt, synthetic construct
  source 1..22: mol_type = other RNA
tctactgtgaattcactaatgc

SEQ ID NO: 150283 - RNA, 22 nt, synthetic construct
  source 1..22: mol_type = other RNA
tctacttatcttttctagtttc

SEQ ID NO: 150284 - RNA, 22 nt, synthetic construct
  source 1..22: mol_type = other RNA
tctactttcacataaggtatat

SEQ ID NO: 150285 - RNA, 22 nt, synthetic construct
  source 1..22: mol_type = other RNA
tctactttctaatcctttgcac

SEQ ID NO: 150286 - RNA, 22 nt, synthetic construct
  source 1..22: mol_type = other RNA
tctagaaagataaatccaacga

SEQ ID NO: 150287 - RNA, 22 nt, synthetic construct
  source 1..22: mol_type = other RNA
tctagaaaggagggactgaaac

SEQ ID NO: 150288 - RNA, 22 nt, synthetic construct
  source 1..22: mol_type = other RNA
tctagaacttatgcatcttgca

SEQ ID NO: 150289 - RNA, 22 nt, synthetic construct
  source 1..22: mol_type = other RNA
tctagaatgcatccctcctctg

SEQ ID NO: 150290 - RNA, 22 nt, synthetic construct
  source 1..22: mol_type = other RNA
tctagagatttgctgtataaca

SEQ ID NO: 150291 - RNA, 22 nt, synthetic construct
  source 1..22: mol_type = other RNA
tctagattcatatgctttgagc

SEQ ID NO: 150292 - RNA, 22 nt, synthetic construct
  source 1..22: mol_type = other RNA
tctagcaaacaaacacactggg

SEQ ID NO: 150293 - RNA, 22 nt, synthetic construct
  source 1..22: mol_type = other RNA
tctagcacagaaccatgtaaca

SEQ ID NO: 150294 - RNA, 22 nt, synthetic construct
  source 1..22: mol_type = other RNA
tctagccaaagcaagccttggc

SEQ ID NO: 150295 - RNA, 22 nt, synthetic construct
  source 1..22: mol_type = other RNA
tctagccaagggtttgtcaatt

SEQ ID NO: 150296 - RNA, 22 nt, synthetic construct
  source 1..22: mol_type = other RNA
tctagccacttcctattagaag

SEQ ID NO: 150297 - RNA, 22 nt, synthetic construct
  source 1..22: mol_type = other RNA
tctagccataatccttagatta

SEQ ID NO: 150298 - RNA, 22 nt, synthetic construct
  source 1..22: mol_type = other RNA
tctagcccagcttccgggactt

SEQ ID NO: 150299 - RNA, 22 nt, synthetic construct
  source 1..22: mol_type = other RNA
tctagcctccagaaaaccagaa

SEQ ID NO: 150300 - RNA, 22 nt, synthetic construct
  source 1..22: mol_type = other RNA
tctagccttgtactgtgtggct

SEQ ID NO: 150301 - RNA, 22 nt, synthetic construct
  source 1..22: mol_type = other RNA
tctagctccccattccctgtct

SEQ ID NO: 150302 - RNA, 22 nt, synthetic construct
  source 1..22: mol_type = other RNA
tctagctcctgggaaaaggatt

SEQ ID NO: 150303 - RNA, 22 nt, synthetic construct
  source 1..22: mol_type = other RNA
tctagctttcagcactgctatt

SEQ ID NO: 150304 - RNA, 22 nt, synthetic construct
  source 1..22: mol_type = other RNA
tctaggaaaagacttgaggttt

SEQ ID NO: 150305 - RNA, 22 nt, synthetic construct
  source 1..22: mol_type = other RNA
tctaggaaacactgctcagaag

SEQ ID NO: 150306 - RNA, 22 nt, synthetic construct
  source 1..22: mol_type = other RNA
tctaggaaccatattagagtga

SEQ ID NO: 150307 - RNA, 22 nt, synthetic construct
  source 1..22: mol_type = other RNA
tctaggaggtctaagagataac

SEQ ID NO: 150308 - RNA, 22 nt, synthetic construct
  source 1..22: mol_type = other RNA
tctaggagtacagtgcatacca

SEQ ID NO: 150309 - RNA, 22 nt, synthetic construct
  source 1..22: mol_type = other RNA
tctaggcatataaactggaagg

SEQ ID NO: 150310 - RNA, 22 nt, synthetic construct
  source 1..22: mol_type = other RNA
tctaggcatataataagcagaa

SEQ ID NO: 150311 - RNA, 22 nt, synthetic construct
  source 1..22: mol_type = other RNA
tctaggcatctatttccccatt

SEQ ID NO: 150312 - RNA, 22 nt, synthetic construct
  source 1..22: mol_type = other RNA
tctaggccctaaccccagagat

SEQ ID NO: 150313 - RNA, 22 nt, synthetic construct
  source 1..22: mol_type = other RNA
tctaggcgaaatatctccctca

SEQ ID NO: 150314 - RNA, 22 nt, synthetic construct
  source 1..22: mol_type = other RNA
tctaggctaatgtgtgttccag

SEQ ID NO: 150315 - RNA, 22 nt, synthetic construct
  source 1..22: mol_type = other RNA
tctaggcttaaaattcttccag

SEQ ID NO: 150316 - RNA, 22 nt, synthetic construct
  source 1..22: mol_type = other RNA
tctaggtagtttctttgaactt

SEQ ID NO: 150317 - RNA, 22 nt, synthetic construct
  source 1..22: mol_type = other RNA
tctaggttatctgttttcttac

SEQ ID NO: 150318 - RNA, 22 nt, synthetic construct
  source 1..22: mol_type = other RNA
tctagtaacttggtcgaaaacc

SEQ ID NO: 150319 - RNA, 22 nt, synthetic construct
  source 1..22: mol_type = other RNA
tctagtcacatttgctttacta

SEQ ID NO: 150320 - RNA, 22 nt, synthetic construct
  source 1..22: mol_type = other RNA
tctagtccatgaagaaaacact

SEQ ID NO: 150321 - RNA, 22 nt, synthetic construct
  source 1..22: mol_type = other RNA
tctagtgaagtcaatttcagat

SEQ ID NO: 150322 - RNA, 22 nt, synthetic construct
  source 1..22: mol_type = other RNA
tctagtgaatgagaccaaatgc

SEQ ID NO: 150323 - RNA, 22 nt, synthetic construct
  source 1..22: mol_type = other RNA
tctagtgatgggagatggacac

SEQ ID NO: 150324 - RNA, 22 nt, synthetic construct
  source 1..22: mol_type = other RNA
tctagtggtgcttaattcaaac

SEQ ID NO: 150325 - RNA, 22 nt, synthetic construct
  source 1..22: mol_type = other RNA
tctagtgtctcagcctcccaag

SEQ ID NO: 150326 - RNA, 22 nt, synthetic construct
  source 1..22: mol_type = other RNA
tctagtgtgcatgtgttgtgca

SEQ ID NO: 150327 - RNA, 22 nt, synthetic construct
  source 1..22: mol_type = other RNA
tctagttaataaaggtgctaat

SEQ ID NO: 150328 - RNA, 22 nt, synthetic construct
  source 1..22: mol_type = other RNA
tctagttaccactagcaaacta

SEQ ID NO: 150329 - RNA, 22 nt, synthetic construct
  source 1..22: mol_type = other RNA
tctagttagtttgttgacccaa

SEQ ID NO: 150330 - RNA, 22 nt, synthetic construct
  source 1..22: mol_type = other RNA
tctagttctaataaacgcggaa

SEQ ID NO: 150331 - RNA, 22 nt, synthetic construct
  source 1..22: mol_type = other RNA
tctagttctagctctgtctttt

SEQ ID NO: 150332 - RNA, 22 nt, synthetic construct
  source 1..22: mol_type = other RNA
tctagttgcacggtgaagaacc

SEQ ID NO: 150333 - RNA, 22 nt, synthetic construct
  source 1..22: mol_type = other RNA
tctagtttctttttgttttctc

SEQ ID NO: 150334 - RNA, 22 nt, synthetic construct
  source 1..22: mol_type = other RNA
tctagtttgaggtgtacaatta

SEQ ID NO: 150335 - RNA, 22 nt, synthetic construct
  source 1..22: mol_type = other RNA
tctagttttccagtatattcat

SEQ ID NO: 150336 - RNA, 22 nt, synthetic construct
  source 1..22: mol_type = other RNA
tctataattctgccttcaatgt

SEQ ID NO: 150337 - RNA, 22 nt, synthetic construct
  source 1..22: mol_type = other RNA
tctatacttcatctttcctgat

SEQ ID NO: 150338 - RNA, 22 nt, synthetic construct
  source 1..22: mol_type = other RNA
tctataggcaatgagtctgaca

SEQ ID NO: 150339 - RNA, 22 nt, synthetic construct
  source 1..22: mol_type = other RNA
tctataggtagtacatattcat

SEQ ID NO: 150340 - RNA, 22 nt, synthetic construct
  source 1..22: mol_type = other RNA
tctatagtcattccgctaaaca

SEQ ID NO: 150341 - RNA, 22 nt, synthetic construct
  source 1..22: mol_type = other RNA
tctatagtggctgcaccatttt

SEQ ID NO: 150342 - RNA, 22 nt, synthetic construct
  source 1..22: mol_type = other RNA
tctatagtttaattgggggaaa

SEQ ID NO: 150343 - RNA, 22 nt, synthetic construct
  source 1..22: mol_type = other RNA
tctatcaatctcacacctgggt

SEQ ID NO: 150344 - RNA, 22 nt, synthetic construct
  source 1..22: mol_type = other RNA
tctatcagggctgaaaaacacc

SEQ ID NO: 150345 - RNA, 22 nt, synthetic construct
  source 1..22: mol_type = other RNA
tctatcatcaagacagagctcc

SEQ ID NO: 150346 - RNA, 22 nt, synthetic construct
  source 1..22: mol_type = other RNA
tctatccaccactccaccttag

SEQ ID NO: 150347 - RNA, 22 nt, synthetic construct
  source 1..22: mol_type = other RNA
tctatccagtgacacctgaggg

SEQ ID NO: 150348 - RNA, 22 nt, synthetic construct
  source 1..22: mol_type = other RNA
tctatctctcagatctgagttt

SEQ ID NO: 150349 - RNA, 22 nt, synthetic construct
  source 1..22: mol_type = other RNA
tctatctgaacattttagctgg

SEQ ID NO: 150350 - RNA, 22 nt, synthetic construct
  source 1..22: mol_type = other RNA
tctatctgaactttcgaagtgg

SEQ ID NO: 150351 - RNA, 22 nt, synthetic construct
  source 1..22: mol_type = other RNA
tctatctttgggaaaatctctg

SEQ ID NO: 150352 - RNA, 22 nt, synthetic construct
  source 1..22: mol_type = other RNA
tctatgaatttgcctattctgg

SEQ ID NO: 150353 - RNA, 22 nt, synthetic construct
  source 1..22: mol_type = other RNA
tctatgcagaaatctaccaaac

SEQ ID NO: 150354 - RNA, 22 nt, synthetic construct
  source 1..22: mol_type = other RNA
tctatgcatactgcagcacttt

SEQ ID NO: 150355 - RNA, 22 nt, synthetic construct
  source 1..22: mol_type = other RNA
tctatgctcttggtttcttcaa

SEQ ID NO: 150356 - RNA, 22 nt, synthetic construct
  source 1..22: mol_type = other RNA
tctatggcaggcaccttcagaa

SEQ ID NO: 150357 - RNA, 22 nt, synthetic construct
  source 1..22: mol_type = other RNA
tctatggcatttgagggttaga

SEQ ID NO: 150358 - RNA, 22 nt, synthetic construct
  source 1..22: mol_type = other RNA
tctatgtcccctggggcctcag

SEQ ID NO: 150359 - RNA, 22 nt, synthetic construct
  source 1..22: mol_type = other RNA
tctatgtgacaaacacttttca

SEQ ID NO: 150360 - RNA, 22 nt, synthetic construct
  source 1..22: mol_type = other RNA
tctatgtgacagaatgcatctt

SEQ ID NO: 150361 - RNA, 22 nt, synthetic construct
  source 1..22: mol_type = other RNA
tctattaaatcatgatgtttgg

SEQ ID NO: 150362 - RNA, 22 nt, synthetic construct
  source 1..22: mol_type = other RNA
tctattaacagaagggtatata

SEQ ID NO: 150363 - RNA, 22 nt, synthetic construct
  source 1..22: mol_type = other RNA
tctattcattaccaggctggaa

SEQ ID NO: 150364 - RNA, 22 nt, synthetic construct
  source 1..22: mol_type = other RNA
tctattccaaatgtctgtcttt

SEQ ID NO: 150365 - RNA, 22 nt, synthetic construct
  source 1..22: mol_type = other RNA
tctattccagagaattcagagt

SEQ ID NO: 150366 - RNA, 22 nt, synthetic construct
  source 1..22: mol_type = other RNA
tctattccattgttctctttgt

SEQ ID NO: 150367 - RNA, 22 nt, synthetic construct
  source 1..22: mol_type = other RNA
tctattcccctggatcccccag

SEQ ID NO: 150368 - RNA, 22 nt, synthetic construct
  source 1..22: mol_type = other RNA
tctattccctacattgccttca

SEQ ID NO: 150369 - RNA, 22 nt, synthetic construct
  source 1..22: mol_type = other RNA
tctatttccccattagagtaag

SEQ ID NO: 150370 - RNA, 22 nt, synthetic construct
  source 1..22: mol_type = other RNA
tctatttctttccattcaatcc

SEQ ID NO: 150371 - RNA, 22 nt, synthetic construct
  source 1..22: mol_type = other RNA
tctattttcctaaaactcccca

SEQ ID NO: 150372 - RNA, 22 nt, synthetic construct
  source 1..22: mol_type = other RNA
tctatttttctgcaattggaag

SEQ ID NO: 150373 - RNA, 22 nt, synthetic construct
  source 1..22: mol_type = other RNA
tctatttttgtctggtggacaa

SEQ ID NO: 150374 - RNA, 22 nt, synthetic construct
  source 1..22: mol_type = other RNA
tctcaaaaatttaagcacagaa

SEQ ID NO: 150375 - RNA, 22 nt, synthetic construct
  source 1..22: mol_type = other RNA
tctcaaaacaaacaaacagaaa

SEQ ID NO: 150376 - RNA, 22 nt, synthetic construct
  source 1..22: mol_type = other RNA
tctcaaacagcctaattgtaca

SEQ ID NO: 150377 - RNA, 22 nt, synthetic construct
  source 1..22: mol_type = other RNA
tctcaaacaggatacaaaaagc

SEQ ID NO: 150378 - RNA, 22 nt, synthetic construct
  source 1..22: mol_type = other RNA
tctcaaactccaagtctcatgc

SEQ ID NO: 150379 - RNA, 22 nt, synthetic construct
  source 1..22: mol_type = other RNA
tctcaaactgtgtgcttggagt

SEQ ID NO: 150380 - RNA, 22 nt, synthetic construct
  source 1..22: mol_type = other RNA
tctcaaagcccaccagcataag

SEQ ID NO: 150381 - RNA, 22 nt, synthetic construct
  source 1..22: mol_type = other RNA
tctcaaatgaacaggttcttca

SEQ ID NO: 150382 - RNA, 22 nt, synthetic construct
  source 1..22: mol_type = other RNA
tctcaacactgtgttcttttcc

SEQ ID NO: 150383 - RNA, 22 nt, synthetic construct
  source 1..22: mol_type = other RNA
tctcaacacttcagtggtaagg

SEQ ID NO: 150384 - RNA, 22 nt, synthetic construct
  source 1..22: mol_type = other RNA
tctcaacctactttaaatcagg

SEQ ID NO: 150385 - RNA, 22 nt, synthetic construct
  source 1..22: mol_type = other RNA
tctcaacctttgcctcctgggt

SEQ ID NO: 150386 - RNA, 22 nt, synthetic construct
  source 1..22: mol_type = other RNA
tctcaactggcccctccatgga

SEQ ID NO: 150387 - RNA, 22 nt, synthetic construct
  source 1..22: mol_type = other RNA
tctcaacttagccttggtaaaa

SEQ ID NO: 150388 - RNA, 22 nt, synthetic construct
  source 1..22: mol_type = other RNA
tctcaacttcctgttttagtgg

SEQ ID NO: 150389 - RNA, 22 nt, synthetic construct
  source 1..22: mol_type = other RNA
tctcaagaaggtatcatcggaa

SEQ ID NO: 150390 - RNA, 22 nt, synthetic construct
  source 1..22: mol_type = other RNA
tctcaagattgtgtgatttcat

SEQ ID NO: 150391 - RNA, 22 nt, synthetic construct
  source 1..22: mol_type = other RNA
tctcaagcaatctgaaacgacc

SEQ ID NO: 150392 - RNA, 22 nt, synthetic construct
  source 1..22: mol_type = other RNA
tctcaagtaattgttttccctt

SEQ ID NO: 150393 - RNA, 22 nt, synthetic construct
  source 1..22: mol_type = other RNA
tctcaataaggaaagcacgttt

SEQ ID NO: 150394 - RNA, 22 nt, synthetic construct
  source 1..22: mol_type = other RNA
tctcaatagtgtcctttgatgc

SEQ ID NO: 150395 - RNA, 22 nt, synthetic construct
  source 1..22: mol_type = other RNA
tctcaatcagggccttcccaaa

SEQ ID NO: 150396 - RNA, 22 nt, synthetic construct
  source 1..22: mol_type = other RNA
tctcaatcccttccccaccttt

SEQ ID NO: 150397 - RNA, 22 nt, synthetic construct
  source 1..22: mol_type = other RNA
tctcaatctcctgatccacctg

SEQ ID NO: 150398 - RNA, 22 nt, synthetic construct
  source 1..22: mol_type = other RNA
tctcaattaatgcccaatcaaa

SEQ ID NO: 150399 - RNA, 22 nt, synthetic construct
  source 1..22: mol_type = other RNA
tctcaattcagaagctaaattt

SEQ ID NO: 150400 - RNA, 22 nt, synthetic construct
  source 1..22: mol_type = other RNA
tctcacacctgggtatacagca

SEQ ID NO: 150401 - RNA, 22 nt, synthetic construct
  source 1..22: mol_type = other RNA
tctcacactgttgtccaggcca

SEQ ID NO: 150402 - RNA, 22 nt, synthetic construct
  source 1..22: mol_type = other RNA
tctcaccaacatccacagcttt

SEQ ID NO: 150403 - RNA, 22 nt, synthetic construct
  source 1..22: mol_type = other RNA
tctcaccctcaggactctgctc

SEQ ID NO: 150404 - RNA, 22 nt, synthetic construct
  source 1..22: mol_type = other RNA
tctcacctcaaggccaactgtc

SEQ ID NO: 150405 - RNA, 22 nt, synthetic construct
  source 1..22: mol_type = other RNA
tctcacgatactttttattttc

SEQ ID NO: 150406 - RNA, 22 nt, synthetic construct
  source 1..22: mol_type = other RNA
tctcacgtcaccgcaacctccg

SEQ ID NO: 150407 - RNA, 22 nt, synthetic construct
  source 1..22: mol_type = other RNA
tctcactcacctagctgttttc

SEQ ID NO: 150408 - RNA, 22 nt, synthetic construct
  source 1..22: mol_type = other RNA
tctcactccaaagcaaacgtgc

SEQ ID NO: 150409 - RNA, 22 nt, synthetic construct
  source 1..22: mol_type = other RNA
tctcactcttaccaaggctgga

SEQ ID NO: 150410 - RNA, 22 nt, synthetic construct
  source 1..22: mol_type = other RNA
tctcactttgttgctcaggctg

SEQ ID NO: 150411 - RNA, 22 nt, synthetic construct
  source 1..22: mol_type = other RNA
tctcagaaattataagcttcct

SEQ ID NO: 150412 - RNA, 22 nt, synthetic construct
  source 1..22: mol_type = other RNA
tctcagagggaaactgtttttg

SEQ ID NO: 150413 - RNA, 22 nt, synthetic construct
  source 1..22: mol_type = other RNA
tctcagagtatatatgctccct

SEQ ID NO: 150414 - RNA, 22 nt, synthetic construct
  source 1..22: mol_type = other RNA
tctcagatctgagtttgctctg

SEQ ID NO: 150415 - RNA, 22 nt, synthetic construct
  source 1..22: mol_type = other RNA
tctcagatctgttgcagtcccc

SEQ ID NO: 150416 - RNA, 22 nt, synthetic construct
  source 1..22: mol_type = other RNA
tctcagatgtctccattttgcc

SEQ ID NO: 150417 - RNA, 22 nt, synthetic construct
  source 1..22: mol_type = other RNA
tctcagcacagagccgaaatgc

SEQ ID NO: 150418 - RNA, 22 nt, synthetic construct
  source 1..22: mol_type = other RNA
tctcagccttttctgatttgct

SEQ ID NO: 150419 - RNA, 22 nt, synthetic construct
  source 1..22: mol_type = other RNA
tctcagctatagcttctgagct

SEQ ID NO: 150420 - RNA, 22 nt, synthetic construct
  source 1..22: mol_type = other RNA
tctcagctcattacagtctcga

SEQ ID NO: 150421 - RNA, 22 nt, synthetic construct
  source 1..22: mol_type = other RNA
tctcagctcctcagaaggccaa

SEQ ID NO: 150422 - RNA, 22 nt, synthetic construct
  source 1..22: mol_type = other RNA
tctcaggagcctagtcatccac

SEQ ID NO: 150423 - RNA, 22 nt, synthetic construct
  source 1..22: mol_type = other RNA
tctcagggcctgcttttggaag

SEQ ID NO: 150424 - RNA, 22 nt, synthetic construct
  source 1..22: mol_type = other RNA
tctcaggggtaaaggggatggg

SEQ ID NO: 150425 - RNA, 22 nt, synthetic construct
  source 1..22: mol_type = other RNA
tctcagtatcctttcaaggtat

SEQ ID NO: 150426 - RNA, 22 nt, synthetic construct
  source 1..22: mol_type = other RNA
tctcagtcataatttgtgtcct

SEQ ID NO: 150427 - RNA, 22 nt, synthetic construct
  source 1..22: mol_type = other RNA
tctcagtcccaaatgggagcat

SEQ ID NO: 150428 - RNA, 22 nt, synthetic construct
  source 1..22: mol_type = other RNA
tctcagtggccctgttggcctg

SEQ ID NO: 150429 - RNA, 22 nt, synthetic construct
  source 1..22: mol_type = other RNA
tctcagtggtgcttttgctgca

SEQ ID NO: 150430 - RNA, 22 nt, synthetic construct
  source 1..22: mol_type = other RNA
tctcagttgcagcatgctcact

SEQ ID NO: 150431 - RNA, 22 nt, synthetic construct
  source 1..22: mol_type = other RNA
tctcataaagccggattccttt

SEQ ID NO: 150432 - RNA, 22 nt, synthetic construct
  source 1..22: mol_type = other RNA
tctcatactttgtcaggcatgc

SEQ ID NO: 150433 - RNA, 22 nt, synthetic construct
  source 1..22: mol_type = other RNA
tctcatagtcttccaaaatatt

SEQ ID NO: 150434 - RNA, 22 nt, synthetic construct
  source 1..22: mol_type = other RNA
tctcatattattttttcccgct

SEQ ID NO: 150435 - RNA, 22 nt, synthetic construct
  source 1..22: mol_type = other RNA
tctcatccacaatgagacattt

SEQ ID NO: 150436 - RNA, 22 nt, synthetic construct
  source 1..22: mol_type = other RNA
tctcatctaaattaagcttcga

SEQ ID NO: 150437 - RNA, 22 nt, synthetic construct
  source 1..22: mol_type = other RNA
tctcatctgtcaaaaagagaac

SEQ ID NO: 150438 - RNA, 22 nt, synthetic construct
  source 1..22: mol_type = other RNA
tctcatctgtcactttcctatt

SEQ ID NO: 150439 - RNA, 22 nt, synthetic construct
  source 1..22: mol_type = other RNA
tctcatgagtcctgaaaattcc

SEQ ID NO: 150440 - RNA, 22 nt, synthetic construct
  source 1..22: mol_type = other RNA
tctcatgcaattccccagcctc

SEQ ID NO: 150441 - RNA, 22 nt, synthetic construct
  source 1..22: mol_type = other RNA
tctcatgcttaggatcccagtc

SEQ ID NO: 150442 - RNA, 22 nt, synthetic construct
  source 1..22: mol_type = other RNA
tctcatggaagttatttaatct

SEQ ID NO: 150443 - RNA, 22 nt, synthetic construct
  source 1..22: mol_type = other RNA
tctcatgtatgttttagcctta

SEQ ID NO: 150444 - RNA, 22 nt, synthetic construct
  source 1..22: mol_type = other RNA
tctcatgtcagagacacatact

SEQ ID NO: 150445 - RNA, 22 nt, synthetic construct
  source 1..22: mol_type = other RNA
tctcatgttgggtaaaaataat

SEQ ID NO: 150446 - RNA, 22 nt, synthetic construct
  source 1..22: mol_type = other RNA
tctcattaaaaatcaacccatg

SEQ ID NO: 150447 - RNA, 22 nt, synthetic construct
  source 1..22: mol_type = other RNA
tctcattagttatctcttagac

SEQ ID NO: 150448 - RNA, 22 nt, synthetic construct
  source 1..22: mol_type = other RNA
tctcattataacataaaagcgt

SEQ ID NO: 150449 - RNA, 22 nt, synthetic construct
  source 1..22: mol_type = other RNA
tctcattcactagacacatttt

SEQ ID NO: 150450 - RNA, 22 nt, synthetic construct
  source 1..22: mol_type = other RNA
tctcattcttctctaatgtaaa

SEQ ID NO: 150451 - RNA, 22 nt, synthetic construct
  source 1..22: mol_type = other RNA
tctcattgtggatgagattaat

SEQ ID NO: 150452 - RNA, 22 nt, synthetic construct
  source 1..22: mol_type = other RNA
tctcattgtgttgcccacgctg

SEQ ID NO: 150453 - RNA, 22 nt, synthetic construct
  source 1..22: mol_type = other RNA
tctcattttgaaaaacagatct

SEQ ID NO: 150454 - RNA, 22 nt, synthetic construct
  source 1..22: mol_type = other RNA
tctcatttttcaggggggccac

SEQ ID NO: 150455 - RNA, 22 nt, synthetic construct
  source 1..22: mol_type = other RNA
tctccaacagaagaagtttcta

SEQ ID NO: 150456 - RNA, 22 nt, synthetic construct
  source 1..22: mol_type = other RNA
tctccaacgctttttatggaaa

SEQ ID NO: 150457 - RNA, 22 nt, synthetic construct
  source 1..22: mol_type = other RNA
tctccaaggaaagtgtgcttgg

SEQ ID NO: 150458 - RNA, 22 nt, synthetic construct
  source 1..22: mol_type = other RNA
tctccaaggtacaattacacat

SEQ ID NO: 150459 - RNA, 22 nt, synthetic construct
  source 1..22: mol_type = other RNA
tctccaatcctcagccccctcc

SEQ ID NO: 150460 - RNA, 22 nt, synthetic construct
  source 1..22: mol_type = other RNA
tctccacatccttgccaacagt

SEQ ID NO: 150461 - RNA, 22 nt, synthetic construct
  source 1..22: mol_type = other RNA
tctccacatttctacacaacat

SEQ ID NO: 150462 - RNA, 22 nt, synthetic construct
  source 1..22: mol_type = other RNA
tctccactttcatgatttggtg

SEQ ID NO: 150463 - RNA, 22 nt, synthetic construct
  source 1..22: mol_type = other RNA
tctccagggaggaatccttcag

SEQ ID NO: 150464 - RNA, 22 nt, synthetic construct
  source 1..22: mol_type = other RNA
tctccagtcccactgacagtgg

SEQ ID NO: 150465 - RNA, 22 nt, synthetic construct
  source 1..22: mol_type = other RNA
tctccagtgaagtcatctggtc

SEQ ID NO: 150466 - RNA, 22 nt, synthetic construct
  source 1..22: mol_type = other RNA
tctccataagtccctaacagtc

SEQ ID NO: 150467 - RNA, 22 nt, synthetic construct
  source 1..22: mol_type = other RNA
tctccatacaaggagacctact

SEQ ID NO: 150468 - RNA, 22 nt, synthetic construct
  source 1..22: mol_type = other RNA
tctccataccccctggaaataa

SEQ ID NO: 150469 - RNA, 22 nt, synthetic construct
  source 1..22: mol_type = other RNA
tctccatgtcctcacctcacat

SEQ ID NO: 150470 - RNA, 22 nt, synthetic construct
  source 1..22: mol_type = other RNA
tctccattttgccagctaactt

SEQ ID NO: 150471 - RNA, 22 nt, synthetic construct
  source 1..22: mol_type = other RNA
tctccattttggtcttaccctc

SEQ ID NO: 150472 - RNA, 22 nt, synthetic construct
  source 1..22: mol_type = other RNA
tctcccaaggttgcctgttcac

SEQ ID NO: 150473 - RNA, 22 nt, synthetic construct
  source 1..22: mol_type = other RNA
tctcccaccatctctctgcctc

SEQ ID NO: 150474 - RNA, 22 nt, synthetic construct
  source 1..22: mol_type = other RNA
tctcccagcatgaagccctcta

SEQ ID NO: 150475 - RNA, 22 nt, synthetic construct
  source 1..22: mol_type = other RNA
tctcccagctgtccaacaaggg

SEQ ID NO: 150476 - RNA, 22 nt, synthetic construct
  source 1..22: mol_type = other RNA
tctcccaggtcagtagtacagt

SEQ ID NO: 150477 - RNA, 22 nt, synthetic construct
  source 1..22: mol_type = other RNA
tctcccagttgtcagaattaga

SEQ ID NO: 150478 - RNA, 22 nt, synthetic construct
  source 1..22: mol_type = other RNA
tctcccataccacctgtcagaa

SEQ ID NO: 150479 - RNA, 22 nt, synthetic construct
  source 1..22: mol_type = other RNA
tctcccatcactagaatgtgac

SEQ ID NO: 150480 - RNA, 22 nt, synthetic construct
  source 1..22: mol_type = other RNA
tctccccaaagatattagctac

SEQ ID NO: 150481 - RNA, 22 nt, synthetic construct
  source 1..22: mol_type = other RNA
tctccccaagtaaacctcaagt

SEQ ID NO: 150482 - RNA, 22 nt, synthetic construct
  source 1..22: mol_type = other RNA
tctcccccaggtggttctgcct

SEQ ID NO: 150483 - RNA, 22 nt, synthetic construct
  source 1..22: mol_type = other RNA
tctcccccgaatcctttgcttc

SEQ ID NO: 150484 - RNA, 22 nt, synthetic construct
  source 1..22: mol_type = other RNA
tctccccttgacgaagtcacat

SEQ ID NO: 150485 - RNA, 22 nt, synthetic construct
  source 1..22: mol_type = other RNA
tctcccgccggagtccgcggct

SEQ ID NO: 150486 - RNA, 22 nt, synthetic construct
  source 1..22: mol_type = other RNA
tctccctaaccaggcccggggc

SEQ ID NO: 150487 - RNA, 22 nt, synthetic construct
  source 1..22: mol_type = other RNA
tctccctcacagtccactcacc

SEQ ID NO: 150488 - RNA, 22 nt, synthetic construct
  source 1..22: mol_type = other RNA
tctccctcggccacagcagggc

SEQ ID NO: 150489 - RNA, 22 nt, synthetic construct
  source 1..22: mol_type = other RNA
tctccctcttcgctcttttaaa

SEQ ID NO: 150490 - RNA, 22 nt, synthetic construct
  source 1..22: mol_type = other RNA
tctccctgaaattgtcagaaaa

SEQ ID NO: 150491 - RNA, 22 nt, synthetic construct
  source 1..22: mol_type = other RNA
tctccctgccctgtgaaaatca

SEQ ID NO: 150492 - RNA, 22 nt, synthetic construct
  source 1..22: mol_type = other RNA
tctccctgtctttctgtctgct

SEQ ID NO: 150493 - RNA, 22 nt, synthetic construct
  source 1..22: mol_type = other RNA
tctccctgtgcgtgaatctgtt

SEQ ID NO: 150494 - RNA, 22 nt, synthetic construct
  source 1..22: mol_type = other RNA
tctcccttcctgttctttgtta

SEQ ID NO: 150495 - RNA, 22 nt, synthetic construct
  source 1..22: mol_type = other RNA
tctcccttctattccattgttc

SEQ ID NO: 150496 - RNA, 22 nt, synthetic construct
  source 1..22: mol_type = other RNA
tctccgggtaaaaagcctgctt

SEQ ID NO: 150497 - RNA, 22 nt, synthetic construct
  source 1..22: mol_type = other RNA
tctcctaagtcttcttctaagc

SEQ ID NO: 150498 - RNA, 22 nt, synthetic construct
  source 1..22: mol_type = other RNA
tctcctatattgtcaatgggga

SEQ ID NO: 150499 - RNA, 22 nt, synthetic construct
  source 1..22: mol_type = other RNA
tctcctccaacccattccaggt

SEQ ID NO: 150500 - RNA, 22 nt, synthetic construct
  source 1..22: mol_type = other RNA
tctcctctttcatatctgattt

SEQ ID NO: 150501 - RNA, 22 nt, synthetic construct
  source 1..22: mol_type = other RNA
tctcctgcatggggagttttag

SEQ ID NO: 150502 - RNA, 22 nt, synthetic construct
  source 1..22: mol_type = other RNA
tctcctgtgccaagtccgtgca

SEQ ID NO: 150503 - RNA, 22 nt, synthetic construct
  source 1..22: mol_type = other RNA
tctcctgtgtgcatgctcccat

SEQ ID NO: 150504 - RNA, 22 nt, synthetic construct
  source 1..22: mol_type = other RNA
tctccttaatccagtctatcat

SEQ ID NO: 150505 - RNA, 22 nt, synthetic construct
  source 1..22: mol_type = other RNA
tctccttctgcaggctgaactg

SEQ ID NO: 150506 - RNA, 22 nt, synthetic construct
  source 1..22: mol_type = other RNA
tctccttctggaagatttctac

SEQ ID NO: 150507 - RNA, 22 nt, synthetic construct
  source 1..22: mol_type = other RNA
tctccttgcacattagaatcat

SEQ ID NO: 150508 - RNA, 22 nt, synthetic construct
  source 1..22: mol_type = other RNA
tctccttgtatggagactagta

SEQ ID NO: 150509 - RNA, 22 nt, synthetic construct
  source 1..22: mol_type = other RNA
tctcctttccttccttgctcag

SEQ ID NO: 150510 - RNA, 22 nt, synthetic construct
  source 1..22: mol_type = other RNA
tctcctttctatacttcatctt

SEQ ID NO: 150511 - RNA, 22 nt, synthetic construct
  source 1..22: mol_type = other RNA
tctcctttgaggtaagaacttg

SEQ ID NO: 150512 - RNA, 22 nt, synthetic construct
  source 1..22: mol_type = other RNA
tctccttttaagagtgaagaaa

SEQ ID NO: 150513 - RNA, 22 nt, synthetic construct
  source 1..22: mol_type = other RNA
tctcgaaaaggaatggaattct

SEQ ID NO: 150514 - RNA, 22 nt, synthetic construct
  source 1..22: mol_type = other RNA
tctcgaactctcgacctcgtga

SEQ ID NO: 150515 - RNA, 22 nt, synthetic construct
  source 1..22: mol_type = other RNA
tctcgaagtggtgcttgaactg

SEQ ID NO: 150516 - RNA, 22 nt, synthetic construct
  source 1..22: mol_type = other RNA
tctcgacacacaatccaagttt

SEQ ID NO: 150517 - RNA, 22 nt, synthetic construct
  source 1..22: mol_type = other RNA
tctcgaccccctgggctcaagc

SEQ ID NO: 150518 - RNA, 22 nt, synthetic construct
  source 1..22: mol_type = other RNA
tctcgagctcctgacctcagat

SEQ ID NO: 150519 - RNA, 22 nt, synthetic construct
  source 1..22: mol_type = other RNA
tctcgatggacatttaggttgt

SEQ ID NO: 150520 - RNA, 22 nt, synthetic construct
  source 1..22: mol_type = other RNA
tctcgcagcggggatgctcagg

SEQ ID NO: 150521 - RNA, 22 nt, synthetic construct
  source 1..22: mol_type = other RNA
tctcgctctgtcgcccaggcgg

SEQ ID NO: 150522 - RNA, 22 nt, synthetic construct
  source 1..22: mol_type = other RNA
tctcggatttaagagaggaagt

SEQ ID NO: 150523 - RNA, 22 nt, synthetic construct
  source 1..22: mol_type = other RNA
tctcggcttactgcaacctccg

SEQ ID NO: 150524 - RNA, 22 nt, synthetic construct
  source 1..22: mol_type = other RNA
tctcggtcattctggagtgttt

SEQ ID NO: 150525 - RNA, 22 nt, synthetic construct
  source 1..22: mol_type = other RNA
tctcgtgaatttggtattctta

SEQ ID NO: 150526 - RNA, 22 nt, synthetic construct
  source 1..22: mol_type = other RNA
tctcgtgcatgtctgcaggagc

SEQ ID NO: 150527 - RNA, 22 nt, synthetic construct
  source 1..22: mol_type = other RNA
tctcgtgtgagctctagccttg

SEQ ID NO: 150528 - RNA, 22 nt, synthetic construct
  source 1..22: mol_type = other RNA
tctcgttcatgttcaaggtgtt

SEQ ID NO: 150529 - RNA, 22 nt, synthetic construct
  source 1..22: mol_type = other RNA
tctctaaaaacatccattactc

SEQ ID NO: 150530 - RNA, 22 nt, synthetic construct
  source 1..22: mol_type = other RNA
tctctaatagctagtgatgttg

SEQ ID NO: 150531 - RNA, 22 nt, synthetic construct
  source 1..22: mol_type = other RNA
tctctaatgtaaacagcatact

SEQ ID NO: 150532 - RNA, 22 nt, synthetic construct
  source 1..22: mol_type = other RNA
tctctacagggaaccgtaactt

SEQ ID NO: 150533 - RNA, 22 nt, synthetic construct
  source 1..22: mol_type = other RNA
tctctacagttaacaatactgc

SEQ ID NO: 150534 - RNA, 22 nt, synthetic construct
  source 1..22: mol_type = other RNA
tctctacatctggatcctgtct

SEQ ID NO: 150535 - RNA, 22 nt, synthetic construct
  source 1..22: mol_type = other RNA
tctctaccaaaatataaatacg

SEQ ID NO: 150536 - RNA, 22 nt, synthetic construct
  source 1..22: mol_type = other RNA
tctctacccagcactctgaatc

SEQ ID NO: 150537 - RNA, 22 nt, synthetic construct
  source 1..22: mol_type = other RNA
tctctactctgcctcagttgac

SEQ ID NO: 150538 - RNA, 22 nt, synthetic construct
  source 1..22: mol_type = other RNA
tctctagaacttatgcatcttg

SEQ ID NO: 150539 - RNA, 22 nt, synthetic construct
  source 1..22: mol_type = other RNA
tctctaggcttaaaattcttcc

SEQ ID NO: 150540 - RNA, 22 nt, synthetic construct
  source 1..22: mol_type = other RNA
tctctagttgcacggtgaagaa

SEQ ID NO: 150541 - RNA, 22 nt, synthetic construct
  source 1..22: mol_type = other RNA
tctctagttttccagtatattc

SEQ ID NO: 150542 - RNA, 22 nt, synthetic construct
  source 1..22: mol_type = other RNA
tctctatccaccactccacctt

SEQ ID NO: 150543 - RNA, 22 nt, synthetic construct
  source 1..22: mol_type = other RNA
tctctatgcagaaatctaccaa

SEQ ID NO: 150544 - RNA, 22 nt, synthetic construct
  source 1..22: mol_type = other RNA
tctctattccaaatgtctgtct

SEQ ID NO: 150545 - RNA, 22 nt, synthetic construct
  source 1..22: mol_type = other RNA
tctctcaactggcccctccatg

SEQ ID NO: 150546 - RNA, 22 nt, synthetic construct
  source 1..22: mol_type = other RNA
tctctcaagcaatctgaaacga

SEQ ID NO: 150547 - RNA, 22 nt, synthetic construct
  source 1..22: mol_type = other RNA
tctctcagagggaaactgtttt

SEQ ID NO: 150548 - RNA, 22 nt, synthetic construct
  source 1..22: mol_type = other RNA
tctctcagatctgagtttgctc

SEQ ID NO: 150549 - RNA, 22 nt, synthetic construct
  source 1..22: mol_type = other RNA
tctctcatgttgggtaaaaata

SEQ ID NO: 150550 - RNA, 22 nt, synthetic construct
  source 1..22: mol_type = other RNA
tctctccaacagaagaagtttc

SEQ ID NO: 150551 - RNA, 22 nt, synthetic construct
  source 1..22: mol_type = other RNA
tctctccaaggtacaattacac

SEQ ID NO: 150552 - RNA, 22 nt, synthetic construct
  source 1..22: mol_type = other RNA
tctctccctgccctgtgaaaat

SEQ ID NO: 150553 - RNA, 22 nt, synthetic construct
  source 1..22: mol_type = other RNA
tctctccctgtctttctgtctg

SEQ ID NO: 150554 - RNA, 22 nt, synthetic construct
  source 1..22: mol_type = other RNA
tctctcccttcctgttctttgt

SEQ ID NO: 150555 - RNA, 22 nt, synthetic construct
  source 1..22: mol_type = other RNA
tctctccttgcacattagaatc

SEQ ID NO: 150556 - RNA, 22 nt, synthetic construct
  source 1..22: mol_type = other RNA
tctctcctttgaggtaagaact

SEQ ID NO: 150557 - RNA, 22 nt, synthetic construct
  source 1..22: mol_type = other RNA
tctctcgatggacatttaggtt

SEQ ID NO: 150558 - RNA, 22 nt, synthetic construct
  source 1..22: mol_type = other RNA
tctctctaaaaacatccattac

SEQ ID NO: 150559 - RNA, 22 nt, synthetic construct
  source 1..22: mol_type = other RNA
tctctctatccaccactccacc

SEQ ID NO: 150560 - RNA, 22 nt, synthetic construct
  source 1..22: mol_type = other RNA
tctctctcaactggcccctcca

SEQ ID NO: 150561 - RNA, 22 nt, synthetic construct
  source 1..22: mol_type = other RNA
tctctctcaagcaatctgaaac

SEQ ID NO: 150562 - RNA, 22 nt, synthetic construct
  source 1..22: mol_type = other RNA
tctctctccctgccctgtgaaa

SEQ ID NO: 150563 - RNA, 22 nt, synthetic construct
  source 1..22: mol_type = other RNA
tctctctccctgtctttctgtc

SEQ ID NO: 150564 - RNA, 22 nt, synthetic construct
  source 1..22: mol_type = other RNA
tctctctctccctgtctttctg

SEQ ID NO: 150565 - RNA, 22 nt, synthetic construct
  source 1..22: mol_type = other RNA
tctctctctgcttcactaactt

SEQ ID NO: 150566 - RNA, 22 nt, synthetic construct
  source 1..22: mol_type = other RNA
tctctctgaaattagctaagta

SEQ ID NO: 150567 - RNA, 22 nt, synthetic construct
  source 1..22: mol_type = other RNA
tctctctgcctcaaaatcaaca

SEQ ID NO: 150568 - RNA, 22 nt, synthetic construct
  source 1..22: mol_type = other RNA
tctctctgcctcggcacagctc

SEQ ID NO: 150569 - RNA, 22 nt, synthetic construct
  source 1..22: mol_type = other RNA
tctctctgcttcactaacttta

SEQ ID NO: 150570 - RNA, 22 nt, synthetic construct
  source 1..22: mol_type = other RNA
tctctcttccaaataatcccgc

SEQ ID NO: 150571 - RNA, 22 nt, synthetic construct
  source 1..22: mol_type = other RNA
tctctcttgaccttagttttca

SEQ ID NO: 150572 - RNA, 22 nt, synthetic construct
  source 1..22: mol_type = other RNA
tctctctttctggggatgctgt

SEQ ID NO: 150573 - RNA, 22 nt, synthetic construct
  source 1..22: mol_type = other RNA
tctctgaaattagctaagtatg

SEQ ID NO: 150574 - RNA, 22 nt, synthetic construct
  source 1..22: mol_type = other RNA
tctctgacatgagagctaaggg

SEQ ID NO: 150575 - RNA, 22 nt, synthetic construct
  source 1..22: mol_type = other RNA
tctctgacattggttattcatg

SEQ ID NO: 150576 - RNA, 22 nt, synthetic construct
  source 1..22: mol_type = other RNA
tctctgacttcattcttgacat

SEQ ID NO: 150577 - RNA, 22 nt, synthetic construct
  source 1..22: mol_type = other RNA
tctctgatggaacggcttaaca

SEQ ID NO: 150578 - RNA, 22 nt, synthetic construct
  source 1..22: mol_type = other RNA
tctctgcaaaaaatgtttgttt

SEQ ID NO: 150579 - RNA, 22 nt, synthetic construct
  source 1..22: mol_type = other RNA
tctctgcaacatttgttgcatc

SEQ ID NO: 150580 - RNA, 22 nt, synthetic construct
  source 1..22: mol_type = other RNA
tctctgcagagcaggctccact

SEQ ID NO: 150581 - RNA, 22 nt, synthetic construct
  source 1..22: mol_type = other RNA
tctctgccccgggcctggttag

SEQ ID NO: 150582 - RNA, 22 nt, synthetic construct
  source 1..22: mol_type = other RNA
tctctgccctcattgaagctac

SEQ ID NO: 150583 - RNA, 22 nt, synthetic construct
  source 1..22: mol_type = other RNA
tctctgcctcaaaatcaacatt

SEQ ID NO: 150584 - RNA, 22 nt, synthetic construct
  source 1..22: mol_type = other RNA
tctctgcctcggcacagctctc

SEQ ID NO: 150585 - RNA, 22 nt, synthetic construct
  source 1..22: mol_type = other RNA
tctctgctcaccgcaacatctg

SEQ ID NO: 150586 - RNA, 22 nt, synthetic construct
  source 1..22: mol_type = other RNA
tctctgctctcaagtaattgtt

SEQ ID NO: 150587 - RNA, 22 nt, synthetic construct
  source 1..22: mol_type = other RNA
tctctgctgctgaaaaagatac

SEQ ID NO: 150588 - RNA, 22 nt, synthetic construct
  source 1..22: mol_type = other RNA
tctctgcttcactaactttaaa

SEQ ID NO: 150589 - RNA, 22 nt, synthetic construct
  source 1..22: mol_type = other RNA
tctctgctttttcttggtggta

SEQ ID NO: 150590 - RNA, 22 nt, synthetic construct
  source 1..22: mol_type = other RNA
tctctggaaggctaagcatgta

SEQ ID NO: 150591 - RNA, 22 nt, synthetic construct
  source 1..22: mol_type = other RNA
tctctggaatagaagagcagtg

SEQ ID NO: 150592 - RNA, 22 nt, synthetic construct
  source 1..22: mol_type = other RNA
tctctggagcaagcatgagtat

SEQ ID NO: 150593 - RNA, 22 nt, synthetic construct
  source 1..22: mol_type = other RNA
tctctggctgcaattgcgcaga

SEQ ID NO: 150594 - RNA, 22 nt, synthetic construct
  source 1..22: mol_type = other RNA
tctctgggctcactgcaacttc

SEQ ID NO: 150595 - RNA, 22 nt, synthetic construct
  source 1..22: mol_type = other RNA
tctctgggcttcactttcgtca

SEQ ID NO: 150596 - RNA, 22 nt, synthetic construct
  source 1..22: mol_type = other RNA
tctctggggttagggcctagaa

SEQ ID NO: 150597 - RNA, 22 nt, synthetic construct
  source 1..22: mol_type = other RNA
tctctggtattctgaactttca

SEQ ID NO: 150598 - RNA, 22 nt, synthetic construct
  source 1..22: mol_type = other RNA
tctctgtctctgttgcccagtc

SEQ ID NO: 150599 - RNA, 22 nt, synthetic construct
  source 1..22: mol_type = other RNA
tctctgtgtggtttgccttttc

SEQ ID NO: 150600 - RNA, 22 nt, synthetic construct
  source 1..22: mol_type = other RNA
tctcttaaatccgagacaagtt

SEQ ID NO: 150601 - RNA, 22 nt, synthetic construct
  source 1..22: mol_type = other RNA
tctcttaagaccacaaggatta

SEQ ID NO: 150602 - RNA, 22 nt, synthetic construct
  source 1..22: mol_type = other RNA
tctcttacacctgtttaaaaag

SEQ ID NO: 150603 - RNA, 22 nt, synthetic construct
  source 1..22: mol_type = other RNA
tctcttagacctcctagattga

SEQ ID NO: 150604 - RNA, 22 nt, synthetic construct
  source 1..22: mol_type = other RNA
tctcttatactagtagaaagca

SEQ ID NO: 150605 - RNA, 22 nt, synthetic construct
  source 1..22: mol_type = other RNA
tctcttcaccaactgaagcggg

SEQ ID NO: 150606 - RNA, 22 nt, synthetic construct
  source 1..22: mol_type = other RNA
tctcttccaaataatcccgcac

SEQ ID NO: 150607 - RNA, 22 nt, synthetic construct
  source 1..22: mol_type = other RNA
tctcttcccccaaaacttagga

SEQ ID NO: 150608 - RNA, 22 nt, synthetic construct
  source 1..22: mol_type = other RNA
tctcttcctcctctggacatta

SEQ ID NO: 150609 - RNA, 22 nt, synthetic construct
  source 1..22: mol_type = other RNA
tctcttcctgtatatctccttt

SEQ ID NO: 150610 - RNA, 22 nt, synthetic construct
  source 1..22: mol_type = other RNA
tctcttcgagggggctgagtat

SEQ ID NO: 150611 - RNA, 22 nt, synthetic construct
  source 1..22: mol_type = other RNA
tctcttctggatagcattatcc

SEQ ID NO: 150612 - RNA, 22 nt, synthetic construct
  source 1..22: mol_type = other RNA
tctcttgaccttagttttcact

SEQ ID NO: 150613 - RNA, 22 nt, synthetic construct
  source 1..22: mol_type = other RNA
tctcttgcccaagctggtcctg

SEQ ID NO: 150614 - RNA, 22 nt, synthetic construct
  source 1..22: mol_type = other RNA
tctcttgcctaggctggagtgc

SEQ ID NO: 150615 - RNA, 22 nt, synthetic construct
  source 1..22: mol_type = other RNA
tctcttggaatgtgcacctcca

SEQ ID NO: 150616 - RNA, 22 nt, synthetic construct
  source 1..22: mol_type = other RNA
tctcttgttgaggatgactgtc

SEQ ID NO: 150617 - RNA, 22 nt, synthetic construct
  source 1..22: mol_type = other RNA
tctctttaaagctgaactcctt

SEQ ID NO: 150618 - RNA, 22 nt, synthetic construct
  source 1..22: mol_type = other RNA
tctctttaattatgagcattcc

SEQ ID NO: 150619 - RNA, 22 nt, synthetic construct
  source 1..22: mol_type = other RNA
tctctttaggaagcttccttga

SEQ ID NO: 150620 - RNA, 22 nt, synthetic construct
  source 1..22: mol_type = other RNA
tctctttagggaagatagtact

SEQ ID NO: 150621 - RNA, 22 nt, synthetic construct
  source 1..22: mol_type = other RNA
tctctttcagccatcccagcta

SEQ ID NO: 150622 - RNA, 22 nt, synthetic construct
  source 1..22: mol_type = other RNA
tctctttctgaaattctcatta

SEQ ID NO: 150623 - RNA, 22 nt, synthetic construct
  source 1..22: mol_type = other RNA
tctctttctggggatgctgtct

SEQ ID NO: 150624 - RNA, 22 nt, synthetic construct
  source 1..22: mol_type = other RNA
tctctttgaaaggaatccggct

SEQ ID NO: 150625 - RNA, 22 nt, synthetic construct
  source 1..22: mol_type = other RNA
tctctttgtttatccttgcacc

SEQ ID NO: 150626 - RNA, 22 nt, synthetic construct
  source 1..22: mol_type = other RNA
tctcttttcctcgttttcaaca

SEQ ID NO: 150627 - RNA, 22 nt, synthetic construct
  source 1..22: mol_type = other RNA
tctcttttcctttaacgtatct

SEQ ID NO: 150628 - RNA, 22 nt, synthetic construct
  source 1..22: mol_type = other RNA
tctctttttgacagatgagact

SEQ ID NO: 150629 - RNA, 22 nt, synthetic construct
  source 1..22: mol_type = other RNA
tctgaaaaatggttttatggta

SEQ ID NO: 150630 - RNA, 22 nt, synthetic construct
  source 1..22: mol_type = other RNA
tctgaaacgaccttgctcattc

SEQ ID NO: 150631 - RNA, 22 nt, synthetic construct
  source 1..22: mol_type = other RNA
tctgaaagcttctgagcagtgt

SEQ ID NO: 150632 - RNA, 22 nt, synthetic construct
  source 1..22: mol_type = other RNA
tctgaaattagctaagtatgca

SEQ ID NO: 150633 - RNA, 22 nt, synthetic construct
  source 1..22: mol_type = other RNA
tctgaaattctcattagttatc

SEQ ID NO: 150634 - RNA, 22 nt, synthetic construct
  source 1..22: mol_type = other RNA
tctgaaattgacttcactagat

SEQ ID NO: 150635 - RNA, 22 nt, synthetic construct
  source 1..22: mol_type = other RNA
tctgaacattttagctggggca

SEQ ID NO: 150636 - RNA, 22 nt, synthetic construct
  source 1..22: mol_type = other RNA
tctgaacgtctttaaatttcaa

SEQ ID NO: 150637 - RNA, 22 nt, synthetic construct
  source 1..22: mol_type = other RNA
tctgaactcaaaagtgaatcac

SEQ ID NO: 150638 - RNA, 22 nt, synthetic construct
  source 1..22: mol_type = other RNA
tctgaactttcaacctaacatg

SEQ ID NO: 150639 - RNA, 22 nt, synthetic construct
  source 1..22: mol_type = other RNA
tctgaactttcgaagtgggaag

SEQ ID NO: 150640 - RNA, 22 nt, synthetic construct
  source 1..22: mol_type = other RNA
tctgaagaaattatctgtgggt

SEQ ID NO: 150641 - RNA, 22 nt, synthetic construct
  source 1..22: mol_type = other RNA
tctgaagacatgctgaggcccc

SEQ ID NO: 150642 - RNA, 22 nt, synthetic construct
  source 1..22: mol_type = other RNA
tctgaagaggctttctgtgtaa

SEQ ID NO: 150643 - RNA, 22 nt, synthetic construct
  source 1..22: mol_type = other RNA
tctgaagagtctatctttggga

SEQ ID NO: 150644 - RNA, 22 nt, synthetic construct
  source 1..22: mol_type = other RNA
tctgaaggcactaacaaagggc

SEQ ID NO: 150645 - RNA, 22 nt, synthetic construct
  source 1..22: mol_type = other RNA
tctgaaggctcagcccctcatc

SEQ ID NO: 150646 - RNA, 22 nt, synthetic construct
  source 1..22: mol_type = other RNA
tctgaaggtgcctgccatagag

SEQ ID NO: 150647 - RNA, 22 nt, synthetic construct
  source 1..22: mol_type = other RNA
tctgaatcacctcaaggcagaa

SEQ ID NO: 150648 - RNA, 22 nt, synthetic construct
  source 1..22: mol_type = other RNA
tctgaatgtgaccttatttgga

SEQ ID NO: 150649 - RNA, 22 nt, synthetic construct
  source 1..22: mol_type = other RNA
tctgaattctctggaatagaag

SEQ ID NO: 150650 - RNA, 22 nt, synthetic construct
  source 1..22: mol_type = other RNA
tctgaattgagatgtactggaa

SEQ ID NO: 150651 - RNA, 22 nt, synthetic construct
  source 1..22: mol_type = other RNA
tctgacaactgggagaatggca

SEQ ID NO: 150652 - RNA, 22 nt, synthetic construct
  source 1..22: mol_type = other RNA
tctgacaatttcagggagaatt

SEQ ID NO: 150653 - RNA, 22 nt, synthetic construct
  source 1..22: mol_type = other RNA
tctgacaatttgccaaaatgat

SEQ ID NO: 150654 - RNA, 22 nt, synthetic construct
  source 1..22: mol_type = other RNA
tctgacacccgaagaggacgat

SEQ ID NO: 150655 - RNA, 22 nt, synthetic construct
  source 1..22: mol_type = other RNA
tctgacacccgacccactagtg

SEQ ID NO: 150656 - RNA, 22 nt, synthetic construct
  source 1..22: mol_type = other RNA
tctgacaggtggtatgggagat

SEQ ID NO: 150657 - RNA, 22 nt, synthetic construct
  source 1..22: mol_type = other RNA
tctgacatactgtcacaggctt

SEQ ID NO: 150658 - RNA, 22 nt, synthetic construct
  source 1..22: mol_type = other RNA
tctgacatatgttttgcttcga

SEQ ID NO: 150659 - RNA, 22 nt, synthetic construct
  source 1..22: mol_type = other RNA
tctgacatgagagctaagggaa

SEQ ID NO: 150660 - RNA, 22 nt, synthetic construct
  source 1..22: mol_type = other RNA
tctgacattggttattcatgtt

SEQ ID NO: 150661 - RNA, 22 nt, synthetic construct
  source 1..22: mol_type = other RNA
tctgaccaactatttcactaaa

SEQ ID NO: 150662 - RNA, 22 nt, synthetic construct
  source 1..22: mol_type = other RNA
tctgaccattgtgtggacacac

SEQ ID NO: 150663 - RNA, 22 nt, synthetic construct
  source 1..22: mol_type = other RNA
tctgacccagagcctaatgtgt

SEQ ID NO: 150664 - RNA, 22 nt, synthetic construct
  source 1..22: mol_type = other RNA
tctgaccctttattcaaagatc

SEQ ID NO: 150665 - RNA, 22 nt, synthetic construct
  source 1..22: mol_type = other RNA
tctgacctaaagttttaagaaa

SEQ ID NO: 150666 - RNA, 22 nt, synthetic construct
  source 1..22: mol_type = other RNA
tctgacctaagcttgggtagga

SEQ ID NO: 150667 - RNA, 22 nt, synthetic construct
  source 1..22: mol_type = other RNA
tctgacgtttaaatgagttaat

SEQ ID NO: 150668 - RNA, 22 nt, synthetic construct
  source 1..22: mol_type = other RNA
tctgactacactgaagggaatt

SEQ ID NO: 150669 - RNA, 22 nt, synthetic construct
  source 1..22: mol_type = other RNA
tctgactctgtgcttgtgcttt

SEQ ID NO: 150670 - RNA, 22 nt, synthetic construct
  source 1..22: mol_type = other RNA
tctgacttagtgagggaggcca

SEQ ID NO: 150671 - RNA, 22 nt, synthetic construct
  source 1..22: mol_type = other RNA
tctgacttcattcttgacatga

SEQ ID NO: 150672 - RNA, 22 nt, synthetic construct
  source 1..22: mol_type = other RNA
tctgacttctctcagagggaaa

SEQ ID NO: 150673 - RNA, 22 nt, synthetic construct
  source 1..22: mol_type = other RNA
tctgactttatggtatcacttt

SEQ ID NO: 150674 - RNA, 22 nt, synthetic construct
  source 1..22: mol_type = other RNA
tctgagaagactaagcagaaat

SEQ ID NO: 150675 - RNA, 22 nt, synthetic construct
  source 1..22: mol_type = other RNA
tctgagaaggcgaaatgtgaac

SEQ ID NO: 150676 - RNA, 22 nt, synthetic construct
  source 1..22: mol_type = other RNA
tctgagacaggatccagatgta

SEQ ID NO: 150677 - RNA, 22 nt, synthetic construct
  source 1..22: mol_type = other RNA
tctgagacatcacaatgcgttt

SEQ ID NO: 150678 - RNA, 22 nt, synthetic construct
  source 1..22: mol_type = other RNA
tctgagagaagtcagactaaga

SEQ ID NO: 150679 - RNA, 22 nt, synthetic construct
  source 1..22: mol_type = other RNA
tctgagagatagaaagcaccag

SEQ ID NO: 150680 - RNA, 22 nt, synthetic construct
  source 1..22: mol_type = other RNA
tctgagagtattgccaggtttg

SEQ ID NO: 150681 - RNA, 22 nt, synthetic construct
  source 1..22: mol_type = other RNA
tctgagcaactactatttcgca

SEQ ID NO: 150682 - RNA, 22 nt, synthetic construct
  source 1..22: mol_type = other RNA
tctgagcagtgtttcctagatt

SEQ ID NO: 150683 - RNA, 22 nt, synthetic construct
  source 1..22: mol_type = other RNA
tctgagccagagtttcactctg

SEQ ID NO: 150684 - RNA, 22 nt, synthetic construct
  source 1..22: mol_type = other RNA
tctgagctgttaatggttagac

SEQ ID NO: 150685 - RNA, 22 nt, synthetic construct
  source 1..22: mol_type = other RNA
tctgaggagctgagaccacaga

SEQ ID NO: 150686 - RNA, 22 nt, synthetic construct
  source 1..22: mol_type = other RNA
tctgaggcctcctgccttcctg

SEQ ID NO: 150687 - RNA, 22 nt, synthetic construct
  source 1..22: mol_type = other RNA
tctgagggaaattatttccagc

SEQ ID NO: 150688 - RNA, 22 nt, synthetic construct
  source 1..22: mol_type = other RNA
tctgaggtggagttctgctctt

SEQ ID NO: 150689 - RNA, 22 nt, synthetic construct
  source 1..22: mol_type = other RNA
tctgagtaaagggtaagaaaat

SEQ ID NO: 150690 - RNA, 22 nt, synthetic construct
  source 1..22: mol_type = other RNA
tctgagtatattctgtgaattg

SEQ ID NO: 150691 - RNA, 22 nt, synthetic construct
  source 1..22: mol_type = other RNA
tctgagtgttacttgaaatcat

SEQ ID NO: 150692 - RNA, 22 nt, synthetic construct
  source 1..22: mol_type = other RNA
tctgagtgttgtgtgcacctaa

SEQ ID NO: 150693 - RNA, 22 nt, synthetic construct
  source 1..22: mol_type = other RNA
tctgagtttgctctgcaaatga

SEQ ID NO: 150694 - RNA, 22 nt, synthetic construct
  source 1..22: mol_type = other RNA
tctgataaattattagcttgct

SEQ ID NO: 150695 - RNA, 22 nt, synthetic construct
  source 1..22: mol_type = other RNA
tctgataagcccaacctgatta

SEQ ID NO: 150696 - RNA, 22 nt, synthetic construct
  source 1..22: mol_type = other RNA
tctgatacacttctatccagtg

SEQ ID NO: 150697 - RNA, 22 nt, synthetic construct
  source 1..22: mol_type = other RNA
tctgatagcttgacaaaaggcc

SEQ ID NO: 150698 - RNA, 22 nt, synthetic construct
  source 1..22: mol_type = other RNA
tctgataggaatatcgtctttt

SEQ ID NO: 150699 - RNA, 22 nt, synthetic construct
  source 1..22: mol_type = other RNA
tctgataggataatgtccagag

SEQ ID NO: 150700 - RNA, 22 nt, synthetic construct
  source 1..22: mol_type = other RNA
tctgatatcctgtaaacctgga

SEQ ID NO: 150701 - RNA, 22 nt, synthetic construct
  source 1..22: mol_type = other RNA
tctgatcacagaagtgttttga

SEQ ID NO: 150702 - RNA, 22 nt, synthetic construct
  source 1..22: mol_type = other RNA
tctgatgcacaagccttgaaaa

SEQ ID NO: 150703 - RNA, 22 nt, synthetic construct
  source 1..22: mol_type = other RNA
tctgatgctttctctagttgca

SEQ ID NO: 150704 - RNA, 22 nt, synthetic construct
  source 1..22: mol_type = other RNA
tctgatggaacggcttaacacc

SEQ ID NO: 150705 - RNA, 22 nt, synthetic construct
  source 1..22: mol_type = other RNA
tctgatgtgtatgttacacttc

SEQ ID NO: 150706 - RNA, 22 nt, synthetic construct
  source 1..22: mol_type = other RNA
tctgatgtgtgtctctgctctc

SEQ ID NO: 150707 - RNA, 22 nt, synthetic construct
  source 1..22: mol_type = other RNA
tctgattcagtggttggaaaac

SEQ ID NO: 150708 - RNA, 22 nt, synthetic construct
  source 1..22: mol_type = other RNA
tctgattgcccattataaaata

SEQ ID NO: 150709 - RNA, 22 nt, synthetic construct
  source 1..22: mol_type = other RNA
tctgatttcaaagttaatagcc

SEQ ID NO: 150710 - RNA, 22 nt, synthetic construct
  source 1..22: mol_type = other RNA
tctgatttgctggctcagtctg

SEQ ID NO: 150711 - RNA, 22 nt, synthetic construct
  source 1..22: mol_type = other RNA
tctgatttgtttagtagctgtc

SEQ ID NO: 150712 - RNA, 22 nt, synthetic construct
  source 1..22: mol_type = other RNA
tctgattttaatctgtcctgaa

SEQ ID NO: 150713 - RNA, 22 nt, synthetic construct
  source 1..22: mol_type = other RNA
tctgattttgtgtcttctgttt

SEQ ID NO: 150714 - RNA, 22 nt, synthetic construct
  source 1..22: mol_type = other RNA
tctgatttttagtgactggctt

SEQ ID NO: 150715 - RNA, 22 nt, synthetic construct
  source 1..22: mol_type = other RNA
tctgcaaatgaggttgctttta

SEQ ID NO: 150716 - RNA, 22 nt, synthetic construct
  source 1..22: mol_type = other RNA
tctgcaacatttgttgcatccc

SEQ ID NO: 150717 - RNA, 22 nt, synthetic construct
  source 1..22: mol_type = other RNA
tctgcaactatcaaaacacttc

SEQ ID NO: 150718 - RNA, 22 nt, synthetic construct
  source 1..22: mol_type = other RNA
tctgcaagcagatctgctgtaa

SEQ ID NO: 150719 - RNA, 22 nt, synthetic construct
  source 1..22: mol_type = other RNA
tctgcaagttgctatccagtct

SEQ ID NO: 150720 - RNA, 22 nt, synthetic construct
  source 1..22: mol_type = other RNA
tctgcaattggaagactatcac

SEQ ID NO: 150721 - RNA, 22 nt, synthetic construct
  source 1..22: mol_type = other RNA
tctgcaattttaaatgtacaac

SEQ ID NO: 150722 - RNA, 22 nt, synthetic construct
  source 1..22: mol_type = other RNA
tctgcacgtactagtcagcaca

SEQ ID NO: 150723 - RNA, 22 nt, synthetic construct
  source 1..22: mol_type = other RNA
tctgcagaccaagaaaggactt

SEQ ID NO: 150724 - RNA, 22 nt, synthetic construct
  source 1..22: mol_type = other RNA
tctgcagactcttgtcccggca

SEQ ID NO: 150725 - RNA, 22 nt, synthetic construct
  source 1..22: mol_type = other RNA
tctgcagagactgtgcttccac

SEQ ID NO: 150726 - RNA, 22 nt, synthetic construct
  source 1..22: mol_type = other RNA
tctgcagagcaggctccacttg

SEQ ID NO: 150727 - RNA, 22 nt, synthetic construct
  source 1..22: mol_type = other RNA
tctgcaggagccttgctgttgt

SEQ ID NO: 150728 - RNA, 22 nt, synthetic construct
  source 1..22: mol_type = other RNA
tctgcaggcagaatgtgacctg

SEQ ID NO: 150729 - RNA, 22 nt, synthetic construct
  source 1..22: mol_type = other RNA
tctgcaggctgaactgctgaca

SEQ ID NO: 150730 - RNA, 22 nt, synthetic construct
  source 1..22: mol_type = other RNA
tctgcagtgaacatgggaatgc

SEQ ID NO: 150731 - RNA, 22 nt, synthetic construct
  source 1..22: mol_type = other RNA
tctgcagtgtccatctcccatc

SEQ ID NO: 150732 - RNA, 22 nt, synthetic construct
  source 1..22: mol_type = other RNA
tctgcagttagcatgcctgaca

SEQ ID NO: 150733 - RNA, 22 nt, synthetic construct
  source 1..22: mol_type = other RNA
tctgcagtttgtgttttcactc

SEQ ID NO: 150734 - RNA, 22 nt, synthetic construct
  source 1..22: mol_type = other RNA
tctgcatacttagctaatttca

SEQ ID NO: 150735 - RNA, 22 nt, synthetic construct
  source 1..22: mol_type = other RNA
tctgcatagagatcttgtgtat

SEQ ID NO: 150736 - RNA, 22 nt, synthetic construct
  source 1..22: mol_type = other RNA
tctgcatccaaaagggaaatat

SEQ ID NO: 150737 - RNA, 22 nt, synthetic construct
  source 1..22: mol_type = other RNA
tctgcatcttttgagggtatca

SEQ ID NO: 150738 - RNA, 22 nt, synthetic construct
  source 1..22: mol_type = other RNA
tctgcatttggtttgcaaaaat

SEQ ID NO: 150739 - RNA, 22 nt, synthetic construct
  source 1..22: mol_type = other RNA
tctgccacattcaacaacatgg

SEQ ID NO: 150740 - RNA, 22 nt, synthetic construct
  source 1..22: mol_type = other RNA
tctgccaggacaattgaatggg

SEQ ID NO: 150741 - RNA, 22 nt, synthetic construct
  source 1..22: mol_type = other RNA
tctgcccatcctatctaagcct

SEQ ID NO: 150742 - RNA, 22 nt, synthetic construct
  source 1..22: mol_type = other RNA
tctgccccgggcctggttaggg

SEQ ID NO: 150743 - RNA, 22 nt, synthetic construct
  source 1..22: mol_type = other RNA
tctgccctcattgaagctacta

SEQ ID NO: 150744 - RNA, 22 nt, synthetic construct
  source 1..22: mol_type = other RNA
tctgcctaatctctaggcttaa

SEQ ID NO: 150745 - RNA, 22 nt, synthetic construct
  source 1..22: mol_type = other RNA
tctgcctcaaaatcaacattgc

SEQ ID NO: 150746 - RNA, 22 nt, synthetic construct
  source 1..22: mol_type = other RNA
tctgcctcagttgacatccttt

SEQ ID NO: 150747 - RNA, 22 nt, synthetic construct
  source 1..22: mol_type = other RNA
tctgcctcccgggtccaggcag

SEQ ID NO: 150748 - RNA, 22 nt, synthetic construct
  source 1..22: mol_type = other RNA
tctgcctcggcacagctctcat

SEQ ID NO: 150749 - RNA, 22 nt, synthetic construct
  source 1..22: mol_type = other RNA
tctgcctgcagactgcaggtct

SEQ ID NO: 150750 - RNA, 22 nt, synthetic construct
  source 1..22: mol_type = other RNA
tctgccttcaatgtttggtaga

SEQ ID NO: 150751 - RNA, 22 nt, synthetic construct
  source 1..22: mol_type = other RNA
tctgccttgacctcccaaagga

SEQ ID NO: 150752 - RNA, 22 nt, synthetic construct
  source 1..22: mol_type = other RNA
tctgccttgaggtgattcagag

SEQ ID NO: 150753 - RNA, 22 nt, synthetic construct
  source 1..22: mol_type = other RNA
tctgcgcaattgcagccagaga

SEQ ID NO: 150754 - RNA, 22 nt, synthetic construct
  source 1..22: mol_type = other RNA
tctgcgccttaaagccacactc

SEQ ID NO: 150755 - RNA, 22 nt, synthetic construct
  source 1..22: mol_type = other RNA
tctgcggcaggcattgtgctca

SEQ ID NO: 150756 - RNA, 22 nt, synthetic construct
  source 1..22: mol_type = other RNA
tctgcggcggctgaggcagccc

SEQ ID NO: 150757 - RNA, 22 nt, synthetic construct
  source 1..22: mol_type = other RNA
tctgcgtgttattttaatcgaa

SEQ ID NO: 150758 - RNA, 22 nt, synthetic construct
  source 1..22: mol_type = other RNA
tctgctaataaaaacatatgca

SEQ ID NO: 150759 - RNA, 22 nt, synthetic construct
  source 1..22: mol_type = other RNA
tctgctacaggggcattccctg

SEQ ID NO: 150760 - RNA, 22 nt, synthetic construct
  source 1..22: mol_type = other RNA
tctgctactagcaagctaataa

SEQ ID NO: 150761 - RNA, 22 nt, synthetic construct
  source 1..22: mol_type = other RNA
tctgctatgaaatgtggttttt

SEQ ID NO: 150762 - RNA, 22 nt, synthetic construct
  source 1..22: mol_type = other RNA
tctgctatgctgaaaggcatga

SEQ ID NO: 150763 - RNA, 22 nt, synthetic construct
  source 1..22: mol_type = other RNA
tctgctattctctttctgaaat

SEQ ID NO: 150764 - RNA, 22 nt, synthetic construct
  source 1..22: mol_type = other RNA
tctgctcaaaggggcattccgt

SEQ ID NO: 150765 - RNA, 22 nt, synthetic construct
  source 1..22: mol_type = other RNA
tctgctcaccgcaacatctgcc

SEQ ID NO: 150766 - RNA, 22 nt, synthetic construct
  source 1..22: mol_type = other RNA
tctgctcactgcaacctttgtc

SEQ ID NO: 150767 - RNA, 22 nt, synthetic construct
  source 1..22: mol_type = other RNA
tctgctcactttgggattagct

SEQ ID NO: 150768 - RNA, 22 nt, synthetic construct
  source 1..22: mol_type = other RNA
tctgctcggctctgtcaccctt

SEQ ID NO: 150769 - RNA, 22 nt, synthetic construct
  source 1..22: mol_type = other RNA
tctgctctcaagtaattgtttt

SEQ ID NO: 150770 - RNA, 22 nt, synthetic construct
  source 1..22: mol_type = other RNA
tctgctcttgtcgcccaggctg

SEQ ID NO: 150771 - RNA, 22 nt, synthetic construct
  source 1..22: mol_type = other RNA
tctgctgctgaaaaagatactc

SEQ ID NO: 150772 - RNA, 22 nt, synthetic construct
  source 1..22: mol_type = other RNA
tctgctgggcccactctcccca

SEQ ID NO: 150773 - RNA, 22 nt, synthetic construct
  source 1..22: mol_type = other RNA
tctgctgtaagctggtaataca

SEQ ID NO: 150774 - RNA, 22 nt, synthetic construct
  source 1..22: mol_type = other RNA
tctgctgtcggttttctagtta

SEQ ID NO: 150775 - RNA, 22 nt, synthetic construct
  source 1..22: mol_type = other RNA
tctgctgttgatggacgtttga

SEQ ID NO: 150776 - RNA, 22 nt, synthetic construct
  source 1..22: mol_type = other RNA
tctgcttaaagcctctcaacac

SEQ ID NO: 150777 - RNA, 22 nt, synthetic construct
  source 1..22: mol_type = other RNA
tctgcttagtcttctcagatct

SEQ ID NO: 150778 - RNA, 22 nt, synthetic construct
  source 1..22: mol_type = other RNA
tctgcttattatatgcctagat

SEQ ID NO: 150779 - RNA, 22 nt, synthetic construct
  source 1..22: mol_type = other RNA
tctgcttcactaactttaaatt

SEQ ID NO: 150780 - RNA, 22 nt, synthetic construct
  source 1..22: mol_type = other RNA
tctgcttccacatttctaattt

SEQ ID NO: 150781 - RNA, 22 nt, synthetic construct
  source 1..22: mol_type = other RNA
tctgcttccttgctatgtaatc

SEQ ID NO: 150782 - RNA, 22 nt, synthetic construct
  source 1..22: mol_type = other RNA
tctgcttctcaataaggaaagc

SEQ ID NO: 150783 - RNA, 22 nt, synthetic construct
  source 1..22: mol_type = other RNA
tctgcttgaatgtgcctacata

SEQ ID NO: 150784 - RNA, 22 nt, synthetic construct
  source 1..22: mol_type = other RNA
tctgcttgcagacaataattct

SEQ ID NO: 150785 - RNA, 22 nt, synthetic construct
  source 1..22: mol_type = other RNA
tctgctttttcttggtggtaac

SEQ ID NO: 150786 - RNA, 22 nt, synthetic construct
  source 1..22: mol_type = other RNA
tctggaaactcaaacccaaatt

SEQ ID NO: 150787 - RNA, 22 nt, synthetic construct
  source 1..22: mol_type = other RNA
tctggaaaggacttgatctaaa

SEQ ID NO: 150788 - RNA, 22 nt, synthetic construct
  source 1..22: mol_type = other RNA
tctggaaagttcaaatgaggct

SEQ ID NO: 150789 - RNA, 22 nt, synthetic construct
  source 1..22: mol_type = other RNA
tctggaacacacattagcctag

SEQ ID NO: 150790 - RNA, 22 nt, synthetic construct
  source 1..22: mol_type = other RNA
tctggaagatttctactggggt

SEQ ID NO: 150791 - RNA, 22 nt, synthetic construct
  source 1..22: mol_type = other RNA
tctggaaggaaacactataaat

SEQ ID NO: 150792 - RNA, 22 nt, synthetic construct
  source 1..22: mol_type = other RNA
tctggaaggctaagcatgtaac

SEQ ID NO: 150793 - RNA, 22 nt, synthetic construct
  source 1..22: mol_type = other RNA
tctggaagtttcctgcacatgc

SEQ ID NO: 150794 - RNA, 22 nt, synthetic construct
  source 1..22: mol_type = other RNA
tctggaatagaagagcagtgtg

SEQ ID NO: 150795 - RNA, 22 nt, synthetic construct
  source 1..22: mol_type = other RNA
tctggaatgcatcgtttcaata

SEQ ID NO: 150796 - RNA, 22 nt, synthetic construct
  source 1..22: mol_type = other RNA
tctggaatgcccatcctctatt

SEQ ID NO: 150797 - RNA, 22 nt, synthetic construct
  source 1..22: mol_type = other RNA
tctggaatgtgtagttctggtg

SEQ ID NO: 150798 - RNA, 22 nt, synthetic construct
  source 1..22: mol_type = other RNA
tctggacattatcctatcagag

SEQ ID NO: 150799 - RNA, 22 nt, synthetic construct
  source 1..22: mol_type = other RNA
tctggaccacaatcttaccccc

SEQ ID NO: 150800 - RNA, 22 nt, synthetic construct
  source 1..22: mol_type = other RNA
tctggaccagttactctctctg

SEQ ID NO: 150801 - RNA, 22 nt, synthetic construct
  source 1..22: mol_type = other RNA
tctggactcagggtcacttcct

SEQ ID NO: 150802 - RNA, 22 nt, synthetic construct
  source 1..22: mol_type = other RNA
tctggactgaaaagatacagaa

SEQ ID NO: 150803 - RNA, 22 nt, synthetic construct
  source 1..22: mol_type = other RNA
tctggagcaagcatgagtatct

SEQ ID NO: 150804 - RNA, 22 nt, synthetic construct
  source 1..22: mol_type = other RNA
tctggaggctagaagtcccagt

SEQ ID NO: 150805 - RNA, 22 nt, synthetic construct
  source 1..22: mol_type = other RNA
tctggagtgttttcttcatgga

SEQ ID NO: 150806 - RNA, 22 nt, synthetic construct
  source 1..22: mol_type = other RNA
tctggatagcattatcccttta

SEQ ID NO: 150807 - RNA, 22 nt, synthetic construct
  source 1..22: mol_type = other RNA
tctggatcctgtctcagagtat

SEQ ID NO: 150808 - RNA, 22 nt, synthetic construct
  source 1..22: mol_type = other RNA
tctggatgtgtatgatcaaagt

SEQ ID NO: 150809 - RNA, 22 nt, synthetic construct
  source 1..22: mol_type = other RNA
tctggatgttaattagatatgt

SEQ ID NO: 150810 - RNA, 22 nt, synthetic construct
  source 1..22: mol_type = other RNA
tctggattatagtggtaaggag

SEQ ID NO: 150811 - RNA, 22 nt, synthetic construct
  source 1..22: mol_type = other RNA
tctggattgattccagtttctc

SEQ ID NO: 150812 - RNA, 22 nt, synthetic construct
  source 1..22: mol_type = other RNA
tctggatttttgtgtagaggtg

SEQ ID NO: 150813 - RNA, 22 nt, synthetic construct
  source 1..22: mol_type = other RNA
tctggcagcaggggctaagtag

SEQ ID NO: 150814 - RNA, 22 nt, synthetic construct
  source 1..22: mol_type = other RNA
tctggcaggtcacctagcctct

SEQ ID NO: 150815 - RNA, 22 nt, synthetic construct
  source 1..22: mol_type = other RNA
tctggccaaatccctgatcaag

SEQ ID NO: 150816 - RNA, 22 nt, synthetic construct
  source 1..22: mol_type = other RNA
tctggccctccatttccctgct

SEQ ID NO: 150817 - RNA, 22 nt, synthetic construct
  source 1..22: mol_type = other RNA
tctggcctgcaccatttattgt

SEQ ID NO: 150818 - RNA, 22 nt, synthetic construct
  source 1..22: mol_type = other RNA
tctggcctggacaacagtgtga

SEQ ID NO: 150819 - RNA, 22 nt, synthetic construct
  source 1..22: mol_type = other RNA
tctggccttctatatttttaca

SEQ ID NO: 150820 - RNA, 22 nt, synthetic construct
  source 1..22: mol_type = other RNA
tctggctcagaaacaacaacaa

SEQ ID NO: 150821 - RNA, 22 nt, synthetic construct
  source 1..22: mol_type = other RNA
tctggctgacctggtactctat

SEQ ID NO: 150822 - RNA, 22 nt, synthetic construct
  source 1..22: mol_type = other RNA
tctggctgcaattgcgcagaac

SEQ ID NO: 150823 - RNA, 22 nt, synthetic construct
  source 1..22: mol_type = other RNA
tctggctgcagggcttctgaag

SEQ ID NO: 150824 - RNA, 22 nt, synthetic construct
  source 1..22: mol_type = other RNA
tctgggaaaaaataagaaaaca

SEQ ID NO: 150825 - RNA, 22 nt, synthetic construct
  source 1..22: mol_type = other RNA
tctgggaacagcccctagcatg

SEQ ID NO: 150826 - RNA, 22 nt, synthetic construct
  source 1..22: mol_type = other RNA
tctgggaagttatgtagctggg

SEQ ID NO: 150827 - RNA, 22 nt, synthetic construct
  source 1..22: mol_type = other RNA
tctgggagttcattagaattca

SEQ ID NO: 150828 - RNA, 22 nt, synthetic construct
  source 1..22: mol_type = other RNA
tctgggataatgagtttaattc

SEQ ID NO: 150829 - RNA, 22 nt, synthetic construct
  source 1..22: mol_type = other RNA
tctgggataatgctatcatttt

SEQ ID NO: 150830 - RNA, 22 nt, synthetic construct
  source 1..22: mol_type = other RNA
tctgggatacttctaactttag

SEQ ID NO: 150831 - RNA, 22 nt, synthetic construct
  source 1..22: mol_type = other RNA
tctgggatgctcagtttcaaaa

SEQ ID NO: 150832 - RNA, 22 nt, synthetic construct
  source 1..22: mol_type = other RNA
tctgggctcactgcaacttccg

SEQ ID NO: 150833 - RNA, 22 nt, synthetic construct
  source 1..22: mol_type = other RNA
tctgggctctctattccaaatg

SEQ ID NO: 150834 - RNA, 22 nt, synthetic construct
  source 1..22: mol_type = other RNA
tctgggcttcactttcgtcatc

SEQ ID NO: 150835 - RNA, 22 nt, synthetic construct
  source 1..22: mol_type = other RNA
tctggggatgctgtctataggc

SEQ ID NO: 150836 - RNA, 22 nt, synthetic construct
  source 1..22: mol_type = other RNA
tctggggctcaagtaagtgaaa

SEQ ID NO: 150837 - RNA, 22 nt, synthetic construct
  source 1..22: mol_type = other RNA
tctggggttagggcctagaaat

SEQ ID NO: 150838 - RNA, 22 nt, synthetic construct
  source 1..22: mol_type = other RNA
tctggggttcaaaccacctaac

SEQ ID NO: 150839 - RNA, 22 nt, synthetic construct
  source 1..22: mol_type = other RNA
tctggggtttttatggttttaa

SEQ ID NO: 150840 - RNA, 22 nt, synthetic construct
  source 1..22: mol_type = other RNA
tctgggtcagaatcgtgatagt

SEQ ID NO: 150841 - RNA, 22 nt, synthetic construct
  source 1..22: mol_type = other RNA
tctgggtgatatctgtaagtca

SEQ ID NO: 150842 - RNA, 22 nt, synthetic construct
  source 1..22: mol_type = other RNA
tctgggtgcgttgaccgctttc

SEQ ID NO: 150843 - RNA, 22 nt, synthetic construct
  source 1..22: mol_type = other RNA
tctggtatctaccaaaaaacta

SEQ ID NO: 150844 - RNA, 22 nt, synthetic construct
  source 1..22: mol_type = other RNA
tctggtattctgaactttcaac

SEQ ID NO: 150845 - RNA, 22 nt, synthetic construct
  source 1..22: mol_type = other RNA
tctggtattttaagattctctt

SEQ ID NO: 150846 - RNA, 22 nt, synthetic construct
  source 1..22: mol_type = other RNA
tctggtcacaaacacaaaacaa

SEQ ID NO: 150847 - RNA, 22 nt, synthetic construct
  source 1..22: mol_type = other RNA
tctggtcctgagctttccttag

SEQ ID NO: 150848 - RNA, 22 nt, synthetic construct
  source 1..22: mol_type = other RNA
tctggtctatctcattataaca

SEQ ID NO: 150849 - RNA, 22 nt, synthetic construct
  source 1..22: mol_type = other RNA
tctggtgctggcagccttctct

SEQ ID NO: 150850 - RNA, 22 nt, synthetic construct
  source 1..22: mol_type = other RNA
tctggtggacaaaaaacgcggc

SEQ ID NO: 150851 - RNA, 22 nt, synthetic construct
  source 1..22: mol_type = other RNA
tctggtgtcgtttatttcttct

SEQ ID NO: 150852 - RNA, 22 nt, synthetic construct
  source 1..22: mol_type = other RNA
tctggtgttgcttgctctacaa

SEQ ID NO: 150853 - RNA, 22 nt, synthetic construct
  source 1..22: mol_type = other RNA
tctggtttgctttggagtcaca

SEQ ID NO: 150854 - RNA, 22 nt, synthetic construct
  source 1..22: mol_type = other RNA
tctggttttctggaggctagaa

SEQ ID NO: 150855 - RNA, 22 nt, synthetic construct
  source 1..22: mol_type = other RNA
tctgtaaacatgaacaagttac

SEQ ID NO: 150856 - RNA, 22 nt, synthetic construct
  source 1..22: mol_type = other RNA
tctgtaagcacctgtataaata

SEQ ID NO: 150857 - RNA, 22 nt, synthetic construct
  source 1..22: mol_type = other RNA
tctgtaagtcagttaacagtgc

SEQ ID NO: 150858 - RNA, 22 nt, synthetic construct
  source 1..22: mol_type = other RNA
tctgtaagtcatcaaaggaagg

SEQ ID NO: 150859 - RNA, 22 nt, synthetic construct
  source 1..22: mol_type = other RNA
tctgtaatattaaccaagaaca

SEQ ID NO: 150860 - RNA, 22 nt, synthetic construct
  source 1..22: mol_type = other RNA
tctgtaatgtttgtacttctac

SEQ ID NO: 150861 - RNA, 22 nt, synthetic construct
  source 1..22: mol_type = other RNA
tctgtacccttacgcgtggatg

SEQ ID NO: 150862 - RNA, 22 nt, synthetic construct
  source 1..22: mol_type = other RNA
tctgtagaatatccaagcacaa

SEQ ID NO: 150863 - RNA, 22 nt, synthetic construct
  source 1..22: mol_type = other RNA
tctgtagataaacgttaactat

SEQ ID NO: 150864 - RNA, 22 nt, synthetic construct
  source 1..22: mol_type = other RNA
tctgtagattgttttaggtagt

SEQ ID NO: 150865 - RNA, 22 nt, synthetic construct
  source 1..22: mol_type = other RNA
tctgtagcttcacgtgcattca

SEQ ID NO: 150866 - RNA, 22 nt, synthetic construct
  source 1..22: mol_type = other RNA
tctgtagggtgactagtgtgaa

SEQ ID NO: 150867 - RNA, 22 nt, synthetic construct
  source 1..22: mol_type = other RNA
tctgtagttacaactactcggg

SEQ ID NO: 150868 - RNA, 22 nt, synthetic construct
  source 1..22: mol_type = other RNA
tctgtatatgaaaagcttcccc

SEQ ID NO: 150869 - RNA, 22 nt, synthetic construct
  source 1..22: mol_type = other RNA
tctgtatcttttcagtccagat

SEQ ID NO: 150870 - RNA, 22 nt, synthetic construct
  source 1..22: mol_type = other RNA
tctgtatgagaagactggaaaa

SEQ ID NO: 150871 - RNA, 22 nt, synthetic construct
  source 1..22: mol_type = other RNA
tctgtatttctgctttggtacc

SEQ ID NO: 150872 - RNA, 22 nt, synthetic construct
  source 1..22: mol_type = other RNA
tctgtcaaaaagagaacacaca

SEQ ID NO: 150873 - RNA, 22 nt, synthetic construct
  source 1..22: mol_type = other RNA
tctgtcacatagacctgaatga

SEQ ID NO: 150874 - RNA, 22 nt, synthetic construct
  source 1..22: mol_type = other RNA
tctgtcacatttgaaagaaaga

SEQ ID NO: 150875 - RNA, 22 nt, synthetic construct
  source 1..22: mol_type = other RNA
tctgtcaccaggctggaatgca

SEQ ID NO: 150876 - RNA, 22 nt, synthetic construct
  source 1..22: mol_type = other RNA
tctgtcacccacgtggagtgca

SEQ ID NO: 150877 - RNA, 22 nt, synthetic construct
  source 1..22: mol_type = other RNA
tctgtcacccttgtaatcaagt

SEQ ID NO: 150878 - RNA, 22 nt, synthetic construct
  source 1..22: mol_type = other RNA
tctgtcacggtgccctacatat

SEQ ID NO: 150879 - RNA, 22 nt, synthetic construct
  source 1..22: mol_type = other RNA
tctgtcactttcctattcacac

SEQ ID NO: 150880 - RNA, 22 nt, synthetic construct
  source 1..22: mol_type = other RNA
tctgtcagcagttcagcctgca

SEQ ID NO: 150881 - RNA, 22 nt, synthetic construct
  source 1..22: mol_type = other RNA
tctgtcatctgaatcaataaga

SEQ ID NO: 150882 - RNA, 22 nt, synthetic construct
  source 1..22: mol_type = other RNA
tctgtcatggtgtgtctgcgcc

SEQ ID NO: 150883 - RNA, 22 nt, synthetic construct
  source 1..22: mol_type = other RNA
tctgtcatgtttgaattttcca

SEQ ID NO: 150884 - RNA, 22 nt, synthetic construct
  source 1..22: mol_type = other RNA
tctgtcattctgcagtttgtgt

SEQ ID NO: 150885 - RNA, 22 nt, synthetic construct
  source 1..22: mol_type = other RNA
tctgtcctcgtaaaagctaatc

SEQ ID NO: 150886 - RNA, 22 nt, synthetic construct
  source 1..22: mol_type = other RNA
tctgtcctgaatactattccta

SEQ ID NO: 150887 - RNA, 22 nt, synthetic construct
  source 1..22: mol_type = other RNA
tctgtcctgtcagtgtggttca

SEQ ID NO: 150888 - RNA, 22 nt, synthetic construct
  source 1..22: mol_type = other RNA
tctgtccttggattgctaaact

SEQ ID NO: 150889 - RNA, 22 nt, synthetic construct
  source 1..22: mol_type = other RNA
tctgtcgcccaggcggaatgca

SEQ ID NO: 150890 - RNA, 22 nt, synthetic construct
  source 1..22: mol_type = other RNA
tctgtctcacctcaaggccaac

SEQ ID NO: 150891 - RNA, 22 nt, synthetic construct
  source 1..22: mol_type = other RNA
tctgtctctacaaaaaagtaat

SEQ ID NO: 150892 - RNA, 22 nt, synthetic construct
  source 1..22: mol_type = other RNA
tctgtctgggataatgagttta

SEQ ID NO: 150893 - RNA, 22 nt, synthetic construct
  source 1..22: mol_type = other RNA
tctgtctgttcacatttcgcct

SEQ ID NO: 150894 - RNA, 22 nt, synthetic construct
  source 1..22: mol_type = other RNA
tctgtcttgatgatagaatacc

SEQ ID NO: 150895 - RNA, 22 nt, synthetic construct
  source 1..22: mol_type = other RNA
tctgtcttgtgcatcctttata

SEQ ID NO: 150896 - RNA, 22 nt, synthetic construct
  source 1..22: mol_type = other RNA
tctgtctttcagtatgtgtctc

SEQ ID NO: 150897 - RNA, 22 nt, synthetic construct
  source 1..22: mol_type = other RNA
tctgtctttggcccatatcctt

SEQ ID NO: 150898 - RNA, 22 nt, synthetic construct
  source 1..22: mol_type = other RNA
tctgtgaaaataatacctaaca

SEQ ID NO: 150899 - RNA, 22 nt, synthetic construct
  source 1..22: mol_type = other RNA
tctgtgaattgtgacagttcta

SEQ ID NO: 150900 - RNA, 22 nt, synthetic construct
  source 1..22: mol_type = other RNA
tctgtgaatttgattatgttag

SEQ ID NO: 150901 - RNA, 22 nt, synthetic construct
  source 1..22: mol_type = other RNA
tctgtgatcagaagagcactat

SEQ ID NO: 150902 - RNA, 22 nt, synthetic construct
  source 1..22: mol_type = other RNA
tctgtgatccctgatatgtcgc

SEQ ID NO: 150903 - RNA, 22 nt, synthetic construct
  source 1..22: mol_type = other RNA
tctgtgatgtagaggcagttga

SEQ ID NO: 150904 - RNA, 22 nt, synthetic construct
  source 1..22: mol_type = other RNA
tctgtgattatcagggatattg

SEQ ID NO: 150905 - RNA, 22 nt, synthetic construct
  source 1..22: mol_type = other RNA
tctgtgccaagcaacttgatca

SEQ ID NO: 150906 - RNA, 22 nt, synthetic construct
  source 1..22: mol_type = other RNA
tctgtgctagatgctaaacagt

SEQ ID NO: 150907 - RNA, 22 nt, synthetic construct
  source 1..22: mol_type = other RNA
tctgtgctagccttcttggagt

SEQ ID NO: 150908 - RNA, 22 nt, synthetic construct
  source 1..22: mol_type = other RNA
tctgtgctctgtatttaatctt

SEQ ID NO: 150909 - RNA, 22 nt, synthetic construct
  source 1..22: mol_type = other RNA
tctgtgctgagatggtcagtac

SEQ ID NO: 150910 - RNA, 22 nt, synthetic construct
  source 1..22: mol_type = other RNA
tctgtgcttaaatttttgagaa

SEQ ID NO: 150911 - RNA, 22 nt, synthetic construct
  source 1..22: mol_type = other RNA
tctgtgcttaaggaaatggaca

SEQ ID NO: 150912 - RNA, 22 nt, synthetic construct
  source 1..22: mol_type = other RNA
tctgtgcttgtgcttttaatac

SEQ ID NO: 150913 - RNA, 22 nt, synthetic construct
  source 1..22: mol_type = other RNA
tctgtggaccatgttttaggag

SEQ ID NO: 150914 - RNA, 22 nt, synthetic construct
  source 1..22: mol_type = other RNA
tctgtggactttaggctgttca

SEQ ID NO: 150915 - RNA, 22 nt, synthetic construct
  source 1..22: mol_type = other RNA
tctgtggagtcctgtcagtttc

SEQ ID NO: 150916 - RNA, 22 nt, synthetic construct
  source 1..22: mol_type = other RNA
tctgtgggttaaaagttagctg

SEQ ID NO: 150917 - RNA, 22 nt, synthetic construct
  source 1..22: mol_type = other RNA
tctgtggtctcagctcctcaga

SEQ ID NO: 150918 - RNA, 22 nt, synthetic construct
  source 1..22: mol_type = other RNA
tctgtggtttcttgaatctctc

SEQ ID NO: 150919 - RNA, 22 nt, synthetic construct
  source 1..22: mol_type = other RNA
tctgtgtaatactgtagaatgt

SEQ ID NO: 150920 - RNA, 22 nt, synthetic construct
  source 1..22: mol_type = other RNA
tctgtgtagttcatcagcataa

SEQ ID NO: 150921 - RNA, 22 nt, synthetic construct
  source 1..22: mol_type = other RNA
tctgtgtgcatgcatgtctgtc

SEQ ID NO: 150922 - RNA, 22 nt, synthetic construct
  source 1..22: mol_type = other RNA
tctgtgtggtttgccttttcac

SEQ ID NO: 150923 - RNA, 22 nt, synthetic construct
  source 1..22: mol_type = other RNA
tctgtgtttatgaatgatgcca

SEQ ID NO: 150924 - RNA, 22 nt, synthetic construct
  source 1..22: mol_type = other RNA
tctgttaaaagatacgaaaatc

SEQ ID NO: 150925 - RNA, 22 nt, synthetic construct
  source 1..22: mol_type = other RNA
tctgttaatagataggtcatgt

SEQ ID NO: 150926 - RNA, 22 nt, synthetic construct
  source 1..22: mol_type = other RNA
tctgttaatgggcacttgggat

SEQ ID NO: 150927 - RNA, 22 nt, synthetic construct
  source 1..22: mol_type = other RNA
tctgttaatgtgatatgccaca

SEQ ID NO: 150928 - RNA, 22 nt, synthetic construct
  source 1..22: mol_type = other RNA
tctgttacagctcttctcagtt

SEQ ID NO: 150929 - RNA, 22 nt, synthetic construct
  source 1..22: mol_type = other RNA
tctgttactcccgatttcagtt

SEQ ID NO: 150930 - RNA, 22 nt, synthetic construct
  source 1..22: mol_type = other RNA
tctgttagatggtgctgattta

SEQ ID NO: 150931 - RNA, 22 nt, synthetic construct
  source 1..22: mol_type = other RNA
tctgttcacatttcgccttctc

SEQ ID NO: 150932 - RNA, 22 nt, synthetic construct
  source 1..22: mol_type = other RNA
tctgttccatcggtctgtattt

SEQ ID NO: 150933 - RNA, 22 nt, synthetic construct
  source 1..22: mol_type = other RNA
tctgttcctgggttctcccttc

SEQ ID NO: 150934 - RNA, 22 nt, synthetic construct
  source 1..22: mol_type = other RNA
tctgttctagctcctgggaaaa

SEQ ID NO: 150935 - RNA, 22 nt, synthetic construct
  source 1..22: mol_type = other RNA
tctgttctcagtatcctttcaa

SEQ ID NO: 150936 - RNA, 22 nt, synthetic construct
  source 1..22: mol_type = other RNA
tctgttctgttccatcggtctg

SEQ ID NO: 150937 - RNA, 22 nt, synthetic construct
  source 1..22: mol_type = other RNA
tctgttgcaaattattttcctc

SEQ ID NO: 150938 - RNA, 22 nt, synthetic construct
  source 1..22: mol_type = other RNA
tctgttgcagtccccggtcttt

SEQ ID NO: 150939 - RNA, 22 nt, synthetic construct
  source 1..22: mol_type = other RNA
tctgttgcccagactggagttc

SEQ ID NO: 150940 - RNA, 22 nt, synthetic construct
  source 1..22: mol_type = other RNA
tctgttgcttaagtcactccat

SEQ ID NO: 150941 - RNA, 22 nt, synthetic construct
  source 1..22: mol_type = other RNA
tctgttggagagatggtagtca

SEQ ID NO: 150942 - RNA, 22 nt, synthetic construct
  source 1..22: mol_type = other RNA
tctgttggtgcttagctgcctc

SEQ ID NO: 150943 - RNA, 22 nt, synthetic construct
  source 1..22: mol_type = other RNA
tctgtttacccttactaaattt

SEQ ID NO: 150944 - RNA, 22 nt, synthetic construct
  source 1..22: mol_type = other RNA
tctgtttcctaatctaacatgt

SEQ ID NO: 150945 - RNA, 22 nt, synthetic construct
  source 1..22: mol_type = other RNA
tctgtttccttaccagtgcttg

SEQ ID NO: 150946 - RNA, 22 nt, synthetic construct
  source 1..22: mol_type = other RNA
tctgtttctgtgaaaaaacaaa

SEQ ID NO: 150947 - RNA, 22 nt, synthetic construct
  source 1..22: mol_type = other RNA
tctgtttgccatcttcaagatt

SEQ ID NO: 150948 - RNA, 22 nt, synthetic construct
  source 1..22: mol_type = other RNA
tctgtttggatgaaaaagtact

SEQ ID NO: 150949 - RNA, 22 nt, synthetic construct
  source 1..22: mol_type = other RNA
tctgtttgtttgttttgagacc

SEQ ID NO: 150950 - RNA, 22 nt, synthetic construct
  source 1..22: mol_type = other RNA
tctgttttcatttattctgttg

SEQ ID NO: 150951 - RNA, 22 nt, synthetic construct
  source 1..22: mol_type = other RNA
tctgtttttcaaaatgagatct

SEQ ID NO: 150952 - RNA, 22 nt, synthetic construct
  source 1..22: mol_type = other RNA
tctgtttttcttagtctagcca

SEQ ID NO: 150953 - RNA, 22 nt, synthetic construct
  source 1..22: mol_type = other RNA
tcttaaaaatgacaccaaaact

SEQ ID NO: 150954 - RNA, 22 nt, synthetic construct
  source 1..22: mol_type = other RNA
tcttaaaactttaggtcagaat

SEQ ID NO: 150955 - RNA, 22 nt, synthetic construct
  source 1..22: mol_type = other RNA
tcttaaaaggagatatacagga

SEQ ID NO: 150956 - RNA, 22 nt, synthetic construct
  source 1..22: mol_type = other RNA
tcttaaaataccagaggttaaa

SEQ ID NO: 150957 - RNA, 22 nt, synthetic construct
  source 1..22: mol_type = other RNA
tcttaaactgccaaaccctaca

SEQ ID NO: 150958 - RNA, 22 nt, synthetic construct
  source 1..22: mol_type = other RNA
tcttaaagtttcaaactgtggt

SEQ ID NO: 150959 - RNA, 22 nt, synthetic construct
  source 1..22: mol_type = other RNA
tcttaaatccgagacaagttct

SEQ ID NO: 150960 - RNA, 22 nt, synthetic construct
  source 1..22: mol_type = other RNA
tcttaaatgtgaattagatggc

SEQ ID NO: 150961 - RNA, 22 nt, synthetic construct
  source 1..22: mol_type = other RNA
tcttaacatttctcatgtatgt

SEQ ID NO: 150962 - RNA, 22 nt, synthetic construct
  source 1..22: mol_type = other RNA
tcttaaccattgagccaaagaa

SEQ ID NO: 150963 - RNA, 22 nt, synthetic construct
  source 1..22: mol_type = other RNA
tcttaagaaccatacagtgcct

SEQ ID NO: 150964 - RNA, 22 nt, synthetic construct
  source 1..22: mol_type = other RNA
tcttaagaaggaaaagaacaca

SEQ ID NO: 150965 - RNA, 22 nt, synthetic construct
  source 1..22: mol_type = other RNA
tcttaagacatttgggaatgtg

SEQ ID NO: 150966 - RNA, 22 nt, synthetic construct
  source 1..22: mol_type = other RNA
tcttaagaccacaaggattaat

SEQ ID NO: 150967 - RNA, 22 nt, synthetic construct
  source 1..22: mol_type = other RNA
tcttaagagactctcaagaagg

SEQ ID NO: 150968 - RNA, 22 nt, synthetic construct
  source 1..22: mol_type = other RNA
tcttaagcttaggtctttgatc

SEQ ID NO: 150969 - RNA, 22 nt, synthetic construct
  source 1..22: mol_type = other RNA
tcttaagttaaaacttgtagag

SEQ ID NO: 150970 - RNA, 22 nt, synthetic construct
  source 1..22: mol_type = other RNA
tcttaataacctcaaagtggaa

SEQ ID NO: 150971 - RNA, 22 nt, synthetic construct
  source 1..22: mol_type = other RNA
tcttaataactgcctaagtaat

SEQ ID NO: 150972 - RNA, 22 nt, synthetic construct
  source 1..22: mol_type = other RNA
tcttaatattgaaacgatgcat

SEQ ID NO: 150973 - RNA, 22 nt, synthetic construct
  source 1..22: mol_type = other RNA
tcttacaatgaatatgtactac

SEQ ID NO: 150974 - RNA, 22 nt, synthetic construct
  source 1..22: mol_type = other RNA
tcttacacattaggctctgggt

SEQ ID NO: 150975 - RNA, 22 nt, synthetic construct
  source 1..22: mol_type = other RNA
tcttacacctgtttaaaaagaa

SEQ ID NO: 150976 - RNA, 22 nt, synthetic construct
  source 1..22: mol_type = other RNA
tcttacagtgacatatgccggc

SEQ ID NO: 150977 - RNA, 22 nt, synthetic construct
  source 1..22: mol_type = other RNA
tcttacataggcttagtacagc

SEQ ID NO: 150978 - RNA, 22 nt, synthetic construct
  source 1..22: mol_type = other RNA
tcttaccaaggctggagtgcag

SEQ ID NO: 150979 - RNA, 22 nt, synthetic construct
  source 1..22: mol_type = other RNA
tcttacccccatcacactggtc

SEQ ID NO: 150980 - RNA, 22 nt, synthetic construct
  source 1..22: mol_type = other RNA
tcttaccctcacagtcacaaag

SEQ ID NO: 150981 - RNA, 22 nt, synthetic construct
  source 1..22: mol_type = other RNA
tcttaccctctagctccccatt

SEQ ID NO: 150982 - RNA, 22 nt, synthetic construct
  source 1..22: mol_type = other RNA
tcttaccctttactcagattca

SEQ ID NO: 150983 - RNA, 22 nt, synthetic construct
  source 1..22: mol_type = other RNA
tcttacctaagcatcgtgaagt

SEQ ID NO: 150984 - RNA, 22 nt, synthetic construct
  source 1..22: mol_type = other RNA
tcttacctcaaaggagagaaga

SEQ ID NO: 150985 - RNA, 22 nt, synthetic construct
  source 1..22: mol_type = other RNA
tcttaccttctaaaatcatcac

SEQ ID NO: 150986 - RNA, 22 nt, synthetic construct
  source 1..22: mol_type = other RNA
tcttactgatttatagtgtttc

SEQ ID NO: 150987 - RNA, 22 nt, synthetic construct
  source 1..22: mol_type = other RNA
tcttactggtgttaggcaatcc

SEQ ID NO: 150988 - RNA, 22 nt, synthetic construct
  source 1..22: mol_type = other RNA
tcttactgtaagttcctggact

SEQ ID NO: 150989 - RNA, 22 nt, synthetic construct
  source 1..22: mol_type = other RNA
tcttagacctcctagattgacc

SEQ ID NO: 150990 - RNA, 22 nt, synthetic construct
  source 1..22: mol_type = other RNA
tcttagccgggaggagccaagt

SEQ ID NO: 150991 - RNA, 22 nt, synthetic construct
  source 1..22: mol_type = other RNA
tcttagctatattcacttttgg

SEQ ID NO: 150992 - RNA, 22 nt, synthetic construct
  source 1..22: mol_type = other RNA
tcttagctcttaagcttaggtc

SEQ ID NO: 150993 - RNA, 22 nt, synthetic construct
  source 1..22: mol_type = other RNA
tcttagctcttcccttaacctt

SEQ ID NO: 150994 - RNA, 22 nt, synthetic construct
  source 1..22: mol_type = other RNA
tcttagcttagaagaagactta

SEQ ID NO: 150995 - RNA, 22 nt, synthetic construct
  source 1..22: mol_type = other RNA
tcttaggaagctatggagcact

SEQ ID NO: 150996 - RNA, 22 nt, synthetic construct
  source 1..22: mol_type = other RNA
tcttaggccataaatcaaggta

SEQ ID NO: 150997 - RNA, 22 nt, synthetic construct
  source 1..22: mol_type = other RNA
tcttaggtttctcatttttcag

SEQ ID NO: 150998 - RNA, 22 nt, synthetic construct
  source 1..22: mol_type = other RNA
tcttagtaaatatccgaaagaa

SEQ ID NO: 150999 - RNA, 22 nt, synthetic construct
  source 1..22: mol_type = other RNA
tcttagtctgacttctctcaga

SEQ ID NO: 151000 - RNA, 22 nt, synthetic construct
  source 1..22: mol_type = other RNA
tcttagtgatgtcttttgaaga

SEQ ID NO: 151001 - RNA, 22 nt, synthetic construct
  source 1..22: mol_type = other RNA
tcttagtgttcccttcttaaat

SEQ ID NO: 151002 - RNA, 22 nt, synthetic construct
  source 1..22: mol_type = other RNA
tcttagttccattattccataa

SEQ ID NO: 151003 - RNA, 22 nt, synthetic construct
  source 1..22: mol_type = other RNA
tcttagttctgcttccacattt

SEQ ID NO: 151004 - RNA, 22 nt, synthetic construct
  source 1..22: mol_type = other RNA
tcttatactagtagaaagcagg

SEQ ID NO: 151005 - RNA, 22 nt, synthetic construct
  source 1..22: mol_type = other RNA
tcttataggttgaatagggcct

SEQ ID NO: 151006 - RNA, 22 nt, synthetic construct
  source 1..22: mol_type = other RNA
tcttatatcctaaacacttagc

SEQ ID NO: 151007 - RNA, 22 nt, synthetic construct
  source 1..22: mol_type = other RNA
tcttatattaattctgaggcct

SEQ ID NO: 151008 - RNA, 22 nt, synthetic construct
  source 1..22: mol_type = other RNA
tcttatccctacctaaaaaggg

SEQ ID NO: 151009 - RNA, 22 nt, synthetic construct
  source 1..22: mol_type = other RNA
tcttatctaggcgaaatatctc

SEQ ID NO: 151010 - RNA, 22 nt, synthetic construct
  source 1..22: mol_type = other RNA
tcttatctgctgtcggttttct

SEQ ID NO: 151011 - RNA, 22 nt, synthetic construct
  source 1..22: mol_type = other RNA
tcttatgaggttattcaaaaca

SEQ ID NO: 151012 - RNA, 22 nt, synthetic construct
  source 1..22: mol_type = other RNA
tcttatgctggtgggctttgag

SEQ ID NO: 151013 - RNA, 22 nt, synthetic construct
  source 1..22: mol_type = other RNA
tcttatggctataaccacgagt

SEQ ID NO: 151014 - RNA, 22 nt, synthetic construct
  source 1..22: mol_type = other RNA
tcttattaatgtgttgtctgat

SEQ ID NO: 151015 - RNA, 22 nt, synthetic construct
  source 1..22: mol_type = other RNA
tcttattccccagggaaacctt

SEQ ID NO: 151016 - RNA, 22 nt, synthetic construct
  source 1..22: mol_type = other RNA
tcttattgattcagatgacaga

SEQ ID NO: 151017 - RNA, 22 nt, synthetic construct
  source 1..22: mol_type = other RNA
tcttattggttatctgtacttt

SEQ ID NO: 151018 - RNA, 22 nt, synthetic construct
  source 1..22: mol_type = other RNA
tcttatttccttccagtttata

SEQ ID NO: 151019 - RNA, 22 nt, synthetic construct
  source 1..22: mol_type = other RNA
tcttatttgttactgatctgct

SEQ ID NO: 151020 - RNA, 22 nt, synthetic construct
  source 1..22: mol_type = other RNA
tcttattttttcccagatacgt

SEQ ID NO: 151021 - RNA, 22 nt, synthetic construct
  source 1..22: mol_type = other RNA
tcttcaaaagacatcactaaga

SEQ ID NO: 151022 - RNA, 22 nt, synthetic construct
  source 1..22: mol_type = other RNA
tcttcaaaatctgatgtgtatg

SEQ ID NO: 151023 - RNA, 22 nt, synthetic construct
  source 1..22: mol_type = other RNA
tcttcaaagttatgtttatgac

SEQ ID NO: 151024 - RNA, 22 nt, synthetic construct
  source 1..22: mol_type = other RNA
tcttcaaccatacttttcaact

SEQ ID NO: 151025 - RNA, 22 nt, synthetic construct
  source 1..22: mol_type = other RNA
tcttcaacctcaactttaggtt

SEQ ID NO: 151026 - RNA, 22 nt, synthetic construct
  source 1..22: mol_type = other RNA
tcttcaagatactgcactaaac

SEQ ID NO: 151027 - RNA, 22 nt, synthetic construct
  source 1..22: mol_type = other RNA
tcttcaagatttcataggcatc

SEQ ID NO: 151028 - RNA, 22 nt, synthetic construct
  source 1..22: mol_type = other RNA
tcttcaagcattgggagctttc

SEQ ID NO: 151029 - RNA, 22 nt, synthetic construct
  source 1..22: mol_type = other RNA
tcttcaatattttggaagacta

SEQ ID NO: 151030 - RNA, 22 nt, synthetic construct
  source 1..22: mol_type = other RNA
tcttcacaaacaaatccttttc

SEQ ID NO: 151031 - RNA, 22 nt, synthetic construct
  source 1..22: mol_type = other RNA
tcttcacacattaactatggac

SEQ ID NO: 151032 - RNA, 22 nt, synthetic construct
  source 1..22: mol_type = other RNA
tcttcacacttagttcaagatg

SEQ ID NO: 151033 - RNA, 22 nt, synthetic construct
  source 1..22: mol_type = other RNA
tcttcaccaactgaagcggggc

SEQ ID NO: 151034 - RNA, 22 nt, synthetic construct
  source 1..22: mol_type = other RNA
tcttcaccattccagccattct

SEQ ID NO: 151035 - RNA, 22 nt, synthetic construct
  source 1..22: mol_type = other RNA
tcttcaccgtgcaactagagaa

SEQ ID NO: 151036 - RNA, 22 nt, synthetic construct
  source 1..22: mol_type = other RNA
tcttcacgtggcgctccctctg

SEQ ID NO: 151037 - RNA, 22 nt, synthetic construct
  source 1..22: mol_type = other RNA
tcttcactcttaaaaggagata

SEQ ID NO: 151038 - RNA, 22 nt, synthetic construct
  source 1..22: mol_type = other RNA
tcttcactgactacacatacac

SEQ ID NO: 151039 - RNA, 22 nt, synthetic construct
  source 1..22: mol_type = other RNA
tcttcagaagaaattacttctt

SEQ ID NO: 151040 - RNA, 22 nt, synthetic construct
  source 1..22: mol_type = other RNA
tcttcagaagaggataaggggc

SEQ ID NO: 151041 - RNA, 22 nt, synthetic construct
  source 1..22: mol_type = other RNA
tcttcagaggccctggtgcttt

SEQ ID NO: 151042 - RNA, 22 nt, synthetic construct
  source 1..22: mol_type = other RNA
tcttcagaggtctgttactccc

SEQ ID NO: 151043 - RNA, 22 nt, synthetic construct
  source 1..22: mol_type = other RNA
tcttcagcaaggaccattagca

SEQ ID NO: 151044 - RNA, 22 nt, synthetic construct
  source 1..22: mol_type = other RNA
tcttcaggtctctctgaaatta

SEQ ID NO: 151045 - RNA, 22 nt, synthetic construct
  source 1..22: mol_type = other RNA
tcttcatcagtccctgtgtttt

SEQ ID NO: 151046 - RNA, 22 nt, synthetic construct
  source 1..22: mol_type = other RNA
tcttcatgattcagtcttggta

SEQ ID NO: 151047 - RNA, 22 nt, synthetic construct
  source 1..22: mol_type = other RNA
tcttcatggactagactgcctg

SEQ ID NO: 151048 - RNA, 22 nt, synthetic construct
  source 1..22: mol_type = other RNA
tcttcatttctaagccatgttt

SEQ ID NO: 151049 - RNA, 22 nt, synthetic construct
  source 1..22: mol_type = other RNA
tcttccaaaatattgaagaggg

SEQ ID NO: 151050 - RNA, 22 nt, synthetic construct
  source 1..22: mol_type = other RNA
tcttccaaataatcccgcacct

SEQ ID NO: 151051 - RNA, 22 nt, synthetic construct
  source 1..22: mol_type = other RNA
tcttccaattgcagaaaaatag

SEQ ID NO: 151052 - RNA, 22 nt, synthetic construct
  source 1..22: mol_type = other RNA
tcttccactagtgggatcaaac

SEQ ID NO: 151053 - RNA, 22 nt, synthetic construct
  source 1..22: mol_type = other RNA
tcttccagaaggagaaaacaaa

SEQ ID NO: 151054 - RNA, 22 nt, synthetic construct
  source 1..22: mol_type = other RNA
tcttccagcctggtaatgaata

SEQ ID NO: 151055 - RNA, 22 nt, synthetic construct
  source 1..22: mol_type = other RNA
tcttccatacgaaagcctttat

SEQ ID NO: 151056 - RNA, 22 nt, synthetic construct
  source 1..22: mol_type = other RNA
tcttccattttagatcaagtcc

SEQ ID NO: 151057 - RNA, 22 nt, synthetic construct
  source 1..22: mol_type = other RNA
tcttcccaatcctttgtgcagg

SEQ ID NO: 151058 - RNA, 22 nt, synthetic construct
  source 1..22: mol_type = other RNA
tcttcccatctcactcacctag

SEQ ID NO: 151059 - RNA, 22 nt, synthetic construct
  source 1..22: mol_type = other RNA
tcttcccatgaacatggtttga

SEQ ID NO: 151060 - RNA, 22 nt, synthetic construct
  source 1..22: mol_type = other RNA
tcttcccccaaaacttaggagg

SEQ ID NO: 151061 - RNA, 22 nt, synthetic construct
  source 1..22: mol_type = other RNA
tcttccctaaagagaatcttaa

SEQ ID NO: 151062 - RNA, 22 nt, synthetic construct
  source 1..22: mol_type = other RNA
tcttcccttaacctttttcttt

SEQ ID NO: 151063 - RNA, 22 nt, synthetic construct
  source 1..22: mol_type = other RNA
tcttcccttgtgcacctcgggt

SEQ ID NO: 151064 - RNA, 22 nt, synthetic construct
  source 1..22: mol_type = other RNA
tcttccgtctcaagattgtgtg

SEQ ID NO: 151065 - RNA, 22 nt, synthetic construct
  source 1..22: mol_type = other RNA
tcttcctcatccctcatatcag

SEQ ID NO: 151066 - RNA, 22 nt, synthetic construct
  source 1..22: mol_type = other RNA
tcttcctcctctggacattatc

SEQ ID NO: 151067 - RNA, 22 nt, synthetic construct
  source 1..22: mol_type = other RNA
tcttcctgtatatctcctttta

SEQ ID NO: 151068 - RNA, 22 nt, synthetic construct
  source 1..22: mol_type = other RNA
tcttcctgtcttggacccatgc

SEQ ID NO: 151069 - RNA, 22 nt, synthetic construct
  source 1..22: mol_type = other RNA
tcttcctgttgctttaacctct

SEQ ID NO: 151070 - RNA, 22 nt, synthetic construct
  source 1..22: mol_type = other RNA
tcttccttaatgtttagtagaa

SEQ ID NO: 151071 - RNA, 22 nt, synthetic construct
  source 1..22: mol_type = other RNA
tcttccttatccgataaagggt

SEQ ID NO: 151072 - RNA, 22 nt, synthetic construct
  source 1..22: mol_type = other RNA
tcttcgagggggctgagtatgg

SEQ ID NO: 151073 - RNA, 22 nt, synthetic construct
  source 1..22: mol_type = other RNA
tcttcgctcttttaaaaattac

SEQ ID NO: 151074 - RNA, 22 nt, synthetic construct
  source 1..22: mol_type = other RNA
tcttcgggtgtcagaattccat

SEQ ID NO: 151075 - RNA, 22 nt, synthetic construct
  source 1..22: mol_type = other RNA
tcttctaaccctcaaatgccat

SEQ ID NO: 151076 - RNA, 22 nt, synthetic construct
  source 1..22: mol_type = other RNA
tcttctaagctaagagttttat

SEQ ID NO: 151077 - RNA, 22 nt, synthetic construct
  source 1..22: mol_type = other RNA
tcttctaataggaagtggctag

SEQ ID NO: 151078 - RNA, 22 nt, synthetic construct
  source 1..22: mol_type = other RNA
tcttctacaatggttgaactag

SEQ ID NO: 151079 - RNA, 22 nt, synthetic construct
  source 1..22: mol_type = other RNA
tcttctactcactgtactactg

SEQ ID NO: 151080 - RNA, 22 nt, synthetic construct
  source 1..22: mol_type = other RNA
tcttctactgtgaattcactaa

SEQ ID NO: 151081 - RNA, 22 nt, synthetic construct
  source 1..22: mol_type = other RNA
tcttctagctttcagcactgct

SEQ ID NO: 151082 - RNA, 22 nt, synthetic construct
  source 1..22: mol_type = other RNA
tcttctagtcacatttgcttta

SEQ ID NO: 151083 - RNA, 22 nt, synthetic construct
  source 1..22: mol_type = other RNA
tcttctattccagagaattcag

SEQ ID NO: 151084 - RNA, 22 nt, synthetic construct
  source 1..22: mol_type = other RNA
tcttctcagatctgttgcagtc

SEQ ID NO: 151085 - RNA, 22 nt, synthetic construct
  source 1..22: mol_type = other RNA
tcttctcagttgcagcatgctc

SEQ ID NO: 151086 - RNA, 22 nt, synthetic construct
  source 1..22: mol_type = other RNA
tcttctccaaggaaagtgtgct

SEQ ID NO: 151087 - RNA, 22 nt, synthetic construct
  source 1..22: mol_type = other RNA
tcttctccctcttcgctctttt

SEQ ID NO: 151088 - RNA, 22 nt, synthetic construct
  source 1..22: mol_type = other RNA
tcttctctaatgtaaacagcat

SEQ ID NO: 151089 - RNA, 22 nt, synthetic construct
  source 1..22: mol_type = other RNA
tcttctctcctttgaggtaaga

SEQ ID NO: 151090 - RNA, 22 nt, synthetic construct
  source 1..22: mol_type = other RNA
tcttctctctctgcttcactaa

SEQ ID NO: 151091 - RNA, 22 nt, synthetic construct
  source 1..22: mol_type = other RNA
tcttctgaagaaattatctgtg

SEQ ID NO: 151092 - RNA, 22 nt, synthetic construct
  source 1..22: mol_type = other RNA
tcttctgaagaggctttctgtg

SEQ ID NO: 151093 - RNA, 22 nt, synthetic construct
  source 1..22: mol_type = other RNA
tcttctgatcacagaagtgttt

SEQ ID NO: 151094 - RNA, 22 nt, synthetic construct
  source 1..22: mol_type = other RNA
tcttctgcaagttgctatccag

SEQ ID NO: 151095 - RNA, 22 nt, synthetic construct
  source 1..22: mol_type = other RNA
tcttctggatagcattatccct

SEQ ID NO: 151096 - RNA, 22 nt, synthetic construct
  source 1..22: mol_type = other RNA
tcttctgtaatattaaccaaga

SEQ ID NO: 151097 - RNA, 22 nt, synthetic construct
  source 1..22: mol_type = other RNA
tcttctgttggagagatggtag

SEQ ID NO: 151098 - RNA, 22 nt, synthetic construct
  source 1..22: mol_type = other RNA
tcttctgtttttcttagtctag

SEQ ID NO: 151099 - RNA, 22 nt, synthetic construct
  source 1..22: mol_type = other RNA
tcttcttagtgttcccttctta

SEQ ID NO: 151100 - RNA, 22 nt, synthetic construct
  source 1..22: mol_type = other RNA
tcttcttatttgttactgatct

SEQ ID NO: 151101 - RNA, 22 nt, synthetic construct
  source 1..22: mol_type = other RNA
tcttcttctaagctaagagttt

SEQ ID NO: 151102 - RNA, 22 nt, synthetic construct
  source 1..22: mol_type = other RNA
tcttcttggattttcttcattt

SEQ ID NO: 151103 - RNA, 22 nt, synthetic construct
  source 1..22: mol_type = other RNA
tcttcttgttttgttctcgttc

SEQ ID NO: 151104 - RNA, 22 nt, synthetic construct
  source 1..22: mol_type = other RNA
tcttctttggctcaatggttaa

SEQ ID NO: 151105 - RNA, 22 nt, synthetic construct
  source 1..22: mol_type = other RNA
tcttcttttacttgcttggttt

SEQ ID NO: 151106 - RNA, 22 nt, synthetic construct
  source 1..22: mol_type = other RNA
tcttgaaaggggccaggtgtgg

SEQ ID NO: 151107 - RNA, 22 nt, synthetic construct
  source 1..22: mol_type = other RNA
tcttgaactaagtgtgaagatt

SEQ ID NO: 151108 - RNA, 22 nt, synthetic construct
  source 1..22: mol_type = other RNA
tcttgaagaaaccaagagcata

SEQ ID NO: 151109 - RNA, 22 nt, synthetic construct
  source 1..22: mol_type = other RNA
tcttgaagatggcaaacagact

SEQ ID NO: 151110 - RNA, 22 nt, synthetic construct
  source 1..22: mol_type = other RNA
tcttgaagtcagttacagcatt

SEQ ID NO: 151111 - RNA, 22 nt, synthetic construct
  source 1..22: mol_type = other RNA
tcttgaatagcatcttagctct

SEQ ID NO: 151112 - RNA, 22 nt, synthetic construct
  source 1..22: mol_type = other RNA
tcttgaatctctctatccacca

SEQ ID NO: 151113 - RNA, 22 nt, synthetic construct
  source 1..22: mol_type = other RNA
tcttgacatgattgaggacttc

SEQ ID NO: 151114 - RNA, 22 nt, synthetic construct
  source 1..22: mol_type = other RNA
tcttgacctcagtggtagttac

SEQ ID NO: 151115 - RNA, 22 nt, synthetic construct
  source 1..22: mol_type = other RNA
tcttgaccttagttttcacttt

SEQ ID NO: 151116 - RNA, 22 nt, synthetic construct
  source 1..22: mol_type = other RNA
tcttgaccttgtgcatgtgcag

SEQ ID NO: 151117 - RNA, 22 nt, synthetic construct
  source 1..22: mol_type = other RNA
tcttgacttcacttccaagtcc

SEQ ID NO: 151118 - RNA, 22 nt, synthetic construct
  source 1..22: mol_type = other RNA
tcttgagacggaagactcatac

SEQ ID NO: 151119 - RNA, 22 nt, synthetic construct
  source 1..22: mol_type = other RNA
tcttgagagtctcttaagacca

SEQ ID NO: 151120 - RNA, 22 nt, synthetic construct
  source 1..22: mol_type = other RNA
tcttgagttaggaatttacatt

SEQ ID NO: 151121 - RNA, 22 nt, synthetic construct
  source 1..22: mol_type = other RNA
tcttgatgatagaataccactt

SEQ ID NO: 151122 - RNA, 22 nt, synthetic construct
  source 1..22: mol_type = other RNA
tcttgcaaaacaatagcccagc

SEQ ID NO: 151123 - RNA, 22 nt, synthetic construct
  source 1..22: mol_type = other RNA
tcttgcaaaacggaaactttat

SEQ ID NO: 151124 - RNA, 22 nt, synthetic construct
  source 1..22: mol_type = other RNA
tcttgcataactcgtaatgcga

SEQ ID NO: 151125 - RNA, 22 nt, synthetic construct
  source 1..22: mol_type = other RNA
tcttgcattagagccccaagaa

SEQ ID NO: 151126 - RNA, 22 nt, synthetic construct
  source 1..22: mol_type = other RNA
tcttgcccaagctggtcctgaa

SEQ ID NO: 151127 - RNA, 22 nt, synthetic construct
  source 1..22: mol_type = other RNA
tcttgcctaggctggagtgcaa

SEQ ID NO: 151128 - RNA, 22 nt, synthetic construct
  source 1..22: mol_type = other RNA
tcttgcggtcttttagccaaca

SEQ ID NO: 151129 - RNA, 22 nt, synthetic construct
  source 1..22: mol_type = other RNA
tcttgctaaacatgtatactaa

SEQ ID NO: 151130 - RNA, 22 nt, synthetic construct
  source 1..22: mol_type = other RNA
tcttgctctgtcacccacgtgg

SEQ ID NO: 151131 - RNA, 22 nt, synthetic construct
  source 1..22: mol_type = other RNA
tcttgctggaagttggcccaac

SEQ ID NO: 151132 - RNA, 22 nt, synthetic construct
  source 1..22: mol_type = other RNA
tcttgctttgctgccccagcta

SEQ ID NO: 151133 - RNA, 22 nt, synthetic construct
  source 1..22: mol_type = other RNA
tcttggaaatgatacctcattt

SEQ ID NO: 151134 - RNA, 22 nt, synthetic construct
  source 1..22: mol_type = other RNA
tcttggaaattagaaatgtgga

SEQ ID NO: 151135 - RNA, 22 nt, synthetic construct
  source 1..22: mol_type = other RNA
tcttggaatgtgcacctccagt

SEQ ID NO: 151136 - RNA, 22 nt, synthetic construct
  source 1..22: mol_type = other RNA
tcttggacccatgcccatgtgc

SEQ ID NO: 151137 - RNA, 22 nt, synthetic construct
  source 1..22: mol_type = other RNA
tcttggagtaaacctgcaattt

SEQ ID NO: 151138 - RNA, 22 nt, synthetic construct
  source 1..22: mol_type = other RNA
tcttggccattttcttttaaat

SEQ ID NO: 151139 - RNA, 22 nt, synthetic construct
  source 1..22: mol_type = other RNA
tcttggccgaatgtggtggtat

SEQ ID NO: 151140 - RNA, 22 nt, synthetic construct
  source 1..22: mol_type = other RNA
tcttggctattgtcagtaattc

SEQ ID NO: 151141 - RNA, 22 nt, synthetic construct
  source 1..22: mol_type = other RNA
tcttggcttttggcagcgtaac

SEQ ID NO: 151142 - RNA, 22 nt, synthetic construct
  source 1..22: mol_type = other RNA
tcttgggaatactttcccatct

SEQ ID NO: 151143 - RNA, 22 nt, synthetic construct
  source 1..22: mol_type = other RNA
tcttggggctctaatgcaagag

SEQ ID NO: 151144 - RNA, 22 nt, synthetic construct
  source 1..22: mol_type = other RNA
tcttgggtgaataacccatatc

SEQ ID NO: 151145 - RNA, 22 nt, synthetic construct
  source 1..22: mol_type = other RNA
tcttggtagtttgcacgttttt

SEQ ID NO: 151146 - RNA, 22 nt, synthetic construct
  source 1..22: mol_type = other RNA
tcttggtctgcagactcttgtc

SEQ ID NO: 151147 - RNA, 22 nt, synthetic construct
  source 1..22: mol_type = other RNA
tcttggtctttctcccaggtca

SEQ ID NO: 151148 - RNA, 22 nt, synthetic construct
  source 1..22: mol_type = other RNA
tcttggtggtaactgatgtgag

SEQ ID NO: 151149 - RNA, 22 nt, synthetic construct
  source 1..22: mol_type = other RNA
tcttggtgtgctcttttcatca

SEQ ID NO: 151150 - RNA, 22 nt, synthetic construct
  source 1..22: mol_type = other RNA
tcttggttaatattacagaaga

SEQ ID NO: 151151 - RNA, 22 nt, synthetic construct
  source 1..22: mol_type = other RNA
tcttggtttcttcaagatactg

SEQ ID NO: 151152 - RNA, 22 nt, synthetic construct
  source 1..22: mol_type = other RNA
tcttgtactcccagcctcaaac

SEQ ID NO: 151153 - RNA, 22 nt, synthetic construct
  source 1..22: mol_type = other RNA
tcttgtagtatttttgcaactt

SEQ ID NO: 151154 - RNA, 22 nt, synthetic construct
  source 1..22: mol_type = other RNA
tcttgtcaataatttggatgaa

SEQ ID NO: 151155 - RNA, 22 nt, synthetic construct
  source 1..22: mol_type = other RNA
tcttgtcataacagtattgtct

SEQ ID NO: 151156 - RNA, 22 nt, synthetic construct
  source 1..22: mol_type = other RNA
tcttgtcatgaatgaatgttga

SEQ ID NO: 151157 - RNA, 22 nt, synthetic construct
  source 1..22: mol_type = other RNA
tcttgtcccggcatgcctctcc

SEQ ID NO: 151158 - RNA, 22 nt, synthetic construct
  source 1..22: mol_type = other RNA
tcttgtctcaacctttgcctcc

SEQ ID NO: 151159 - RNA, 22 nt, synthetic construct
  source 1..22: mol_type = other RNA
tcttgtgaattgataaaagtca

SEQ ID NO: 151160 - RNA, 22 nt, synthetic construct
  source 1..22: mol_type = other RNA
tcttgtgcatcctttatacctt

SEQ ID NO: 151161 - RNA, 22 nt, synthetic construct
  source 1..22: mol_type = other RNA
tcttgtggctgacatgtgtaaa

SEQ ID NO: 151162 - RNA, 22 nt, synthetic construct
  source 1..22: mol_type = other RNA
tcttgtgggtattttgttgttg

SEQ ID NO: 151163 - RNA, 22 nt, synthetic construct
  source 1..22: mol_type = other RNA
tcttgtgtatcttttgttagat

SEQ ID NO: 151164 - RNA, 22 nt, synthetic construct
  source 1..22: mol_type = other RNA
tcttgttaagcattttccggtt

SEQ ID NO: 151165 - RNA, 22 nt, synthetic construct
  source 1..22: mol_type = other RNA
tcttgttagaattttgcttttg

SEQ ID NO: 151166 - RNA, 22 nt, synthetic construct
  source 1..22: mol_type = other RNA
tcttgttagtaggaaaaccatg

SEQ ID NO: 151167 - RNA, 22 nt, synthetic construct
  source 1..22: mol_type = other RNA
tcttgttataagcaaagatatg

SEQ ID NO: 151168 - RNA, 22 nt, synthetic construct
  source 1..22: mol_type = other RNA
tcttgttgaggatgactgtcct

SEQ ID NO: 151169 - RNA, 22 nt, synthetic construct
  source 1..22: mol_type = other RNA
tcttgtttacccagtgtgtttg

SEQ ID NO: 151170 - RNA, 22 nt, synthetic construct
  source 1..22: mol_type = other RNA
tcttgttttcttgagatggagt

SEQ ID NO: 151171 - RNA, 22 nt, synthetic construct
  source 1..22: mol_type = other RNA
tcttgttttgttctcgttcatg

SEQ ID NO: 151172 - RNA, 22 nt, synthetic construct
  source 1..22: mol_type = other RNA
tctttaaaaccagagcggaatt

SEQ ID NO: 151173 - RNA, 22 nt, synthetic construct
  source 1..22: mol_type = other RNA
tctttaaaactgctgagtcttc

SEQ ID NO: 151174 - RNA, 22 nt, synthetic construct
  source 1..22: mol_type = other RNA
tctttaaaagaaagctctcaat

SEQ ID NO: 151175 - RNA, 22 nt, synthetic construct
  source 1..22: mol_type = other RNA
tctttaaagctgaactcctttc

SEQ ID NO: 151176 - RNA, 22 nt, synthetic construct
  source 1..22: mol_type = other RNA
tctttaattatgagcattcccc

SEQ ID NO: 151177 - RNA, 22 nt, synthetic construct
  source 1..22: mol_type = other RNA
tctttacttcccttctcgaagt

SEQ ID NO: 151178 - RNA, 22 nt, synthetic construct
  source 1..22: mol_type = other RNA
tctttactttcagctcaaacag

SEQ ID NO: 151179 - RNA, 22 nt, synthetic construct
  source 1..22: mol_type = other RNA
tctttaggaagcttccttgatc

SEQ ID NO: 151180 - RNA, 22 nt, synthetic construct
  source 1..22: mol_type = other RNA
tctttagggaagatagtactga

SEQ ID NO: 151181 - RNA, 22 nt, synthetic construct
  source 1..22: mol_type = other RNA
tctttaggtgttttttccttct

SEQ ID NO: 151182 - RNA, 22 nt, synthetic construct
  source 1..22: mol_type = other RNA
tctttagtgttgcttggtgttg

SEQ ID NO: 151183 - RNA, 22 nt, synthetic construct
  source 1..22: mol_type = other RNA
tctttatctccacatttctaca

SEQ ID NO: 151184 - RNA, 22 nt, synthetic construct
  source 1..22: mol_type = other RNA
tctttatgccaatatcacactg

SEQ ID NO: 151185 - RNA, 22 nt, synthetic construct
  source 1..22: mol_type = other RNA
tctttcaaatgtgacagaacaa

SEQ ID NO: 151186 - RNA, 22 nt, synthetic construct
  source 1..22: mol_type = other RNA
tctttcaaggggccttttgtca

SEQ ID NO: 151187 - RNA, 22 nt, synthetic construct
  source 1..22: mol_type = other RNA
tctttcagccatcccagctaca

SEQ ID NO: 151188 - RNA, 22 nt, synthetic construct
  source 1..22: mol_type = other RNA
tctttcagtatgtgtctctgac

SEQ ID NO: 151189 - RNA, 22 nt, synthetic construct
  source 1..22: mol_type = other RNA
tctttcatatctgattttgtgt

SEQ ID NO: 151190 - RNA, 22 nt, synthetic construct
  source 1..22: mol_type = other RNA
tctttccactctctggctgcaa

SEQ ID NO: 151191 - RNA, 22 nt, synthetic construct
  source 1..22: mol_type = other RNA
tctttccattcaatccttgtaa

SEQ ID NO: 151192 - RNA, 22 nt, synthetic construct
  source 1..22: mol_type = other RNA
tctttcccattaccaaaacctg

SEQ ID NO: 151193 - RNA, 22 nt, synthetic construct
  source 1..22: mol_type = other RNA
tctttcctgatcacaccctcct

SEQ ID NO: 151194 - RNA, 22 nt, synthetic construct
  source 1..22: mol_type = other RNA
tctttcctgatcagcaccctca

SEQ ID NO: 151195 - RNA, 22 nt, synthetic construct
  source 1..22: mol_type = other RNA
tctttcctgtgatttatgtggc

SEQ ID NO: 151196 - RNA, 22 nt, synthetic construct
  source 1..22: mol_type = other RNA
tctttcgcatcattcaaatgat

SEQ ID NO: 151197 - RNA, 22 nt, synthetic construct
  source 1..22: mol_type = other RNA
tctttcggatatttactaagaa

SEQ ID NO: 151198 - RNA, 22 nt, synthetic construct
  source 1..22: mol_type = other RNA
tctttctagattcatatgcttt

SEQ ID NO: 151199 - RNA, 22 nt, synthetic construct
  source 1..22: mol_type = other RNA
tctttctcaacttcctgtttta

SEQ ID NO: 151200 - RNA, 22 nt, synthetic construct
  source 1..22: mol_type = other RNA
tctttctcccaggtcagtagta

SEQ ID NO: 151201 - RNA, 22 nt, synthetic construct
  source 1..22: mol_type = other RNA
tctttctctttcagccatccca

SEQ ID NO: 151202 - RNA, 22 nt, synthetic construct
  source 1..22: mol_type = other RNA
tctttctgaaattctcattagt

SEQ ID NO: 151203 - RNA, 22 nt, synthetic construct
  source 1..22: mol_type = other RNA
tctttctgaactcaaaagtgaa

SEQ ID NO: 151204 - RNA, 22 nt, synthetic construct
  source 1..22: mol_type = other RNA
tctttctggggatgctgtctat

SEQ ID NO: 151205 - RNA, 22 nt, synthetic construct
  source 1..22: mol_type = other RNA
tctttctttcaaatgtgacaga

SEQ ID NO: 151206 - RNA, 22 nt, synthetic construct
  source 1..22: mol_type = other RNA
tctttgaaaggaatccggcttt

SEQ ID NO: 151207 - RNA, 22 nt, synthetic construct
  source 1..22: mol_type = other RNA
tctttgaataaagggtcagaat

SEQ ID NO: 151208 - RNA, 22 nt, synthetic construct
  source 1..22: mol_type = other RNA
tctttgagtagttcatgttagc

SEQ ID NO: 151209 - RNA, 22 nt, synthetic construct
  source 1..22: mol_type = other RNA
tctttgatccattttgagttca

SEQ ID NO: 151210 - RNA, 22 nt, synthetic construct
  source 1..22: mol_type = other RNA
tctttgctaataagtgagtttg

SEQ ID NO: 151211 - RNA, 22 nt, synthetic construct
  source 1..22: mol_type = other RNA
tctttggaaaaatgtccgttga

SEQ ID NO: 151212 - RNA, 22 nt, synthetic construct
  source 1..22: mol_type = other RNA
tctttggagctgtatttttgct

SEQ ID NO: 151213 - RNA, 22 nt, synthetic construct
  source 1..22: mol_type = other RNA
tctttggatatccccatttttc

SEQ ID NO: 151214 - RNA, 22 nt, synthetic construct
  source 1..22: mol_type = other RNA
tctttggcaaacttagaatata

SEQ ID NO: 151215 - RNA, 22 nt, synthetic construct
  source 1..22: mol_type = other RNA
tctttggcccatatccttttat

SEQ ID NO: 151216 - RNA, 22 nt, synthetic construct
  source 1..22: mol_type = other RNA
tctttggcccattttcgaatta

SEQ ID NO: 151217 - RNA, 22 nt, synthetic construct
  source 1..22: mol_type = other RNA
tctttggctcaatggttaagac

SEQ ID NO: 151218 - RNA, 22 nt, synthetic construct
  source 1..22: mol_type = other RNA
tctttggctcttagaaaatata

SEQ ID NO: 151219 - RNA, 22 nt, synthetic construct
  source 1..22: mol_type = other RNA
tctttggctgttagccttgcca

SEQ ID NO: 151220 - RNA, 22 nt, synthetic construct
  source 1..22: mol_type = other RNA
tctttgggaaaatctctgactt

SEQ ID NO: 151221 - RNA, 22 nt, synthetic construct
  source 1..22: mol_type = other RNA
tctttgggaaggccctgattga

SEQ ID NO: 151222 - RNA, 22 nt, synthetic construct
  source 1..22: mol_type = other RNA
tctttgggaggctgaggcggaa

SEQ ID NO: 151223 - RNA, 22 nt, synthetic construct
  source 1..22: mol_type = other RNA
tctttggggagataccttgaaa

SEQ ID NO: 151224 - RNA, 22 nt, synthetic construct
  source 1..22: mol_type = other RNA
tctttgggggaagcaggaactc

SEQ ID NO: 151225 - RNA, 22 nt, synthetic construct
  source 1..22: mol_type = other RNA
tctttgggtaatttatctccat

SEQ ID NO: 151226 - RNA, 22 nt, synthetic construct
  source 1..22: mol_type = other RNA
tctttggtgaaggttcatgaac

SEQ ID NO: 151227 - RNA, 22 nt, synthetic construct
  source 1..22: mol_type = other RNA
tctttggtgatcctaagccatc

SEQ ID NO: 151228 - RNA, 22 nt, synthetic construct
  source 1..22: mol_type = other RNA
tctttggtgctgataaatggct

SEQ ID NO: 151229 - RNA, 22 nt, synthetic construct
  source 1..22: mol_type = other RNA
tctttggttttgactcagtact

SEQ ID NO: 151230 - RNA, 22 nt, synthetic construct
  source 1..22: mol_type = other RNA
tctttgtacagtaattgtagtt

SEQ ID NO: 151231 - RNA, 22 nt, synthetic construct
  source 1..22: mol_type = other RNA
tctttgtctattccctacattg

SEQ ID NO: 151232 - RNA, 22 nt, synthetic construct
  source 1..22: mol_type = other RNA
tctttgttacagcagctctagc

SEQ ID NO: 151233 - RNA, 22 nt, synthetic construct
  source 1..22: mol_type = other RNA
tctttgttagtttattcatacg

SEQ ID NO: 151234 - RNA, 22 nt, synthetic construct
  source 1..22: mol_type = other RNA
tctttgtttatccttgcaccaa

SEQ ID NO: 151235 - RNA, 22 nt, synthetic construct
  source 1..22: mol_type = other RNA
tcttttaaacccatttcatgcc

SEQ ID NO: 151236 - RNA, 22 nt, synthetic construct
  source 1..22: mol_type = other RNA
tcttttaaagacctcaggttta

SEQ ID NO: 151237 - RNA, 22 nt, synthetic construct
  source 1..22: mol_type = other RNA
tcttttaaatgccaatttggga

SEQ ID NO: 151238 - RNA, 22 nt, synthetic construct
  source 1..22: mol_type = other RNA
tcttttaacagatggtcctttt

SEQ ID NO: 151239 - RNA, 22 nt, synthetic construct
  source 1..22: mol_type = other RNA
tcttttacttgcttggtttcac

SEQ ID NO: 151240 - RNA, 22 nt, synthetic construct
  source 1..22: mol_type = other RNA
tcttttagagtaactgtcatca

SEQ ID NO: 151241 - RNA, 22 nt, synthetic construct
  source 1..22: mol_type = other RNA
tcttttagccaacaaccataat

SEQ ID NO: 151242 - RNA, 22 nt, synthetic construct
  source 1..22: mol_type = other RNA
tcttttcaaaaacagcatatac

SEQ ID NO: 151243 - RNA, 22 nt, synthetic construct
  source 1..22: mol_type = other RNA
tcttttcaaaaacccaactctt

SEQ ID NO: 151244 - RNA, 22 nt, synthetic construct
  source 1..22: mol_type = other RNA
tcttttcacataaatttgccac

SEQ ID NO: 151245 - RNA, 22 nt, synthetic construct
  source 1..22: mol_type = other RNA
tcttttcactctaatatggttc

SEQ ID NO: 151246 - RNA, 22 nt, synthetic construct
  source 1..22: mol_type = other RNA
tcttttcagtccagatattatc

SEQ ID NO: 151247 - RNA, 22 nt, synthetic construct
  source 1..22: mol_type = other RNA
tcttttcatcactcactggcct

SEQ ID NO: 151248 - RNA, 22 nt, synthetic construct
  source 1..22: mol_type = other RNA
tcttttcatgttgaccattttt

SEQ ID NO: 151249 - RNA, 22 nt, synthetic construct
  source 1..22: mol_type = other RNA
tcttttccaaccaagcccaact

SEQ ID NO: 151250 - RNA, 22 nt, synthetic construct
  source 1..22: mol_type = other RNA
tcttttcctaccctgaggatat

SEQ ID NO: 151251 - RNA, 22 nt, synthetic construct
  source 1..22: mol_type = other RNA
tcttttcctagactgccaggta

SEQ ID NO: 151252 - RNA, 22 nt, synthetic construct
  source 1..22: mol_type = other RNA
tcttttcctcgttttcaacaaa

SEQ ID NO: 151253 - RNA, 22 nt, synthetic construct
  source 1..22: mol_type = other RNA
tcttttccttcttaagacattt

SEQ ID NO: 151254 - RNA, 22 nt, synthetic construct
  source 1..22: mol_type = other RNA
tcttttcctttaacgtatctgg

SEQ ID NO: 151255 - RNA, 22 nt, synthetic construct
  source 1..22: mol_type = other RNA
tcttttctgacaatttcaggga

SEQ ID NO: 151256 - RNA, 22 nt, synthetic construct
  source 1..22: mol_type = other RNA
tcttttcttaaaactttaggtc

SEQ ID NO: 151257 - RNA, 22 nt, synthetic construct
  source 1..22: mol_type = other RNA
tcttttgacgcgcaacaattca

SEQ ID NO: 151258 - RNA, 22 nt, synthetic construct
  source 1..22: mol_type = other RNA
tcttttgagggtatcatattat

SEQ ID NO: 151259 - RNA, 22 nt, synthetic construct
  source 1..22: mol_type = other RNA
tcttttgcctggatgaatgcag

SEQ ID NO: 151260 - RNA, 22 nt, synthetic construct
  source 1..22: mol_type = other RNA
tcttttgctgtatacccaggtg

SEQ ID NO: 151261 - RNA, 22 nt, synthetic construct
  source 1..22: mol_type = other RNA
tcttttgtgggtaaattaagta

SEQ ID NO: 151262 - RNA, 22 nt, synthetic construct
  source 1..22: mol_type = other RNA
tcttttgttgcctgtagttttg

SEQ ID NO: 151263 - RNA, 22 nt, synthetic construct
  source 1..22: mol_type = other RNA
tctttttaaacaggtgtaagag

SEQ ID NO: 151264 - RNA, 22 nt, synthetic construct
  source 1..22: mol_type = other RNA
tctttttacacttggagttttc

SEQ ID NO: 151265 - RNA, 22 nt, synthetic construct
  source 1..22: mol_type = other RNA
tctttttactcatgtctacctg

SEQ ID NO: 151266 - RNA, 22 nt, synthetic construct
  source 1..22: mol_type = other RNA
tctttttactcgagggtagctt

SEQ ID NO: 151267 - RNA, 22 nt, synthetic construct
  source 1..22: mol_type = other RNA
tctttttagtaagaggtatcac

SEQ ID NO: 151268 - RNA, 22 nt, synthetic construct
  source 1..22: mol_type = other RNA
tctttttcagcagcagagaagt

SEQ ID NO: 151269 - RNA, 22 nt, synthetic construct
  source 1..22: mol_type = other RNA
tctttttccaggaccaatttac

SEQ ID NO: 151270 - RNA, 22 nt, synthetic construct
  source 1..22: mol_type = other RNA
tctttttctagtttgaggtgta

SEQ ID NO: 151271 - RNA, 22 nt, synthetic construct
  source 1..22: mol_type = other RNA
tctttttcttgctttgctgccc

SEQ ID NO: 151272 - RNA, 22 nt, synthetic construct
  source 1..22: mol_type = other RNA
tctttttgacagatgagactct

SEQ ID NO: 151273 - RNA, 22 nt, synthetic construct
  source 1..22: mol_type = other RNA
tctttttgttttctccttctgg

SEQ ID NO: 151274 - RNA, 22 nt, synthetic construct
  source 1..22: mol_type = other RNA
tgaaaaaacaaaacaaaaccct

SEQ ID NO: 151275 - RNA, 22 nt, synthetic construct
  source 1..22: mol_type = other RNA
tgaaaaaacttcccttagctct

SEQ ID NO: 151276 - RNA, 22 nt, synthetic construct
  source 1..22: mol_type = other RNA
tgaaaaaatggtgcagccacta

SEQ ID NO: 151277 - RNA, 22 nt, synthetic construct
  source 1..22: mol_type = other RNA
tgaaaaacacctcagttaaacc

SEQ ID NO: 151278 - RNA, 22 nt, synthetic construct
  source 1..22: mol_type = other RNA
tgaaaaacagatcttggccgaa

SEQ ID NO: 151279 - RNA, 22 nt, synthetic construct
  source 1..22: mol_type = other RNA
tgaaaaacggaggttgcagtaa

SEQ ID NO: 151280 - RNA, 22 nt, synthetic construct
  source 1..22: mol_type = other RNA
tgaaaaaggaaagtaactgttg

SEQ ID NO: 151281 - RNA, 22 nt, synthetic construct
  source 1..22: mol_type = other RNA
tgaaaaagtactggaaatggac

SEQ ID NO: 151282 - RNA, 22 nt, synthetic construct
  source 1..22: mol_type = other RNA
tgaaaaatgagaaacctaagaa

SEQ ID NO: 151283 - RNA, 22 nt, synthetic construct
  source 1..22: mol_type = other RNA
tgaaaaatggttttatggtaac

SEQ ID NO: 151284 - RNA, 22 nt, synthetic construct
  source 1..22: mol_type = other RNA
tgaaaaatgtcaattttccccc

SEQ ID NO: 151285 - RNA, 22 nt, synthetic construct
  source 1..22: mol_type = other RNA
tgaaaaattcactcctcattca

SEQ ID NO: 151286 - RNA, 22 nt, synthetic construct
  source 1..22: mol_type = other RNA
tgaaaaatttgacatgacaggt

SEQ ID NO: 151287 - RNA, 22 nt, synthetic construct
  source 1..22: mol_type = other RNA
tgaaaacacaaactgcagaatg

SEQ ID NO: 151288 - RNA, 22 nt, synthetic construct
  source 1..22: mol_type = other RNA
tgaaaacacaacataccaaaac

SEQ ID NO: 151289 - RNA, 22 nt, synthetic construct
  source 1..22: mol_type = other RNA
tgaaaacagctaggtgagtgag

SEQ ID NO: 151290 - RNA, 22 nt, synthetic construct
  source 1..22: mol_type = other RNA
tgaaaacatgttttgttgttgt

SEQ ID NO: 151291 - RNA, 22 nt, synthetic construct
  source 1..22: mol_type = other RNA
tgaaaacgaggaaaagagaaca

SEQ ID NO: 151292 - RNA, 22 nt, synthetic construct
  source 1..22: mol_type = other RNA
tgaaaactaaggtcaagagaga

SEQ ID NO: 151293 - RNA, 22 nt, synthetic construct
  source 1..22: mol_type = other RNA
tgaaaactcaactgcctctaca

SEQ ID NO: 151294 - RNA, 22 nt, synthetic construct
  source 1..22: mol_type = other RNA
tgaaaagaaaaaggttaaggga

SEQ ID NO: 151295 - RNA, 22 nt, synthetic construct
  source 1..22: mol_type = other RNA
tgaaaagaacaacatggtagac

SEQ ID NO: 151296 - RNA, 22 nt, synthetic construct
  source 1..22: mol_type = other RNA
tgaaaagagcacaccaagacat

SEQ ID NO: 151297 - RNA, 22 nt, synthetic construct
  source 1..22: mol_type = other RNA
tgaaaagatactcaacatcact

SEQ ID NO: 151298 - RNA, 22 nt, synthetic construct
  source 1..22: mol_type = other RNA
tgaaaagcccaatctacaggtc

SEQ ID NO: 151299 - RNA, 22 nt, synthetic construct
  source 1..22: mol_type = other RNA
tgaaaagcctcaaacgaaccaa

SEQ ID NO: 151300 - RNA, 22 nt, synthetic construct
  source 1..22: mol_type = other RNA
tgaaaagctcaaaaatactcaa

SEQ ID NO: 151301 - RNA, 22 nt, synthetic construct
  source 1..22: mol_type = other RNA
tgaaaagcttcccccctctctc

SEQ ID NO: 151302 - RNA, 22 nt, synthetic construct
  source 1..22: mol_type = other RNA
tgaaaaggcaaaccacacagag

SEQ ID NO: 151303 - RNA, 22 nt, synthetic construct
  source 1..22: mol_type = other RNA
tgaaaagtatggttgaagaaag

SEQ ID NO: 151304 - RNA, 22 nt, synthetic construct
  source 1..22: mol_type = other RNA
tgaaaagtgtttgtcacataga

SEQ ID NO: 151305 - RNA, 22 nt, synthetic construct
  source 1..22: mol_type = other RNA
tgaaaataaaaagtatcgtgag

SEQ ID NO: 151306 - RNA, 22 nt, synthetic construct
  source 1..22: mol_type = other RNA
tgaaaataatacctaacagccg

SEQ ID NO: 151307 - RNA, 22 nt, synthetic construct
  source 1..22: mol_type = other RNA
tgaaaatactaacgatccttac

SEQ ID NO: 151308 - RNA, 22 nt, synthetic construct
  source 1..22: mol_type = other RNA
tgaaaatagtaactttctgctt

SEQ ID NO: 151309 - RNA, 22 nt, synthetic construct
  source 1..22: mol_type = other RNA
tgaaaatcattttggcaaattg

SEQ ID NO: 151310 - RNA, 22 nt, synthetic construct
  source 1..22: mol_type = other RNA
tgaaaatgcccttatttaatgt

SEQ ID NO: 151311 - RNA, 22 nt, synthetic construct
  source 1..22: mol_type = other RNA
tgaaaatggtttaggctgtctc

SEQ ID NO: 151312 - RNA, 22 nt, synthetic construct
  source 1..22: mol_type = other RNA
tgaaaatgttccctcttcaata

SEQ ID NO: 151313 - RNA, 22 nt, synthetic construct
  source 1..22: mol_type = other RNA
tgaaaattagctggatgtggtg

SEQ ID NO: 151314 - RNA, 22 nt, synthetic construct
  source 1..22: mol_type = other RNA
tgaaaattccttcccctttctt

SEQ ID NO: 151315 - RNA, 22 nt, synthetic construct
  source 1..22: mol_type = other RNA
tgaaaattggcgtacatgtaga

SEQ ID NO: 151316 - RNA, 22 nt, synthetic construct
  source 1..22: mol_type = other RNA
tgaaaatttttgtctggaacac

SEQ ID NO: 151317 - RNA, 22 nt, synthetic construct
  source 1..22: mol_type = other RNA
tgaaacaataaatttctgttgc

SEQ ID NO: 151318 - RNA, 22 nt, synthetic construct
  source 1..22: mol_type = other RNA
tgaaacaatactttagacatgg

SEQ ID NO: 151319 - RNA, 22 nt, synthetic construct
  source 1..22: mol_type = other RNA
tgaaacaatcgcaatccaaaat

SEQ ID NO: 151320 - RNA, 22 nt, synthetic construct
  source 1..22: mol_type = other RNA
tgaaacacttgtgtaactacca

SEQ ID NO: 151321 - RNA, 22 nt, synthetic construct
  source 1..22: mol_type = other RNA
tgaaaccaagcaagtaaaagaa

SEQ ID NO: 151322 - RNA, 22 nt, synthetic construct
  source 1..22: mol_type = other RNA
tgaaaccagtgctctcccccga

SEQ ID NO: 151323 - RNA, 22 nt, synthetic construct
  source 1..22: mol_type = other RNA
tgaaaccagtgggtcagctagt

SEQ ID NO: 151324 - RNA, 22 nt, synthetic construct
  source 1..22: mol_type = other RNA
tgaaaccccgcatactgtgcag

SEQ ID NO: 151325 - RNA, 22 nt, synthetic construct
  source 1..22: mol_type = other RNA
tgaaaccctcacgaaagcggtc

SEQ ID NO: 151326 - RNA, 22 nt, synthetic construct
  source 1..22: mol_type = other RNA
tgaaacctgccatggtgttaaa

SEQ ID NO: 151327 - RNA, 22 nt, synthetic construct
  source 1..22: mol_type = other RNA
tgaaacgaccttgctcattcat

SEQ ID NO: 151328 - RNA, 22 nt, synthetic construct
  source 1..22: mol_type = other RNA
tgaaacgatgcattccagattg

SEQ ID NO: 151329 - RNA, 22 nt, synthetic construct
  source 1..22: mol_type = other RNA
tgaaactaaatgtgagcattta

SEQ ID NO: 151330 - RNA, 22 nt, synthetic construct
  source 1..22: mol_type = other RNA
tgaaactcaatgttggttagtg

SEQ ID NO: 151331 - RNA, 22 nt, synthetic construct
  source 1..22: mol_type = other RNA
tgaaactctggctcagaaacaa

SEQ ID NO: 151332 - RNA, 22 nt, synthetic construct
  source 1..22: mol_type = other RNA
tgaaactgagcatcccagaggt

SEQ ID NO: 151333 - RNA, 22 nt, synthetic construct
  source 1..22: mol_type = other RNA
tgaaacttatttccagggggta

SEQ ID NO: 151334 - RNA, 22 nt, synthetic construct
  source 1..22: mol_type = other RNA
tgaaacttgaatactcgtgtgt

SEQ ID NO: 151335 - RNA, 22 nt, synthetic construct
  source 1..22: mol_type = other RNA
tgaaagaaagaaggccatttga

SEQ ID NO: 151336 - RNA, 22 nt, synthetic construct
  source 1..22: mol_type = other RNA
tgaaagacagacctctattaaa

SEQ ID NO: 151337 - RNA, 22 nt, synthetic construct
  source 1..22: mol_type = other RNA
tgaaagagaaagaagtaatttc

SEQ ID NO: 151338 - RNA, 22 nt, synthetic construct
  source 1..22: mol_type = other RNA
tgaaagaggagacattacaatt

SEQ ID NO: 151339 - RNA, 22 nt, synthetic construct
  source 1..22: mol_type = other RNA
tgaaagatcatttagtaagtgt

SEQ ID NO: 151340 - RNA, 22 nt, synthetic construct
  source 1..22: mol_type = other RNA
tgaaagcagggactcccatatc

SEQ ID NO: 151341 - RNA, 22 nt, synthetic construct
  source 1..22: mol_type = other RNA
tgaaagcccttgagtatttttg

SEQ ID NO: 151342 - RNA, 22 nt, synthetic construct
  source 1..22: mol_type = other RNA
tgaaagctagaagacctcaaat

SEQ ID NO: 151343 - RNA, 22 nt, synthetic construct
  source 1..22: mol_type = other RNA
tgaaagctcccaatgcttgaag

SEQ ID NO: 151344 - RNA, 22 nt, synthetic construct
  source 1..22: mol_type = other RNA
tgaaagcttctgagcagtgttt

SEQ ID NO: 151345 - RNA, 22 nt, synthetic construct
  source 1..22: mol_type = other RNA
tgaaaggaaatgagtgtatgca

SEQ ID NO: 151346 - RNA, 22 nt, synthetic construct
  source 1..22: mol_type = other RNA
tgaaaggaatccggctttatga

SEQ ID NO: 151347 - RNA, 22 nt, synthetic construct
  source 1..22: mol_type = other RNA
tgaaaggatactgagaacagaa

SEQ ID NO: 151348 - RNA, 22 nt, synthetic construct
  source 1..22: mol_type = other RNA
tgaaaggcaaaggaaaaaactt

SEQ ID NO: 151349 - RNA, 22 nt, synthetic construct
  source 1..22: mol_type = other RNA
tgaaaggcatgaaattcttggg

SEQ ID NO: 151350 - RNA, 22 nt, synthetic construct
  source 1..22: mol_type = other RNA
tgaaaggcgtcggggctgctgg

SEQ ID NO: 151351 - RNA, 22 nt, synthetic construct
  source 1..22: mol_type = other RNA
tgaaaggggccaggtgtggagg

SEQ ID NO: 151352 - RNA, 22 nt, synthetic construct
  source 1..22: mol_type = other RNA
tgaaagtaaagatagcccctta

SEQ ID NO: 151353 - RNA, 22 nt, synthetic construct
  source 1..22: mol_type = other RNA
tgaaagtagaggactgcctatt

SEQ ID NO: 151354 - RNA, 22 nt, synthetic construct
  source 1..22: mol_type = other RNA
tgaaagtattaaaagcacaagc

SEQ ID NO: 151355 - RNA, 22 nt, synthetic construct
  source 1..22: mol_type = other RNA
tgaaagtcagctaattttctaa

SEQ ID NO: 151356 - RNA, 22 nt, synthetic construct
  source 1..22: mol_type = other RNA
tgaaagtctccctaaccaggcc

SEQ ID NO: 151357 - RNA, 22 nt, synthetic construct
  source 1..22: mol_type = other RNA
tgaaagtggagaattactaaaa

SEQ ID NO: 151358 - RNA, 22 nt, synthetic construct
  source 1..22: mol_type = other RNA
tgaaagttcagaataccagaga

SEQ ID NO: 151359 - RNA, 22 nt, synthetic construct
  source 1..22: mol_type = other RNA
tgaaataatttggttatgcgaa

SEQ ID NO: 151360 - RNA, 22 nt, synthetic construct
  source 1..22: mol_type = other RNA
tgaaatactcaaactatgctta

SEQ ID NO: 151361 - RNA, 22 nt, synthetic construct
  source 1..22: mol_type = other RNA
tgaaatagttggtcagaaaaat

SEQ ID NO: 151362 - RNA, 22 nt, synthetic construct
  source 1..22: mol_type = other RNA
tgaaatcacacaatcttgagac

SEQ ID NO: 151363 - RNA, 22 nt, synthetic construct
  source 1..22: mol_type = other RNA
tgaaatcagaacttgacaagta

SEQ ID NO: 151364 - RNA, 22 nt, synthetic construct
  source 1..22: mol_type = other RNA
tgaaatcaggaagtatgagtct

SEQ ID NO: 151365 - RNA, 22 nt, synthetic construct
  source 1..22: mol_type = other RNA
tgaaatcccctttagtgttctg

SEQ ID NO: 151366 - RNA, 22 nt, synthetic construct
  source 1..22: mol_type = other RNA
tgaaatcctagccccaaatacc

SEQ ID NO: 151367 - RNA, 22 nt, synthetic construct
  source 1..22: mol_type = other RNA
tgaaatcgggagtaacagacct

SEQ ID NO: 151368 - RNA, 22 nt, synthetic construct
  source 1..22: mol_type = other RNA
tgaaatctaaatgtagatcaag

SEQ ID NO: 151369 - RNA, 22 nt, synthetic construct
  source 1..22: mol_type = other RNA
tgaaatctaggcatataataag

SEQ ID NO: 151370 - RNA, 22 nt, synthetic construct
  source 1..22: mol_type = other RNA
tgaaatctgatttgtttagtag

SEQ ID NO: 151371 - RNA, 22 nt, synthetic construct
  source 1..22: mol_type = other RNA
tgaaatcttgaagatggcaaac

SEQ ID NO: 151372 - RNA, 22 nt, synthetic construct
  source 1..22: mol_type = other RNA
tgaaatgaaccaaacttggttt

SEQ ID NO: 151373 - RNA, 22 nt, synthetic construct
  source 1..22: mol_type = other RNA
tgaaatgatctttgaataaagg

SEQ ID NO: 151374 - RNA, 22 nt, synthetic construct
  source 1..22: mol_type = other RNA
tgaaatgatttcaagtaacact

SEQ ID NO: 151375 - RNA, 22 nt, synthetic construct
  source 1..22: mol_type = other RNA
tgaaatgctgtaactgacttca

SEQ ID NO: 151376 - RNA, 22 nt, synthetic construct
  source 1..22: mol_type = other RNA
tgaaatggcccttaacttcacc

SEQ ID NO: 151377 - RNA, 22 nt, synthetic construct
  source 1..22: mol_type = other RNA
tgaaatggcttaaggaaataaa

SEQ ID NO: 151378 - RNA, 22 nt, synthetic construct
  source 1..22: mol_type = other RNA
tgaaatgggtttaaaagagtgc

SEQ ID NO: 151379 - RNA, 22 nt, synthetic construct
  source 1..22: mol_type = other RNA
tgaaatgtggtttttggttcac

SEQ ID NO: 151380 - RNA, 22 nt, synthetic construct
  source 1..22: mol_type = other RNA
tgaaattagctaagtatgcaga

SEQ ID NO: 151381 - RNA, 22 nt, synthetic construct
  source 1..22: mol_type = other RNA
tgaaattagttccttttaaggg

SEQ ID NO: 151382 - RNA, 22 nt, synthetic construct
  source 1..22: mol_type = other RNA
tgaaattctcaaatgaacaggt

SEQ ID NO: 151383 - RNA, 22 nt, synthetic construct
  source 1..22: mol_type = other RNA
tgaaattctcattagttatctc

SEQ ID NO: 151384 - RNA, 22 nt, synthetic construct
  source 1..22: mol_type = other RNA
tgaaattcttgggtgaataacc

SEQ ID NO: 151385 - RNA, 22 nt, synthetic construct
  source 1..22: mol_type = other RNA
tgaaattgaccattccacgctg

SEQ ID NO: 151386 - RNA, 22 nt, synthetic construct
  source 1..22: mol_type = other RNA
tgaaattgacttcactagatct

SEQ ID NO: 151387 - RNA, 22 nt, synthetic construct
  source 1..22: mol_type = other RNA
tgaaattgtcagaaaagatcag

SEQ ID NO: 151388 - RNA, 22 nt, synthetic construct
  source 1..22: mol_type = other RNA
tgaaatttaaagacgttcagat

SEQ ID NO: 151389 - RNA, 22 nt, synthetic construct
  source 1..22: mol_type = other RNA
tgaaatttgaggccctattcaa

SEQ ID NO: 151390 - RNA, 22 nt, synthetic construct
  source 1..22: mol_type = other RNA
tgaacaaaatgtggtatatatg

SEQ ID NO: 151391 - RNA, 22 nt, synthetic construct
  source 1..22: mol_type = other RNA
tgaacaaaatttttgcaaacca

SEQ ID NO: 151392 - RNA, 22 nt, synthetic construct
  source 1..22: mol_type = other RNA
tgaacaaaggcaggagcagtgt

SEQ ID NO: 151393 - RNA, 22 nt, synthetic construct
  source 1..22: mol_type = other RNA
tgaacaacgctgtggctaacaa

SEQ ID NO: 151394 - RNA, 22 nt, synthetic construct
  source 1..22: mol_type = other RNA
tgaacaagagcgtcgtaccttt

SEQ ID NO: 151395 - RNA, 22 nt, synthetic construct
  source 1..22: mol_type = other RNA
tgaacaagttacaaacatatgc

SEQ ID NO: 151396 - RNA, 22 nt, synthetic construct
  source 1..22: mol_type = other RNA
tgaacaatccttctaatcagta

SEQ ID NO: 151397 - RNA, 22 nt, synthetic construct
  source 1..22: mol_type = other RNA
tgaacaattttctctcatgttg

SEQ ID NO: 151398 - RNA, 22 nt, synthetic construct
  source 1..22: mol_type = other RNA
tgaacactctgcaattttaaat

SEQ ID NO: 151399 - RNA, 22 nt, synthetic construct
  source 1..22: mol_type = other RNA
tgaacagacagacatgcatgca

SEQ ID NO: 151400 - RNA, 22 nt, synthetic construct
  source 1..22: mol_type = other RNA
tgaacagcctaaagtccacaga

SEQ ID NO: 151401 - RNA, 22 nt, synthetic construct
  source 1..22: mol_type = other RNA
tgaacaggcaaccttgggagaa

SEQ ID NO: 151402 - RNA, 22 nt, synthetic construct
  source 1..22: mol_type = other RNA
tgaacaggttcttcatcagtcc

SEQ ID NO: 151403 - RNA, 22 nt, synthetic construct
  source 1..22: mol_type = other RNA
tgaacatcacccagctcgacca

SEQ ID NO: 151404 - RNA, 22 nt, synthetic construct
  source 1..22: mol_type = other RNA
tgaacatgaacgagaacaaaac

SEQ ID NO: 151405 - RNA, 22 nt, synthetic construct
  source 1..22: mol_type = other RNA
tgaacatgggaatgcatatatc

SEQ ID NO: 151406 - RNA, 22 nt, synthetic construct
  source 1..22: mol_type = other RNA
tgaacatggtttgatcccacta

SEQ ID NO: 151407 - RNA, 22 nt, synthetic construct
  source 1..22: mol_type = other RNA
tgaacatgtatgtttctcattc

SEQ ID NO: 151408 - RNA, 22 nt, synthetic construct
  source 1..22: mol_type = other RNA
tgaacattctgtagaagtaaat

SEQ ID NO: 151409 - RNA, 22 nt, synthetic construct
  source 1..22: mol_type = other RNA
tgaacatttatacagttggaac

SEQ ID NO: 151410 - RNA, 22 nt, synthetic construct
  source 1..22: mol_type = other RNA
tgaacattttagctggggcagc

SEQ ID NO: 151411 - RNA, 22 nt, synthetic construct
  source 1..22: mol_type = other RNA
tgaacattttgagttattgcat

SEQ ID NO: 151412 - RNA, 22 nt, synthetic construct
  source 1..22: mol_type = other RNA
tgaaccaaaaaccacatttcat

SEQ ID NO: 151413 - RNA, 22 nt, synthetic construct
  source 1..22: mol_type = other RNA
tgaaccaaacttggtttatttt

SEQ ID NO: 151414 - RNA, 22 nt, synthetic construct
  source 1..22: mol_type = other RNA
tgaaccacactgacaggacaga

SEQ ID NO: 151415 - RNA, 22 nt, synthetic construct
  source 1..22: mol_type = other RNA
tgaaccacgcatctggtctatc

SEQ ID NO: 151416 - RNA, 22 nt, synthetic construct
  source 1..22: mol_type = other RNA
tgaaccattgtaaaccatatgg

SEQ ID NO: 151417 - RNA, 22 nt, synthetic construct
  source 1..22: mol_type = other RNA
tgaacccaccaggaggcggagc

SEQ ID NO: 151418 - RNA, 22 nt, synthetic construct
  source 1..22: mol_type = other RNA
tgaacccactgagcatttatat

SEQ ID NO: 151419 - RNA, 22 nt, synthetic construct
  source 1..22: mol_type = other RNA
tgaacccaggaggcaaaggttg

SEQ ID NO: 151420 - RNA, 22 nt, synthetic construct
  source 1..22: mol_type = other RNA
tgaaccccagaaggttaactaa

SEQ ID NO: 151421 - RNA, 22 nt, synthetic construct
  source 1..22: mol_type = other RNA
tgaacccgaggtgcacaaggga

SEQ ID NO: 151422 - RNA, 22 nt, synthetic construct
  source 1..22: mol_type = other RNA
tgaacctgaaaaacggaggttg

SEQ ID NO: 151423 - RNA, 22 nt, synthetic construct
  source 1..22: mol_type = other RNA
tgaacctgcatggtgtaaaata

SEQ ID NO: 151424 - RNA, 22 nt, synthetic construct
  source 1..22: mol_type = other RNA
tgaacctgctttctactagtat

SEQ ID NO: 151425 - RNA, 22 nt, synthetic construct
  source 1..22: mol_type = other RNA
tgaaccttcaccaaagatttac

SEQ ID NO: 151426 - RNA, 22 nt, synthetic construct
  source 1..22: mol_type = other RNA
tgaaccttcctcttcctcatcc

SEQ ID NO: 151427 - RNA, 22 nt, synthetic construct
  source 1..22: mol_type = other RNA
tgaaccttgaagtacttcagcg

SEQ ID NO: 151428 - RNA, 22 nt, synthetic construct
  source 1..22: mol_type = other RNA
tgaacgaatgaaaacacaacat

SEQ ID NO: 151429 - RNA, 22 nt, synthetic construct
  source 1..22: mol_type = other RNA
tgaacgagaacaaaacaagaag

SEQ ID NO: 151430 - RNA, 22 nt, synthetic construct
  source 1..22: mol_type = other RNA
tgaacgatggtttctgacaccc

SEQ ID NO: 151431 - RNA, 22 nt, synthetic construct
  source 1..22: mol_type = other RNA
tgaacgctaaattaaaggctgg

SEQ ID NO: 151432 - RNA, 22 nt, synthetic construct
  source 1..22: mol_type = other RNA
tgaacgtctttaaatttcaaac

SEQ ID NO: 151433 - RNA, 22 nt, synthetic construct
  source 1..22: mol_type = other RNA
tgaactaagtgtgaagattaag

SEQ ID NO: 151434 - RNA, 22 nt, synthetic construct
  source 1..22: mol_type = other RNA
tgaactacacagacatgaacaa

SEQ ID NO: 151435 - RNA, 22 nt, synthetic construct
  source 1..22: mol_type = other RNA
tgaactacagtgtttagggacg

SEQ ID NO: 151436 - RNA, 22 nt, synthetic construct
  source 1..22: mol_type = other RNA
tgaactcaaaagtgaatcacta

SEQ ID NO: 151437 - RNA, 22 nt, synthetic construct
  source 1..22: mol_type = other RNA
tgaactcactggccagcattac

SEQ ID NO: 151438 - RNA, 22 nt, synthetic construct
  source 1..22: mol_type = other RNA
tgaactcccagaactcgaagcc

SEQ ID NO: 151439 - RNA, 22 nt, synthetic construct
  source 1..22: mol_type = other RNA
tgaactcctatagttaagtctg

SEQ ID NO: 151440 - RNA, 22 nt, synthetic construct
  source 1..22: mol_type = other RNA
tgaactcctttcttaccctcac

SEQ ID NO: 151441 - RNA, 22 nt, synthetic construct
  source 1..22: mol_type = other RNA
tgaactcgtggcctcaagcagt

SEQ ID NO: 151442 - RNA, 22 nt, synthetic construct
  source 1..22: mol_type = other RNA
tgaactctgtggagtcctgtca

SEQ ID NO: 151443 - RNA, 22 nt, synthetic construct
  source 1..22: mol_type = other RNA
tgaactgctgacagattaaata

SEQ ID NO: 151444 - RNA, 22 nt, synthetic construct
  source 1..22: mol_type = other RNA
tgaactgctggtctggaatgtg

SEQ ID NO: 151445 - RNA, 22 nt, synthetic construct
  source 1..22: mol_type = other RNA
tgaactgggacttctagcctcc

SEQ ID NO: 151446 - RNA, 22 nt, synthetic construct
  source 1..22: mol_type = other RNA
tgaactgggtgtagggggaaaa

SEQ ID NO: 151447 - RNA, 22 nt, synthetic construct
  source 1..22: mol_type = other RNA
tgaactgttacttgactatttt

SEQ ID NO: 151448 - RNA, 22 nt, synthetic construct
  source 1..22: mol_type = other RNA
tgaacttatataaatgctcagt

SEQ ID NO: 151449 - RNA, 22 nt, synthetic construct
  source 1..22: mol_type = other RNA
tgaacttgtcacaaaatgtgga

SEQ ID NO: 151450 - RNA, 22 nt, synthetic construct
  source 1..22: mol_type = other RNA
tgaactttcaacctaacatgtc

SEQ ID NO: 151451 - RNA, 22 nt, synthetic construct
  source 1..22: mol_type = other RNA
tgaactttccagaagtaactct

SEQ ID NO: 151452 - RNA, 22 nt, synthetic construct
  source 1..22: mol_type = other RNA
tgaactttcgaagtgggaagca

SEQ ID NO: 151453 - RNA, 22 nt, synthetic construct
  source 1..22: mol_type = other RNA
tgaagaaaacactccagaatga

SEQ ID NO: 151454 - RNA, 22 nt, synthetic construct
  source 1..22: mol_type = other RNA
tgaagaaaataaaattctgacc

SEQ ID NO: 151455 - RNA, 22 nt, synthetic construct
  source 1..22: mol_type = other RNA
tgaagaaaatccaagaagacat

SEQ ID NO: 151456 - RNA, 22 nt, synthetic construct
  source 1..22: mol_type = other RNA
tgaagaaaccaagagcatagac

SEQ ID NO: 151457 - RNA, 22 nt, synthetic construct
  source 1..22: mol_type = other RNA
tgaagaaacctttctcaaagcc

SEQ ID NO: 151458 - RNA, 22 nt, synthetic construct
  source 1..22: mol_type = other RNA
tgaagaaagtaggaattaaaca

SEQ ID NO: 151459 - RNA, 22 nt, synthetic construct
  source 1..22: mol_type = other RNA
tgaagaaagttttgcagttggg

SEQ ID NO: 151460 - RNA, 22 nt, synthetic construct
  source 1..22: mol_type = other RNA
tgaagaaatagaaaacttgagc

SEQ ID NO: 151461 - RNA, 22 nt, synthetic construct
  source 1..22: mol_type = other RNA
tgaagaaattatctgtgggtta

SEQ ID NO: 151462 - RNA, 22 nt, synthetic construct
  source 1..22: mol_type = other RNA
tgaagaaccgactgaaaggaaa

SEQ ID NO: 151463 - RNA, 22 nt, synthetic construct
  source 1..22: mol_type = other RNA
tgaagaacctgttcatttgaga

SEQ ID NO: 151464 - RNA, 22 nt, synthetic construct
  source 1..22: mol_type = other RNA
tgaagaaggaatgtgcactctt

SEQ ID NO: 151465 - RNA, 22 nt, synthetic construct
  source 1..22: mol_type = other RNA
tgaagaataactgtcctgaatt

SEQ ID NO: 151466 - RNA, 22 nt, synthetic construct
  source 1..22: mol_type = other RNA
tgaagaatgtgaaaaatttgac

SEQ ID NO: 151467 - RNA, 22 nt, synthetic construct
  source 1..22: mol_type = other RNA
tgaagacatgctgaggccccag

SEQ ID NO: 151468 - RNA, 22 nt, synthetic construct
  source 1..22: mol_type = other RNA
tgaagacctgcagtctgcaggc

SEQ ID NO: 151469 - RNA, 22 nt, synthetic construct
  source 1..22: mol_type = other RNA
tgaagactggatttgattgggc

SEQ ID NO: 151470 - RNA, 22 nt, synthetic construct
  source 1..22: mol_type = other RNA
tgaagagagcctgtggtctctt

SEQ ID NO: 151471 - RNA, 22 nt, synthetic construct
  source 1..22: mol_type = other RNA
tgaagagcgcttctatgtgaca

SEQ ID NO: 151472 - RNA, 22 nt, synthetic construct
  source 1..22: mol_type = other RNA
tgaagaggctttctgtgtaata

SEQ ID NO: 151473 - RNA, 22 nt, synthetic construct
  source 1..22: mol_type = other RNA
tgaagagggaacattttcattt

SEQ ID NO: 151474 - RNA, 22 nt, synthetic construct
  source 1..22: mol_type = other RNA
tgaagagtctatctttgggaaa

SEQ ID NO: 151475 - RNA, 22 nt, synthetic construct
  source 1..22: mol_type = other RNA
tgaagatgctgaacttgtcaca

SEQ ID NO: 151476 - RNA, 22 nt, synthetic construct
  source 1..22: mol_type = other RNA
tgaagatggagttacgctgcca

SEQ ID NO: 151477 - RNA, 22 nt, synthetic construct
  source 1..22: mol_type = other RNA
tgaagatggcaaacagactgag

SEQ ID NO: 151478 - RNA, 22 nt, synthetic construct
  source 1..22: mol_type = other RNA
tgaagatggcctccctcactaa

SEQ ID NO: 151479 - RNA, 22 nt, synthetic construct
  source 1..22: mol_type = other RNA
tgaagattaagcacatctgtct

SEQ ID NO: 151480 - RNA, 22 nt, synthetic construct
  source 1..22: mol_type = other RNA
tgaagattagaaaattagctga

SEQ ID NO: 151481 - RNA, 22 nt, synthetic construct
  source 1..22: mol_type = other RNA
tgaagcagagagagaagatgac

SEQ ID NO: 151482 - RNA, 22 nt, synthetic construct
  source 1..22: mol_type = other RNA
tgaagcaggccttcgaggcatc

SEQ ID NO: 151483 - RNA, 22 nt, synthetic construct
  source 1..22: mol_type = other RNA
tgaagcaggctttttacccgga

SEQ ID NO: 151484 - RNA, 22 nt, synthetic construct
  source 1..22: mol_type = other RNA
tgaagcagggaaatggagggcc

SEQ ID NO: 151485 - RNA, 22 nt, synthetic construct
  source 1..22: mol_type = other RNA
tgaagcattaatgcaacctgct

SEQ ID NO: 151486 - RNA, 22 nt, synthetic construct
  source 1..22: mol_type = other RNA
tgaagccagcacctaacaatga

SEQ ID NO: 151487 - RNA, 22 nt, synthetic construct
  source 1..22: mol_type = other RNA
tgaagccagcattaccctaata

SEQ ID NO: 151488 - RNA, 22 nt, synthetic construct
  source 1..22: mol_type = other RNA
tgaagccagtccttgtgatcta

SEQ ID NO: 151489 - RNA, 22 nt, synthetic construct
  source 1..22: mol_type = other RNA
tgaagcccagagaggctaggtg

SEQ ID NO: 151490 - RNA, 22 nt, synthetic construct
  source 1..22: mol_type = other RNA
tgaagccctctaagtcagcctg

SEQ ID NO: 151491 - RNA, 22 nt, synthetic construct
  source 1..22: mol_type = other RNA
tgaagcggggctgccactactt

SEQ ID NO: 151492 - RNA, 22 nt, synthetic construct
  source 1..22: mol_type = other RNA
tgaagctacagactaatatgag

SEQ ID NO: 151493 - RNA, 22 nt, synthetic construct
  source 1..22: mol_type = other RNA
tgaagctactattccaggatca

SEQ ID NO: 151494 - RNA, 22 nt, synthetic construct
  source 1..22: mol_type = other RNA
tgaagctctagtgagctatgat

SEQ ID NO: 151495 - RNA, 22 nt, synthetic construct
  source 1..22: mol_type = other RNA
tgaagctggacccttaccttaa

SEQ ID NO: 151496 - RNA, 22 nt, synthetic construct
  source 1..22: mol_type = other RNA
tgaagcttcaaaccactatcta

SEQ ID NO: 151497 - RNA, 22 nt, synthetic construct
  source 1..22: mol_type = other RNA
tgaagcttcacttctctgctgc

SEQ ID NO: 151498 - RNA, 22 nt, synthetic construct
  source 1..22: mol_type = other RNA
tgaagcttttctcctaagtctt

SEQ ID NO: 151499 - RNA, 22 nt, synthetic construct
  source 1..22: mol_type = other RNA
tgaaggaaaaaacgggttatac

SEQ ID NO: 151500 - RNA, 22 nt, synthetic construct
  source 1..22: mol_type = other RNA
tgaaggaaggattggaatgagt

SEQ ID NO: 151501 - RNA, 22 nt, synthetic construct
  source 1..22: mol_type = other RNA
tgaaggattcctccctggagag

SEQ ID NO: 151502 - RNA, 22 nt, synthetic construct
  source 1..22: mol_type = other RNA
tgaaggcaatgtagggaataga

SEQ ID NO: 151503 - RNA, 22 nt, synthetic construct
  source 1..22: mol_type = other RNA
tgaaggcactaacaaagggcct

SEQ ID NO: 151504 - RNA, 22 nt, synthetic construct
  source 1..22: mol_type = other RNA
tgaaggcactgtatggttctta

SEQ ID NO: 151505 - RNA, 22 nt, synthetic construct
  source 1..22: mol_type = other RNA
tgaaggcagaattatagagggc

SEQ ID NO: 151506 - RNA, 22 nt, synthetic construct
  source 1..22: mol_type = other RNA
tgaaggcatagggccttctact

SEQ ID NO: 151507 - RNA, 22 nt, synthetic construct
  source 1..22: mol_type = other RNA
tgaaggctcagcccctcatcct

SEQ ID NO: 151508 - RNA, 22 nt, synthetic construct
  source 1..22: mol_type = other RNA
tgaagggaattttactgatctt

SEQ ID NO: 151509 - RNA, 22 nt, synthetic construct
  source 1..22: mol_type = other RNA
tgaagggaggaaaaaacagttg

SEQ ID NO: 151510 - RNA, 22 nt, synthetic construct
  source 1..22: mol_type = other RNA
tgaagggaggtaggcttagatg

SEQ ID NO: 151511 - RNA, 22 nt, synthetic construct
  source 1..22: mol_type = other RNA
tgaagggttttctgtagaatat

SEQ ID NO: 151512 - RNA, 22 nt, synthetic construct
  source 1..22: mol_type = other RNA
tgaaggtgcctgccatagaggg

SEQ ID NO: 151513 - RNA, 22 nt, synthetic construct
  source 1..22: mol_type = other RNA
tgaaggttcatgaacataaatt

SEQ ID NO: 151514 - RNA, 22 nt, synthetic construct
  source 1..22: mol_type = other RNA
tgaagtaataaagcaagtatga

SEQ ID NO: 151515 - RNA, 22 nt, synthetic construct
  source 1..22: mol_type = other RNA
tgaagtacttcaaggttcacaa

SEQ ID NO: 151516 - RNA, 22 nt, synthetic construct
  source 1..22: mol_type = other RNA
tgaagtacttcagcgcttgaac

SEQ ID NO: 151517 - RNA, 22 nt, synthetic construct
  source 1..22: mol_type = other RNA
tgaagtatagaaaggagaccag

SEQ ID NO: 151518 - RNA, 22 nt, synthetic construct
  source 1..22: mol_type = other RNA
tgaagtatgtaattacagggga

SEQ ID NO: 151519 - RNA, 22 nt, synthetic construct
  source 1..22: mol_type = other RNA
tgaagtattgatttgaccatgg

SEQ ID NO: 151520 - RNA, 22 nt, synthetic construct
  source 1..22: mol_type = other RNA
tgaagtcaagatgaatctgcaa

SEQ ID NO: 151521 - RNA, 22 nt, synthetic construct
  source 1..22: mol_type = other RNA
tgaagtcaatttcagatctctg

SEQ ID NO: 151522 - RNA, 22 nt, synthetic construct
  source 1..22: mol_type = other RNA
tgaagtcagagattttcccaaa

SEQ ID NO: 151523 - RNA, 22 nt, synthetic construct
  source 1..22: mol_type = other RNA
tgaagtcagttacagcatttca

SEQ ID NO: 151524 - RNA, 22 nt, synthetic construct
  source 1..22: mol_type = other RNA
tgaagtcatctggtcctgagct

SEQ ID NO: 151525 - RNA, 22 nt, synthetic construct
  source 1..22: mol_type = other RNA
tgaagtcccatcttccatacga

SEQ ID NO: 151526 - RNA, 22 nt, synthetic construct
  source 1..22: mol_type = other RNA
tgaagtcctcaatcatgtcaag

SEQ ID NO: 151527 - RNA, 22 nt, synthetic construct
  source 1..22: mol_type = other RNA
tgaagtcctttcttggtctgca

SEQ ID NO: 151528 - RNA, 22 nt, synthetic construct
  source 1..22: mol_type = other RNA
tgaagtctttggcccattttcg

SEQ ID NO: 151529 - RNA, 22 nt, synthetic construct
  source 1..22: mol_type = other RNA
tgaagtctttggtgatcctaag

SEQ ID NO: 151530 - RNA, 22 nt, synthetic construct
  source 1..22: mol_type = other RNA
tgaagtgttgagaggctttaag

SEQ ID NO: 151531 - RNA, 22 nt, synthetic construct
  source 1..22: mol_type = other RNA
tgaagttaagggccatttcatt

SEQ ID NO: 151532 - RNA, 22 nt, synthetic construct
  source 1..22: mol_type = other RNA
tgaagttctcaggggtaaaggg

SEQ ID NO: 151533 - RNA, 22 nt, synthetic construct
  source 1..22: mol_type = other RNA
tgaagttgggcttaacatttga

SEQ ID NO: 151534 - RNA, 22 nt, synthetic construct
  source 1..22: mol_type = other RNA
tgaagtttatcagtctccaatc

SEQ ID NO: 151535 - RNA, 22 nt, synthetic construct
  source 1..22: mol_type = other RNA
tgaataaaattctgatagcttg

SEQ ID NO: 151536 - RNA, 22 nt, synthetic construct
  source 1..22: mol_type = other RNA
tgaataaaccacgcagtttgtt

SEQ ID NO: 151537 - RNA, 22 nt, synthetic construct
  source 1..22: mol_type = other RNA
tgaataaactaacaaagaacag

SEQ ID NO: 151538 - RNA, 22 nt, synthetic construct
  source 1..22: mol_type = other RNA
tgaataaagggtcagaatttta

SEQ ID NO: 151539 - RNA, 22 nt, synthetic construct
  source 1..22: mol_type = other RNA
tgaataaccaatgtcagagatc

SEQ ID NO: 151540 - RNA, 22 nt, synthetic construct
  source 1..22: mol_type = other RNA
tgaataacccatatctttgctt

SEQ ID NO: 151541 - RNA, 22 nt, synthetic construct
  source 1..22: mol_type = other RNA
tgaataacctcataagaactcc

SEQ ID NO: 151542 - RNA, 22 nt, synthetic construct
  source 1..22: mol_type = other RNA
tgaataaggtctgtaagtcagt

SEQ ID NO: 151543 - RNA, 22 nt, synthetic construct
  source 1..22: mol_type = other RNA
tgaataatttccaggtcattac

SEQ ID NO: 151544 - RNA, 22 nt, synthetic construct
  source 1..22: mol_type = other RNA
tgaatacaaaggtgttaagccg

SEQ ID NO: 151545 - RNA, 22 nt, synthetic construct
  source 1..22: mol_type = other RNA
tgaatacccctccctacctggc

SEQ ID NO: 151546 - RNA, 22 nt, synthetic construct
  source 1..22: mol_type = other RNA
tgaatacctatttagagggatg

SEQ ID NO: 151547 - RNA, 22 nt, synthetic construct
  source 1..22: mol_type = other RNA
tgaatactcgtgtgtctcataa

SEQ ID NO: 151548 - RNA, 22 nt, synthetic construct
  source 1..22: mol_type = other RNA
tgaatagaaaatccttacttcc

SEQ ID NO: 151549 - RNA, 22 nt, synthetic construct
  source 1..22: mol_type = other RNA
tgaatagcaactgttttttcct

SEQ ID NO: 151550 - RNA, 22 nt, synthetic construct
  source 1..22: mol_type = other RNA
tgaatagcatcttagctcttcc

SEQ ID NO: 151551 - RNA, 22 nt, synthetic construct
  source 1..22: mol_type = other RNA
tgaataggaaagtgacagatga

SEQ ID NO: 151552 - RNA, 22 nt, synthetic construct
  source 1..22: mol_type = other RNA
tgaatagggcctcaaatttcat

SEQ ID NO: 151553 - RNA, 22 nt, synthetic construct
  source 1..22: mol_type = other RNA
tgaataggtgtgtgttccttcc

SEQ ID NO: 151554 - RNA, 22 nt, synthetic construct
  source 1..22: mol_type = other RNA
tgaatatactggaaaactagag

SEQ ID NO: 151555 - RNA, 22 nt, synthetic construct
  source 1..22: mol_type = other RNA
tgaatatagctaagaaacagta

SEQ ID NO: 151556 - RNA, 22 nt, synthetic construct
  source 1..22: mol_type = other RNA
tgaatatcatttgaatgatgcg

SEQ ID NO: 151557 - RNA, 22 nt, synthetic construct
  source 1..22: mol_type = other RNA
tgaatatgtactacctatagaa

SEQ ID NO: 151558 - RNA, 22 nt, synthetic construct
  source 1..22: mol_type = other RNA
tgaatattcgttccagcagggt

SEQ ID NO: 151559 - RNA, 22 nt, synthetic construct
  source 1..22: mol_type = other RNA
tgaatcacctcaaggcagaaca

SEQ ID NO: 151560 - RNA, 22 nt, synthetic construct
  source 1..22: mol_type = other RNA
tgaatcactacagcatattagc

SEQ ID NO: 151561 - RNA, 22 nt, synthetic construct
  source 1..22: mol_type = other RNA
tgaatcagacaacacattaata

SEQ ID NO: 151562 - RNA, 22 nt, synthetic construct
  source 1..22: mol_type = other RNA
tgaatcatgggagccaaacttg

SEQ ID NO: 151563 - RNA, 22 nt, synthetic construct
  source 1..22: mol_type = other RNA
tgaatctagaaagataaatcca

SEQ ID NO: 151564 - RNA, 22 nt, synthetic construct
  source 1..22: mol_type = other RNA
tgaatctctctatccaccactc

SEQ ID NO: 151565 - RNA, 22 nt, synthetic construct
  source 1..22: mol_type = other RNA
tgaatctgagtaaagggtaaga

SEQ ID NO: 151566 - RNA, 22 nt, synthetic construct
  source 1..22: mol_type = other RNA
tgaatctgcaactatcaaaaca

SEQ ID NO: 151567 - RNA, 22 nt, synthetic construct
  source 1..22: mol_type = other RNA
tgaatctgtagattgttttagg

SEQ ID NO: 151568 - RNA, 22 nt, synthetic construct
  source 1..22: mol_type = other RNA
tgaatctgttcctgggttctcc

SEQ ID NO: 151569 - RNA, 22 nt, synthetic construct
  source 1..22: mol_type = other RNA
tgaatcttaacatttctcatgt

SEQ ID NO: 151570 - RNA, 22 nt, synthetic construct
  source 1..22: mol_type = other RNA
tgaatgaacaaaatgtggtata

SEQ ID NO: 151571 - RNA, 22 nt, synthetic construct
  source 1..22: mol_type = other RNA
tgaatgactgttgcctctgtgc

SEQ ID NO: 151572 - RNA, 22 nt, synthetic construct
  source 1..22: mol_type = other RNA
tgaatgagaccaaatgcataaa

SEQ ID NO: 151573 - RNA, 22 nt, synthetic construct
  source 1..22: mol_type = other RNA
tgaatgagcaaggtcgtttcag

SEQ ID NO: 151574 - RNA, 22 nt, synthetic construct
  source 1..22: mol_type = other RNA
tgaatgaggagtgaatttttca

SEQ ID NO: 151575 - RNA, 22 nt, synthetic construct
  source 1..22: mol_type = other RNA
tgaatgatgccatcacattttg

SEQ ID NO: 151576 - RNA, 22 nt, synthetic construct
  source 1..22: mol_type = other RNA
tgaatgatttccctgcatacac

SEQ ID NO: 151577 - RNA, 22 nt, synthetic construct
  source 1..22: mol_type = other RNA
tgaatgcacgtgaagctacaga

SEQ ID NO: 151578 - RNA, 22 nt, synthetic construct
  source 1..22: mol_type = other RNA
tgaatgcagtggcttcctaact

SEQ ID NO: 151579 - RNA, 22 nt, synthetic construct
  source 1..22: mol_type = other RNA
tgaatggaaaattcaaacatga

SEQ ID NO: 151580 - RNA, 22 nt, synthetic construct
  source 1..22: mol_type = other RNA
tgaatggaaaattcttggtctt

SEQ ID NO: 151581 - RNA, 22 nt, synthetic construct
  source 1..22: mol_type = other RNA
tgaatggaaagaaatagaactg

SEQ ID NO: 151582 - RNA, 22 nt, synthetic construct
  source 1..22: mol_type = other RNA
tgaatggaaatgtaaattccta

SEQ ID NO: 151583 - RNA, 22 nt, synthetic construct
  source 1..22: mol_type = other RNA
tgaatggataaggaaaatatga

SEQ ID NO: 151584 - RNA, 22 nt, synthetic construct
  source 1..22: mol_type = other RNA
tgaatggggatgcaacaaatgt

SEQ ID NO: 151585 - RNA, 22 nt, synthetic construct
  source 1..22: mol_type = other RNA
tgaatggggtaattttggggcc

SEQ ID NO: 151586 - RNA, 22 nt, synthetic construct
  source 1..22: mol_type = other RNA
tgaatgtgaggtgaggacatgg

SEQ ID NO: 151587 - RNA, 22 nt, synthetic construct
  source 1..22: mol_type = other RNA
tgaatgtgcctacatagtccac

SEQ ID NO: 151588 - RNA, 22 nt, synthetic construct
  source 1..22: mol_type = other RNA
tgaatgtggcagaatttacatt

SEQ ID NO: 151589 - RNA, 22 nt, synthetic construct
  source 1..22: mol_type = other RNA
tgaattaagcaccactagagta

SEQ ID NO: 151590 - RNA, 22 nt, synthetic construct
  source 1..22: mol_type = other RNA
tgaattaatctcttacacctgt

SEQ ID NO: 151591 - RNA, 22 nt, synthetic construct
  source 1..22: mol_type = other RNA
tgaattacaaatgaaagtcagc

SEQ ID NO: 151592 - RNA, 22 nt, synthetic construct
  source 1..22: mol_type = other RNA
tgaattagatggcttaggatca

SEQ ID NO: 151593 - RNA, 22 nt, synthetic construct
  source 1..22: mol_type = other RNA
tgaattagcaatgcgaatcatc

SEQ ID NO: 151594 - RNA, 22 nt, synthetic construct
  source 1..22: mol_type = other RNA
tgaattagtgattttaccaagg

SEQ ID NO: 151595 - RNA, 22 nt, synthetic construct
  source 1..22: mol_type = other RNA
tgaattcacagtagaagactca

SEQ ID NO: 151596 - RNA, 22 nt, synthetic construct
  source 1..22: mol_type = other RNA
tgaattcactaatgcctcaaat

SEQ ID NO: 151597 - RNA, 22 nt, synthetic construct
  source 1..22: mol_type = other RNA
tgaattcagatggccccaaaat

SEQ ID NO: 151598 - RNA, 22 nt, synthetic construct
  source 1..22: mol_type = other RNA
tgaattcccacaaaatatgaag

SEQ ID NO: 151599 - RNA, 22 nt, synthetic construct
  source 1..22: mol_type = other RNA
tgaattctaatgaactcccaga

SEQ ID NO: 151600 - RNA, 22 nt, synthetic construct
  source 1..22: mol_type = other RNA
tgaattctctggaatagaagag

SEQ ID NO: 151601 - RNA, 22 nt, synthetic construct
  source 1..22: mol_type = other RNA
tgaattctgacttagtgaggga

SEQ ID NO: 151602 - RNA, 22 nt, synthetic construct
  source 1..22: mol_type = other RNA
tgaattctgcttattatatgcc

SEQ ID NO: 151603 - RNA, 22 nt, synthetic construct
  source 1..22: mol_type = other RNA
tgaattcttgacctcaaatgat

SEQ ID NO: 151604 - RNA, 22 nt, synthetic construct
  source 1..22: mol_type = other RNA
tgaattgagatgtactggaagt

SEQ ID NO: 151605 - RNA, 22 nt, synthetic construct
  source 1..22: mol_type = other RNA
tgaattgtgacagttctatttc

SEQ ID NO: 151606 - RNA, 22 nt, synthetic construct
  source 1..22: mol_type = other RNA
tgaattgttgcgcgtcaaaaga

SEQ ID NO: 151607 - RNA, 22 nt, synthetic construct
  source 1..22: mol_type = other RNA
tgaattgttggagttctttata

SEQ ID NO: 151608 - RNA, 22 nt, synthetic construct
  source 1..22: mol_type = other RNA
tgaatttaagacacaaggaagg

SEQ ID NO: 151609 - RNA, 22 nt, synthetic construct
  source 1..22: mol_type = other RNA
tgaatttaattttgagagtgca

SEQ ID NO: 151610 - RNA, 22 nt, synthetic construct
  source 1..22: mol_type = other RNA
tgaatttctgtccttggattgc

SEQ ID NO: 151611 - RNA, 22 nt, synthetic construct
  source 1..22: mol_type = other RNA
tgaatttgcctattctggggct

SEQ ID NO: 151612 - RNA, 22 nt, synthetic construct
  source 1..22: mol_type = other RNA
tgaatttggaaagggtagagca

SEQ ID NO: 151613 - RNA, 22 nt, synthetic construct
  source 1..22: mol_type = other RNA
tgaatttggatttgagtaacta

SEQ ID NO: 151614 - RNA, 22 nt, synthetic construct
  source 1..22: mol_type = other RNA
tgaatttggtattcttatccct

SEQ ID NO: 151615 - RNA, 22 nt, synthetic construct
  source 1..22: mol_type = other RNA
tgaattttccattcacacaccc

SEQ ID NO: 151616 - RNA, 22 nt, synthetic construct
  source 1..22: mol_type = other RNA
tgacaaaaagtaggggtaaatc

SEQ ID NO: 151617 - RNA, 22 nt, synthetic construct
  source 1..22: mol_type = other RNA
tgacaaaaggccccttgaaaga

SEQ ID NO: 151618 - RNA, 22 nt, synthetic construct
  source 1..22: mol_type = other RNA
tgacaaacacttttcaaacact

SEQ ID NO: 151619 - RNA, 22 nt, synthetic construct
  source 1..22: mol_type = other RNA
tgacaaagtatgagaaatgtct

SEQ ID NO: 151620 - RNA, 22 nt, synthetic construct
  source 1..22: mol_type = other RNA
tgacaaataaaagcttatgatc

SEQ ID NO: 151621 - RNA, 22 nt, synthetic construct
  source 1..22: mol_type = other RNA
tgacaactgggagaatggcaag

SEQ ID NO: 151622 - RNA, 22 nt, synthetic construct
  source 1..22: mol_type = other RNA
tgacaagaatctttggcaaact

SEQ ID NO: 151623 - RNA, 22 nt, synthetic construct
  source 1..22: mol_type = other RNA
tgacaagacgtgtacataaaat

SEQ ID NO: 151624 - RNA, 22 nt, synthetic construct
  source 1..22: mol_type = other RNA
tgacaagactacctaaaacaat

SEQ ID NO: 151625 - RNA, 22 nt, synthetic construct
  source 1..22: mol_type = other RNA
tgacaagtaaatgcaatgcagg

SEQ ID NO: 151626 - RNA, 22 nt, synthetic construct
  source 1..22: mol_type = other RNA
tgacaagtagtacaaaagtgct

SEQ ID NO: 151627 - RNA, 22 nt, synthetic construct
  source 1..22: mol_type = other RNA
tgacaagttcagcatcttcact

SEQ ID NO: 151628 - RNA, 22 nt, synthetic construct
  source 1..22: mol_type = other RNA
tgacaataaatggtgcaggcca

SEQ ID NO: 151629 - RNA, 22 nt, synthetic construct
  source 1..22: mol_type = other RNA
tgacaataataactacacatca

SEQ ID NO: 151630 - RNA, 22 nt, synthetic construct
  source 1..22: mol_type = other RNA
tgacaatagccaagacatggaa

SEQ ID NO: 151631 - RNA, 22 nt, synthetic construct
  source 1..22: mol_type = other RNA
tgacaatataggagactatcgt

SEQ ID NO: 151632 - RNA, 22 nt, synthetic construct
  source 1..22: mol_type = other RNA
tgacaatttcagggagaattgg

SEQ ID NO: 151633 - RNA, 22 nt, synthetic construct
  source 1..22: mol_type = other RNA
tgacaatttgccaaaatgattt

SEQ ID NO: 151634 - RNA, 22 nt, synthetic construct
  source 1..22: mol_type = other RNA
tgacacaaaggactggaactca

SEQ ID NO: 151635 - RNA, 22 nt, synthetic construct
  source 1..22: mol_type = other RNA
tgacacaacttactactaaaaa

SEQ ID NO: 151636 - RNA, 22 nt, synthetic construct
  source 1..22: mol_type = other RNA
tgacacaggctgaagggaggaa

SEQ ID NO: 151637 - RNA, 22 nt, synthetic construct
  source 1..22: mol_type = other RNA
tgacaccaaaactacaggcaac

SEQ ID NO: 151638 - RNA, 22 nt, synthetic construct
  source 1..22: mol_type = other RNA
tgacacccgaagaggacgattt

SEQ ID NO: 151639 - RNA, 22 nt, synthetic construct
  source 1..22: mol_type = other RNA
tgacacccgacccactagtgaa

SEQ ID NO: 151640 - RNA, 22 nt, synthetic construct
  source 1..22: mol_type = other RNA
tgacacctgaggggtcttatgc

SEQ ID NO: 151641 - RNA, 22 nt, synthetic construct
  source 1..22: mol_type = other RNA
tgacagaaaatatctacaaatc

SEQ ID NO: 151642 - RNA, 22 nt, synthetic construct
  source 1..22: mol_type = other RNA
tgacagaacaaactcaagttcc

SEQ ID NO: 151643 - RNA, 22 nt, synthetic construct
  source 1..22: mol_type = other RNA
tgacagaacaaataacaccata

SEQ ID NO: 151644 - RNA, 22 nt, synthetic construct
  source 1..22: mol_type = other RNA
tgacagaatgcatcttttaaaa

SEQ ID NO: 151645 - RNA, 22 nt, synthetic construct
  source 1..22: mol_type = other RNA
tgacagagagagacctttcttt

SEQ ID NO: 151646 - RNA, 22 nt, synthetic construct
  source 1..22: mol_type = other RNA
tgacagagcaacaacctgtctc

SEQ ID NO: 151647 - RNA, 22 nt, synthetic construct
  source 1..22: mol_type = other RNA
tgacagagccgagcagaaggga

SEQ ID NO: 151648 - RNA, 22 nt, synthetic construct
  source 1..22: mol_type = other RNA
tgacagagttccacctccatca

SEQ ID NO: 151649 - RNA, 22 nt, synthetic construct
  source 1..22: mol_type = other RNA
tgacagatcccaaaaaggtttt

SEQ ID NO: 151650 - RNA, 22 nt, synthetic construct
  source 1..22: mol_type = other RNA
tgacagatgagaaatacttgga

SEQ ID NO: 151651 - RNA, 22 nt, synthetic construct
  source 1..22: mol_type = other RNA
tgacagatgagactcttaatat

SEQ ID NO: 151652 - RNA, 22 nt, synthetic construct
  source 1..22: mol_type = other RNA
tgacagattaaataccacctga

SEQ ID NO: 151653 - RNA, 22 nt, synthetic construct
  source 1..22: mol_type = other RNA
tgacagcaaataaacaaaatca

SEQ ID NO: 151654 - RNA, 22 nt, synthetic construct
  source 1..22: mol_type = other RNA
tgacagccacgtgtattgagtg

SEQ ID NO: 151655 - RNA, 22 nt, synthetic construct
  source 1..22: mol_type = other RNA
tgacagctgagtagcgctttaa

SEQ ID NO: 151656 - RNA, 22 nt, synthetic construct
  source 1..22: mol_type = other RNA
tgacaggacagagcagtaggct

SEQ ID NO: 151657 - RNA, 22 nt, synthetic construct
  source 1..22: mol_type = other RNA
tgacaggactccacagagttca

SEQ ID NO: 151658 - RNA, 22 nt, synthetic construct
  source 1..22: mol_type = other RNA
tgacaggtgagtggactgtgag

SEQ ID NO: 151659 - RNA, 22 nt, synthetic construct
  source 1..22: mol_type = other RNA
tgacaggtggtatgggagatgt

SEQ ID NO: 151660 - RNA, 22 nt, synthetic construct
  source 1..22: mol_type = other RNA
tgacagtatgtcagactcattg

SEQ ID NO: 151661 - RNA, 22 nt, synthetic construct
  source 1..22: mol_type = other RNA
tgacagtggacaaaggttccaa

SEQ ID NO: 151662 - RNA, 22 nt, synthetic construct
  source 1..22: mol_type = other RNA
tgacagttactctaaaagaata

SEQ ID NO: 151663 - RNA, 22 nt, synthetic construct
  source 1..22: mol_type = other RNA
tgacagttctatttctttccat

SEQ ID NO: 151664 - RNA, 22 nt, synthetic construct
  source 1..22: mol_type = other RNA
tgacagttctgtgaatttgatt

SEQ ID NO: 151665 - RNA, 22 nt, synthetic construct
  source 1..22: mol_type = other RNA
tgacataactgtaaagtaatca

SEQ ID NO: 151666 - RNA, 22 nt, synthetic construct
  source 1..22: mol_type = other RNA
tgacatactgtcacaggctttc

SEQ ID NO: 151667 - RNA, 22 nt, synthetic construct
  source 1..22: mol_type = other RNA
tgacatatgccggctgttaggt

SEQ ID NO: 151668 - RNA, 22 nt, synthetic construct
  source 1..22: mol_type = other RNA
tgacatatgttttgcttcgaag

SEQ ID NO: 151669 - RNA, 22 nt, synthetic construct
  source 1..22: mol_type = other RNA
tgacatcaagggtggtgctgga

SEQ ID NO: 151670 - RNA, 22 nt, synthetic construct
  source 1..22: mol_type = other RNA
tgacatcctttaatttgggttt

SEQ ID NO: 151671 - RNA, 22 nt, synthetic construct
  source 1..22: mol_type = other RNA
tgacatcctttgcgtctgtgat

SEQ ID NO: 151672 - RNA, 22 nt, synthetic construct
  source 1..22: mol_type = other RNA
tgacatcttgcataactcgtaa

SEQ ID NO: 151673 - RNA, 22 nt, synthetic construct
  source 1..22: mol_type = other RNA
tgacatgacaggtgagtggact

SEQ ID NO: 151674 - RNA, 22 nt, synthetic construct
  source 1..22: mol_type = other RNA
tgacatgagagctaagggaagt

SEQ ID NO: 151675 - RNA, 22 nt, synthetic construct
  source 1..22: mol_type = other RNA
tgacatgattgaggacttcatg

SEQ ID NO: 151676 - RNA, 22 nt, synthetic construct
  source 1..22: mol_type = other RNA
tgacatggttttcctactaaca

SEQ ID NO: 151677 - RNA, 22 nt, synthetic construct
  source 1..22: mol_type = other RNA
tgacatgtgtaaaacatctgga

SEQ ID NO: 151678 - RNA, 22 nt, synthetic construct
  source 1..22: mol_type = other RNA
tgacatgtgttttatttaggcc

SEQ ID NO: 151679 - RNA, 22 nt, synthetic construct
  source 1..22: mol_type = other RNA
tgacattagtggtggtagtaag

SEQ ID NO: 151680 - RNA, 22 nt, synthetic construct
  source 1..22: mol_type = other RNA
tgacattcttaccttctaaaat

SEQ ID NO: 151681 - RNA, 22 nt, synthetic construct
  source 1..22: mol_type = other RNA
tgacattggttattcatgtttg

SEQ ID NO: 151682 - RNA, 22 nt, synthetic construct
  source 1..22: mol_type = other RNA
tgacatttgcttttcctggaaa

SEQ ID NO: 151683 - RNA, 22 nt, synthetic construct
  source 1..22: mol_type = other RNA
tgacatttttcaaatacctagt

SEQ ID NO: 151684 - RNA, 22 nt, synthetic construct
  source 1..22: mol_type = other RNA
tgaccaaaacaaaaaacaaacc

SEQ ID NO: 151685 - RNA, 22 nt, synthetic construct
  source 1..22: mol_type = other RNA
tgaccaaacatgtgaggattta

SEQ ID NO: 151686 - RNA, 22 nt, synthetic construct
  source 1..22: mol_type = other RNA
tgaccaactatttcactaaata

SEQ ID NO: 151687 - RNA, 22 nt, synthetic construct
  source 1..22: mol_type = other RNA
tgaccacagtttgaaactttaa

SEQ ID NO: 151688 - RNA, 22 nt, synthetic construct
  source 1..22: mol_type = other RNA
tgaccacattcccaaatgtctt

SEQ ID NO: 151689 - RNA, 22 nt, synthetic construct
  source 1..22: mol_type = other RNA
tgaccagatcaaacgtgctttc

SEQ ID NO: 151690 - RNA, 22 nt, synthetic construct
  source 1..22: mol_type = other RNA
tgaccagtgtgatgggggtaag

SEQ ID NO: 151691 - RNA, 22 nt, synthetic construct
  source 1..22: mol_type = other RNA
tgaccatctcagcacagagccg

SEQ ID NO: 151692 - RNA, 22 nt, synthetic construct
  source 1..22: mol_type = other RNA
tgaccatgggacaagtgggtgg

SEQ ID NO: 151693 - RNA, 22 nt, synthetic construct
  source 1..22: mol_type = other RNA
tgaccattccacgctgtggctt

SEQ ID NO: 151694 - RNA, 22 nt, synthetic construct
  source 1..22: mol_type = other RNA
tgaccattgtgtggacacactg

SEQ ID NO: 151695 - RNA, 22 nt, synthetic construct
  source 1..22: mol_type = other RNA
tgaccatttttatatctttgga

SEQ ID NO: 151696 - RNA, 22 nt, synthetic construct
  source 1..22: mol_type = other RNA
tgacccaatcatgttctttata

SEQ ID NO: 151697 - RNA, 22 nt, synthetic construct
  source 1..22: mol_type = other RNA
tgacccactggtttcagtccct

SEQ ID NO: 151698 - RNA, 22 nt, synthetic construct
  source 1..22: mol_type = other RNA
tgacccagagcctaatgtgtaa

SEQ ID NO: 151699 - RNA, 22 nt, synthetic construct
  source 1..22: mol_type = other RNA
tgacccataaactgaacattta

SEQ ID NO: 151700 - RNA, 22 nt, synthetic construct
  source 1..22: mol_type = other RNA
tgaccctgagtccagaggtgag

SEQ ID NO: 151701 - RNA, 22 nt, synthetic construct
  source 1..22: mol_type = other RNA
tgaccctgctatgcatactttg

SEQ ID NO: 151702 - RNA, 22 nt, synthetic construct
  source 1..22: mol_type = other RNA
tgaccctttattcaaagatcat

SEQ ID NO: 151703 - RNA, 22 nt, synthetic construct
  source 1..22: mol_type = other RNA
tgaccctttgaagtatgtaatt

SEQ ID NO: 151704 - RNA, 22 nt, synthetic construct
  source 1..22: mol_type = other RNA
tgaccgagatacttaagttttt

SEQ ID NO: 151705 - RNA, 22 nt, synthetic construct
  source 1..22: mol_type = other RNA
tgaccgctttcgtgagggtttc

SEQ ID NO: 151706 - RNA, 22 nt, synthetic construct
  source 1..22: mol_type = other RNA
tgacctaaaatcttattcccca

SEQ ID NO: 151707 - RNA, 22 nt, synthetic construct
  source 1..22: mol_type = other RNA
tgacctaaagttttaagaaaag

SEQ ID NO: 151708 - RNA, 22 nt, synthetic construct
  source 1..22: mol_type = other RNA
tgacctaagcttgggtaggaag

SEQ ID NO: 151709 - RNA, 22 nt, synthetic construct
  source 1..22: mol_type = other RNA
tgacctatctattaacagaagg

SEQ ID NO: 151710 - RNA, 22 nt, synthetic construct
  source 1..22: mol_type = other RNA
tgacctcaagcgatccagccgc

SEQ ID NO: 151711 - RNA, 22 nt, synthetic construct
  source 1..22: mol_type = other RNA
tgacctcagtggtagttacaca

SEQ ID NO: 151712 - RNA, 22 nt, synthetic construct
  source 1..22: mol_type = other RNA
tgacctcatgtaactaattact

SEQ ID NO: 151713 - RNA, 22 nt, synthetic construct
  source 1..22: mol_type = other RNA
tgacctcccaaaggactgggat

SEQ ID NO: 151714 - RNA, 22 nt, synthetic construct
  source 1..22: mol_type = other RNA
tgacctcctcccacttacatca

SEQ ID NO: 151715 - RNA, 22 nt, synthetic construct
  source 1..22: mol_type = other RNA
tgacctctgcagttagcatgcc

SEQ ID NO: 151716 - RNA, 22 nt, synthetic construct
  source 1..22: mol_type = other RNA
tgacctgccagagttggcacag

SEQ ID NO: 151717 - RNA, 22 nt, synthetic construct
  source 1..22: mol_type = other RNA
tgacctgctttcttggggctct

SEQ ID NO: 151718 - RNA, 22 nt, synthetic construct
  source 1..22: mol_type = other RNA
tgacctggaaattattcaatat

SEQ ID NO: 151719 - RNA, 22 nt, synthetic construct
  source 1..22: mol_type = other RNA
tgacctgggagaaagaccaaga

SEQ ID NO: 151720 - RNA, 22 nt, synthetic construct
  source 1..22: mol_type = other RNA
tgacctggtactctatgatata

SEQ ID NO: 151721 - RNA, 22 nt, synthetic construct
  source 1..22: mol_type = other RNA
tgacctgtaatttttctctttt

SEQ ID NO: 151722 - RNA, 22 nt, synthetic construct
  source 1..22: mol_type = other RNA
tgacctgtccttgtgttttatt

SEQ ID NO: 151723 - RNA, 22 nt, synthetic construct
  source 1..22: mol_type = other RNA
tgaccttagtggttgacccata

SEQ ID NO: 151724 - RNA, 22 nt, synthetic construct
  source 1..22: mol_type = other RNA
tgaccttagttttcacttttgt

SEQ ID NO: 151725 - RNA, 22 nt, synthetic construct
  source 1..22: mol_type = other RNA
tgaccttccttgtgtcttaaat

SEQ ID NO: 151726 - RNA, 22 nt, synthetic construct
  source 1..22: mol_type = other RNA
tgaccttctacttatcttttct

SEQ ID NO: 151727 - RNA, 22 nt, synthetic construct
  source 1..22: mol_type = other RNA
tgaccttgacaataaatggtgc

SEQ ID NO: 151728 - RNA, 22 nt, synthetic construct
  source 1..22: mol_type = other RNA
tgaccttgtatccagtaatctt

SEQ ID NO: 151729 - RNA, 22 nt, synthetic construct
  source 1..22: mol_type = other RNA
tgaccttgtgcatgtgcaggaa

SEQ ID NO: 151730 - RNA, 22 nt, synthetic construct
  source 1..22: mol_type = other RNA
tgacgaaagtgaagcccagaga

SEQ ID NO: 151731 - RNA, 22 nt, synthetic construct
  source 1..22: mol_type = other RNA
tgacgaagtcacattctagtga

SEQ ID NO: 151732 - RNA, 22 nt, synthetic construct
  source 1..22: mol_type = other RNA
tgacgcgcaacaattcaacagc

SEQ ID NO: 151733 - RNA, 22 nt, synthetic construct
  source 1..22: mol_type = other RNA
tgacgtgagatcatgccactcc

SEQ ID NO: 151734 - RNA, 22 nt, synthetic construct
  source 1..22: mol_type = other RNA
tgactaatttgaggcattagtg

SEQ ID NO: 151735 - RNA, 22 nt, synthetic construct
  source 1..22: mol_type = other RNA
tgactacacatacacagggaaa

SEQ ID NO: 151736 - RNA, 22 nt, synthetic construct
  source 1..22: mol_type = other RNA
tgactacactgaagggaatttt

SEQ ID NO: 151737 - RNA, 22 nt, synthetic construct
  source 1..22: mol_type = other RNA
tgactaccaattctccctgaaa

SEQ ID NO: 151738 - RNA, 22 nt, synthetic construct
  source 1..22: mol_type = other RNA
tgactaccatctctccaacaga

SEQ ID NO: 151739 - RNA, 22 nt, synthetic construct
  source 1..22: mol_type = other RNA
tgactagaagaaatgttaacaa

SEQ ID NO: 151740 - RNA, 22 nt, synthetic construct
  source 1..22: mol_type = other RNA
tgactaggctcctgagaaccgg

SEQ ID NO: 151741 - RNA, 22 nt, synthetic construct
  source 1..22: mol_type = other RNA
tgactagtacgtgcagagcagg

SEQ ID NO: 151742 - RNA, 22 nt, synthetic construct
  source 1..22: mol_type = other RNA
tgactagtggctcatacttgct

SEQ ID NO: 151743 - RNA, 22 nt, synthetic construct
  source 1..22: mol_type = other RNA
tgactagtgtgaatgaggagtg

SEQ ID NO: 151744 - RNA, 22 nt, synthetic construct
  source 1..22: mol_type = other RNA
tgactatgaaaagcctcaaacg

SEQ ID NO: 151745 - RNA, 22 nt, synthetic construct
  source 1..22: mol_type = other RNA
tgactattttaccctcatttta

SEQ ID NO: 151746 - RNA, 22 nt, synthetic construct
  source 1..22: mol_type = other RNA
tgactcaatcttcttatttgtt

SEQ ID NO: 151747 - RNA, 22 nt, synthetic construct
  source 1..22: mol_type = other RNA
tgactcagtacttccctctttc

SEQ ID NO: 151748 - RNA, 22 nt, synthetic construct
  source 1..22: mol_type = other RNA
tgactccaaagcaaaccagaca

SEQ ID NO: 151749 - RNA, 22 nt, synthetic construct
  source 1..22: mol_type = other RNA
tgactccaagcacacagtttga

SEQ ID NO: 151750 - RNA, 22 nt, synthetic construct
  source 1..22: mol_type = other RNA
tgactccctttttaggtaggga

SEQ ID NO: 151751 - RNA, 22 nt, synthetic construct
  source 1..22: mol_type = other RNA
tgactcctaaaacatggtccac

SEQ ID NO: 151752 - RNA, 22 nt, synthetic construct
  source 1..22: mol_type = other RNA
tgactctaaagtctatgctctt

SEQ ID NO: 151753 - RNA, 22 nt, synthetic construct
  source 1..22: mol_type = other RNA
tgactctgtgcttgtgctttta

SEQ ID NO: 151754 - RNA, 22 nt, synthetic construct
  source 1..22: mol_type = other RNA
tgactgaaggattcctccctgg

SEQ ID NO: 151755 - RNA, 22 nt, synthetic construct
  source 1..22: mol_type = other RNA
tgactgaattaatctcttacac

SEQ ID NO: 151756 - RNA, 22 nt, synthetic construct
  source 1..22: mol_type = other RNA
tgactgaattcccacaaaatat

SEQ ID NO: 151757 - RNA, 22 nt, synthetic construct
  source 1..22: mol_type = other RNA
tgactgacataactgtaaagta

SEQ ID NO: 151758 - RNA, 22 nt, synthetic construct
  source 1..22: mol_type = other RNA
tgactgagatacttaagttttt

SEQ ID NO: 151759 - RNA, 22 nt, synthetic construct
  source 1..22: mol_type = other RNA
tgactggccatccttcccaaat

SEQ ID NO: 151760 - RNA, 22 nt, synthetic construct
  source 1..22: mol_type = other RNA
tgactggctgtgccaactctgg

SEQ ID NO: 151761 - RNA, 22 nt, synthetic construct
  source 1..22: mol_type = other RNA
tgactggcttaatgcatataaa

SEQ ID NO: 151762 - RNA, 22 nt, synthetic construct
  source 1..22: mol_type = other RNA
tgactggtgtccttctgagaag

SEQ ID NO: 151763 - RNA, 22 nt, synthetic construct
  source 1..22: mol_type = other RNA
tgactgtaagctgaactctgtg

SEQ ID NO: 151764 - RNA, 22 nt, synthetic construct
  source 1..22: mol_type = other RNA
tgactgtagtccctgctacttg

SEQ ID NO: 151765 - RNA, 22 nt, synthetic construct
  source 1..22: mol_type = other RNA
tgactgtcctgaattctaatga

SEQ ID NO: 151766 - RNA, 22 nt, synthetic construct
  source 1..22: mol_type = other RNA
tgactgtgagggtaagaaagga

SEQ ID NO: 151767 - RNA, 22 nt, synthetic construct
  source 1..22: mol_type = other RNA
tgactgttgcctctgtgctagc

SEQ ID NO: 151768 - RNA, 22 nt, synthetic construct
  source 1..22: mol_type = other RNA
tgacttaagcaacagaaattta

SEQ ID NO: 151769 - RNA, 22 nt, synthetic construct
  source 1..22: mol_type = other RNA
tgacttacagaccttattcaaa

SEQ ID NO: 151770 - RNA, 22 nt, synthetic construct
  source 1..22: mol_type = other RNA
tgacttacagatatcacccaga

SEQ ID NO: 151771 - RNA, 22 nt, synthetic construct
  source 1..22: mol_type = other RNA
tgacttagagggcttcatgctg

SEQ ID NO: 151772 - RNA, 22 nt, synthetic construct
  source 1..22: mol_type = other RNA
tgacttagtgagggaggccatc

SEQ ID NO: 151773 - RNA, 22 nt, synthetic construct
  source 1..22: mol_type = other RNA
tgacttcaaactatacttcaat

SEQ ID NO: 151774 - RNA, 22 nt, synthetic construct
  source 1..22: mol_type = other RNA
tgacttcaagaggttaaaacca

SEQ ID NO: 151775 - RNA, 22 nt, synthetic construct
  source 1..22: mol_type = other RNA
tgacttcactagatctcttttc

SEQ ID NO: 151776 - RNA, 22 nt, synthetic construct
  source 1..22: mol_type = other RNA
tgacttcactggagaattctac

SEQ ID NO: 151777 - RNA, 22 nt, synthetic construct
  source 1..22: mol_type = other RNA
tgacttcacttccaagtcccgg

SEQ ID NO: 151778 - RNA, 22 nt, synthetic construct
  source 1..22: mol_type = other RNA
tgacttcattcttgacatgatt

SEQ ID NO: 151779 - RNA, 22 nt, synthetic construct
  source 1..22: mol_type = other RNA
tgacttcctggctctagcccag

SEQ ID NO: 151780 - RNA, 22 nt, synthetic construct
  source 1..22: mol_type = other RNA
tgacttcgtcaaggggagaggc

SEQ ID NO: 151781 - RNA, 22 nt, synthetic construct
  source 1..22: mol_type = other RNA
tgacttctcagggcctgctttt

SEQ ID NO: 151782 - RNA, 22 nt, synthetic construct
  source 1..22: mol_type = other RNA
tgacttctctcagagggaaact

SEQ ID NO: 151783 - RNA, 22 nt, synthetic construct
  source 1..22: mol_type = other RNA
tgacttctggatgtgtatgatc

SEQ ID NO: 151784 - RNA, 22 nt, synthetic construct
  source 1..22: mol_type = other RNA
tgacttgtttattttacttagc

SEQ ID NO: 151785 - RNA, 22 nt, synthetic construct
  source 1..22: mol_type = other RNA
tgactttaccctgctggaacga

SEQ ID NO: 151786 - RNA, 22 nt, synthetic construct
  source 1..22: mol_type = other RNA
tgactttactgttctccagtcc

SEQ ID NO: 151787 - RNA, 22 nt, synthetic construct
  source 1..22: mol_type = other RNA
tgactttatggtatcacttttt

SEQ ID NO: 151788 - RNA, 22 nt, synthetic construct
  source 1..22: mol_type = other RNA
tgactttcatttgtaattcatc

SEQ ID NO: 151789 - RNA, 22 nt, synthetic construct
  source 1..22: mol_type = other RNA
tgacttttatcaattcacaaga

SEQ ID NO: 151790 - RNA, 22 nt, synthetic construct
  source 1..22: mol_type = other RNA
tgacttttccttaaaaaaggtt

SEQ ID NO: 151791 - RNA, 22 nt, synthetic construct
  source 1..22: mol_type = other RNA
tgacttttttgcccactcttat

SEQ ID NO: 151792 - RNA, 22 nt, synthetic construct
  source 1..22: mol_type = other RNA
tgagaaacatacatgttcagtt

SEQ ID NO: 151793 - RNA, 22 nt, synthetic construct
  source 1..22: mol_type = other RNA
tgagaaacctaagaaaggtcta

SEQ ID NO: 151794 - RNA, 22 nt, synthetic construct
  source 1..22: mol_type = other RNA
tgagaaactatccaacatgcca

SEQ ID NO: 151795 - RNA, 22 nt, synthetic construct
  source 1..22: mol_type = other RNA
tgagaaagagggaagtactgag

SEQ ID NO: 151796 - RNA, 22 nt, synthetic construct
  source 1..22: mol_type = other RNA
tgagaaagcacataaaaaagga

SEQ ID NO: 151797 - RNA, 22 nt, synthetic construct
  source 1..22: mol_type = other RNA
tgagaaaggtttcttcactctt

SEQ ID NO: 151798 - RNA, 22 nt, synthetic construct
  source 1..22: mol_type = other RNA
tgagaaatacttggacagggga

SEQ ID NO: 151799 - RNA, 22 nt, synthetic construct
  source 1..22: mol_type = other RNA
tgagaaatgtctggtttgcttt

SEQ ID NO: 151800 - RNA, 22 nt, synthetic construct
  source 1..22: mol_type = other RNA
tgagaaatgttaagattcaaca

SEQ ID NO: 151801 - RNA, 22 nt, synthetic construct
  source 1..22: mol_type = other RNA
tgagaacccagtgtctgctaca

SEQ ID NO: 151802 - RNA, 22 nt, synthetic construct
  source 1..22: mol_type = other RNA
tgagaaccggaacttgagtttg

SEQ ID NO: 151803 - RNA, 22 nt, synthetic construct
  source 1..22: mol_type = other RNA
tgagaagactaagcagaaatga

SEQ ID NO: 151804 - RNA, 22 nt, synthetic construct
  source 1..22: mol_type = other RNA
tgagaagactggaaaagtgttg

SEQ ID NO: 151805 - RNA, 22 nt, synthetic construct
  source 1..22: mol_type = other RNA
tgagaagagctgtaacagaggc

SEQ ID NO: 151806 - RNA, 22 nt, synthetic construct
  source 1..22: mol_type = other RNA
tgagaagcagaaaatcagtgtg

SEQ ID NO: 151807 - RNA, 22 nt, synthetic construct
  source 1..22: mol_type = other RNA
tgagaagccacacagtacaagg

SEQ ID NO: 151808 - RNA, 22 nt, synthetic construct
  source 1..22: mol_type = other RNA
tgagaaggcgaaatgtgaacag

SEQ ID NO: 151809 - RNA, 22 nt, synthetic construct
  source 1..22: mol_type = other RNA
tgagaagtaacattacaacagc

SEQ ID NO: 151810 - RNA, 22 nt, synthetic construct
  source 1..22: mol_type = other RNA
tgagaagtcaaagcctgtggag

SEQ ID NO: 151811 - RNA, 22 nt, synthetic construct
  source 1..22: mol_type = other RNA
tgagaagtcttttcctaccctg

SEQ ID NO: 151812 - RNA, 22 nt, synthetic construct
  source 1..22: mol_type = other RNA
tgagaattcattgttgtgtgtt

SEQ ID NO: 151813 - RNA, 22 nt, synthetic construct
  source 1..22: mol_type = other RNA
tgagaatttcagaaagagaata

SEQ ID NO: 151814 - RNA, 22 nt, synthetic construct
  source 1..22: mol_type = other RNA
tgagaatttcaggtgtgtaaac

SEQ ID NO: 151815 - RNA, 22 nt, synthetic construct
  source 1..22: mol_type = other RNA
tgagacacacgagtattcaagt

SEQ ID NO: 151816 - RNA, 22 nt, synthetic construct
  source 1..22: mol_type = other RNA
tgagacacctacaatattaact

SEQ ID NO: 151817 - RNA, 22 nt, synthetic construct
  source 1..22: mol_type = other RNA
tgagacacggtctcacactgtt

SEQ ID NO: 151818 - RNA, 22 nt, synthetic construct
  source 1..22: mol_type = other RNA
tgagacagaccctggcttgtga

SEQ ID NO: 151819 - RNA, 22 nt, synthetic construct
  source 1..22: mol_type = other RNA
tgagacagattctctgtctctg

SEQ ID NO: 151820 - RNA, 22 nt, synthetic construct
  source 1..22: mol_type = other RNA
tgagacaggatccagatgtaga

SEQ ID NO: 151821 - RNA, 22 nt, synthetic construct
  source 1..22: mol_type = other RNA
tgagacagggtctcactcttac

SEQ ID NO: 151822 - RNA, 22 nt, synthetic construct
  source 1..22: mol_type = other RNA
tgagacagtattgtgctgaaac

SEQ ID NO: 151823 - RNA, 22 nt, synthetic construct
  source 1..22: mol_type = other RNA
tgagacatcacaatgcgtttgt

SEQ ID NO: 151824 - RNA, 22 nt, synthetic construct
  source 1..22: mol_type = other RNA
tgagacatttgagggtgctgat

SEQ ID NO: 151825 - RNA, 22 nt, synthetic construct
  source 1..22: mol_type = other RNA
tgagaccaaatgcataaaaata

SEQ ID NO: 151826 - RNA, 22 nt, synthetic construct
  source 1..22: mol_type = other RNA
tgagaccacagacgtgcagcac

SEQ ID NO: 151827 - RNA, 22 nt, synthetic construct
  source 1..22: mol_type = other RNA
tgagaccaccacacttgcttgg

SEQ ID NO: 151828 - RNA, 22 nt, synthetic construct
  source 1..22: mol_type = other RNA
tgagaccagcgtgggcaacaca

SEQ ID NO: 151829 - RNA, 22 nt, synthetic construct
  source 1..22: mol_type = other RNA
tgagaccccatctctaccaaaa

SEQ ID NO: 151830 - RNA, 22 nt, synthetic construct
  source 1..22: mol_type = other RNA
tgagaccggatgaggtggctca

SEQ ID NO: 151831 - RNA, 22 nt, synthetic construct
  source 1..22: mol_type = other RNA
tgagacctcaggcagtctagtc

SEQ ID NO: 151832 - RNA, 22 nt, synthetic construct
  source 1..22: mol_type = other RNA
tgagacctcatcttagccggga

SEQ ID NO: 151833 - RNA, 22 nt, synthetic construct
  source 1..22: mol_type = other RNA
tgagacggaagactcatacttc

SEQ ID NO: 151834 - RNA, 22 nt, synthetic construct
  source 1..22: mol_type = other RNA
tgagacggaatcttaccctgtt

SEQ ID NO: 151835 - RNA, 22 nt, synthetic construct
  source 1..22: mol_type = other RNA
tgagactattatgagcagttgt

SEQ ID NO: 151836 - RNA, 22 nt, synthetic construct
  source 1..22: mol_type = other RNA
tgagactccaactcaaaaaaga

SEQ ID NO: 151837 - RNA, 22 nt, synthetic construct
  source 1..22: mol_type = other RNA
tgagactcttaatattgaaacg

SEQ ID NO: 151838 - RNA, 22 nt, synthetic construct
  source 1..22: mol_type = other RNA
tgagactgcagtgacctatcat

SEQ ID NO: 151839 - RNA, 22 nt, synthetic construct
  source 1..22: mol_type = other RNA
tgagacttaggcaaaggaaaaa

SEQ ID NO: 151840 - RNA, 22 nt, synthetic construct
  source 1..22: mol_type = other RNA
tgagagaaaattgttcatgaaa

SEQ ID NO: 151841 - RNA, 22 nt, synthetic construct
  source 1..22: mol_type = other RNA
tgagagaagtcagactaagaca

SEQ ID NO: 151842 - RNA, 22 nt, synthetic construct
  source 1..22: mol_type = other RNA
tgagagagaattctaaattgcc

SEQ ID NO: 151843 - RNA, 22 nt, synthetic construct
  source 1..22: mol_type = other RNA
tgagagagataaaacctggaat

SEQ ID NO: 151844 - RNA, 22 nt, synthetic construct
  source 1..22: mol_type = other RNA
tgagagatagaaagcaccaggg

SEQ ID NO: 151845 - RNA, 22 nt, synthetic construct
  source 1..22: mol_type = other RNA
tgagagcagagacacacatcag

SEQ ID NO: 151846 - RNA, 22 nt, synthetic construct
  source 1..22: mol_type = other RNA
tgagagctaagggaagtttttt

SEQ ID NO: 151847 - RNA, 22 nt, synthetic construct
  source 1..22: mol_type = other RNA
tgagagctcaggccagtgagtg

SEQ ID NO: 151848 - RNA, 22 nt, synthetic construct
  source 1..22: mol_type = other RNA
tgagagctgtgccgaggcagag

SEQ ID NO: 151849 - RNA, 22 nt, synthetic construct
  source 1..22: mol_type = other RNA
tgagagctttcttttaaagacc

SEQ ID NO: 151850 - RNA, 22 nt, synthetic construct
  source 1..22: mol_type = other RNA
tgagaggactgcctggtcctga

SEQ ID NO: 151851 - RNA, 22 nt, synthetic construct
  source 1..22: mol_type = other RNA
tgagaggctttaagcagaaagt

SEQ ID NO: 151852 - RNA, 22 nt, synthetic construct
  source 1..22: mol_type = other RNA
tgagagggaagtttatagcagt

SEQ ID NO: 151853 - RNA, 22 nt, synthetic construct
  source 1..22: mol_type = other RNA
tgagagggagaccgtgggggga

SEQ ID NO: 151854 - RNA, 22 nt, synthetic construct
  source 1..22: mol_type = other RNA
tgagagtaagttgcatacgtcg

SEQ ID NO: 151855 - RNA, 22 nt, synthetic construct
  source 1..22: mol_type = other RNA
tgagagtattgccaggtttgtg

SEQ ID NO: 151856 - RNA, 22 nt, synthetic construct
  source 1..22: mol_type = other RNA
tgagagtctcttaagaccacaa

SEQ ID NO: 151857 - RNA, 22 nt, synthetic construct
  source 1..22: mol_type = other RNA
tgagagtgaaaacacaaactgc

SEQ ID NO: 151858 - RNA, 22 nt, synthetic construct
  source 1..22: mol_type = other RNA
tgagagtgcagtatgtaggaaa

SEQ ID NO: 151859 - RNA, 22 nt, synthetic construct
  source 1..22: mol_type = other RNA
tgagagtggcctaaatcaggat

SEQ ID NO: 151860 - RNA, 22 nt, synthetic construct
  source 1..22: mol_type = other RNA
tgagataaactagattaccttg

SEQ ID NO: 151861 - RNA, 22 nt, synthetic construct
  source 1..22: mol_type = other RNA
tgagatactacgcctagctgac

SEQ ID NO: 151862 - RNA, 22 nt, synthetic construct
  source 1..22: mol_type = other RNA
tgagatagaccagatgcgtggt

SEQ ID NO: 151863 - RNA, 22 nt, synthetic construct
  source 1..22: mol_type = other RNA
tgagatctaaattttaagtgca

SEQ ID NO: 151864 - RNA, 22 nt, synthetic construct
  source 1..22: mol_type = other RNA
tgagatgggaagaaaaaataaa

SEQ ID NO: 151865 - RNA, 22 nt, synthetic construct
  source 1..22: mol_type = other RNA
tgagatggtcagtactatcttc

SEQ ID NO: 151866 - RNA, 22 nt, synthetic construct
  source 1..22: mol_type = other RNA
tgagatgtactggaagtgtaac

SEQ ID NO: 151867 - RNA, 22 nt, synthetic construct
  source 1..22: mol_type = other RNA
tgagattaatgtaggtgtctga

SEQ ID NO: 151868 - RNA, 22 nt, synthetic construct
  source 1..22: mol_type = other RNA
tgagattacagatgtgagcccc

SEQ ID NO: 151869 - RNA, 22 nt, synthetic construct
  source 1..22: mol_type = other RNA
tgagattacatagcaaggaagc

SEQ ID NO: 151870 - RNA, 22 nt, synthetic construct
  source 1..22: mol_type = other RNA
tgagattagcgaaagggattct

SEQ ID NO: 151871 - RNA, 22 nt, synthetic construct
  source 1..22: mol_type = other RNA
tgagattgatagatcatatgat

SEQ ID NO: 151872 - RNA, 22 nt, synthetic construct
  source 1..22: mol_type = other RNA
tgagattgccccattgcactcc

SEQ ID NO: 151873 - RNA, 22 nt, synthetic construct
  source 1..22: mol_type = other RNA
tgagattgtgccagtgaactcc

SEQ ID NO: 151874 - RNA, 22 nt, synthetic construct
  source 1..22: mol_type = other RNA
tgagatttgagtcttgctctct

SEQ ID NO: 151875 - RNA, 22 nt, synthetic construct
  source 1..22: mol_type = other RNA
tgagcaaaaatacagctccaaa

SEQ ID NO: 151876 - RNA, 22 nt, synthetic construct
  source 1..22: mol_type = other RNA
tgagcaactactatttcgcaaa

SEQ ID NO: 151877 - RNA, 22 nt, synthetic construct
  source 1..22: mol_type = other RNA
tgagcaaggaaggaaaggagat

SEQ ID NO: 151878 - RNA, 22 nt, synthetic construct
  source 1..22: mol_type = other RNA
tgagcaaggtcgtttcagattg

SEQ ID NO: 151879 - RNA, 22 nt, synthetic construct
  source 1..22: mol_type = other RNA
tgagcacaatgcctgccgcaga

SEQ ID NO: 151880 - RNA, 22 nt, synthetic construct
  source 1..22: mol_type = other RNA
tgagcagaaggaggaaaataat

SEQ ID NO: 151881 - RNA, 22 nt, synthetic construct
  source 1..22: mol_type = other RNA
tgagcagagtcctgagggtgag

SEQ ID NO: 151882 - RNA, 22 nt, synthetic construct
  source 1..22: mol_type = other RNA
tgagcagatcagtaacaaataa

SEQ ID NO: 151883 - RNA, 22 nt, synthetic construct
  source 1..22: mol_type = other RNA
tgagcagtgaaagtctccctaa

SEQ ID NO: 151884 - RNA, 22 nt, synthetic construct
  source 1..22: mol_type = other RNA
tgagcagtgtttcctagattcc

SEQ ID NO: 151885 - RNA, 22 nt, synthetic construct
  source 1..22: mol_type = other RNA
tgagcagttgtatgccaaaaaa

SEQ ID NO: 151886 - RNA, 22 nt, synthetic construct
  source 1..22: mol_type = other RNA
tgagcatcccagaggtactcaa

SEQ ID NO: 151887 - RNA, 22 nt, synthetic construct
  source 1..22: mol_type = other RNA
tgagcatccccgctgcgagaaa

SEQ ID NO: 151888 - RNA, 22 nt, synthetic construct
  source 1..22: mol_type = other RNA
tgagcatgctgcaactgagaag

SEQ ID NO: 151889 - RNA, 22 nt, synthetic construct
  source 1..22: mol_type = other RNA
tgagcattccccacataggata

SEQ ID NO: 151890 - RNA, 22 nt, synthetic construct
  source 1..22: mol_type = other RNA
tgagcatttagccccctgaata

SEQ ID NO: 151891 - RNA, 22 nt, synthetic construct
  source 1..22: mol_type = other RNA
tgagccaaagaagaaatcaaat

SEQ ID NO: 151892 - RNA, 22 nt, synthetic construct
  source 1..22: mol_type = other RNA
tgagccacagcgcccggcccgt

SEQ ID NO: 151893 - RNA, 22 nt, synthetic construct
  source 1..22: mol_type = other RNA
tgagccacagctacactcaata

SEQ ID NO: 151894 - RNA, 22 nt, synthetic construct
  source 1..22: mol_type = other RNA
tgagccacagggcccagcctca

SEQ ID NO: 151895 - RNA, 22 nt, synthetic construct
  source 1..22: mol_type = other RNA
tgagccacatacatagtattaa

SEQ ID NO: 151896 - RNA, 22 nt, synthetic construct
  source 1..22: mol_type = other RNA
tgagccaccacgtccggtcgtt

SEQ ID NO: 151897 - RNA, 22 nt, synthetic construct
  source 1..22: mol_type = other RNA
tgagccaccactcccggccgta

SEQ ID NO: 151898 - RNA, 22 nt, synthetic construct
  source 1..22: mol_type = other RNA
tgagccaccgcacctggccggg

SEQ ID NO: 151899 - RNA, 22 nt, synthetic construct
  source 1..22: mol_type = other RNA
tgagccaccgcgcccggccaaa

SEQ ID NO: 151900 - RNA, 22 nt, synthetic construct
  source 1..22: mol_type = other RNA
tgagccaccgcgcctggtgatt

SEQ ID NO: 151901 - RNA, 22 nt, synthetic construct
  source 1..22: mol_type = other RNA
tgagccaccgtgccgggcttgg

SEQ ID NO: 151902 - RNA, 22 nt, synthetic construct
  source 1..22: mol_type = other RNA
tgagccacctcatccggtctca

SEQ ID NO: 151903 - RNA, 22 nt, synthetic construct
  source 1..22: mol_type = other RNA
tgagccactaaaacaggaagtt

SEQ ID NO: 151904 - RNA, 22 nt, synthetic construct
  source 1..22: mol_type = other RNA
tgagccactacgcccggcccat

SEQ ID NO: 151905 - RNA, 22 nt, synthetic construct
  source 1..22: mol_type = other RNA
tgagccactagtcagtatattt

SEQ ID NO: 151906 - RNA, 22 nt, synthetic construct
  source 1..22: mol_type = other RNA
tgagccactgcgggcccagctc

SEQ ID NO: 151907 - RNA, 22 nt, synthetic construct
  source 1..22: mol_type = other RNA
tgagccagagtttcactctgtc

SEQ ID NO: 151908 - RNA, 22 nt, synthetic construct
  source 1..22: mol_type = other RNA
tgagccagcaaatcagaaaagg

SEQ ID NO: 151909 - RNA, 22 nt, synthetic construct
  source 1..22: mol_type = other RNA
tgagccaggcatggtggtgggc

SEQ ID NO: 151910 - RNA, 22 nt, synthetic construct
  source 1..22: mol_type = other RNA
tgagccatcatgcctgggtaat

SEQ ID NO: 151911 - RNA, 22 nt, synthetic construct
  source 1..22: mol_type = other RNA
tgagccatcgcgcccagcccgt

SEQ ID NO: 151912 - RNA, 22 nt, synthetic construct
  source 1..22: mol_type = other RNA
tgagcccagagatcccaccatt

SEQ ID NO: 151913 - RNA, 22 nt, synthetic construct
  source 1..22: mol_type = other RNA
tgagcccaggaggttgaagctc

SEQ ID NO: 151914 - RNA, 22 nt, synthetic construct
  source 1..22: mol_type = other RNA
tgagcccaggagttgcatcact

SEQ ID NO: 151915 - RNA, 22 nt, synthetic construct
  source 1..22: mol_type = other RNA
tgagcccagggggtcgagactg

SEQ ID NO: 151916 - RNA, 22 nt, synthetic construct
  source 1..22: mol_type = other RNA
tgagccccagaataggcaaatt

SEQ ID NO: 151917 - RNA, 22 nt, synthetic construct
  source 1..22: mol_type = other RNA
tgagcccccacgcccggccgat

SEQ ID NO: 151918 - RNA, 22 nt, synthetic construct
  source 1..22: mol_type = other RNA
tgagccgtcggtatgttaataa

SEQ ID NO: 151919 - RNA, 22 nt, synthetic construct
  source 1..22: mol_type = other RNA
tgagcctccacacctggcccct

SEQ ID NO: 151920 - RNA, 22 nt, synthetic construct
  source 1..22: mol_type = other RNA
tgagcctggaagttcaaggtta

SEQ ID NO: 151921 - RNA, 22 nt, synthetic construct
  source 1..22: mol_type = other RNA
tgagcctgttccgattttactt

SEQ ID NO: 151922 - RNA, 22 nt, synthetic construct
  source 1..22: mol_type = other RNA
tgagccttcagaactcttctcc

SEQ ID NO: 151923 - RNA, 22 nt, synthetic construct
  source 1..22: mol_type = other RNA
tgagctacaaactccaaacctt

SEQ ID NO: 151924 - RNA, 22 nt, synthetic construct
  source 1..22: mol_type = other RNA
tgagctactgcatgctaggggc

SEQ ID NO: 151925 - RNA, 22 nt, synthetic construct
  source 1..22: mol_type = other RNA
tgagctccagcctgggcgacag

SEQ ID NO: 151926 - RNA, 22 nt, synthetic construct
  source 1..22: mol_type = other RNA
tgagctctagccttgtactgtg

SEQ ID NO: 151927 - RNA, 22 nt, synthetic construct
  source 1..22: mol_type = other RNA
tgagctctcagtggccctgttg

SEQ ID NO: 151928 - RNA, 22 nt, synthetic construct
  source 1..22: mol_type = other RNA
tgagctgaaagtaaagatagcc

SEQ ID NO: 151929 - RNA, 22 nt, synthetic construct
  source 1..22: mol_type = other RNA
tgagctggaagtaaggattttc

SEQ ID NO: 151930 - RNA, 22 nt, synthetic construct
  source 1..22: mol_type = other RNA
tgagctgtccccaccgccttcc

SEQ ID NO: 151931 - RNA, 22 nt, synthetic construct
  source 1..22: mol_type = other RNA
tgagctgttaatggttagactg

SEQ ID NO: 151932 - RNA, 22 nt, synthetic construct
  source 1..22: mol_type = other RNA
tgagctttccttagttcgaagt

SEQ ID NO: 151933 - RNA, 22 nt, synthetic construct
  source 1..22: mol_type = other RNA
tgagctttttctttttaaacag

SEQ ID NO: 151934 - RNA, 22 nt, synthetic construct
  source 1..22: mol_type = other RNA
tgaggaaagcaggttgcattaa

SEQ ID NO: 151935 - RNA, 22 nt, synthetic construct
  source 1..22: mol_type = other RNA
tgaggaagaggaaggttcaagt

SEQ ID NO: 151936 - RNA, 22 nt, synthetic construct
  source 1..22: mol_type = other RNA
tgaggaagctaatcaagccgca

SEQ ID NO: 151937 - RNA, 22 nt, synthetic construct
  source 1..22: mol_type = other RNA
tgaggaaggagaatcgcttaaa

SEQ ID NO: 151938 - RNA, 22 nt, synthetic construct
  source 1..22: mol_type = other RNA
tgaggacactagcaatccagga

SEQ ID NO: 151939 - RNA, 22 nt, synthetic construct
  source 1..22: mol_type = other RNA
tgaggacatggagacagtgagc

SEQ ID NO: 151940 - RNA, 22 nt, synthetic construct
  source 1..22: mol_type = other RNA
tgaggacgctgatgacagttac

SEQ ID NO: 151941 - RNA, 22 nt, synthetic construct
  source 1..22: mol_type = other RNA
tgaggacttcatgtacaatgaa

SEQ ID NO: 151942 - RNA, 22 nt, synthetic construct
  source 1..22: mol_type = other RNA
tgaggagctgagaccacagacg

SEQ ID NO: 151943 - RNA, 22 nt, synthetic construct
  source 1..22: mol_type = other RNA
tgaggagtgaatttttcatttt

SEQ ID NO: 151944 - RNA, 22 nt, synthetic construct
  source 1..22: mol_type = other RNA
tgaggatataacgatagtctcc

SEQ ID NO: 151945 - RNA, 22 nt, synthetic construct
  source 1..22: mol_type = other RNA
tgaggatctgttggtgcttagc

SEQ ID NO: 151946 - RNA, 22 nt, synthetic construct
  source 1..22: mol_type = other RNA
tgaggatgactgtcctgaattc

SEQ ID NO: 151947 - RNA, 22 nt, synthetic construct
  source 1..22: mol_type = other RNA
tgaggattcgattaaaataaca

SEQ ID NO: 151948 - RNA, 22 nt, synthetic construct
  source 1..22: mol_type = other RNA
tgaggattggagactgataaac

SEQ ID NO: 151949 - RNA, 22 nt, synthetic construct
  source 1..22: mol_type = other RNA
tgaggcagagagatggtgggag

SEQ ID NO: 151950 - RNA, 22 nt, synthetic construct
  source 1..22: mol_type = other RNA
tgaggcagagtagagaaggctt

SEQ ID NO: 151951 - RNA, 22 nt, synthetic construct
  source 1..22: mol_type = other RNA
tgaggcagcccgacctccagcg

SEQ ID NO: 151952 - RNA, 22 nt, synthetic construct
  source 1..22: mol_type = other RNA
tgaggcaggagaactgcctgga

SEQ ID NO: 151953 - RNA, 22 nt, synthetic construct
  source 1..22: mol_type = other RNA
tgaggcaggagagtcgcttgaa

SEQ ID NO: 151954 - RNA, 22 nt, synthetic construct
  source 1..22: mol_type = other RNA
tgaggcaggagcatagcttgaa

SEQ ID NO: 151955 - RNA, 22 nt, synthetic construct
  source 1..22: mol_type = other RNA
tgaggcaggaggcacctgaacc

SEQ ID NO: 151956 - RNA, 22 nt, synthetic construct
  source 1..22: mol_type = other RNA
tgaggcaggtggatatctgagg

SEQ ID NO: 151957 - RNA, 22 nt, synthetic construct
  source 1..22: mol_type = other RNA
tgaggcatattattgtaacttg

SEQ ID NO: 151958 - RNA, 22 nt, synthetic construct
  source 1..22: mol_type = other RNA
tgaggcattagtgaattcacag

SEQ ID NO: 151959 - RNA, 22 nt, synthetic construct
  source 1..22: mol_type = other RNA
tgaggccccaggggacatagat

SEQ ID NO: 151960 - RNA, 22 nt, synthetic construct
  source 1..22: mol_type = other RNA
tgaggccctattcaacctataa

SEQ ID NO: 151961 - RNA, 22 nt, synthetic construct
  source 1..22: mol_type = other RNA
tgaggccgcagtgagccatggc

SEQ ID NO: 151962 - RNA, 22 nt, synthetic construct
  source 1..22: mol_type = other RNA
tgaggccggaggattgcttgag

SEQ ID NO: 151963 - RNA, 22 nt, synthetic construct
  source 1..22: mol_type = other RNA
tgaggcctcctgccttcctgac

SEQ ID NO: 151964 - RNA, 22 nt, synthetic construct
  source 1..22: mol_type = other RNA
tgaggcctctccccttgacgaa

SEQ ID NO: 151965 - RNA, 22 nt, synthetic construct
  source 1..22: mol_type = other RNA
tgaggcggaaggattgcctaac

SEQ ID NO: 151966 - RNA, 22 nt, synthetic construct
  source 1..22: mol_type = other RNA
tgaggcggctggatcgcttgag

SEQ ID NO: 151967 - RNA, 22 nt, synthetic construct
  source 1..22: mol_type = other RNA
tgaggctgcagtgagctccagc

SEQ ID NO: 151968 - RNA, 22 nt, synthetic construct
  source 1..22: mol_type = other RNA
tgaggctgggagtacaagacca

SEQ ID NO: 151969 - RNA, 22 nt, synthetic construct
  source 1..22: mol_type = other RNA
tgaggctgggccctgtggctca

SEQ ID NO: 151970 - RNA, 22 nt, synthetic construct
  source 1..22: mol_type = other RNA
tgaggctggggaattgcatgag

SEQ ID NO: 151971 - RNA, 22 nt, synthetic construct
  source 1..22: mol_type = other RNA
tgaggcttttattggtaatgtt

SEQ ID NO: 151972 - RNA, 22 nt, synthetic construct
  source 1..22: mol_type = other RNA
tgaggcttttcatagtcatcat

SEQ ID NO: 151973 - RNA, 22 nt, synthetic construct
  source 1..22: mol_type = other RNA
tgaggcttttggattttctttc

SEQ ID NO: 151974 - RNA, 22 nt, synthetic construct
  source 1..22: mol_type = other RNA
tgagggaaattatttccagcct

SEQ ID NO: 151975 - RNA, 22 nt, synthetic construct
  source 1..22: mol_type = other RNA
tgagggaatttttcttacctaa

SEQ ID NO: 151976 - RNA, 22 nt, synthetic construct
  source 1..22: mol_type = other RNA
tgagggactgagcagtgaaagt

SEQ ID NO: 151977 - RNA, 22 nt, synthetic construct
  source 1..22: mol_type = other RNA
tgagggagatatttcgcctaga

SEQ ID NO: 151978 - RNA, 22 nt, synthetic construct
  source 1..22: mol_type = other RNA
tgagggaggccatcttcatttc

SEQ ID NO: 151979 - RNA, 22 nt, synthetic construct
  source 1..22: mol_type = other RNA
tgagggatgaggaagaggaagg

SEQ ID NO: 151980 - RNA, 22 nt, synthetic construct
  source 1..22: mol_type = other RNA
tgagggcagagataactgggtg

SEQ ID NO: 151981 - RNA, 22 nt, synthetic construct
  source 1..22: mol_type = other RNA
tgagggctttgtgaagggaggt

SEQ ID NO: 151982 - RNA, 22 nt, synthetic construct
  source 1..22: mol_type = other RNA
tgaggggctgagccttcagaac

SEQ ID NO: 151983 - RNA, 22 nt, synthetic construct
  source 1..22: mol_type = other RNA
tgaggggtcttatgctggtggg

SEQ ID NO: 151984 - RNA, 22 nt, synthetic construct
  source 1..22: mol_type = other RNA
tgagggtaaaatagtcaagtaa

SEQ ID NO: 151985 - RNA, 22 nt, synthetic construct
  source 1..22: mol_type = other RNA
tgagggtaagaaaggagttcag

SEQ ID NO: 151986 - RNA, 22 nt, synthetic construct
  source 1..22: mol_type = other RNA
tgagggtatcatattatttttg

SEQ ID NO: 151987 - RNA, 22 nt, synthetic construct
  source 1..22: mol_type = other RNA
tgagggtgagaccaccacactt

SEQ ID NO: 151988 - RNA, 22 nt, synthetic construct
  source 1..22: mol_type = other RNA
tgagggtgctgatcaggaaaga

SEQ ID NO: 151989 - RNA, 22 nt, synthetic construct
  source 1..22: mol_type = other RNA
tgagggttagaagacaatactg

SEQ ID NO: 151990 - RNA, 22 nt, synthetic construct
  source 1..22: mol_type = other RNA
tgagggttagatttttcctttg

SEQ ID NO: 151991 - RNA, 22 nt, synthetic construct
  source 1..22: mol_type = other RNA
tgagggtttcagtgagtaggga

SEQ ID NO: 151992 - RNA, 22 nt, synthetic construct
  source 1..22: mol_type = other RNA
tgaggtaagaacttgtctttgt

SEQ ID NO: 151993 - RNA, 22 nt, synthetic construct
  source 1..22: mol_type = other RNA
tgaggtagcacaactagtaagt

SEQ ID NO: 151994 - RNA, 22 nt, synthetic construct
  source 1..22: mol_type = other RNA
tgaggtatcatttccaagattg

SEQ ID NO: 151995 - RNA, 22 nt, synthetic construct
  source 1..22: mol_type = other RNA
tgaggtcaagaaataaaacatg

SEQ ID NO: 151996 - RNA, 22 nt, synthetic construct
  source 1..22: mol_type = other RNA
tgaggtcacccaagccacagcg

SEQ ID NO: 151997 - RNA, 22 nt, synthetic construct
  source 1..22: mol_type = other RNA
tgaggtctaggctaatgtgtgt

SEQ ID NO: 151998 - RNA, 22 nt, synthetic construct
  source 1..22: mol_type = other RNA
tgaggtctcaaaatttaaagtt

SEQ ID NO: 151999 - RNA, 22 nt, synthetic construct
  source 1..22: mol_type = other RNA
tgaggtctcagccttttctgat

SEQ ID NO: 152000 - RNA, 22 nt, synthetic construct
  source 1..22: mol_type = other RNA
tgaggtcttctagctttcagca

SEQ ID NO: 152001 - RNA, 22 nt, synthetic construct
  source 1..22: mol_type = other RNA
tgaggtctttaaaagaaagctc

SEQ ID NO: 152002 - RNA, 22 nt, synthetic construct
  source 1..22: mol_type = other RNA
tgaggtgagacagaccctggct

SEQ ID NO: 152003 - RNA, 22 nt, synthetic construct
  source 1..22: mol_type = other RNA
tgaggtgaggacatggagacag

SEQ ID NO: 152004 - RNA, 22 nt, synthetic construct
  source 1..22: mol_type = other RNA
tgaggtgattaaaggccctgat

SEQ ID NO: 152005 - RNA, 22 nt, synthetic construct
  source 1..22: mol_type = other RNA
tgaggtgattcagagtgctggg

SEQ ID NO: 152006 - RNA, 22 nt, synthetic construct
  source 1..22: mol_type = other RNA
tgaggtggagttctgctcttgt

SEQ ID NO: 152007 - RNA, 22 nt, synthetic construct
  source 1..22: mol_type = other RNA
tgaggtgtacaattaggctgtt

SEQ ID NO: 152008 - RNA, 22 nt, synthetic construct
  source 1..22: mol_type = other RNA
tgaggtgtttttcagccctgat

SEQ ID NO: 152009 - RNA, 22 nt, synthetic construct
  source 1..22: mol_type = other RNA
tgaggttattaagataatgctg

SEQ ID NO: 152010 - RNA, 22 nt, synthetic construct
  source 1..22: mol_type = other RNA
tgaggttattcaaaacaaaaca

SEQ ID NO: 152011 - RNA, 22 nt, synthetic construct
  source 1..22: mol_type = other RNA
tgaggttgaagacctgcagtct

SEQ ID NO: 152012 - RNA, 22 nt, synthetic construct
  source 1..22: mol_type = other RNA
tgaggttgcttttacttggctc

SEQ ID NO: 152013 - RNA, 22 nt, synthetic construct
  source 1..22: mol_type = other RNA
tgaggtttacttggggagagtg

SEQ ID NO: 152014 - RNA, 22 nt, synthetic construct
  source 1..22: mol_type = other RNA
tgaggttttacgatgttggcca

SEQ ID NO: 152015 - RNA, 22 nt, synthetic construct
  source 1..22: mol_type = other RNA
tgagtaaaaagaaatctgcatc

SEQ ID NO: 152016 - RNA, 22 nt, synthetic construct
  source 1..22: mol_type = other RNA
tgagtaaagggtaagaaaattg

SEQ ID NO: 152017 - RNA, 22 nt, synthetic construct
  source 1..22: mol_type = other RNA
tgagtaacatgtggaacataat

SEQ ID NO: 152018 - RNA, 22 nt, synthetic construct
  source 1..22: mol_type = other RNA
tgagtaactaaactattgtatg

SEQ ID NO: 152019 - RNA, 22 nt, synthetic construct
  source 1..22: mol_type = other RNA
tgagtacctctgggatgctcag

SEQ ID NO: 152020 - RNA, 22 nt, synthetic construct
  source 1..22: mol_type = other RNA
tgagtagaagagtaatggttgg

SEQ ID NO: 152021 - RNA, 22 nt, synthetic construct
  source 1..22: mol_type = other RNA
tgagtagcaccctatttatgtt

SEQ ID NO: 152022 - RNA, 22 nt, synthetic construct
  source 1..22: mol_type = other RNA
tgagtagcgctttaagcatccc

SEQ ID NO: 152023 - RNA, 22 nt, synthetic construct
  source 1..22: mol_type = other RNA
tgagtagctgtgattaccggca

SEQ ID NO: 152024 - RNA, 22 nt, synthetic construct
  source 1..22: mol_type = other RNA
tgagtagggaaggtgcccgcga

SEQ ID NO: 152025 - RNA, 22 nt, synthetic construct
  source 1..22: mol_type = other RNA
tgagtagtacttctgagtgtta

SEQ ID NO: 152026 - RNA, 22 nt, synthetic construct
  source 1..22: mol_type = other RNA
tgagtagttcatgttagcataa

SEQ ID NO: 152027 - RNA, 22 nt, synthetic construct
  source 1..22: mol_type = other RNA
tgagtatattctgtgaattgtg

SEQ ID NO: 152028 - RNA, 22 nt, synthetic construct
  source 1..22: mol_type = other RNA
tgagtatctggtgctggcagcc

SEQ ID NO: 152029 - RNA, 22 nt, synthetic construct
  source 1..22: mol_type = other RNA
tgagtatctggtgttgcttgct

SEQ ID NO: 152030 - RNA, 22 nt, synthetic construct
  source 1..22: mol_type = other RNA
tgagtatcttttcatgttgacc

SEQ ID NO: 152031 - RNA, 22 nt, synthetic construct
  source 1..22: mol_type = other RNA
tgagtatgggtctccattttgg

SEQ ID NO: 152032 - RNA, 22 nt, synthetic construct
  source 1..22: mol_type = other RNA
tgagtatttcatgtacttgtaa

SEQ ID NO: 152033 - RNA, 22 nt, synthetic construct
  source 1..22: mol_type = other RNA
tgagtatttttgagcttttcaa

SEQ ID NO: 152034 - RNA, 22 nt, synthetic construct
  source 1..22: mol_type = other RNA
tgagtcaaaaccaaagaaaggg

SEQ ID NO: 152035 - RNA, 22 nt, synthetic construct
  source 1..22: mol_type = other RNA
tgagtcagtaatcaaaaacctc

SEQ ID NO: 152036 - RNA, 22 nt, synthetic construct
  source 1..22: mol_type = other RNA
tgagtccagaggtgagcttttt

SEQ ID NO: 152037 - RNA, 22 nt, synthetic construct
  source 1..22: mol_type = other RNA
tgagtccagctttctaattctg

SEQ ID NO: 152038 - RNA, 22 nt, synthetic construct
  source 1..22: mol_type = other RNA
tgagtcctgaaaattccttccc

SEQ ID NO: 152039 - RNA, 22 nt, synthetic construct
  source 1..22: mol_type = other RNA
tgagtccttccagtatgatgcc

SEQ ID NO: 152040 - RNA, 22 nt, synthetic construct
  source 1..22: mol_type = other RNA
tgagtcgccatacctggtcctt

SEQ ID NO: 152041 - RNA, 22 nt, synthetic construct
  source 1..22: mol_type = other RNA
tgagtctgacatactgtcacag

SEQ ID NO: 152042 - RNA, 22 nt, synthetic construct
  source 1..22: mol_type = other RNA
tgagtctgtagggtgactagtg

SEQ ID NO: 152043 - RNA, 22 nt, synthetic construct
  source 1..22: mol_type = other RNA
tgagtctgtgctctgtatttaa

SEQ ID NO: 152044 - RNA, 22 nt, synthetic construct
  source 1..22: mol_type = other RNA
tgagtcttccgtctcaagattg

SEQ ID NO: 152045 - RNA, 22 nt, synthetic construct
  source 1..22: mol_type = other RNA
tgagtcttctactgtgaattca

SEQ ID NO: 152046 - RNA, 22 nt, synthetic construct
  source 1..22: mol_type = other RNA
tgagtcttgctctcttgcctag

SEQ ID NO: 152047 - RNA, 22 nt, synthetic construct
  source 1..22: mol_type = other RNA
tgagtcttgtttacccagtgtg

SEQ ID NO: 152048 - RNA, 22 nt, synthetic construct
  source 1..22: mol_type = other RNA
tgagtgaatggggtaattttgg

SEQ ID NO: 152049 - RNA, 22 nt, synthetic construct
  source 1..22: mol_type = other RNA
tgagtgagatgggaagaaaaaa

SEQ ID NO: 152050 - RNA, 22 nt, synthetic construct
  source 1..22: mol_type = other RNA
tgagtgagccacagctacactc

SEQ ID NO: 152051 - RNA, 22 nt, synthetic construct
  source 1..22: mol_type = other RNA
tgagtgatgaaaagagcacacc

SEQ ID NO: 152052 - RNA, 22 nt, synthetic construct
  source 1..22: mol_type = other RNA
tgagtggactgtgagggagata

SEQ ID NO: 152053 - RNA, 22 nt, synthetic construct
  source 1..22: mol_type = other RNA
tgagtggatcatttgaggtcaa

SEQ ID NO: 152054 - RNA, 22 nt, synthetic construct
  source 1..22: mol_type = other RNA
tgagtggcatcatactggaagg

SEQ ID NO: 152055 - RNA, 22 nt, synthetic construct
  source 1..22: mol_type = other RNA
tgagtgtaaggtgtttggtgaa

SEQ ID NO: 152056 - RNA, 22 nt, synthetic construct
  source 1..22: mol_type = other RNA
tgagtgtagctgtggctcactc

SEQ ID NO: 152057 - RNA, 22 nt, synthetic construct
  source 1..22: mol_type = other RNA
tgagtgtatgcagggaaatcat

SEQ ID NO: 152058 - RNA, 22 nt, synthetic construct
  source 1..22: mol_type = other RNA
tgagtgttacttgaaatcattt

SEQ ID NO: 152059 - RNA, 22 nt, synthetic construct
  source 1..22: mol_type = other RNA
tgagtgttgtgtgcacctaata

SEQ ID NO: 152060 - RNA, 22 nt, synthetic construct
  source 1..22: mol_type = other RNA
tgagtgtttcccttaaaaggaa

SEQ ID NO: 152061 - RNA, 22 nt, synthetic construct
  source 1..22: mol_type = other RNA
tgagttaggaatttacatttcc

SEQ ID NO: 152062 - RNA, 22 nt, synthetic construct
  source 1..22: mol_type = other RNA
tgagttattgcatagggatgtt

SEQ ID NO: 152063 - RNA, 22 nt, synthetic construct
  source 1..22: mol_type = other RNA
tgagttcaaatgttaagcccaa

SEQ ID NO: 152064 - RNA, 22 nt, synthetic construct
  source 1..22: mol_type = other RNA
tgagttcagaaagattaatcct

SEQ ID NO: 152065 - RNA, 22 nt, synthetic construct
  source 1..22: mol_type = other RNA
tgagttcagttttgtatatggt

SEQ ID NO: 152066 - RNA, 22 nt, synthetic construct
  source 1..22: mol_type = other RNA
tgagttccagtcctttgtgtca

SEQ ID NO: 152067 - RNA, 22 nt, synthetic construct
  source 1..22: mol_type = other RNA
tgagttcctgcttcccccaaag

SEQ ID NO: 152068 - RNA, 22 nt, synthetic construct
  source 1..22: mol_type = other RNA
tgagttgtttccactttgaggt

SEQ ID NO: 152069 - RNA, 22 nt, synthetic construct
  source 1..22: mol_type = other RNA
tgagtttaattcttttgctgta

SEQ ID NO: 152070 - RNA, 22 nt, synthetic construct
  source 1..22: mol_type = other RNA
tgagtttcaatgacttttatca

SEQ ID NO: 152071 - RNA, 22 nt, synthetic construct
  source 1..22: mol_type = other RNA
tgagtttccagaaaactggcaa

SEQ ID NO: 152072 - RNA, 22 nt, synthetic construct
  source 1..22: mol_type = other RNA
tgagtttgacctgtaatttttc

SEQ ID NO: 152073 - RNA, 22 nt, synthetic construct
  source 1..22: mol_type = other RNA
tgagtttgctctgcaaatgagg

SEQ ID NO: 152074 - RNA, 22 nt, synthetic construct
  source 1..22: mol_type = other RNA
tgagtttggtgtatttagtata

SEQ ID NO: 152075 - RNA, 22 nt, synthetic construct
  source 1..22: mol_type = other RNA
tgagtttgttctgtcacatttg

SEQ ID NO: 152076 - RNA, 22 nt, synthetic construct
  source 1..22: mol_type = other RNA
tgagttttaactcttgcattag

SEQ ID NO: 152077 - RNA, 22 nt, synthetic construct
  source 1..22: mol_type = other RNA
tgagttttcaacctttgttgaa

SEQ ID NO: 152078 - RNA, 22 nt, synthetic construct
  source 1..22: mol_type = other RNA
tgataaaaaggagggaaaatgt

SEQ ID NO: 152079 - RNA, 22 nt, synthetic construct
  source 1..22: mol_type = other RNA
tgataaaaataacgggccgggc

SEQ ID NO: 152080 - RNA, 22 nt, synthetic construct
  source 1..22: mol_type = other RNA
tgataaaaatctctacagggaa

SEQ ID NO: 152081 - RNA, 22 nt, synthetic construct
  source 1..22: mol_type = other RNA
tgataaaactgaagtttatcgt

SEQ ID NO: 152082 - RNA, 22 nt, synthetic construct
  source 1..22: mol_type = other RNA
tgataaaagtcattgaaactca

SEQ ID NO: 152083 - RNA, 22 nt, synthetic construct
  source 1..22: mol_type = other RNA
tgataaacttcagttttgagtg

SEQ ID NO: 152084 - RNA, 22 nt, synthetic construct
  source 1..22: mol_type = other RNA
tgataaatacgataaacttcag

SEQ ID NO: 152085 - RNA, 22 nt, synthetic construct
  source 1..22: mol_type = other RNA
tgataaatatgtgttacaactc

SEQ ID NO: 152086 - RNA, 22 nt, synthetic construct
  source 1..22: mol_type = other RNA
tgataaatctaaagccaatctt

SEQ ID NO: 152087 - RNA, 22 nt, synthetic construct
  source 1..22: mol_type = other RNA
tgataaatggctttttacgatg

SEQ ID NO: 152088 - RNA, 22 nt, synthetic construct
  source 1..22: mol_type = other RNA
tgataaattattagcttgctag

SEQ ID NO: 152089 - RNA, 22 nt, synthetic construct
  source 1..22: mol_type = other RNA
tgataactgatatgagggatga

SEQ ID NO: 152090 - RNA, 22 nt, synthetic construct
  source 1..22: mol_type = other RNA
tgataactggtgcttttttggt

SEQ ID NO: 152091 - RNA, 22 nt, synthetic construct
  source 1..22: mol_type = other RNA
tgataagcacatggtgataact

SEQ ID NO: 152092 - RNA, 22 nt, synthetic construct
  source 1..22: mol_type = other RNA
tgataagcccaacctgattaga

SEQ ID NO: 152093 - RNA, 22 nt, synthetic construct
  source 1..22: mol_type = other RNA
tgataagctcccagccaaacag

SEQ ID NO: 152094 - RNA, 22 nt, synthetic construct
  source 1..22: mol_type = other RNA
tgataaggggctatctttactt

SEQ ID NO: 152095 - RNA, 22 nt, synthetic construct
  source 1..22: mol_type = other RNA
tgataatcacagacgcaaagga

SEQ ID NO: 152096 - RNA, 22 nt, synthetic construct
  source 1..22: mol_type = other RNA
tgatacaatacttggatcttat

SEQ ID NO: 152097 - RNA, 22 nt, synthetic construct
  source 1..22: mol_type = other RNA
tgatacacttctatccagtgac

SEQ ID NO: 152098 - RNA, 22 nt, synthetic construct
  source 1..22: mol_type = other RNA
tgataccataaagtcagaggag

SEQ ID NO: 152099 - RNA, 22 nt, synthetic construct
  source 1..22: mol_type = other RNA
tgataccctcaaaagatgcaga

SEQ ID NO: 152100 - RNA, 22 nt, synthetic construct
  source 1..22: mol_type = other RNA
tgatacctagtacgtaacctaa

SEQ ID NO: 152101 - RNA, 22 nt, synthetic construct
  source 1..22: mol_type = other RNA
tgatacctcttactaaaaagaa

SEQ ID NO: 152102 - RNA, 22 nt, synthetic construct
  source 1..22: mol_type = other RNA
tgataccttcttgagagtctct

SEQ ID NO: 152103 - RNA, 22 nt, synthetic construct
  source 1..22: mol_type = other RNA
tgatacggagtctcgctctgtc

SEQ ID NO: 152104 - RNA, 22 nt, synthetic construct
  source 1..22: mol_type = other RNA
tgatactagtttagtgcagtat

SEQ ID NO: 152105 - RNA, 22 nt, synthetic construct
  source 1..22: mol_type = other RNA
tgatactcgtagttttttggta

SEQ ID NO: 152106 - RNA, 22 nt, synthetic construct
  source 1..22: mol_type = other RNA
tgatagaataccacttagtttg

SEQ ID NO: 152107 - RNA, 22 nt, synthetic construct
  source 1..22: mol_type = other RNA
tgatagactggattaaggagat

SEQ ID NO: 152108 - RNA, 22 nt, synthetic construct
  source 1..22: mol_type = other RNA
tgatagatattggcaacatttt

SEQ ID NO: 152109 - RNA, 22 nt, synthetic construct
  source 1..22: mol_type = other RNA
tgatagcattatcccagatcta

SEQ ID NO: 152110 - RNA, 22 nt, synthetic construct
  source 1..22: mol_type = other RNA
tgatagcgaaaggtacgacgct

SEQ ID NO: 152111 - RNA, 22 nt, synthetic construct
  source 1..22: mol_type = other RNA
tgatagctgtggaagcacagtc

SEQ ID NO: 152112 - RNA, 22 nt, synthetic construct
  source 1..22: mol_type = other RNA
tgatagcttgacaaaaggcccc

SEQ ID NO: 152113 - RNA, 22 nt, synthetic construct
  source 1..22: mol_type = other RNA
tgataggaatatcgtctttttt

SEQ ID NO: 152114 - RNA, 22 nt, synthetic construct
  source 1..22: mol_type = other RNA
tgataggataatgtccagagga

SEQ ID NO: 152115 - RNA, 22 nt, synthetic construct
  source 1..22: mol_type = other RNA
tgataggtcactgcagtctcaa

SEQ ID NO: 152116 - RNA, 22 nt, synthetic construct
  source 1..22: mol_type = other RNA
tgatagtcttccaattgcagaa

SEQ ID NO: 152117 - RNA, 22 nt, synthetic construct
  source 1..22: mol_type = other RNA
tgatagttgcagattcatcttg

SEQ ID NO: 152118 - RNA, 22 nt, synthetic construct
  source 1..22: mol_type = other RNA
tgatatcctgtaaacctggaat

SEQ ID NO: 152119 - RNA, 22 nt, synthetic construct
  source 1..22: mol_type = other RNA
tgatatctgagtgttgtgtgca

SEQ ID NO: 152120 - RNA, 22 nt, synthetic construct
  source 1..22: mol_type = other RNA
tgatatctgtaagtcatcaaag

SEQ ID NO: 152121 - RNA, 22 nt, synthetic construct
  source 1..22: mol_type = other RNA
tgatatgagggatgaggaagag

SEQ ID NO: 152122 - RNA, 22 nt, synthetic construct
  source 1..22: mol_type = other RNA
tgatatgccacattttttggtt

SEQ ID NO: 152123 - RNA, 22 nt, synthetic construct
  source 1..22: mol_type = other RNA
tgatatgtcgcatgaaaacagc

SEQ ID NO: 152124 - RNA, 22 nt, synthetic construct
  source 1..22: mol_type = other RNA
tgatattggcataaagacagac

SEQ ID NO: 152125 - RNA, 22 nt, synthetic construct
  source 1..22: mol_type = other RNA
tgatatttgttcagaaatagac

SEQ ID NO: 152126 - RNA, 22 nt, synthetic construct
  source 1..22: mol_type = other RNA
tgatatttttcagattgacctt

SEQ ID NO: 152127 - RNA, 22 nt, synthetic construct
  source 1..22: mol_type = other RNA
tgatcaaaaccaggaggtttgc

SEQ ID NO: 152128 - RNA, 22 nt, synthetic construct
  source 1..22: mol_type = other RNA
tgatcaaagtgaaaggcaaagg

SEQ ID NO: 152129 - RNA, 22 nt, synthetic construct
  source 1..22: mol_type = other RNA
tgatcaaggaagcttcctaaag

SEQ ID NO: 152130 - RNA, 22 nt, synthetic construct
  source 1..22: mol_type = other RNA
tgatcaagttgcttggcacaga

SEQ ID NO: 152131 - RNA, 22 nt, synthetic construct
  source 1..22: mol_type = other RNA
tgatcacaccctcctaccttcc

SEQ ID NO: 152132 - RNA, 22 nt, synthetic construct
  source 1..22: mol_type = other RNA
tgatcacagaagtgttttgata

SEQ ID NO: 152133 - RNA, 22 nt, synthetic construct
  source 1..22: mol_type = other RNA
tgatcagaagagcactatgtaa

SEQ ID NO: 152134 - RNA, 22 nt, synthetic construct
  source 1..22: mol_type = other RNA
tgatcagcaccctcaaatgtct

SEQ ID NO: 152135 - RNA, 22 nt, synthetic construct
  source 1..22: mol_type = other RNA
tgatcagcttcctacccaagct

SEQ ID NO: 152136 - RNA, 22 nt, synthetic construct
  source 1..22: mol_type = other RNA
tgatcaggaaagaccggggact

SEQ ID NO: 152137 - RNA, 22 nt, synthetic construct
  source 1..22: mol_type = other RNA
tgatcaggaaagatgaagtata

SEQ ID NO: 152138 - RNA, 22 nt, synthetic construct
  source 1..22: mol_type = other RNA
tgatcagggatttggccagaat

SEQ ID NO: 152139 - RNA, 22 nt, synthetic construct
  source 1..22: mol_type = other RNA
tgatcatacacatccagaagtc

SEQ ID NO: 152140 - RNA, 22 nt, synthetic construct
  source 1..22: mol_type = other RNA
tgatcatcgcattacgagttat

SEQ ID NO: 152141 - RNA, 22 nt, synthetic construct
  source 1..22: mol_type = other RNA
tgatccagcagtttcacttctt

SEQ ID NO: 152142 - RNA, 22 nt, synthetic construct
  source 1..22: mol_type = other RNA
tgatccaggtgtatgatcttat

SEQ ID NO: 152143 - RNA, 22 nt, synthetic construct
  source 1..22: mol_type = other RNA
tgatccattacatcaacatata

SEQ ID NO: 152144 - RNA, 22 nt, synthetic construct
  source 1..22: mol_type = other RNA
tgatcccactagtggaagaatc

SEQ ID NO: 152145 - RNA, 22 nt, synthetic construct
  source 1..22: mol_type = other RNA
tgatccctgatatgtcgcatga

SEQ ID NO: 152146 - RNA, 22 nt, synthetic construct
  source 1..22: mol_type = other RNA
tgatcctaagccatctaattca

SEQ ID NO: 152147 - RNA, 22 nt, synthetic construct
  source 1..22: mol_type = other RNA
tgatcctcctgccttggccttc

SEQ ID NO: 152148 - RNA, 22 nt, synthetic construct
  source 1..22: mol_type = other RNA
tgatcctggaatagtagcttca

SEQ ID NO: 152149 - RNA, 22 nt, synthetic construct
  source 1..22: mol_type = other RNA
tgatccttctgccttgacctcc

SEQ ID NO: 152150 - RNA, 22 nt, synthetic construct
  source 1..22: mol_type = other RNA
tgatctaaaatggaagacttta

SEQ ID NO: 152151 - RNA, 22 nt, synthetic construct
  source 1..22: mol_type = other RNA
tgatctaaatggtgtgaagttg

SEQ ID NO: 152152 - RNA, 22 nt, synthetic construct
  source 1..22: mol_type = other RNA
tgatctatcaatctcacacctg

SEQ ID NO: 152153 - RNA, 22 nt, synthetic construct
  source 1..22: mol_type = other RNA
tgatctatgaatttgcctattc

SEQ ID NO: 152154 - RNA, 22 nt, synthetic construct
  source 1..22: mol_type = other RNA
tgatctatgcatactgcagcac

SEQ ID NO: 152155 - RNA, 22 nt, synthetic construct
  source 1..22: mol_type = other RNA
tgatctcacgtcaccgcaacct

SEQ ID NO: 152156 - RNA, 22 nt, synthetic construct
  source 1..22: mol_type = other RNA
tgatctcggcttactgcaacct

SEQ ID NO: 152157 - RNA, 22 nt, synthetic construct
  source 1..22: mol_type = other RNA
tgatctctgctcaccgcaacat

SEQ ID NO: 152158 - RNA, 22 nt, synthetic construct
  source 1..22: mol_type = other RNA
tgatctgccaggacaattgaat

SEQ ID NO: 152159 - RNA, 22 nt, synthetic construct
  source 1..22: mol_type = other RNA
tgatctgctcaagttttctatt

SEQ ID NO: 152160 - RNA, 22 nt, synthetic construct
  source 1..22: mol_type = other RNA
tgatctggtcacaaacacaaaa

SEQ ID NO: 152161 - RNA, 22 nt, synthetic construct
  source 1..22: mol_type = other RNA
tgatcttattaatgtgttgtct

SEQ ID NO: 152162 - RNA, 22 nt, synthetic construct
  source 1..22: mol_type = other RNA
tgatcttgggaatactttccca

SEQ ID NO: 152163 - RNA, 22 nt, synthetic construct
  source 1..22: mol_type = other RNA
tgatctttacttcccttctcga

SEQ ID NO: 152164 - RNA, 22 nt, synthetic construct
  source 1..22: mol_type = other RNA
tgatctttcaaggggccttttg

SEQ ID NO: 152165 - RNA, 22 nt, synthetic construct
  source 1..22: mol_type = other RNA
tgatctttgaataaagggtcag

SEQ ID NO: 152166 - RNA, 22 nt, synthetic construct
  source 1..22: mol_type = other RNA
tgatcttttctgacaatttcag

SEQ ID NO: 152167 - RNA, 22 nt, synthetic construct
  source 1..22: mol_type = other RNA
tgatgaaaagagcacaccaaga

SEQ ID NO: 152168 - RNA, 22 nt, synthetic construct
  source 1..22: mol_type = other RNA
tgatgaacaaaggcaggagcag

SEQ ID NO: 152169 - RNA, 22 nt, synthetic construct
  source 1..22: mol_type = other RNA
tgatgaactacacagacatgaa

SEQ ID NO: 152170 - RNA, 22 nt, synthetic construct
  source 1..22: mol_type = other RNA
tgatgaagaacctgttcatttg

SEQ ID NO: 152171 - RNA, 22 nt, synthetic construct
  source 1..22: mol_type = other RNA
tgatgaagggttttctgtagaa

SEQ ID NO: 152172 - RNA, 22 nt, synthetic construct
  source 1..22: mol_type = other RNA
tgatgaattccagtttatctat

SEQ ID NO: 152173 - RNA, 22 nt, synthetic construct
  source 1..22: mol_type = other RNA
tgatgacagttactctaaaaga

SEQ ID NO: 152174 - RNA, 22 nt, synthetic construct
  source 1..22: mol_type = other RNA
tgatgactatgaaaagcctcaa

SEQ ID NO: 152175 - RNA, 22 nt, synthetic construct
  source 1..22: mol_type = other RNA
tgatgactgtaagctgaactct

SEQ ID NO: 152176 - RNA, 22 nt, synthetic construct
  source 1..22: mol_type = other RNA
tgatgacttacagatatcaccc

SEQ ID NO: 152177 - RNA, 22 nt, synthetic construct
  source 1..22: mol_type = other RNA
tgatgagctactgcatgctagg

SEQ ID NO: 152178 - RNA, 22 nt, synthetic construct
  source 1..22: mol_type = other RNA
tgatgatagaataccacttagt

SEQ ID NO: 152179 - RNA, 22 nt, synthetic construct
  source 1..22: mol_type = other RNA
tgatgatgatggtgatgctaac

SEQ ID NO: 152180 - RNA, 22 nt, synthetic construct
  source 1..22: mol_type = other RNA
tgatgatggtgatgctaacgtg

SEQ ID NO: 152181 - RNA, 22 nt, synthetic construct
  source 1..22: mol_type = other RNA
tgatgattttagaaggtaagaa

SEQ ID NO: 152182 - RNA, 22 nt, synthetic construct
  source 1..22: mol_type = other RNA
tgatgatttttgccagtgtttt

SEQ ID NO: 152183 - RNA, 22 nt, synthetic construct
  source 1..22: mol_type = other RNA
tgatgcaactcctgggctcatc

SEQ ID NO: 152184 - RNA, 22 nt, synthetic construct
  source 1..22: mol_type = other RNA
tgatgcaatttgttttccaagc

SEQ ID NO: 152185 - RNA, 22 nt, synthetic construct
  source 1..22: mol_type = other RNA
tgatgcacaaaagtttaacttt

SEQ ID NO: 152186 - RNA, 22 nt, synthetic construct
  source 1..22: mol_type = other RNA
tgatgcacaagccttgaaaata

SEQ ID NO: 152187 - RNA, 22 nt, synthetic construct
  source 1..22: mol_type = other RNA
tgatgcagcccctgccacactc

SEQ ID NO: 152188 - RNA, 22 nt, synthetic construct
  source 1..22: mol_type = other RNA
tgatgccactcaaaactgaagt

SEQ ID NO: 152189 - RNA, 22 nt, synthetic construct
  source 1..22: mol_type = other RNA
tgatgccatcacattttgaatc

SEQ ID NO: 152190 - RNA, 22 nt, synthetic construct
  source 1..22: mol_type = other RNA
tgatgctaacgtgcttgctctg

SEQ ID NO: 152191 - RNA, 22 nt, synthetic construct
  source 1..22: mol_type = other RNA
tgatgctttctctagttgcacg

SEQ ID NO: 152192 - RNA, 22 nt, synthetic construct
  source 1..22: mol_type = other RNA
tgatggaacggcttaacacctt

SEQ ID NO: 152193 - RNA, 22 nt, synthetic construct
  source 1..22: mol_type = other RNA
tgatggaattctgacacccgaa

SEQ ID NO: 152194 - RNA, 22 nt, synthetic construct
  source 1..22: mol_type = other RNA
tgatggacattctgcttccttg

SEQ ID NO: 152195 - RNA, 22 nt, synthetic construct
  source 1..22: mol_type = other RNA
tgatggaggtggaactctgtca

SEQ ID NO: 152196 - RNA, 22 nt, synthetic construct
  source 1..22: mol_type = other RNA
tgatggcaacaatcaacaggta

SEQ ID NO: 152197 - RNA, 22 nt, synthetic construct
  source 1..22: mol_type = other RNA
tgatggcatcattcataaacac

SEQ ID NO: 152198 - RNA, 22 nt, synthetic construct
  source 1..22: mol_type = other RNA
tgatggcgcatgcctgtggtcc

SEQ ID NO: 152199 - RNA, 22 nt, synthetic construct
  source 1..22: mol_type = other RNA
tgatggctcaacgcctgtgatc

SEQ ID NO: 152200 - RNA, 22 nt, synthetic construct
  source 1..22: mol_type = other RNA
tgatggctgtactaagcctatg

SEQ ID NO: 152201 - RNA, 22 nt, synthetic construct
  source 1..22: mol_type = other RNA
tgatgggagatggacactgcag

SEQ ID NO: 152202 - RNA, 22 nt, synthetic construct
  source 1..22: mol_type = other RNA
tgatgggggtaagattgtggtc

SEQ ID NO: 152203 - RNA, 22 nt, synthetic construct
  source 1..22: mol_type = other RNA
tgatggtgatgctaacgtgctt

SEQ ID NO: 152204 - RNA, 22 nt, synthetic construct
  source 1..22: mol_type = other RNA
tgatggtttggggcttttgaac

SEQ ID NO: 152205 - RNA, 22 nt, synthetic construct
  source 1..22: mol_type = other RNA
tgatgtaagtgggaggaggtca

SEQ ID NO: 152206 - RNA, 22 nt, synthetic construct
  source 1..22: mol_type = other RNA
tgatgtaatggatcaaggcaca

SEQ ID NO: 152207 - RNA, 22 nt, synthetic construct
  source 1..22: mol_type = other RNA
tgatgtagaggcagttgagttt

SEQ ID NO: 152208 - RNA, 22 nt, synthetic construct
  source 1..22: mol_type = other RNA
tgatgtcacaagccagggtctg

SEQ ID NO: 152209 - RNA, 22 nt, synthetic construct
  source 1..22: mol_type = other RNA
tgatgtctcagatgtctccatt

SEQ ID NO: 152210 - RNA, 22 nt, synthetic construct
  source 1..22: mol_type = other RNA
tgatgtcttttgaagaagttct

SEQ ID NO: 152211 - RNA, 22 nt, synthetic construct
  source 1..22: mol_type = other RNA
tgatgtgaggatctgttggtgc

SEQ ID NO: 152212 - RNA, 22 nt, synthetic construct
  source 1..22: mol_type = other RNA
tgatgtgtagttattattgtca

SEQ ID NO: 152213 - RNA, 22 nt, synthetic construct
  source 1..22: mol_type = other RNA
tgatgtgtatgttacacttcca

SEQ ID NO: 152214 - RNA, 22 nt, synthetic construct
  source 1..22: mol_type = other RNA
tgatgtgtgtctctgctctcaa

SEQ ID NO: 152215 - RNA, 22 nt, synthetic construct
  source 1..22: mol_type = other RNA
tgatgtgttgaccttagtggtt

SEQ ID NO: 152216 - RNA, 22 nt, synthetic construct
  source 1..22: mol_type = other RNA
tgatgttcaaccctcggcctct

SEQ ID NO: 152217 - RNA, 22 nt, synthetic construct
  source 1..22: mol_type = other RNA
tgatgttgagtatcttttcatg

SEQ ID NO: 152218 - RNA, 22 nt, synthetic construct
  source 1..22: mol_type = other RNA
tgatgtttggctccttaccact

SEQ ID NO: 152219 - RNA, 22 nt, synthetic construct
  source 1..22: mol_type = other RNA
tgatgttttacattttccattg

SEQ ID NO: 152220 - RNA, 22 nt, synthetic construct
  source 1..22: mol_type = other RNA
tgatgttttgaacgaatgaaaa

SEQ ID NO: 152221 - RNA, 22 nt, synthetic construct
  source 1..22: mol_type = other RNA
tgattaaaggccctgatttaaa

SEQ ID NO: 152222 - RNA, 22 nt, synthetic construct
  source 1..22: mol_type = other RNA
tgattaatttgaggtctaggct

SEQ ID NO: 152223 - RNA, 22 nt, synthetic construct
  source 1..22: mol_type = other RNA
tgattacaagggtgacagagcc

SEQ ID NO: 152224 - RNA, 22 nt, synthetic construct
  source 1..22: mol_type = other RNA
tgattacaattcctttctaggc

SEQ ID NO: 152225 - RNA, 22 nt, synthetic construct
  source 1..22: mol_type = other RNA
tgattaccggcatccgccacca

SEQ ID NO: 152226 - RNA, 22 nt, synthetic construct
  source 1..22: mol_type = other RNA
tgattactgactcaatcttctt

SEQ ID NO: 152227 - RNA, 22 nt, synthetic construct
  source 1..22: mol_type = other RNA
tgattactttacagttatgtca

SEQ ID NO: 152228 - RNA, 22 nt, synthetic construct
  source 1..22: mol_type = other RNA
tgattagaaggattgttcatgt

SEQ ID NO: 152229 - RNA, 22 nt, synthetic construct
  source 1..22: mol_type = other RNA
tgattagaggctgcaccctcct

SEQ ID NO: 152230 - RNA, 22 nt, synthetic construct
  source 1..22: mol_type = other RNA
tgattagcttcctcaggatcta

SEQ ID NO: 152231 - RNA, 22 nt, synthetic construct
  source 1..22: mol_type = other RNA
tgattagttgactcctaaaaca

SEQ ID NO: 152232 - RNA, 22 nt, synthetic construct
  source 1..22: mol_type = other RNA
tgattataaccttgaacttcca

SEQ ID NO: 152233 - RNA, 22 nt, synthetic construct
  source 1..22: mol_type = other RNA
tgattatcagggatattggctt

SEQ ID NO: 152234 - RNA, 22 nt, synthetic construct
  source 1..22: mol_type = other RNA
tgattatgttagatatcccata

SEQ ID NO: 152235 - RNA, 22 nt, synthetic construct
  source 1..22: mol_type = other RNA
tgattatttgcggcttgattag

SEQ ID NO: 152236 - RNA, 22 nt, synthetic construct
  source 1..22: mol_type = other RNA
tgattatttttacccaacatga

SEQ ID NO: 152237 - RNA, 22 nt, synthetic construct
  source 1..22: mol_type = other RNA
tgattcaaaatgtgatggcatc

SEQ ID NO: 152238 - RNA, 22 nt, synthetic construct
  source 1..22: mol_type = other RNA
tgattcacttttgagttcagaa

SEQ ID NO: 152239 - RNA, 22 nt, synthetic construct
  source 1..22: mol_type = other RNA
tgattcagagtgctgggtagag

SEQ ID NO: 152240 - RNA, 22 nt, synthetic construct
  source 1..22: mol_type = other RNA
tgattcagatgacagaaataat

SEQ ID NO: 152241 - RNA, 22 nt, synthetic construct
  source 1..22: mol_type = other RNA
tgattcagtcttggtagtttgc

SEQ ID NO: 152242 - RNA, 22 nt, synthetic construct
  source 1..22: mol_type = other RNA
tgattcagtggttggaaaactt

SEQ ID NO: 152243 - RNA, 22 nt, synthetic construct
  source 1..22: mol_type = other RNA
tgattcagtttgctagtatttt

SEQ ID NO: 152244 - RNA, 22 nt, synthetic construct
  source 1..22: mol_type = other RNA
tgattccacttatatgaagcta

SEQ ID NO: 152245 - RNA, 22 nt, synthetic construct
  source 1..22: mol_type = other RNA
tgattccagtttctctgctttt

SEQ ID NO: 152246 - RNA, 22 nt, synthetic construct
  source 1..22: mol_type = other RNA
tgattccccttatatgggatat

SEQ ID NO: 152247 - RNA, 22 nt, synthetic construct
  source 1..22: mol_type = other RNA
tgattcgcattgctaattcatt

SEQ ID NO: 152248 - RNA, 22 nt, synthetic construct
  source 1..22: mol_type = other RNA
tgattctaatgtgcaaggagag

SEQ ID NO: 152249 - RNA, 22 nt, synthetic construct
  source 1..22: mol_type = other RNA
tgattcttccactagtgggatc

SEQ ID NO: 152250 - RNA, 22 nt, synthetic construct
  source 1..22: mol_type = other RNA
tgattgagattagcgaaaggga

SEQ ID NO: 152251 - RNA, 22 nt, synthetic construct
  source 1..22: mol_type = other RNA
tgattgaggacttcatgtacaa

SEQ ID NO: 152252 - RNA, 22 nt, synthetic construct
  source 1..22: mol_type = other RNA
tgattgagtatctggtgctggc

SEQ ID NO: 152253 - RNA, 22 nt, synthetic construct
  source 1..22: mol_type = other RNA
tgattgcaggtgtgggccacca

SEQ ID NO: 152254 - RNA, 22 nt, synthetic construct
  source 1..22: mol_type = other RNA
tgattgccagttttctggaaac

SEQ ID NO: 152255 - RNA, 22 nt, synthetic construct
  source 1..22: mol_type = other RNA
tgattgcccattataaaatagg

SEQ ID NO: 152256 - RNA, 22 nt, synthetic construct
  source 1..22: mol_type = other RNA
tgattggatatttgcagtagta

SEQ ID NO: 152257 - RNA, 22 nt, synthetic construct
  source 1..22: mol_type = other RNA
tgattggcaaatctttagtgtt

SEQ ID NO: 152258 - RNA, 22 nt, synthetic construct
  source 1..22: mol_type = other RNA
tgattgggcattaattgagagc

SEQ ID NO: 152259 - RNA, 22 nt, synthetic construct
  source 1..22: mol_type = other RNA
tgattgggtcaacaaactaact

SEQ ID NO: 152260 - RNA, 22 nt, synthetic construct
  source 1..22: mol_type = other RNA
tgattgttagccacagcgttgt

SEQ ID NO: 152261 - RNA, 22 nt, synthetic construct
  source 1..22: mol_type = other RNA
tgattgttccaggggggaaaaa

SEQ ID NO: 152262 - RNA, 22 nt, synthetic construct
  source 1..22: mol_type = other RNA
tgattgttgccatcattttatg

SEQ ID NO: 152263 - RNA, 22 nt, synthetic construct
  source 1..22: mol_type = other RNA
tgatttaaagtaggttgagact

SEQ ID NO: 152264 - RNA, 22 nt, synthetic construct
  source 1..22: mol_type = other RNA
tgatttaatagaggtctgtctt

SEQ ID NO: 152265 - RNA, 22 nt, synthetic construct
  source 1..22: mol_type = other RNA
tgatttagaaatacctgcaggt

SEQ ID NO: 152266 - RNA, 22 nt, synthetic construct
  source 1..22: mol_type = other RNA
tgatttaggccactctcatcta

SEQ ID NO: 152267 - RNA, 22 nt, synthetic construct
  source 1..22: mol_type = other RNA
tgatttataatccattgggtac

SEQ ID NO: 152268 - RNA, 22 nt, synthetic construct
  source 1..22: mol_type = other RNA
tgatttatagtgtttccttcca

SEQ ID NO: 152269 - RNA, 22 nt, synthetic construct
  source 1..22: mol_type = other RNA
tgatttatggcctaagatggaa

SEQ ID NO: 152270 - RNA, 22 nt, synthetic construct
  source 1..22: mol_type = other RNA
tgatttcaaagttaatagcctc

SEQ ID NO: 152271 - RNA, 22 nt, synthetic construct
  source 1..22: mol_type = other RNA
tgatttcaagtaacactcagaa

SEQ ID NO: 152272 - RNA, 22 nt, synthetic construct
  source 1..22: mol_type = other RNA
tgatttcacttacttgagcccc

SEQ ID NO: 152273 - RNA, 22 nt, synthetic construct
  source 1..22: mol_type = other RNA
tgatttccagtgtttggttttt

SEQ ID NO: 152274 - RNA, 22 nt, synthetic construct
  source 1..22: mol_type = other RNA
tgatttccctgcatacactcat

SEQ ID NO: 152275 - RNA, 22 nt, synthetic construct
  source 1..22: mol_type = other RNA
tgatttctaggccctaacccca

SEQ ID NO: 152276 - RNA, 22 nt, synthetic construct
  source 1..22: mol_type = other RNA
tgatttcttctttggctcaatg

SEQ ID NO: 152277 - RNA, 22 nt, synthetic construct
  source 1..22: mol_type = other RNA
tgatttgaccatgggacaagtg

SEQ ID NO: 152278 - RNA, 22 nt, synthetic construct
  source 1..22: mol_type = other RNA
tgatttgcatttctctaatagc

SEQ ID NO: 152279 - RNA, 22 nt, synthetic construct
  source 1..22: mol_type = other RNA
tgatttgctggctcagtctgtt

SEQ ID NO: 152280 - RNA, 22 nt, synthetic construct
  source 1..22: mol_type = other RNA
tgatttggtgtgtgcaaaggat

SEQ ID NO: 152281 - RNA, 22 nt, synthetic construct
  source 1..22: mol_type = other RNA
tgatttgtagatattttctgtc

SEQ ID NO: 152282 - RNA, 22 nt, synthetic construct
  source 1..22: mol_type = other RNA
tgatttgttatatccagattga

SEQ ID NO: 152283 - RNA, 22 nt, synthetic construct
  source 1..22: mol_type = other RNA
tgatttgtttagtagctgtctt

SEQ ID NO: 152284 - RNA, 22 nt, synthetic construct
  source 1..22: mol_type = other RNA
tgatttgtttgaattaagcacc

SEQ ID NO: 152285 - RNA, 22 nt, synthetic construct
  source 1..22: mol_type = other RNA
tgattttaatctgtcctgaata

SEQ ID NO: 152286 - RNA, 22 nt, synthetic construct
  source 1..22: mol_type = other RNA
tgattttaccaaggctaagttg

SEQ ID NO: 152287 - RNA, 22 nt, synthetic construct
  source 1..22: mol_type = other RNA
tgattttagaaggtaagaatgt

SEQ ID NO: 152288 - RNA, 22 nt, synthetic construct
  source 1..22: mol_type = other RNA
tgattttcacagggcagggaga

SEQ ID NO: 152289 - RNA, 22 nt, synthetic construct
  source 1..22: mol_type = other RNA
tgattttctgcttctcaataag

SEQ ID NO: 152290 - RNA, 22 nt, synthetic construct
  source 1..22: mol_type = other RNA
tgattttgaggcagagagatgg

SEQ ID NO: 152291 - RNA, 22 nt, synthetic construct
  source 1..22: mol_type = other RNA
tgattttgtatcctgagactta

SEQ ID NO: 152292 - RNA, 22 nt, synthetic construct
  source 1..22: mol_type = other RNA
tgattttgtgtcttctgttttt

SEQ ID NO: 152293 - RNA, 22 nt, synthetic construct
  source 1..22: mol_type = other RNA
tgattttgtttatttgctgtca

SEQ ID NO: 152294 - RNA, 22 nt, synthetic construct
  source 1..22: mol_type = other RNA
tgatttttagtgactggcttaa

SEQ ID NO: 152295 - RNA, 22 nt, synthetic construct
  source 1..22: mol_type = other RNA
tgatttttgccagtgttttaaa

SEQ ID NO: 152296 - RNA, 22 nt, synthetic construct
  source 1..22: mol_type = other RNA
tgcaaaaacagtttccctctga

SEQ ID NO: 152297 - RNA, 22 nt, synthetic construct
  source 1..22: mol_type = other RNA
tgcaaaaatactacaagagttc

SEQ ID NO: 152298 - RNA, 22 nt, synthetic construct
  source 1..22: mol_type = other RNA
tgcaaaaattttgttcaggagt

SEQ ID NO: 152299 - RNA, 22 nt, synthetic construct
  source 1..22: mol_type = other RNA
tgcaaaacaatagcccagcagg

SEQ ID NO: 152300 - RNA, 22 nt, synthetic construct
  source 1..22: mol_type = other RNA
tgcaaaacggaaactttatacc

SEQ ID NO: 152301 - RNA, 22 nt, synthetic construct
  source 1..22: mol_type = other RNA
tgcaaaccaaatgcagaaaata

SEQ ID NO: 152302 - RNA, 22 nt, synthetic construct
  source 1..22: mol_type = other RNA
tgcaaacctcctggttttgatc

SEQ ID NO: 152303 - RNA, 22 nt, synthetic construct
  source 1..22: mol_type = other RNA
tgcaaactaagtggtattctat

SEQ ID NO: 152304 - RNA, 22 nt, synthetic construct
  source 1..22: mol_type = other RNA
tgcaaactaccaagactgaatc

SEQ ID NO: 152305 - RNA, 22 nt, synthetic construct
  source 1..22: mol_type = other RNA
tgcaaactctaaataataggtt

SEQ ID NO: 152306 - RNA, 22 nt, synthetic construct
  source 1..22: mol_type = other RNA
tgcaaaggattagaaagtagat

SEQ ID NO: 152307 - RNA, 22 nt, synthetic construct
  source 1..22: mol_type = other RNA
tgcaaagtttcctacatactgc

SEQ ID NO: 152308 - RNA, 22 nt, synthetic construct
  source 1..22: mol_type = other RNA
tgcaaatatccaatcactggct

SEQ ID NO: 152309 - RNA, 22 nt, synthetic construct
  source 1..22: mol_type = other RNA
tgcaaatcaaaacaataagaca

SEQ ID NO: 152310 - RNA, 22 nt, synthetic construct
  source 1..22: mol_type = other RNA
tgcaaatgaggttgcttttact

SEQ ID NO: 152311 - RNA, 22 nt, synthetic construct
  source 1..22: mol_type = other RNA
tgcaaattattttcctccttct

SEQ ID NO: 152312 - RNA, 22 nt, synthetic construct
  source 1..22: mol_type = other RNA
tgcaacaaatgttgcagagact

SEQ ID NO: 152313 - RNA, 22 nt, synthetic construct
  source 1..22: mol_type = other RNA
tgcaacagaataaatgaaaaca

SEQ ID NO: 152314 - RNA, 22 nt, synthetic construct
  source 1..22: mol_type = other RNA
tgcaacagatctgagaagacta

SEQ ID NO: 152315 - RNA, 22 nt, synthetic construct
  source 1..22: mol_type = other RNA
tgcaacataaatagggtgctac

SEQ ID NO: 152316 - RNA, 22 nt, synthetic construct
  source 1..22: mol_type = other RNA
tgcaacatttgttgcatcccca

SEQ ID NO: 152317 - RNA, 22 nt, synthetic construct
  source 1..22: mol_type = other RNA
tgcaaccatccccgctgtccat

SEQ ID NO: 152318 - RNA, 22 nt, synthetic construct
  source 1..22: mol_type = other RNA
tgcaacctccgtttttcaggtt

SEQ ID NO: 152319 - RNA, 22 nt, synthetic construct
  source 1..22: mol_type = other RNA
tgcaacctgctttcctcatgtc

SEQ ID NO: 152320 - RNA, 22 nt, synthetic construct
  source 1..22: mol_type = other RNA
tgcaactagagaaagcatcaga

SEQ ID NO: 152321 - RNA, 22 nt, synthetic construct
  source 1..22: mol_type = other RNA
tgcaactatcaaaacacttctg

SEQ ID NO: 152322 - RNA, 22 nt, synthetic construct
  source 1..22: mol_type = other RNA
tgcaactcctgggctcatctaa

SEQ ID NO: 152323 - RNA, 22 nt, synthetic construct
  source 1..22: mol_type = other RNA
tgcaactgaaaacatctttttt

SEQ ID NO: 152324 - RNA, 22 nt, synthetic construct
  source 1..22: mol_type = other RNA
tgcaactgagaagagctgtaac

SEQ ID NO: 152325 - RNA, 22 nt, synthetic construct
  source 1..22: mol_type = other RNA
tgcaacttactctcaaataatt

SEQ ID NO: 152326 - RNA, 22 nt, synthetic construct
  source 1..22: mol_type = other RNA
tgcaagaatggtttaacacata

SEQ ID NO: 152327 - RNA, 22 nt, synthetic construct
  source 1..22: mol_type = other RNA
tgcaagagttaaaactcacaaa

SEQ ID NO: 152328 - RNA, 22 nt, synthetic construct
  source 1..22: mol_type = other RNA
tgcaagatgcataagttctaga

SEQ ID NO: 152329 - RNA, 22 nt, synthetic construct
  source 1..22: mol_type = other RNA
tgcaagatggcaagtttccatt

SEQ ID NO: 152330 - RNA, 22 nt, synthetic construct
  source 1..22: mol_type = other RNA
tgcaagatgtcaacattaaggg

SEQ ID NO: 152331 - RNA, 22 nt, synthetic construct
  source 1..22: mol_type = other RNA
tgcaagattaatcttgtgaatt

SEQ ID NO: 152332 - RNA, 22 nt, synthetic construct
  source 1..22: mol_type = other RNA
tgcaagcactggtaaggaaaca

SEQ ID NO: 152333 - RNA, 22 nt, synthetic construct
  source 1..22: mol_type = other RNA
tgcaagcagatctgctgtaagc

SEQ ID NO: 152334 - RNA, 22 nt, synthetic construct
  source 1..22: mol_type = other RNA
tgcaagccacattagccactct

SEQ ID NO: 152335 - RNA, 22 nt, synthetic construct
  source 1..22: mol_type = other RNA
tgcaagctccgcctcctggtgg

SEQ ID NO: 152336 - RNA, 22 nt, synthetic construct
  source 1..22: mol_type = other RNA
tgcaaggagagaaaaacaaaac

SEQ ID NO: 152337 - RNA, 22 nt, synthetic construct
  source 1..22: mol_type = other RNA
tgcaaggataaacaaagagaac

SEQ ID NO: 152338 - RNA, 22 nt, synthetic construct
  source 1..22: mol_type = other RNA
tgcaaggcccaccatgatgcag

SEQ ID NO: 152339 - RNA, 22 nt, synthetic construct
  source 1..22: mol_type = other RNA
tgcaagttgctatccagtctct

SEQ ID NO: 152340 - RNA, 22 nt, synthetic construct
  source 1..22: mol_type = other RNA
tgcaataactcaaaatgttcat

SEQ ID NO: 152341 - RNA, 22 nt, synthetic construct
  source 1..22: mol_type = other RNA
tgcaatacagttaacgtatgaa

SEQ ID NO: 152342 - RNA, 22 nt, synthetic construct
  source 1..22: mol_type = other RNA
tgcaatacttaatagcccaaca

SEQ ID NO: 152343 - RNA, 22 nt, synthetic construct
  source 1..22: mol_type = other RNA
tgcaatcacagcacttggggag

SEQ ID NO: 152344 - RNA, 22 nt, synthetic construct
  source 1..22: mol_type = other RNA
tgcaatcacggctgattataac

SEQ ID NO: 152345 - RNA, 22 nt, synthetic construct
  source 1..22: mol_type = other RNA
tgcaatgataggtcactgcagt

SEQ ID NO: 152346 - RNA, 22 nt, synthetic construct
  source 1..22: mol_type = other RNA
tgcaatgcaggcgcctggacag

SEQ ID NO: 152347 - RNA, 22 nt, synthetic construct
  source 1..22: mol_type = other RNA
tgcaatgcgtgtgaaaccaagc

SEQ ID NO: 152348 - RNA, 22 nt, synthetic construct
  source 1..22: mol_type = other RNA
tgcaatggggcaatctcagctc

SEQ ID NO: 152349 - RNA, 22 nt, synthetic construct
  source 1..22: mol_type = other RNA
tgcaatggtgggatctctgggc

SEQ ID NO: 152350 - RNA, 22 nt, synthetic construct
  source 1..22: mol_type = other RNA
tgcaattccccagcctcagcct

SEQ ID NO: 152351 - RNA, 22 nt, synthetic construct
  source 1..22: mol_type = other RNA
tgcaattgcgcagaactggggc

SEQ ID NO: 152352 - RNA, 22 nt, synthetic construct
  source 1..22: mol_type = other RNA
tgcaattggaagactatcacga

SEQ ID NO: 152353 - RNA, 22 nt, synthetic construct
  source 1..22: mol_type = other RNA
tgcaatttatatgatactcgta

SEQ ID NO: 152354 - RNA, 22 nt, synthetic construct
  source 1..22: mol_type = other RNA
tgcaatttgttttccaagcctt

SEQ ID NO: 152355 - RNA, 22 nt, synthetic construct
  source 1..22: mol_type = other RNA
tgcacaaaagtgaaaactaagg

SEQ ID NO: 152356 - RNA, 22 nt, synthetic construct
  source 1..22: mol_type = other RNA
tgcacaaaagtttaactttgat

SEQ ID NO: 152357 - RNA, 22 nt, synthetic construct
  source 1..22: mol_type = other RNA
tgcacaaaggattgggaagatt

SEQ ID NO: 152358 - RNA, 22 nt, synthetic construct
  source 1..22: mol_type = other RNA
tgcacaaataattaacactatg

SEQ ID NO: 152359 - RNA, 22 nt, synthetic construct
  source 1..22: mol_type = other RNA
tgcacaacacatgcacactaga

SEQ ID NO: 152360 - RNA, 22 nt, synthetic construct
  source 1..22: mol_type = other RNA
tgcacaagacagatgtgcttaa

SEQ ID NO: 152361 - RNA, 22 nt, synthetic construct
  source 1..22: mol_type = other RNA
tgcacaagccttgaaaatatac

SEQ ID NO: 152362 - RNA, 22 nt, synthetic construct
  source 1..22: mol_type = other RNA
tgcacaagggaagaggccacaa

SEQ ID NO: 152363 - RNA, 22 nt, synthetic construct
  source 1..22: mol_type = other RNA
tgcacaaggtcaagagcggcct

SEQ ID NO: 152364 - RNA, 22 nt, synthetic construct
  source 1..22: mol_type = other RNA
tgcacaatgcagtattgttaac

SEQ ID NO: 152365 - RNA, 22 nt, synthetic construct
  source 1..22: mol_type = other RNA
tgcacaatggaatattactcag

SEQ ID NO: 152366 - RNA, 22 nt, synthetic construct
  source 1..22: mol_type = other RNA
tgcacaatgttgtggatgtcct

SEQ ID NO: 152367 - RNA, 22 nt, synthetic construct
  source 1..22: mol_type = other RNA
tgcacaattgcactccagccta

SEQ ID NO: 152368 - RNA, 22 nt, synthetic construct
  source 1..22: mol_type = other RNA
tgcacacaacactcagatatca

SEQ ID NO: 152369 - RNA, 22 nt, synthetic construct
  source 1..22: mol_type = other RNA
tgcacacaccaaatcatgaaag

SEQ ID NO: 152370 - RNA, 22 nt, synthetic construct
  source 1..22: mol_type = other RNA
tgcacacagagggagcgccacg

SEQ ID NO: 152371 - RNA, 22 nt, synthetic construct
  source 1..22: mol_type = other RNA
tgcacacaggagaacttgtctc

SEQ ID NO: 152372 - RNA, 22 nt, synthetic construct
  source 1..22: mol_type = other RNA
tgcacacatccacgcgtaaggg

SEQ ID NO: 152373 - RNA, 22 nt, synthetic construct
  source 1..22: mol_type = other RNA
tgcacacccagttatctctgcc

SEQ ID NO: 152374 - RNA, 22 nt, synthetic construct
  source 1..22: mol_type = other RNA
tgcacacgctggaagggagccc

SEQ ID NO: 152375 - RNA, 22 nt, synthetic construct
  source 1..22: mol_type = other RNA
tgcacactagacctttcttagg

SEQ ID NO: 152376 - RNA, 22 nt, synthetic construct
  source 1..22: mol_type = other RNA
tgcacagtatgcggggtttcag

SEQ ID NO: 152377 - RNA, 22 nt, synthetic construct
  source 1..22: mol_type = other RNA
tgcacagtctcccccaggtggt

SEQ ID NO: 152378 - RNA, 22 nt, synthetic construct
  source 1..22: mol_type = other RNA
tgcacataaaaggatatgggcc

SEQ ID NO: 152379 - RNA, 22 nt, synthetic construct
  source 1..22: mol_type = other RNA
tgcacataatataaaaagacac

SEQ ID NO: 152380 - RNA, 22 nt, synthetic construct
  source 1..22: mol_type = other RNA
tgcacatgcacaaggtcaagag

SEQ ID NO: 152381 - RNA, 22 nt, synthetic construct
  source 1..22: mol_type = other RNA
tgcacatgggcatgggtccaag

SEQ ID NO: 152382 - RNA, 22 nt, synthetic construct
  source 1..22: mol_type = other RNA
tgcacatgttccctagaactta

SEQ ID NO: 152383 - RNA, 22 nt, synthetic construct
  source 1..22: mol_type = other RNA
tgcacattagaatcatccgggg

SEQ ID NO: 152384 - RNA, 22 nt, synthetic construct
  source 1..22: mol_type = other RNA
tgcacattccaagagaggaata

SEQ ID NO: 152385 - RNA, 22 nt, synthetic construct
  source 1..22: mol_type = other RNA
tgcacattccttcttcacacat

SEQ ID NO: 152386 - RNA, 22 nt, synthetic construct
  source 1..22: mol_type = other RNA
tgcaccaacacctgcagtggcg

SEQ ID NO: 152387 - RNA, 22 nt, synthetic construct
  source 1..22: mol_type = other RNA
tgcaccaactccacattgtctt

SEQ ID NO: 152388 - RNA, 22 nt, synthetic construct
  source 1..22: mol_type = other RNA
tgcaccatttattgtcaaggtc

SEQ ID NO: 152389 - RNA, 22 nt, synthetic construct
  source 1..22: mol_type = other RNA
tgcaccattttttcaccagcgg

SEQ ID NO: 152390 - RNA, 22 nt, synthetic construct
  source 1..22: mol_type = other RNA
tgcaccctcctcctcctggcca

SEQ ID NO: 152391 - RNA, 22 nt, synthetic construct
  source 1..22: mol_type = other RNA
tgcacctaataaaatgtttagc

SEQ ID NO: 152392 - RNA, 22 nt, synthetic construct
  source 1..22: mol_type = other RNA
tgcacctccagtgtcctgaatg

SEQ ID NO: 152393 - RNA, 22 nt, synthetic construct
  source 1..22: mol_type = other RNA
tgcacctcgggttcaagcccca

SEQ ID NO: 152394 - RNA, 22 nt, synthetic construct
  source 1..22: mol_type = other RNA
tgcaccttacattgtaatcctg

SEQ ID NO: 152395 - RNA, 22 nt, synthetic construct
  source 1..22: mol_type = other RNA
tgcacgagaaaagcacaggcat

SEQ ID NO: 152396 - RNA, 22 nt, synthetic construct
  source 1..22: mol_type = other RNA
tgcacgctgtgaatgtgaggtg

SEQ ID NO: 152397 - RNA, 22 nt, synthetic construct
  source 1..22: mol_type = other RNA
tgcacggacttggcacaggaga

SEQ ID NO: 152398 - RNA, 22 nt, synthetic construct
  source 1..22: mol_type = other RNA
tgcacggtgaagaaccgactga

SEQ ID NO: 152399 - RNA, 22 nt, synthetic construct
  source 1..22: mol_type = other RNA
tgcacgtactagtcagcacact

SEQ ID NO: 152400 - RNA, 22 nt, synthetic construct
  source 1..22: mol_type = other RNA
tgcacgtctgtggtctcagctc

SEQ ID NO: 152401 - RNA, 22 nt, synthetic construct
  source 1..22: mol_type = other RNA
tgcacgtgaagctacagactaa

SEQ ID NO: 152402 - RNA, 22 nt, synthetic construct
  source 1..22: mol_type = other RNA
tgcacgtttgctttggagtgag

SEQ ID NO: 152403 - RNA, 22 nt, synthetic construct
  source 1..22: mol_type = other RNA
tgcacgtttttagaaatttacc

SEQ ID NO: 152404 - RNA, 22 nt, synthetic construct
  source 1..22: mol_type = other RNA
tgcactaaactagtatcaacct

SEQ ID NO: 152405 - RNA, 22 nt, synthetic construct
  source 1..22: mol_type = other RNA
tgcactcaagcaatcctccggc

SEQ ID NO: 152406 - RNA, 22 nt, synthetic construct
  source 1..22: mol_type = other RNA
tgcactccacgtgggtgacaga

SEQ ID NO: 152407 - RNA, 22 nt, synthetic construct
  source 1..22: mol_type = other RNA
tgcactccagccttggtaagag

SEQ ID NO: 152408 - RNA, 22 nt, synthetic construct
  source 1..22: mol_type = other RNA
tgcactctcaaaattaaattca

SEQ ID NO: 152409 - RNA, 22 nt, synthetic construct
  source 1..22: mol_type = other RNA
tgcactctggcctggacaacag

SEQ ID NO: 152410 - RNA, 22 nt, synthetic construct
  source 1..22: mol_type = other RNA
tgcactcttttaaacccatttc

SEQ ID NO: 152411 - RNA, 22 nt, synthetic construct
  source 1..22: mol_type = other RNA
tgcactggcacagcactgttaa

SEQ ID NO: 152412 - RNA, 22 nt, synthetic construct
  source 1..22: mol_type = other RNA
tgcactggctattagttaacct

SEQ ID NO: 152413 - RNA, 22 nt, synthetic construct
  source 1..22: mol_type = other RNA
tgcactgtactcctagatactc

SEQ ID NO: 152414 - RNA, 22 nt, synthetic construct
  source 1..22: mol_type = other RNA
tgcacttaaaatttagatctca

SEQ ID NO: 152415 - RNA, 22 nt, synthetic construct
  source 1..22: mol_type = other RNA
tgcacttagcgctgatgtgttg

SEQ ID NO: 152416 - RNA, 22 nt, synthetic construct
  source 1..22: mol_type = other RNA
tgcagaaaataaaccaagtttg

SEQ ID NO: 152417 - RNA, 22 nt, synthetic construct
  source 1..22: mol_type = other RNA
tgcagaaaccagttgtaatttt

SEQ ID NO: 152418 - RNA, 22 nt, synthetic construct
  source 1..22: mol_type = other RNA
tgcagaaatctaccaaacattg

SEQ ID NO: 152419 - RNA, 22 nt, synthetic construct
  source 1..22: mol_type = other RNA
tgcagaagagtgaagctggacc

SEQ ID NO: 152420 - RNA, 22 nt, synthetic construct
  source 1..22: mol_type = other RNA
tgcagaaggagaaaccatttac

SEQ ID NO: 152421 - RNA, 22 nt, synthetic construct
  source 1..22: mol_type = other RNA
tgcagaatgacagaaaatatct

SEQ ID NO: 152422 - RNA, 22 nt, synthetic construct
  source 1..22: mol_type = other RNA
tgcagaattactgacaatagcc

SEQ ID NO: 152423 - RNA, 22 nt, synthetic construct
  source 1..22: mol_type = other RNA
tgcagacaataattcttcctgt

SEQ ID NO: 152424 - RNA, 22 nt, synthetic construct
  source 1..22: mol_type = other RNA
tgcagacatgcacgagaaaagc

SEQ ID NO: 152425 - RNA, 22 nt, synthetic construct
  source 1..22: mol_type = other RNA
tgcagaccaagaaaggacttca

SEQ ID NO: 152426 - RNA, 22 nt, synthetic construct
  source 1..22: mol_type = other RNA
tgcagactcttgtcccggcatg

SEQ ID NO: 152427 - RNA, 22 nt, synthetic construct
  source 1..22: mol_type = other RNA
tgcagactgcaggtcttcaacc

SEQ ID NO: 152428 - RNA, 22 nt, synthetic construct
  source 1..22: mol_type = other RNA
tgcagagacggggtcccactat

SEQ ID NO: 152429 - RNA, 22 nt, synthetic construct
  source 1..22: mol_type = other RNA
tgcagagactggatagcaactt

SEQ ID NO: 152430 - RNA, 22 nt, synthetic construct
  source 1..22: mol_type = other RNA
tgcagagactgtgcttccacag

SEQ ID NO: 152431 - RNA, 22 nt, synthetic construct
  source 1..22: mol_type = other RNA
tgcagagcaaactcagatctga

SEQ ID NO: 152432 - RNA, 22 nt, synthetic construct
  source 1..22: mol_type = other RNA
tgcagagcaggctccacttggg

SEQ ID NO: 152433 - RNA, 22 nt, synthetic construct
  source 1..22: mol_type = other RNA
tgcagagcaggggtggggggat

SEQ ID NO: 152434 - RNA, 22 nt, synthetic construct
  source 1..22: mol_type = other RNA
tgcagaggtcaggaaggcagga

SEQ ID NO: 152435 - RNA, 22 nt, synthetic construct
  source 1..22: mol_type = other RNA
tgcagagtgttcaaaagcccca

SEQ ID NO: 152436 - RNA, 22 nt, synthetic construct
  source 1..22: mol_type = other RNA
tgcagatgaatgagcaaggtcg

SEQ ID NO: 152437 - RNA, 22 nt, synthetic construct
  source 1..22: mol_type = other RNA
tgcagattcatcttgacttcac

SEQ ID NO: 152438 - RNA, 22 nt, synthetic construct
  source 1..22: mol_type = other RNA
tgcagatttctttttactcatg

SEQ ID NO: 152439 - RNA, 22 nt, synthetic construct
  source 1..22: mol_type = other RNA
tgcagcaaaagcaccactgaga

SEQ ID NO: 152440 - RNA, 22 nt, synthetic construct
  source 1..22: mol_type = other RNA
tgcagcaacggaaatgagtgag

SEQ ID NO: 152441 - RNA, 22 nt, synthetic construct
  source 1..22: mol_type = other RNA
tgcagcaagcagtaaatatact

SEQ ID NO: 152442 - RNA, 22 nt, synthetic construct
  source 1..22: mol_type = other RNA
tgcagcaattatttgaataagg

SEQ ID NO: 152443 - RNA, 22 nt, synthetic construct
  source 1..22: mol_type = other RNA
tgcagcatgctcactgtctcca

SEQ ID NO: 152444 - RNA, 22 nt, synthetic construct
  source 1..22: mol_type = other RNA
tgcagccactatagaaaatagt

SEQ ID NO: 152445 - RNA, 22 nt, synthetic construct
  source 1..22: mol_type = other RNA
tgcagccagagagtggaaagag

SEQ ID NO: 152446 - RNA, 22 nt, synthetic construct
  source 1..22: mol_type = other RNA
tgcagccagatttgatcctgga

SEQ ID NO: 152447 - RNA, 22 nt, synthetic construct
  source 1..22: mol_type = other RNA
tgcagcccctgccacactccag

SEQ ID NO: 152448 - RNA, 22 nt, synthetic construct
  source 1..22: mol_type = other RNA
tgcagcctctaatcaggttggg

SEQ ID NO: 152449 - RNA, 22 nt, synthetic construct
  source 1..22: mol_type = other RNA
tgcagccttccctgaacaatga

SEQ ID NO: 152450 - RNA, 22 nt, synthetic construct
  source 1..22: mol_type = other RNA
tgcaggaaacttccagaaactt

SEQ ID NO: 152451 - RNA, 22 nt, synthetic construct
  source 1..22: mol_type = other RNA
tgcaggaccaactttaagcaaa

SEQ ID NO: 152452 - RNA, 22 nt, synthetic construct
  source 1..22: mol_type = other RNA
tgcaggagaaacatggcttaga

SEQ ID NO: 152453 - RNA, 22 nt, synthetic construct
  source 1..22: mol_type = other RNA
tgcaggagccttgctgttgtaa

SEQ ID NO: 152454 - RNA, 22 nt, synthetic construct
  source 1..22: mol_type = other RNA
tgcaggagtttgagactgcagt

SEQ ID NO: 152455 - RNA, 22 nt, synthetic construct
  source 1..22: mol_type = other RNA
tgcaggcagaatgtgacctgtc

SEQ ID NO: 152456 - RNA, 22 nt, synthetic construct
  source 1..22: mol_type = other RNA
tgcaggccagatatccataagg

SEQ ID NO: 152457 - RNA, 22 nt, synthetic construct
  source 1..22: mol_type = other RNA
tgcaggcgcctggacaggatcc

SEQ ID NO: 152458 - RNA, 22 nt, synthetic construct
  source 1..22: mol_type = other RNA
tgcaggctgaactgctgacaga

SEQ ID NO: 152459 - RNA, 22 nt, synthetic construct
  source 1..22: mol_type = other RNA
tgcagggaaatcattcaggaca

SEQ ID NO: 152460 - RNA, 22 nt, synthetic construct
  source 1..22: mol_type = other RNA
tgcagggcttctgaaggtgcct

SEQ ID NO: 152461 - RNA, 22 nt, synthetic construct
  source 1..22: mol_type = other RNA
tgcaggtatttctaaatcaaca

SEQ ID NO: 152462 - RNA, 22 nt, synthetic construct
  source 1..22: mol_type = other RNA
tgcaggtcttcaacctcaactt

SEQ ID NO: 152463 - RNA, 22 nt, synthetic construct
  source 1..22: mol_type = other RNA
tgcaggtgtgggccaccaagcc

SEQ ID NO: 152464 - RNA, 22 nt, synthetic construct
  source 1..22: mol_type = other RNA
tgcaggtgttggtgcatttggg

SEQ ID NO: 152465 - RNA, 22 nt, synthetic construct
  source 1..22: mol_type = other RNA
tgcaggttcatgtgtgcttaca

SEQ ID NO: 152466 - RNA, 22 nt, synthetic construct
  source 1..22: mol_type = other RNA
tgcaggttgatactagtttagt

SEQ ID NO: 152467 - RNA, 22 nt, synthetic construct
  source 1..22: mol_type = other RNA
tgcaggtttactccaagaaggc

SEQ ID NO: 152468 - RNA, 22 nt, synthetic construct
  source 1..22: mol_type = other RNA
tgcagtacttgtctttttgtga

SEQ ID NO: 152469 - RNA, 22 nt, synthetic construct
  source 1..22: mol_type = other RNA
tgcagtagctcatcatttatac

SEQ ID NO: 152470 - RNA, 22 nt, synthetic construct
  source 1..22: mol_type = other RNA
tgcagtagtaaagcaaatgtga

SEQ ID NO: 152471 - RNA, 22 nt, synthetic construct
  source 1..22: mol_type = other RNA
tgcagtagtattgaactgttac

SEQ ID NO: 152472 - RNA, 22 nt, synthetic construct
  source 1..22: mol_type = other RNA
tgcagtatcttgaagaaaccaa

SEQ ID NO: 152473 - RNA, 22 nt, synthetic construct
  source 1..22: mol_type = other RNA
tgcagtatgcatagatcacaag

SEQ ID NO: 152474 - RNA, 22 nt, synthetic construct
  source 1..22: mol_type = other RNA
tgcagtatgtaggaaactttgc

SEQ ID NO: 152475 - RNA, 22 nt, synthetic construct
  source 1..22: mol_type = other RNA
tgcagtatgtgccatttttata

SEQ ID NO: 152476 - RNA, 22 nt, synthetic construct
  source 1..22: mol_type = other RNA
tgcagtattgttaactgtagag

SEQ ID NO: 152477 - RNA, 22 nt, synthetic construct
  source 1..22: mol_type = other RNA
tgcagtccccggtctttcctga

SEQ ID NO: 152478 - RNA, 22 nt, synthetic construct
  source 1..22: mol_type = other RNA
tgcagtctaaccattaacagct

SEQ ID NO: 152479 - RNA, 22 nt, synthetic construct
  source 1..22: mol_type = other RNA
tgcagtctcaaactcctgcact

SEQ ID NO: 152480 - RNA, 22 nt, synthetic construct
  source 1..22: mol_type = other RNA
tgcagtctctgctcactgcaac

SEQ ID NO: 152481 - RNA, 22 nt, synthetic construct
  source 1..22: mol_type = other RNA
tgcagtctgcaggcagaatgtg

SEQ ID NO: 152482 - RNA, 22 nt, synthetic construct
  source 1..22: mol_type = other RNA
tgcagtctgtcctcgtaaaagc

SEQ ID NO: 152483 - RNA, 22 nt, synthetic construct
  source 1..22: mol_type = other RNA
tgcagtgaacatgggaatgcat

SEQ ID NO: 152484 - RNA, 22 nt, synthetic construct
  source 1..22: mol_type = other RNA
tgcagtgagcccagagatccca

SEQ ID NO: 152485 - RNA, 22 nt, synthetic construct
  source 1..22: mol_type = other RNA
tgcagtggatgactaggctcct

SEQ ID NO: 152486 - RNA, 22 nt, synthetic construct
  source 1..22: mol_type = other RNA
tgcagtggcgcagccatggctc

SEQ ID NO: 152487 - RNA, 22 nt, synthetic construct
  source 1..22: mol_type = other RNA
tgcagtggcgtgtgcccaggct

SEQ ID NO: 152488 - RNA, 22 nt, synthetic construct
  source 1..22: mol_type = other RNA
tgcagtggcttcctaactggtc

SEQ ID NO: 152489 - RNA, 22 nt, synthetic construct
  source 1..22: mol_type = other RNA
tgcagtggtgtggtcttgtctc

SEQ ID NO: 152490 - RNA, 22 nt, synthetic construct
  source 1..22: mol_type = other RNA
tgcagtgtccatctcccatcac

SEQ ID NO: 152491 - RNA, 22 nt, synthetic construct
  source 1..22: mol_type = other RNA
tgcagttagcatgcctgacaaa

SEQ ID NO: 152492 - RNA, 22 nt, synthetic construct
  source 1..22: mol_type = other RNA
tgcagttgcttactctaatggg

SEQ ID NO: 152493 - RNA, 22 nt, synthetic construct
  source 1..22: mol_type = other RNA
tgcagttggattatatgttcta

SEQ ID NO: 152494 - RNA, 22 nt, synthetic construct
  source 1..22: mol_type = other RNA
tgcagttggggactcttatggc

SEQ ID NO: 152495 - RNA, 22 nt, synthetic construct
  source 1..22: mol_type = other RNA
tgcagtttgtgttttcactctc

SEQ ID NO: 152496 - RNA, 22 nt, synthetic construct
  source 1..22: mol_type = other RNA
tgcagtttttccactaatgtcc

SEQ ID NO: 152497 - RNA, 22 nt, synthetic construct
  source 1..22: mol_type = other RNA
tgcataaacgacagcaggaaaa

SEQ ID NO: 152498 - RNA, 22 nt, synthetic construct
  source 1..22: mol_type = other RNA
tgcataactcgtaatgcgatga

SEQ ID NO: 152499 - RNA, 22 nt, synthetic construct
  source 1..22: mol_type = other RNA
tgcataagttctagagatttgc

SEQ ID NO: 152500 - RNA, 22 nt, synthetic construct
  source 1..22: mol_type = other RNA
tgcatacactcatttcctttca

SEQ ID NO: 152501 - RNA, 22 nt, synthetic construct
  source 1..22: mol_type = other RNA
tgcataccaagcccggcacggt

SEQ ID NO: 152502 - RNA, 22 nt, synthetic construct
  source 1..22: mol_type = other RNA
tgcataccaccacattcggcca

SEQ ID NO: 152503 - RNA, 22 nt, synthetic construct
  source 1..22: mol_type = other RNA
tgcatacgtcgtcccccatccc

SEQ ID NO: 152504 - RNA, 22 nt, synthetic construct
  source 1..22: mol_type = other RNA
tgcatactgcagcacttttaag

SEQ ID NO: 152505 - RNA, 22 nt, synthetic construct
  source 1..22: mol_type = other RNA
tgcatactgtgatgattttaga

SEQ ID NO: 152506 - RNA, 22 nt, synthetic construct
  source 1..22: mol_type = other RNA
tgcatacttagctaatttcaga

SEQ ID NO: 152507 - RNA, 22 nt, synthetic construct
  source 1..22: mol_type = other RNA
tgcatactttggaaggtaggag

SEQ ID NO: 152508 - RNA, 22 nt, synthetic construct
  source 1..22: mol_type = other RNA
tgcatagagatcttgtgtatct

SEQ ID NO: 152509 - RNA, 22 nt, synthetic construct
  source 1..22: mol_type = other RNA
tgcatagatcacaaggactggc

SEQ ID NO: 152510 - RNA, 22 nt, synthetic construct
  source 1..22: mol_type = other RNA
tgcatagcagggtcatgcacac

SEQ ID NO: 152511 - RNA, 22 nt, synthetic construct
  source 1..22: mol_type = other RNA
tgcatagggatgttgcctacta

SEQ ID NO: 152512 - RNA, 22 nt, synthetic construct
  source 1..22: mol_type = other RNA
tgcatagtactccattatatga

SEQ ID NO: 152513 - RNA, 22 nt, synthetic construct
  source 1..22: mol_type = other RNA
tgcatagtattccatggtatgt

SEQ ID NO: 152514 - RNA, 22 nt, synthetic construct
  source 1..22: mol_type = other RNA
tgcatatataccacattttgtt

SEQ ID NO: 152515 - RNA, 22 nt, synthetic construct
  source 1..22: mol_type = other RNA
tgcatatatctgtctgggataa

SEQ ID NO: 152516 - RNA, 22 nt, synthetic construct
  source 1..22: mol_type = other RNA
tgcatatgtttgtaacttgttc

SEQ ID NO: 152517 - RNA, 22 nt, synthetic construct
  source 1..22: mol_type = other RNA
tgcatatgtttttattagcaga

SEQ ID NO: 152518 - RNA, 22 nt, synthetic construct
  source 1..22: mol_type = other RNA
tgcatattgaagccagcaccta

SEQ ID NO: 152519 - RNA, 22 nt, synthetic construct
  source 1..22: mol_type = other RNA
tgcatcaaaggacactattgag

SEQ ID NO: 152520 - RNA, 22 nt, synthetic construct
  source 1..22: mol_type = other RNA
tgcatcaactgcttccctagcc

SEQ ID NO: 152521 - RNA, 22 nt, synthetic construct
  source 1..22: mol_type = other RNA
tgcatcacttgaggtgattaaa

SEQ ID NO: 152522 - RNA, 22 nt, synthetic construct
  source 1..22: mol_type = other RNA
tgcatcagaattccattccttt

SEQ ID NO: 152523 - RNA, 22 nt, synthetic construct
  source 1..22: mol_type = other RNA
tgcatcatggtgggccttgcaa

SEQ ID NO: 152524 - RNA, 22 nt, synthetic construct
  source 1..22: mol_type = other RNA
tgcatccaaaagggaaatatga

SEQ ID NO: 152525 - RNA, 22 nt, synthetic construct
  source 1..22: mol_type = other RNA
tgcatccacattttgtgacaag

SEQ ID NO: 152526 - RNA, 22 nt, synthetic construct
  source 1..22: mol_type = other RNA
tgcatcccaagggttttggtat

SEQ ID NO: 152527 - RNA, 22 nt, synthetic construct
  source 1..22: mol_type = other RNA
tgcatccccattcaattgtcct

SEQ ID NO: 152528 - RNA, 22 nt, synthetic construct
  source 1..22: mol_type = other RNA
tgcatccctcctctggccctcc

SEQ ID NO: 152529 - RNA, 22 nt, synthetic construct
  source 1..22: mol_type = other RNA
tgcatcctttataccttttaat

SEQ ID NO: 152530 - RNA, 22 nt, synthetic construct
  source 1..22: mol_type = other RNA
tgcatcgtttcaatattaagag

SEQ ID NO: 152531 - RNA, 22 nt, synthetic construct
  source 1..22: mol_type = other RNA
tgcatcttcttttacttgcttg

SEQ ID NO: 152532 - RNA, 22 nt, synthetic construct
  source 1..22: mol_type = other RNA
tgcatcttgaactaagtgtgaa

SEQ ID NO: 152533 - RNA, 22 nt, synthetic construct
  source 1..22: mol_type = other RNA
tgcatcttgcaaaacggaaact

SEQ ID NO: 152534 - RNA, 22 nt, synthetic construct
  source 1..22: mol_type = other RNA
tgcatcttttgagggtatcata

SEQ ID NO: 152535 - RNA, 22 nt, synthetic construct
  source 1..22: mol_type = other RNA
tgcatgaccctgctatgcatac

SEQ ID NO: 152536 - RNA, 22 nt, synthetic construct
  source 1..22: mol_type = other RNA
tgcatgagacttggagtttgag

SEQ ID NO: 152537 - RNA, 22 nt, synthetic construct
  source 1..22: mol_type = other RNA
tgcatgaggcatattattgtaa

SEQ ID NO: 152538 - RNA, 22 nt, synthetic construct
  source 1..22: mol_type = other RNA
tgcatgattccccttatatggg

SEQ ID NO: 152539 - RNA, 22 nt, synthetic construct
  source 1..22: mol_type = other RNA
tgcatgcacacagagggagcgc

SEQ ID NO: 152540 - RNA, 22 nt, synthetic construct
  source 1..22: mol_type = other RNA
tgcatgcatgtctgtctgttca

SEQ ID NO: 152541 - RNA, 22 nt, synthetic construct
  source 1..22: mol_type = other RNA
tgcatgcctctgttacagctct

SEQ ID NO: 152542 - RNA, 22 nt, synthetic construct
  source 1..22: mol_type = other RNA
tgcatgctaggggctgttccca

SEQ ID NO: 152543 - RNA, 22 nt, synthetic construct
  source 1..22: mol_type = other RNA
tgcatgctcccatttgggactg

SEQ ID NO: 152544 - RNA, 22 nt, synthetic construct
  source 1..22: mol_type = other RNA
tgcatgggaggtaatactataa

SEQ ID NO: 152545 - RNA, 22 nt, synthetic construct
  source 1..22: mol_type = other RNA
tgcatggggagttttaggaaaa

SEQ ID NO: 152546 - RNA, 22 nt, synthetic construct
  source 1..22: mol_type = other RNA
tgcatggtgtaaaatacaacag

SEQ ID NO: 152547 - RNA, 22 nt, synthetic construct
  source 1..22: mol_type = other RNA
tgcatgtctgcaggagccttgc

SEQ ID NO: 152548 - RNA, 22 nt, synthetic construct
  source 1..22: mol_type = other RNA
tgcatgtctgtctgttcacatt

SEQ ID NO: 152549 - RNA, 22 nt, synthetic construct
  source 1..22: mol_type = other RNA
tgcatgtgcaggaaacttccag

SEQ ID NO: 152550 - RNA, 22 nt, synthetic construct
  source 1..22: mol_type = other RNA
tgcatgtgttgtgcacacatcc

SEQ ID NO: 152551 - RNA, 22 nt, synthetic construct
  source 1..22: mol_type = other RNA
tgcatgttatttggggattctg

SEQ ID NO: 152552 - RNA, 22 nt, synthetic construct
  source 1..22: mol_type = other RNA
tgcattaagccagtcactaaaa

SEQ ID NO: 152553 - RNA, 22 nt, synthetic construct
  source 1..22: mol_type = other RNA
tgcattaatgcttcatattttg

SEQ ID NO: 152554 - RNA, 22 nt, synthetic construct
  source 1..22: mol_type = other RNA
tgcattacatgaatggaaaatt

SEQ ID NO: 152555 - RNA, 22 nt, synthetic construct
  source 1..22: mol_type = other RNA
tgcattagagccccaagaaagc

SEQ ID NO: 152556 - RNA, 22 nt, synthetic construct
  source 1..22: mol_type = other RNA
tgcattcatactgaaggcatag

SEQ ID NO: 152557 - RNA, 22 nt, synthetic construct
  source 1..22: mol_type = other RNA
tgcattcatccaggcaaaagat

SEQ ID NO: 152558 - RNA, 22 nt, synthetic construct
  source 1..22: mol_type = other RNA
tgcattccagattgaaatctag

SEQ ID NO: 152559 - RNA, 22 nt, synthetic construct
  source 1..22: mol_type = other RNA
tgcattcccatgttcactgcag

SEQ ID NO: 152560 - RNA, 22 nt, synthetic construct
  source 1..22: mol_type = other RNA
tgcattccgcctgggcgacaga

SEQ ID NO: 152561 - RNA, 22 nt, synthetic construct
  source 1..22: mol_type = other RNA
tgcattcctgaaatgaaccaaa

SEQ ID NO: 152562 - RNA, 22 nt, synthetic construct
  source 1..22: mol_type = other RNA
tgcattcgtccctaaacactgt

SEQ ID NO: 152563 - RNA, 22 nt, synthetic construct
  source 1..22: mol_type = other RNA
tgcattctagaaaggagggact

SEQ ID NO: 152564 - RNA, 22 nt, synthetic construct
  source 1..22: mol_type = other RNA
tgcattctgtcacatagacctg

SEQ ID NO: 152565 - RNA, 22 nt, synthetic construct
  source 1..22: mol_type = other RNA
tgcattgactaccaattctccc

SEQ ID NO: 152566 - RNA, 22 nt, synthetic construct
  source 1..22: mol_type = other RNA
tgcattgcatttacttgtcatt

SEQ ID NO: 152567 - RNA, 22 nt, synthetic construct
  source 1..22: mol_type = other RNA
tgcattgtgcacttaaaattta

SEQ ID NO: 152568 - RNA, 22 nt, synthetic construct
  source 1..22: mol_type = other RNA
tgcatttacttgtcatttctgc

SEQ ID NO: 152569 - RNA, 22 nt, synthetic construct
  source 1..22: mol_type = other RNA
tgcatttattagtagttaggtg

SEQ ID NO: 152570 - RNA, 22 nt, synthetic construct
  source 1..22: mol_type = other RNA
tgcatttcggctctgtgctgag

SEQ ID NO: 152571 - RNA, 22 nt, synthetic construct
  source 1..22: mol_type = other RNA
tgcatttctctaatagctagtg

SEQ ID NO: 152572 - RNA, 22 nt, synthetic construct
  source 1..22: mol_type = other RNA
tgcatttgggacagcctagttt

SEQ ID NO: 152573 - RNA, 22 nt, synthetic construct
  source 1..22: mol_type = other RNA
tgcatttggtctcattcactag

SEQ ID NO: 152574 - RNA, 22 nt, synthetic construct
  source 1..22: mol_type = other RNA
tgcatttggtttgcaaaaattt

SEQ ID NO: 152575 - RNA, 22 nt, synthetic construct
  source 1..22: mol_type = other RNA
tgccaaaagccaagagcgaggc

SEQ ID NO: 152576 - RNA, 22 nt, synthetic construct
  source 1..22: mol_type = other RNA
tgccaaaatgattttcacaggg

SEQ ID NO: 152577 - RNA, 22 nt, synthetic construct
  source 1..22: mol_type = other RNA
tgccaaaccctacacccatcca

SEQ ID NO: 152578 - RNA, 22 nt, synthetic construct
  source 1..22: mol_type = other RNA
tgccaaactgttttccacagtg

SEQ ID NO: 152579 - RNA, 22 nt, synthetic construct
  source 1..22: mol_type = other RNA
tgccaaagattcttgtcatgaa

SEQ ID NO: 152580 - RNA, 22 nt, synthetic construct
  source 1..22: mol_type = other RNA
tgccaaattatttgagagtaag

SEQ ID NO: 152581 - RNA, 22 nt, synthetic construct
  source 1..22: mol_type = other RNA
tgccaacacatggggcattaat

SEQ ID NO: 152582 - RNA, 22 nt, synthetic construct
  source 1..22: mol_type = other RNA
tgccaacagttactttcctttt

SEQ ID NO: 152583 - RNA, 22 nt, synthetic construct
  source 1..22: mol_type = other RNA
tgccaactctggcaggtcacct

SEQ ID NO: 152584 - RNA, 22 nt, synthetic construct
  source 1..22: mol_type = other RNA
tgccaagcaacttgatcaggga

SEQ ID NO: 152585 - RNA, 22 nt, synthetic construct
  source 1..22: mol_type = other RNA
tgccaaggcttgctttggctag

SEQ ID NO: 152586 - RNA, 22 nt, synthetic construct
  source 1..22: mol_type = other RNA
tgccaagtataagatgatgata

SEQ ID NO: 152587 - RNA, 22 nt, synthetic construct
  source 1..22: mol_type = other RNA
tgccaagtcagcacttctgata

SEQ ID NO: 152588 - RNA, 22 nt, synthetic construct
  source 1..22: mol_type = other RNA
tgccaagtccgtgcatgcctct

SEQ ID NO: 152589 - RNA, 22 nt, synthetic construct
  source 1..22: mol_type = other RNA
tgccaatatcacactgtttgat

SEQ ID NO: 152590 - RNA, 22 nt, synthetic construct
  source 1..22: mol_type = other RNA
tgccaatatctatcagggctga

SEQ ID NO: 152591 - RNA, 22 nt, synthetic construct
  source 1..22: mol_type = other RNA
tgccaatcaataattctgtgcc

SEQ ID NO: 152592 - RNA, 22 nt, synthetic construct
  source 1..22: mol_type = other RNA
tgccaatttgggatatagctac

SEQ ID NO: 152593 - RNA, 22 nt, synthetic construct
  source 1..22: mol_type = other RNA
tgccacaaatggagtgacttaa

SEQ ID NO: 152594 - RNA, 22 nt, synthetic construct
  source 1..22: mol_type = other RNA
tgccacaccacatccagctaat

SEQ ID NO: 152595 - RNA, 22 nt, synthetic construct
  source 1..22: mol_type = other RNA
tgccacactccagcatccctcc

SEQ ID NO: 152596 - RNA, 22 nt, synthetic construct
  source 1..22: mol_type = other RNA
tgccacataaatcacaggaaag

SEQ ID NO: 152597 - RNA, 22 nt, synthetic construct
  source 1..22: mol_type = other RNA
tgccacattcaacaacatggat

SEQ ID NO: 152598 - RNA, 22 nt, synthetic construct
  source 1..22: mol_type = other RNA
tgccacattttaccaaaacagc

SEQ ID NO: 152599 - RNA, 22 nt, synthetic construct
  source 1..22: mol_type = other RNA
tgccacattttttggtttgtat

SEQ ID NO: 152600 - RNA, 22 nt, synthetic construct
  source 1..22: mol_type = other RNA
tgccactacttagcccctgctg

SEQ ID NO: 152601 - RNA, 22 nt, synthetic construct
  source 1..22: mol_type = other RNA
tgccactcaaaactgaagttta

SEQ ID NO: 152602 - RNA, 22 nt, synthetic construct
  source 1..22: mol_type = other RNA
tgccagagttggcacagccagt

SEQ ID NO: 152603 - RNA, 22 nt, synthetic construct
  source 1..22: mol_type = other RNA
tgccagatgttctaatttcttt

SEQ ID NO: 152604 - RNA, 22 nt, synthetic construct
  source 1..22: mol_type = other RNA
tgccagcaccagatactcaatc

SEQ ID NO: 152605 - RNA, 22 nt, synthetic construct
  source 1..22: mol_type = other RNA
tgccagccacccttgctgcttc

SEQ ID NO: 152606 - RNA, 22 nt, synthetic construct
  source 1..22: mol_type = other RNA
tgccagctaacttttaacccac

SEQ ID NO: 152607 - RNA, 22 nt, synthetic construct
  source 1..22: mol_type = other RNA
tgccagctttggctgaaatgct

SEQ ID NO: 152608 - RNA, 22 nt, synthetic construct
  source 1..22: mol_type = other RNA
tgccaggacaattgaatgggga

SEQ ID NO: 152609 - RNA, 22 nt, synthetic construct
  source 1..22: mol_type = other RNA
tgccagggcgctcctctcccgc

SEQ ID NO: 152610 - RNA, 22 nt, synthetic construct
  source 1..22: mol_type = other RNA
tgccaggtagggaggggtattc

SEQ ID NO: 152611 - RNA, 22 nt, synthetic construct
  source 1..22: mol_type = other RNA
tgccaggtttgtgcttggatat

SEQ ID NO: 152612 - RNA, 22 nt, synthetic construct
  source 1..22: mol_type = other RNA
tgccagtgaactccagtctggg

SEQ ID NO: 152613 - RNA, 22 nt, synthetic construct
  source 1..22: mol_type = other RNA
tgccagtgcaaacctcctggtt

SEQ ID NO: 152614 - RNA, 22 nt, synthetic construct
  source 1..22: mol_type = other RNA
tgccagtgttttaaagcaggga

SEQ ID NO: 152615 - RNA, 22 nt, synthetic construct
  source 1..22: mol_type = other RNA
tgccagttttctggaaactcaa

SEQ ID NO: 152616 - RNA, 22 nt, synthetic construct
  source 1..22: mol_type = other RNA
tgccatagagctttaaagttaa

SEQ ID NO: 152617 - RNA, 22 nt, synthetic construct
  source 1..22: mol_type = other RNA
tgccatagagggagcatcttcc

SEQ ID NO: 152618 - RNA, 22 nt, synthetic construct
  source 1..22: mol_type = other RNA
tgccatatgtagggcaccgtga

SEQ ID NO: 152619 - RNA, 22 nt, synthetic construct
  source 1..22: mol_type = other RNA
tgccatcacattttgaatcatg

SEQ ID NO: 152620 - RNA, 22 nt, synthetic construct
  source 1..22: mol_type = other RNA
tgccatcattttatgaaaccat

SEQ ID NO: 152621 - RNA, 22 nt, synthetic construct
  source 1..22: mol_type = other RNA
tgccatcctggatttgggaagg

SEQ ID NO: 152622 - RNA, 22 nt, synthetic construct
  source 1..22: mol_type = other RNA
tgccatctccttaatccagtct

SEQ ID NO: 152623 - RNA, 22 nt, synthetic construct
  source 1..22: mol_type = other RNA
tgccatcttcaagatttcatag

SEQ ID NO: 152624 - RNA, 22 nt, synthetic construct
  source 1..22: mol_type = other RNA
tgccatcttgcataagtttttt

SEQ ID NO: 152625 - RNA, 22 nt, synthetic construct
  source 1..22: mol_type = other RNA
tgccatggtgttaaatatttac

SEQ ID NO: 152626 - RNA, 22 nt, synthetic construct
  source 1..22: mol_type = other RNA
tgccatgtgttttgttttgaat

SEQ ID NO: 152627 - RNA, 22 nt, synthetic construct
  source 1..22: mol_type = other RNA
tgccattctcccagttgtcaga

SEQ ID NO: 152628 - RNA, 22 nt, synthetic construct
  source 1..22: mol_type = other RNA
tgcccaaggaaggcagggtagg

SEQ ID NO: 152629 - RNA, 22 nt, synthetic construct
  source 1..22: mol_type = other RNA
tgcccaatcaaatccagtcttc

SEQ ID NO: 152630 - RNA, 22 nt, synthetic construct
  source 1..22: mol_type = other RNA
tgcccaatgcctgcgattgcag

SEQ ID NO: 152631 - RNA, 22 nt, synthetic construct
  source 1..22: mol_type = other RNA
tgcccacctgacaagtagtaca

SEQ ID NO: 152632 - RNA, 22 nt, synthetic construct
  source 1..22: mol_type = other RNA
tgcccactcttatatcctaaac

SEQ ID NO: 152633 - RNA, 22 nt, synthetic construct
  source 1..22: mol_type = other RNA
tgcccagactggagttcactgg

SEQ ID NO: 152634 - RNA, 22 nt, synthetic construct
  source 1..22: mol_type = other RNA
tgcccaggctgacttagagggc

SEQ ID NO: 152635 - RNA, 22 nt, synthetic construct
  source 1..22: mol_type = other RNA
tgcccaggctggtcttgtactc

SEQ ID NO: 152636 - RNA, 22 nt, synthetic construct
  source 1..22: mol_type = other RNA
tgcccatcctatctaagcctac

SEQ ID NO: 152637 - RNA, 22 nt, synthetic construct
  source 1..22: mol_type = other RNA
tgcccatcctctatttttgtct

SEQ ID NO: 152638 - RNA, 22 nt, synthetic construct
  source 1..22: mol_type = other RNA
tgcccatgtgcattattgtaat

SEQ ID NO: 152639 - RNA, 22 nt, synthetic construct
  source 1..22: mol_type = other RNA
tgcccattaaaaccatgaaaat

SEQ ID NO: 152640 - RNA, 22 nt, synthetic construct
  source 1..22: mol_type = other RNA
tgcccattaacagatgaatgaa

SEQ ID NO: 152641 - RNA, 22 nt, synthetic construct
  source 1..22: mol_type = other RNA
tgcccattataaaataggaagt

SEQ ID NO: 152642 - RNA, 22 nt, synthetic construct
  source 1..22: mol_type = other RNA
tgccccactccacacacgaagt

SEQ ID NO: 152643 - RNA, 22 nt, synthetic construct
  source 1..22: mol_type = other RNA
tgccccagctaaaatgttcaga

SEQ ID NO: 152644 - RNA, 22 nt, synthetic construct
  source 1..22: mol_type = other RNA
tgccccatgtgttggcactgaa

SEQ ID NO: 152645 - RNA, 22 nt, synthetic construct
  source 1..22: mol_type = other RNA
tgccccattgcactccacgtgg

SEQ ID NO: 152646 - RNA, 22 nt, synthetic construct
  source 1..22: mol_type = other RNA
tgccccctcttctctcctttga

SEQ ID NO: 152647 - RNA, 22 nt, synthetic construct
  source 1..22: mol_type = other RNA
tgccccgggcctggttagggag

SEQ ID NO: 152648 - RNA, 22 nt, synthetic construct
  source 1..22: mol_type = other RNA
tgcccctccactccacaaagcc

SEQ ID NO: 152649 - RNA, 22 nt, synthetic construct
  source 1..22: mol_type = other RNA
tgcccctgtagcagacactggg

SEQ ID NO: 152650 - RNA, 22 nt, synthetic construct
  source 1..22: mol_type = other RNA
tgccccttatcctcttctgaag

SEQ ID NO: 152651 - RNA, 22 nt, synthetic construct
  source 1..22: mol_type = other RNA
tgcccctttgagcagagtcctg

SEQ ID NO: 152652 - RNA, 22 nt, synthetic construct
  source 1..22: mol_type = other RNA
tgcccgcgaaggcgtgtaaact

SEQ ID NO: 152653 - RNA, 22 nt, synthetic construct
  source 1..22: mol_type = other RNA
tgcccggccagacattttattt

SEQ ID NO: 152654 - RNA, 22 nt, synthetic construct
  source 1..22: mol_type = other RNA
tgccctacatatggcaattcca

SEQ ID NO: 152655 - RNA, 22 nt, synthetic construct
  source 1..22: mol_type = other RNA
tgccctcattgaagctactatt

SEQ ID NO: 152656 - RNA, 22 nt, synthetic construct
  source 1..22: mol_type = other RNA
tgccctgtgaaaatcattttgg

SEQ ID NO: 152657 - RNA, 22 nt, synthetic construct
  source 1..22: mol_type = other RNA
tgcccttatttaatgtgctgtc

SEQ ID NO: 152658 - RNA, 22 nt, synthetic construct
  source 1..22: mol_type = other RNA
tgccgaggcagagagagtaact

SEQ ID NO: 152659 - RNA, 22 nt, synthetic construct
  source 1..22: mol_type = other RNA
tgccgcagagcaagcacgttag

SEQ ID NO: 152660 - RNA, 22 nt, synthetic construct
  source 1..22: mol_type = other RNA
tgccgcgcgagggagcgtacgg

SEQ ID NO: 152661 - RNA, 22 nt, synthetic construct
  source 1..22: mol_type = other RNA
tgccgcgttttttgtccaccag

SEQ ID NO: 152662 - RNA, 22 nt, synthetic construct
  source 1..22: mol_type = other RNA
tgccgctggtgaaaaaatggtg

SEQ ID NO: 152663 - RNA, 22 nt, synthetic construct
  source 1..22: mol_type = other RNA
tgccgcttcgcctttctcgcag

SEQ ID NO: 152664 - RNA, 22 nt, synthetic construct
  source 1..22: mol_type = other RNA
tgccggctgttaggtattattt

SEQ ID NO: 152665 - RNA, 22 nt, synthetic construct
  source 1..22: mol_type = other RNA
tgccgggacaagagtctgcaga

SEQ ID NO: 152666 - RNA, 22 nt, synthetic construct
  source 1..22: mol_type = other RNA
tgccgggcttggtatgcatctt

SEQ ID NO: 152667 - RNA, 22 nt, synthetic construct
  source 1..22: mol_type = other RNA
tgccggtaatcacagctactca

SEQ ID NO: 152668 - RNA, 22 nt, synthetic construct
  source 1..22: mol_type = other RNA
tgcctaacaccagtaagattct

SEQ ID NO: 152669 - RNA, 22 nt, synthetic construct
  source 1..22: mol_type = other RNA
tgcctaagtaatgctggccagt

SEQ ID NO: 152670 - RNA, 22 nt, synthetic construct
  source 1..22: mol_type = other RNA
tgcctaagtctcaggatacaaa

SEQ ID NO: 152671 - RNA, 22 nt, synthetic construct
  source 1..22: mol_type = other RNA
tgcctaatctctaggcttaaaa

SEQ ID NO: 152672 - RNA, 22 nt, synthetic construct
  source 1..22: mol_type = other RNA
tgcctacatagtccactttcca

SEQ ID NO: 152673 - RNA, 22 nt, synthetic construct
  source 1..22: mol_type = other RNA
tgcctactagccagtgattgga

SEQ ID NO: 152674 - RNA, 22 nt, synthetic construct
  source 1..22: mol_type = other RNA
tgcctagaaaggaattgtaatc

SEQ ID NO: 152675 - RNA, 22 nt, synthetic construct
  source 1..22: mol_type = other RNA
tgcctagatgattcgcattgct

SEQ ID NO: 152676 - RNA, 22 nt, synthetic construct
  source 1..22: mol_type = other RNA
tgcctagatttcaatctggaat

SEQ ID NO: 152677 - RNA, 22 nt, synthetic construct
  source 1..22: mol_type = other RNA
tgcctataaaatgctggaaatt

SEQ ID NO: 152678 - RNA, 22 nt, synthetic construct
  source 1..22: mol_type = other RNA
tgcctataattcaattttcatg

SEQ ID NO: 152679 - RNA, 22 nt, synthetic construct
  source 1..22: mol_type = other RNA
tgcctatagacagcatccccag

SEQ ID NO: 152680 - RNA, 22 nt, synthetic construct
  source 1..22: mol_type = other RNA
tgcctatgaaatcttgaagatg

SEQ ID NO: 152681 - RNA, 22 nt, synthetic construct
  source 1..22: mol_type = other RNA
tgcctattctggggctcaagta

SEQ ID NO: 152682 - RNA, 22 nt, synthetic construct
  source 1..22: mol_type = other RNA
tgcctcaaaatcaacattgcct

SEQ ID NO: 152683 - RNA, 22 nt, synthetic construct
  source 1..22: mol_type = other RNA
tgcctcaaattagtcatagcag

SEQ ID NO: 152684 - RNA, 22 nt, synthetic construct
  source 1..22: mol_type = other RNA
tgcctcagccgccgcagaggcc

SEQ ID NO: 152685 - RNA, 22 nt, synthetic construct
  source 1..22: mol_type = other RNA
tgcctcagcctcccgagtatct

SEQ ID NO: 152686 - RNA, 22 nt, synthetic construct
  source 1..22: mol_type = other RNA
tgcctcagttgacatcctttaa

SEQ ID NO: 152687 - RNA, 22 nt, synthetic construct
  source 1..22: mol_type = other RNA
tgcctcatgcatccacattttg

SEQ ID NO: 152688 - RNA, 22 nt, synthetic construct
  source 1..22: mol_type = other RNA
tgcctccacaggctttgacttc

SEQ ID NO: 152689 - RNA, 22 nt, synthetic construct
  source 1..22: mol_type = other RNA
tgcctccatatgggatgcttaa

SEQ ID NO: 152690 - RNA, 22 nt, synthetic construct
  source 1..22: mol_type = other RNA
tgcctcccgggtccaggcagtt

SEQ ID NO: 152691 - RNA, 22 nt, synthetic construct
  source 1..22: mol_type = other RNA
tgcctcccgggtttaagcgatt

SEQ ID NO: 152692 - RNA, 22 nt, synthetic construct
  source 1..22: mol_type = other RNA
tgcctcctgggttcaggtgcct

SEQ ID NO: 152693 - RNA, 22 nt, synthetic construct
  source 1..22: mol_type = other RNA
tgcctcgaaggcctgcttcatt

SEQ ID NO: 152694 - RNA, 22 nt, synthetic construct
  source 1..22: mol_type = other RNA
tgcctcggcacagctctcatga

SEQ ID NO: 152695 - RNA, 22 nt, synthetic construct
  source 1..22: mol_type = other RNA
tgcctctacatcacagacaggg

SEQ ID NO: 152696 - RNA, 22 nt, synthetic construct
  source 1..22: mol_type = other RNA
tgcctctccagggaggaatcct

SEQ ID NO: 152697 - RNA, 22 nt, synthetic construct
  source 1..22: mol_type = other RNA
tgcctctcccaccatctctctg

SEQ ID NO: 152698 - RNA, 22 nt, synthetic construct
  source 1..22: mol_type = other RNA
tgcctctgtgctagccttcttg

SEQ ID NO: 152699 - RNA, 22 nt, synthetic construct
  source 1..22: mol_type = other RNA
tgcctctgttacagctcttctc

SEQ ID NO: 152700 - RNA, 22 nt, synthetic construct
  source 1..22: mol_type = other RNA
tgcctcttcctgttgctttaac

SEQ ID NO: 152701 - RNA, 22 nt, synthetic construct
  source 1..22: mol_type = other RNA
tgcctctttgctaataagtgag

SEQ ID NO: 152702 - RNA, 22 nt, synthetic construct
  source 1..22: mol_type = other RNA
tgcctgacaaagtatgagaaat

SEQ ID NO: 152703 - RNA, 22 nt, synthetic construct
  source 1..22: mol_type = other RNA
tgcctgacagcaaataaacaaa

SEQ ID NO: 152704 - RNA, 22 nt, synthetic construct
  source 1..22: mol_type = other RNA
tgcctgaggtctcaaaatttaa

SEQ ID NO: 152705 - RNA, 22 nt, synthetic construct
  source 1..22: mol_type = other RNA
tgcctgcagactgcaggtcttc

SEQ ID NO: 152706 - RNA, 22 nt, synthetic construct
  source 1..22: mol_type = other RNA
tgcctgccatagagggagcatc

SEQ ID NO: 152707 - RNA, 22 nt, synthetic construct
  source 1..22: mol_type = other RNA
tgcctgccgcagagcaagcacg

SEQ ID NO: 152708 - RNA, 22 nt, synthetic construct
  source 1..22: mol_type = other RNA
tgcctgcgtccgtagaccgagg

SEQ ID NO: 152709 - RNA, 22 nt, synthetic construct
  source 1..22: mol_type = other RNA
tgcctggacccgggaggcagat

SEQ ID NO: 152710 - RNA, 22 nt, synthetic construct
  source 1..22: mol_type = other RNA
tgcctggatgaatgcagtggct

SEQ ID NO: 152711 - RNA, 22 nt, synthetic construct
  source 1..22: mol_type = other RNA
tgcctgggtaattaaacatttt

SEQ ID NO: 152712 - RNA, 22 nt, synthetic construct
  source 1..22: mol_type = other RNA
tgcctggtcctgagggctttgt

SEQ ID NO: 152713 - RNA, 22 nt, synthetic construct
  source 1..22: mol_type = other RNA
tgcctgtagttttggtgtcatt

SEQ ID NO: 152714 - RNA, 22 nt, synthetic construct
  source 1..22: mol_type = other RNA
tgcctgtgcttgtctctctctt

SEQ ID NO: 152715 - RNA, 22 nt, synthetic construct
  source 1..22: mol_type = other RNA
tgcctgtgcttttctcgtgcat

SEQ ID NO: 152716 - RNA, 22 nt, synthetic construct
  source 1..22: mol_type = other RNA
tgcctgtggtccctgctactca

SEQ ID NO: 152717 - RNA, 22 nt, synthetic construct
  source 1..22: mol_type = other RNA
tgccttcaagttgctttttctt

SEQ ID NO: 152718 - RNA, 22 nt, synthetic construct
  source 1..22: mol_type = other RNA
tgccttcaatgtttggtagatt

SEQ ID NO: 152719 - RNA, 22 nt, synthetic construct
  source 1..22: mol_type = other RNA
tgccttcagaaggagtccagtc

SEQ ID NO: 152720 - RNA, 22 nt, synthetic construct
  source 1..22: mol_type = other RNA
tgccttcagctatggtgttatt

SEQ ID NO: 152721 - RNA, 22 nt, synthetic construct
  source 1..22: mol_type = other RNA
tgccttcagtatgaatgcacgt

SEQ ID NO: 152722 - RNA, 22 nt, synthetic construct
  source 1..22: mol_type = other RNA
tgccttcctgacctctgcagtt

SEQ ID NO: 152723 - RNA, 22 nt, synthetic construct
  source 1..22: mol_type = other RNA
tgccttccttgggcacactccc

SEQ ID NO: 152724 - RNA, 22 nt, synthetic construct
  source 1..22: mol_type = other RNA
tgccttcgcagggtgaaacttg

SEQ ID NO: 152725 - RNA, 22 nt, synthetic construct
  source 1..22: mol_type = other RNA
tgccttgacctcccaaaggact

SEQ ID NO: 152726 - RNA, 22 nt, synthetic construct
  source 1..22: mol_type = other RNA
tgccttgaggtgattcagagtg

SEQ ID NO: 152727 - RNA, 22 nt, synthetic construct
  source 1..22: mol_type = other RNA
tgccttgatccattacatcaac

SEQ ID NO: 152728 - RNA, 22 nt, synthetic construct
  source 1..22: mol_type = other RNA
tgccttggccttctgaggagct

SEQ ID NO: 152729 - RNA, 22 nt, synthetic construct
  source 1..22: mol_type = other RNA
tgcctttcactttgatcataca

SEQ ID NO: 152730 - RNA, 22 nt, synthetic construct
  source 1..22: mol_type = other RNA
tgcctttcagcatagcagaacc

SEQ ID NO: 152731 - RNA, 22 nt, synthetic construct
  source 1..22: mol_type = other RNA
tgcctttcgcttttggagctat

SEQ ID NO: 152732 - RNA, 22 nt, synthetic construct
  source 1..22: mol_type = other RNA
tgcctttgttcatcatcttttg

SEQ ID NO: 152733 - RNA, 22 nt, synthetic construct
  source 1..22: mol_type = other RNA
tgccttttcactcttagtgatg

SEQ ID NO: 152734 - RNA, 22 nt, synthetic construct
  source 1..22: mol_type = other RNA
tgcgaaacacactcgtgtatga

SEQ ID NO: 152735 - RNA, 22 nt, synthetic construct
  source 1..22: mol_type = other RNA
tgcgaaatagtagttgctcaga

SEQ ID NO: 152736 - RNA, 22 nt, synthetic construct
  source 1..22: mol_type = other RNA
tgcgaaggcaatgtaacacagt

SEQ ID NO: 152737 - RNA, 22 nt, synthetic construct
  source 1..22: mol_type = other RNA
tgcgaatcatctaggcatataa

SEQ ID NO: 152738 - RNA, 22 nt, synthetic construct
  source 1..22: mol_type = other RNA
tgcgaatttacttttaaactgt

SEQ ID NO: 152739 - RNA, 22 nt, synthetic construct
  source 1..22: mol_type = other RNA
tgcgacatatcagggatcacag

SEQ ID NO: 152740 - RNA, 22 nt, synthetic construct
  source 1..22: mol_type = other RNA
tgcgacctcgaagcacaaccac

SEQ ID NO: 152741 - RNA, 22 nt, synthetic construct
  source 1..22: mol_type = other RNA
tgcgagaaaggcgaagcggcag

SEQ ID NO: 152742 - RNA, 22 nt, synthetic construct
  source 1..22: mol_type = other RNA
tgcgagcggcgggcttcgcctt

SEQ ID NO: 152743 - RNA, 22 nt, synthetic construct
  source 1..22: mol_type = other RNA
tgcgagtgtgaacgatggtttc

SEQ ID NO: 152744 - RNA, 22 nt, synthetic construct
  source 1..22: mol_type = other RNA
tgcgatgatcaaaaccaggagg

SEQ ID NO: 152745 - RNA, 22 nt, synthetic construct
  source 1..22: mol_type = other RNA
tgcgattggttggactccaccc

SEQ ID NO: 152746 - RNA, 22 nt, synthetic construct
  source 1..22: mol_type = other RNA
tgcgattgtttcagtgtgtcca

SEQ ID NO: 152747 - RNA, 22 nt, synthetic construct
  source 1..22: mol_type = other RNA
tgcgcaattgcagccagagagt

SEQ ID NO: 152748 - RNA, 22 nt, synthetic construct
  source 1..22: mol_type = other RNA
tgcgcagaactggggcttgaac

SEQ ID NO: 152749 - RNA, 22 nt, synthetic construct
  source 1..22: mol_type = other RNA
tgcgccaagcagggacgggcgg

SEQ ID NO: 152750 - RNA, 22 nt, synthetic construct
  source 1..22: mol_type = other RNA
tgcgccactgcactccagcctt

SEQ ID NO: 152751 - RNA, 22 nt, synthetic construct
  source 1..22: mol_type = other RNA
tgcgccatcacacccagtatac

SEQ ID NO: 152752 - RNA, 22 nt, synthetic construct
  source 1..22: mol_type = other RNA
tgcgccttaaagccacactctt

SEQ ID NO: 152753 - RNA, 22 nt, synthetic construct
  source 1..22: mol_type = other RNA
tgcgcgtcaaaagatgctggtg

SEQ ID NO: 152754 - RNA, 22 nt, synthetic construct
  source 1..22: mol_type = other RNA
tgcggcaggcattgtgctcagt

SEQ ID NO: 152755 - RNA, 22 nt, synthetic construct
  source 1..22: mol_type = other RNA
tgcggcggctgaggcagcccga

SEQ ID NO: 152756 - RNA, 22 nt, synthetic construct
  source 1..22: mol_type = other RNA
tgcggcttgattagcttcctca

SEQ ID NO: 152757 - RNA, 22 nt, synthetic construct
  source 1..22: mol_type = other RNA
tgcgggattatttggaagagag

SEQ ID NO: 152758 - RNA, 22 nt, synthetic construct
  source 1..22: mol_type = other RNA
tgcgggcccagctcttttgtgt

SEQ ID NO: 152759 - RNA, 22 nt, synthetic construct
  source 1..22: mol_type = other RNA
tgcggggtttcagcacaatact

SEQ ID NO: 152760 - RNA, 22 nt, synthetic construct
  source 1..22: mol_type = other RNA
tgcggtcttttagccaacaacc

SEQ ID NO: 152761 - RNA, 22 nt, synthetic construct
  source 1..22: mol_type = other RNA
tgcggtgacgtgagatcatgcc

SEQ ID NO: 152762 - RNA, 22 nt, synthetic construct
  source 1..22: mol_type = other RNA
tgcgtccgtagaccgaggaaac

SEQ ID NO: 152763 - RNA, 22 nt, synthetic construct
  source 1..22: mol_type = other RNA
tgcgtctgtgattatcagggat

SEQ ID NO: 152764 - RNA, 22 nt, synthetic construct
  source 1..22: mol_type = other RNA
tgcgtgaatctgttcctgggtt

SEQ ID NO: 152765 - RNA, 22 nt, synthetic construct
  source 1..22: mol_type = other RNA
tgcgtggttcacacctgtagtc

SEQ ID NO: 152766 - RNA, 22 nt, synthetic construct
  source 1..22: mol_type = other RNA
tgcgtggtttattcatataatg

SEQ ID NO: 152767 - RNA, 22 nt, synthetic construct
  source 1..22: mol_type = other RNA
tgcgtgtgaaaccaagcaagta

SEQ ID NO: 152768 - RNA, 22 nt, synthetic construct
  source 1..22: mol_type = other RNA
tgcgtgttattttaatcgaatc

SEQ ID NO: 152769 - RNA, 22 nt, synthetic construct
  source 1..22: mol_type = other RNA
tgcgttgaccgctttcgtgagg

SEQ ID NO: 152770 - RNA, 22 nt, synthetic construct
  source 1..22: mol_type = other RNA
tgcgtttgttagatctgggata

SEQ ID NO: 152771 - RNA, 22 nt, synthetic construct
  source 1..22: mol_type = other RNA
tgctaaacagtacagtagtaaa

SEQ ID NO: 152772 - RNA, 22 nt, synthetic construct
  source 1..22: mol_type = other RNA
tgctaaactgttccccaagcca

SEQ ID NO: 152773 - RNA, 22 nt, synthetic construct
  source 1..22: mol_type = other RNA
tgctaacaccttgaactgggac

SEQ ID NO: 152774 - RNA, 22 nt, synthetic construct
  source 1..22: mol_type = other RNA
tgctaacatgaactactcaaag

SEQ ID NO: 152775 - RNA, 22 nt, synthetic construct
  source 1..22: mol_type = other RNA
tgctaacgtgcttgctctgcgg

SEQ ID NO: 152776 - RNA, 22 nt, synthetic construct
  source 1..22: mol_type = other RNA
tgctaactgcagaggtcaggaa

SEQ ID NO: 152777 - RNA, 22 nt, synthetic construct
  source 1..22: mol_type = other RNA
tgctaagtaaaataaacaagtc

SEQ ID NO: 152778 - RNA, 22 nt, synthetic construct
  source 1..22: mol_type = other RNA
tgctaagtgtttaggatataag

SEQ ID NO: 152779 - RNA, 22 nt, synthetic construct
  source 1..22: mol_type = other RNA
tgctaataaaaacatatgcagg

SEQ ID NO: 152780 - RNA, 22 nt, synthetic construct
  source 1..22: mol_type = other RNA
tgctaataagtgagtttgacct

SEQ ID NO: 152781 - RNA, 22 nt, synthetic construct
  source 1..22: mol_type = other RNA
tgctaataatgatgactatgaa

SEQ ID NO: 152782 - RNA, 22 nt, synthetic construct
  source 1..22: mol_type = other RNA
tgctaatggtccttgctgaaga

SEQ ID NO: 152783 - RNA, 22 nt, synthetic construct
  source 1..22: mol_type = other RNA
tgctaattcattgtacatgaag

SEQ ID NO: 152784 - RNA, 22 nt, synthetic construct
  source 1..22: mol_type = other RNA
tgctaattgtttgttgggttta

SEQ ID NO: 152785 - RNA, 22 nt, synthetic construct
  source 1..22: mol_type = other RNA
tgctacaggggcattccctgtc

SEQ ID NO: 152786 - RNA, 22 nt, synthetic construct
  source 1..22: mol_type = other RNA
tgctacctcaaattgtgtgttc

SEQ ID NO: 152787 - RNA, 22 nt, synthetic construct
  source 1..22: mol_type = other RNA
tgctacgaatgaactcctatag

SEQ ID NO: 152788 - RNA, 22 nt, synthetic construct
  source 1..22: mol_type = other RNA
tgctactagcaagctaataatt

SEQ ID NO: 152789 - RNA, 22 nt, synthetic construct
  source 1..22: mol_type = other RNA
tgctactcaaagtttagttatt

SEQ ID NO: 152790 - RNA, 22 nt, synthetic construct
  source 1..22: mol_type = other RNA
tgctactcaggagattaaggct

SEQ ID NO: 152791 - RNA, 22 nt, synthetic construct
  source 1..22: mol_type = other RNA
tgctacttgtggggctgaggtg

SEQ ID NO: 152792 - RNA, 22 nt, synthetic construct
  source 1..22: mol_type = other RNA
tgctagagctgctgtaacaaag

SEQ ID NO: 152793 - RNA, 22 nt, synthetic construct
  source 1..22: mol_type = other RNA
tgctagatgctaaacagtacag

SEQ ID NO: 152794 - RNA, 22 nt, synthetic construct
  source 1..22: mol_type = other RNA
tgctagccttcttggagtaaac

SEQ ID NO: 152795 - RNA, 22 nt, synthetic construct
  source 1..22: mol_type = other RNA
tgctaggggctgttcccagata

SEQ ID NO: 152796 - RNA, 22 nt, synthetic construct
  source 1..22: mol_type = other RNA
tgctagtagcagaatccccaaa

SEQ ID NO: 152797 - RNA, 22 nt, synthetic construct
  source 1..22: mol_type = other RNA
tgctagtattttgttgacatcc

SEQ ID NO: 152798 - RNA, 22 nt, synthetic construct
  source 1..22: mol_type = other RNA
tgctagtggtaactagatgcct

SEQ ID NO: 152799 - RNA, 22 nt, synthetic construct
  source 1..22: mol_type = other RNA
tgctagtgtcctcaggctccag

SEQ ID NO: 152800 - RNA, 22 nt, synthetic construct
  source 1..22: mol_type = other RNA
tgctataaacttccctctcagt

SEQ ID NO: 152801 - RNA, 22 nt, synthetic construct
  source 1..22: mol_type = other RNA
tgctataaagaacatgattggg

SEQ ID NO: 152802 - RNA, 22 nt, synthetic construct
  source 1..22: mol_type = other RNA
tgctatacaaccggaaaatgct

SEQ ID NO: 152803 - RNA, 22 nt, synthetic construct
  source 1..22: mol_type = other RNA
tgctatcattttaaagggataa

SEQ ID NO: 152804 - RNA, 22 nt, synthetic construct
  source 1..22: mol_type = other RNA
tgctatccagaagagaatggct

SEQ ID NO: 152805 - RNA, 22 nt, synthetic construct
  source 1..22: mol_type = other RNA
tgctatccagtctctgcaacat

SEQ ID NO: 152806 - RNA, 22 nt, synthetic construct
  source 1..22: mol_type = other RNA
tgctatgaaaattggcgtacat

SEQ ID NO: 152807 - RNA, 22 nt, synthetic construct
  source 1..22: mol_type = other RNA
tgctatgaaatgtggtttttgg

SEQ ID NO: 152808 - RNA, 22 nt, synthetic construct
  source 1..22: mol_type = other RNA
tgctatgactaatttgaggcat

SEQ ID NO: 152809 - RNA, 22 nt, synthetic construct
  source 1..22: mol_type = other RNA
tgctatgcatactttggaaggt

SEQ ID NO: 152810 - RNA, 22 nt, synthetic construct
  source 1..22: mol_type = other RNA
tgctatgctgaaaggcatgaaa

SEQ ID NO: 152811 - RNA, 22 nt, synthetic construct
  source 1..22: mol_type = other RNA
tgctatgtaatctcatggaagt

SEQ ID NO: 152812 - RNA, 22 nt, synthetic construct
  source 1..22: mol_type = other RNA
tgctattataaatggcatcttt

SEQ ID NO: 152813 - RNA, 22 nt, synthetic construct
  source 1..22: mol_type = other RNA
tgctattcaacaggtataaagt

SEQ ID NO: 152814 - RNA, 22 nt, synthetic construct
  source 1..22: mol_type = other RNA
tgctattcaagacaagcaagga

SEQ ID NO: 152815 - RNA, 22 nt, synthetic construct
  source 1..22: mol_type = other RNA
tgctattctctttctgaaattc

SEQ ID NO: 152816 - RNA, 22 nt, synthetic construct
  source 1..22: mol_type = other RNA
tgctattgataaatctaaagcc

SEQ ID NO: 152817 - RNA, 22 nt, synthetic construct
  source 1..22: mol_type = other RNA
tgctattgttgaattgttggag

SEQ ID NO: 152818 - RNA, 22 nt, synthetic construct
  source 1..22: mol_type = other RNA
tgctattttattagatagtggt

SEQ ID NO: 152819 - RNA, 22 nt, synthetic construct
  source 1..22: mol_type = other RNA
tgctcaaaggggcattccgtgg

SEQ ID NO: 152820 - RNA, 22 nt, synthetic construct
  source 1..22: mol_type = other RNA
tgctcacacttactaaatgatc

SEQ ID NO: 152821 - RNA, 22 nt, synthetic construct
  source 1..22: mol_type = other RNA
tgctcacatttagtttcatcta

SEQ ID NO: 152822 - RNA, 22 nt, synthetic construct
  source 1..22: mol_type = other RNA
tgctcaccgcaacatctgcctc

SEQ ID NO: 152823 - RNA, 22 nt, synthetic construct
  source 1..22: mol_type = other RNA
tgctcactgcaacctttgtctc

SEQ ID NO: 152824 - RNA, 22 nt, synthetic construct
  source 1..22: mol_type = other RNA
tgctcactgtctccatgtcctc

SEQ ID NO: 152825 - RNA, 22 nt, synthetic construct
  source 1..22: mol_type = other RNA
tgctcactttgggattagctta

SEQ ID NO: 152826 - RNA, 22 nt, synthetic construct
  source 1..22: mol_type = other RNA
tgctcagaaaattttcttttgt

SEQ ID NO: 152827 - RNA, 22 nt, synthetic construct
  source 1..22: mol_type = other RNA
tgctcagaagctttcagactta

SEQ ID NO: 152828 - RNA, 22 nt, synthetic construct
  source 1..22: mol_type = other RNA
tgctcaggagtaactgctcctc

SEQ ID NO: 152829 - RNA, 22 nt, synthetic construct
  source 1..22: mol_type = other RNA
tgctcagggtgcgacctcgaag

SEQ ID NO: 152830 - RNA, 22 nt, synthetic construct
  source 1..22: mol_type = other RNA
tgctcagtccctcaccttctgc

SEQ ID NO: 152831 - RNA, 22 nt, synthetic construct
  source 1..22: mol_type = other RNA
tgctcagtgggttcaattatgt

SEQ ID NO: 152832 - RNA, 22 nt, synthetic construct
  source 1..22: mol_type = other RNA
tgctcagtggttctgcgtgtta

SEQ ID NO: 152833 - RNA, 22 nt, synthetic construct
  source 1..22: mol_type = other RNA
tgctcagtttcaaaagctcccc

SEQ ID NO: 152834 - RNA, 22 nt, synthetic construct
  source 1..22: mol_type = other RNA
tgctcataatagtctcacgata

SEQ ID NO: 152835 - RNA, 22 nt, synthetic construct
  source 1..22: mol_type = other RNA
tgctcataattaaagagagtaa

SEQ ID NO: 152836 - RNA, 22 nt, synthetic construct
  source 1..22: mol_type = other RNA
tgctcattcatctgcagtgtcc

SEQ ID NO: 152837 - RNA, 22 nt, synthetic construct
  source 1..22: mol_type = other RNA
tgctccagagaagttttccagg

SEQ ID NO: 152838 - RNA, 22 nt, synthetic construct
  source 1..22: mol_type = other RNA
tgctccagtatgacctcctccc

SEQ ID NO: 152839 - RNA, 22 nt, synthetic construct
  source 1..22: mol_type = other RNA
tgctccatagcttcctaagaaa

SEQ ID NO: 152840 - RNA, 22 nt, synthetic construct
  source 1..22: mol_type = other RNA
tgctcccatttgggactgagac

SEQ ID NO: 152841 - RNA, 22 nt, synthetic construct
  source 1..22: mol_type = other RNA
tgctccctaaatacacatgttg

SEQ ID NO: 152842 - RNA, 22 nt, synthetic construct
  source 1..22: mol_type = other RNA
tgctccctctatggcaggcacc

SEQ ID NO: 152843 - RNA, 22 nt, synthetic construct
  source 1..22: mol_type = other RNA
tgctccctctgccgcctggggc

SEQ ID NO: 152844 - RNA, 22 nt, synthetic construct
  source 1..22: mol_type = other RNA
tgctcctctgactttatggtat

SEQ ID NO: 152845 - RNA, 22 nt, synthetic construct
  source 1..22: mol_type = other RNA
tgctcctgcctttgttcatcat

SEQ ID NO: 152846 - RNA, 22 nt, synthetic construct
  source 1..22: mol_type = other RNA
tgctcggctctgtcacccttgt

SEQ ID NO: 152847 - RNA, 22 nt, synthetic construct
  source 1..22: mol_type = other RNA
tgctctacaaaccttcttattt

SEQ ID NO: 152848 - RNA, 22 nt, synthetic construct
  source 1..22: mol_type = other RNA
tgctctaccctttccaaattca

SEQ ID NO: 152849 - RNA, 22 nt, synthetic construct
  source 1..22: mol_type = other RNA
tgctctcaagtaattgttttcc

SEQ ID NO: 152850 - RNA, 22 nt, synthetic construct
  source 1..22: mol_type = other RNA
tgctctcccccgaatcctttgc

SEQ ID NO: 152851 - RNA, 22 nt, synthetic construct
  source 1..22: mol_type = other RNA
tgctctcttcccccaaaactta

SEQ ID NO: 152852 - RNA, 22 nt, synthetic construct
  source 1..22: mol_type = other RNA
tgctctcttgcccaagctggtc

SEQ ID NO: 152853 - RNA, 22 nt, synthetic construct
  source 1..22: mol_type = other RNA
tgctctcttgcctaggctggag

SEQ ID NO: 152854 - RNA, 22 nt, synthetic construct
  source 1..22: mol_type = other RNA
tgctctgacgtttaaatgagtt

SEQ ID NO: 152855 - RNA, 22 nt, synthetic construct
  source 1..22: mol_type = other RNA
tgctctgataggataatgtcca

SEQ ID NO: 152856 - RNA, 22 nt, synthetic construct
  source 1..22: mol_type = other RNA
tgctctgcaaatgaggttgctt

SEQ ID NO: 152857 - RNA, 22 nt, synthetic construct
  source 1..22: mol_type = other RNA
tgctctgcacgtactagtcagc

SEQ ID NO: 152858 - RNA, 22 nt, synthetic construct
  source 1..22: mol_type = other RNA
tgctctgcagagactgtgcttc

SEQ ID NO: 152859 - RNA, 22 nt, synthetic construct
  source 1..22: mol_type = other RNA
tgctctgcggcaggcattgtgc

SEQ ID NO: 152860 - RNA, 22 nt, synthetic construct
  source 1..22: mol_type = other RNA
tgctctgtcacccacgtggagt

SEQ ID NO: 152861 - RNA, 22 nt, synthetic construct
  source 1..22: mol_type = other RNA
tgctctgtcctgtcagtgtggt

SEQ ID NO: 152862 - RNA, 22 nt, synthetic construct
  source 1..22: mol_type = other RNA
tgctcttaagtatttttgttag

SEQ ID NO: 152863 - RNA, 22 nt, synthetic construct
  source 1..22: mol_type = other RNA
tgctcttctattccagagaatt

SEQ ID NO: 152864 - RNA, 22 nt, synthetic construct
  source 1..22: mol_type = other RNA
tgctcttctgatcacagaagtg

SEQ ID NO: 152865 - RNA, 22 nt, synthetic construct
  source 1..22: mol_type = other RNA
tgctcttggtttcttcaagata

SEQ ID NO: 152866 - RNA, 22 nt, synthetic construct
  source 1..22: mol_type = other RNA
tgctctttatctccacatttct

SEQ ID NO: 152867 - RNA, 22 nt, synthetic construct
  source 1..22: mol_type = other RNA
tgctcttttcatcactcactgg

SEQ ID NO: 152868 - RNA, 22 nt, synthetic construct
  source 1..22: mol_type = other RNA
tgctgaaaaagatactcttaaa

SEQ ID NO: 152869 - RNA, 22 nt, synthetic construct
  source 1..22: mol_type = other RNA
tgctgaaaccccgcatactgtg

SEQ ID NO: 152870 - RNA, 22 nt, synthetic construct
  source 1..22: mol_type = other RNA
tgctgaaagctagaagacctca

SEQ ID NO: 152871 - RNA, 22 nt, synthetic construct
  source 1..22: mol_type = other RNA
tgctgaaaggcatgaaattctt

SEQ ID NO: 152872 - RNA, 22 nt, synthetic construct
  source 1..22: mol_type = other RNA
tgctgaacttgtcacaaaatgt

SEQ ID NO: 152873 - RNA, 22 nt, synthetic construct
  source 1..22: mol_type = other RNA
tgctgaagaataactgtcctga

SEQ ID NO: 152874 - RNA, 22 nt, synthetic construct
  source 1..22: mol_type = other RNA
tgctgacagattaaataccacc

SEQ ID NO: 152875 - RNA, 22 nt, synthetic construct
  source 1..22: mol_type = other RNA
tgctgactagtacgtgcagagc

SEQ ID NO: 152876 - RNA, 22 nt, synthetic construct
  source 1..22: mol_type = other RNA
tgctgacttcctggctctagcc

SEQ ID NO: 152877 - RNA, 22 nt, synthetic construct
  source 1..22: mol_type = other RNA
tgctgagatggtcagtactatc

SEQ ID NO: 152878 - RNA, 22 nt, synthetic construct
  source 1..22: mol_type = other RNA
tgctgagattacagatgtgagc

SEQ ID NO: 152879 - RNA, 22 nt, synthetic construct
  source 1..22: mol_type = other RNA
tgctgaggccccaggggacata

SEQ ID NO: 152880 - RNA, 22 nt, synthetic construct
  source 1..22: mol_type = other RNA
tgctgagggaatttttcttacc

SEQ ID NO: 152881 - RNA, 22 nt, synthetic construct
  source 1..22: mol_type = other RNA
tgctgagtcttctactgtgaat

SEQ ID NO: 152882 - RNA, 22 nt, synthetic construct
  source 1..22: mol_type = other RNA
tgctgagtgaatggggtaattt

SEQ ID NO: 152883 - RNA, 22 nt, synthetic construct
  source 1..22: mol_type = other RNA
tgctgataaatggctttttacg

SEQ ID NO: 152884 - RNA, 22 nt, synthetic construct
  source 1..22: mol_type = other RNA
tgctgatcaggaaagaccgggg

SEQ ID NO: 152885 - RNA, 22 nt, synthetic construct
  source 1..22: mol_type = other RNA
tgctgatgaactacacagacat

SEQ ID NO: 152886 - RNA, 22 nt, synthetic construct
  source 1..22: mol_type = other RNA
tgctgatgtaagtgggaggagg

SEQ ID NO: 152887 - RNA, 22 nt, synthetic construct
  source 1..22: mol_type = other RNA
tgctgcaactgagaagagctgt

SEQ ID NO: 152888 - RNA, 22 nt, synthetic construct
  source 1..22: mol_type = other RNA
tgctgcacgtctgtggtctcag

SEQ ID NO: 152889 - RNA, 22 nt, synthetic construct
  source 1..22: mol_type = other RNA
tgctgcactggctattagttaa

SEQ ID NO: 152890 - RNA, 22 nt, synthetic construct
  source 1..22: mol_type = other RNA
tgctgcagtatgcatagatcac

SEQ ID NO: 152891 - RNA, 22 nt, synthetic construct
  source 1..22: mol_type = other RNA
tgctgcagtttttccactaatg

SEQ ID NO: 152892 - RNA, 22 nt, synthetic construct
  source 1..22: mol_type = other RNA
tgctgcatagtactccattata

SEQ ID NO: 152893 - RNA, 22 nt, synthetic construct
  source 1..22: mol_type = other RNA
tgctgcatcccaagggttttgg

SEQ ID NO: 152894 - RNA, 22 nt, synthetic construct
  source 1..22: mol_type = other RNA
tgctgccaagtcagcacttctg

SEQ ID NO: 152895 - RNA, 22 nt, synthetic construct
  source 1..22: mol_type = other RNA
tgctgccagatgttctaatttc

SEQ ID NO: 152896 - RNA, 22 nt, synthetic construct
  source 1..22: mol_type = other RNA
tgctgccccagctaaaatgttc

SEQ ID NO: 152897 - RNA, 22 nt, synthetic construct
  source 1..22: mol_type = other RNA
tgctgcgagccccgggggagct

SEQ ID NO: 152898 - RNA, 22 nt, synthetic construct
  source 1..22: mol_type = other RNA
tgctgctatgaaaattggcgta

SEQ ID NO: 152899 - RNA, 22 nt, synthetic construct
  source 1..22: mol_type = other RNA
tgctgctctgacgtttaaatga

SEQ ID NO: 152900 - RNA, 22 nt, synthetic construct
  source 1..22: mol_type = other RNA
tgctgctgaaaaagatactctt

SEQ ID NO: 152901 - RNA, 22 nt, synthetic construct
  source 1..22: mol_type = other RNA
tgctgcttctacccactattga

SEQ ID NO: 152902 - RNA, 22 nt, synthetic construct
  source 1..22: mol_type = other RNA
tgctggaaattttcaagggtgt

SEQ ID NO: 152903 - RNA, 22 nt, synthetic construct
  source 1..22: mol_type = other RNA
tgctggaacgaatattcattta

SEQ ID NO: 152904 - RNA, 22 nt, synthetic construct
  source 1..22: mol_type = other RNA
tgctggaagttggcccaacatg

SEQ ID NO: 152905 - RNA, 22 nt, synthetic construct
  source 1..22: mol_type = other RNA
tgctggactggagggatgctgg

SEQ ID NO: 152906 - RNA, 22 nt, synthetic construct
  source 1..22: mol_type = other RNA
tgctggagtgtggcaggggctg

SEQ ID NO: 152907 - RNA, 22 nt, synthetic construct
  source 1..22: mol_type = other RNA
tgctggatcatatagtaattct

SEQ ID NO: 152908 - RNA, 22 nt, synthetic construct
  source 1..22: mol_type = other RNA
tgctggcagccttctctcttcc

SEQ ID NO: 152909 - RNA, 22 nt, synthetic construct
  source 1..22: mol_type = other RNA
tgctggccagtgagttcaaatg

SEQ ID NO: 152910 - RNA, 22 nt, synthetic construct
  source 1..22: mol_type = other RNA
tgctggctcagtctgtttgcca

SEQ ID NO: 152911 - RNA, 22 nt, synthetic construct
  source 1..22: mol_type = other RNA
tgctggcttcaatatgcagtat

SEQ ID NO: 152912 - RNA, 22 nt, synthetic construct
  source 1..22: mol_type = other RNA
tgctggcttcatgggtggaaat

SEQ ID NO: 152913 - RNA, 22 nt, synthetic construct
  source 1..22: mol_type = other RNA
tgctgggagaccaggagttctt

SEQ ID NO: 152914 - RNA, 22 nt, synthetic construct
  source 1..22: mol_type = other RNA
tgctgggcccactctccccaag

SEQ ID NO: 152915 - RNA, 22 nt, synthetic construct
  source 1..22: mol_type = other RNA
tgctgggctagggaagcagttg

SEQ ID NO: 152916 - RNA, 22 nt, synthetic construct
  source 1..22: mol_type = other RNA
tgctgggctattgttttgcaag

SEQ ID NO: 152917 - RNA, 22 nt, synthetic construct
  source 1..22: mol_type = other RNA
tgctggggacccctccctgctt

SEQ ID NO: 152918 - RNA, 22 nt, synthetic construct
  source 1..22: mol_type = other RNA
tgctgggtagagactggatcct

SEQ ID NO: 152919 - RNA, 22 nt, synthetic construct
  source 1..22: mol_type = other RNA
tgctggtctggaatgtgtagtt

SEQ ID NO: 152920 - RNA, 22 nt, synthetic construct
  source 1..22: mol_type = other RNA
tgctggtggagtattctagttc

SEQ ID NO: 152921 - RNA, 22 nt, synthetic construct
  source 1..22: mol_type = other RNA
tgctggtgggctttgagaaagg

SEQ ID NO: 152922 - RNA, 22 nt, synthetic construct
  source 1..22: mol_type = other RNA
tgctgtaacaaagatgccacaa

SEQ ID NO: 152923 - RNA, 22 nt, synthetic construct
  source 1..22: mol_type = other RNA
tgctgtaactgacttcaagagg

SEQ ID NO: 152924 - RNA, 22 nt, synthetic construct
  source 1..22: mol_type = other RNA
tgctgtaagctggtaatacagt

SEQ ID NO: 152925 - RNA, 22 nt, synthetic construct
  source 1..22: mol_type = other RNA
tgctgtagtgattcacttttga

SEQ ID NO: 152926 - RNA, 22 nt, synthetic construct
  source 1..22: mol_type = other RNA
tgctgtataacattttctctac

SEQ ID NO: 152927 - RNA, 22 nt, synthetic construct
  source 1..22: mol_type = other RNA
tgctgtatacccaggtgtgaga

SEQ ID NO: 152928 - RNA, 22 nt, synthetic construct
  source 1..22: mol_type = other RNA
tgctgtcaggcaagggactgtc

SEQ ID NO: 152929 - RNA, 22 nt, synthetic construct
  source 1..22: mol_type = other RNA
tgctgtccatttccttaagcac

SEQ ID NO: 152930 - RNA, 22 nt, synthetic construct
  source 1..22: mol_type = other RNA
tgctgtcggttttctagttagt

SEQ ID NO: 152931 - RNA, 22 nt, synthetic construct
  source 1..22: mol_type = other RNA
tgctgtcgtttatgcatttatt

SEQ ID NO: 152932 - RNA, 22 nt, synthetic construct
  source 1..22: mol_type = other RNA
tgctgtctataggcaatgagtc

SEQ ID NO: 152933 - RNA, 22 nt, synthetic construct
  source 1..22: mol_type = other RNA
tgctgtgaatttggatttgagt

SEQ ID NO: 152934 - RNA, 22 nt, synthetic construct
  source 1..22: mol_type = other RNA
tgctgtgattgcaggtgtgggc

SEQ ID NO: 152935 - RNA, 22 nt, synthetic construct
  source 1..22: mol_type = other RNA
tgctgtgccagtgcaaacctcc

SEQ ID NO: 152936 - RNA, 22 nt, synthetic construct
  source 1..22: mol_type = other RNA
tgctgtggccgagggagacggc

SEQ ID NO: 152937 - RNA, 22 nt, synthetic construct
  source 1..22: mol_type = other RNA
tgctgttcccaagcaagtgtgg

SEQ ID NO: 152938 - RNA, 22 nt, synthetic construct
  source 1..22: mol_type = other RNA
tgctgttctctgtgtggtttgc

SEQ ID NO: 152939 - RNA, 22 nt, synthetic construct
  source 1..22: mol_type = other RNA
tgctgttgaggctgggccctgt

SEQ ID NO: 152940 - RNA, 22 nt, synthetic construct
  source 1..22: mol_type = other RNA
tgctgttgatggacgtttgagt

SEQ ID NO: 152941 - RNA, 22 nt, synthetic construct
  source 1..22: mol_type = other RNA
tgctgttgtaatgttacttctc

SEQ ID NO: 152942 - RNA, 22 nt, synthetic construct
  source 1..22: mol_type = other RNA
tgctgttgtattttacaccatg

SEQ ID NO: 152943 - RNA, 22 nt, synthetic construct
  source 1..22: mol_type = other RNA
tgctgtttacattagagaagaa

SEQ ID NO: 152944 - RNA, 22 nt, synthetic construct
  source 1..22: mol_type = other RNA
tgctgtttaccaagggtgtgtt

SEQ ID NO: 152945 - RNA, 22 nt, synthetic construct
  source 1..22: mol_type = other RNA
tgctgttttgcttactgtagca

SEQ ID NO: 152946 - RNA, 22 nt, synthetic construct
  source 1..22: mol_type = other RNA
tgctgtttttgaaaagaacaac

SEQ ID NO: 152947 - RNA, 22 nt, synthetic construct
  source 1..22: mol_type = other RNA
tgcttaaagcctctcaacactt

SEQ ID NO: 152948 - RNA, 22 nt, synthetic construct
  source 1..22: mol_type = other RNA
tgcttaaagcgctactcagctg

SEQ ID NO: 152949 - RNA, 22 nt, synthetic construct
  source 1..22: mol_type = other RNA
tgcttaaagttggtcctgcata

SEQ ID NO: 152950 - RNA, 22 nt, synthetic construct
  source 1..22: mol_type = other RNA
tgcttaacaagaatcctgctat

SEQ ID NO: 152951 - RNA, 22 nt, synthetic construct
  source 1..22: mol_type = other RNA
tgcttaaggaaatggacagcac

SEQ ID NO: 152952 - RNA, 22 nt, synthetic construct
  source 1..22: mol_type = other RNA
tgcttaagtcactccatttgtg

SEQ ID NO: 152953 - RNA, 22 nt, synthetic construct
  source 1..22: mol_type = other RNA
tgcttaatctgatttttagtga

SEQ ID NO: 152954 - RNA, 22 nt, synthetic construct
  source 1..22: mol_type = other RNA
tgcttaatcttcacacttagtt

SEQ ID NO: 152955 - RNA, 22 nt, synthetic construct
  source 1..22: mol_type = other RNA
tgcttaattgagctgtccccac

SEQ ID NO: 152956 - RNA, 22 nt, synthetic construct
  source 1..22: mol_type = other RNA
tgcttacacacacgtttatatt

SEQ ID NO: 152957 - RNA, 22 nt, synthetic construct
  source 1..22: mol_type = other RNA
tgcttacagactgattaatttg

SEQ ID NO: 152958 - RNA, 22 nt, synthetic construct
  source 1..22: mol_type = other RNA
tgcttactctaatggggaaata

SEQ ID NO: 152959 - RNA, 22 nt, synthetic construct
  source 1..22: mol_type = other RNA
tgcttactgtagcattgaagta

SEQ ID NO: 152960 - RNA, 22 nt, synthetic construct
  source 1..22: mol_type = other RNA
tgcttagccttccagagacaaa

SEQ ID NO: 152961 - RNA, 22 nt, synthetic construct
  source 1..22: mol_type = other RNA
tgcttagcgctggaggtcgggc

SEQ ID NO: 152962 - RNA, 22 nt, synthetic construct
  source 1..22: mol_type = other RNA
tgcttagctgcctcttcctgtt

SEQ ID NO: 152963 - RNA, 22 nt, synthetic construct
  source 1..22: mol_type = other RNA
tgcttaggatcccagtcctttg

SEQ ID NO: 152964 - RNA, 22 nt, synthetic construct
  source 1..22: mol_type = other RNA
tgcttaggctgaagcaggcttt

SEQ ID NO: 152965 - RNA, 22 nt, synthetic construct
  source 1..22: mol_type = other RNA
tgcttaggctgttattagagtt

SEQ ID NO: 152966 - RNA, 22 nt, synthetic construct
  source 1..22: mol_type = other RNA
tgcttaggtaagaaaaattccc

SEQ ID NO: 152967 - RNA, 22 nt, synthetic construct
  source 1..22: mol_type = other RNA
tgcttagtcttctcagatctgt

SEQ ID NO: 152968 - RNA, 22 nt, synthetic construct
  source 1..22: mol_type = other RNA
tgcttataacaagaaaatctga

SEQ ID NO: 152969 - RNA, 22 nt, synthetic construct
  source 1..22: mol_type = other RNA
tgcttatgtcttgtggctgaca

SEQ ID NO: 152970 - RNA, 22 nt, synthetic construct
  source 1..22: mol_type = other RNA
tgcttattatatgcctagattt

SEQ ID NO: 152971 - RNA, 22 nt, synthetic construct
  source 1..22: mol_type = other RNA
tgcttcaaagagaacaaaatac

SEQ ID NO: 152972 - RNA, 22 nt, synthetic construct
  source 1..22: mol_type = other RNA
tgcttcagcctaagcaagttac

SEQ ID NO: 152973 - RNA, 22 nt, synthetic construct
  source 1..22: mol_type = other RNA
tgcttcatattttgtgggaatt

SEQ ID NO: 152974 - RNA, 22 nt, synthetic construct
  source 1..22: mol_type = other RNA
tgcttcatctggaccagttact

SEQ ID NO: 152975 - RNA, 22 nt, synthetic construct
  source 1..22: mol_type = other RNA
tgcttcattccgcgtttattag

SEQ ID NO: 152976 - RNA, 22 nt, synthetic construct
  source 1..22: mol_type = other RNA
tgcttccaaaagcaggccctga

SEQ ID NO: 152977 - RNA, 22 nt, synthetic construct
  source 1..22: mol_type = other RNA
tgcttccacagctatcaggcct

SEQ ID NO: 152978 - RNA, 22 nt, synthetic construct
  source 1..22: mol_type = other RNA
tgcttccacatttctaatttcc

SEQ ID NO: 152979 - RNA, 22 nt, synthetic construct
  source 1..22: mol_type = other RNA
tgcttcccacttcgaaagttca

SEQ ID NO: 152980 - RNA, 22 nt, synthetic construct
  source 1..22: mol_type = other RNA
tgcttcccccaaagaaggaaaa

SEQ ID NO: 152981 - RNA, 22 nt, synthetic construct
  source 1..22: mol_type = other RNA
tgcttccctagcccagcacttc

SEQ ID NO: 152982 - RNA, 22 nt, synthetic construct
  source 1..22: mol_type = other RNA
tgcttcctaaacctgctacgaa

SEQ ID NO: 152983 - RNA, 22 nt, synthetic construct
  source 1..22: mol_type = other RNA
tgcttccttctcttatactagt

SEQ ID NO: 152984 - RNA, 22 nt, synthetic construct
  source 1..22: mol_type = other RNA
tgcttccttgctatgtaatctc

SEQ ID NO: 152985 - RNA, 22 nt, synthetic construct
  source 1..22: mol_type = other RNA
tgcttcgaagcttattaaaatg

SEQ ID NO: 152986 - RNA, 22 nt, synthetic construct
  source 1..22: mol_type = other RNA
tgcttcgaggtcgcaccctgag

SEQ ID NO: 152987 - RNA, 22 nt, synthetic construct
  source 1..22: mol_type = other RNA
tgcttctacccactattgaaag

SEQ ID NO: 152988 - RNA, 22 nt, synthetic construct
  source 1..22: mol_type = other RNA
tgcttctagccaaagcaagcct

SEQ ID NO: 152989 - RNA, 22 nt, synthetic construct
  source 1..22: mol_type = other RNA
tgcttctagtaacttggtcgaa

SEQ ID NO: 152990 - RNA, 22 nt, synthetic construct
  source 1..22: mol_type = other RNA
tgcttctcaataaggaaagcac

SEQ ID NO: 152991 - RNA, 22 nt, synthetic construct
  source 1..22: mol_type = other RNA
tgcttctgataggaatatcgtc

SEQ ID NO: 152992 - RNA, 22 nt, synthetic construct
  source 1..22: mol_type = other RNA
tgcttgaactgctggtctggaa

SEQ ID NO: 152993 - RNA, 22 nt, synthetic construct
  source 1..22: mol_type = other RNA
tgcttgaagagcgcttctatgt

SEQ ID NO: 152994 - RNA, 22 nt, synthetic construct
  source 1..22: mol_type = other RNA
tgcttgaatgtgcctacatagt

SEQ ID NO: 152995 - RNA, 22 nt, synthetic construct
  source 1..22: mol_type = other RNA
tgcttgagagagataaaacctg

SEQ ID NO: 152996 - RNA, 22 nt, synthetic construct
  source 1..22: mol_type = other RNA
tgcttgaggccacgagttcagg

SEQ ID NO: 152997 - RNA, 22 nt, synthetic construct
  source 1..22: mol_type = other RNA
tgcttgagtgcaggagtttgag

SEQ ID NO: 152998 - RNA, 22 nt, synthetic construct
  source 1..22: mol_type = other RNA
tgcttgcagacaataattcttc

SEQ ID NO: 152999 - RNA, 22 nt, synthetic construct
  source 1..22: mol_type = other RNA
tgcttgcagccttccctgaaca

SEQ ID NO: 153000 - RNA, 22 nt, synthetic construct
  source 1..22: mol_type = other RNA
tgcttgctccagagaagttttc

SEQ ID NO: 153001 - RNA, 22 nt, synthetic construct
  source 1..22: mol_type = other RNA
tgcttgctctacaaaccttctt

SEQ ID NO: 153002 - RNA, 22 nt, synthetic construct
  source 1..22: mol_type = other RNA
tgcttgctctgcggcaggcatt

SEQ ID NO: 153003 - RNA, 22 nt, synthetic construct
  source 1..22: mol_type = other RNA
tgcttgctgcactggctattag

SEQ ID NO: 153004 - RNA, 22 nt, synthetic construct
  source 1..22: mol_type = other RNA
tgcttggagtcacttgacaaaa

SEQ ID NO: 153005 - RNA, 22 nt, synthetic construct
  source 1..22: mol_type = other RNA
tgcttggatattctacagaaaa

SEQ ID NO: 153006 - RNA, 22 nt, synthetic construct
  source 1..22: mol_type = other RNA
tgcttggcacagaattattgat

SEQ ID NO: 153007 - RNA, 22 nt, synthetic construct
  source 1..22: mol_type = other RNA
tgcttggcgcagtgcttagcgc

SEQ ID NO: 153008 - RNA, 22 nt, synthetic construct
  source 1..22: mol_type = other RNA
tgcttgggaacagcaggggaag

SEQ ID NO: 153009 - RNA, 22 nt, synthetic construct
  source 1..22: mol_type = other RNA
tgcttgggctcccttccagcgt

SEQ ID NO: 153010 - RNA, 22 nt, synthetic construct
  source 1..22: mol_type = other RNA
tgcttggtgttgactgaattaa

SEQ ID NO: 153011 - RNA, 22 nt, synthetic construct
  source 1..22: mol_type = other RNA
tgcttggtttcacacgcattgc

SEQ ID NO: 153012 - RNA, 22 nt, synthetic construct
  source 1..22: mol_type = other RNA
tgcttgtctctctctttctctc

SEQ ID NO: 153013 - RNA, 22 nt, synthetic construct
  source 1..22: mol_type = other RNA
tgcttgtcttgaatagcatctt

SEQ ID NO: 153014 - RNA, 22 nt, synthetic construct
  source 1..22: mol_type = other RNA
tgcttgtgcttttaatactttc

SEQ ID NO: 153015 - RNA, 22 nt, synthetic construct
  source 1..22: mol_type = other RNA
tgctttaaaacactggcaaaaa

SEQ ID NO: 153016 - RNA, 22 nt, synthetic construct
  source 1..22: mol_type = other RNA
tgctttaacctctggtatttta

SEQ ID NO: 153017 - RNA, 22 nt, synthetic construct
  source 1..22: mol_type = other RNA
tgctttactactgcattttttg

SEQ ID NO: 153018 - RNA, 22 nt, synthetic construct
  source 1..22: mol_type = other RNA
tgctttcagttctttcggatat

SEQ ID NO: 153019 - RNA, 22 nt, synthetic construct
  source 1..22: mol_type = other RNA
tgctttcctcatgtccatagtt

SEQ ID NO: 153020 - RNA, 22 nt, synthetic construct
  source 1..22: mol_type = other RNA
tgctttccttattgagaagcag

SEQ ID NO: 153021 - RNA, 22 nt, synthetic construct
  source 1..22: mol_type = other RNA
tgctttctactagtataagaga

SEQ ID NO: 153022 - RNA, 22 nt, synthetic construct
  source 1..22: mol_type = other RNA
tgctttctatctctcagatctg

SEQ ID NO: 153023 - RNA, 22 nt, synthetic construct
  source 1..22: mol_type = other RNA
tgctttctcaacactgtgttct

SEQ ID NO: 153024 - RNA, 22 nt, synthetic construct
  source 1..22: mol_type = other RNA
tgctttctctagttgcacggtg

SEQ ID NO: 153025 - RNA, 22 nt, synthetic construct
  source 1..22: mol_type = other RNA
tgctttcttggggctctaatgc

SEQ ID NO: 153026 - RNA, 22 nt, synthetic construct
  source 1..22: mol_type = other RNA
tgctttgaatttggaaagggta

SEQ ID NO: 153027 - RNA, 22 nt, synthetic construct
  source 1..22: mol_type = other RNA
tgctttgagctacaaactccaa

SEQ ID NO: 153028 - RNA, 22 nt, synthetic construct
  source 1..22: mol_type = other RNA
tgctttgcgaaatagtagttgc

SEQ ID NO: 153029 - RNA, 22 nt, synthetic construct
  source 1..22: mol_type = other RNA
tgctttgctgccccagctaaaa

SEQ ID NO: 153030 - RNA, 22 nt, synthetic construct
  source 1..22: mol_type = other RNA
tgctttggagtcacagtgaatt

SEQ ID NO: 153031 - RNA, 22 nt, synthetic construct
  source 1..22: mol_type = other RNA
tgctttggagtgagaggactgc

SEQ ID NO: 153032 - RNA, 22 nt, synthetic construct
  source 1..22: mol_type = other RNA
tgctttggctagaagcatctga

SEQ ID NO: 153033 - RNA, 22 nt, synthetic construct
  source 1..22: mol_type = other RNA
tgctttgggtctatagtttaat

SEQ ID NO: 153034 - RNA, 22 nt, synthetic construct
  source 1..22: mol_type = other RNA
tgctttgtctctggaaggctaa

SEQ ID NO: 153035 - RNA, 22 nt, synthetic construct
  source 1..22: mol_type = other RNA
tgcttttaatactttcacactg

SEQ ID NO: 153036 - RNA, 22 nt, synthetic construct
  source 1..22: mol_type = other RNA
tgcttttacttggctcctcccg

SEQ ID NO: 153037 - RNA, 22 nt, synthetic construct
  source 1..22: mol_type = other RNA
tgcttttcctggaaaacttctc

SEQ ID NO: 153038 - RNA, 22 nt, synthetic construct
  source 1..22: mol_type = other RNA
tgcttttctcgtgcatgtctgc

SEQ ID NO: 153039 - RNA, 22 nt, synthetic construct
  source 1..22: mol_type = other RNA
tgcttttgctgagggaattttt

SEQ ID NO: 153040 - RNA, 22 nt, synthetic construct
  source 1..22: mol_type = other RNA
tgcttttgctgcatcccaaggg

SEQ ID NO: 153041 - RNA, 22 nt, synthetic construct
  source 1..22: mol_type = other RNA
tgcttttgctttgggtctatag

SEQ ID NO: 153042 - RNA, 22 nt, synthetic construct
  source 1..22: mol_type = other RNA
tgcttttggaagcatgtggcca

SEQ ID NO: 153043 - RNA, 22 nt, synthetic construct
  source 1..22: mol_type = other RNA
tgctttttactttgcgaaacac

SEQ ID NO: 153044 - RNA, 22 nt, synthetic construct
  source 1..22: mol_type = other RNA
tgctttttctgcatcttttgag

SEQ ID NO: 153045 - RNA, 22 nt, synthetic construct
  source 1..22: mol_type = other RNA
tgctttttcttcttgttttgtt

SEQ ID NO: 153046 - RNA, 22 nt, synthetic construct
  source 1..22: mol_type = other RNA
tgctttttcttggtggtaactg

SEQ ID NO: 153047 - RNA, 22 nt, synthetic construct
  source 1..22: mol_type = other RNA
tgctttttgtatcctgtttgag

SEQ ID NO: 153048 - RNA, 22 nt, synthetic construct
  source 1..22: mol_type = other RNA
tgcttttttggtgtttttctag

SEQ ID NO: 153049 - RNA, 22 nt, synthetic construct
  source 1..22: mol_type = other RNA
tggaaaaactgcagcaattatt

SEQ ID NO: 153050 - RNA, 22 nt, synthetic construct
  source 1..22: mol_type = other RNA
tggaaaaatcgtcctcttcggg

SEQ ID NO: 153051 - RNA, 22 nt, synthetic construct
  source 1..22: mol_type = other RNA
tggaaaaatgtccgttgaagtc

SEQ ID NO: 153052 - RNA, 22 nt, synthetic construct
  source 1..22: mol_type = other RNA
tggaaaacaaattgcatcaact

SEQ ID NO: 153053 - RNA, 22 nt, synthetic construct
  source 1..22: mol_type = other RNA
tggaaaactagagatgggaaag

SEQ ID NO: 153054 - RNA, 22 nt, synthetic construct
  source 1..22: mol_type = other RNA
tggaaaactaggtatttgaaaa

SEQ ID NO: 153055 - RNA, 22 nt, synthetic construct
  source 1..22: mol_type = other RNA
tggaaaactctgtttccttacc

SEQ ID NO: 153056 - RNA, 22 nt, synthetic construct
  source 1..22: mol_type = other RNA
tggaaaacttctctggagcaag

SEQ ID NO: 153057 - RNA, 22 nt, synthetic construct
  source 1..22: mol_type = other RNA
tggaaaagaaagctgtggatgt

SEQ ID NO: 153058 - RNA, 22 nt, synthetic construct
  source 1..22: mol_type = other RNA
tggaaaagtgttgactaccatc

SEQ ID NO: 153059 - RNA, 22 nt, synthetic construct
  source 1..22: mol_type = other RNA
tggaaaatgtaaaacatcaaag

SEQ ID NO: 153060 - RNA, 22 nt, synthetic construct
  source 1..22: mol_type = other RNA
tggaaaatgtatgattttctag

SEQ ID NO: 153061 - RNA, 22 nt, synthetic construct
  source 1..22: mol_type = other RNA
tggaaaattcaaacatgacaga

SEQ ID NO: 153062 - RNA, 22 nt, synthetic construct
  source 1..22: mol_type = other RNA
tggaaaattcttggtcttttga

SEQ ID NO: 153063 - RNA, 22 nt, synthetic construct
  source 1..22: mol_type = other RNA
tggaaacaacctaaatgtccat

SEQ ID NO: 153064 - RNA, 22 nt, synthetic construct
  source 1..22: mol_type = other RNA
tggaaacaactcaaacgtccat

SEQ ID NO: 153065 - RNA, 22 nt, synthetic construct
  source 1..22: mol_type = other RNA
tggaaacatggtaatttgtcca

SEQ ID NO: 153066 - RNA, 22 nt, synthetic construct
  source 1..22: mol_type = other RNA
tggaaaccttttgtagaccctg

SEQ ID NO: 153067 - RNA, 22 nt, synthetic construct
  source 1..22: mol_type = other RNA
tggaaactacaattactgtaca

SEQ ID NO: 153068 - RNA, 22 nt, synthetic construct
  source 1..22: mol_type = other RNA
tggaaactcaaacccaaattaa

SEQ ID NO: 153069 - RNA, 22 nt, synthetic construct
  source 1..22: mol_type = other RNA
tggaaacttgccatcttgcata

SEQ ID NO: 153070 - RNA, 22 nt, synthetic construct
  source 1..22: mol_type = other RNA
tggaaagaaatagaactgtcac

SEQ ID NO: 153071 - RNA, 22 nt, synthetic construct
  source 1..22: mol_type = other RNA
tggaaagagccagcctgatgat

SEQ ID NO: 153072 - RNA, 22 nt, synthetic construct
  source 1..22: mol_type = other RNA
tggaaaggacttgatctaaaat

SEQ ID NO: 153073 - RNA, 22 nt, synthetic construct
  source 1..22: mol_type = other RNA
tggaaagggtagagcactttcg

SEQ ID NO: 153074 - RNA, 22 nt, synthetic construct
  source 1..22: mol_type = other RNA
tggaaagtggactatgtaggca

SEQ ID NO: 153075 - RNA, 22 nt, synthetic construct
  source 1..22: mol_type = other RNA
tggaaagttcaaatgaggcttt

SEQ ID NO: 153076 - RNA, 22 nt, synthetic construct
  source 1..22: mol_type = other RNA
tggaaataagtttcatggactt

SEQ ID NO: 153077 - RNA, 22 nt, synthetic construct
  source 1..22: mol_type = other RNA
tggaaataatttccctcagaat

SEQ ID NO: 153078 - RNA, 22 nt, synthetic construct
  source 1..22: mol_type = other RNA
tggaaatacttgaacattctgt

SEQ ID NO: 153079 - RNA, 22 nt, synthetic construct
  source 1..22: mol_type = other RNA
tggaaatatggtcactgctgat

SEQ ID NO: 153080 - RNA, 22 nt, synthetic construct
  source 1..22: mol_type = other RNA
tggaaatcacaggtttaggttt

SEQ ID NO: 153081 - RNA, 22 nt, synthetic construct
  source 1..22: mol_type = other RNA
tggaaatgaagtattgatttga

SEQ ID NO: 153082 - RNA, 22 nt, synthetic construct
  source 1..22: mol_type = other RNA
tggaaatgatacctcatttata

SEQ ID NO: 153083 - RNA, 22 nt, synthetic construct
  source 1..22: mol_type = other RNA
tggaaatggacagcggggatgg

SEQ ID NO: 153084 - RNA, 22 nt, synthetic construct
  source 1..22: mol_type = other RNA
tggaaatgtaaattcctaactc

SEQ ID NO: 153085 - RNA, 22 nt, synthetic construct
  source 1..22: mol_type = other RNA
tggaaattaaacacacccttgg

SEQ ID NO: 153086 - RNA, 22 nt, synthetic construct
  source 1..22: mol_type = other RNA
tggaaattagaaatgtggaagc

SEQ ID NO: 153087 - RNA, 22 nt, synthetic construct
  source 1..22: mol_type = other RNA
tggaaattttcaagggtgtttt

SEQ ID NO: 153088 - RNA, 22 nt, synthetic construct
  source 1..22: mol_type = other RNA
tggaacaatcaaaccatccttt

SEQ ID NO: 153089 - RNA, 22 nt, synthetic construct
  source 1..22: mol_type = other RNA
tggaacacacattagcctagac

SEQ ID NO: 153090 - RNA, 22 nt, synthetic construct
  source 1..22: mol_type = other RNA
tggaacaggccctttgttagtg

SEQ ID NO: 153091 - RNA, 22 nt, synthetic construct
  source 1..22: mol_type = other RNA
tggaacataatctttggtgctg

SEQ ID NO: 153092 - RNA, 22 nt, synthetic construct
  source 1..22: mol_type = other RNA
tggaaccactgtaggccccgat

SEQ ID NO: 153093 - RNA, 22 nt, synthetic construct
  source 1..22: mol_type = other RNA
tggaacctttgtccactgtcag

SEQ ID NO: 153094 - RNA, 22 nt, synthetic construct
  source 1..22: mol_type = other RNA
tggaacggcttaacacctttgt

SEQ ID NO: 153095 - RNA, 22 nt, synthetic construct
  source 1..22: mol_type = other RNA
tggaactcatttctgcttgaat

SEQ ID NO: 153096 - RNA, 22 nt, synthetic construct
  source 1..22: mol_type = other RNA
tggaactctattttcctaaaac

SEQ ID NO: 153097 - RNA, 22 nt, synthetic construct
  source 1..22: mol_type = other RNA
tggaactctgtcatggtgtgtc

SEQ ID NO: 153098 - RNA, 22 nt, synthetic construct
  source 1..22: mol_type = other RNA
tggaactcttgcggtcttttag

SEQ ID NO: 153099 - RNA, 22 nt, synthetic construct
  source 1..22: mol_type = other RNA
tggaagaatcaggtctctttga

SEQ ID NO: 153100 - RNA, 22 nt, synthetic construct
  source 1..22: mol_type = other RNA
tggaagaattttaagcctagag

SEQ ID NO: 153101 - RNA, 22 nt, synthetic construct
  source 1..22: mol_type = other RNA
tggaagactatcacgattctga

SEQ ID NO: 153102 - RNA, 22 nt, synthetic construct
  source 1..22: mol_type = other RNA
tggaagactatgagaaggatta

SEQ ID NO: 153103 - RNA, 22 nt, synthetic construct
  source 1..22: mol_type = other RNA
tggaagactttatggtaattgg

SEQ ID NO: 153104 - RNA, 22 nt, synthetic construct
  source 1..22: mol_type = other RNA
tggaagagagaaggctgccagc

SEQ ID NO: 153105 - RNA, 22 nt, synthetic construct
  source 1..22: mol_type = other RNA
tggaagatgggacttcactagt

SEQ ID NO: 153106 - RNA, 22 nt, synthetic construct
  source 1..22: mol_type = other RNA
tggaagatttctactggggtct

SEQ ID NO: 153107 - RNA, 22 nt, synthetic construct
  source 1..22: mol_type = other RNA
tggaagcacagtctctgcagag

SEQ ID NO: 153108 - RNA, 22 nt, synthetic construct
  source 1..22: mol_type = other RNA
tggaagcagaactaagacccca

SEQ ID NO: 153109 - RNA, 22 nt, synthetic construct
  source 1..22: mol_type = other RNA
tggaagcatgtggccaggagga

SEQ ID NO: 153110 - RNA, 22 nt, synthetic construct
  source 1..22: mol_type = other RNA
tggaagctgtccttctcgtgtg

SEQ ID NO: 153111 - RNA, 22 nt, synthetic construct
  source 1..22: mol_type = other RNA
tggaaggaaacactataaatca

SEQ ID NO: 153112 - RNA, 22 nt, synthetic construct
  source 1..22: mol_type = other RNA
tggaaggaaataagaaggtttg

SEQ ID NO: 153113 - RNA, 22 nt, synthetic construct
  source 1..22: mol_type = other RNA
tggaaggactcacagcttacca

SEQ ID NO: 153114 - RNA, 22 nt, synthetic construct
  source 1..22: mol_type = other RNA
tggaaggcctgatagctgtgga

SEQ ID NO: 153115 - RNA, 22 nt, synthetic construct
  source 1..22: mol_type = other RNA
tggaaggccttctcctccaacc

SEQ ID NO: 153116 - RNA, 22 nt, synthetic construct
  source 1..22: mol_type = other RNA
tggaaggctaagcatgtaactt

SEQ ID NO: 153117 - RNA, 22 nt, synthetic construct
  source 1..22: mol_type = other RNA
tggaagggagcccaagcacact

SEQ ID NO: 153118 - RNA, 22 nt, synthetic construct
  source 1..22: mol_type = other RNA
tggaaggtaggagggtgtgatc

SEQ ID NO: 153119 - RNA, 22 nt, synthetic construct
  source 1..22: mol_type = other RNA
tggaagtaaggattttctattc

SEQ ID NO: 153120 - RNA, 22 nt, synthetic construct
  source 1..22: mol_type = other RNA
tggaagtaattgggatctgata

SEQ ID NO: 153121 - RNA, 22 nt, synthetic construct
  source 1..22: mol_type = other RNA
tggaagtgaagtcaagatgaat

SEQ ID NO: 153122 - RNA, 22 nt, synthetic construct
  source 1..22: mol_type = other RNA
tggaagtgctgggctagggaag

SEQ ID NO: 153123 - RNA, 22 nt, synthetic construct
  source 1..22: mol_type = other RNA
tggaagtgtaacatacacatca

SEQ ID NO: 153124 - RNA, 22 nt, synthetic construct
  source 1..22: mol_type = other RNA
tggaagttatttaatctctctt

SEQ ID NO: 153125 - RNA, 22 nt, synthetic construct
  source 1..22: mol_type = other RNA
tggaagttcaaggttataatca

SEQ ID NO: 153126 - RNA, 22 nt, synthetic construct
  source 1..22: mol_type = other RNA
tggaagttggcccaacatgctc

SEQ ID NO: 153127 - RNA, 22 nt, synthetic construct
  source 1..22: mol_type = other RNA
tggaagtttcctgcacatgcac

SEQ ID NO: 153128 - RNA, 22 nt, synthetic construct
  source 1..22: mol_type = other RNA
tggaagtttctggaagtttcct

SEQ ID NO: 153129 - RNA, 22 nt, synthetic construct
  source 1..22: mol_type = other RNA
tggaataatggaactaagaaaa

SEQ ID NO: 153130 - RNA, 22 nt, synthetic construct
  source 1..22: mol_type = other RNA
tggaatagaagagcagtgtgtt

SEQ ID NO: 153131 - RNA, 22 nt, synthetic construct
  source 1..22: mol_type = other RNA
tggaatagaagggagaacccag

SEQ ID NO: 153132 - RNA, 22 nt, synthetic construct
  source 1..22: mol_type = other RNA
tggaatagtagcttcaatgagg

SEQ ID NO: 153133 - RNA, 22 nt, synthetic construct
  source 1..22: mol_type = other RNA
tggaatattactcagtctcgaa

SEQ ID NO: 153134 - RNA, 22 nt, synthetic construct
  source 1..22: mol_type = other RNA
tggaatattgttcagccttaaa

SEQ ID NO: 153135 - RNA, 22 nt, synthetic construct
  source 1..22: mol_type = other RNA
tggaatcaatccagacagctaa

SEQ ID NO: 153136 - RNA, 22 nt, synthetic construct
  source 1..22: mol_type = other RNA
tggaatcattccgtatatattt

SEQ ID NO: 153137 - RNA, 22 nt, synthetic construct
  source 1..22: mol_type = other RNA
tggaatgagtccagctttctaa

SEQ ID NO: 153138 - RNA, 22 nt, synthetic construct
  source 1..22: mol_type = other RNA
tggaatgcatcgtttcaatatt

SEQ ID NO: 153139 - RNA, 22 nt, synthetic construct
  source 1..22: mol_type = other RNA
tggaatgcccatcctctatttt

SEQ ID NO: 153140 - RNA, 22 nt, synthetic construct
  source 1..22: mol_type = other RNA
tggaatgggttggaggagaagg

SEQ ID NO: 153141 - RNA, 22 nt, synthetic construct
  source 1..22: mol_type = other RNA
tggaatggtcaatttcatcgta

SEQ ID NO: 153142 - RNA, 22 nt, synthetic construct
  source 1..22: mol_type = other RNA
tggaatggtgaagaatgtgaaa

SEQ ID NO: 153143 - RNA, 22 nt, synthetic construct
  source 1..22: mol_type = other RNA
tggaatgtgcacctccagtgtc

SEQ ID NO: 153144 - RNA, 22 nt, synthetic construct
  source 1..22: mol_type = other RNA
tggaatgtgtagttctggtgtc

SEQ ID NO: 153145 - RNA, 22 nt, synthetic construct
  source 1..22: mol_type = other RNA
tggaattaaaatgttgccaata

SEQ ID NO: 153146 - RNA, 22 nt, synthetic construct
  source 1..22: mol_type = other RNA
tggaattaactccaggggacat

SEQ ID NO: 153147 - RNA, 22 nt, synthetic construct
  source 1..22: mol_type = other RNA
tggaattcatcaaagttaaact

SEQ ID NO: 153148 - RNA, 22 nt, synthetic construct
  source 1..22: mol_type = other RNA
tggaattctgacacccgaagag

SEQ ID NO: 153149 - RNA, 22 nt, synthetic construct
  source 1..22: mol_type = other RNA
tggaattctgatgcacaagcct

SEQ ID NO: 153150 - RNA, 22 nt, synthetic construct
  source 1..22: mol_type = other RNA
tggaattgccatatgtagggca

SEQ ID NO: 153151 - RNA, 22 nt, synthetic construct
  source 1..22: mol_type = other RNA
tggaatttaaggggtaaatggt

SEQ ID NO: 153152 - RNA, 22 nt, synthetic construct
  source 1..22: mol_type = other RNA
tggaattttagtaattctccac

SEQ ID NO: 153153 - RNA, 22 nt, synthetic construct
  source 1..22: mol_type = other RNA
tggacaaaaaacgcggcacttg

SEQ ID NO: 153154 - RNA, 22 nt, synthetic construct
  source 1..22: mol_type = other RNA
tggacaaattaccatgtttcca

SEQ ID NO: 153155 - RNA, 22 nt, synthetic construct
  source 1..22: mol_type = other RNA
tggacaacagtgtgagaccgtg

SEQ ID NO: 153156 - RNA, 22 nt, synthetic construct
  source 1..22: mol_type = other RNA
tggacacacacagtcctgtgtt

SEQ ID NO: 153157 - RNA, 22 nt, synthetic construct
  source 1..22: mol_type = other RNA
tggacacactgaaacaatcgca

SEQ ID NO: 153158 - RNA, 22 nt, synthetic construct
  source 1..22: mol_type = other RNA
tggacactgcagatgaatgagc

SEQ ID NO: 153159 - RNA, 22 nt, synthetic construct
  source 1..22: mol_type = other RNA
tggacagcacattaaataaggg

SEQ ID NO: 153160 - RNA, 22 nt, synthetic construct
  source 1..22: mol_type = other RNA
tggacagcggggatggttgcac

SEQ ID NO: 153161 - RNA, 22 nt, synthetic construct
  source 1..22: mol_type = other RNA
tggacagctgggagaaagctaa

SEQ ID NO: 153162 - RNA, 22 nt, synthetic construct
  source 1..22: mol_type = other RNA
tggacaggatcccggaacagga

SEQ ID NO: 153163 - RNA, 22 nt, synthetic construct
  source 1..22: mol_type = other RNA
tggacaggggacatgaaggaag

SEQ ID NO: 153164 - RNA, 22 nt, synthetic construct
  source 1..22: mol_type = other RNA
tggacataagggtctgttttac

SEQ ID NO: 153165 - RNA, 22 nt, synthetic construct
  source 1..22: mol_type = other RNA
tggacatgaggaaagcaggttg

SEQ ID NO: 153166 - RNA, 22 nt, synthetic construct
  source 1..22: mol_type = other RNA
tggacattatcctatcagagca

SEQ ID NO: 153167 - RNA, 22 nt, synthetic construct
  source 1..22: mol_type = other RNA
tggacattctgcttccttgcta

SEQ ID NO: 153168 - RNA, 22 nt, synthetic construct
  source 1..22: mol_type = other RNA
tggaccacaatcttacccccat

SEQ ID NO: 153169 - RNA, 22 nt, synthetic construct
  source 1..22: mol_type = other RNA
tggaccagttactctctctgcc

SEQ ID NO: 153170 - RNA, 22 nt, synthetic construct
  source 1..22: mol_type = other RNA
tggaccatgttttaggagtcaa

SEQ ID NO: 153171 - RNA, 22 nt, synthetic construct
  source 1..22: mol_type = other RNA
tggacccatgcccatgtgcatt

SEQ ID NO: 153172 - RNA, 22 nt, synthetic construct
  source 1..22: mol_type = other RNA
tggacccgggaggcagatgttg

SEQ ID NO: 153173 - RNA, 22 nt, synthetic construct
  source 1..22: mol_type = other RNA
tggacccttaccttaaaccata

SEQ ID NO: 153174 - RNA, 22 nt, synthetic construct
  source 1..22: mol_type = other RNA
tggacgggtggtagggaggggg

SEQ ID NO: 153175 - RNA, 22 nt, synthetic construct
  source 1..22: mol_type = other RNA
tggacgtttgagttgtttccac

SEQ ID NO: 153176 - RNA, 22 nt, synthetic construct
  source 1..22: mol_type = other RNA
tggactagactgcctgaggtct

SEQ ID NO: 153177 - RNA, 22 nt, synthetic construct
  source 1..22: mol_type = other RNA
tggactatgtaggcacattcaa

SEQ ID NO: 153178 - RNA, 22 nt, synthetic construct
  source 1..22: mol_type = other RNA
tggactcagggtcacttcctct

SEQ ID NO: 153179 - RNA, 22 nt, synthetic construct
  source 1..22: mol_type = other RNA
tggactcattccaatccttcct

SEQ ID NO: 153180 - RNA, 22 nt, synthetic construct
  source 1..22: mol_type = other RNA
tggactccaccctgccccttat

SEQ ID NO: 153181 - RNA, 22 nt, synthetic construct
  source 1..22: mol_type = other RNA
tggactccttctgaaggcacta

SEQ ID NO: 153182 - RNA, 22 nt, synthetic construct
  source 1..22: mol_type = other RNA
tggactgaaaagatacagaaat

SEQ ID NO: 153183 - RNA, 22 nt, synthetic construct
  source 1..22: mol_type = other RNA
tggactggagggatgctggagt

SEQ ID NO: 153184 - RNA, 22 nt, synthetic construct
  source 1..22: mol_type = other RNA
tggactgtgagggagatatttc

SEQ ID NO: 153185 - RNA, 22 nt, synthetic construct
  source 1..22: mol_type = other RNA
tggactgtgatgactgtaagct

SEQ ID NO: 153186 - RNA, 22 nt, synthetic construct
  source 1..22: mol_type = other RNA
tggacttcctattttataatgg

SEQ ID NO: 153187 - RNA, 22 nt, synthetic construct
  source 1..22: mol_type = other RNA
tggactttaggctgttcaattt

SEQ ID NO: 153188 - RNA, 22 nt, synthetic construct
  source 1..22: mol_type = other RNA
tggagaaagcccagccgcggac

SEQ ID NO: 153189 - RNA, 22 nt, synthetic construct
  source 1..22: mol_type = other RNA
tggagaacagtaaagtcactgt

SEQ ID NO: 153190 - RNA, 22 nt, synthetic construct
  source 1..22: mol_type = other RNA
tggagaacttaaaggtttggag

SEQ ID NO: 153191 - RNA, 22 nt, synthetic construct
  source 1..22: mol_type = other RNA
tggagaagagttctgaaggctc

SEQ ID NO: 153192 - RNA, 22 nt, synthetic construct
  source 1..22: mol_type = other RNA
tggagaattactaaaattccaa

SEQ ID NO: 153193 - RNA, 22 nt, synthetic construct
  source 1..22: mol_type = other RNA
tggagaattctactaaacatta

SEQ ID NO: 153194 - RNA, 22 nt, synthetic construct
  source 1..22: mol_type = other RNA
tggagacactagggactggcct

SEQ ID NO: 153195 - RNA, 22 nt, synthetic construct
  source 1..22: mol_type = other RNA
tggagacagcctaaaccatttt

SEQ ID NO: 153196 - RNA, 22 nt, synthetic construct
  source 1..22: mol_type = other RNA
tggagacagtgagcatgctgca

SEQ ID NO: 153197 - RNA, 22 nt, synthetic construct
  source 1..22: mol_type = other RNA
tggagacatctgagacatcaca

SEQ ID NO: 153198 - RNA, 22 nt, synthetic construct
  source 1..22: mol_type = other RNA
tggagacccatactcagccccc

SEQ ID NO: 153199 - RNA, 22 nt, synthetic construct
  source 1..22: mol_type = other RNA
tggagactagtacactgttgat

SEQ ID NO: 153200 - RNA, 22 nt, synthetic construct
  source 1..22: mol_type = other RNA
tggagactgataaacttcagtt

SEQ ID NO: 153201 - RNA, 22 nt, synthetic construct
  source 1..22: mol_type = other RNA
tggagagaaaccttggtgtgct

SEQ ID NO: 153202 - RNA, 22 nt, synthetic construct
  source 1..22: mol_type = other RNA
tggagagatggtagtcaacact

SEQ ID NO: 153203 - RNA, 22 nt, synthetic construct
  source 1..22: mol_type = other RNA
tggagaggcaaaggccgctctt

SEQ ID NO: 153204 - RNA, 22 nt, synthetic construct
  source 1..22: mol_type = other RNA
tggagataaagagcaggtggaa

SEQ ID NO: 153205 - RNA, 22 nt, synthetic construct
  source 1..22: mol_type = other RNA
tggagataaattacccaaagac

SEQ ID NO: 153206 - RNA, 22 nt, synthetic construct
  source 1..22: mol_type = other RNA
tggagatggggacttgctctct

SEQ ID NO: 153207 - RNA, 22 nt, synthetic construct
  source 1..22: mol_type = other RNA
tggagcaagcatgagtatctgg

SEQ ID NO: 153208 - RNA, 22 nt, synthetic construct
  source 1..22: mol_type = other RNA
tggagcactgtgagccactaaa

SEQ ID NO: 153209 - RNA, 22 nt, synthetic construct
  source 1..22: mol_type = other RNA
tggagcagggtgggcccttaat

SEQ ID NO: 153210 - RNA, 22 nt, synthetic construct
  source 1..22: mol_type = other RNA
tggagcctgaggacactagcaa

SEQ ID NO: 153211 - RNA, 22 nt, synthetic construct
  source 1..22: mol_type = other RNA
tggagcctgctctgcagagact

SEQ ID NO: 153212 - RNA, 22 nt, synthetic construct
  source 1..22: mol_type = other RNA
tggagcggtgtcttattgtttt

SEQ ID NO: 153213 - RNA, 22 nt, synthetic construct
  source 1..22: mol_type = other RNA
tggagctataatttatctggat

SEQ ID NO: 153214 - RNA, 22 nt, synthetic construct
  source 1..22: mol_type = other RNA
tggagctcactgcagcctcaac

SEQ ID NO: 153215 - RNA, 22 nt, synthetic construct
  source 1..22: mol_type = other RNA
tggagctgtatttttgctcaca

SEQ ID NO: 153216 - RNA, 22 nt, synthetic construct
  source 1..22: mol_type = other RNA
tggaggagaaggccttccacgg

SEQ ID NO: 153217 - RNA, 22 nt, synthetic construct
  source 1..22: mol_type = other RNA
tggaggagccctgctgtggccg

SEQ ID NO: 153218 - RNA, 22 nt, synthetic construct
  source 1..22: mol_type = other RNA
tggaggataatatctggactga

SEQ ID NO: 153219 - RNA, 22 nt, synthetic construct
  source 1..22: mol_type = other RNA
tggaggatggcttgagcccagg

SEQ ID NO: 153220 - RNA, 22 nt, synthetic construct
  source 1..22: mol_type = other RNA
tggaggcaatgttgattttgag

SEQ ID NO: 153221 - RNA, 22 nt, synthetic construct
  source 1..22: mol_type = other RNA
tggaggcagtaccattcccctt

SEQ ID NO: 153222 - RNA, 22 nt, synthetic construct
  source 1..22: mol_type = other RNA
tggaggctagaagtcccagttc

SEQ ID NO: 153223 - RNA, 22 nt, synthetic construct
  source 1..22: mol_type = other RNA
tggagggatgctggagtgtggc

SEQ ID NO: 153224 - RNA, 22 nt, synthetic construct
  source 1..22: mol_type = other RNA
tggagggccagaggagggatgc

SEQ ID NO: 153225 - RNA, 22 nt, synthetic construct
  source 1..22: mol_type = other RNA
tggagggctcccagtgcccacc

SEQ ID NO: 153226 - RNA, 22 nt, synthetic construct
  source 1..22: mol_type = other RNA
tggaggggcaggaaaggtgggg

SEQ ID NO: 153227 - RNA, 22 nt, synthetic construct
  source 1..22: mol_type = other RNA
tggaggggccagttgagagaga

SEQ ID NO: 153228 - RNA, 22 nt, synthetic construct
  source 1..22: mol_type = other RNA
tggaggtcgggctgcctcagcc

SEQ ID NO: 153229 - RNA, 22 nt, synthetic construct
  source 1..22: mol_type = other RNA
tggaggtgcacattccaagaga

SEQ ID NO: 153230 - RNA, 22 nt, synthetic construct
  source 1..22: mol_type = other RNA
tggaggtggaactctgtcatgg

SEQ ID NO: 153231 - RNA, 22 nt, synthetic construct
  source 1..22: mol_type = other RNA
tggagtaaacctgcaatttttt

SEQ ID NO: 153232 - RNA, 22 nt, synthetic construct
  source 1..22: mol_type = other RNA
tggagtactatgcagcaacgga

SEQ ID NO: 153233 - RNA, 22 nt, synthetic construct
  source 1..22: mol_type = other RNA
tggagtattctagttctagctc

SEQ ID NO: 153234 - RNA, 22 nt, synthetic construct
  source 1..22: mol_type = other RNA
tggagtcacagtgaattctgac

SEQ ID NO: 153235 - RNA, 22 nt, synthetic construct
  source 1..22: mol_type = other RNA
tggagtcacttgacaaaaatta

SEQ ID NO: 153236 - RNA, 22 nt, synthetic construct
  source 1..22: mol_type = other RNA
tggagtccaaccaatcgcaggg

SEQ ID NO: 153237 - RNA, 22 nt, synthetic construct
  source 1..22: mol_type = other RNA
tggagtcctgtcagtttctgat

SEQ ID NO: 153238 - RNA, 22 nt, synthetic construct
  source 1..22: mol_type = other RNA
tggagtgacttaagcaacagaa

SEQ ID NO: 153239 - RNA, 22 nt, synthetic construct
  source 1..22: mol_type = other RNA
tggagtgagaggactgcctggt

SEQ ID NO: 153240 - RNA, 22 nt, synthetic construct
  source 1..22: mol_type = other RNA
tggagtgcaatggtgggatctc

SEQ ID NO: 153241 - RNA, 22 nt, synthetic construct
  source 1..22: mol_type = other RNA
tggagtgcgagtgtgaacgatg

SEQ ID NO: 153242 - RNA, 22 nt, synthetic construct
  source 1..22: mol_type = other RNA
tggagtggaggggcaggaaagg

SEQ ID NO: 153243 - RNA, 22 nt, synthetic construct
  source 1..22: mol_type = other RNA
tggagtggagtggcatgatctc

SEQ ID NO: 153244 - RNA, 22 nt, synthetic construct
  source 1..22: mol_type = other RNA
tggagtggcatgatctcacgtc

SEQ ID NO: 153245 - RNA, 22 nt, synthetic construct
  source 1..22: mol_type = other RNA
tggagtggggcacctaaaaggt

SEQ ID NO: 153246 - RNA, 22 nt, synthetic construct
  source 1..22: mol_type = other RNA
tggagtggtggatagagagatt

SEQ ID NO: 153247 - RNA, 22 nt, synthetic construct
  source 1..22: mol_type = other RNA
tggagtgtggcaggggctgcat

SEQ ID NO: 153248 - RNA, 22 nt, synthetic construct
  source 1..22: mol_type = other RNA
tggagtgttttcttcatggact

SEQ ID NO: 153249 - RNA, 22 nt, synthetic construct
  source 1..22: mol_type = other RNA
tggagttaattccacaaccact

SEQ ID NO: 153250 - RNA, 22 nt, synthetic construct
  source 1..22: mol_type = other RNA
tggagttacgctgccaaaagcc

SEQ ID NO: 153251 - RNA, 22 nt, synthetic construct
  source 1..22: mol_type = other RNA
tggagttcagtggtgcaatcac

SEQ ID NO: 153252 - RNA, 22 nt, synthetic construct
  source 1..22: mol_type = other RNA
tggagttggtgcaaggataaac

SEQ ID NO: 153253 - RNA, 22 nt, synthetic construct
  source 1..22: mol_type = other RNA
tggagtttgtagctcaaagcat

SEQ ID NO: 153254 - RNA, 22 nt, synthetic construct
  source 1..22: mol_type = other RNA
tggagttttccccctacaccca

SEQ ID NO: 153255 - RNA, 22 nt, synthetic construct
  source 1..22: mol_type = other RNA
tggatacaaggtcaatctgaaa

SEQ ID NO: 153256 - RNA, 22 nt, synthetic construct
  source 1..22: mol_type = other RNA
tggatacggaaatataacatta

SEQ ID NO: 153257 - RNA, 22 nt, synthetic construct
  source 1..22: mol_type = other RNA
tggatagaagtgtatcagatgc

SEQ ID NO: 153258 - RNA, 22 nt, synthetic construct
  source 1..22: mol_type = other RNA
tggatagagagattcaagaaac

SEQ ID NO: 153259 - RNA, 22 nt, synthetic construct
  source 1..22: mol_type = other RNA
tggatagcaacttgcagaagag

SEQ ID NO: 153260 - RNA, 22 nt, synthetic construct
  source 1..22: mol_type = other RNA
tggatagcattatccctttaaa

SEQ ID NO: 153261 - RNA, 22 nt, synthetic construct
  source 1..22: mol_type = other RNA
tggatagtgctttttactttgc

SEQ ID NO: 153262 - RNA, 22 nt, synthetic construct
  source 1..22: mol_type = other RNA
tggatagtttctcaacttagcc

SEQ ID NO: 153263 - RNA, 22 nt, synthetic construct
  source 1..22: mol_type = other RNA
tggatatccccatttttctcga

SEQ ID NO: 153264 - RNA, 22 nt, synthetic construct
  source 1..22: mol_type = other RNA
tggatatctgaggtcaggagct

SEQ ID NO: 153265 - RNA, 22 nt, synthetic construct
  source 1..22: mol_type = other RNA
tggatatctggcctgcaccatt

SEQ ID NO: 153266 - RNA, 22 nt, synthetic construct
  source 1..22: mol_type = other RNA
tggatattctacagaaaaccct

SEQ ID NO: 153267 - RNA, 22 nt, synthetic construct
  source 1..22: mol_type = other RNA
tggatatttgcagtagtattga

SEQ ID NO: 153268 - RNA, 22 nt, synthetic construct
  source 1..22: mol_type = other RNA
tggatatttggccgggcgcggt

SEQ ID NO: 153269 - RNA, 22 nt, synthetic construct
  source 1..22: mol_type = other RNA
tggatcaaagacctaagcttaa

SEQ ID NO: 153270 - RNA, 22 nt, synthetic construct
  source 1..22: mol_type = other RNA
tggatcaaggcacagtctgtgc

SEQ ID NO: 153271 - RNA, 22 nt, synthetic construct
  source 1..22: mol_type = other RNA
tggatcaagtgggatttatccc

SEQ ID NO: 153272 - RNA, 22 nt, synthetic construct
  source 1..22: mol_type = other RNA
tggatcatatagtaattctgtg

SEQ ID NO: 153273 - RNA, 22 nt, synthetic construct
  source 1..22: mol_type = other RNA
tggatcccccagcccctggtga

SEQ ID NO: 153274 - RNA, 22 nt, synthetic construct
  source 1..22: mol_type = other RNA
tggatcctggagggctcccagt

SEQ ID NO: 153275 - RNA, 22 nt, synthetic construct
  source 1..22: mol_type = other RNA
tggatcctgtctcagagtatat

SEQ ID NO: 153276 - RNA, 22 nt, synthetic construct
  source 1..22: mol_type = other RNA
tggatcttatctgctgtcggtt

SEQ ID NO: 153277 - RNA, 22 nt, synthetic construct
  source 1..22: mol_type = other RNA
tggatgaaaaagtactggaaat

SEQ ID NO: 153278 - RNA, 22 nt, synthetic construct
  source 1..22: mol_type = other RNA
tggatgaacgctaaattaaagg

SEQ ID NO: 153279 - RNA, 22 nt, synthetic construct
  source 1..22: mol_type = other RNA
tggatgaatacaaaggtgttaa

SEQ ID NO: 153280 - RNA, 22 nt, synthetic construct
  source 1..22: mol_type = other RNA
tggatgaatgcagtggcttcct

SEQ ID NO: 153281 - RNA, 22 nt, synthetic construct
  source 1..22: mol_type = other RNA
tggatgactaggctcctgagaa

SEQ ID NO: 153282 - RNA, 22 nt, synthetic construct
  source 1..22: mol_type = other RNA
tggatgagattaatgtaggtgt

SEQ ID NO: 153283 - RNA, 22 nt, synthetic construct
  source 1..22: mol_type = other RNA
tggatgcagatttctttttact

SEQ ID NO: 153284 - RNA, 22 nt, synthetic construct
  source 1..22: mol_type = other RNA
tggatgcatgaggcatattatt

SEQ ID NO: 153285 - RNA, 22 nt, synthetic construct
  source 1..22: mol_type = other RNA
tggatgctggggacccctccct

SEQ ID NO: 153286 - RNA, 22 nt, synthetic construct
  source 1..22: mol_type = other RNA
tggatgggtgtagggtttggca

SEQ ID NO: 153287 - RNA, 22 nt, synthetic construct
  source 1..22: mol_type = other RNA
tggatgtccttaatgccaccga

SEQ ID NO: 153288 - RNA, 22 nt, synthetic construct
  source 1..22: mol_type = other RNA
tggatgtggtgtggcatgtctg

SEQ ID NO: 153289 - RNA, 22 nt, synthetic construct
  source 1..22: mol_type = other RNA
tggatgtgtatgatcaaagtga

SEQ ID NO: 153290 - RNA, 22 nt, synthetic construct
  source 1..22: mol_type = other RNA
tggatgtgtgcacaacacatgc

SEQ ID NO: 153291 - RNA, 22 nt, synthetic construct
  source 1..22: mol_type = other RNA
tggatgttaattagatatgtga

SEQ ID NO: 153292 - RNA, 22 nt, synthetic construct
  source 1..22: mol_type = other RNA
tggatgttggtgagaacccagt

SEQ ID NO: 153293 - RNA, 22 nt, synthetic construct
  source 1..22: mol_type = other RNA
tggatgtttttagagagatgcc

SEQ ID NO: 153294 - RNA, 22 nt, synthetic construct
  source 1..22: mol_type = other RNA
tggattaaggagatggcacata

SEQ ID NO: 153295 - RNA, 22 nt, synthetic construct
  source 1..22: mol_type = other RNA
tggattaagggcccaccctgct

SEQ ID NO: 153296 - RNA, 22 nt, synthetic construct
  source 1..22: mol_type = other RNA
tggattatagtggtaaggagcc

SEQ ID NO: 153297 - RNA, 22 nt, synthetic construct
  source 1..22: mol_type = other RNA
tggattcccaggtattttgttc

SEQ ID NO: 153298 - RNA, 22 nt, synthetic construct
  source 1..22: mol_type = other RNA
tggattgattccagtttctctg

SEQ ID NO: 153299 - RNA, 22 nt, synthetic construct
  source 1..22: mol_type = other RNA
tggattgcgattgtttcagtgt

SEQ ID NO: 153300 - RNA, 22 nt, synthetic construct
  source 1..22: mol_type = other RNA
tggattgctaaactgttcccca

SEQ ID NO: 153301 - RNA, 22 nt, synthetic construct
  source 1..22: mol_type = other RNA
tggattgctagtgtcctcaggc

SEQ ID NO: 153302 - RNA, 22 nt, synthetic construct
  source 1..22: mol_type = other RNA
tggattgtgtgtcgagaaaaat

SEQ ID NO: 153303 - RNA, 22 nt, synthetic construct
  source 1..22: mol_type = other RNA
tggatttatctttctagattca

SEQ ID NO: 153304 - RNA, 22 nt, synthetic construct
  source 1..22: mol_type = other RNA
tggatttgagtaactaaactat

SEQ ID NO: 153305 - RNA, 22 nt, synthetic construct
  source 1..22: mol_type = other RNA
tggatttgattgggcattaatt

SEQ ID NO: 153306 - RNA, 22 nt, synthetic construct
  source 1..22: mol_type = other RNA
tggatttgggaaggatggccag

SEQ ID NO: 153307 - RNA, 22 nt, synthetic construct
  source 1..22: mol_type = other RNA
tggatttttctgtttctgtgaa

SEQ ID NO: 153308 - RNA, 22 nt, synthetic construct
  source 1..22: mol_type = other RNA
tggatttttgtgtagaggtgaa

SEQ ID NO: 153309 - RNA, 22 nt, synthetic construct
  source 1..22: mol_type = other RNA
tggcaaaaaatgcagtagtaaa

SEQ ID NO: 153310 - RNA, 22 nt, synthetic construct
  source 1..22: mol_type = other RNA
tggcaaaatggagacatctgag

SEQ ID NO: 153311 - RNA, 22 nt, synthetic construct
  source 1..22: mol_type = other RNA
tggcaaacagactgagccagca

SEQ ID NO: 153312 - RNA, 22 nt, synthetic construct
  source 1..22: mol_type = other RNA
tggcaaacttagaatataaact

SEQ ID NO: 153313 - RNA, 22 nt, synthetic construct
  source 1..22: mol_type = other RNA
tggcaaatctttagtgttgctt

SEQ ID NO: 153314 - RNA, 22 nt, synthetic construct
  source 1..22: mol_type = other RNA
tggcaaattgtcagattttctt

SEQ ID NO: 153315 - RNA, 22 nt, synthetic construct
  source 1..22: mol_type = other RNA
tggcaaatttatgtgaaaagaa

SEQ ID NO: 153316 - RNA, 22 nt, synthetic construct
  source 1..22: mol_type = other RNA
tggcaacaaaggcgaagcccgc

SEQ ID NO: 153317 - RNA, 22 nt, synthetic construct
  source 1..22: mol_type = other RNA
tggcaacaatcaacaggtagct

SEQ ID NO: 153318 - RNA, 22 nt, synthetic construct
  source 1..22: mol_type = other RNA
tggcaacattttaattccaaat

SEQ ID NO: 153319 - RNA, 22 nt, synthetic construct
  source 1..22: mol_type = other RNA
tggcaaggctaacagccaaaga

SEQ ID NO: 153320 - RNA, 22 nt, synthetic construct
  source 1..22: mol_type = other RNA
tggcaaggggaatggtactgcc

SEQ ID NO: 153321 - RNA, 22 nt, synthetic construct
  source 1..22: mol_type = other RNA
tggcaagtttccattctcttaa

SEQ ID NO: 153322 - RNA, 22 nt, synthetic construct
  source 1..22: mol_type = other RNA
tggcaatactctcagaaattat

SEQ ID NO: 153323 - RNA, 22 nt, synthetic construct
  source 1..22: mol_type = other RNA
tggcaatcaaatggccttcttt

SEQ ID NO: 153324 - RNA, 22 nt, synthetic construct
  source 1..22: mol_type = other RNA
tggcaattccataaatgtttgc

SEQ ID NO: 153325 - RNA, 22 nt, synthetic construct
  source 1..22: mol_type = other RNA
tggcacaatcatagctcactag

SEQ ID NO: 153326 - RNA, 22 nt, synthetic construct
  source 1..22: mol_type = other RNA
tggcacagaattattgattggc

SEQ ID NO: 153327 - RNA, 22 nt, synthetic construct
  source 1..22: mol_type = other RNA
tggcacagcactgttaactgac

SEQ ID NO: 153328 - RNA, 22 nt, synthetic construct
  source 1..22: mol_type = other RNA
tggcacagccagtcagtgatgg

SEQ ID NO: 153329 - RNA, 22 nt, synthetic construct
  source 1..22: mol_type = other RNA
tggcacaggagagcgacagcta

SEQ ID NO: 153330 - RNA, 22 nt, synthetic construct
  source 1..22: mol_type = other RNA
tggcacatactgcatattgaag

SEQ ID NO: 153331 - RNA, 22 nt, synthetic construct
  source 1..22: mol_type = other RNA
tggcactgaagccagtccttgt

SEQ ID NO: 153332 - RNA, 22 nt, synthetic construct
  source 1..22: mol_type = other RNA
tggcactttcctgataaggggc

SEQ ID NO: 153333 - RNA, 22 nt, synthetic construct
  source 1..22: mol_type = other RNA
tggcagatcaattgaccaaaca

SEQ ID NO: 153334 - RNA, 22 nt, synthetic construct
  source 1..22: mol_type = other RNA
tggcagcaggggctaagtagtg

SEQ ID NO: 153335 - RNA, 22 nt, synthetic construct
  source 1..22: mol_type = other RNA
tggcagccccgcttcagttggt

SEQ ID NO: 153336 - RNA, 22 nt, synthetic construct
  source 1..22: mol_type = other RNA
tggcagccttctctcttccaaa

SEQ ID NO: 153337 - RNA, 22 nt, synthetic construct
  source 1..22: mol_type = other RNA
tggcagcgtaactccatcttca

SEQ ID NO: 153338 - RNA, 22 nt, synthetic construct
  source 1..22: mol_type = other RNA
tggcaggcaccttcagaagccc

SEQ ID NO: 153339 - RNA, 22 nt, synthetic construct
  source 1..22: mol_type = other RNA
tggcaggggctgcatcatggtg

SEQ ID NO: 153340 - RNA, 22 nt, synthetic construct
  source 1..22: mol_type = other RNA
tggcaggtcacctagcctctct

SEQ ID NO: 153341 - RNA, 22 nt, synthetic construct
  source 1..22: mol_type = other RNA
tggcaggtttcaagtgaaccaa

SEQ ID NO: 153342 - RNA, 22 nt, synthetic construct
  source 1..22: mol_type = other RNA
tggcagtctaggaaaagacttg

SEQ ID NO: 153343 - RNA, 22 nt, synthetic construct
  source 1..22: mol_type = other RNA
tggcagtttaagaattaaaaac

SEQ ID NO: 153344 - RNA, 22 nt, synthetic construct
  source 1..22: mol_type = other RNA
tggcataaagacagacatttgg

SEQ ID NO: 153345 - RNA, 22 nt, synthetic construct
  source 1..22: mol_type = other RNA
tggcatacaactgctcataata

SEQ ID NO: 153346 - RNA, 22 nt, synthetic construct
  source 1..22: mol_type = other RNA
tggcatcatactggaaggactc

SEQ ID NO: 153347 - RNA, 22 nt, synthetic construct
  source 1..22: mol_type = other RNA
tggcatcattcataaacacaga

SEQ ID NO: 153348 - RNA, 22 nt, synthetic construct
  source 1..22: mol_type = other RNA
tggcatcggggcctacagtggt

SEQ ID NO: 153349 - RNA, 22 nt, synthetic construct
  source 1..22: mol_type = other RNA
tggcatctttaagattttttgt

SEQ ID NO: 153350 - RNA, 22 nt, synthetic construct
  source 1..22: mol_type = other RNA
tggcatctttgttacagcagct

SEQ ID NO: 153351 - RNA, 22 nt, synthetic construct
  source 1..22: mol_type = other RNA
tggcatgaaatgggtttaaaag

SEQ ID NO: 153352 - RNA, 22 nt, synthetic construct
  source 1..22: mol_type = other RNA
tggcatgaacccaccaggaggc

SEQ ID NO: 153353 - RNA, 22 nt, synthetic construct
  source 1..22: mol_type = other RNA
tggcatgatctcacgtcaccgc

SEQ ID NO: 153354 - RNA, 22 nt, synthetic construct
  source 1..22: mol_type = other RNA
tggcatgtctgtagttacaact

SEQ ID NO: 153355 - RNA, 22 nt, synthetic construct
  source 1..22: mol_type = other RNA
tggcatgttggatagtttctca

SEQ ID NO: 153356 - RNA, 22 nt, synthetic construct
  source 1..22: mol_type = other RNA
tggcattaaggacatccacaac

SEQ ID NO: 153357 - RNA, 22 nt, synthetic construct
  source 1..22: mol_type = other RNA
tggcattgtcccgggggagggc

SEQ ID NO: 153358 - RNA, 22 nt, synthetic construct
  source 1..22: mol_type = other RNA
tggcatttaaaagaacctctgg

SEQ ID NO: 153359 - RNA, 22 nt, synthetic construct
  source 1..22: mol_type = other RNA
tggcatttcttacacattaggc

SEQ ID NO: 153360 - RNA, 22 nt, synthetic construct
  source 1..22: mol_type = other RNA
tggcatttgagggttagaagac

SEQ ID NO: 153361 - RNA, 22 nt, synthetic construct
  source 1..22: mol_type = other RNA
tggccaaatccctgatcaagtt

SEQ ID NO: 153362 - RNA, 22 nt, synthetic construct
  source 1..22: mol_type = other RNA
tggccaacatcgtaaaacctca

SEQ ID NO: 153363 - RNA, 22 nt, synthetic construct
  source 1..22: mol_type = other RNA
tggccaagagttgctgacttcc

SEQ ID NO: 153364 - RNA, 22 nt, synthetic construct
  source 1..22: mol_type = other RNA
tggccacatgcttccaaaagca

SEQ ID NO: 153365 - RNA, 22 nt, synthetic construct
  source 1..22: mol_type = other RNA
tggccactgattgagtatctgg

SEQ ID NO: 153366 - RNA, 22 nt, synthetic construct
  source 1..22: mol_type = other RNA
tggccagaatccctttcgctaa

SEQ ID NO: 153367 - RNA, 22 nt, synthetic construct
  source 1..22: mol_type = other RNA
tggccagcattacttaggcagt

SEQ ID NO: 153368 - RNA, 22 nt, synthetic construct
  source 1..22: mol_type = other RNA
tggccaggaggaggagggtgca

SEQ ID NO: 153369 - RNA, 22 nt, synthetic construct
  source 1..22: mol_type = other RNA
tggccaggctggttccaaactt

SEQ ID NO: 153370 - RNA, 22 nt, synthetic construct
  source 1..22: mol_type = other RNA
tggccagtatctcctttccttc

SEQ ID NO: 153371 - RNA, 22 nt, synthetic construct
  source 1..22: mol_type = other RNA
tggccagtcatgtggggacttt

SEQ ID NO: 153372 - RNA, 22 nt, synthetic construct
  source 1..22: mol_type = other RNA
tggccagtgaccagtgtgatgg

SEQ ID NO: 153373 - RNA, 22 nt, synthetic construct
  source 1..22: mol_type = other RNA
tggccagtgagttcaaatgtta

SEQ ID NO: 153374 - RNA, 22 nt, synthetic construct
  source 1..22: mol_type = other RNA
tggccatccttcccaaatccag

SEQ ID NO: 153375 - RNA, 22 nt, synthetic construct
  source 1..22: mol_type = other RNA
tggccatgttttatttcttgac

SEQ ID NO: 153376 - RNA, 22 nt, synthetic construct
  source 1..22: mol_type = other RNA
tggccattttcttttaaatgta

SEQ ID NO: 153377 - RNA, 22 nt, synthetic construct
  source 1..22: mol_type = other RNA
tggcccaacatgctcttaagta

SEQ ID NO: 153378 - RNA, 22 nt, synthetic construct
  source 1..22: mol_type = other RNA
tggcccacacctgcaatcacag

SEQ ID NO: 153379 - RNA, 22 nt, synthetic construct
  source 1..22: mol_type = other RNA
tggcccagccatcccattactc

SEQ ID NO: 153380 - RNA, 22 nt, synthetic construct
  source 1..22: mol_type = other RNA
tggcccatatccttttatgtgc

SEQ ID NO: 153381 - RNA, 22 nt, synthetic construct
  source 1..22: mol_type = other RNA
tggcccattttcgaattagatt

SEQ ID NO: 153382 - RNA, 22 nt, synthetic construct
  source 1..22: mol_type = other RNA
tggccccaaaattaccccattc

SEQ ID NO: 153383 - RNA, 22 nt, synthetic construct
  source 1..22: mol_type = other RNA
tggcccccctgaaaaatgagaa

SEQ ID NO: 153384 - RNA, 22 nt, synthetic construct
  source 1..22: mol_type = other RNA
tggcccctccatggaaactaca
